United States Patent Application Publication US 2016/0078168 A1 - sequence listing, part 3

SEQ ID NO: 46346 - RNA, 80 nt, Homo sapiens
agagaagaaggaggcagaaggagcaggacgaaagcgaaagagaagcggagaagggcagaagacaaccggaaaagcgaagg

SEQ ID NO: 46347 - RNA, 70 nt, Homo sapiens
cgagggagcacaagaaaagcccaggaaaaagaaggaaccacgcagaacagaggaaccagagccggcagcc

SEQ ID NO: 46348 - RNA, 52 nt, Homo sapiens
ccgggaccagaaaagggcaagaaggaacagacaaaaacggccggaaggaaac

SEQ ID NO: 46349 - RNA, 87 nt, Homo sapiens
agccgagacgccaagcggggagcgcccgcgacagaggagggaggaaaacaaccgagggcagaggacagagagccgaaagccgggcaa

SEQ ID NO: 46350 - RNA, 59 nt, Homo sapiens
gcgagcaccagagcggcgaacacgccgacagggccaaggcgcagggcaaggcgcgggac

SEQ ID NO: 46351 - RNA, 91 nt, Homo sapiens
ccaccaccacgccagccgcaccagccgcccaagccgcacagccgcggcggcagcagcaggagagacagagcgccgccaccgccgccaccac

SEQ ID NO: 46352 - RNA, 74 nt, Homo sapiens
cgcacgcccgcgccgggaaccaaggccagcaacagaagaaagcaagcaccggggaaagcggcccgaaacaagca

SEQ ID NO: 46353 - RNA, 70 nt, Homo sapiens
cggggccgacaagagccccggaacggccgacggacccgccgcacccgagacaaagaaccggcgcgcaaac

SEQ ID NO: 46354 - RNA, 81 nt, Homo sapiens
acggaaaaaccgaagggccagggaaaccagcagcaggccgacaggagccgcgcaaagcaagagcggaaacaagcagcagaa

SEQ ID NO: 46355 - RNA, 86 nt, Homo sapiens
gggacgggggggcggcccggccccgcaggaaggcccgaacaagacaggaacgccggcccggacgggagcggcagggaggacaccaa

SEQ ID NO: 46356 - RNA, 76 nt, Homo sapiens
ccgggcccgggaaaacacacggccagggacagagagccgaaagccgggcaaggggaaagaaggccgaagaaccaaa

SEQ ID NO: 46357 - RNA, 75 nt, Homo sapiens
ggaggaccccacgcgacgggaccgagagaccgcgacacgggggccagaaggaaagcaagggaccaggcagacgac

SEQ ID NO: 46358 - RNA, 57 nt, Homo sapiens
accacacgccagacggggagagccaccggccccagcagaaggggagagaacaaaccg

SEQ ID NO: 46359 - RNA, 81 nt, Homo sapiens
ggagaggacccagccaccagcaaaccaggagccgagcaaacagaacaaaaacaagaaaagcgacagaggggagacaagaag

SEQ ID NO: 46360 - RNA, 79 nt, Homo sapiens
ccccgggacgaggccgcccgcacccagcggaggggaaggccagaccgagaggagaagccgacgaccccgccagacgcca

SEQ ID NO: 46361 - RNA, 57 nt, Homo sapiens
gaaacggagcccggagcagcggcggcgaaagacaagcaaggcaccagcagaacagac

SEQ ID NO: 46362 - RNA, 62 nt, Homo sapiens
acgccggggcccaaccacaagacgaccaaaggaggaaggccaacccagggaggagcaaacag

SEQ ID NO: 46363 - RNA, 71 nt, Homo sapiens
aaggcggaaaagcccaagaaacaaacacgggcaggcaggagagcccgagcagcaccaaaggcaagagcggc

SEQ ID NO: 46364 - RNA, 72 nt, Homo sapiens
accagcagagaggaaaaacacaacccaagaaacggaaaagagcaccggccagcagaaccagccggggccggc

SEQ ID NO: 46365 - RNA, 70 nt, Homo sapiens
aaggaaggaaaccgagaggaaccggggcaggaagggcaccaagggcaggagaagggccagaccggagccg

SEQ ID NO: 46366 - RNA, 91 nt, Homo sapiens
gccccgcgagcacagagcccgccgccgaccgccgcccgccacacccgccgccagccggaaccaaaaagaagccccagagccggggccagga

SEQ ID NO: 46367 - RNA, 83 nt, Homo sapiens
caggcgcggcgccggcggcgggacgaagagggacgggcccgcggcgagcgagcccgagaagaagccacacacagaagacccaa

SEQ ID NO: 46368 - RNA, 72 nt, Homo sapiens
ggcggacccagagcccgggaagggggggaccgcgccgcgaaaaagcacagagaagaagaaaaaaagagcaca

SEQ ID NO: 46369 - RNA, 68 nt, Homo sapiens
ggacaggaggaagaggcagcgccaacccacgccgaaaggaaggcacacaggcggagacccgaaaaccc

SEQ ID NO: 46370 - RNA, 73 nt, Homo sapiens
ggaaccaacaggggaaaggaccacgcccggcagcaaagaccccagaccaaacgaagcgccgagaaccagaaac

SEQ ID NO: 46371 - RNA, 74 nt, Homo sapiens
gagcccccgcccaaggagaagcgcccaagcggacgccaaagaacacggcagaagcccccaagggaaaaaggaag

SEQ ID NO: 46372 - RNA, 80 nt, Homo sapiens
ccagcacagcggagaaaccccccagccaaggccaccgagccacaagaccacagcaccgacccccgacccggaaggagacg

SEQ ID NO: 46373 - RNA, 59 nt, Homo sapiens
aaagaccgaccgaaccgaaccgaggcaaaagaaaggccacaaaaccgaggggaaagaga

SEQ ID NO: 46374 - RNA, 73 nt, Homo sapiens
acagccacccgggagagcccggaaaggcccgcggcgaggagcgagcagagagacacagaagagcgcgaacaca

SEQ ID NO: 46375 - RNA, 72 nt, Homo sapiens
cagggggcaggacgaccagcgggaggccagaggaaggcagaacaccaccccaccgccaccgggaagaaccag

SEQ ID NO: 46376 - RNA, 58 nt, Homo sapiens
ccagccgccacaccccgccgggcaggacaccagccgcacccaagcgcaggggggcaga

SEQ ID NO: 46377 - RNA, 93 nt, Homo sapiens
cccggcccgcaggcccccccgcgccgaccgcgccaggacagacgcacagacaccgcagacgaagccaagaccggggacaagaaaccccgggcc

SEQ ID NO: 46378 - RNA, 78 nt, Homo sapiens
ggcgcgacgagcaagcagcgggccggacgaggaagagaacgagggcccaaagaagaggaacgagacagcccagaaaaa

SEQ ID NO: 46379 - RNA, 72 nt, Homo sapiens
acacgagggaacaaacaccggagcaccgccaagccgacgccagcgggcgccacccaacaggcgcaccgccca

SEQ ID NO: 46380 - RNA, 72 nt, Homo sapiens
ccacccgcccacggaccgaggaagccccgcagcagcagcccaaaggaagagcgccgcaaggcacagccagcc

SEQ ID NO: 46381 - RNA, 54 nt, Homo sapiens
gagacccgccaggagcaaagaacaaggaaacacgcagaaggaaaagcgcagaga

SEQ ID NO: 46382 - RNA, 82 nt, Homo sapiens
aagacggacaaccaacaggaacacaggaccagaacagaagcacagagcgcagaacagagcgaagacccgaaaacgccaacgc

SEQ ID NO: 46383 - RNA, 35 nt, Homo sapiens
agcagggaaccgggaagccccccagccgaggagaa

SEQ ID NO: 46384 - RNA, 74 nt, Homo sapiens
gcaggaaggccgcgacaggaaaaagaaagcagcacccggcacaacaacaaccaaaaaacaagcagccaacaaac

SEQ ID NO: 46385 - RNA, 80 nt, Homo sapiens
ggaggaaccagaaccccaaagaaacccaaacagaacacacagggaccaggagaagagccggccaggggcaaaggagagga

SEQ ID NO: 46386 - RNA, 70 nt, Homo sapiens
cccacaggggggaagagcaaaacccagagaaacccaaaccccacagccagaaaccacgaagaggcccgaa

SEQ ID NO: 46387 - RNA, 61 nt, Homo sapiens
gggggcggacacgcgaccaagggcacgggccacagagacgagaccccaacaacaaaaccac

SEQ ID NO: 46388 - RNA, 73 nt, Homo sapiens
ggacacacccaagcacggaccaaaacaaggcgcccgcgaagagcccgcggccccaggcccccccccgccgccc

SEQ ID NO: 46389 - RNA, 72 nt, Homo sapiens
gaaagcacaaggacgcccaggcacgaaagacggaaagggaagcggacgagaaaaaagagcggccggcccagg

SEQ ID NO: 46390 - RNA, 75 nt, Homo sapiens
gcagagagccccagcaggaaggccaccgagggaacccgaccggacccagccccagaagaggccagccggccgacc

SEQ ID NO: 46391 - RNA, 53 nt, Homo sapiens
caggcccgacagccggaagaggcacacccagaagccacaggagaagcaagagg

SEQ ID NO: 46392 - RNA, 84 nt, Homo sapiens
cggccgggaccccggacagcagcagagcccgaggagagacaggaaggccgaaggagagaaaaaaaccgaggcgccagagaagcg

SEQ ID NO: 46393 - RNA, 81 nt, Homo sapiens
aggacggagacaagaacaacgacggccgcacgacagagagccggagaagcagaggagccgcaacaggacagcaagcgaagc

SEQ ID NO: 46394 - RNA, 77 nt, Homo sapiens
ggcacccacccacgaagggaggaaaagggcagggacagcgcaggcagcaggagccaaaaaccgaacacccggaaggg

SEQ ID NO: 46395 - RNA, 74 nt, Homo sapiens
ggccagggcagaggaccaacagggcagagagcaagggggagccgggcgagggacggccaaagggaagagcacgc

SEQ ID NO: 46396 - RNA, 68 nt, Homo sapiens
agagaagcaacaacagaaccggacagaagcgcaaaaaacgcgaggagagaaagaacccacgcaggacg

SEQ ID NO: 46397 - RNA, 84 nt, Homo sapiens
cgaacagaaggaacgacgcggaccagaagccagagcgaggacgccggcaggcacacaggaccccgcgagccagcggcgacggga

SEQ ID NO: 46398 - RNA, 97 nt, Homo sapiens
gcgcgcagaccacagggcaggagcagcagagacaggaccggccaggcagacaggggaaacaacaagccagacgcggagacacccgcagggggaggcc

SEQ ID NO: 46399 - RNA, 60 nt, Homo sapiens
ggaaccggcgcgccggcgcgcggcgcggacaggcccaaacgcccacagcccccacccgag

SEQ ID NO: 46400 - RNA, 70 nt, Homo sapiens
aagaggggacccccgaaacaccccccagagacggacccaaacgcgcaggggaaggcaacaaaacacccca

SEQ ID NO: 46401 - RNA, 72 nt, Homo sapiens
caagaccagagccgggaccccagccagagccagaagaccacccgaggccgccacagggaccggggaaaaaac

SEQ ID NO: 46402 - RNA, 69 nt, Homo sapiens
acagcgagcggaccccgaccccgaggcgagacggaaaggagagcacgaagggagaagcccgacgccaaa

SEQ ID NO: 46403 - RNA, 73 nt, Homo sapiens
cggcccccgaaccacccacgccaaccccagcccagagcagagcagggaccgggcaaagagccagagaccccac

SEQ ID NO: 46404 - RNA, 74 nt, Homo sapiens
gaaggaccaagaaccagaccagcccaaccaccaccaccaccaacagcgcccccccagggccgcagaaggaggag

SEQ ID NO: 46405 - RNA, 78 nt, Homo sapiens
cacagacccccaccaagcagcgagggggagccgaagcccacagcaccgggacgcaggaaagggaagaggaagccggcc

SEQ ID NO: 46406 - RNA, 49 nt, Homo sapiens
ccgaaaccccaggacccagacacagaggccaaacacagccacccaagag

SEQ ID NO: 46407 - RNA, 56 nt, Homo sapiens
ggaaaaccgacacaacaggaaccagcaccagacagaagacgcagaagagcagcgaa

SEQ ID NO: 46408 - RNA, 70 nt, Homo sapiens
aaagcgggggcgggaagacaaacgacgccgaaaggccccagggaaagacaaggagccgggccgagaaacc

SEQ ID NO: 46409 - RNA, 82 nt, Homo sapiens
ccgcccagccgcccagcgccgccgcgcccggccaaggagccccgcgccccacccgaccggaacggggcaagcgaaaccccgc

SEQ ID NO: 46410 - RNA, 76 nt, Homo sapiens
gggcgggaggagcgcgccccgcagcccaggagggacggcgggcgcggacacccacgaccaaggaggagggagacag

SEQ ID NO: 46411 - RNA, 80 nt, Homo sapiens
cggccgcgcccgcggaaccagaccagaccgaaggaaaagaagccccaggcaggcggggaccaacgcgagagcagaacacg

SEQ ID NO: 46412 - RNA, 84 nt, Homo sapiens
cgcaagacccggacccggacaggagcccaagggggaagagcaagcgaagaagagggaaaagcccaaggaacaccggaacaccgg

SEQ ID NO: 46413 - RNA, 69 nt, Homo sapiens
ggccaggaaaccgcaccgaaaacgagcacagcaggggaacagacaagaacaaaagaaacaaacccgccg

SEQ ID NO: 46414 - RNA, 76 nt, Homo sapiens
gcgccggcccagcaccccgagaaccgcaggagccagaggcagagagacgaagagagaagcagggcagaaagagcgg

SEQ ID NO: 46415 - RNA, 76 nt, Homo sapiens
gccggaaggggcccgaagcccccgcaggaaccacaacccaaccagagcccaaaaggcagagcgaggagagaagaag

SEQ ID NO: 46416 - RNA, 82 nt, Homo sapiens
agaaacgaccgcaaaggcacccggggcagaccggaccaaggacagcaggaagagaacagcaaaaccagacgccgggaagagc

SEQ ID NO: 46417 - RNA, 80 nt, Homo sapiens
gaggcaccgggacggaccgagaccggaccgagagcggaccgagagcgcgaaacgcacgagaagagccaacacagacaaga

SEQ ID NO: 46418 - RNA, 76 nt, Homo sapiens
cccaccgcgcccccagaacagcaccggaaaggagaggggcagaccaggagacccccagcccccggaagaaaagggc

SEQ ID NO: 46419 - RNA, 60 nt, Homo sapiens
gcgggcgcaggcagcccccagaaggccgagcacgcgagcaggaccgaaacgggggacccg

SEQ ID NO: 46420 - RNA, 77 nt, Homo sapiens
gcgaggggccggcgagcagagagaccgcaccacccggaaccaaaggcaagaaccggagcaggagaaaagccggaaag

SEQ ID NO: 46421 - RNA, 106 nt, Homo sapiens
acaccggcggccccaccagcagacgcagccgagacaccagcccgaaacaccaccaaggcagagacccagagaacccaaacaagaccaaaaccacgagcgaagagga

SEQ ID NO: 46422 - RNA, 70 nt, Homo sapiens
agaaccaccgcggccgcccacggcccaagccgcgggccgccacccacgcagacagacagaaagcgcccag

SEQ ID NO: 46423 - RNA, 84 nt, Homo sapiens
gacaaggagaccaggaagggaaagccccagcacggacaagcacgagagcgcacgccggccaacgagccaccgggcccgaccggc

SEQ ID NO: 46424 - RNA, 70 nt, Homo sapiens
gaaacagccaaagaaccagaacccaaaaacaccagaccaggcccagggaaacacccggagaacccaggca

SEQ ID NO: 46425 - RNA, 60 nt, Homo sapiens
ccacccagcggggagcacggcgagcagccaggccaggagagcgcggacaaggccacaaga

SEQ ID NO: 46426 - RNA, 58 nt, Homo sapiens
gcgcaaagcgcgaggggcgagcacccccgcaaggccaccggggggccacaaccaccgc

SEQ ID NO: 46427 - RNA, 34 nt, Homo sapiens
ggcaaggagcggcggcgcgaagacccaaccccac

SEQ ID NO: 46428 - RNA, 62 nt, Homo sapiens
cacaagcccgccaccacccaaagagcgaggagaagaaagggaagcaaagaaagaagaaccga

SEQ ID NO: 46429 - RNA, 78 nt, Homo sapiens
cggacccagcacgaggaggcgcgaggagagagcccccaaaccggaggaaaggccacccagacaccggcggcgggaggc

SEQ ID NO: 46430 - RNA, 72 nt, Homo sapiens
gaacacaagaaagaaggccagaccaagaagaacagccccagaaaggaagaagcgaaaagcaaaaaacggcaa

SEQ ID NO: 46431 - RNA, 73 nt, Homo sapiens
cgagagcgaaaaacaagcgccaaacaaacaggaagccagaacacaacgaagggacggggcggaaaaacaagag

SEQ ID NO: 46432 - RNA, 76 nt, Homo sapiens
acgacagcgggccgggaaaagggcacgaggccggaaccgcccagccccgggccggcccagggagaacgcaaaacca

SEQ ID NO: 46433 - RNA, 66 nt, Homo sapiens
gaccaagagagccgaggagaacccaggagaaacgacaggaaaaccaaaggaccgaaaaccccagga

SEQ ID NO: 46434 - RNA, 64 nt, Homo sapiens
cgaagcgacgagccgcgaggaggccagcacccgcccgaggacagagaggcgagcgcccggaggg

SEQ ID NO: 46435 - RNA, 77 nt, Homo sapiens
cgaaagaacagggagacaaggaaaacacaaggacccagaaaacacccgacacgaagaccagaaccaaaaccagacag

SEQ ID NO: 46436 - RNA, 74 nt, Homo sapiens
ccaagaaaaccgaagaccacagcagcacagcaagggaaaaagcacagaccggagccagccgcagacaaaaacca

SEQ ID NO: 46437 - RNA, 78 nt, Homo sapiens
aggcaacgggaagagcgacagccccaggcccgggggggcgggggcccgaaggcaccgcagaacggggcgggacgacag

SEQ ID NO: 46438 - RNA, 52 nt, Homo sapiens
ggaagaacgccgcgggaaggaggaagcacgaaaacagagccagcagagggaa

SEQ ID NO: 46439 - RNA, 80 nt, Homo sapiens
ggaagagggagaagagggggaagaaaggagagggccggggaaggaggggaggaagaaaacgccggaggggcgcggccagg

SEQ ID NO: 46440 - RNA, 78 nt, Homo sapiens
ccggccgccagccgggagaagacagccaagagagggaaaccccagaagcagcgccccgggagcgaagaagaaacggca

SEQ ID NO: 46441 - RNA, 72 nt, Homo sapiens
agaacccgcgaaagagggaagcggcaaaccaaaagagcaacggaaagagaagccgaagagaaaaagcggaag

SEQ ID NO: 46442 - RNA, 55 nt, Homo sapiens
aaaaggcgagaaaggacgaagcggaccagaacaaaggcgggggcagagggaagcg

SEQ ID NO: 46443 - RNA, 54 nt, Homo sapiens
ccgacagccgcagaacgagacccaccggccaagccagccgcggaggcgcacgca

SEQ ID NO: 46444 - RNA, 72 nt, Homo sapiens
gcagcagccaaccacccacgacaccagcaacgcccaggagcaagacaggggagggaggagcgcggcaagaca

SEQ ID NO: 46445 - RNA, 81 nt, Homo sapiens
ggaccaacagcccaggaggccgagcgcgggaaagcagcgcgcccaccccacgggaggccgggacgggacaacgaaccaccc

SEQ ID NO: 46446 - RNA, 71 nt, Homo sapiens
aacgagggacaggcaaccccaaagacagcacagcaccgccgcccaagagcaaaggacaggagagacaacgg

SEQ ID NO: 46447 - RNA, 58 nt, Homo sapiens
aggcaaggccggcaaccagcgaagcgaggaaaggaagccagaaccgaaaacccaccga

SEQ ID NO: 46448 - RNA, 64 nt, Homo sapiens
gaaaaggccacgggaggaagacccaaaagcagcagacaggaaggaaaggacagggaagagcaaa

SEQ ID NO: 46449 - RNA, 77 nt, Homo sapiens
caccccaagccaggaaaagccgggccgcagaggcaggggaggagggcaccagcccagaccggcccaaagaccaacag

SEQ ID NO: 46450 - RNA, 65 nt, Homo sapiens
cgcagagacaagcccgcgcgcgagacagagcaaggaagggacgcgaagaaccccaaggacaagaa

SEQ ID NO: 46451 - RNA, 81 nt, Homo sapiens
gaaccacaagagccagaaggaaagaccacagcaagaccacgcccccagccgggggaccaggccgaacgacccggacacaaa

SEQ ID NO: 46452 - RNA, 73 nt, Homo sapiens
accagccaagcaaacaccccccccaccaccccaccagaaagaaacgccgaccagaagaagaagaacggggagc

SEQ ID NO: 46453 - RNA, 55 nt, Homo sapiens
gagaaggaggaccgcgccaggcagaaggaaagcagcgagcagccacagaaccccc

SEQ ID NO: 46454 - RNA, 74 nt, Homo sapiens
ccgggcacacccggaagccgagagccagagagaaccagaggcaagccagcacaccggcgggagggcaagcacgg

SEQ ID NO: 46455 - RNA, 72 nt, Homo sapiens
aagggggacaagcaagcagggggaagcaagcccccaacaagcaaaggaacgaagccagaggacaacagagca

SEQ ID NO: 46456 - RNA, 87 nt, Homo sapiens
ggggaagaagcggaaaggaggggccccggcacgcggcacaccacaagcagagaagacgggaaaaagagcaaccgccaagcagccgca

SEQ ID NO: 46457 - RNA, 76 nt, Homo sapiens
gcaaccccggcgcagcaggagcgcacggccgcaccacacagggggagaggcaccagcaacagaccaaccgcagcaa

SEQ ID NO: 46458 - RNA, 72 nt, Homo sapiens
acaccaggcggcaggggcaaccagacgggccaaggagaaaaccggaagagaaaggccgggaagcaggaaaga

SEQ ID NO: 46459 - RNA, 85 nt, Homo sapiens
gagagcagcagaaagaacagaggcgacggcagaagagaagaaacaggacgagaagaggccccccaaaggacacaggacagaccga

SEQ ID NO: 46460 - RNA, 79 nt, Homo sapiens
agcaccccggcggagccagcccacaggcccaaggcggccaagggccggaagccaagaccaggcccgggcccgggaacaa

SEQ ID NO: 46461 - RNA, 82 nt, Homo sapiens
aagggccgggaccgaaaccagccccggacgagaagcgcagcaacggcgggggaccacgagagccgcagagacgggcgaacaa

SEQ ID NO: 46462 - RNA, 69 nt, Homo sapiens
gagaaaggagcacgaaggaacaaagccacgaaaaccaaagacggccagcccccaggaaagagaaaacag

SEQ ID NO: 46463 - RNA, 70 nt, Homo sapiens
aggaccagcacaagagaaggaaaagacagagcaccacaggaaggaaacagcaggaccgaaaagcaggaag

SEQ ID NO: 46464 - RNA, 59 nt, Homo sapiens
gcacagagaaacagacacagcccagcagaagacgggacaaacagccccaaagagcaggc

SEQ ID NO: 46465 - RNA, 75 nt, Homo sapiens
cggcacggccacgggcgggcaggcaagaaaccggagccgaaaaggaaaaggaacaagaagcaaaagaagcgccag

SEQ ID NO: 46466 - RNA, 73 nt, Homo sapiens
accaaggaaagggcgacagcaacagccgccggcggaagggacgcacagagaaacgggacacaagaagaagaag

SEQ ID NO: 46467 - RNA, 77 nt, Homo sapiens
gagcggcgcggaggcgcgcggccgcgacgacgccgcgcgaggccggcacggggccacgcggggaaacccagacgaca

SEQ ID NO: 46468 - RNA, 61 nt, Homo sapiens
cggccagcaaagaaacacacagcgcaggagaagaagagcaggaccagggaacgggacacac

SEQ ID NO: 46469 - RNA, 71 nt, Homo sapiens
ggaagcggaacacagcagggaaaggccaggcccaagaggaagcagaacccaaagaagcgaagcagaaagga

SEQ ID NO: 46470 - RNA, 78 nt, Homo sapiens
gccgggcccggcacgagcggccgcggccaggcgacgccacccaagacacaaacggcgacacaggagaagacagaggag

SEQ ID NO: 46471 - RNA, 60 nt, Homo sapiens
caggcagccccgcacgagcggcaaccgaaagccagcagcggaggagaaaggcgcaggaaa

SEQ ID NO: 46472 - RNA, 80 nt, Homo sapiens
ccggggacacgaggggacgaagaaccccacaggggccagcagcggcggagaaaccaccacaaacacgaggccagcaacga

SEQ ID NO: 46473 - RNA, 75 nt, Homo sapiens
caaccggcgccaccagcaaccagagggccagagggaaggacagcggacagaaggcacgggggcccgcacgagaaa

SEQ ID NO: 46474 - RNA, 53 nt, Homo sapiens
accaaagcccggcaaaggccgagcaccacagacagcgcgccccccgggccggc

SEQ ID NO: 46475 - RNA, 84 nt, Homo sapiens
gcggccagcagaggagaaggggccaccaggccacgagcgccgcgggacaccaggaaaggcccgagacgccagcaagaaaggagg

SEQ ID NO: 46476 - RNA, 70 nt, Homo sapiens
ggagcgagaccggagcgccagggccacggcccaccacccggaagagacccagacgaagagcgcacagaaa

SEQ ID NO: 46477 - RNA, 75 nt, Homo sapiens
gacaagaaaaacacagaggggaggggggaccgaggaacaacgagagacacaagcagaagaggcaccagaaaaaaa

SEQ ID NO: 46478 - RNA, 77 nt, Homo sapiens
aagaacccagaaagcagaaccaaccggaaggaggacccgaagaagacaagcgccgcggacccacgagccaccaacca

SEQ ID NO: 46479 - RNA, 79 nt, Homo sapiens
acgagagcagcgaagcaccacgaaaggaggggacaacaggcagccccaagggggccacccccccacacaacagcaacaa

SEQ ID NO: 46480 - RNA, 83 nt, Homo sapiens
gcggcaaaaaagcaaacacgaggccacggggaaacacagcagaacacagaagccccagggccacaaaagaagacagggaagcc

SEQ ID NO: 46481 - RNA, 70 nt, Homo sapiens
ccaagaagcagaaggagaacaagccaggaaaaccccgaaaacgcaagaagcggccggagcgcgaagacgc

SEQ ID NO: 46482 - RNA, 51 nt, Homo sapiens
caccagccgagagcacggggacaccaaaggaccaggaccgggggcccgcgc

SEQ ID NO: 46483 - RNA, 91 nt, Homo sapiens
acacacccagggaggcaagcagagcgcggccaagaacagaggaagggggcaaggaaaggaggaaaacaagcgaagcggcaacaaaacggaa

SEQ ID NO: 46484 - RNA, 75 nt, Homo sapiens
cccagagccacgggggcagcgccgaaccaggaccggacccggacccaaaggccagcaagacacaagagaggaaac

SEQ ID NO: 46485 - RNA, 65 nt, Homo sapiens
gagcaccacgggcaggaaggcagcgcacgacagcaaaagggagaaacacaggacaacggacccaa

SEQ ID NO: 46486 - RNA, 77 nt, Homo sapiens
cgggcgccagcggccccgccgagagccggaggcaaggagaacagagcgggaggaagaagagagggcgaaggaggcca

SEQ ID NO: 46487 - RNA, 71 nt, Homo sapiens
acaccgaaagccacagcaagaagggcacaagacaagaaagacccagcggagaagaaaacgaagaagaccgg

SEQ ID NO: 46488 - RNA, 75 nt, Homo sapiens
gccaggcccacgggaaaaggagcgacgcgggcaggaacgcccaggagaaagagggaagagaaaaggaacaaggcc

SEQ ID NO: 46489 - RNA, 67 nt, Homo sapiens
gcacgagagcggccaaccaaagcgagaccccgaaccaggcagcaaaggaccacccaacggcagacca

SEQ ID NO: 46490 - RNA, 83 nt, Homo sapiens
gccgggggaggccgcaccgcagcgaggccaggaacccggggagaccccgacgggaggccgagaaaccaaagagccaggcgacc

SEQ ID NO: 46491 - RNA, 69 nt, Homo sapiens
ccaaggagcgaggcaccaagcagaagagaagaacgaggaacagaggaggaggcggcaaggagacggccc

SEQ ID NO: 46492 - RNA, 70 nt, Homo sapiens
agaacccgccgacacccaaacagaagaagcagagggaaccggaggaaagcaagaaacaaaggaacgaaca

SEQ ID NO: 46493 - RNA, 57 nt, Homo sapiens
caaggacgagccggggcgcgaagcccgaccccgaccccccccggagcggccgacaag

SEQ ID NO: 46494 - RNA, 73 nt, Homo sapiens
acccggacaggaggagccagggcccggcccgaaaggagagccaaccccacagccgagccaaaggccaacacaa

SEQ ID NO: 46495 - RNA, 88 nt, Homo sapiens
agagggacagcgacgggagacgcgcccacagaaacccggacgagaggcagcgagaggaggaggggacacaaaggaagaggcagccaga

SEQ ID NO: 46496 - RNA, 77 nt, Homo sapiens
aaggacaacagcccgacaaccaggagcgcacccggacccacagcggccaggggaccgcagcgcagaggacggaaggc

SEQ ID NO: 46497 - RNA, 57 nt, Homo sapiens
gcagaaaaaggacagaagaacacgaaaagaggccgaggagcacagaccaacagaaaa

SEQ ID NO: 46498 - RNA, 55 nt, Homo sapiens
agagacccacagccagcaacaccacacagggccacggggccaggcggaggcggca

SEQ ID NO: 46499 - RNA, 86 nt, Homo sapiens
cagagcgaccagacacggcccacggccagaaggccgggacagcagaaaacagccagcagaaaaagccaaaaagcaagcggacaaaa

SEQ ID NO: 46500 - RNA, 59 nt, Homo sapiens
cggcggggagcggcgaagccgcgggcgagccagggccccccacgcgagaacccgggccg

SEQ ID NO: 46501 - RNA, 89 nt, Homo sapiens
aacccccaggagaagagcccaagcagcgccagacaaagagcaagggccagaagcggacccagaagaggggagcagcaaggaggaagaca

SEQ ID NO: 46502 - RNA, 86 nt, Homo sapiens
cagaaagcaggcgaacccgcggcgcaaaacggaaaaaaaggaacggaaccgaacagaagaaagagaagaccccaaggacagcacgc

SEQ ID NO: 46503 - RNA, 78 nt, Homo sapiens
cgaggccacgacaccaggggaggagcagacggccagagacacaaggccccggcagcagcagcgcgcacccgaggaccc

SEQ ID NO: 46504 - RNA, 57 nt, Homo sapiens
acaagagacccgaaagaaaggaacgaaagcggcacggagaagaaggaaaagaacggc

SEQ ID NO: 46505 - RNA, 80 nt, Homo sapiens
gaagaggcggacggaggagcaggcgagaagagaagacacgcagcggccgaggcaggggaagagagcggccccggacacgc

SEQ ID NO: 46506 - RNA, 75 nt, Homo sapiens
acagacgagaaaacgcacgagaaagcaaaacaggagacaaagaaacagccggaaaagcacgagcacaagacgaaa

SEQ ID NO: 46507 - RNA, 104 nt, Homo sapiens
gaagacgacgcaccgcaggcagacaaaagggccaaagaagggagagagggaccccgggagggcccagcaaccggccagcgaaccggagacaaacaggcagggcc

SEQ ID NO: 46508 - RNA, 66 nt, Homo sapiens
caacggagaccaaaagaaagggcacaagggacaagcgggggggcggcccaccggcccgcccgagcc

SEQ ID NO: 46509 - RNA, 78 nt, Homo sapiens
cggcgaaggacccggccgaggcgggcgcaagagaaggcaccaagaggaccgacagcacgaggaggagagaagaaaagc

SEQ ID NO: 46510 - RNA, 80 nt, Homo sapiens
ggggggcgcagcggcagcagcagcggagcgcccaaggagagagccagaaaagccagcaagcgcagaaggaagcgcccaag

SEQ ID NO: 46511 - RNA, 54 nt, Homo sapiens
cccgcccgaaccgagggaacagaaaccggaaggcgaaacagcgcgccgaagagc

SEQ ID NO: 46512 - RNA, 55 nt, Homo sapiens
gccacaggccgaccccgccagcccccaagcagcggaacagcgagcacgaaagcac

SEQ ID NO: 46513 - RNA, 77 nt, Homo sapiens
cgccgcgacggccggccgcgccaccgcaccgccaccggcccgacccaaaacaacagcaggaagcggcccacgcacca

SEQ ID NO: 46514 - RNA, 55 nt, Homo sapiens
gcccccgagagcggggacaggagggaagaacaagagacagagaaaacaaaaccac

SEQ ID NO: 46515 - RNA, 80 nt, Homo sapiens
gccgaggaacccggcgaggcggcaggcggggccggggagcccgggccagaccccccagacccagcccaccccggagcagc

SEQ ID NO: 46516 - RNA, 74 nt, Homo sapiens
gaaaaacgaggaaagacagacccaccaaaccagccgaaagggccaccccaggccaccagcaagaccaccccccg

SEQ ID NO: 46517 - RNA, 79 nt, Homo sapiens
ggacgcgggacggaagcacacgcggcggaagagagcgagcggaaaacggccgaaggcaaagcgaccagaccggacccgg

SEQ ID NO: 46518 - RNA, 78 nt, Homo sapiens
gggagacgcgcccacagaaacccggacgagaggcagcgagaggaaacacaaaggcgggccgaaagagaaaagccacaa

SEQ ID NO: 46519 - RNA, 70 nt, Homo sapiens
gccgaaggaaccagcaaagaggcagaaaaagaagaggagggagggcagaaaaacaagccgagaagcccgg

SEQ ID NO: 46520 - RNA, 50 nt, Homo sapiens
aggaaagccgggaaccaaaccgcacaacaagacgagagaggacccccgcc

SEQ ID NO: 46521 - RNA, 56 nt, Homo sapiens
ggcgaaggaggcagaggcacagcgcagccggccaccacacaaagaacccagagaag

SEQ ID NO: 46522 - RNA, 66 nt, Homo sapiens
gaaaggcggaccacaaggaaaagaaaaacagaagcacagaaaacagggagcagacaggcgcccaga

SEQ ID NO: 46523 - RNA, 61 nt, Homo sapiens
ggaaggcgcaaggcacaaaccaggggcccaaaacagcccccacaaaaaaccagagaaagag

SEQ ID NO: 46524 - RNA, 73 nt, Homo sapiens
aagcagaggagcgccccgcgcaagagacagacacagaccgagggcaaacgaccccccgggccgggacaaagga

SEQ ID NO: 46525 - RNA, 81 nt, Homo sapiens
ggaccccacccggccagacccagcaccccaacggaagggcgcacacaaggacaccagacacgaaggaccacaggccccgga

SEQ ID NO: 46526 - RNA, 78 nt, Homo sapiens
aagcccaaccccggagaaaacagaggaaccccagccccggacaccccggacggggaaggcgccgcagccagcggcccc

SEQ ID NO: 46527 - RNA, 78 nt, Homo sapiens
cccggccgccagaccacagcacagccgggaaggggagccaccagccccccggggagccaccgagcccaagcggagggc

SEQ ID NO: 46528 - RNA, 83 nt, Homo sapiens
gcgcacgcccgaggccagacacacaggcggagcccccacagcagcggggccaggcccccccccgaggcggagcaggcgggccg

SEQ ID NO: 46529 - RNA, 64 nt, Homo sapiens
cacacgcgcgccgaggacccgaccagcagacgcaccaaagacaaaggaaacacaagcacacggg

SEQ ID NO: 46530 - RNA, 84 nt, Homo sapiens
ggccgaacgaggcgagaacgcgcagaccggggagggaaagaaaagagaaaagcccggaaacgcaaaccaagcaaccaacaaacc

SEQ ID NO: 46531 - RNA, 63 nt, Homo sapiens
gagaaggcacggagcgccgcggagcgcagccagacggaaggcacgagggccgacacgcccccc

SEQ ID NO: 46532 - RNA, 86 nt, Homo sapiens
gcgcggggaacccccccagggaagacgcagaaccgggcgcgggcggaccccagcccaacaccggcccaagggaggccaagggagga

SEQ ID NO: 46533 - RNA, 77 nt, Homo sapiens
cggaaccccccgaagcgagggaagggcggacacaccaaccccgggggcccccccaggcagcaagccaggagccggcc

SEQ ID NO: 46534 - RNA, 87 nt, Homo sapiens
cacgcgcgggcccgggccaggccgccgccgagccgagaacacagcccggccagcgggccgaagaccgaccaggaggcccggggagcg

SEQ ID NO: 46535 - RNA, 80 nt, Homo sapiens
cggcacacaaggaaggaaaggcagcagaccagcggcagaccagggacaagagaaaaaaagggcgggcgaacaaaaagagc

SEQ ID NO: 46536 - RNA, 70 nt, Homo sapiens
cgcccagcagcgcaggaccagcccaggagaggaaccgagaacacgacacccgcacagaacaaagaacgga

SEQ ID NO: 46537 - RNA, 42 nt, Homo sapiens
gaccgccacgcacagggcacgaggaacaccggcaagagacgc

SEQ ID NO: 46538 - RNA, 57 nt, Homo sapiens
caagccggcggccaagacggagccgaagaaggaacagaacagacaccaccgaaacgc

SEQ ID NO: 46539 - RNA, 71 nt, Homo sapiens
cggaaaaagccgaaggacaccccaacagacaccccccaacgccccaagcaccaggaaaggcaaaagcagca

SEQ ID NO: 46540 - RNA, 74 nt, Homo sapiens
caggaacccgaagacacaccagcaaaagagccaacacccaggccaggccgcccggaaggaggccgccacgcccc

SEQ ID NO: 46541 - RNA, 84 nt, Homo sapiens
gcagcaaaaacaagagccccaaagcagccaaaaggccggcgccagcgccagcgaggaaccgaacccagccaaaaggccccgcgc

SEQ ID NO: 46542 - RNA, 78 nt, Homo sapiens
agcagcagccgcggagcagagccgccggggagggagccagaagcaacgagggaaacacaaagaagacaccagaagggc

SEQ ID NO: 46543 - RNA, 81 nt, Homo sapiens
ggccacagcagccccggccggcggcggggcccgggcgagcagcccgccccggacggagacgacaccaagaggaaaaaccag

SEQ ID NO: 46544 - RNA, 78 nt, Homo sapiens
gaacaagaacagaaagggaacacagcagagggggaaaaaaacagagaaagccaacccagcgaaggaacaagcaaaccc

SEQ ID NO: 46545 - RNA, 75 nt, Homo sapiens
agaccgcaagagaaaaggcaaacagaacaaaacgaagaggagaaaggaggcaaagggagagagccagaggaccca

SEQ ID NO: 46546 - RNA, 62 nt, Homo sapiens
acggcacggcaggagcacggcccagcgccgggcgcggccacggcagagagacggggaccagg

SEQ ID NO: 46547 - RNA, 70 nt, Homo sapiens
aaagggccaaagaagggagagagggaagacacaggaagcgccgaggaaggaaaccagcccagaaccgcaa

SEQ ID NO: 46548 - RNA, 70 nt, Homo sapiens
acagacgaaaacccggcgccggagcacccgcccccacacgaacccgacacacagcaaagcgaaggagaac

SEQ ID NO: 46549 - RNA, 70 nt, Homo sapiens
gggcagcgaagagcaggcaaggagagcaagccagggcaacgagggcaaacaccaagggacaaacaaaaac

SEQ ID NO: 46550 - RNA, 79 nt, Homo sapiens
caccagagcacccccgggacagcgccacacgccggaggaagcccaaaaggaaagaaccagagacgacacccgcccccca

SEQ ID NO: 46551 - RNA, 79 nt, Homo sapiens
acgaagccgcgagagcgccccgaaccaaaaacagaggccacccaggaaggggcagccggaggaggagggcgaccagcag

SEQ ID NO: 46552 - RNA, 75 nt, Homo sapiens
gagaaagcccacacaaccccaacgcaggggacaaacacacggcggcggacacagaccggcccggaggcgaccaag

SEQ ID NO: 46553 - RNA, 70 nt, Homo sapiens
accaagaaccagggccacgaacccacagaagagaaccgcgccccgagccagcagcgaagccggaggaaca

SEQ ID NO: 46554 - RNA, 71 nt, Homo sapiens
ccagacacacacacccaacccaaaccaagggaccccaccaccccagaccacccagaagacaaagacacggg

SEQ ID NO: 46555 - RNA, 86 nt, Homo sapiens
gcggccgagcaggcgagcgaacgacgcgccgcgccaggacggcagccagacgagcagggccgcagcaggccgcagcgccaaagacc

SEQ ID NO: 46556 - RNA, 70 nt, Homo sapiens
ggagggaggggggagcggacccagccagaaccaacccacaccagaaaggacacacaggacaaggcacgag

SEQ ID NO: 46557 - RNA, 77 nt, Homo sapiens
gccgcgcgggagagggccaccgcccgccacccgcgcgccgccgccgaggagaaaggagaccagaccacagaagagcc

SEQ ID NO: 46558 - RNA, 79 nt, Homo sapiens
cagaacccgccccgcagcacagaaggccaaacgcgaagaagacgcagaaacgaggaagaaggaaacaaaaaggccaaac

SEQ ID NO: 46559 - RNA, 83 nt, Homo sapiens
gagcgcgacggcagggcgaggcacggggagggacgaaggggccgaccccaggaacgcacaccagcaccagcccaccaaaccag

SEQ ID NO: 46560 - RNA, 94 nt, Homo sapiens
cgccgcggccaggcagggaggagaccggcacccagacaggggcgaaggcagaggaggcgagccagcccccacccagaggagaacgaaaccacga

SEQ ID NO: 46561 - RNA, 77 nt, Homo sapiens
aagacgggccccaacacccagagacgaaagggggacgaccaccagccaggccggggacaaacaggcaaccgacgggg

SEQ ID NO: 46562 - RNA, 81 nt, Homo sapiens
ccggcgaccgccgacgcaaggagcggaaaacacgggccaacacggcgcgaaagccagggaagggaccaccacacgaaacca

SEQ ID NO: 46563 - RNA, 77 nt, Homo sapiens
cgacgccagaagaccaagaccgcagaccgaccccgagagaggacgaagacgaccccgacgcaggccaggagccgcgg

SEQ ID NO: 46564 - RNA, 71 nt, Homo sapiens
aaaagcaacaaagagggaaagcggggcagcaaggcaaggaaaaaacgaagagcaggggaaaacaaaagcca

SEQ ID NO: 46565 - RNA, 55 nt, Homo sapiens
ggcaccagaagaaagaagagaccaagcgcacaggaggaagcagagccccgggccg

SEQ ID NO: 46566 - RNA, 75 nt, Homo sapiens
cgagaacacgcgcaaaaggaccagagaaaccgaggaaaagcgagagaagaggaggagagaagagaggaagcgagc

SEQ ID NO: 46567 - RNA, 77 nt, Homo sapiens
caaccccccgcaccaaagcacgcccagaagagagcggaggaaggacagagagcggcagcgacaccggcgcagcgccc

SEQ ID NO: 46568 - RNA, 33 nt, Homo sapiens
cagcccgaagaaaagcgacaaacggggggcacc

SEQ ID NO: 46569 - RNA, 94 nt, Homo sapiens
cagaaacaagcccaagagcaggcaagcaggagggaccgaggcgggaagaagggggcccaggaaggagagcccggacccacccaccggccaacaa

SEQ ID NO: 46570 - RNA, 64 nt, Homo sapiens
aagaagagaggcccaagaggagacggcggcggcgagcggcggacagagccaacaaggaacggaa

SEQ ID NO: 46571 - RNA, 78 nt, Homo sapiens
gaccggccgggcaccagccagcaaaccagagagacagaagaaacccaagcccccagcccagcgagagccacagcaaga

SEQ ID NO: 46572 - RNA, 74 nt, Homo sapiens
gcccaagacccacaacaaaagaaccagggaaagaacggagaagcggcccaggccaggcgagcgaccagccccgg

SEQ ID NO: 46573 - RNA, 100 nt, Homo sapiens
ccgagagccgcccgggccagcggccgcgcacccccggccggaggcaccagcggaggcaccgccccaacccccccccgcccggagaaccccgcggaacgag

SEQ ID NO: 46574 - RNA, 50 nt, Homo sapiens
cagcgcggagccgagagcgagacgcggggccaggacacacgagcaagaag

SEQ ID NO: 46575 - RNA, 71 nt, Homo sapiens
ccaccacacgaaacagggcaaggcaagaggccaacgcaggacaacagacggcagcacacagccgacagaca

SEQ ID NO: 46576 - RNA, 71 nt, Homo sapiens
cgcaccgcggcaaagagaggacgcagcgagaaaggcaggaccaaaggaaaccaccagaaaaaaggaaaaga

SEQ ID NO: 46577 - RNA, 83 nt, Homo sapiens
cgacaaggggcccgaacagagggggaaccgggcgggggacggccggcccgggcccacgaccggggggagcgagacggccggca

SEQ ID NO: 46578 - RNA, 69 nt, Homo sapiens
cgaagaagaacccaaggaaaaacaggacaaaggaagccaagcaggaggcaggggcacacgagaggagca

SEQ ID NO: 46579 - RNA, 76 nt, Homo sapiens
cggacgcaccccacgggaacccacgaccaaagcggaaggccaaaaccagacgagagacagaagacgaaagggcaag

SEQ ID NO: 46580 - RNA, 78 nt, Homo sapiens
agagagagaggaaagaaagccccgaagaagaggccgaccggacaggaagacagacgaacaagagggccaccgaacaaa

SEQ ID NO: 46581 - RNA, 75 nt, Homo sapiens
ggagaccaggcgaaggaccccaaaccagaaagcagggccgcaccccagagcagccccaagcacgcaacccaggcc

SEQ ID NO: 46582 - RNA, 70 nt, Homo sapiens
cccagccgcgcccgggagagcaagaccaagacacccaggagaaagacagcggggaaaagaaaaaggaggg

SEQ ID NO: 46583 - RNA, 77 nt, Homo sapiens
agaagacaggaaaggaaaaggcaggcgacggcaacagccgggcgcaaggccgaaagcggacacagacaggcaggaga

SEQ ID NO: 46584 - RNA, 89 nt, Homo sapiens
gccagccgcaccagccgcccaagccgcacagccgcggcggcagcagcaggagagggccaggccgagggcccgcccggccccaggagaag

SEQ ID NO: 46585 - RNA, 75 nt, Homo sapiens
cacaggcagcgaacgggaaagacagagaccaggggccacaacggaaaccaggaaaccgcagaagaaaaggacgaa

SEQ ID NO: 46586 - RNA, 80 nt, Homo sapiens
ccagaacaccgaaaaggaaaccccaaaggggccagggagaccagggggcaggggaggagcgcccaggcgaccggcgaaca

SEQ ID NO: 46587 - RNA, 69 nt, Homo sapiens
gacgcagcccggcggcagcagaacagaaggaggagggccaggaaagacgcgcaacaagcagggggggaa

SEQ ID NO: 46588 - RNA, 58 nt, Homo sapiens
gaggccaagggcggggaaggccacagaaaagcgggccagccccggggaggagaggagg

SEQ ID NO: 46589 - RNA, 58 nt, Homo sapiens
cggagaagcgcggagcacagggaacaccagaggcgggaccacgggcagcgcccaggga

SEQ ID NO: 46590 - RNA, 75 nt, Homo sapiens
gcgcgcccgcccgcagcgcccaagcaccaaagaacacggcagaagcccccaagggaaaaaggaaggagcagacac

SEQ ID NO: 46591 - RNA, 63 nt, Homo sapiens
accaggagcccgagagagaagggaaaaccgacggcgcgaggacaaagacagccggaaaccagc

SEQ ID NO: 46592 - RNA, 78 nt, Homo sapiens
gcgacagcccccgacgacggggcagcgacgcccccaggaccagggaagacacgggagcgccgccgccggagggcagga

SEQ ID NO: 46593 - RNA, 75 nt, Homo sapiens
gccgcggccaggcgacgccacccaagacacaaacggcgacacaggaccaaggggcaacaaacgaacaggacaaga

SEQ ID NO: 46594 - RNA, 68 nt, Homo sapiens
caggaaaccagacgcagcggacaggcacagcaggaagggcagggaacagaccagcgaaaaagaacgaa

SEQ ID NO: 46595 - RNA, 86 nt, Homo sapiens
aacacaaacggacggcggagaaggccagcaacccacgcagaaaagagccgggaaaccgaagaaggcagagaaggcaaacaggaggc

SEQ ID NO: 46596 - RNA, 65 nt, Homo sapiens
ggcccaaggagaaaggaaacggggacagaagaacgaagaacaaggacaaggaaaacaggagagaa

SEQ ID NO: 46597 - RNA, 68 nt, Homo sapiens
cccagccagcgcaggacccagaaaagagcaccggccagcagaaccagccggggccggcaagccccgcc

SEQ ID NO: 46598 - RNA, 66 nt, Homo sapiens
accaacccgcaaaagagagggacgggaccggaaaaaaggaggcagccaccagcaggaggaaaacca

SEQ ID NO: 46599 - RNA, 83 nt, Homo sapiens
gacaaacggagaagaccggagaagcgcgacccggcccacaggcaaaaggccgcccagggagccgcgcgggagcggacgcggga

SEQ ID NO: 46600 - RNA, 59 nt, Homo sapiens
gcggggcgcccgcgcagcagcccaggagagaggagcgggaaggccccgcacccggagac

SEQ ID NO: 46601 - RNA, 35 nt, Homo sapiens
gaccccggcggccccgggagaggagccgccgggcc

SEQ ID NO: 46602 - RNA, 56 nt, Homo sapiens
ggagcggaaaaccaggaacggccaggaacaccagcaggaaaaaagagcggcagaag

SEQ ID NO: 46603 - RNA, 75 nt, Homo sapiens
aacaaccgcgggcacccacggaaaaggagacacggacggcagccgccaccgccaacagcgggcggcgcccgcgcg

SEQ ID NO: 46604 - RNA, 97 nt, Homo sapiens
aacacggaagaaaacacagcgggccgccgcgaccggggaggccaggccaggaaaacacgccccacacaaggagagcaagcagggagggcccacgaag

SEQ ID NO: 46605 - RNA, 59 nt, Homo sapiens
gacaagacccgccagaacagccacagagggccgccagcacaagaccggaggaagaagcg

SEQ ID NO: 46606 - RNA, 81 nt, Homo sapiens
gcgccacggcaagagggaacccccccggagcccggcggggagggcagcagggccagccgaaccgcggacagagcacagacc

SEQ ID NO: 46607 - RNA, 86 nt, Homo sapiens
ggccgaccacggagcagccgaggacgggaccccagggcagcgaagcagaacgggcaccccgggcggaaaagagggaaggcgacacc

SEQ ID NO: 46608 - RNA, 70 nt, Homo sapiens
gccgacgggcagcacacccaccgagccgagaggggacccacgaggaagcggccgcggcgaaccccagagc

SEQ ID NO: 46609 - RNA, 72 nt, Homo sapiens
agcaccggacggcaagcacaaccagccagagcggagccacacaccgagggagagaagaacaaggggagccaa

SEQ ID NO: 46610 - RNA, 79 nt, Homo sapiens
cagaaagagcagaaaggagggggcgagaaggcgggaagccgaaggcagccacaggagcaaaaggagggaggacagagaa

SEQ ID NO: 46611 - RNA, 78 nt, Homo sapiens
ccagccgcccagccgcccagcgccgccgcgcccggccaagaccgcagccagaccacgcgagccggcccgggcccaccc

SEQ ID NO: 46612 - RNA, 55 nt, Homo sapiens
aggcggaaaggccggggaaaagggcaagacgccaagagaaaaggcgagagcacaa

SEQ ID NO: 46613 - RNA, 87 nt, Homo sapiens
aggaagcgccggagacagcgcgaccggacgggcagggagacagaagccaaacaggaggaggaagggaggagaagacggcccagcaga

SEQ ID NO: 46614 - RNA, 81 nt, Homo sapiens
aggaagacgagccgggaggaacggcccggaaacaggaggacggaccagcgccagccagccagggggggcagagccccacac

SEQ ID NO: 46615 - RNA, 64 nt, Homo sapiens
agggacaagaagggcaaagccgaaagcagcagagggagaaccagaagagaaaacagcggcacac

SEQ ID NO: 46616 - RNA, 91 nt, Homo sapiens
aagaacgcaggacggccgcggcaccgaaccacaaggaggacgaggcggcggccggggcagcgccgcgagccagcaacgggggaaggccaca

SEQ ID NO: 46617 - RNA, 75 nt, Homo sapiens
aaacaacgaccagcaccagcaaaccaaaccagggaacggagcagcaagaagagaggaaaggcaggacaggaaccg

SEQ ID NO: 46618 - RNA, 80 nt, Homo sapiens
gcggcggcccaccaaggaaagggcgacagcaacagccgccggcggaaggaacgaaccaacaaaccgaaagagaagaccaa

SEQ ID NO: 46619 - RNA, 69 nt, Homo sapiens
agacagcacccaccgggaaccagaagacaaaaacaaggccgcgcagacggagcgacggcagaccacaca

SEQ ID NO: 46620 - RNA, 78 nt, Homo sapiens
gcggaaaggagggcggcccggaccgggagacacggccagacgcccccagcacaggccgccccagaccccggaagccca

SEQ ID NO: 46621 - RNA, 82 nt, Homo sapiens
gacgggcggggccgcacgggaccccggaacccgcgcgcgcccacgacgccgagcgccacccccagggcccaaggccggccac

SEQ ID NO: 46622 - RNA, 71 nt, Homo sapiens
ggacagagcgagaagagcacagaaaagagaaaacggaaaacaaaggacacaaccagagggaagcacgcccg

SEQ ID NO: 46623 - RNA, 83 nt, Homo sapiens
acggaaggcagaggaccgcgcggaggcagcgggcgcaggaagacaggaacaagaaaaagaaggagaccgaagcaagaagcaca

SEQ ID NO: 46624 - RNA, 83 nt, Homo sapiens
cagcgcccggaccggccgagaggaagacgagccgggaggaacggcccggaaacaggaggacgaaaccccccaggcaagaggcg

SEQ ID NO: 46625 - RNA, 82 nt, Homo sapiens
gaaacgcagcaagaggggggaagcacgcagaccgggaacacccccaggggccccgccgagacgaagggcgggccaaacgcag

SEQ ID NO: 46626 - RNA, 77 nt, Homo sapiens
aagcccgcggaaaagcgcagacaggcgcacggaagaccaggagagagagggacgcagacacgacaagcaccaaaaga

SEQ ID NO: 46627 - RNA, 89 nt, Homo sapiens
acagaacccgacgcagacacgcgccaaccggcggagacacggcagggccagaaacgcgcgcagcgggggcgggagacaaaaggaagagg

SEQ ID NO: 46628 - RNA, 81 nt, Homo sapiens
ccaggagacaggaggccgcggggagacgcgggggacggggcaggaccacagggcgcccacccgccacaggaagagaccaaa

SEQ ID NO: 46629 - RNA, 70 nt, Homo sapiens
caggccccagccgcaggcacgcagcacgggggcaggggccgacccagaacgccagcgccgcaaggaaaaa

SEQ ID NO: 46630 - RNA, 64 nt, Homo sapiens
ccggacgcccacaaacgacagcagccaggcgagcggcagggagacagcgcacccgcggagcggg

SEQ ID NO: 46631 - RNA, 78 nt, Homo sapiens
gaaccgacaggaaccagacacgcaaacaggagacgcagagccccagcggggaggcgcaacacgaggcgccgcagcacc

SEQ ID NO: 46632 - RNA, 86 nt, Homo sapiens
ggacaagcgcggagcgaggcagccacgccggaggggaaggcgaggaaaggggggaggcagcaaaggaaggacaaaaccgaaagagc

SEQ ID NO: 46633 - RNA, 78 nt, Homo sapiens
cgcgggccagcaccaggaggacggaagcggagccccccccacaggcaaggaagacgccgagaggcgcgaacagggccc

SEQ ID NO: 46634 - RNA, 80 nt, Homo sapiens
gaagaaggaggcaggcacggccgaggacgaagacgacggggagacagcggaggagcgggaccaggggaaacggaagccgc

SEQ ID NO: 46635 - RNA, 82 nt, Homo sapiens
caccaacacgcacaagacggacgaaagccagagaaaaagcggagaaaaggcacgagagggggagggcccaggcggcgaaccc

SEQ ID NO: 46636 - RNA, 63 nt, Homo sapiens
ccccgagaagaaggaggcgcacggaaagagaggaagaagaccgcaaaagaaggcaacgcgggg

SEQ ID NO: 46637 - RNA, 86 nt, Homo sapiens
cgccggacacggcggaggcggagccgcccgaaggagcggacaccacgaggcagcccaggaaagccgcgccaggccacgcgacaggg

SEQ ID NO: 46638 - RNA, 70 nt, Homo sapiens
ggagcccaagaggcacgcaccccacaaaaaaagggaagcacgcaggccagcgggagagcagaccaaaccc

SEQ ID NO: 46639 - RNA, 64 nt, Homo sapiens
ggggacagcggggacggcacggcgcgcgcaggcacgcaaacacagaggaagacacacgggccca

SEQ ID NO: 46640 - RNA, 87 nt, Homo sapiens
gagccgcaggggcccggacaaggagcgagcgacgcgcccacggaggaggcgggggccccacaagaagaccaacaggaaggcgaggag

SEQ ID NO: 46641 - RNA, 80 nt, Homo sapiens
ggcgcgcccagagccgccgggcggcacgcagcacgggggcaggggccgacccagaacgccagcgccgcaaggaaaaaaac

SEQ ID NO: 46642 - RNA, 77 nt, Homo sapiens
aaaacccgggcggcagacggaccagagaaaccacaggaaccggagacgccaccgaaaaagccaaggcgaagccacag

SEQ ID NO: 46643 - RNA, 70 nt, Homo sapiens
ccacagccgcacggacccccagacaagaggaaaagggagaaccaacaaagagggcaccacgaaacaaagc

SEQ ID NO: 46644 - RNA, 63 nt, Homo sapiens
caggagcaccccaaacgaggcaaagacacaaagcgggacaacgcagagccccgagaggggcgc

SEQ ID NO: 46645 - RNA, 80 nt, Homo sapiens
gcggccgagacggcgggggggacgcccgggccgggcgcgcccgccgcagcgcagaaccggccgaaaagcacaaacagcaa

SEQ ID NO: 46646 - RNA, 72 nt, Homo sapiens
caccccagaggcgcccggcaacacggagagggaacgccccgcagcagcccccggggccgccaggagcagcca

SEQ ID NO: 46647 - RNA, 58 nt, Homo sapiens
gggcgaaagacacagaaacaagagccagagggccgagccagcccggcgcagaaagagg

SEQ ID NO: 46648 - RNA, 80 nt, Homo sapiens
cgggggagcgagccggagacagggggaaagcaggggagaaaagaaaagaaagacgggaaagaagcgcaaagcagagaaaa

SEQ ID NO: 46649 - RNA, 82 nt, Homo sapiens
gccgcgggggagcagcgacaccagccgcacggacaagacgccaggccgaggggaagagcggggaccccgaacccagcgaagc

SEQ ID NO: 46650 - RNA, 63 nt, Homo sapiens
ccgacgccaggcagcgcccccaaacgagggccaggcagcacaggaggaaccaggagcggacgc

SEQ ID NO: 46651 - RNA, 52 nt, Homo sapiens
cgggaggccagaggaaggaaccccgaacaggcccaagggccggcagagagac

SEQ ID NO: 46652 - RNA, 38 nt, Homo sapiens
agacccaaggaaccaggcgaagacacacaccagaggga

SEQ ID NO: 46653 - RNA, 67 nt, Homo sapiens
aaggaccaagaaccaggaagggaaacagagaaaaagaacagcacagagggagggggcaagaagaaag

SEQ ID NO: 46654 - RNA, 74 nt, Homo sapiens
gcgaggaacgccgggcgcgggcccacgcggcgcaggcagaaaaaaccagcaggccaggaacacaacccaccgac

SEQ ID NO: 46655 - RNA, 37 nt, Homo sapiens
acagcaacagccgccggcggaagaggccaacggcggg

SEQ ID NO: 46656 - RNA, 90 nt, Homo sapiens
gccaggcggggaccgcgccaagaggcgaggccgagacaaacgcacagcaagcagaagcacggcagccagggaaggcccccaaccaggcaa

SEQ ID NO: 46657 - RNA, 72 nt, Homo sapiens
cgcgacgggcccccgccgccgaggcacggacagaagaggaagaaaacgccagagaagcagagcagcccggag

SEQ ID NO: 46658 - RNA, 68 nt, Homo sapiens
ggccccccgcgacacgcggaggaaacaccccagaaagccaaagagacagaacggaagccacgcacgcc

SEQ ID NO: 46659 - RNA, 60 nt, Homo sapiens
caggaaccgaagggaaacagagagccagaaggaagacaagcgcagcagccgcccaaaaca

SEQ ID NO: 46660 - RNA, 54 nt, Homo sapiens
gggaaccccggagaaaaggccaagaaggcagagaaggcggagaaaagaacagag

SEQ ID NO: 46661 - RNA, 80 nt, Homo sapiens
gaacacggggacaccaacaggacccggaaacaaagagcgcccggaaagaggcagaggaaacgagcccccgcagaagaaga

SEQ ID NO: 46662 - RNA, 63 nt, Homo sapiens
ggacgcggaggcccaaccgaagaaaacaagaccaagagaagacagaacacacgacaccagaag

SEQ ID NO: 46663 - RNA, 84 nt, Homo sapiens
aaacgaacacaaaacggcaccacgggcacagccccacgcggccacggccagggaacaaggaagccaccaccagagggcaagaag

SEQ ID NO: 46664 - RNA, 67 nt, Homo sapiens
gccagcaaccaagaacccacaaaacaaagggcaaaggacacaccgcacaaacggccgcgcaccacac

SEQ ID NO: 46665 - RNA, 73 nt, Homo sapiens
cggccaacacaaacccgaaacacaaggcagccccagcagcacggacagggggcggggccgacaaaacagacgg

SEQ ID NO: 46666 - RNA, 71 nt, Homo sapiens
gaagacccgaagccccccacgcccacaaaccggaggacacccccagacgcagaagggcaggagacacagcc

SEQ ID NO: 46667 - RNA, 65 nt, Homo sapiens
gcggccgcagcgccacaaaccagggacaccgaaaagcaaagggagaggacacacgaggcaaagca

SEQ ID NO: 46668 - RNA, 68 nt, Homo sapiens
ggccggggaagggagcggagacgaacaaacacccaaagcagccaggagccagcaaaaagaagagacga

SEQ ID NO: 46669 - RNA, 76 nt, Homo sapiens
accagccacccccgagaggggaacgaggacgggcaaggagcaggggaacagagaacagcgaagacaagggaaaaaa

SEQ ID NO: 46670 - RNA, 81 nt, Homo sapiens
cgcgcggggccgcccgcccacccagggccggaaaagccaacgccggcgaaggccgcggggggcagacaaccacgcgcggca

SEQ ID NO: 46671 - RNA, 60 nt, Homo sapiens
cggagcgccacaccaaggccaagaacgggcaccggcggggggggccgaagaagccagggg

SEQ ID NO: 46672 - RNA, 73 nt, Homo sapiens
agcaaaccgcaccacagaaaccagagacacaagcaagagaccggaaaaccagggaacgaacagaaagaacgga

SEQ ID NO: 46673 - RNA, 86 nt, Homo sapiens
ggcaaggcggcggacggcgcgcgcccgaggcgaggaggagcgcggcggcgaagccgacgagcccgaacagacgcaccagcgggagg

SEQ ID NO: 46674 - RNA, 80 nt, Homo sapiens
gaagaagccacccgagcggaccccgaggaccacagacacaaggacaagaaagccaccaggacgagaaaaaccaccggaca

SEQ ID NO: 46675 - RNA, 44 nt, Homo sapiens
cacggacaaggcaccgacgcgggaaggaacggaaccgggacaaa

SEQ ID NO: 46676 - RNA, 76 nt, Homo sapiens
cgcacacaaccaggccgggggcagccaggaccccccagcccgccggccacaaagaccaagcgccggaggggccacg

SEQ ID NO: 46677 - RNA, 76 nt, Homo sapiens
caaggggagcgggcgcgcgcgaccgcgccccggaaccaaggagagacacacggaacaagagacaaaaaaagaagca

SEQ ID NO: 46678 - RNA, 79 nt, Homo sapiens
cggcgggcagagcgagccggagaagcaggggggccaggaggggagaggaggcaggcccgcgggaaagggagcagcaccg

SEQ ID NO: 46679 - RNA, 72 nt, Homo sapiens
agaggcccaacccccaccccgcccaaggaggcccagcggggccgcccaaagcgagcgacgccaccagagcag

SEQ ID NO: 46680 - RNA, 85 nt, Homo sapiens
gggagccagaagcaacgagccacaagggcgcagaagccggcagagcccaagagacaacaagccgaaaagagaggcaaacgccagg

SEQ ID NO: 46681 - RNA, 50 nt, Homo sapiens
gagccgaccacccgaggaaccggagacgcgccccgcccacgcgggagcgg

SEQ ID NO: 46682 - RNA, 75 nt, Homo sapiens
gccaacgcccaggggagaaaacaagacggggcggagcccagagcgggaaacccgggccaagagcccccaccagcc

SEQ ID NO: 46683 - RNA, 57 nt, Homo sapiens
aggagcacaacaggcagacagacaagaaaaccaacggcccggaggaccacagcccag

SEQ ID NO: 46684 - RNA, 76 nt, Homo sapiens
agcagcacaggaggccaccaacagcagcaaccgagccggacgcgccccggaccagacaacggcaagcggagaagag

SEQ ID NO: 46685 - RNA, 64 nt, Homo sapiens
ggggcggcaccggcgagccagcgcgagaaccacgccgacaacggcggaagaggaacgggaacgg

SEQ ID NO: 46686 - RNA, 72 nt, Homo sapiens
aacaccaagaaaaagccaaagcaagagcaggcgacacgcaggagaaaggaagcacgcgcgcggacaagacca

SEQ ID NO: 46687 - RNA, 80 nt, Homo sapiens
cagggcccgacaggcacacagcagacccccaagccccgagaacacccagccccggaagcagccacaggaagaaaagagca

SEQ ID NO: 46688 - RNA, 66 nt, Homo sapiens
cacaccagcagacccaagcgacaccaaagaagcccagcgacgggccccgaggcgcccccacaccca

SEQ ID NO: 46689 - RNA, 76 nt, Homo sapiens
caggccaaccgcgaaggcggagggcccggcaaggggcaaccccacgcacagggccgcgcgggaagggcagacggac

SEQ ID NO: 46690 - RNA, 73 nt, Homo sapiens
acaggagacgggacagaagaacccgggccagcaggcaccaccaccgaaacagcacgagacaaggaacacccga

SEQ ID NO: 46691 - RNA, 53 nt, Homo sapiens
ggggaccaccggacaagaaaaacggcagcagccaagcacgcaaccaagaggga

SEQ ID NO: 46692 - RNA, 67 nt, Homo sapiens
aaagggaaccacaagcaggggcaaggaccaaagagcgccagacgacccgagaaaaccgaggcccaag

SEQ ID NO: 46693 - RNA, 79 nt, Homo sapiens
gcaggagccgggagccaccgcgaaggagcccacgaaagggccagcagcccccagaagaagccagaaagccaggaaaggc

SEQ ID NO: 46694 - RNA, 75 nt, Homo sapiens
cagacgaagcccgcgcggacccgcccgggacgggaaacaacgagccaaggcgaagacagagagacgacaagaccc

SEQ ID NO: 46695 - RNA, 82 nt, Homo sapiens
aacgaagggacaagacccgccagaacagaaacgaaggaggcccaaccacaaaaggagccgacggaacccagacggagaacaa

SEQ ID NO: 46696 - RNA, 81 nt, Homo sapiens
gcggcgagccgagcggcaccccgcagccgagagccagagccgccacccggagcgaacagaaccaggacacgcgcacgcgca

SEQ ID NO: 46697 - RNA, 92 nt, Homo sapiens
aagaggcacgggacacaggagcgaaacgaggaaggaaaccacaaacgaaaacagaagaaggcaacccgaggccaaaaagacaggaaaagagc

SEQ ID NO: 46698 - RNA, 58 nt, Homo sapiens
agaagaagaagcaaaaaaggaacacagcacaaaacaaccagcacagggaccagaccag

SEQ ID NO: 46699 - RNA, 73 nt, Homo sapiens
agaagcagccaagggggcccggagcaggaagcaaagcgcgaagagacccaaacgcaggcaaagaagggaagga

SEQ ID NO: 46700 - RNA, 76 nt, Homo sapiens
gagaggagcggagcccgcagaaccccacagcaagaggacggcgggcgccacggaaaggagggcggccagaacacgc

SEQ ID NO: 46701 - RNA, 75 nt, Homo sapiens
aaggacacaaaagaaagcgacaaggaacaagaggggagagagcggagccgaaaccaagccggacccgaagaccag

SEQ ID NO: 46702 - RNA, 71 nt, Homo sapiens
caagaaggcccggacacagcaaaccgggccacaggacaccccccaggcacagccacaccccagcggccaag

SEQ ID NO: 46703 - RNA, 78 nt, Homo sapiens
gaagggaggacggcggggggcccgcggccacgcccccgggcccacaaacccagagaagagaggaaacggagaagaaag

SEQ ID NO: 46704 - RNA, 72 nt, Homo sapiens
aagccaaccaagcaagagcacaaaacagggaaagacgacggaacggaaaaacggaggcagcagcaagaagaa

SEQ ID NO: 46705 - RNA, 56 nt, Homo sapiens
ccacgccgcaccgaggagaacccgccccaccgaggcaccaccaaccaaagcggcaa

SEQ ID NO: 46706 - RNA, 80 nt, Homo sapiens
aggcgcgcgccgcgcgggagagggccaccgcccgccacccgcgcgccgccgccgaggagaaagaaacggcaaaagccaca

SEQ ID NO: 46707 - RNA, 77 nt, Homo sapiens
agccacaaggagagcgaagcaaggcccggcgcaaggccagacaacaggcacaaagagagaaggaacacccacagggc

SEQ ID NO: 46708 - RNA, 71 nt, Homo sapiens
aggaggaacaccaggcacaaggaggggcacagggccagagcagagggaggaagcggaggggaggcaggacg

SEQ ID NO: 46709 - RNA, 36 nt, Homo sapiens
cccggacggaaacccagcgcaagccccggggcagag

SEQ ID NO: 46710 - RNA, 51 nt, Homo sapiens
caaccagagccgcaacagaaccacaaacagaccgcagcacggaacccacgc

SEQ ID NO: 46711 - RNA, 71 nt, Homo sapiens
gaaaagccaggcacgaacagcccgagaaaagcacagcacccgcaggccaacacaggaccaacagaacgagc

SEQ ID NO: 46712 - RNA, 77 nt, Homo sapiens
accgggcgacaagaggccgggcgccccgcaggacacaaggcaaggacccacagaccggcgacacaagaaaacaacgg

SEQ ID NO: 46713 - RNA, 79 nt, Homo sapiens
caggaggcggaggcgaaagcggaacgaggcgcacggaagaccaggagagagagggacgcagacacgacaagcaccaaaa

SEQ ID NO: 46714 - RNA, 75 nt, Homo sapiens
gagcccgcaagaagaacagagacagcagccaaacccccaggcgcagagacaaggaagggaagcggagaaaaggag

SEQ ID NO: 46715 - RNA, 78 nt, Homo sapiens
gcgccccgcgccgccgcgcccacggccccgccagcaaggcggcgcgcccaggaggaccagccacaagaagacagacac

SEQ ID NO: 46716 - RNA, 59 nt, Homo sapiens
gggcaggccacgagaggaccaggcccaccgccggcgcaggcagcacagaagaacgaaga

SEQ ID NO: 46717 - RNA, 78 nt, Homo sapiens
aagaaaccacagagacaaagcgccagccaagagggaacaggcacgccccacccgccagccgagcccccgacgcagcac

SEQ ID NO: 46718 - RNA, 79 nt, Homo sapiens
caggaccgcacgcggaggcggcgcccgcagagaagaagaaggaggccgcggccagaaacccaagaaaaagcgaaggaac

SEQ ID NO: 46719 - RNA, 74 nt, Homo sapiens
gagcgggagggccgggcaacccgaccgaaccaaacgggaccaggcagacgaccaaggagcaggcggggcaggcc

SEQ ID NO: 46720 - RNA, 85 nt, Homo sapiens
ggcccggcaagcccgccgcacagcacacggagcgcgccggccccacgggaaacaaagaaaggcagcaacaggggaagcggaggga

SEQ ID NO: 46721 - RNA, 74 nt, Homo sapiens
cggcgcgccagcggcagaccagggcccacgaagacgaaaccacggccgccaggcacagagaaggcaaacgggag

SEQ ID NO: 46722 - RNA, 73 nt, Homo sapiens
aggaaagcagaagagaagaagagaagcagggagaagaggaccgccagaagcagcgcgacggagagccaagccc

SEQ ID NO: 46723 - RNA, 76 nt, Homo sapiens
ccggacgcaacgcggcgggcgagacgccaggacaaaaccacaaggcaagaagccagcaacagccagcggagagcca

SEQ ID NO: 46724 - RNA, 78 nt, Homo sapiens
cagggaacggggcacgcggccaacgggcaaacagcacagaagaaggcaaagaaagaacgcagaacagcagcaaaggaa

SEQ ID NO: 46725 - RNA, 74 nt, Homo sapiens
aaacgaagaaggcccagcccaccagggcaggcccgaaaggaaaaacgcaaccacagaggaagaaaagcaagagc

SEQ ID NO: 46726 - RNA, 81 nt, Homo sapiens
acaaacacacaccgcgggacgacaagaggaccccgcgcaaccggcacaacaggcagaggcaacggacaacaaccacacagc

SEQ ID NO: 46727 - RNA, 68 nt, Homo sapiens
aaccacccacaggcaagggaaacgggagaggccgacgaagggcggcagcagcaagaaagaacgcgaga

SEQ ID NO: 46728 - RNA, 78 nt, Homo sapiens
gcaaagcccccgcacacgccggaggcaggggacaacacgacacaagcggccggggaaggccaccggccagaacggagg

SEQ ID NO: 46729 - RNA, 75 nt, Homo sapiens
agaagcaaccacaagccggaggacccgcagacacaacggaggcccgaccgagcggcccccacagccagcaccgca

SEQ ID NO: 46730 - RNA, 58 nt, Homo sapiens
cggacacagcaaaccgggccacaggaagggaaacggcaaaacaaaggacaacgcgacc

SEQ ID NO: 46731 - RNA, 78 nt, Homo sapiens
ccaggcagaccgcacaaacccacggacacccgccccgacccgggcgaagagcccgccgacacagccaccaagaaggca

SEQ ID NO: 46732 - RNA, 40 nt, Homo sapiens
ggccaccagagccgcacccgccccgagacaccgcccggag

SEQ ID NO: 46733 - RNA, 55 nt, Homo sapiens
cgagaagagcagccagagaccacagcgccgaaaccaggcaagacagcgaaaggcg

SEQ ID NO: 46734 - RNA, 82 nt, Homo sapiens
gaagagcagcaagaagaaaccagagaacacagcgaaagcagaagcgaagagggccaggaacccacaccacggacaagaccaa

SEQ ID NO: 46735 - RNA, 80 nt, Homo sapiens
cgggcgccagaaggaagaggcggacggaggagcaggcgagaagagaaggacaccagaggaccagaacccacgagaaacag

SEQ ID NO: 46736 - RNA, 80 nt, Homo sapiens
gcagagaggagcacacggccagggcaggcggccggcagagcaccgaaggggaagaacggaccacccaccgccggagcccc

SEQ ID NO: 46737 - RNA, 72 nt, Homo sapiens
accacagcacagaaacaccacggcggcgccgaggccccaagcgagcaaaagaggaaaaccagcaaagccacc

SEQ ID NO: 46738 - RNA, 77 nt, Homo sapiens
cacgggacgcagagcggcgagagcacggcaacagcaagaacgccggcggccggcgcaggagcccacgcaggagacgg

SEQ ID NO: 46739 - RNA, 77 nt, Homo sapiens
ccggagcagcgcgcaggcgggaccacgccggggacacaggccgccaaaggagggaaaagggagagcgaagaccacac

SEQ ID NO: 46740 - RNA, 115 nt, Homo sapiens
gcgagcgaggggaggcaggcgcggcagacggcgacagggcggcggcgccaggcagggcgcaggacccaaggccagccagccccaggcaccagcggacaggacagggaggacgaag

SEQ ID NO: 46741 - RNA, 75 nt, Homo sapiens
cagagagggccgggagcgcgcagccagcgcccaccggccgcaagcgacccgccaccccacacgcgccaccccccg

SEQ ID NO: 46742 - RNA, 79 nt, Homo sapiens
gcgaacacccagggaaccaacaagacccccgcgaggacgaccccacccggagcagagcacagccgacccagcgcccgca

SEQ ID NO: 46743 - RNA, 76 nt, Homo sapiens
gccaacgccaaaaaagcagagaaaccccaaaacagaaacaaccaagcaggaggcgacgagacggagacagcaaaca

SEQ ID NO: 46744 - RNA, 61 nt, Homo sapiens
cccgcgccgacggcgccaaacacagggacccaaagacaggaccacgcaccagcagagaagg

SEQ ID NO: 46745 - RNA, 84 nt, Homo sapiens
ccaaaacaggacagaaagaaggaaaaagcagaaagccagaggaagaggacacaacggacaaagagaagccgaggagcagacccg

SEQ ID NO: 46746 - RNA, 74 nt, Homo sapiens
gagaggaagaaaggacagggagagaagccaagaaagacaggagaagcaggaaggaaaaaaaccagaagaggacc

SEQ ID NO: 46747 - RNA, 88 nt, Homo sapiens
aaggaagagggagcagagcaagaaaaaaaggaagacgagaccagcggagaggcagggcgaagcccaccgggcaagcgaaggaaggacc

SEQ ID NO: 46748 - RNA, 81 nt, Homo sapiens
accccaggacccgggcagcagaagccaacggcaccaccaggaccagcgacaccagcccacagcaaggagccacagaccccc

SEQ ID NO: 46749 - RNA, 76 nt, Homo sapiens
aagagcagaggccccagaccgccaagaggcacagcggagagcggccgggaggaagcagagggaaccaggacagagc

SEQ ID NO: 46750 - RNA, 77 nt, Homo sapiens
cgaaagaacagcgaggggacacagaagaaggagacccaacaccccggccagacgggccaccaggccggcgccccacg

SEQ ID NO: 46751 - RNA, 70 nt, Homo sapiens
gccgggggagagcaacgggccacggaggaaaaccggagaacgaacccagaaacgcaggaacagggccgcc

SEQ ID NO: 46752 - RNA, 77 nt, Homo sapiens
agaggcccaacaggagaagacagaaaggagaggcacagcaaggcaaggaagacaaagcacaggccagaccaagaggc

SEQ ID NO: 46753 - RNA, 80 nt, Homo sapiens
cggacacaaacaagcagcaggaggacaccaaagggacaggccaagaggacgggaccaccaggaggagggcagcaccggac

SEQ ID NO: 46754 - RNA, 78 nt, Homo sapiens
gaccggaaggccgaacagagagcgcagaagacaggacaaaaagcccacacaacaccaggaggaccgaaagacacgcag

SEQ ID NO: 46755 - RNA, 84 nt, Homo sapiens
cggagcaagaggcggacaccccggacgaaccacaggaagcgcggggcggcggcgaaaggacggaccccaagaagcaggcagaca

SEQ ID NO: 46756 - RNA, 67 nt, Homo sapiens
aggcaacgggcggcacggggaggagaagcggccacgagaagcgccccacggcccacagacccagccc

SEQ ID NO: 46757 - RNA, 56 nt, Homo sapiens
agcgcgcagaaagggcgaccaccaaaaaaacgggcaggagggaacccggcgcaacc

SEQ ID NO: 46758 - RNA, 77 nt, Homo sapiens
acgccggccccagcccagcggccggcccgcgcccagcagaggaggaagaaggagacccaacaccccggccagacggg

SEQ ID NO: 46759 - RNA, 74 nt, Homo sapiens
ccagggcgaaaaaaaagacccaacagaggaagccgcaagaaacgggacgacaggaaggccagagaaggcgggcc

SEQ ID NO: 46760 - RNA, 60 nt, Homo sapiens
gcgccgagcgcgcggagaaccagagaagccgggacaaaacagaggagaccagaccagaag

SEQ ID NO: 46761 - RNA, 68 nt, Homo sapiens
accaaccgcgcgcaccgccgacccggaagaccgccgccggaagaagagagggcgaaggaggccacaca

SEQ ID NO: 46762 - RNA, 56 nt, Homo sapiens
aacaaagaagagccacaaagcaggcagccaggacccgaaaagccagcaagcgagac

SEQ ID NO: 46763 - RNA, 107 nt, Homo sapiens
cggaccaggggggcgcgccacggcgacgccccagcccgcccaaagaaagaaggaggaaccaacgcagagccccagaacaaaagaacacagaggaaccagaacagacc

SEQ ID NO: 46764 - RNA, 79 nt, Homo sapiens
aaagcccaccgaagaacagaaaacgcaaggagaaacccaagagcagcggcagagaggagcgcagcagacagcggccggc

SEQ ID NO: 46765 - RNA, 82 nt, Homo sapiens
gcgcgcccggccggcccggagcaccgagccgcggcacggaggagcggcggaggcggaccggggggcccgggcccgccagacc

SEQ ID NO: 46766 - RNA, 71 nt, Homo sapiens
cggcgccggaccaacaccccccagccgcgcgaccgcgccggaaacgaaagcgccggcccggcgcaggcggg

SEQ ID NO: 46767 - RNA, 76 nt, Homo sapiens
caggcccgggccaaaacagcaacccaaacacagaagggggaaagaagcagccgaaaggaagaagaacggacagcag

SEQ ID NO: 46768 - RNA, 55 nt, Homo sapiens
agcaaggaacaagggcaagaagggagaaccacaagggcgagccaagaagagcgac

SEQ ID NO: 46769 - RNA, 55 nt, Homo sapiens
gaaagcagaagcgcgcagcaacggcggaggcgcaacaaagcccagggacaaaaga

SEQ ID NO: 46770 - RNA, 81 nt, Homo sapiens
aaacggcccaccgccccgggggagaggcggggccgggcggcggggccccccgacgacccccgcagaacccagcggggccgc

SEQ ID NO: 46771 - RNA, 49 nt, Homo sapiens
cggcagcaaagagggaacaggcccaaaaaaacagaccaccagccgcgag

SEQ ID NO: 46772 - RNA, 56 nt, Homo sapiens
cagcagaccggcaacagacacacaaaccgggccaccaagagccaccgaggccaaag

SEQ ID NO: 46773 - RNA, 69 nt, Homo sapiens
gggacgccccagaggaccccggccggaggcaaggcagagacccagagaacccaaacaagaccaaaacca

SEQ ID NO: 46774 - RNA, 57 nt, Homo sapiens
gaaagaaaggccaaagcagcagagacggccggagacgaaccggccacaaccggggga

SEQ ID NO: 46775 - RNA, 131 nt, Homo sapiens
gacgagggcggagccgccgccgcgccgcgcagaaggccggggccggccagaagcgggcggcgcgggggagagacacgggccggagacgaccgggagagggagagcagggaaacggagaagcccagaacgcc

SEQ ID NO: 46776 - RNA, 75 nt, Homo sapiens
agccagagaacagcccccacgcagcccagaagccgccaggagcaaggcagcgacccagggcacagcggggcacag

SEQ ID NO: 46777 - RNA, 62 nt, Homo sapiens
cagcagcaggcacaagacacgggagaggaagagcaagcggcggagggcagagagagcgaaaa

SEQ ID NO: 46778 - RNA, 73 nt, Homo sapiens
aagccacaacaagaaaaccaaggaccacgacccccgcagacccagccccacagaccgggcagccagcggcggg

SEQ ID NO: 46779 - RNA, 84 nt, Homo sapiens
agaccgcccgaaggaaagaggggacgcggaaacccaggccagagacggagcagaggcccagccgcacaggaagacggaagagga

SEQ ID NO: 46780 - RNA, 70 nt, Homo sapiens
cgcggcgggcggcggcagggacgaggggcgaggaagagacaggcgggggagaagaagcagggccaaacgc

SEQ ID NO: 46781 - RNA, 80 nt, Homo sapiens
ggccccagcgaggagggccaacccagcggcaaggacacaaaggccagcggaagagacgaccggagggagaaagaacagag

SEQ ID NO: 46782 - RNA, 96 nt, Homo sapiens
gcacggcacacacagccggccgaggaccagggacaacagagccagaggcaaacgaagaaaacgacccagccagaggacaaaggaccgaggacaggg

SEQ ID NO: 46783 - RNA, 76 nt, Homo sapiens
ccagaggaggaggcggccggccgagcacaggagggccgaggaacgcagaaggaaaaccgcaccgaagcagccaagg

SEQ ID NO: 46784 - RNA, 83 nt, Homo sapiens
cgaccaccgcacacccgacacagcggagcgcccagaggcgagcccggggaggaagaggccagacgggacccgaaccaggaacc

SEQ ID NO: 46785 - RNA, 78 nt, Homo sapiens
cagccccgcggcacgcagagacgggcaacccggggggcgggcaggaaagagagaagcgacgagaggagaggagaggca

SEQ ID NO: 46786 - RNA, 76 nt, Homo sapiens
ggacaccggcggggcgcgggccgcacccgcgcggacccaaagacaggaccacgcaccagcagagaaggaaagcaaa

SEQ ID NO: 46787 - RNA, 74 nt, Homo sapiens
gcggccagccccacagaggaaggaagaagccgagcaggcagggcgacgcccgggggggggagccaaaaacacag

SEQ ID NO: 46788 - RNA, 76 nt, Homo sapiens
gcgaccgagggacgggagcgaggaggcgcgggccccggggccgcggcgaaaggacggggcgaaagccaagaaccac

SEQ ID NO: 46789 - RNA, 67 nt, Homo sapiens
ggagcccaggacacaaggaggacaccaacagagagacaggcccgagcccaagcgcacgacaccagag

SEQ ID NO: 46790 - RNA, 79 nt, Homo sapiens
gcgaggcgcagaaaccccggacaaggcacgccagacgagaggagccaaagggaagaagcaggaaacaagccgaaaaaca

SEQ ID NO: 46791 - RNA, 69 nt, Homo sapiens
caaccgacccgccaagcgcacacaaaagaggagaaaaccgggcgcagccggggccgagaggcagaggaa

SEQ ID NO: 46792 - RNA, 78 nt, Homo sapiens
gaccggccggagccccagggccgaggaacgggcgcagcagcggccacccggacaggcaacaagggaaggaacaagcag

SEQ ID NO: 46793 - RNA, 75 nt, Homo sapiens
agaaacacagaccacacaagagcaaagccggccagacaaggagagcaacacaaggaagcaagggccaccgcccag

SEQ ID NO: 46794 - RNA, 77 nt, Homo sapiens
acagagaagacagcaccaggccaaacacaagaagcaagaagaaaacggagaaacagaggagagaggagcacgggaca

SEQ ID NO: 46795 - RNA, 88 nt, Homo sapiens
ccagagcggaagacaagacggaagcgcaacaggaaaggagagaagaaggcaagggccacggcacccagaaggcgcgagaagggcagag

SEQ ID NO: 46796 - RNA, 77 nt, Homo sapiens
ggggaccagcagccgggccagggccagagcaaaggaaacggagcacccaccaacgagagagccgcagggcaggacca

SEQ ID NO: 46797 - RNA, 75 nt, Homo sapiens
ggcgaacagcaaggcacaaggggagaccaccaggaaaagaaccccccgagaacgggccccggcacggccggggca

SEQ ID NO: 46798 - RNA, 71 nt, Homo sapiens
ggcgacccgcgccgccaggaaaacgaggcccacgcgacggaagcgcgggagagcgacgggcaacaggagga

SEQ ID NO: 46799 - RNA, 64 nt, Homo sapiens
acaaaggaagccaagcaggaggcggcgcgaccagccacagaagccagccaacacagcaggcggc

SEQ ID NO: 46800 - RNA, 71 nt, Homo sapiens
aggcgcccaggagacgagcaggccacagagagcggcacaagcccagaacccagcagcggaaggagacggcg

SEQ ID NO: 46801 - RNA, 70 nt, Homo sapiens
cccggcagcgacgcacaaacgcccccggaaaaggaaaaacgggccgagaaagcgagcgaaaagaagaaca

SEQ ID NO: 46802 - RNA, 68 nt, Homo sapiens
gaaaagggacccccgggaagaagacacagaaaacagaagccccagcgacgcagaggacccagccaagg

SEQ ID NO: 46803 - RNA, 69 nt, Homo sapiens
cagagccacgcggccgcggaggaaagccagacaccacccgcggagaaccacggggcagagcagggcggg

SEQ ID NO: 46804 - RNA, 83 nt, Homo sapiens
agcgggagcccggccggagcgggcggagacgccgggcagccgaacggagggcgacggagggagcccgagcgggaagaagccgc

SEQ ID NO: 46805 - RNA, 79 nt, Homo sapiens
cccagggagggaacaaagcccacagcaccgacggaacacgcgaacacgcaaaaggaagcggcaggcacgggacccaagg

SEQ ID NO: 46806 - RNA, 63 nt, Homo sapiens
cggcacacgaaaccacgacccacagaaagggaccaaagggggccccaggaaagccggggaaac

SEQ ID NO: 46807 - RNA, 77 nt, Homo sapiens
cgagaccaacaccaacacgagggcggcggaaaaagccgccacacgccaaagaggcccacgcggaccggcagcgccac

SEQ ID NO: 46808 - RNA, 78 nt, Homo sapiens
caccccacggccagggccaccaaccccaacccggagagcggcgaggaaggaaaccggcaagccaggccacacccccac

SEQ ID NO: 46809 - RNA, 76 nt, Homo sapiens
acgagcgcgcacaacgcaggaccggcgccgaaggcccgccaggacaaagacccggggccaggcgggccccacgcgg

SEQ ID NO: 46810 - RNA, 91 nt, Homo sapiens
accgccggaggcggcagcgcacgcgggaggccgaggagaagcggaggagcggcgaagcgcggcgcaggcgggagaccagggccagcccggc

SEQ ID NO: 46811 - RNA, 69 nt, Homo sapiens
cccgacacccaggaccaacccccaggagggagcgggcaagaccagaggaaaacagcaagcaacagggga

SEQ ID NO: 46812 - RNA, 69 nt, Homo sapiens
ggaggagacaggcgagagaggaggacacgaccgcagaaacaacgcgagagcccccaagggaccgagcgc

SEQ ID NO: 46813 - RNA, 79 nt, Homo sapiens
cccgaggagccggacgaagggacaagcaaggccaagccgacagccggaacaacgcaagacggacagaggcaggggcgcc

SEQ ID NO: 46814 - RNA, 78 nt, Homo sapiens
cgccgaccgcggccccgccggccgccggccgcgcggggggccaagacaaggggcgcagagcggggggacaggcgcaag

SEQ ID NO: 46815 - RNA, 62 nt, Homo sapiens
gcaagaacagcggggcagaagcgcgggcaaggacccaaaaggcgggcgaaaacgccaaaaac

SEQ ID NO: 46816 - RNA, 67 nt, Homo sapiens
agggcaacgagaaagagacgagccaaagcagacccccaagcgagcggagcggaaggagcgcgcccca

SEQ ID NO: 46817 - RNA, 76 nt, Homo sapiens
cggcagccccacgccccgcccgaagccgacccgacgcccccaggagaaaaacagccccagagggggcccgggcgcc

SEQ ID NO: 46818 - RNA, 67 nt, Homo sapiens
ccgcgcggcacacggggcagccaggccgagccaacaaaagacacagcaaggccgaaggcggaaacac

SEQ ID NO: 46819 - RNA, 103 nt, Homo sapiens
ccgcggagcaaaaaaagagcccgcaagaagaacagagacagcagccaaacccccagcccgagaaaagcacagcacccgcaggccaacacaggaccaacagaac

SEQ ID NO: 46820 - RNA, 78 nt, Homo sapiens
aggcgcagagggggcggcgaccgagaggcgcggagccggggacgcaagcaacccaggcacccccaacaggcacccacc

SEQ ID NO: 46821 - RNA, 86 nt, Homo sapiens
gccagcccccgccacggccgccggagagcagcaggacgggcccagggaacacgggagccccggaccaccggacaggggagcgcgag

SEQ ID NO: 46822 - RNA, 66 nt, Homo sapiens
agccaccacaccagagcagcacgagggccggaaagaccgaaaggggcccagagagggccgaaccgg

SEQ ID NO: 46823 - RNA, 72 nt, Homo sapiens
gccaccgccgcccccaacgccagccgacgcagggaagcaacaggaaaccaaacaagggaagagggaagggcc

SEQ ID NO: 46824 - RNA, 65 nt, Homo sapiens
cggcgaggcaccccaacagcagagaaacaagggggacggcccgccacgggccccgcagccgcgcc

SEQ ID NO: 46825 - RNA, 52 nt, Homo sapiens
cccaccaagaacccagagcacgcccgggcgacagcaaggacacaacacgaaa

SEQ ID NO: 46826 - RNA, 61 nt, Homo sapiens
gagagcgaccaggccagggacacaggcacccggaaggacaagggcagacccgggaaaaggc

SEQ ID NO: 46827 - RNA, 39 nt, Homo sapiens
cgagaccagccgagcaacaggcggccgaaccccgaccca

SEQ ID NO: 46828 - RNA, 77 nt, Homo sapiens
ccagaggcccggacgacagcccccaggagccgaggagggcgcgcggcccggcggacggaccacggaggaccgcggac

SEQ ID NO: 46829 - RNA, 90 nt, Homo sapiens
ggcccacccagacccccggcagaaggcccgaccgccggcgccacagccacagcccggagcccaggcccaggcccaaggccaaggagagag

SEQ ID NO: 46830 - RNA, 87 nt, Homo sapiens
ccccccaaagcaggacaacggacggccggcagggggagagcgccaccccagaaaaggacccaagggggcaaaggcggaaacagcaga

SEQ ID NO: 46831 - RNA, 72 nt, Homo sapiens
gacgcacgggagacacaagacaccaaaagacaccaggcgcagcccagcccgaaagcagaacgacgccggcga

SEQ ID NO: 46832 - RNA, 61 nt, Homo sapiens
cgagacgagagagcgcgcgagcggccagcacaagacagaaggcgaggccgggggcagagaa

SEQ ID NO: 46833 - RNA, 83 nt, Homo sapiens
caaacagagacacccagggagaggaaacgggaacagaaagaaaagccgaaagagcgacagccgaggaagcaagcagcaaccag

SEQ ID NO: 46834 - RNA, 72 nt, Homo sapiens
aaaccagaagacagaccgcaggaaccacggcaaagggggagggacaagaccggcaccaggcaaaaggaggag

SEQ ID NO: 46835 - RNA, 80 nt, Homo sapiens
gggaggccgaggggcccggaggaggcccaggccggaggaagaagaaagagcggccagaaagccggaagggagcacgggag

SEQ ID NO: 46836 - RNA, 62 nt, Homo sapiens
cccaggggacaaaaaaggaacgaggcccagaaaaggcaaagcagaccaggacacggacaaca

SEQ ID NO: 46837 - RNA, 40 nt, Homo sapiens
cgacagcgcaaggagacgaaggcgggaacggacagggcaa

SEQ ID NO: 46838 - RNA, 40 nt, Homo sapiens
ccagaccaggaaagacagaggcaccagaacaagcagaaac

SEQ ID NO: 46839 - RNA, 75 nt, Homo sapiens
gcaaacaggcggggaccggcgaggagcgaagaacaaacacccgagcgcgagggacacgcgacgacaagcaggagc

SEQ ID NO: 46840 - RNA, 76 nt, Homo sapiens
cgcaggaccaaggaaaccggaccccacgaggcgaacacagacaacgaacagacacacaccagagggagcaccgacg

SEQ ID NO: 46841 - RNA, 79 nt, Homo sapiens
ggaaaagagaacaagaacacacaagacaagggccaaggcgagccaaaagcggaacccagcgcagaacggcgcagcgccc

SEQ ID NO: 46842 - RNA, 72 nt, Homo sapiens
ggcgacggcagaggaccccggagagcaaggaagaaagcagcccaggaggccaggccagagggaccaacgaag

SEQ ID NO: 46843 - RNA, 84 nt, Homo sapiens
aagcggagaccagccgagcggcggcccggggcagcccggcgggcggacccaaagacaggaccacgcaccagcagagaaggaaag

SEQ ID NO: 46844 - RNA, 74 nt, Homo sapiens
ccgacgcccgcgccggcgccccggcaaagaaggccaagaagacgacacaaaaggagcaccgagcggacaagagc

SEQ ID NO: 46845 - RNA, 75 nt, Homo sapiens
gcaacccacacggggggcgaagaagagcgccagacccacaggccaccaccaccacagacagagggaagagcggaa

SEQ ID NO: 46846 - RNA, 69 nt, Homo sapiens
gagagggccggcaggcccgggaaggcccggccgaggggagggagggcagccgagaaaggaaagcacgca

SEQ ID NO: 46847 - RNA, 70 nt, Homo sapiens
gggaccgccgcccggcaaacacggaaccaccccccacccaagaagagcgaggcgggacaaacaaggcaga

SEQ ID NO: 46848 - RNA, 68 nt, Homo sapiens
cacagaagaaacccacaggcagacccgcagaccaacgaaaaccacggcgccacgaagagggaaaagga

SEQ ID NO: 46849 - RNA, 75 nt, Homo sapiens
cagacacggaggcacacgagcagcacaacagaggagaccagggggaagggacgagagagaacaccggcgccccgg

SEQ ID NO: 46850 - RNA, 76 nt, Homo sapiens
caggagagaccaaaaaagggccagacagaagagcaaaaagaacacccggcaccagcccaaccccaaagacgacaaa

SEQ ID NO: 46851 - RNA, 54 nt, Homo sapiens
acagaaggccacgcggaaacaaggcgaccccagaaaggcgccacaggagccgca

SEQ ID NO: 46852 - RNA, 125 nt, Homo sapiens
agcgggcccgggggccggggccgcgcgcccgggccgcgaggacgaggcggcgccgccgggcgggagcccccggcagggccaaggcccccccacggcgcgccgacggacagcgggcgcgggggacg

SEQ ID NO: 46853 - RNA, 75 nt, Homo sapiens
ccagcggccgcgcacccccggccggaggcaccagcgacaggacacccagcaacagaccgagaagacagcggcaaa

SEQ ID NO: 46854 - RNA, 75 nt, Homo sapiens
ggagagaagaagacagacgccccagggccgagggccggggccacgcaggcacccaggggcaaagggacccaggcc

SEQ ID NO: 46855 - RNA, 73 nt, Homo sapiens
agcgcggaagaggaccggaggccggaggaagccaggaggccgggaaccacagggaaaaagcaggggagacgga

SEQ ID NO: 46856 - RNA, 84 nt, Homo sapiens
aacaggccgggcaccaaggcgcagcaggggaaagcgcgagcgagcacccggagcagcagagcacccaacaggggacaggcaccg

SEQ ID NO: 46857 - RNA, 100 nt, Homo sapiens
agcgcggccgcggacgaagaggcgaccgccagacggagcacacggacaaagacgaccccgacgcaggccaggagccgcggacagaagccgagcacggccg

SEQ ID NO: 46858 - RNA, 74 nt, Homo sapiens
caaaaggaaaagacacaccagaaggcccgcacgcagcacacagaagaagcaccacacccgccacgggcaagaca

SEQ ID NO: 46859 - RNA, 69 nt, Homo sapiens
ggaccggaggcggagcaggaaagcaggagcccggaaaggagaaggaaaagacggcaggaggaagagaga

SEQ ID NO: 46860 - RNA, 48 nt, Homo sapiens
gggcaggcaccgaggaagcgaggccaggacaacggccacagagaagcc

SEQ ID NO: 46861 - RNA, 73 nt, Homo sapiens
cacaaaaagaccgcagagccaagccccaccagggcaaagcaccccagagcaaaaaacggggagaacaaagaac

SEQ ID NO: 46862 - RNA, 78 nt, Homo sapiens
cgccagcaccggccccaccacagggcccggccaggccccaccgccacaagcaggggaacaccgccaaccccaagggcc

SEQ ID NO: 46863 - RNA, 50 nt, Homo sapiens
agaaaagccaggaggaaagcgagaaggggaacagacacaccaacagcagc

SEQ ID NO: 46864 - RNA, 78 nt, Homo sapiens
aaaacggcaccacgggcacagccccacgcggccacggccagggaacaagacagcgaacccacccaacacggcaaaaca

SEQ ID NO: 46865 - RNA, 72 nt, Homo sapiens
aggaacaggaagaacgccagagaaaaagaaaagggcacagaaagccaggagcgaacacacagaacccgcaag

SEQ ID NO: 46866 - RNA, 73 nt, Homo sapiens
gcacaagaaggcaggccacgaagaaagcagggcagcagaaaagccagaggagaaaacaccagcccacccccca

SEQ ID NO: 46867 - RNA, 69 nt, Homo sapiens
aaaaagaaagcaccgccgcacagacccaacagcaagggagaacagagcaaccaccaaagagagagggga

SEQ ID NO: 46868 - RNA, 76 nt, Homo sapiens
gcccggacccgacgcaggagggagagcacagcaagagccaggaccaccggaagccagaaagacgcaaaaggaaaag

SEQ ID NO: 46869 - RNA, 77 nt, Homo sapiens
gaccacaaggcacagaaccacggccccggcaagcccccgcccgccagggcagacggcccaggcgggaaaacggcaca

SEQ ID NO: 46870 - RNA, 75 nt, Homo sapiens
acgacccgagcacaaggcaagagaccaaccccagccccgaaaggaccgaaaagacgcggccccaaaggaaacacc

SEQ ID NO: 46871 - RNA, 92 nt, Homo sapiens
cacccaagaaaaaagagacagaagcaagaaaaagacaagaaggccaacagagaaggaggggccaagggagaagaccgcaagagggaagaaca

SEQ ID NO: 46872 - RNA, 79 nt, Homo sapiens
cgaggaagagggccccgggcccccacgccccaggcccaggacccggcgggggcaaggaagcacggaggcccgggaacaa

SEQ ID NO: 46873 - RNA, 79 nt, Homo sapiens
gggcggcccggaccgggagacacggccagacgcccccacgcgccgcgcgccgggagaggcccggggcccgccggcgccc

SEQ ID NO: 46874 - RNA, 70 nt, Homo sapiens
aagagcagcacacccagccccaagagcaacaggaaacgggagacgagagagaaaaaaaagaggaagcaga

SEQ ID NO: 46875 - RNA, 77 nt, Homo sapiens
cccgggccaggacccggggggcggccccccggaaacgggacccaggacaaggaagccgggggggaaccacaaagaac

SEQ ID NO: 46876 - RNA, 69 nt, Homo sapiens
ggaaaaaggagaacgggagcgagagacgaagcacagaggacaggagagacaacggaggcaagaaagacg

SEQ ID NO: 46877 - RNA, 51 nt, Homo sapiens
cgggccacccccccgcgccgccggcacgcgaccagcggagaccacaagaag

SEQ ID NO: 46878 - RNA, 67 nt, Homo sapiens
aagcacagccacaagaaaaagacaccaggcgccgagaaggccagcagagaaacaggcaggagaggcc

SEQ ID NO: 46879 - RNA, 111 nt, Homo sapiens
cgcggacaggcgggcacagcgaaggaggagcccggagacacacaggcagacccaacgacggggaagggagaccgcgagacacggccggccccacacacagcccccgcggaa

SEQ ID NO: 46880 - RNA, 86 nt, Homo sapiens
gcggcccggccggagcaagaggcgagggcgagcggcagccgccgccagcaacaaacgacagaggcaacgaagcgaacaacacagcc

SEQ ID NO: 46881 - RNA, 54 nt, Homo sapiens
agcagaaggagcaaaaggcggacaggcagcgcgagaagcacaggcacggagggc

SEQ ID NO: 46882 - RNA, 81 nt, Homo sapiens
gaccggccgagaggaagacgagccgggaggaacggcccggaaacaggaggaccgagcccggacggccacgacgggcgcgga

SEQ ID NO: 46883 - RNA, 78 nt, Homo sapiens
cagcaggggcgacgaggcgggacgcaggaaggggaggcaagcaggggggcaaaggaaagaaggcagaaagggaggcca

SEQ ID NO: 46884 - RNA, 82 nt, Homo sapiens
caagaggcgggcaggagcggcggccaggccagacccgaaggccaggagacccgaccccaaggcgcacaagagcagggacccc

SEQ ID NO: 46885 - RNA, 79 nt, Homo sapiens
aacgagccgggccaccagccagggcccgccgagcaggaacgaagcaggaagggaacgagcggcaaggcgaagaaggaga

SEQ ID NO: 46886 - RNA, 59 nt, Homo sapiens
acggcgaagcgcgcgccgcgcccggaccccaggccaagccgacgccagcgggcgccacc

SEQ ID NO: 46887 - RNA, 86 nt, Homo sapiens
aggcgggagaaggcgcaacgcggcgcccgcccaacagcacaagaagcgccaccacgccggcccgggggaaaggacccgaaggagcc

SEQ ID NO: 46888 - RNA, 75 nt, Homo sapiens
aacgggaccagcagggacagagcgccggaggaccggcccgagcccgcagacaagaggggacacagccagggcgca

SEQ ID NO: 46889 - RNA, 67 nt, Homo sapiens
aaggaccaacgacccccagacgagaacgccagaaacacaagcacgaggggacaagaaaaccagaaac

SEQ ID NO: 46890 - RNA, 71 nt, Homo sapiens
gagagacccccaccgacccaccaacaacacagagaggagcaccagggccagacggccgaacccgacccaag

SEQ ID NO: 46891 - RNA, 74 nt, Homo sapiens
cgggccagagcggggcgaccaggaaagccccggcgacccaccaaagagccgggggacaaagaacaaacggaaaa

SEQ ID NO: 46892 - RNA, 79 nt, Homo sapiens
gacccagcagaaaagaagcgggcaacccagcgcaggagggcacggaggggcaaaggaaaggggcaggcacccccaacaa

SEQ ID NO: 46893 - RNA, 82 nt, Homo sapiens
ccagggcagcaaaggaaaacccggacaaccagcggggcacaacaagggcacaacagagccaccccaccacccccaaaaagga

SEQ ID NO: 46894 - RNA, 77 nt, Homo sapiens
ggacccaccaccgcgggagcgccggcgacccaacaaggcccgggcccccgcccccgacagagggacaaccaggccag

SEQ ID NO: 46895 - RNA, 120 nt, Homo sapiens
ccaacgcaggccccgcaaagacggcacgcgggacgaacaccgcacaggcaggaggcaggccaaggaacggacgggagacacaggaagagcgggccaaccggggacgagccagacggggca

SEQ ID NO: 46896 - RNA, 37 nt, Homo sapiens
agcgcgaggccgcagcagcacagggaccagcagccca

SEQ ID NO: 46897 - RNA, 69 nt, Homo sapiens
agacggcaccaggggcaggccagcacccgagccgagccccagcgcagcacaaacacacgaagaacaaac

SEQ ID NO: 46898 - RNA, 77 nt, Homo sapiens
ccagccaggagccgcacggccggcgcggccgacggcgcgcgcccgcgcgcgcggcggggaccggccaagaagaagac

SEQ ID NO: 46899 - RNA, 87 nt, Homo sapiens
gcgacaagcaaggggaggagcagcagcgcggcagagcagggggccgggaacgggaaacgcgcgccgagaagccacccgccgagaggg

SEQ ID NO: 46900 - RNA, 76 nt, Homo sapiens
ggaggccccacagccagggaacacaaagagccgggaaaaacccagcagggggcgaaagaaaccccaggcaggaccc

SEQ ID NO: 46901 - RNA, 85 nt, Homo sapiens
gcgacgacgaggaggaggcggccgccgcagccggggcccccgccgccgccggagcgagaggaccgaggaggggcgccgaggaaaa

SEQ ID NO: 46902 - RNA, 58 nt, Homo sapiens
ggaaaccgcaccgcccggagggcacgcgcccaagggaggccaagcgaaggaagcgacg

SEQ ID NO: 46903 - RNA, 80 nt, Homo sapiens
cgcagggcgcccccggaagaagaccaaaggacaaaaaagacggagagagaacaggccaacgggagcagggcaagaagcca

SEQ ID NO: 46904 - RNA, 44 nt, Homo sapiens
agcaggcggggaagagaaagggccgggaacccaacaagggagca

SEQ ID NO: 46905 - RNA, 55 nt, Homo sapiens
cagcacgaagaagccacagccgcacggacccccagcccgcaacccagaaaggaag

SEQ ID NO: 46906 - RNA, 77 nt, Homo sapiens
gaaggaaggagggccgagcacgagccagggagccgccgggaccggcccgggagacgacaacccaaaccgaaaaggca

SEQ ID NO: 46907 - RNA, 76 nt, Homo sapiens
cacaacaacaggaacccagacagcgcggcccagcagcaaagaaaccggaaacacgcgcaacaacccagaaaggagc

SEQ ID NO: 46908 - RNA, 88 nt, Homo sapiens
ggaccgagccgacgcgggccgcgcggggacccaggaggaaaccagcagccgcaccgcccgagaaggcggcgggccggaaacgcgggaa

SEQ ID NO: 46909 - RNA, 72 nt, Homo sapiens
caggcgaaaccacgcgaacacgcagcgcccaaagcaaacgccaccagaaggaaagaaccggaacagaagaca

SEQ ID NO: 46910 - RNA, 70 nt, Homo sapiens
caacgggcacaacaacacacgcaagcaacccacagaagaaaagggcggagagagcagcacaaaccaacag

SEQ ID NO: 46911 - RNA, 85 nt, Homo sapiens
aggcagagggcgcaccgcccgggacggccacagacccacagaggcaccccagacacacccgccaggagcccggaaggggccgcac

SEQ ID NO: 46912 - RNA, 74 nt, Homo sapiens
ggccagcggcagcaagaacccgccagggccccgaggacccagaaaggccagcagcagcgaggccccgccagcga

SEQ ID NO: 46913 - RNA, 79 nt, Homo sapiens
caggagagaagggagcgaacacagagagccacaggccgcacaccccagagcccgaagggggccccgaccccgacccagc

SEQ ID NO: 46914 - RNA, 73 nt, Homo sapiens
cgcagggcgcccccggcgacagggggaccgcggcgcgagggacgcaccgccccaggacggggagaaagagccc

SEQ ID NO: 46915 - RNA, 75 nt, Homo sapiens
agaaaagagaaacggggcgaccaaaagagagggacgaaagagaagcagaaggcggcagggagcacgcaccaggag

SEQ ID NO: 46916 - RNA, 81 nt, Homo sapiens
aagcacagccaaccacaaacggacaaggggagcggcagcgaccgacgacacccacagcgagcagacagaagccggaaggag

SEQ ID NO: 46917 - RNA, 76 nt, Homo sapiens
agacacggggaagcgcaaaaacaagacggggcgccccacagaggggcgacgacaaaaaacacgcaccaagaagaaa

SEQ ID NO: 46918 - RNA, 71 nt, Homo sapiens
aaacaaagcacgaagcaaaaagacccaacagcacagcaagacggggacagacccagcagggggccccagaa

SEQ ID NO: 46919 - RNA, 71 nt, Homo sapiens
ccgccccccgccaacacaccccaagaggaaccaggacagaaacccacagaaagagggggcccgggcagggc

SEQ ID NO: 46920 - RNA, 68 nt, Homo sapiens
aaacaagacgcccggacaagagacaacaggcacaaagagagaaggaacacccacagggcagacagaga

SEQ ID NO: 46921 - RNA, 77 nt, Homo sapiens
gcggcccgggggcaggggaggagacgaggcaacagcagcgcaggagaaggagaaagaaaaagaaaccagccaaacag

SEQ ID NO: 46922 - RNA, 54 nt, Homo sapiens
gcgcccacacccaagcagaagagaggccggccacacaacagccaagcaacgcgg

SEQ ID NO: 46923 - RNA, 72 nt, Homo sapiens
acgggaacaagaggggacagaaagggcacacaaagcgggaaagggaaagccccaaagcagccgcacggaagg

SEQ ID NO: 46924 - RNA, 83 nt, Homo sapiens
gccacgaaagccggccacgccgggccggagccggcgcaagacgcgagcaaaaagagaaaacaaagaagcaaagcccgacccac

SEQ ID NO: 46925 - RNA, 67 nt, Homo sapiens
cgcacccacccacggcaggagcccgaaggagagcgcccggacaccacggaggaaaggagagaaaaag

SEQ ID NO: 46926 - RNA, 32 nt, Homo sapiens
acaggagacacaagaccagaaacgggggggga

SEQ ID NO: 46927 - RNA, 72 nt, Homo sapiens
gcgccaaacagcccaaaggaacacagaagagaggagacagacgcggagccgggagaacccaacccaaagcca

SEQ ID NO: 46928 - RNA, 71 nt, Homo sapiens
acccccggccggcgcgaggccagccggacacaagagggcaagaaaggcgcgacgggccgaaaagggacgaa

SEQ ID NO: 46929 - RNA, 82 nt, Homo sapiens
gagaaggacacaggagaaaaacgcaacccaaacggcccagccgagcacagaccggggacccgaagcccgcgagaaggaggcg

SEQ ID NO: 46930 - RNA, 76 nt, Homo sapiens
agagacggagaggagagcaacggcagagggggaccgccagcacaggggacggaagcggcagcgggcagccggccca

SEQ ID NO: 46931 - RNA, 68 nt, Homo sapiens
ccaaccgcccaaaaacccagagcagcagcaagaagagaagaaagcaccagcaccaagaccagccaggg

SEQ ID NO: 46932 - RNA, 86 nt, Homo sapiens
cgagaacggcgggaagagaagacacgagcacaaacgccaggacccccagcacagccagcagcggaacagcgaaccagcagcggcag

SEQ ID NO: 46933 - RNA, 75 nt, Homo sapiens
aaaggcaaaccgaagaaaaaaaccagaagcggaacacagcgccaacaacagcaacggaagagggaagaaaaaaac

SEQ ID NO: 46934 - RNA, 72 nt, Homo sapiens
agacgacggccgggacaaggcaacgccgcgcccacacaggaggccggacccaagaacccgcacgagccaccc

SEQ ID NO: 46935 - RNA, 71 nt, Homo sapiens
cacgaggcaccacccagcacacggagagagacccccggaagaagacccagcccgcaggcagaaccccaagc

SEQ ID NO: 46936 - RNA, 71 nt, Homo sapiens
ggaacaaacaggcaaggagcgccacggaaggagagcgcagacgagcagagaaaagagagccaggcgacagc

SEQ ID NO: 46937 - RNA, 62 nt, Homo sapiens
gagaccagagaggacagaacgaggaagaggcccaacgggacacggaagggaacggagagccc

SEQ ID NO: 46938 - RNA, 73 nt, Homo sapiens
agggacgcagaaaagggagaggagaggcaaaaagaggcgcacagagcccgcaaagaccagccagaagaagcaa

SEQ ID NO: 46939 - RNA, 75 nt, Homo sapiens
ggcgcccgccaccggcccccgggagccaccgggggcggaggagggagccagcacagcgcccaccccacgggaggc

SEQ ID NO: 46940 - RNA, 43 nt, Homo sapiens
caaaaagcccgcaggggcgagggagacccgagccgagggacca

SEQ ID NO: 46941 - RNA, 79 nt, Homo sapiens
ggcaagcagcgccgagcccaggcaagagcccgcgagaagcagaagaggcggccacccacgagccgacggcaaacgccag

SEQ ID NO: 46942 - RNA, 78 nt, Homo sapiens
agggccaaagccaacgaagaaaagaggagcgccagagcgaaaagagaaggcaaacagcgaagaacggcaaccgagccg

SEQ ID NO: 46943 - RNA, 70 nt, Homo sapiens
agggaaaggcccaggaaaaagaccgaagcgccggccagaccaggcgagccgagagagaggacaccgagcc

SEQ ID NO: 46944 - RNA, 78 nt, Homo sapiens
gagaaacaaggaacccgaaaagcgaacaacccgagccagaaaacaccaggccccagggaaaggaccgaggcaggaaag

SEQ ID NO: 46945 - RNA, 83 nt, Homo sapiens
ggagcgcccggagccccggacagccaggcggaagcaggcgaagccgcgccgggaaaggaccccaccaaaacggacaaaagagc

SEQ ID NO: 46946 - RNA, 56 nt, Homo sapiens
acaaggccgcacaccagcccgccgcagcaagagagagcaaggagcaggcgcagagc

SEQ ID NO: 46947 - RNA, 68 nt, Homo sapiens
cgcgccagcccaggaaaggcgccgaagaggacacaggcggagaccgggagacgggccaaacagccacg

SEQ ID NO: 46948 - RNA, 79 nt, Homo sapiens
aaggcgaggagagagcgcgacggaacgcacagcacgaagcagccacggccaccggagacgggagggccagaagacaccg

SEQ ID NO: 46949 - RNA, 85 nt, Homo sapiens
aggaagccacaaagccagggcggggcggacaaggcagcggcgccacggggcgggcacggaaccaggaccaaggagcagccgcgcc

SEQ ID NO: 46950 - RNA, 58 nt, Homo sapiens
gccgaccccggaggagcgccaccgggaagcgggaccaacgaagacagcgcaccggcca

SEQ ID NO: 46951 - RNA, 79 nt, Homo sapiens
acggcgacgaagcagccaaacaccaacggcgacgaggcacaaagccaagaagccggcccaccaagagggcaaggcggca

SEQ ID NO: 46952 - RNA, 73 nt, Homo sapiens
agagcagcacaagccagaaccgaccgcgcacagggagacaaagacacagcagacaggaggggcaggagaccag

SEQ ID NO: 46953 - RNA, 78 nt, Homo sapiens
gcggggagcaggagcggcgggcaccccgagacccggggcagacgcccacccagaaccccaaccggacaagacaccacc

SEQ ID NO: 46954 - RNA, 73 nt, Homo sapiens
cgcccgcccacagcgcaccaccagccagccaagacaagccgggcccagcaaccggcgcagacaacacaccccg

SEQ ID NO: 46955 - RNA, 71 nt, Homo sapiens
gacaagcggacccacccgcaacggacggcacaaacaggaagcagaccgccaagagcagcacgaccgcccgc

SEQ ID NO: 46956 - RNA, 80 nt, Homo sapiens
caccgccccacacgcaacaccagcaagaagacggcacgacgcagcacccaagacaaggcggcgacggcggcgcgaggacc

SEQ ID NO: 46957 - RNA, 54 nt, Homo sapiens
cggcacaaggaaccagaacaccggaagaacagacacacagagccacggcccgca

SEQ ID NO: 46958 - RNA, 76 nt, Homo sapiens
gcccggcagagcgggccgacccgaaagcgccgcgcccggggagacagaaacgaggcgcccccagcagcaggaggac

SEQ ID NO: 46959 - RNA, 82 nt, Homo sapiens
agcagggccccacccggccgcccgcccagcgccgcccccggagggcccacgcagcgccggacaagaagaccgcaggaaagca

SEQ ID NO: 46960 - RNA, 62 nt, Homo sapiens
gccaggccagcagcagaacgaccgggcgaggccaccccgaggcaaggccccagaggaggacc

SEQ ID NO: 46961 - RNA, 73 nt, Homo sapiens
gcagaccggggcaggcacccaggagaggacagcagccggcaagaccggagaagaacaagccgacccaaagccg

SEQ ID NO: 46962 - RNA, 76 nt, Homo sapiens
cccgagcaagcagccgcggcggaagagcggcgccaggagcaaggagaagaagcaccagccgacgcgaacggaacac

SEQ ID NO: 46963 - RNA, 71 nt, Homo sapiens
agcggaagacagacaagaccaacgaacccccagccccagaaagagaagcgagccccgacccaacggaaccg

SEQ ID NO: 46964 - RNA, 79 nt, Homo sapiens
ccggaagaagggagagcagaagccgcgaaaaaggggggccgaggcgggcacgaaaggaaagccgagaaggcacgacaag

SEQ ID NO: 46965 - RNA, 78 nt, Homo sapiens
cgggacagcacgccccggaccccaagagagacagagagaggagaaagcggccaaccccagaagagagaacagaagaag

SEQ ID NO: 46966 - RNA, 84 nt, Homo sapiens
acgcaaaaagaggcgaaaggaagcaagcagcagaagagccaaggaaaaacagcaagaacccaaaagggaacaacaaaagcagga

SEQ ID NO: 46967 - RNA, 76 nt, Homo sapiens
acaaaggagcagggaagaaggaacacgaggcagggggccacacgcaaggggaacagaaccaagaaggagcgaggga

SEQ ID NO: 46968 - RNA, 80 nt, Homo sapiens
caccacgccgagacaaaggacggcccgccgggaggcccccagccgagccagcggccggggcaggagcaggagaggaacgg

SEQ ID NO: 46969 - RNA, 52 nt, Homo sapiens
caacccagaagagcgaaggacccagcgaggaggcgagacgacgggaccgaag

SEQ ID NO: 46970 - RNA, 72 nt, Homo sapiens
gaaaacccaccgagcccgccaaaggccgccgacccccggcaaagcaccagaggaagaggaggaacgaggcca

SEQ ID NO: 46971 - RNA, 82 nt, Homo sapiens
agcgggccgacgggaagaacagaaagagcgccagcgggagagacccagagcaaaacgagcaccaagggcaaacacaagccca

SEQ ID NO: 46972 - RNA, 60 nt, Homo sapiens
agcaggccgagcccgagccgcagcacgagccaaaccgaggcagaagccagagggcgcgaa

SEQ ID NO: 46973 - RNA, 71 nt, Homo sapiens
ccgcaacagcccccgcccaacaaccagggggagaagaggccgccacacacccaacggcaaacagcaacaca

SEQ ID NO: 46974 - RNA, 69 nt, Homo sapiens
ccccggaaacacgacaagccaaagcaagccgaagaaaccagaggaaagaagaaaaaaaccgggggagaa

SEQ ID NO: 46975 - RNA, 57 nt, Homo sapiens
acaagcaaccggcgacaaagaagagcagcccagagaccgagaaaaaggcacagaaac

SEQ ID NO: 46976 - RNA, 70 nt, Homo sapiens
accccaccggacccggaagcaggcaccggcacggaccaccccaacaccgggggagaaccgggcccaccag

SEQ ID NO: 46977 - RNA, 87 nt, Homo sapiens
gggcgggacccgaccccgcccgaggcccccacaagaagcagcggacgcgcccccaagaaagggcggaaaacaccccaaaagccaaaa

SEQ ID NO: 46978 - RNA, 71 nt, Homo sapiens
ggaagaaacccccagccgacgcccgcgccccccagcaagacagcaacagagaggaccaccgcacgacaaac

SEQ ID NO: 46979 - RNA, 87 nt, Homo sapiens
cgacccacaccggcggcaccggcggcggcgcgcagcggcaggcggagagacccgccgccagggaagcaggaggagaacaacgcgccc

SEQ ID NO: 46980 - RNA, 81 nt, Homo sapiens
ggcacaagggagcacgccgcggcaaccagggccagaccacaggaaagcggggccgcagcagggaacaacgcccgacacggg

SEQ ID NO: 46981 - RNA, 55 nt, Homo sapiens
agaggagcaaaaaacaggaaaaaacacacagggcgggggccagcaaggaccacac

SEQ ID NO: 46982 - RNA, 77 nt, Homo sapiens
aaaaaaaagcgcacacacgacggagaagcagaccccaggaaagccaaagaacaaaacccaggggaccccagacaaca

SEQ ID NO: 46983 - RNA, 74 nt, Homo sapiens
gacaagaagcacgaacagcaggccaaagaccagagagagagacgccggacacgggcggcaaagccaccacccaa

SEQ ID NO: 46984 - RNA, 69 nt, Homo sapiens
cggcccggccggccggacaggagagacaacggaggcaagaaagacggagaagcgagaagagaccagcag

SEQ ID NO: 46985 - RNA, 51 nt, Homo sapiens
agcgagaccggagcgccacggccacggcccccacaacaacggggcggcaca

SEQ ID NO: 46986 - RNA, 78 nt, Homo sapiens
gacgcagcggaagcggacgccccaagcccgggccgcaccacaaaccagagacaaagcacccagaagggaagaagacgg

SEQ ID NO: 46987 - RNA, 78 nt, Homo sapiens
cgccggcgccgccgcccccgggccgcggccgcaggcaaccagacacacaaccaccagaaggagagaagaacagaagcc

SEQ ID NO: 46988 - RNA, 78 nt, Homo sapiens
ccgaaaaacagagcaaggagacagagaaagagcggacccagagggcgaagaaggagcagagcgggacgggcaagcggc

SEQ ID NO: 46989 - RNA, 90 nt, Homo sapiens
cggcgccccggcgcgaagaggcggaccggacggccgaggaccaggcacagacaccacgaacagggaggaaagccaggaggagagcagaaa

SEQ ID NO: 46990 - RNA, 83 nt, Homo sapiens
cgacccgggcccgccggcccgagccccggcggcgcagacagaagagggacaagccaagaaacccggaacgaggaaaacacgga

SEQ ID NO: 46991 - RNA, 83 nt, Homo sapiens
ggcaaagcggaaaggacaggggaaggccaaggcaaggcagaccgccacagagagcgggcacagggaagaaggcagacgcagcc

SEQ ID NO: 46992 - RNA, 75 nt, Homo sapiens
aaaagcaaggcaacaagcacaaggaggccgacccacccaccagcagaccaaggacccacggaaccgcgcagggga

SEQ ID NO: 46993 - RNA, 82 nt, Homo sapiens
cgccgcgagccgcgcggagccgcgcagccccggagcacggcaaaagcagaccggaaaacccaccggcaagaccacacccgag

SEQ ID NO: 46994 - RNA, 76 nt, Homo sapiens
cgaccgagacgggcggagaggagaagagaagcaggaaacacaggaggcgccggccagaaacacaaaacaaacgccc

SEQ ID NO: 46995 - RNA, 86 nt, Homo sapiens
aaagcagacggccgcacgcgacccgaaggcgaacagacaagcagagggagccaaggcccagacagaggccagccagcagaaggcgg

SEQ ID NO: 46996 - RNA, 80 nt, Homo sapiens
ggcccccgacgggacagcagaggaaagacggaagcccaggggaagccagcagaaacgaagcagacagaaacaacaaccca

SEQ ID NO: 46997 - RNA, 44 nt, Homo sapiens
agcgcccagcacggagcggaggaagagccgggaaaccgaagaag

SEQ ID NO: 46998 - RNA, 40 nt, Homo sapiens
ccaagcgcccacgccggaccgggcagaaacgacacgggga

SEQ ID NO: 46999 - RNA, 58 nt, Homo sapiens
caggccaacagccaacacagcacaacaacagcaacggaggcgggaccggaacaggcac

SEQ ID NO: 47000 - RNA, 81 nt, Homo sapiens
ccagaaaggcgcaggccaagcgcccacgccggaccgggcagaggccaacggaacccaaaggaaagacaccaaggacagaca

SEQ ID NO: 47001 - RNA, 75 nt, Homo sapiens
ggcagacgcagaccagggccacagagcaaccaaaaaccggccgcaggcacaaaagaagacgggaaaagggccaaa

SEQ ID NO: 47002 - RNA, 77 nt, Homo sapiens
cccacaggcagacaggaaaaccaggcagggacacaacaggcagaaaaaaagcacaaaaccgccggccggaaaacaga

SEQ ID NO: 47003 - RNA, 77 nt, Homo sapiens
aaacaagagaccacagaaggacaccagaggaccagaacccacgagaaacagacgagccaaccagaccccaggagcca

SEQ ID NO: 47004 - RNA, 79 nt, Homo sapiens
ggccccgagccccgggaccgcggagcggagccggccgacgcgggcgcgagggcagaaccgggcggaccggggcaaggag

SEQ ID NO: 47005 - RNA, 69 nt, Homo sapiens
accaaagcacccgaaagaaagacccccaggcaaaccgccccgcagcaccacccggcccggcaaccagga

SEQ ID NO: 47006 - RNA, 84 nt, Homo sapiens
caggcgcgaggaacccaccgccgcccccaccgccagcccggccgcgagcgcggccgcaggagcgaggaagaaaggacccggcag

SEQ ID NO: 47007 - RNA, 76 nt, Homo sapiens
gaagcaccccccaggcaggcggcagagagcagcgagaacaagccaaagacagaccgccagcgcagcccacaaagga

SEQ ID NO: 47008 - RNA, 80 nt, Homo sapiens
caggaaccccggccgccgaccagccccacgacgcggcaaaggacaggcacaaagccaaagcacaccgacagagaacccag

SEQ ID NO: 47009 - RNA, 70 nt, Homo sapiens
accgcccgcacgcacagcagcggacaggccgagccccacggggccacggcgccaccgagacagccgccca

SEQ ID NO: 47010 - RNA, 82 nt, Homo sapiens
cccgaccaagaggcagaagacgggggaacaaaaccagccaagcagaggagaaaaagacagcaccccagagccagaaccagag

SEQ ID NO: 47011 - RNA, 69 nt, Homo sapiens
agacgcccaagcaaaagagacaaggaggccaaggaccgcacaaccagggggccagcaggcgcgccaacc

SEQ ID NO: 47012 - RNA, 69 nt, Homo sapiens
cacgcgaacaacccacccagaccggggcccacagagcgaaaagaggagccggaacccgggaccaacacc

SEQ ID NO: 47013 - RNA, 66 nt, Homo sapiens
cgccgcgcgaggaaaggccgaggggccggagccacagagccaggacaaaaccaggcagaaccaaca

SEQ ID NO: 47014 - RNA, 72 nt, Homo sapiens
ggagagcaaacaacacgacgaggagccccgccacaccagcaggcgccaaacaccgggccagggcaacaagac

SEQ ID NO: 47015 - RNA, 80 nt, Homo sapiens
ccacccgagccccgccaccgggaggggcaggaaggaggcgaagcagagcacaagacccagaaaaaaaggagaaagaagag

SEQ ID NO: 47016 - RNA, 53 nt, Homo sapiens
gaaacccaaaaagcaaaaaacgcccacaccagaggcagaagagacaacacaga

SEQ ID NO: 47017 - RNA, 80 nt, Homo sapiens
agaggagcagcaggcacagcacgggcagagccagaccaaaaacggagcggcaaaccaccaagaacccaaaaaccggcaga

SEQ ID NO: 47018 - RNA, 64 nt, Homo sapiens
agcgagaccgcggcgaggaccggccgacgcccgccgcggccggggaacaggccacagccaggag

SEQ ID NO: 47019 - RNA, 86 nt, Homo sapiens
gccaaaccgcaggaaagccccgaaacgcggcgaccacagaaacaccggcgggcgggccgacgaggccagacaagaacaaggccgac

SEQ ID NO: 47020 - RNA, 69 nt, Homo sapiens
cagagcaggaccgacccagaagccggagaggcacacccagaagccacaggagaagcaagaggcggcccc

SEQ ID NO: 47021 - RNA, 74 nt, Homo sapiens
aaagacggaccaaaaacaggaggaagcccagggaacggcggcccgcaggagcaaaacaaaaccagcgacacacc

SEQ ID NO: 47022 - RNA, 52 nt, Homo sapiens
acaggccaaaggacaccagggaagaaccacaaggagccgcaaaacacaccag

SEQ ID NO: 47023 - RNA, 78 nt, Homo sapiens
acagagcggcggaaggcgggcgccagaggacaaggagaccaaagagaacaaccccgaagaagaagcaaccagcccaac

SEQ ID NO: 47024 - RNA, 56 nt, Homo sapiens
aaaacgcgaggacagagccacgggacagcagaccacagcccggcaggcccaaaaac

SEQ ID NO: 47025 - RNA, 78 nt, Homo sapiens
aaaggagagaaaagagcagaacgaagaaacccgcaggccggcacgggcaccaggcaccaggacccgccagcacaagga

SEQ ID NO: 47026 - RNA, 39 nt, Homo sapiens
aaacggaacccgcaccaagagagcaaggaagagacacgg

SEQ ID NO: 47027 - RNA, 60 nt, Homo sapiens
ggccccgcccccggccagccaacggacagcggagcacgagagaaggcggacaggagagcg

SEQ ID NO: 47028 - RNA, 71 nt, Homo sapiens
ggaaggaagcaaacaagaaaagccaacgccggggagacaaaggagagcggaacgccaggacaccgggagag

SEQ ID NO: 47029 - RNA, 72 nt, Homo sapiens
gccgaccggaacgaaggaaaaccagagacccagacacgcgaaggaacgaaaggccaaaaggcaaaagacgac

SEQ ID NO: 47030 - RNA, 74 nt, Homo sapiens
gaggaaacggcaagaccaaaaaacacaaaccaggcaacaggcagaaaaagaaccagcgaacgcagagcaagggc

SEQ ID NO: 47031 - RNA, 84 nt, Homo sapiens
gccccacaagaccacagcggccccagcgaccccccagaggccacgaacggagccgaaagccaccggcggaggcaaggcgcaacc

SEQ ID NO: 47032 - RNA, 83 nt, Homo sapiens
caggacagccagagaccgaacagagagaacaagagacgcagccgcacagagggacagagcgaagaaccccccaagaagacgaa

SEQ ID NO: 47033 - RNA, 75 nt, Homo sapiens
aagaaaccggaagaggacagcccacaaggacaaaagaagccaagggggcaacgccccgacaagggaccgggcggg

SEQ ID NO: 47034 - RNA, 82 nt, Homo sapiens
aaggggcccgaggaagcgcgggcggacgacagaggagccgaaccacccagacaaagaccaagaaaaagaccaagccaggaca

SEQ ID NO: 47035 - RNA, 62 nt, Homo sapiens
agagggacggaaccacaacaagaaggacagcaaaggagcagggcaagacccagagaaaggaa

SEQ ID NO: 47036 - RNA, 70 nt, Homo sapiens
aagaggaacgaaaggaaaagagacgcagacagacaacgaagagaggaaagaagcggaaaggagggagcac

SEQ ID NO: 47037 - RNA, 73 nt, Homo sapiens
aggagcggccgggagcccgccgcgcggagcgacgagagcgacaaacccagccaggggggggagacagagagag

SEQ ID NO: 47038 - RNA, 42 nt, Homo sapiens
caccccaagagcaccccagggcaagcaagcccacaagcggaa

SEQ ID NO: 47039 - RNA, 83 nt, Homo sapiens
cgcgccgccaccgcgaacaggagcccgacagaagacaggggagagccaccgacccaagagccaccccaaaccaaacaacagca

SEQ ID NO: 47040 - RNA, 72 nt, Homo sapiens
ggaaccgaccgcggcgcgccacccggccgcagcaaagaaacccagcggcggcagaaccagccggcacaaagc

SEQ ID NO: 47041 - RNA, 77 nt, Homo sapiens
ccaaaaggggaaagagaaaacggaccacaggcccaccaaccgggcaccgaccgcacgaggccggaaccaccgagagc

SEQ ID NO: 47042 - RNA, 71 nt, Homo sapiens
gaacgacgggggaagcagcagccaggaagcagcagcggagaaacagcaagaagagaaccgacagcacaagg

SEQ ID NO: 47043 - RNA, 79 nt, Homo sapiens
agaccgccgaaggcgggaagggaagcggccaaggcacggaggccgcgaacagagagaagggcgggagaaaccaaggaaa

SEQ ID NO: 47044 - RNA, 81 nt, Homo sapiens
aaggaagcaagccgaaagcaaccgggagacagggagccaaccaaccccagggaggcaaacagaaaagcggcacgggggcca

SEQ ID NO: 47045 - RNA, 79 nt, Homo sapiens
cgcgggcggaagacaggccacccagcggggagcacggcgagcagccaggccaggagaggaagaggagcaggacggaggg

SEQ ID NO: 47046 - RNA, 73 nt, Homo sapiens
ccgaggccacacaacgggcacccccgacgccccacccgcccacaacacccccagggagcgggggcggaaacac

SEQ ID NO: 47047 - RNA, 58 nt, Homo sapiens
ggcggcgggcggagacaggaccgcggcgagcaagagccagcgggccggcaccggcacg

SEQ ID NO: 47048 - RNA, 73 nt, Homo sapiens
gagcaggaagcacagaaccagaagcagacaaacccgacaggggagcccccgagcgcccgcgacgcagcacgga

SEQ ID NO: 47049 - RNA, 83 nt, Homo sapiens
cgcccaccgcccaccgagccggaaccacgaagcgcccgagacgccaccacgcgggggagcagagagccccacggacccaaacc

SEQ ID NO: 47050 - RNA, 75 nt, Homo sapiens
agccacgaccggggagcagcccggggcggagcgacaggggaccagaccaccgcgcaacagcaacgagcgaccacc

SEQ ID NO: 47051 - RNA, 40 nt, Homo sapiens
gagaacccacaggaaaagggaggcacagcgagaagggaag

SEQ ID NO: 47052 - RNA, 83 nt, Homo sapiens
cggaggcccggcaagcccgccgcacagcacacggagcgcgccggccccacgggaaacaaagacaggggaacccaccagccgga

SEQ ID NO: 47053 - RNA, 82 nt, Homo sapiens
cagggacgcgaaaaaacaggggcagaagaacaaggaagcggagaggcaagagacaacaggcacaaagagagaaggaacaccc

SEQ ID NO: 47054 - RNA, 51 nt, Homo sapiens
aaggcagccaagcccgggacggagccccacgcgagaacaacaagcggaccg

SEQ ID NO: 47055 - RNA, 67 nt, Homo sapiens
agcagacgaaagcggaagaagcagaaacggacggaagaaagagaccagaggggaaaccaaaaagggc

SEQ ID NO: 47056 - RNA, 78 nt, Homo sapiens
ggccacaaagcgaacaaagaaagggaagagacacaaggagacaagggcgggcccccggcagggacaaaggcgagacac

SEQ ID NO: 47057 - RNA, 78 nt, Homo sapiens
gaaaaacacgggcgccaggaacgcggaacagaaccaaaggcaggacagccagcaggggaaggcagcccaaaagggaga

SEQ ID NO: 47058 - RNA, 41 nt, Homo sapiens
gggcgggacccggcccgcgacggggggggccccagcccggc

SEQ ID NO: 47059 - RNA, 72 nt, Homo sapiens
gagcggacaaggacaacaggagagaagccgggaggcccgacaccagggcacccagggccagcggcccggcca

SEQ ID NO: 47060 - RNA, 68 nt, Homo sapiens
acaggccgcacaaaaagcggcccagacgcgcggaggcggaggagccccgccccggacaccaaagaaag

SEQ ID NO: 47061 - RNA, 81 nt, Homo sapiens
cggcccacaccggcagaacacagcagggcggaggaaaggcagggagaagaaccaacaacggaaaaccagcgggacaaggca

SEQ ID NO: 47062 - RNA, 72 nt, Homo sapiens
acaaagaccacccccagagggcgcgcccgacaccagaagaacccaccagagaagaaaagaagcgaaagcaag

SEQ ID NO: 47063 - RNA, 43 nt, Homo sapiens
agaaccaggaacaccacccgcagaccgaccaagaccacacaga

SEQ ID NO: 47064 - RNA, 78 nt, Homo sapiens
ggcaacggccaaccggcaagaccagacgggaacgggagacaagcgcagcgagacccggaggaaagcccagagggaagc

SEQ ID NO: 47065 - RNA, 83 nt, Homo sapiens
ccccacccgcccggcccgcggcgcgcaccgggcgcggacgcccccggaagcgcccccccaggacaagggccaaagaaccagga

SEQ ID NO: 47066 - RNA, 84 nt, Homo sapiens
gccagagagcaaaaaaagaaaacagaggaaaagaaacgagagacgacaaccacacaaaagagggacaacacaagccacagcgcc

SEQ ID NO: 47067 - RNA, 100 nt, Homo sapiens
cggcgccggcgaggaggcgcccggagcggccgccccagcggggcaccagccgaagccaggcaagcaagaaccaacaagaagaccccaagccacaacccga

SEQ ID NO: 47068 - RNA, 40 nt, Homo sapiens
aggagcgcgccggaccagcgcgagccggacgagcgggaga

SEQ ID NO: 47069 - RNA, 76 nt, Homo sapiens
cccgcggccgccgcgccccgagggcagccgcacgccaacaagggccgccgcgccgccaccgcaagagaaaagcggg

SEQ ID NO: 47070 - RNA, 57 nt, Homo sapiens
agaagaagcggaggcccagccagggcgggggagcgggaggagccagagcacaccgca

SEQ ID NO: 47071 - RNA, 74 nt, Homo sapiens
acccccggcacccggcagcgcaagaccccgcacggaagcagcaagcacaggcagcgcagagccagagaccacag

SEQ ID NO: 47072 - RNA, 60 nt, Homo sapiens
aaacaaaaggaaaccacaccaaccaagaagagccaggaacaggagacagcggagaaagag

SEQ ID NO: 47073 - RNA, 82 nt, Homo sapiens
cccgccccccgcgcccgccaccggccgccgcccggagccgggggggcgagcccgccgagagcgccaaggaggagacaacggg

SEQ ID NO: 47074 - RNA, 75 nt, Homo sapiens
cgcagcagcgcagcagaaggccaaaggcgaaggccaaagcagccaagggaagcagaaagaccacccaagaagacc

SEQ ID NO: 47075 - RNA, 88 nt, Homo sapiens
ccagggaacccggcaccgccccagacaccacgacagcgaggcagccagcagcagccaccagagcccaagagcacagccaaagggcggc

SEQ ID NO: 47076 - RNA, 79 nt, Homo sapiens
ccaggggacagcgaacagggaggagagacggcggcggaaaaccccaaaaggacaaaggaagggaggacaagggaaaaag

SEQ ID NO: 47077 - RNA, 74 nt, Homo sapiens
gagcgacccccacccagcccgagagcagacacggaagcagggcgagcgcgagcagccgggaacgaggccaacaa

SEQ ID NO: 47078 - RNA, 54 nt, Homo sapiens
aaggcgacgccagaggaggaaaggaagacaaggcgggaccaggacggaccaaca

SEQ ID NO: 47079 - RNA, 57 nt, Homo sapiens
aaacaagagacgcgaccaggacagagaggcagggaggcaggcaacaagcaaaagaag

SEQ ID NO: 47080 - RNA, 39 nt, Homo sapiens
gccacaagacaagcaacagacaagaagaagagcgccgag

SEQ ID NO: 47081 - RNA, 68 nt, Homo sapiens
acggacagcccacgggaacaagaggggacagaaagagggaggaaccgaaaggaaaccgaggacacaga

SEQ ID NO: 47082 - RNA, 80 nt, Homo sapiens
cccagcggccgccggcgaagaagggcggacgggcaagcaacgaagcagcagcgggacaagcgaggcagaccagaagagga

SEQ ID NO: 47083 - RNA, 53 nt, Homo sapiens
aaaaggccagggcccacgcaagccggaggcgccacggcgggggccaccgggcc

SEQ ID NO: 47084 - RNA, 94 nt, Homo sapiens
gaacgaagcgagcaaaggcgcggccaggggagcgcggagcaagagggacaggcggacaaggcaaaggggcagcggaaaacaaaccgcagagcgg

SEQ ID NO: 47085 - RNA, 72 nt, Homo sapiens
cgacacagcggcggaccccacaccaagggagcgagcacaaacgacacacgcaaaccacaaagcccagcaacc

SEQ ID NO: 47086 - RNA, 59 nt, Homo sapiens
aaaaaacaacccaacccggaaaaaaacgacgccccagggcaaaaggcacaaaaaacaag

SEQ ID NO: 47087 - RNA, 80 nt, Homo sapiens
gaaaacaccaccaagcagccaggcagacgggagcaggaaagccagggggacccagcacagagacaggaagggaaggggcg

SEQ ID NO: 47088 - RNA, 72 nt, Homo sapiens
gaaccgaacccacgaccacccagagacaggaggaccaaccgcaacggcagagagagaaggcacagaccaaag

SEQ ID NO: 47089 - RNA, 36 nt, Homo sapiens
aaaccccccaggaagcaggccggggccgccacgccg

SEQ ID NO: 47090 - RNA, 70 nt, Homo sapiens
acgcagggcgcccccgcaaggcgccaccggaagaaacgggaggggaggagccgggaaagacagcgccaag

SEQ ID NO: 47091 - RNA, 77 nt, Homo sapiens
cagaggcaaaaagcggaagaaaaggagcgcagcaggaggcacagcgaacagaaggccagacgggcgccagccacggg

SEQ ID NO: 47092 - RNA, 79 nt, Homo sapiens
cacacgacacacaacagggcccaccagggaggaagaggcaggcgcagcagagagagcagagccacacgcggacaaagaa

SEQ ID NO: 47093 - RNA, 69 nt, Homo sapiens
aggcgaaagccaacggcgaggacgcccaaccagaacaacagcgaccccaaggaagacaaggagaaccgc

SEQ ID NO: 47094 - RNA, 56 nt, Homo sapiens
cgcagggcgcccccgaccaaaggccaaaaaaaaccaacaacagggggaaaaaaaga

SEQ ID NO: 47095 - RNA, 67 nt, Homo sapiens
acaaaccagccgaaaagaagacgcaaggcccgggcaacccagggggcaggacgaccagcgggaggcc

SEQ ID NO: 47096 - RNA, 69 nt, Homo sapiens
gggacgaagcagcagggggagggcccacggcaacagaaaaacacggaaagaaccgggcgaaagaggacc

SEQ ID NO: 47097 - RNA, 71 nt, Homo sapiens
gagaacaggcccgaaaggcaaaaagggagcaaagaagccaaaggcgagcccagaagggaaaccaaaacgca

SEQ ID NO: 47098 - RNA, 89 nt, Homo sapiens
gcccgacccgggcgccccgccggcaccccgcgcggacaccagggcggaaaacaccccaaaagccaaaagggaaaggaaaagaccaacaa

SEQ ID NO: 47099 - RNA, 77 nt, Homo sapiens
accagcgcacgcaggagcgcagaccacaggaacacagaccaccaggagccagccggccaccaggaaaaaggaggaaa

SEQ ID NO: 47100 - RNA, 69 nt, Homo sapiens
cggcccgcagcccccgccggccgcccaacaccgaacaccggcgaaaaccacagagagcccaaacacgcc

SEQ ID NO: 47101 - RNA, 79 nt, Homo sapiens
aggaacaagaggaacgcccgcagaaaaagaggcccccccccccgcgacggagcacagcaagcgggagcaggcagaccaa

SEQ ID NO: 47102 - RNA, 72 nt, Homo sapiens
agcagggaccggagaagccgaccaggagacgcagagaaaggagcacaggggaggggaagcaacagggcgggg

SEQ ID NO: 47103 - RNA, 72 nt, Homo sapiens
aaaggcaccggaaagccaggaaaaacacacggggccaggacccccaggaccccacgacgagccagggggccc

SEQ ID NO: 47104 - RNA, 67 nt, Homo sapiens
gaagagagaccgacacccaagacaagacagcgcaaggcaggaacaagcagaaagcacgaacaacgag

SEQ ID NO: 47105 - RNA, 94 nt, Homo sapiens
gggacacaaacaccagagggaaaaagaccacagaaacaggagaaccggggcaagagacggcagacaaacacagccgagagaaggcaggcgacgg

SEQ ID NO: 47106 - RNA, 84 nt, Homo sapiens
gccaaaggaaagccacggccgagaagaaacagaaacagaaaggaggaagggaaccgagagaaaaggggacgccacggacaccgg

SEQ ID NO: 47107 - RNA, 80 nt, Homo sapiens
agcgcggcccagaccccgcaagagccaaaggccagcggagaacagccgagggaggggaggcccgcacgcccacagaggag

SEQ ID NO: 47108 - RNA, 62 nt, Homo sapiens
aacaagaccgaggcgaccaggggggaaagcgccccagggcagcgaaaccgggagaccgagga

SEQ ID NO: 47109 - RNA, 84 nt, Homo sapiens
agacaggaaggagaaaacgcggaggcagaaaagcccgacgacagccagaaaagcaggagagaaaagaagcaagacaagaaacaa

SEQ ID NO: 47110 - RNA, 82 nt, Homo sapiens
gcacaggaaccgcagacccggggcacaggccccgagccccggccccaaagacccaaaacagagacaccccccagcccccgcg

SEQ ID NO: 47111 - RNA, 86 nt, Homo sapiens
cggcccggcccggcccggccggcccggccccccaggccgcgggaacaacgggaaacaaaaagcgcagagcggccgcaacgcgagcc

SEQ ID NO: 47112 - RNA, 90 nt, Homo sapiens
aaagaaaaaggcgagacacaagcgaagacccagccagagaggaagccgccgcggagaggccggaaggaccacggaaaccccaccaagaca

SEQ ID NO: 47113 - RNA, 75 nt, Homo sapiens
cgagggaaagcacagcaggacaccaggaccggccgaagacaccccccccccggaccagaggagcgacccgagcgg

SEQ ID NO: 47114 - RNA, 52 nt, Homo sapiens
aaacccaccgagacggccacagacaacggaggagaaccagccaaaaaagggc

SEQ ID NO: 47115 - RNA, 75 nt, Homo sapiens
aagcccagcaaagccgacagcagaagaagcaccaagaaaagaaggaggccagcgggacacacaaagaaagacgaa

SEQ ID NO: 47116 - RNA, 76 nt, Homo sapiens
accgggcccaggcccaccccagcgaccggaagcgagcagcagcgccgccagaaggcgccacggccggaacgcacag

SEQ ID NO: 47117 - RNA, 77 nt, Homo sapiens
cggaggcggggggaccggcgggcgggcccagcccccggacacgggcggccggaaggcgaggccccgccagcccgccg

SEQ ID NO: 47118 - RNA, 70 nt, Homo sapiens
gaaagcaaacacaccccccccaaggagagagcggcacaaaaccccagccaggacaccgcgaccagcacca

SEQ ID NO: 47119 - RNA, 73 nt, Homo sapiens
gaacagcgcacgagcccccccccgaaagaaggagcaccccgaaacaaagaagcaggcgcaaacagccacaagg

SEQ ID NO: 47120 - RNA, 66 nt, Homo sapiens
caaaccagaggaagcccacacacgccagcagaccaccccgggagggagagaagagaggcagcaaag

SEQ ID NO: 47121 - RNA, 64 nt, Homo sapiens
agcagccgggccagggccagagcaaagcgagacaggaggggggccgcagcgcagggacacgacc

SEQ ID NO: 47122 - RNA, 81 nt, Homo sapiens
caaaaagcccgcaggggcgagggagcagagaccgggaggcagcaacccagaggccaccgccaagcaaaacaaaaccccaag

SEQ ID NO: 47123 - RNA, 85 nt, Homo sapiens
gagacggagcagagccgcgggcgccggagccgaggcgagcgccgcgcgcaccacgcacagagaagaagaaaaaaagagcacaaaa

SEQ ID NO: 47124 - RNA, 79 nt, Homo sapiens
gaaggggagacacaagggcacgaagggcgccgcgggcggacacgccagaggaggaggccggggaaggccgcgggggcag

SEQ ID NO: 47125 - RNA, 79 nt, Homo sapiens
agggggaagccaagcagaacaagacaagagcgccgcgagacagcagggagagcaaaggagcaggcgcggaacacgcgca

SEQ ID NO: 47126 - RNA, 72 nt, Homo sapiens
aaaaggaaccggccccggaaagcgcgcgcccggcccaggagaggacacccgaccgccagccccccgcgaaac

SEQ ID NO: 47127 - RNA, 48 nt, Homo sapiens
ccggcccaccaaaccccacaccgaaaacgagaaacgaaagagacacgg

SEQ ID NO: 47128 - RNA, 75 nt, Homo sapiens
agacccagcaaaagcgccacagggaaaggaggacaaaaggaaaaaaaaaaagggaagacagagaggcggggaaag

SEQ ID NO: 47129 - RNA, 82 nt, Homo sapiens
aacggggcggggccggggaacacacagcggaaacagagagcaaggagaagcgagaggcgcagaaagaggaccggccagagcg

SEQ ID NO: 47130 - RNA, 63 nt, Homo sapiens
accccagagcgacagcccgggacaccaagaaagaacagagaagaagaaggaggccgcggccag

SEQ ID NO: 47131 - RNA, 50 nt, Homo sapiens
ccgaaaagcgaaaagaaacagaggcgggcacaaaccgaagaggacaagga

SEQ ID NO: 47132 - RNA, 71 nt, Homo sapiens
ggagggaagagaccacacaggaaaacagccgaggaagcagggccaggaacccagaagcccgagagacgaga

SEQ ID NO: 47133 - RNA, 79 nt, Homo sapiens
cccccaagaaaggccagccgaagaaaagcgaaagggagacggcagacacaccaggcaaggcacccagcaggcgcacaag

SEQ ID NO: 47134 - RNA, 82 nt, Homo sapiens
gagaacccacgccccgggcccaccaaggagccgcggaccaggggccccggcccgggcaaaggcccaccggagcccagggacc

SEQ ID NO: 47135 - RNA, 72 nt, Homo sapiens
ggccacaggcgcaagcagggaccacgacggggcgaaaggaaaggaagcaagcaggacacggaaagcaacggg

SEQ ID NO: 47136 - RNA, 42 nt, Homo sapiens
accggaccagaccccaggaaagggggcccgcagggccaggag

SEQ ID NO: 47137 - RNA, 71 nt, Homo sapiens
gccggaccggagacggggccaacagggaccagaccaccacagcgccccgagagaccccggagaccaagcgg

SEQ ID NO: 47138 - RNA, 44 nt, Homo sapiens
gccgcacaaaaagcagagagggcagggagcggagcggagaggag

SEQ ID NO: 47139 - RNA, 79 nt, Homo sapiens
agaacgcccagccaaagaaacaagccgggaaagggacaagaagggcaaagccgaagaggaaccccagacaaagcaccaa

SEQ ID NO: 47140 - RNA, 90 nt, Homo sapiens
caaagaagaagaggagaggagacgggcagaagaagaaaagaggagaggaaagagaacagacagaagcgaaggggacagggggagaaccgc

SEQ ID NO: 47141 - RNA, 60 nt, Homo sapiens
aagaccagggcccgcagcggaagaggagcgccagggggggccgaagaagccagggggagg

SEQ ID NO: 47142 - RNA, 72 nt, Homo sapiens
gcacaccacggcccgggaggaggacgagcacgacccagagccaggagggaagaaagagcagagaagagacag

SEQ ID NO: 47143 - RNA, 81 nt, Homo sapiens
cagggggggacagacagggcaccgcaggcacgggggggccgaagaagccagggggaggaaagcagacagacccaccaagag

SEQ ID NO: 47144 - RNA, 84 nt, Homo sapiens
ccggaaggaaccgcccccaccgggaccgaccgcaaacaaggagagccacgagcagccgaggggcccacccgaaagagcccccca

SEQ ID NO: 47145 - RNA, 77 nt, Homo sapiens
gggaacggggggccaccggaagaaaaccagggggcggagggacaccgcccggcgcaacgacccagacagacggcacg

SEQ ID NO: 47146 - RNA, 105 nt, Homo sapiens
ccgcggcccgggccgcaccagagcgcccggcccacgacacaggaagaagacagggcaaggccagagaaggcgggagaaagacacgaaccacagaacgcaacagga

SEQ ID NO: 47147 - RNA, 81 nt, Homo sapiens
aggacagagcacaccaggaaaggccagccaccagcaggagcacgggaggacagcacacgcacaggagagggcgcaagaaga

SEQ ID NO: 47148 - RNA, 70 nt, Homo sapiens
ggcccgggagcacggacggcaaaggcgccaagcagaccagaccgccgacccagcggacgccaagaagaaa

SEQ ID NO: 47149 - RNA, 77 nt, Homo sapiens
ggcggaggagcggggcccggccacagcgaccccggcggcgcgaagccggccggagacaggcaggcggaccgaagagc

SEQ ID NO: 47150 - RNA, 75 nt, Homo sapiens
gacaggaagaggagggggagccagagcaacagaaacaacaaggaccaagcacccaaaaaccgagaagaaaagaaa

SEQ ID NO: 47151 - RNA, 76 nt, Homo sapiens
agaacccacacaaggacaaggcccacgaccacggaacccaccgggcagcagagaggcgggggaagccgcacggaac

SEQ ID NO: 47152 - RNA, 87 nt, Homo sapiens
ccaagcccgcggagcacccgccggccagagaagagaacaggggcccaaccacccaggagaaaaggccagaccaagcgcaaggcaggc

SEQ ID NO: 47153 - RNA, 78 nt, Homo sapiens
cggccgccgaccgcggccccgccggccgccggccgcgcgggggaaagccaacaggcagaccagagacagcgccacgca

SEQ ID NO: 47154 - RNA, 40 nt, Homo sapiens
cccaacccaccggggggagaggcaccagcaacagaccaac

SEQ ID NO: 47155 - RNA, 87 nt, Homo sapiens
ccagcacgacggcaaagggaccaggccgaccgggcggcagcgagagggcgcaaagacccgaaccccacacgacggccgcaaggccaa

SEQ ID NO: 47156 - RNA, 76 nt, Homo sapiens
caggaagcgccgagcagcagccccgcgggcgggaggcaagcaccaaggaggagacggacaagagacagggcagcca

SEQ ID NO: 47157 - RNA, 69 nt, Homo sapiens
cgcagggagaaaagccgccaaaaagcgggcaagaaaaagggccaaggagggcaccccgagaaacgaaga

SEQ ID NO: 47158 - RNA, 73 nt, Homo sapiens
aacgccggcgcccgacagccaaaggcagagggaaaaaggccaagagcaaaagccaagaacaaaaacgggcaca

SEQ ID NO: 47159 - RNA, 84 nt, Homo sapiens
ggcacgaacagagccgggagcaagaagaacacccagagaccgaggccaaaagaaaggaagaaaacccccaaaaagccaaaaggc

SEQ ID NO: 47160 - RNA, 61 nt, Homo sapiens
gagggagagaaaagaagaggaccagaaaccccacagcggagaaaaaggagaaacccccaag

SEQ ID NO: 47161 - RNA, 88 nt, Homo sapiens
ccaaggccaagagcaaggcccggcggaggaggaggaggagggcaccaggggcaagacagcccccagcagcaacagcagcagcaagagg

SEQ ID NO: 47162 - RNA, 55 nt, Homo sapiens
ggacccccgcccgaaccgagggaacaggggcgacgagaggccaggggccggaacc

SEQ ID NO: 47163 - RNA, 33 nt, Homo sapiens
acacacacaccgcaaggaggacgcggccacaca

SEQ ID NO: 47164 - RNA, 96 nt, Homo sapiens
cacaaagggagggggcagcccgcaggagcaagcgcagcaccaccaacaggaaacacaaagaagacaccagaagggccagcaccacgacaacacggc

SEQ ID NO: 47165 - RNA, 70 nt, Homo sapiens
ggagcagccaagggacggacccgacagcaccagagaaaacaccagaccaaaagaaagagaggaacaaaag

SEQ ID NO: 47166 - RNA, 72 nt, Homo sapiens
gagaacccgaccccgcggagacagcgagacccgccaggagcaaaggggcgaaggaacaaaagacgcaagaaa

SEQ ID NO: 47167 - RNA, 86 nt, Homo sapiens
aagcagagacaccaggacagaaaagacaggcgccaggagcacagaagagcgaggagggggccggcgggggaccaggagggggcaga

SEQ ID NO: 47168 - RNA, 76 nt, Homo sapiens
caagagcagcgaagcggaagccagagcgccgcaagggagccgacccacccaccacaaaaagaggagaaacagaaaa

SEQ ID NO: 47169 - RNA, 95 nt, Homo sapiens
cacggccaccgcccagcgggagaggagcccaccaggacgaccgcgccgcccagcacgccagggaaagaccaaaccccaaagcaggccaaacccag

SEQ ID NO: 47170 - RNA, 53 nt, Homo sapiens
gcgggaacgcagccaccggaaaggaagggcaggagggaacccggcgcaaccgc

SEQ ID NO: 47171 - RNA, 82 nt, Homo sapiens
cgccgccaagcccggcccggcccgacaccgcgggccgccagacgggaaggccagagacccagagcagcagcgaagagaaggc

SEQ ID NO: 47172 - RNA, 70 nt, Homo sapiens
cgaggaagagcccgccgaaggacagaagacaggagccgacgcagagcagggccggcaacagaggaaaaaa

SEQ ID NO: 47173 - RNA, 74 nt, Homo sapiens
ggaccagcagagacccacagaccaggcacccgcaggagaggccccaacaagcgcagaagagaagcacgaaaacg

SEQ ID NO: 47174 - RNA, 72 nt, Homo sapiens
aaggagagccgaccaagcgaccaagcaggagcaccacgacacggaacccaacccgcaaccggggcaaaaggg

SEQ ID NO: 47175 - RNA, 95 nt, Homo sapiens
caaagaagaacgaaggaaagacacaagagaccacaagaccgaccaggaaaagagagaaccccacccaagagacaaagaccaacgagccaccacag

SEQ ID NO: 47176 - RNA, 41 nt, Homo sapiens
ccccagcccaagccgcgcccggaggaagccagcccgagcag

SEQ ID NO: 47177 - RNA, 82 nt, Homo sapiens
agaaaccgccgaccaagagcgaagcgacggcaaaagcagaccggaaaacccaccggcaagaccacacccgaggggagcccag

SEQ ID NO: 47178 - RNA, 78 nt, Homo sapiens
gggcagacagcacaaccagcgggagcaccgcggacgccccagggcacaccgcgcaccagcgagaggaggagaaccggc

SEQ ID NO: 47179 - RNA, 78 nt, Homo sapiens
aagcgaaaccggggccaagagaaagaagcagccacaagaggacacaacccgagaggaacgcgaaagaaggaaacaaag

SEQ ID NO: 47180 - RNA, 66 nt, Homo sapiens
gagcgagcagcagaagaaagaacccgagagcccacgacacgaccaaaggaccagaacagagaagaa

SEQ ID NO: 47181 - RNA, 72 nt, Homo sapiens
caccccgacaacccagaaacaggggagaccacaggccagggggcaaaaagacaggaaccagagaggcgagac

SEQ ID NO: 47182 - RNA, 71 nt, Homo sapiens
cgaaggacccaaaaaggccgaagacaagccccggcacaggaggagagaaaccagccgaggcagccgaacac

SEQ ID NO: 47183 - RNA, 73 nt, Homo sapiens
cagacaggagaacaggagaacgcagaagaggagaccgaacagccaagagccgccgggggggaaccagcccacc

SEQ ID NO: 47184 - RNA, 82 nt, Homo sapiens
acgcgaggaccggcggaccaagaaagaggggggcgacacgccaacagggcgccccacgcccccaccaaagcccagaaggagc

SEQ ID NO: 47185 - RNA, 87 nt, Homo sapiens
cgcaccggcgcgaggagcagggagccccaaagagccaggaacggacaggacagggccggggaccgggacaacacccgaccgcacagg

SEQ ID NO: 47186 - RNA, 62 nt, Homo sapiens
gcacgccaaggaaacagggagccagaaacgagcagacgaaaagaaaacgcaggaagaaccga

SEQ ID NO: 47187 - RNA, 57 nt, Homo sapiens
gagaacgcaggaaccggcccacaggaaggagggccccggagcagccacaccaccgag

SEQ ID NO: 47188 - RNA, 105 nt, Homo sapiens
cgcgccccagcggacccaaggacaaccggagaaggagcggaggccgagcggccagcgaaagggaagcaaaggaagaggacccaaccgagcgcccggcccgaaagc

SEQ ID NO: 47189 - RNA, 71 nt, Homo sapiens
gaacggagccccaaccgcgcgccgggacgggagaaagaacagacaagccgcaagaaccggggaagggagag

SEQ ID NO: 47190 - RNA, 56 nt, Homo sapiens
gccgggggagcggggccccacacccccccgggggggcggagcggaggcagacacac

SEQ ID NO: 47191 - RNA, 75 nt, Homo sapiens
gggaagccagaagaggaggaaaaggccacgggaggaagacccaaaagcgagaaaagccgacgcaagagggaaagc

SEQ ID NO: 47192 - RNA, 37 nt, Homo sapiens
cccaaagggagaagaggagagacgaccgcccccgggc

SEQ ID NO: 47193 - RNA, 69 nt, Homo sapiens
cagaccacccaaaggagaaacaccaaaaggaaccgcaggagacgggacgcgccagcccacaagacacca

SEQ ID NO: 47194 - RNA, 55 nt, Homo sapiens
gaagccagcccccaggcggaacgcccgccccgcagagagggagaaaagaagcagc

SEQ ID NO: 47195 - RNA, 66 nt, Homo sapiens
ccagaggaacgaaaagacccagaggaacaacccacgcaagcaagaaacgaacgacaagaacccgaa

SEQ ID NO: 47196 - RNA, 75 nt, Homo sapiens
agcgagccggaaccggacaaagccgcgaaaccaagggacacagagagggcaacaaggacccagacaaggcggggc

SEQ ID NO: 47197 - RNA, 70 nt, Homo sapiens
cagaggaaacaccaggcgcggcggcccagccccgacacagggacagggaggaaaaccagagagaaggaga

SEQ ID NO: 47198 - RNA, 73 nt, Homo sapiens
ggcgggcgggccccccggcaacgcggcaagccaaagcgccacagagagaagaagaaggaggccgcggccagaa

SEQ ID NO: 47199 - RNA, 61 nt, Homo sapiens
caaaaaggcgacgcaaccaagcaccgaaacagcagggcgcgagcccgggcggaggcggcag

SEQ ID NO: 47200 - RNA, 91 nt, Homo sapiens
ccgggggccgccgggacccggccaccagcaagccggagaaccggggcaagagacggcagacaaacacagccgagagaaggcaggcgacggg

SEQ ID NO: 47201 - RNA, 84 nt, Homo sapiens
acccaaccgaggaaaagaagagagacacgaggcccgaggaacagcagcaccggggacggacggggccaacaacgcagcggaagg

SEQ ID NO: 47202 - RNA, 85 nt, Homo sapiens
gcccggccgcggccagcggagcccgggcggggcaggagccgagcgacaccaagcgacacagagaggaggacaacccagagccccc

SEQ ID NO: 47203 - RNA, 51 nt, Homo sapiens
gggccagagccggacgacccaagcgaacgaggcgcgacacaccagcggagc

SEQ ID NO: 47204 - RNA, 72 nt, Homo sapiens
gccaccccccgaggaaaaaacagcggaaagacccaggggagcagagcacgcagcagcgcagcaagcgcagaa

SEQ ID NO: 47205 - RNA, 84 nt, Homo sapiens
cccgccaaccaacacgacggaaacgcaccggaacaggaccgagccaagaccgaggaagggggccaggcgaccagaccggaccca

SEQ ID NO: 47206 - RNA, 74 nt, Homo sapiens
ggcagccggagcaacaggcgagccaccaaggagaaagccagaagacaggaacgggagacacacggaaagaagcg

SEQ ID NO: 47207 - RNA, 65 nt, Homo sapiens
gggcgcccagccagggaggacccgcacgagggccgggagaagccccaggcagccaccaacaccac

SEQ ID NO: 47208 - RNA, 76 nt, Homo sapiens
agacaaccaaccccaccgaggaggacagagacgcaaggagcaggcaacaaggacccaacagggcagccacaccgcc

SEQ ID NO: 47209 - RNA, 81 nt, Homo sapiens
agcccgagcgggagcggagaggagggccgacccccccgccggggagggcccagcgcaccgacagcacgagccagggagccg

SEQ ID NO: 47210 - RNA, 55 nt, Homo sapiens
gaagacaacaggaaggaaaacagcagcagggacgcaccaaaacggacagccgaag

SEQ ID NO: 47211 - RNA, 52 nt, Homo sapiens
cacccaagcacggaccaaacagccgaaccagggagcagcgacaggagccagc

SEQ ID NO: 47212 - RNA, 68 nt, Homo sapiens
cccagaaacaggcaagcgacaacaagagagacagagccggccgaagcagagcacgcagacgacccagg

SEQ ID NO: 47213 - RNA, 79 nt, Homo sapiens
cggagcgcggagcccggccccgcaccaggaggaggacgacagcacgcgagacgacgggaccgaaggaccccgccagaga

SEQ ID NO: 47214 - RNA, 77 nt, Homo sapiens
gagagagggggaccgggagggaaagaaaacaacccgccgcagccgcagcccagaggcaggcgaaccgcagaagcgcc

SEQ ID NO: 47215 - RNA, 80 nt, Homo sapiens
caaccccaacccggagagcggcgaggccaaaacagaagaggcaaagcccagccacagcagcagcccagcagcaaacaacc

SEQ ID NO: 47216 - RNA, 36 nt, Homo sapiens
agcccgggcaccacagaaaaggagacagcagacgac

SEQ ID NO: 47217 - RNA, 74 nt, Homo sapiens
acgaaccaaggaaccagcaaaggcgaggccagaggacaggccgagcgccggccggaacacgggcagagaggcca

SEQ ID NO: 47218 - RNA, 82 nt, Homo sapiens
caggggagccgcccgcacagcggcccggggaaggaagcggagaacgcgggcaggccggaggaacagggaagggggcaaccaa

SEQ ID NO: 47219 - RNA, 79 nt, Homo sapiens
aagagaaccagacagcccacagggagcgaagcacagaaagcaacagaggaagaaacggcgaggaaagagaggagccccg

SEQ ID NO: 47220 - RNA, 58 nt, Homo sapiens
cgcacgcgcgcccgaagggcaacgccgcccaacgaaggaagggaacacggacgacgag

SEQ ID NO: 47221 - RNA, 56 nt, Homo sapiens
caacaccagggaagagacacacccagggccgaaccacagcagcgcagcaagaaggg

SEQ ID NO: 47222 - RNA, 68 nt, Homo sapiens
cagaagaggagagagagcaagagaggaagaagaacgacccgcccggggcagcaggccaacaagcccac

SEQ ID NO: 47223 - RNA, 76 nt, Homo sapiens
cccaaagacacgaaaaccaggaccgagaaggcgcagcggaaaggagcaaggccgggccgcagggaagcccggaagc

SEQ ID NO: 47224 - RNA, 70 nt, Homo sapiens
cagagacgggcgccgcaccaggagcgaagagcgccgacaaggggacggaccccggcacccaaacgcgaca

SEQ ID NO: 47225 - RNA, 85 nt, Homo sapiens
gaagagcgagagacaccacacggccaacaaccaggcaggcacagagagcgggaccagaaacccggaggaaagcccagagggaagc

SEQ ID NO: 47226 - RNA, 78 nt, Homo sapiens
ggaagagaagcagagcagcccccgcagccagagccaggagagacgaaccgagacgcaaagacgccaaaagcagaggaa

SEQ ID NO: 47227 - RNA, 71 nt, Homo sapiens
agaggggagaacagccagcgaacagccggaggcaccacacccagaccaccaaaacaaagggccaggaagaa

SEQ ID NO: 47228 - RNA, 73 nt, Homo sapiens
gagccaagacggagaaacaagaacgaaagcaggccgagccaggaccccaccaccacgggccgccccagaggga

SEQ ID NO: 47229 - RNA, 68 nt, Homo sapiens
aaaagcaagcaaaaacagggaaggccaccagcccagaaaagagaagaggggcagacccgaggcgagcg

SEQ ID NO: 47230 - RNA, 76 nt, Homo sapiens
gcagagccccccagcagacgagcccagaccgacagcagcgaaagaccagcagagaagaccagaaaggggacagcga

SEQ ID NO: 47231 - RNA, 78 nt, Homo sapiens
aaagcgaggccagagaaagagaagcggcacccccaggaagcgcgggcagcagcggagaccgagcagcagggaaggaaa

SEQ ID NO: 47232 - RNA, 51 nt, Homo sapiens
ccgagccagggaggccggggggggcacagagccccggaagacagcccccag

SEQ ID NO: 47233 - RNA, 73 nt, Homo sapiens
ccgccgacccggaagaccgccgccgaagcggaagcaggaggccagcgccaaaaaacggggcgagagggcggga

SEQ ID NO: 47234 - RNA, 56 nt, Homo sapiens
caaggaccggcggccacacccgccaggcacgggaggagcagccccagagcgcacac

SEQ ID NO: 47235 - RNA, 83 nt, Homo sapiens
cgcggagcccggagcggggcgacgaggcgagcgggggccgggcagcggaggcacccaccacgggccaggcgggccagaggcaa

SEQ ID NO: 47236 - RNA, 83 nt, Homo sapiens
cggagacaaggcagcccgggccgggacgccgggccgcaggagcagcgacggacccagagccagggcggccccggccccaaccc

SEQ ID NO: 47237 - RNA, 55 nt, Homo sapiens
cgcagagggacgaaagaagcgcagcggaggaaggcgaggggagggacgcgcacaa

SEQ ID NO: 47238 - RNA, 79 nt, Homo sapiens
cacacgaaaggcaccccggagagccggggaaggaaaccaaaccccccaaaggcccaggacaggacgaagcccccgcggg

SEQ ID NO: 47239 - RNA, 76 nt, Homo sapiens
caagccccagagccaaaaggccggaagaaacgcggaccgcggagggccggagagcgggacccagagcggaaacaca

SEQ ID NO: 47240 - RNA, 69 nt, Homo sapiens
cccaaacccggaaacccagcggcccagccggggacaagagaaaaaaagggcgggcgaacaaaaagagca

SEQ ID NO: 47241 - RNA, 69 nt, Homo sapiens
cggaccgggggaaacaaaaacgcacacaacgacccagcaaaccagagaccggaaacgagagaaacgaag

SEQ ID NO: 47242 - RNA, 76 nt, Homo sapiens
gcagaaagccgccgaaggcggccaagccggggggggcacagagccccggaagacagcccccagcgaccagacccag

SEQ ID NO: 47243 - RNA, 78 nt, Homo sapiens
gcgcggagcgggcagccgccgccaccccgcggccgcacccccgccccagagccagccgccgcgccaagaaacgcgcgg

SEQ ID NO: 47244 - RNA, 62 nt, Homo sapiens
gagggacacacccaagcacggaccaaagccgaacccgaaagagcgagaaagcacgagaacgg

SEQ ID NO: 47245 - RNA, 69 nt, Homo sapiens
agcccagagacacggggggaacgacgaacagggcaaaccgcaggcacaacacaagcaccaggacaaaag

SEQ ID NO: 47246 - RNA, 75 nt, Homo sapiens
gaggcgcagcgccaagagaaggaaaaagaacagaggccaacccgacaagaggaccaaggccaccagagaaggaag

SEQ ID NO: 47247 - RNA, 65 nt, Homo sapiens
aaaggcaacggcagcagcagagacagggaacagcaaagagcagaaaaacaccgaaaaagcgcgaa

SEQ ID NO: 47248 - RNA, 73 nt, Homo sapiens
agcggaccgagagcgcgaaacgcacgagaaggagagaagagacccacgcgagaaccaggcgcgaacgaagaaa

SEQ ID NO: 47249 - RNA, 74 nt, Homo sapiens
ccggcgaggaggcgcccggagcggccgccccagcgaacagagcaacaccagccagccgccagggacaagggaca

SEQ ID NO: 47250 - RNA, 76 nt, Homo sapiens
agaagaagaaaaagagcaaagaaagaagagaaaaagagaagagaagaaacccagcgaaggagagacaacacagacg

SEQ ID NO: 47251 - RNA, 75 nt, Homo sapiens
cgcccaccccgacccgcccaggccgcagggaagcaaacccgcccagcccggcgcgcccagcccagcgccggaccg

SEQ ID NO: 47252 - RNA, 98 nt, Homo sapiens
gaagcaaacccaagcaaagaccagcgccggaacaccaccgccaggccaggaaggaggacagggccaccagaagaccaggagccgggaacggagaccag

SEQ ID NO: 47253 - RNA, 81 nt, Homo sapiens
gcagcccgggggccccaggggagcggcgcggaaccccaggcccagcaggagaccggaaaccgagagaaacgaagacgaaga

SEQ ID NO: 47254 - RNA, 71 nt, Homo sapiens
ggagaaggaccaagaaccagaggaggagagaaagaaagccagcgcaacgagagaaccagcagaaaagaagc

SEQ ID NO: 47255 - RNA, 71 nt, Homo sapiens
acccccaaagagcgcagaaacgacccacacgaggagaagcaaaaagccacgagggacacaaggccagcagg

SEQ ID NO: 47256 - RNA, 87 nt, Homo sapiens
cgcaccaagccgcccacacgccaaccggccagaggacgagggaggcagggcagcaccagagcaaaccaagacccccccccccaccaa

SEQ ID NO: 47257 - RNA, 82 nt, Homo sapiens
gaggcccaggaacgggccaaagaccaggagagacgagcagcccagggagcgggagacaggaagcgccacgcagagagcaagg

SEQ ID NO: 47258 - RNA, 56 nt, Homo sapiens
caaaaccagaagaaaacgggagccaaacccacgaaggcaagcaaaaacagcaagag

SEQ ID NO: 47259 - RNA, 65 nt, Homo sapiens
agcacccgcagacggggggaggcgggcaaggaacaggcgagaaacagagcagggacaaggaaggg

SEQ ID NO: 47260 - RNA, 70 nt, Homo sapiens
ggaacaggccaagagagccgaacccaccgagccagggagaaacgggagaaggccacacggcacagacaga

SEQ ID NO: 47261 - RNA, 76 nt, Homo sapiens
cggcacgaggccggccccgacggcccagcggggcccagcgaagagcgaagggggggaggagggacaacacacaacg

SEQ ID NO: 47262 - RNA, 74 nt, Homo sapiens
cgcgggcggaccgacggagacggaaagccgggacaggagagcagggccagagaccggacggaaggagcgggggg

SEQ ID NO: 47263 - RNA, 67 nt, Homo sapiens
aagaaacaccaccaacaaacggcagcaacacgcaaccccccgacccccaaaaaggccgaccgaaaca

SEQ ID NO: 47264 - RNA, 81 nt, Homo sapiens
gaccacagacccccggcacaccagggggcgggacaaccagccccgagacacggacgcagaaagagcacgaggcgagcgggg

SEQ ID NO: 47265 - RNA, 64 nt, Homo sapiens
aaacggcgcggcagaaaaaccagcccggcgcaggccacaggccaacgacaacgacaagcgacag

SEQ ID NO: 47266 - RNA, 69 nt, Homo sapiens
cgaaagcaggacggaggagcgaccaccgacagggaggccgcacagaggaggagcaccaaaccgagggag

SEQ ID NO: 47267 - RNA, 78 nt, Homo sapiens
agagcccgggaacgggagaaaaacagcacacaggaggaagagcaagcaggcccgagggacaaagaaggcagaccagcg

SEQ ID NO: 47268 - RNA, 80 nt, Homo sapiens
caaagaagagaccggacaagcagacgacacccgaggaggcgcagacaaagaaggagacacaaaccagacaacaaggcaaa

SEQ ID NO: 47269 - RNA, 68 nt, Homo sapiens
ccgacgcccgccggcacgaagccgagccaaagaaccagggaaaccagaaggcacgacggccgaacaga

SEQ ID NO: 47270 - RNA, 83 nt, Homo sapiens
ccccgccgagcaccgaggggaagcgaaccagcgaaaaagaccaagaaacgacaacgcgaggcgccccgacgggagggagccca

SEQ ID NO: 47271 - RNA, 73 nt, Homo sapiens
gagcccggccgccagaccacagcacagccgggaaggggagccaccagccccccgcccaggggcacgggcacag

SEQ ID NO: 47272 - RNA, 62 nt, Homo sapiens
acgggaacagaaagaaaagccgaaagagcgggagagcacaccgggacagccagccaacagcc

SEQ ID NO: 47273 - RNA, 79 nt, Homo sapiens
gccccaagcggaaagcgcacggggaaaacaaggggacccgggaagaggcgagaaaggcgcacaccaagcggcgcacagg

SEQ ID NO: 47274 - RNA, 109 nt, Homo sapiens
ccggaagcaccccggcggccgcggaagcggggcgcacaccaccggacaaccgacaaaagagcaggacgggcccaaaaccaacgaaacaaacgaacaaccaagcaagccc

SEQ ID NO: 47275 - RNA, 76 nt, Homo sapiens
agagcgaagcgcagaagcccgaagaaaacagcgggaagagacagccaagaccaaaacacgcgacgagagcaggaca

SEQ ID NO: 47276 - RNA, 85 nt, Homo sapiens
cgccgaacaccaagcgccgcacaagcaggaaaaaccagccgcaagaacggcacacgcgagaacaaaccccaccagaaaccgccaa

SEQ ID NO: 47277 - RNA, 81 nt, Homo sapiens
ccgcgggcaccgaccgcgcccggaggaaggagcaccaccacaagcccccagaaacccacaaagccccgaggggcagggagc

SEQ ID NO: 47278 - RNA, 74 nt, Homo sapiens
acaaaaaagcaaggcaggggccccaaaaccggaaaggacgcgaggacagggccccacaccaggacaccaacagg

SEQ ID NO: 47279 - RNA, 65 nt, Homo sapiens
cagggcgaccgcgaggggccgagaaggagggcccaagggggcaaacgaccccaagaccacagaga

SEQ ID NO: 47280 - RNA, 71 nt, Homo sapiens
gcccaacgccagagcgcaccaggcgaaggggcgccgaaccgagcccgaagggaagggccggcgggccaaca

SEQ ID NO: 47281 - RNA, 76 nt, Homo sapiens
ccacacaggggaacacagccaacgaggacacggaggcaaggagagaagacgaggcgggccaccacggagaaaaccc

SEQ ID NO: 47282 - RNA, 62 nt, Homo sapiens
gcaggaaccaccaggacagagagcaagacccagagaaccccggaagaagagaaacgacaggc

SEQ ID NO: 47283 - RNA, 39 nt, Homo sapiens
cccaagagcgggacacaggcggggggcgcgccgagccca

SEQ ID NO: 47284 - RNA, 75 nt, Homo sapiens
cagcgccgagcccaggcaagagcccgcgagaaggcaacaccgagcgccaaagcaaaagaagaacaccacgggacc

SEQ ID NO: 47285 - RNA, 62 nt, Homo sapiens
cagaacagaacccaaaagccgacaaccccagaaacagaagaagacacaccgagccgcagagc

SEQ ID NO: 47286 - RNA, 59 nt, Homo sapiens
caggcacccagggaagagcgggccaacagacgaaggagacgcaggagggagagcagcca

SEQ ID NO: 47287 - RNA, 69 nt, Homo sapiens
gccgagaccaaaacaccccaacagacacacacacgggcgacgcagcacgacagccgaaggagaggaggc

SEQ ID NO: 47288 - RNA, 72 nt, Homo sapiens
gcgggccgggcaacacgcagccgagcgggaggaaggaacggcccgggcccggaggcagcagacggcagaagg

SEQ ID NO: 47289 - RNA, 72 nt, Homo sapiens
cggggaacagggagcgcccggcgcacagcgccagcagaagaaggaagcaagagaagaaccagccggggagcc

SEQ ID NO: 47290 - RNA, 81 nt, Homo sapiens
ggggagccgccacagaggaaccagccagagccaccgccagcccagaccaacacccgcagccacgccacaccagggagccca

SEQ ID NO: 47291 - RNA, 78 nt, Homo sapiens
acgcaagcacaagacccagagcagccgggaagccgccgcccgccagcggacccgcggcaccgccccgcgcgcgcccgg

SEQ ID NO: 47292 - RNA, 91 nt, Homo sapiens
agagagccgcagccgccagggacgggggccaccggacaggccgccaggcacagagaaggcaaacgggagggcgaggacaccaagagcagcg

SEQ ID NO: 47293 - RNA, 54 nt, Homo sapiens
gggggacgcacgcagcacgggcgagaagcagaaagggccgccaaaacagggaga

SEQ ID NO: 47294 - RNA, 41 nt, Homo sapiens
aaaaagcggacaaagagagagacacagcaagaaggccccac

SEQ ID NO: 47295 - RNA, 84 nt, Homo sapiens
cggggggacgcggggcgggccggagccgccgagggccccgcacccgggcgcgggagcagaagacagagggaggagggccacgga

SEQ ID NO: 47296 - RNA, 62 nt, Homo sapiens
gcgacccgaggaggaaggcccgcgggcccaaggaccgcgaggaagaggaggacgcagcagag

SEQ ID NO: 47297 - RNA, 56 nt, Homo sapiens
gcgcgagcacgccggagccaacacgccaaggcccaagcgggggcgagaggaaaaaa

SEQ ID NO: 47298 - RNA, 59 nt, Homo sapiens
aaaaaagagaagaacacagcccgggacagaggaaaaccagcaggaaaaagacacaccag

SEQ ID NO: 47299 - RNA, 79 nt, Homo sapiens
ccggggggagcggcggccacggcaccggcggggggcacgaggaaagcccgggcaccagccgagagcccgaaagaagcga

SEQ ID NO: 47300 - RNA, 76 nt, Homo sapiens
gccggacccgcccagcagaagaagagaggagggagaacacagaaaccggccccaggaccagaacagagaagaaagc

SEQ ID NO: 47301 - RNA, 73 nt, Homo sapiens
ggacaccgacggcgacaaacaagaaaaaacagaccggcggggggacaagggaaaacaacagggaggaaaaagg

SEQ ID NO: 47302 - RNA, 55 nt, Homo sapiens
agccaagcaggaccacccaccagccaccagagacagggaacagcaaagagcagaa

SEQ ID NO: 47303 - RNA, 60 nt, Homo sapiens
ggagggagaacacagaaaccggccccagacgacgcaagaacagccaacacagaagacacc

SEQ ID NO: 47304 - RNA, 71 nt, Homo sapiens
agaccacacacaccacgaggacacccgagcagcaggaacaggccccaaaagaagaagggcaaggcgagcga

SEQ ID NO: 47305 - RNA, 78 nt, Homo sapiens
cagacaagcggaaaaacagaaccacaggaccaaaacagggcagaagaagcgcccaagaagacaagaagaggaggaagc

SEQ ID NO: 47306 - RNA, 83 nt, Homo sapiens
cgcccgccgaggacgaaagaaaggggaggagaagacaagcagacccaccgaagaccgcgcaggagcagcaaagacacaagaag

SEQ ID NO: 47307 - RNA, 70 nt, Homo sapiens
gcaaacggaccagaccgaccaccaaaaaaaaccgaagcccccacaagcaaaaaggaagaacaacagacgg

SEQ ID NO: 47308 - RNA, 74 nt, Homo sapiens
agccaagccaggagcaggaggaaggggagaagaaaaagcagcaaaagagaagcaggaggggaacacaggcaaca

SEQ ID NO: 47309 - RNA, 71 nt, Homo sapiens
accaaccgccggggagagcaaccacaaaccacacaacagagaagggggggacacaggacaacgagagaagc

SEQ ID NO: 47310 - RNA, 77 nt, Homo sapiens
gccaccagggaagccacagggaaagcaagagagccagaggaaggacaaagcgcagaccaaggagagccaagaaacag

SEQ ID NO: 47311 - RNA, 72 nt, Homo sapiens
gcccccagaagcaagaaagaacgcacagccacgcacacagaccaagagaggcacggcggccagcgaggggag

SEQ ID NO: 47312 - RNA, 77 nt, Homo sapiens
aagccacgacaaacaacccaggacgaaaagagggcacaggacgcaccgccgcgccaggccagcggaccccagggaag

SEQ ID NO: 47313 - RNA, 54 nt, Homo sapiens
ccaacaggaaacgaaagcacaagccgaaccggccgggaaccaccccaccgccag

SEQ ID NO: 47314 - RNA, 72 nt, Homo sapiens
aacaaccgagacacaagaggcaaaacagaaggagaacccccagcccagggggcgacagcaagaaggagccag

SEQ ID NO: 47315 - RNA, 39 nt, Homo sapiens
ccgagagccgggaacagggcgcgagagagaaggggagga

SEQ ID NO: 47316 - RNA, 77 nt, Homo sapiens
ggaccgacggcagcagcgggaagccaacacagaaaccgccacaggccacccggccaagccggaaaggaagaccaaca

SEQ ID NO: 47317 - RNA, 52 nt, Homo sapiens
gcaggaaagaaaagcaagcccaggaagcacgaagagccaacacagacaagac

SEQ ID NO: 47318 - RNA, 70 nt, Homo sapiens
gagaaaggcaaaacaaaggaaaggcagagggaggacgcccgaccccacccagcccgcaccgggcagccag

SEQ ID NO: 47319 - RNA, 72 nt, Homo sapiens
gcacacgaggaaaaaaggacacggagagaagccgaaggaagccaaggcgagcgggaaagccgaagaaaggag

SEQ ID NO: 47320 - RNA, 71 nt, Homo sapiens
cggcgaggacaaaaccgaaggagggggaaacgaccaccggagccaagacagagggagccgacaccaccccc

SEQ ID NO: 47321 - RNA, 78 nt, Homo sapiens
ccgggcccagccgggaacccccacgcggccagcgaaaacgcccaggaacgccagcgccggagaccaccgaaccgggcc

SEQ ID NO: 47322 - RNA, 56 nt, Homo sapiens
gggagaaaggaggccacacccaaaaaagggagggccagcccccagaccaagaaaga

SEQ ID NO: 47323 - RNA, 74 nt, Homo sapiens
gaaagacagcagaggcacaccaccacagccagaggagcagccgaagcccaggacaacaccgcaccccagccggg

SEQ ID NO: 47324 - RNA, 77 nt, Homo sapiens
gagccaccagcacggaccaggaggcgagcaacagggaagagaaaccacgaggagggaagccagcacccgggccagcc

SEQ ID NO: 47325 - RNA, 63 nt, Homo sapiens
ggcaggccacgggaagccacacgcccaaggaaagaaacccaaaggaagcaagaagggagacac

SEQ ID NO: 47326 - RNA, 80 nt, Homo sapiens
cggaaccacaagcaccagcacgccggcaaggagggcagcacacacaggcaccaaccaccaccagagaaggagcgcccacc

SEQ ID NO: 47327 - RNA, 75 nt, Homo sapiens
agcaagcaagaggagcaggcagcggaaccgagacaggacaggcggcacaaaccaagggcaggcacaaaacgccca

SEQ ID NO: 47328 - RNA, 80 nt, Homo sapiens
gcggccaccgcgggagaacacaaggccagcaccgggcacaagaaagaaaagcgaggccacaaccaccgccccagaagggg

SEQ ID NO: 47329 - RNA, 82 nt, Homo sapiens
ccagaacgagaagcgcaccacaggaccgaaaagacgcggccccaaaggaaacacccgaagaacacagcgccagcccaacgga

SEQ ID NO: 47330 - RNA, 81 nt, Homo sapiens
cgcgagcggaggaggagaccggagcggggggcggagcagacacagacagcagagggagagcaagccccccaccagccccac

SEQ ID NO: 47331 - RNA, 87 nt, Homo sapiens
agagaaacacaacaccccaacaagagacaccagaagcagagggcaggcagcagagacgcagaaagagcgcggaagggcagaaacggc

SEQ ID NO: 47332 - RNA, 94 nt, Homo sapiens
caggcccggacccaaccagagaaagacaaccaaccccaccgaggaggacagagacgcaaaacccggggaagaaaacgaggagaaaggggaaagc

SEQ ID NO: 47333 - RNA, 44 nt, Homo sapiens
aacaaaaggccggagcgacaggaaccccgagggagggaaaagag

SEQ ID NO: 47334 - RNA, 61 nt, Homo sapiens
aagacccgggaaggaggcgacaggaggcagcacggcaggagacgaggagaggacagcagga

SEQ ID NO: 47335 - RNA, 76 nt, Homo sapiens
gaacagagagaacaaaagagcaggcccgcaggaagcccaagagggaaagccccagaggccggagagcagaaagcca

SEQ ID NO: 47336 - RNA, 70 nt, Homo sapiens
agcccgagagcgggaacagcgcccccaagacaggacgcaagcgacagggcacccagcaaggaggcggacc

SEQ ID NO: 47337 - RNA, 55 nt, Homo sapiens
ccggcgcagggcggaaggacaacagcccgacaaccagacgcggacagaagaaaag

SEQ ID NO: 47338 - RNA, 53 nt, Homo sapiens
cgccacccgcccagcccggacgaccaaagggacaagccccgggggcgccgagg

SEQ ID NO: 47339 - RNA, 73 nt, Homo sapiens
aaagccagccaggacaggacagaggccgccgcagcagcaacggaaacagaccagaccagcacacagaaaaccc

SEQ ID NO: 47340 - RNA, 87 nt, Homo sapiens
caacgacgcagacggcagggggaaaagaccagccaagggaggagaaagaaaaggccacggccccgggcgaggggcgagaaaacacaa

SEQ ID NO: 47341 - RNA, 55 nt, Homo sapiens
cagacgaagaccgagcggccagcacagcccaaccagaacccaggaccaccagggc

SEQ ID NO: 47342 - RNA, 67 nt, Homo sapiens
cacacgcccaagccaccgcaggggcaccaaaacacacaccgaaacccacgcccccgaagaaaggaaa

SEQ ID NO: 47343 - RNA, 67 nt, Homo sapiens
gcgcccccccccaacaggcggcccagggcggcgcagccgaaggaaagcacgaaggaacgaccgccaa

SEQ ID NO: 47344 - RNA, 77 nt, Homo sapiens
aggacccagccacacaggagggcacagaaggaaggaaaccaccaccggacacggcaagacgagaaaagagcacagaa

SEQ ID NO: 47345 - RNA, 80 nt, Homo sapiens
caccgagagggccaaaggcagcgacccccacgacagcccgccccccagaggcaggcccagcacagaaggagagacaaccc

SEQ ID NO: 47346 - RNA, 70 nt, Homo sapiens
cccgagccggagaccagcaagacacacggcgagacagagggaaagaaccaccaccaacgagacacaaaaa

SEQ ID NO: 47347 - RNA, 67 nt, Homo sapiens
ggcccggaccgaaggcgcaagagggaggcgcacacacagccgcaagcaggaagaaaagagcggggca

SEQ ID NO: 47348 - RNA, 31 nt, Homo sapiens
acccagaaagcaaggggaagaaggaccggga

SEQ ID NO: 47349 - RNA, 75 nt, Homo sapiens
ccaaccccccacaaagaagggacaggagcaccaggaggcacggcgcagaaaccgacagcaccagggcggcggcgg

SEQ ID NO: 47350 - RNA, 82 nt, Homo sapiens
cgcgaagaggcagcgcgaggaggagccgaagcccaaaaagcgaaggggaggcgccgcaagcgcgagaaggccacggcaccca

SEQ ID NO: 47351 - RNA, 75 nt, Homo sapiens
aaaaaaagagagaaccaagacgaaaacaaacggaacggagccgcccagcaaaacccaacgggaacccgccggaaa

SEQ ID NO: 47352 - RNA, 78 nt, Homo sapiens
gaggagggcgcaggagcacacgagaccgcaccgcacggcggagcccgcacgcggcgggcaggcaccgcgcgccgcgcc

SEQ ID NO: 47353 - RNA, 69 nt, Homo sapiens
caccagccgccgccccgcagccccccgcagcacccagccggccacggccgcaggagggaagcgcacgga

SEQ ID NO: 47354 - RNA, 74 nt, Homo sapiens
ccagaacgcccagccaaagaaacaagccgggaaagggacaagaagggcaaagccgaagggccacacgcggaccc

SEQ ID NO: 47355 - RNA, 67 nt, Homo sapiens
ccggcccggaggaagaaagccaaggaggcacccccgccaaggccggccggcggcaggcccccacgag

SEQ ID NO: 47356 - RNA, 37 nt, Homo sapiens
ccgacagccgcagaacacgccgacaccccaggccacg

SEQ ID NO: 47357 - RNA, 78 nt, Homo sapiens
ccagcgccagcggcacggcccgccgcccaagaggcgcgaacagggcccacccgccacgacacaggggaagaagaccac

SEQ ID NO: 47358 - RNA, 73 nt, Homo sapiens
cgagcacccggaagcaccagcacgccaaccaccggagaaaagaaaaagccaggaagagacaaacaggagaagc

SEQ ID NO: 47359 - RNA, 63 nt, Homo sapiens
ccacacggccaggaaacggaaaagcaagcccaccacaaaccaaacgagcaagaaggagcgagg

SEQ ID NO: 47360 - RNA, 64 nt, Homo sapiens
ccccgggggaaaagaacgaggaagcaaggccccacccaaagaccaagccagcgaacaagcaaga

SEQ ID NO: 47361 - RNA, 77 nt, Homo sapiens
aacaaaagcaaccaccccccagagagaacacaaggaacgaaaggaagggaagaagcagaaccaagacaaaagaagac

SEQ ID NO: 47362 - RNA, 84 nt, Homo sapiens
caggacaagcaaccggcgacaaagaagagcagcccagaccaagaggagcggggaaaagagggccgagaagcgggagcagggcag

SEQ ID NO: 47363 - RNA, 61 nt, Homo sapiens
aacgaagccggggaccagaaaggaacggcaagacaacaagaacaccgcgaaacgagacagg

SEQ ID NO: 47364 - RNA, 61 nt, Homo sapiens
gggaagaaagagcgggcagagacgagacgagacacaaccagagggacccgccacaacacgc

SEQ ID NO: 47365 - RNA, 83 nt, Homo sapiens
gccggcaacggcggggcgcccggagcccgaggaaagaccacagcaagaccacgcccccagccgggggaccaggccgaacgacc

SEQ ID NO: 47366 - RNA, 71 nt, Homo sapiens
accaagaacaaaccggaccggaacaggaaaccaacagcacacagacaacagaggagggagaaaacacagca

SEQ ID NO: 47367 - RNA, 79 nt, Homo sapiens
ccaaccaacaaagaggagaaagagaacagagacggaccaagaaaggcccagggaccaaagcccggacaaggcccgagca

SEQ ID NO: 47368 - RNA, 76 nt, Homo sapiens
agagcagcagagagaccgaaagaaagacaacccgaaagaacaccgaaccagacaccgagagaaaaggaaaggaaaa

SEQ ID NO: 47369 - RNA, 58 nt, Homo sapiens
acgccaaagaacggggagaggacagagacgaggcgggcccaagggcaccaccggcacc

SEQ ID NO: 47370 - RNA, 60 nt, Homo sapiens
aaaggcaccgggagcaggaaaccaggaggggaaggccaacgcagacaccagagaagaacc

SEQ ID NO: 47371 - RNA, 94 nt, Homo sapiens
acggggacagccagaaaccggggaccaacaaccaccaagaaacagaggggaccgccaaccaaaggacggcacaacacaaggagcaaagaggcag

SEQ ID NO: 47372 - RNA, 67 nt, Homo sapiens
ccaccccagccccagccacagacacagcaccacaccccaccggccggagcacgccaagcagccccca

SEQ ID NO: 47373 - RNA, 59 nt, Homo sapiens
caacccagagaaccaaagggagcgccacgacacaggaagagcaaaggacaaacaacgag

SEQ ID NO: 47374 - RNA, 37 nt, Homo sapiens
aagaggggcagcaagggccaagaaccgcgaacgcgca

SEQ ID NO: 47375 - RNA, 59 nt, Homo sapiens
gggagccaaggagagagaggaggaagccaaagcagaaccaagacaaacgaccccggaac

SEQ ID NO: 47376 - RNA, 61 nt, Homo sapiens
ggggagccggcggaaggggggccgcccgcccaaggcaggaagaggggccgcaaagaagacg

SEQ ID NO: 47377 - RNA, 76 nt, Homo sapiens
acaggaacggagagcaacagcagggcagccagacaggccaggacagcggaggccaccacccaaaagaggccgaagc

SEQ ID NO: 47378 - RNA, 80 nt, Homo sapiens
gaggagaaggccaaaagaaaaaaaggcgacgccgaacaaaacagcacaggaaggcaagacagagccgccggcccaggcgg

SEQ ID NO: 47379 - RNA, 77 nt, Homo sapiens
aagaccagacagggccgaaagaaaaggcacacacacccgcaggagagcgccggagaaaggaagaacccagacacaga

SEQ ID NO: 47380 - RNA, 57 nt, Homo sapiens
cccggccgaggcgggcgcaagagaaggcaccaagagggccacccgcacggcagcaag

SEQ ID NO: 47381 - RNA, 34 nt, Homo sapiens
aagcagcacaaagacaaccccccaggggaaggcc

SEQ ID NO: 47382 - RNA, 57 nt, Homo sapiens
aacagagggagaagcaaagcaacgccaaggccaggggcaagcaccacccgagcaaga

SEQ ID NO: 47383 - RNA, 81 nt, Homo sapiens
acacagggagaaaacggcagcgagacggccggccgcggcggagaaaccaccacaaacacgaggccagcaacgaccaacaag

SEQ ID NO: 47384 - RNA, 41 nt, Homo sapiens
agaacccagcccgacgggcgcagccagagaaacagcaaaaa

SEQ ID NO: 47385 - RNA, 70 nt, Homo sapiens
caagcggaaagcacgcgcacagagcaaggggcacacgaagcgaaaaagaaagaagaaaacgggcacccaa

SEQ ID NO: 47386 - RNA, 83 nt, Homo sapiens
gggaacgggggcggccgggacggaggacgcgcaggagggagaagaccaaagaagagagagcaggaccaccaccgcccacagcc

SEQ ID NO: 47387 - RNA, 39 nt, Homo sapiens
gcacggaacccagaaccccagacccccgagaccagaaag

SEQ ID NO: 47388 - RNA, 78 nt, Homo sapiens
gagacgcgaaaagcggcccggaccgaaggcgcaagagggaggcgcacacacaggccgcaagcacacaagacagaagac

SEQ ID NO: 47389 - RNA, 85 nt, Homo sapiens
gcgggaacccgcggggagcgggacacgaacggaggcgggaggcggcagaagcagccagaggagggcacaggcggcgcggagcgcg

SEQ ID NO: 47390 - RNA, 50 nt, Homo sapiens
cgccaaagcaacgacacaggcgcgaagaaagaggcccggcacacgcccag

SEQ ID NO: 47391 - RNA, 74 nt, Homo sapiens
aaagaaagagcagagaggggggcgaccggggaaccagacggagaaaggcaaggaaaaagaagaccaccggacag

SEQ ID NO: 47392 - RNA, 63 nt, Homo sapiens
agcgaggaaaaggagcagccagggagaaaggaaacaagaaggcgcacccggcagaacggaggc

SEQ ID NO: 47393 - RNA, 74 nt, Homo sapiens
ggaccaccaacccagggcaggagaaccaacagaggcaaaagcagagacaacaacagcgaagccccacggagaaa

SEQ ID NO: 47394 - RNA, 76 nt, Homo sapiens
gccagcaagacccgagcccagagagaaaggccagcacgggggaacaaagggaccggaaaggagagagaagacgcca

SEQ ID NO: 47395 - RNA, 108 nt, Homo sapiens
cccgccggggagaggccggcgggaacgaacagccgacggggcgaccgccggcccaggggcccgaccccacgcacccggagccaccgagacgaaccaaacccaggaagc

SEQ ID NO: 47396 - RNA, 63 nt, Homo sapiens
aaaaaaaggaccccgaaaaagcaaggaacagaagccaccgcaaaaaaggacccaagaagacca

SEQ ID NO: 47397 - RNA, 55 nt, Homo sapiens
aacccagcaccgggaggcgagccaccggcgacacgaccccacagaggacccacac

SEQ ID NO: 47398 - RNA, 62 nt, Homo sapiens
aggcaacgacgccacgggaaggaccaccaaccaggggcggcaccaggaaaaagaaagacggc

SEQ ID NO: 47399 - RNA, 82 nt, Homo sapiens
caaggcaccagccggggggcgcccccgccaccgccaaggcacacaagcagcaggaggaccaggacacaccccagaagaagcc

SEQ ID NO: 47400 - RNA, 74 nt, Homo sapiens
gaagaggaaagcagacaagccagcggagaaacccgcaccaccccaccaccgacgccacgaagacaaaggacacc

SEQ ID NO: 47401 - RNA, 56 nt, Homo sapiens
ggggaggaccgaacggcgccagaggcagagcaacagggacacaagcaagaagaaag

SEQ ID NO: 47402 - RNA, 80 nt, Homo sapiens
agcccaaggaggaggcagaacccagcagcagcacgccagggaccgggggaacagaaagcaacgaggccgcaaagcaacgg

SEQ ID NO: 47403 - RNA, 56 nt, Homo sapiens
gccgccaaagggagaggcgagcagaaggggggcccgcagacgaaggagcaagggca

SEQ ID NO: 47404 - RNA, 40 nt, Homo sapiens
ggggcggaagccaaaagcagagaagaaggaagagacgggc

SEQ ID NO: 47405 - RNA, 73 nt, Homo sapiens
gaaaccagggagaacagaagggacaggaaaaaagcagcagccggcaaacccaccgagacgccagaaagacaga

SEQ ID NO: 47406 - RNA, 86 nt, Homo sapiens
cgcccggacccaacggggcaacagaagaagaggggccccaaaggcagcgcggcaggcaggagaaggaccaaaaggaacgagacgga

SEQ ID NO: 47407 - RNA, 72 nt, Homo sapiens
cagcgacccgccagcccccacacggcagcggcggccgcgcccaccggcagggaagacacgccacaccacaag

SEQ ID NO: 47408 - RNA, 76 nt, Homo sapiens
gacagcaaaaaccacgcgggcccaaaggcgcagggagcaggagaagcggagcgaaggggcgggcaggcagaggcgg

SEQ ID NO: 47409 - RNA, 33 nt, Homo sapiens
agggaggcgcacacacaggggcggcagggggac

SEQ ID NO: 47410 - RNA, 55 nt, Homo sapiens
cagcacgagaacagcagaaacagcgcccacagggacaagaacacagccaggagaa

SEQ ID NO: 47411 - RNA, 41 nt, Homo sapiens
aaagcagcacaagagagaccggccagaaacgcgcgccaccg

SEQ ID NO: 47412 - RNA, 68 nt, Homo sapiens
gcagcagacaggggacacaagcaggacacaggaaaaggaggcaaagaagaaccaaccgcacgggggca

SEQ ID NO: 47413 - RNA, 77 nt, Homo sapiens
gacaagaccagaaccaggacccaaccgagaaagccagggccgacagcagcagacagcacaaacccagggccaagagg

SEQ ID NO: 47414 - RNA, 62 nt, Homo sapiens
cagaaagcagggaggggaaaaggaccaaagcccccagcacccggccacccagcccagcccca

SEQ ID NO: 47415 - RNA, 115 nt, Homo sapiens
agcgggcgggccgggcgacgccggggggggcggcccgcagcgaaggaccgccggaaccaaaaagaagccccagagccggggccaggagccccaagcgccccagcagcaaacacag

SEQ ID NO: 47416 - RNA, 65 nt, Homo sapiens
ccacccggcgacggcgcgggacccggcccgcgaggacacaaccagagggaagcacgcccgggcac

SEQ ID NO: 47417 - RNA, 76 nt, Homo sapiens
gagccggcggagcagggcagcaccacgagccagaagcagagccgacacgcgggcacgggcccggaccagccaggcc

SEQ ID NO: 47418 - RNA, 74 nt, Homo sapiens
ggagcagcggcaggagacgcacgcgacaaagaagaagcaagacaaagggcagcccaaggaccaagggagaagag

SEQ ID NO: 47419 - RNA, 63 nt, Homo sapiens
aaggcagaaccaccccaggcacccccggccggcgcgaggccagagccaaggacaagaccaggg

SEQ ID NO: 47420 - RNA, 61 nt, Homo sapiens
gcgggaccccaggagggggacaggaggcgcggggcccaggacaggagagacaacggaggca

SEQ ID NO: 47421 - RNA, 85 nt, Homo sapiens
aaagaaaaagcccacggagcgaaggagccaagggcggccagagcggccgggcccgggaggagcaggggcagaggggagaacccag

SEQ ID NO: 47422 - RNA, 69 nt, Homo sapiens
cgggcaccggcgcgcagcgggggccgggggccgaccggcaggcagggcagcggcccccagaagagaaaa

SEQ ID NO: 47423 - RNA, 59 nt, Homo sapiens
gcccccgggagcgcgggcaaaaggaggagacacacagccccagacgggaggaaaaaagg

SEQ ID NO: 47424 - RNA, 76 nt, Homo sapiens
caacacccccacacagccaccagccccccagagcgcagcggcgccggacgacggacagagcgggagccaccagcgc

SEQ ID NO: 47425 - RNA, 77 nt, Homo sapiens
acgggaaggagagcagccagcagcccgaaaagcagaaccaaggaaagcccaagaaacaaacccaaggaaagaaggag

SEQ ID NO: 47426 - RNA, 57 nt, Homo sapiens
gagggacggccgggaccaccagagggaaagcggggcgagacaggcgccaggcccagg

SEQ ID NO: 47427 - RNA, 83 nt, Homo sapiens
aggggcaacaagacgcccgagggcggacgggccccgcggccgcccgagcaggaggacgaacagaaacgaaggaggcccaacca

SEQ ID NO: 47428 - RNA, 83 nt, Homo sapiens
gagcaagaggcggcagaagcagcggcccaggcgccagcagcccaagagcccaaaggccgagcgaggaagacaaaccggccgcc

SEQ ID NO: 47429 - RNA, 50 nt, Homo sapiens
gaaggcaacggaggccaggaagaaaagacgagaaacaaaggagaaaagga

SEQ ID NO: 47430 - RNA, 80 nt, Homo sapiens
cgggcgggagcagccagacacgcggagcgggagagcggccacaccagcgaggcaagagaagcagaaaggagaaaccaggg

SEQ ID NO: 47431 - RNA, 69 nt, Homo sapiens
agagaacagaagagacaagagaccgaacaggaaaggaaaggaggcccaagaggcgaaacgcaacacgga

SEQ ID NO: 47432 - RNA, 82 nt, Homo sapiens
cacgcccaccggcccgaggaccccaggcggacgcccggcacgggccgcgcacggcaagagaccgaaggagcagacgaggcac

SEQ ID NO: 47433 - RNA, 67 nt, Homo sapiens
ggcccccgcgccccaccccgacgcgggcccaaaggacagcccagggaaagaccaaaccccaaagcag

SEQ ID NO: 47434 - RNA, 80 nt, Homo sapiens
ccgaagcgcccggagcgggagcgagcggcgcggcccgacaccagacgaaacaacgacccagggaaaacagcagcagcagc

SEQ ID NO: 47435 - RNA, 79 nt, Homo sapiens
gcagcgccgccgcccgcggaagggagcccaagcgcagaggaacccagcaccaacgagaaaagaaaaaggaagagaagag

SEQ ID NO: 47436 - RNA, 95 nt, Homo sapiens
gaagaacagccccaagacgcaggaggcggaaaggggacggcaggcaaaaccccaaaagagccgcgcagcgagccacgcaccaaaccagcagccgg

SEQ ID NO: 47437 - RNA, 80 nt, Homo sapiens
gcggcaacggcaaaccccagagcgacagcaggggggaaaaagacaaaggcggcggcacacagagcgggacgaagcaagca

SEQ ID NO: 47438 - RNA, 74 nt, Homo sapiens
gcaagagaaagccgcaaaaggccccaggagcaaggcacaacgagccaggggcccacaggacggccaagcaccag

SEQ ID NO: 47439 - RNA, 96 nt, Homo sapiens
cggcaggagggccgcaagacccaagaagaagaaggcgaaggaccccaacggggaggccaacggaagaagcccgggcccgccggccacaccacacgc

SEQ ID NO: 47440 - RNA, 75 nt, Homo sapiens
aaaaaagacagaacgaggaaggagaacgaacagacagcgagcaacagcagaaaagagaagagacccacgcaacga

SEQ ID NO: 47441 - RNA, 70 nt, Homo sapiens
gcccaacagaaaaagagaggagggagaacacagaaacccgccccgggaggagaacccgccgcccgagggc

SEQ ID NO: 47442 - RNA, 78 nt, Homo sapiens
acggcggagcaggagacgccaccacagccgcgcagagggaggacgccaaaagcccgccaaccccgagccaccacggac

SEQ ID NO: 47443 - RNA, 77 nt, Homo sapiens
gaaagaaccgcccacgggccgcgccagggacccaaggccagccagccccaggcaccagcggacaggacagggaggac

SEQ ID NO: 47444 - RNA, 84 nt, Homo sapiens
gggcccggcaggggagccgcccgcacagcggcccggggaaggaagcggagaacgcgggcagacgaaacggaggagcccaggagg

SEQ ID NO: 47445 - RNA, 72 nt, Homo sapiens
caaggaaacagcagaaaccggaaccacacacaccacaggaagccagccaggcgaaccagccgaaaaaggaga

SEQ ID NO: 47446 - RNA, 81 nt, Homo sapiens
gccgggcgaccgggcaccagcaggacccgaggccaggagccaggggcccagaagggaaacccagacgacaaggaaggccaa

SEQ ID NO: 47447 - RNA, 56 nt, Homo sapiens
cgagcagcgcaaacccccgaaaaaggggaaccagaagaggccaaccagcacgaacg

SEQ ID NO: 47448 - RNA, 69 nt, Homo sapiens
ggaccaacccaagaaccagagaaagaagcgcgcaagccacccagcaagcaaaggaccagcaggaacaaa

SEQ ID NO: 47449 - RNA, 73 nt, Homo sapiens
gcggcagagaccgggcgagcgacccaggaaggagagagcacagcagaaacacacaaaccaagggagacaaagc

SEQ ID NO: 47450 - RNA, 73 nt, Homo sapiens
cacgcgcacacaagggagcccccccaccacccccgaggaccaaggacaagacccagacaaggggccggccaac

SEQ ID NO: 47451 - RNA, 70 nt, Homo sapiens
gaaagaagaggagaagaaaaccagggccaccgcagacggagacggcggagacgggcagagaaccagcaag

SEQ ID NO: 47452 - RNA, 79 nt, Homo sapiens
gcacaccaggcggcaggggcaaccagacgggccaaggaacaagccaagagagacaaagcagaggaagagaagaaaaagc

SEQ ID NO: 47453 - RNA, 72 nt, Homo sapiens
cgagccagaagcagagccgcgcgcgcgaagcgaggagaccaaaaaaccccgcagaaacgagaggagccagcc

SEQ ID NO: 47454 - RNA, 86 nt, Homo sapiens
gggggagggaaggaccggaccggagaacaccgcgcgggaagaaggacacaaccagagggaagcacgcccgggcacagcggaagaga

SEQ ID NO: 47455 - RNA, 67 nt, Homo sapiens
ggcacagagacgagcggcgcagaggagagaaggaggacgacgcccagaaacgggaggaccaggaagc

SEQ ID NO: 47456 - RNA, 69 nt, Homo sapiens
cacgagcacggcccgcgcacgcccggagagagggagaaaagcccagaaccgagacagagcggaaaagca

SEQ ID NO: 47457 - RNA, 29 nt, Homo sapiens
caaccgacacaagaaccaccggacaaaca

SEQ ID NO: 47458 - RNA, 80 nt, Homo sapiens
agcaaggagcgcggaacggggagcgccggagcagcggacccaggcagggacagacagccagagggaaacgagagccagaa

SEQ ID NO: 47459 - RNA, 76 nt, Homo sapiens
aagaccccgaaaccagaagggggaaaggagccaccaaacaccagcccaggcccaggcggaccaggacggaagccag

SEQ ID NO: 47460 - RNA, 58 nt, Homo sapiens
gacaaacaaaaggggcaggcaggagaagggcaccggggaggaccgcgcgacgcgccgg

SEQ ID NO: 47461 - RNA, 75 nt, Homo sapiens
cgaagagccggaaaccaccaagccgaaacacaagcaaggaacacaaagaagaaagaaaggaacggaaggaagaaa

SEQ ID NO: 47462 - RNA, 61 nt, Homo sapiens
aggaggcccccggaaaaggccagggaggaagaggaggagagaagagaggaagcgagcagca

SEQ ID NO: 47463 - RNA, 70 nt, Homo sapiens
acgaacacaccccacgccaagcaccaagaagaaccggcacaagcagaacaagacaccaagggaaggaaac

SEQ ID NO: 47464 - RNA, 104 nt, Homo sapiens
ccgccaccacaagaccggcccaagccgagcagacggcacgaagggcggccgccgccggagaagacagaggagccagaccaagagacagcacaggcgagcgagca

SEQ ID NO: 47465 - RNA, 82 nt, Homo sapiens
acgacgacaaacacgcagaggaaggagcagcgcaaggaccagccacaagaagacagacacgaggaaggaaaagaccaccaca

SEQ ID NO: 47466 - RNA, 76 nt, Homo sapiens
gacagagagaaaaggaaaggcggaaaaaaggcaggcaacggggcgcgagcagagccgggaaagacacccgccgcga

SEQ ID NO: 47467 - RNA, 73 nt, Homo sapiens
gcgggcgggggcgggggccggagagaagcggaaagaccacgccaaccaggaaagaacaccaacaagagaaaac

SEQ ID NO: 47468 - RNA, 82 nt, Homo sapiens
cccgcaaggcgcccccccagagagccagaaagaagagagcgagagagccccgggaacagaccgagcacacagggaggccgca

SEQ ID NO: 47469 - RNA, 37 nt, Homo sapiens
gcaagacagggaagcgcgagacagagggaaagaacca

SEQ ID NO: 47470 - RNA, 72 nt, Homo sapiens
agcacaaaaacccaaagcgaaaaacgaaagaagcaggaaggaaaaaacagagaggacgcaaaggacagagaa

SEQ ID NO: 47471 - RNA, 87 nt, Homo sapiens
cgggaacacagagagcgaagccaggagaaaccagcggcgcaccgcccaacaaggaccccacgggagcgggcgcagaccaacaaacgg

SEQ ID NO: 47472 - RNA, 47 nt, Homo sapiens
agccccagccaggagcccgaacccaaacgagcacacgaggcccccgc

SEQ ID NO: 47473 - RNA, 85 nt, Homo sapiens
cgcagaggcagcagcagccgcggagcagagccgccggggagggagccagaagcaacgaggcccaggaccgcagcccagccacaca

SEQ ID NO: 47474 - RNA, 87 nt, Homo sapiens
ggagacggaccgagccacgggcccccgcggccgcagcaccggaggaggcggagaacggaaaagcaccaggaagcagagaggaccgca

SEQ ID NO: 47475 - RNA, 110 nt, Homo sapiens
aagacgagaagaggagagggagagggcccaggcggaagagcaagagaagaccccacagaaaccagaaaagcacgaaacacaaagcaaaacggagaaggacgaagaagggg

SEQ ID NO: 47476 - RNA, 84 nt, Homo sapiens
gacaagaggagcggcccccccaagaaccgaagggcccgggcacccagcaaccgacagcgccgcccacccgggggccccaccggg

SEQ ID NO: 47477 - RNA, 71 nt, Homo sapiens
agagcgagcgagggggggcgcgccggaaaccggagcgcgcagcagaagcgagagaaaacgccagagcaacc

SEQ ID NO: 47478 - RNA, 80 nt, Homo sapiens
gcccccacacccggaacgacaccaggaacccaaggcaccaggggcaagacagcccccagcagcaacagcagcagcaagag

SEQ ID NO: 47479 - RNA, 74 nt, Homo sapiens
cgccggcacgagggcaaagaagaaggcacaagaaagcagcggaacaggacacccaaccgcgagaccagcaagga

SEQ ID NO: 47480 - RNA, 74 nt, Homo sapiens
cagagaagaggcccgcgaagacaaaaaacccaagaacccaaacaggcggcacccagaagccagggggcaccagg

SEQ ID NO: 47481 - RNA, 62 nt, Homo sapiens
ggagagcgacaagaagccacccaggaacaagacgacaggacgacaagacagccaaacccagc

SEQ ID NO: 47482 - RNA, 72 nt, Homo sapiens
gggggcaccggaccgaggacaccagcagcgcaaaacaccaggagcgccaaccggaacgaaagacaagggagg

SEQ ID NO: 47483 - RNA, 89 nt, Homo sapiens
cggaacggggcgccgccccgggccccccagcagaagaccccggcggacacaggccagcaaaggacgcccgaacggcgcagagcaggagc

SEQ ID NO: 47484 - RNA, 65 nt, Homo sapiens
gaacccagaagaggaagaaagagccggcgcacgacaacaggagcggaacgcaaccagaaccgccc

SEQ ID NO: 47485 - RNA, 122 nt, Homo sapiens
caaaggcggaccgacaccacgacgacgggccacagcagccggcggcggcagaggcacacaagaggcaacaccaggagccaacagagccggggacgaacgcgggcccggagcagcgcgcgggc

SEQ ID NO: 47486 - RNA, 61 nt, Homo sapiens
gcacgcgcagccaggcgaagacagagggccgacggcgacagacacaccaaagccccaaaac

SEQ ID NO: 47487 - RNA, 67 nt, Homo sapiens
agaaccgcgcgggaagccccagcccgcagccccggggcgcagcagaaggccgggcaggagaccaagg

SEQ ID NO: 47488 - RNA, 74 nt, Homo sapiens
ccagccagaagcaggccagcaggcccagagaacaccaggccagaccgggccagggccgagagagccaccaccgc

SEQ ID NO: 47489 - RNA, 77 nt, Homo sapiens
agggcggcccggaccgggagacacggccagacgcccccaggaaccacggagaccagaccgcgccacaggacaagaag

SEQ ID NO: 47490 - RNA, 77 nt, Homo sapiens
accccaggcccggaaccaacgcaccacacgggggggcagaacacgggcgcagaggaagaagaggggaaagagaggaa

SEQ ID NO: 47491 - RNA, 76 nt, Homo sapiens
cgggcgggcaccgccgggaaccaccggcacgccaagacaggccaaggaagcgacagccaggaccaggcacccggga

SEQ ID NO: 47492 - RNA, 80 nt, Homo sapiens
agaaaacgggaagagagggaacacgcaggagggaagcacagagggaaggagaaggagacacagaaggagcagcaggagac

SEQ ID NO: 47493 - RNA, 77 nt, Homo sapiens
gcggccgcgaccccggccccggcccggccgggcgagcggaccccgaccgccacggacccgggcgccaccccggcgcg

SEQ ID NO: 47494 - RNA, 70 nt, Homo sapiens
aacaccgagcgccagaggggcaacagcagaaaagcagcagcagcaccggaagccggcaacccgagccgac

SEQ ID NO: 47495 - RNA, 76 nt, Homo sapiens
gacccggacaaccagaggcagccagcagggggagagcaggcccgacccggaggcaccacgccgacgcccgccagca

SEQ ID NO: 47496 - RNA, 70 nt, Homo sapiens
agaaccgcagccgagcggggccggccacagagggagacggggggcggccccggacacgacccgaggacag

SEQ ID NO: 47497 - RNA, 70 nt, Homo sapiens
gcggaggagaggagcggcggaagaggggaacccagggcgagagggcacagggaaggacccagaacagagc

SEQ ID NO: 47498 - RNA, 82 nt, Homo sapiens
cgagccaaagaagagcgaagcagggcacacacacccccggggcaggaccgcccccgcaggaagaggagcccccccgccaccc

SEQ ID NO: 47499 - RNA, 58 nt, Homo sapiens
cccggcgccggaaaggcagccaaaggcacagaaaaggaccacacagacaaagccgaaa

SEQ ID NO: 47500 - RNA, 79 nt, Homo sapiens
gcgagcagcccaccgcacgccggcagacaaacaggcgcggcagaggggggaggggaacagcagcggagaacacggcaga

SEQ ID NO: 47501 - RNA, 80 nt, Homo sapiens
aggcacgacaccaccgggagagcaccgaccaacaaaaaccccagcaacagggcaaagaggagagcagaggagagaagacg

SEQ ID NO: 47502 - RNA, 82 nt, Homo sapiens
aggaagccggaggccgcgggaggaggcgccccgcgcagcggcggcggagcagagcgccccaggccaccggccacgcaaagag

SEQ ID NO: 47503 - RNA, 82 nt, Homo sapiens
gcccccccaaaaaggaaagacaccggcgggaacgcagcccaccggagagcccccggggccaggaggaccgaaggagcagcgg

SEQ ID NO: 47504 - RNA, 72 nt, Homo sapiens
caagccggggaggaagggcggcggaccgacgacgcagccagagcagcaagaggccaaggggacgacggccac

SEQ ID NO: 47505 - RNA, 65 nt, Homo sapiens
cagaggagcggccacgaaaacgagagaaacgacagggagaaaaagcaaagaagacagcaaagaga

SEQ ID NO: 47506 - RNA, 83 nt, Homo sapiens
caagaccacacaccagccggacggcggggccgggcccccggccgcaagcaggcgccgaccccgacagaacgggccccgcaccc

SEQ ID NO: 47507 - RNA, 87 nt, Homo sapiens
cgcccccgccggccccaaagacgcaaacggcccaccgccccgggggagagggcggaaaacaccccaaaagccaaaagggaaaggaaa

SEQ ID NO: 47508 - RNA, 102 nt, Homo sapiens
aagaggaaccgggcagaagcggcgaaaggaggcacaaacccagccgcacagcaacagccgaaaaaggaaaaacagacaccgaaagccccaaaaaacaaccag

SEQ ID NO: 47509 - RNA, 68 nt, Homo sapiens
cccgcagcggccacacgcaccgaaggcaacaccaaggggaaaaggaaagaaggggccggaacgcccaa

SEQ ID NO: 47510 - RNA, 74 nt, Homo sapiens
cccgcccgaccaggagaaccggcagacgagcgaagaagaagaggaaaggagacacaaaagaaccaaagccacgg

SEQ ID NO: 47511 - RNA, 75 nt, Homo sapiens
ggccggccggccccggagcggcggaccccggcagggcccgggaaaaaaaaggagaaacaaccaaaacgaagaaaa

SEQ ID NO: 47512 - RNA, 73 nt, Homo sapiens
ccgggagccgccccgccagcgcgcgcgggccccggggccgcggcgaaaggacggggcgaaagccaagaaccac

SEQ ID NO: 47513 - RNA, 73 nt, Homo sapiens
agcaagacgccaggcccccggaaaccagaaagagagaaaagacacagacggcaaaacccaaaaaaccagaaga

SEQ ID NO: 47514 - RNA, 77 nt, Homo sapiens
gcggccccgacgacagcgggccgggaaaagggcacgaggccggaaccgcccagccccgcccgccaccgaagaccaga

SEQ ID NO: 47515 - RNA, 75 nt, Homo sapiens
aaagaaggaagaagccgggaccgaaggcgaagagagaaaaggaggaggacggcacaaaaaaaggcagagaagagg

SEQ ID NO: 47516 - RNA, 76 nt, Homo sapiens
gcacgcccgcggccgccggacggccgggcgcggagagccggaggaaaccacagagcagccagcagaagggagaacc

SEQ ID NO: 47517 - RNA, 70 nt, Homo sapiens
acgaagaaaagaacggaggagccagcaggccaagggaaaagcagcggaaaaccagcccaaaaggccgaga

SEQ ID NO: 47518 - RNA, 81 nt, Homo sapiens
aagaaacaaccggcccagagagaagcgggaagcgaacacggagccaaggagaaccgaaggacaccagaccaagcgcaccac

SEQ ID NO: 47519 - RNA, 84 nt, Homo sapiens
ccaggcgccagagcgagccagcccagggccagggagcaggagccagggccgagcacgggaagagaggccaaagagaagccaccg

SEQ ID NO: 47520 - RNA, 71 nt, Homo sapiens
caaaagcgggggaagaagagaggacgacaccagcccccagaacgaccaaaaagaagaaaaaaggacaggac

SEQ ID NO: 47521 - RNA, 34 nt, Homo sapiens
agacgggccccccagacccgaaaaaccgcgccgg

SEQ ID NO: 47522 - RNA, 78 nt, Homo sapiens
acgaaaaccggaggggaacggcgcggagcggagcggcaggacacacagccgcggagaaccgaaccaacagccagccaa

SEQ ID NO: 47523 - RNA, 75 nt, Homo sapiens
gcaagaaacccaggacgagaacagcaacagggagagggcgaaacggggcgggcacgcaggagcagcacggcgaag

SEQ ID NO: 47524 - RNA, 105 nt, Homo sapiens
cgagaagccacccaacaaccccaccacggagccggacaagcccgcgggccggcggggcggaccacggggcgccagcccgggaagacaccagggaagaagaccaag

SEQ ID NO: 47525 - RNA, 56 nt, Homo sapiens
aaggacagaaaccaagagagcgaacgaagggccgagccgccacaccccgcaccggg

SEQ ID NO: 47526 - RNA, 43 nt, Homo sapiens
caccggcgggaggaacaaaaggcaagcgcgcggcaggacccag

SEQ ID NO: 47527 - RNA, 59 nt, Homo sapiens
agccagggcccaaagaaccgcagaaaggacacgcacggcgacaccgacacccaaacggg

SEQ ID NO: 47528 - RNA, 75 nt, Homo sapiens
cggacccaacgccacggaccagaagaaacacgggccgggaagcaccgaagaacagcccgccacaccgaagccgac

SEQ ID NO: 47529 - RNA, 62 nt, Homo sapiens
caacagcccagcccccgaaacccacaaaccccagagcaagccaacgcaaggcgcagaaaaaa

SEQ ID NO: 47530 - RNA, 79 nt, Homo sapiens
aaggggacggccagacagcaggccgacggccccgggcgcagccaaaccgagaggacccagaaaccacagccaacccaac

SEQ ID NO: 47531 - RNA, 79 nt, Homo sapiens
cacagcacaaggaggcccgaggagaggagggaaccccccgagcagcccaccacccagggggcaacggggcggcacacaa

SEQ ID NO: 47532 - RNA, 67 nt, Homo sapiens
aggggaagacagggacggaccacgggaccaagcagacaaaccaaggcaccaaccagaccacggaaca

SEQ ID NO: 47533 - RNA, 46 nt, Homo sapiens
cccaccccgagggcagggcccgcagcagcaggggagcagcggagga

SEQ ID NO: 47534 - RNA, 83 nt, Homo sapiens
gaagagagggggcgcccagcgccaacaccaagccacgaggcggccccagcgcgggcgacaggccgacacccccagagagccgg

SEQ ID NO: 47535 - RNA, 81 nt, Homo sapiens
cccagccaccccaagcaccacccgcacccaccaagcagaggcccagggcccggaagccggccacaacgcaaggagcggaag

SEQ ID NO: 47536 - RNA, 69 nt, Homo sapiens
cgccgcgccgcggggacaggcccgcgcaggggacaaggcacgaggcgcggcgaccaccacagcagagcc

SEQ ID NO: 47537 - RNA, 76 nt, Homo sapiens
aggacacagagacacaaaaacagaacagggacaccaggcgacaggcgccaaggagagaagagcgccagagcgcccg

SEQ ID NO: 47538 - RNA, 75 nt, Homo sapiens
cgccccgccagaccacgaggagcgcgcagggcgcccagggagccaggagcgccaggggggagaggcagagggaca

SEQ ID NO: 47539 - RNA, 72 nt, Homo sapiens
acgcaccagagccgagaaacgcgaaaaggaagcggaagggacaacacagaggacccagccacaccacaaggc

SEQ ID NO: 47540 - RNA, 77 nt, Homo sapiens
gccgcaggggagccgagagccacaggagggccggagccacacccgagggccaacccgcggagagccaaggagaccgg

SEQ ID NO: 47541 - RNA, 74 nt, Homo sapiens
cgcggccagccagagcaacaggagagccccggccaccggcaacggcgaagcaagacgaggaaaacgccccggag

SEQ ID NO: 47542 - RNA, 77 nt, Homo sapiens
gcccgcggggaccggagccccggacagagaggaacagggaaacaaaacaaaagaaaaagaacagcggacagagggac

SEQ ID NO: 47543 - RNA, 73 nt, Homo sapiens
gccggacaggagccgccgccgccaacagccacagaccccgccggggaagaacaggaggggagcgaccagcaca

SEQ ID NO: 47544 - RNA, 83 nt, Homo sapiens
cgccgcccccagccccccgcccggggagggcaccagccagaacaagccgggagaggaacagcgcgccgggcgcacgaacagca

SEQ ID NO: 47545 - RNA, 77 nt, Homo sapiens
aacccaagagccgggaaaaggcaaggcgccaggaaagccaggcccggcccggcggaaaaggagaggcagacccaagg

SEQ ID NO: 47546 - RNA, 70 nt, Homo sapiens
cgagcggggccggccacagggagagaagcaggccaagaaagcgcacgggccagagacgaccaggccagaa

SEQ ID NO: 47547 - RNA, 72 nt, Homo sapiens
acgggggcccgggccgaccgagcaccaggcgaggacggaagcaaagggcagccaccgaagacagcgaccaga

SEQ ID NO: 47548 - RNA, 72 nt, Homo sapiens
agcgacagccaggaccaggcacccgggaagccccacgcgaagagaagaagcaacagacaaaagggccacagc

SEQ ID NO: 47549 - RNA, 75 nt, Homo sapiens
agaacagaacaaggacaacgccaagagcggacggacaagagaaagaaagagaagagagccgaagacacggggaaa

SEQ ID NO: 47550 - RNA, 61 nt, Homo sapiens
gaacaaccgggcgccgacgagacggaggcagcgagaagaaaaagaagagagagacacggac

SEQ ID NO: 47551 - RNA, 68 nt, Homo sapiens
agaaggccaccaaggacagggcagcaaggaacccccgaagcaacagcccccacgccacgggcgccccc

SEQ ID NO: 47552 - RNA, 75 nt, Homo sapiens
cggaggaagcacccggaccacggggacagcgggaccccgacggagagacaaagaagacggagggggggccagcca

SEQ ID NO: 47553 - RNA, 74 nt, Homo sapiens
ggggaagcccgaaccaagccagcaagacaccaccggggaccacgggaaagcccccgcagccggcagacaaagac

SEQ ID NO: 47554 - RNA, 79 nt, Homo sapiens
gagaaacagaggaaaacccagagaaaaggaaacaacaggacacgaggggcagcagcaggacagggaacccgggagacag

SEQ ID NO: 47555 - RNA, 74 nt, Homo sapiens
gaccagaggaggaagagcaagcgggggaccgaacaaggcaaaagggacaagggaggcgaggacggacaaaagga

SEQ ID NO: 47556 - RNA, 72 nt, Homo sapiens
gccacggccaacgccgcgcccgcggagggaaaagagaagacaacgccccggggaccgagcccggaagcaccc

SEQ ID NO: 47557 - RNA, 54 nt, Homo sapiens
gaagacgcacgccggaccgagaaagccacagaaagcccgccccagacagggccc

SEQ ID NO: 47558 - RNA, 63 nt, Homo sapiens
gaccccgaccccgaggcgagacggaaaggagagcgaccccggccgcggccagcaaaagaagac

SEQ ID NO: 47559 - RNA, 73 nt, Homo sapiens
ggaacagggacagccgagaagcaggccaaacgccccagcaggaggagcaaagacacgcagcggccgaggcagg

SEQ ID NO: 47560 - RNA, 53 nt, Homo sapiens
ggccccggacacccaggaaagcaaggaaacagggcagaagccagacccgcaca

SEQ ID NO: 47561 - RNA, 70 nt, Homo sapiens
ggcccgagaagccgacggacacaaggggggcccccggagagacagaaccaacaccagagaagcgccgcga

SEQ ID NO: 47562 - RNA, 78 nt, Homo sapiens
cgggaccaggcccgggggcggcggccacgccaaggacgggccgaacggccccccccaaagaggagaaacccaagcaac

SEQ ID NO: 47563 - RNA, 75 nt, Homo sapiens
cgccagaggaaaggccagaccaagagaacagagaagagccaaacaaccaagcgggccaagaccgaacggcgggcg

SEQ ID NO: 47564 - RNA, 80 nt, Homo sapiens
cccaaaggcggccgccacgggacagaacccgacccagcgacccccaccagaacacacccacagcagccgcgcgggcacac

SEQ ID NO: 47565 - RNA, 73 nt, Homo sapiens
agcagcaccagcccaagagaagggaaacacaaagaagacaccagaagggccagcaccacgacaacacggcgac

SEQ ID NO: 47566 - RNA, 70 nt, Homo sapiens
ccccccacagcaaaaaagaggaaccagagaaggagaaacagcagggccaaaggcaagaacccgggaaagg

SEQ ID NO: 47567 - RNA, 70 nt, Homo sapiens
ggagcgaagcgaacaaaaagcagcaaaccggaccaccccgaagaaagcacaggagccgcccagcaaaacc

SEQ ID NO: 47568 - RNA, 101 nt, Homo sapiens
gcaccaagcgcaaagaagcagcagacggccagggaccgcgccaacggagggaggcccagccgccggggacagcgcgggcccccgggccgaggcggcacgcg

SEQ ID NO: 47569 - RNA, 65 nt, Homo sapiens
gccgggccacccacaggccgcaaagggggagccggagaacacagcagggagaagcgcagaccaca

SEQ ID NO: 47570 - RNA, 77 nt, Homo sapiens
gaaaaggagaacaaagggcaaaacccgaacgaagcagcagcgcgaggcaaaaagcggcaccaggacgccgaaaagcg

SEQ ID NO: 47571 - RNA, 42 nt, Homo sapiens
cgcggacggcacgcagacgccagggggcgcaagcgagccggc

SEQ ID NO: 47572 - RNA, 70 nt, Homo sapiens
aagggacccaaaaagacggacagcccacgggaacaagaggggacagaaaggcgaagcaacaaaccaccac

SEQ ID NO: 47573 - RNA, 62 nt, Homo sapiens
acccggcgcggcgccccgggcccagcacgcggggcaggcggacccccggacaagcacccaag

SEQ ID NO: 47574 - RNA, 83 nt, Homo sapiens
agacagaggcgggcgacccagaagaacacggggccacagaacaagccaaaagccccccaggcagccaaagcgaggcagcagcc

SEQ ID NO: 47575 - RNA, 82 nt, Homo sapiens
ggacgacagaggagccgaaccacccagaaacccaccagagaaggcgcggccacccaggacccgggggaggcagcgaagaaaa

SEQ ID NO: 47576 - RNA, 76 nt, Homo sapiens
cagagaaagaggcaagaagaaagagacgagagggccggcagaaaacggcgggggcaaagaaagacccgaagaagcg

SEQ ID NO: 47577 - RNA, 54 nt, Homo sapiens
cgaccggcacacagcagagaggaaacaggaacacgaaagaggaaaaacgcacaa

SEQ ID NO: 47578 - RNA, 74 nt, Homo sapiens
gccaccggcgccggaggccgaagagcccaaaaggcagagcgaggagagaagaaggagggaaagccaaacaacgg

SEQ ID NO: 47579 - RNA, 72 nt, Homo sapiens
gcagcacaaggaaagccccaagcggaagggcaccagggaagccagggcaagcgagcaaccacccggggacga

SEQ ID NO: 47580 - RNA, 57 nt, Homo sapiens
aggcagcgggccggcgcacacggagaagaaaaagaaccaggagcggcagaccgccgc

SEQ ID NO: 47581 - RNA, 62 nt, Homo sapiens
cagcaacccccccacgccacacagggaaggcacacagcaggagaaagacagcaaagaaaagg

SEQ ID NO: 47582 - RNA, 51 nt, Homo sapiens
gacggcggcagacaacacccaggacaaaacccggcgaggagcgggcaaagc

SEQ ID NO: 47583 - RNA, 77 nt, Homo sapiens
gcacagaagaggcgcaccagagaccagacgacgggcggcagagaagagaagagcacagcgggaggaaagggagagac

SEQ ID NO: 47584 - RNA, 73 nt, Homo sapiens
caccaacacacgggaacccaagaaacaaacccagacgggcagaagagagagaaagcgcagcagcagaagcgca

SEQ ID NO: 47585 - RNA, 59 nt, Homo sapiens
cagacgcagggcgcccccgggaaggggcccggccaggaccggggaagggggccgagagc

SEQ ID NO: 47586 - RNA, 81 nt, Homo sapiens
cccccggcacaggcagcggaggagcccgaccgacccgaacccaggacgagaaaaaacagagcggaacaagcggcccaagag

SEQ ID NO: 47587 - RNA, 65 nt, Homo sapiens
ggacaagagagcagagagcacagccaccacgacacccagcaggaagagacgcaaacagcagacgg

SEQ ID NO: 47588 - RNA, 81 nt, Homo sapiens
agacggccagggagagaggaacccaagacaccaccaggagcccccaacaagcccaagaggagagaccccagaggagcgcag

SEQ ID NO: 47589 - RNA, 72 nt, Homo sapiens
cacacacggaccgaccgaagaacccggaacccaagcaagggcgagacgcggaaaaagggcaacagagaggga

SEQ ID NO: 47590 - RNA, 80 nt, Homo sapiens
aaccaagaagggggaaagcaccaaaacgcaggggggcccaggcagaccgagggaaggcagagggggcgagggaggaaagg

SEQ ID NO: 47591 - RNA, 69 nt, Homo sapiens
agaagaagggacaaaaggcgcacacacaaaggggagccaggaagaagacaaaacagagaggaagcagca

SEQ ID NO: 47592 - RNA, 63 nt, Homo sapiens
gcgccacaagacaccacagaagacaaagagccgccacgaaaaaagcgcgcggaggcaggccag

SEQ ID NO: 47593 - RNA, 83 nt, Homo sapiens
aaacagacacagcacaccacaccaaggacgggaagggagaaagacagcaaagaaaaggagaagaaaggaaaaaaacaaccccg

SEQ ID NO: 47594 - RNA, 71 nt, Homo sapiens
accgccagagaaaaccacagagagcagcggagacccaagcaccggcccagagagcgcaccccggaagccaa

SEQ ID NO: 47595 - RNA, 83 nt, Homo sapiens
ggcgccagagccggggacgaaagggaaggacaggcagagcaaacaagggaaggccgccaaagcccaaacagagaaccaaagaa

SEQ ID NO: 47596 - RNA, 75 nt, Homo sapiens
cacaaggaccacgcaaaaccggcaaggaaaacgcaccaagaacaaaaccagccaagcagaggagaaaaagacagc

SEQ ID NO: 47597 - RNA, 61 nt, Homo sapiens
agcaggggccggaagcaccaggacagagcaaacgcccggaggagcagcgaaggagcaggag

SEQ ID NO: 47598 - RNA, 68 nt, Homo sapiens
cacagccgaccgaggaagggcagcaaacacacaagaagaaggaggaaggaagagacccagggaggcgg

SEQ ID NO: 47599 - RNA, 83 nt, Homo sapiens
cgggggccgaggccacagccacagcaggggaagcgaaggcagcgggggcacagcgagggggcagaccccagcgccacgaacgg

SEQ ID NO: 47600 - RNA, 126 nt, Homo sapiens
ggagagcccgcgagcaccgggcgcgcgcggccgagcgcggaggcgccccgcgcagcgcgcgcccaagaggaggagacccacccggggacgagccgccccagaagcaccccaggccaccacgcgggc

SEQ ID NO: 47601 - RNA, 69 nt, Homo sapiens
gacagagcgggagagccggagagaaaccacggccaacaggaagaaagaaaggcagacccggcaccacag

SEQ ID NO: 47602 - RNA, 83 nt, Homo sapiens
ccgcggcccccacccgcccccagcaccccacaagcggaggaagaccaagagaagagacgagcgggggacggcacgggccgcag

SEQ ID NO: 47603 - RNA, 82 nt, Homo sapiens
cacgagccaggaaagaaagggcgacggggaggacggaagaaagaccccaaaaaagaaagacccacacagcaaggagaagaga

SEQ ID NO: 47604 - RNA, 68 nt, Homo sapiens
aaaaccagccccaggaggggacaaaaccccgaaaaaggcgcacaaacagggagaaacaggaggagacg

SEQ ID NO: 47605 - RNA, 68 nt, Homo sapiens
cgaccacaaggagagacacagaaggaaacccagacgacaaggaaggccaagggacccacgaccaacca

SEQ ID NO: 47606 - RNA, 89 nt, Homo sapiens
ggcggaggccccagggaagcgcagaaagcaggcgaacccgcggcgcaaaacgagaaggagggggcagagcacggcaggcagaaggggcc

SEQ ID NO: 47607 - RNA, 77 nt, Homo sapiens
gaagagaggagcgacgccgggggcgcagaccgggcaagaccacccgcaagcacgcggccaaagagggcgaaaaaaag

SEQ ID NO: 47608 - RNA, 58 nt, Homo sapiens
cgaacccaggcgcacaggagaagagacccaagaggaaggaccaaaccacagcaaaaac

SEQ ID NO: 47609 - RNA, 76 nt, Homo sapiens
aacgcaggaccagagagcacgcaggagccaagacgccaggaggaggagcaaaggggaagaggagccgaaggagacg

SEQ ID NO: 47610 - RNA, 81 nt, Homo sapiens
cacggggaaccgcccggcccagcccccgagcccaggaagcacgccacgggagcacagggggcagacccaaaggaaacgcac

SEQ ID NO: 47611 - RNA, 87 nt, Homo sapiens
cagacgcgcaggaagaagagggaagccaaggcacaggggcccgacccagcaggacagaaagaagagccacgaacccccgaacaagga

SEQ ID NO: 47612 - RNA, 73 nt, Homo sapiens
aaagagggccggaaaccggaggcaggaaacgcagcaaagccacgggggagaagaagccgaggccgccagcgcc

SEQ ID NO: 47613 - RNA, 81 nt, Homo sapiens
gcagaaggccggagacaccagcagaggccgagggagccaaccggagcaacaccccgaaccgggggaaaggagggccccagg

SEQ ID NO: 47614 - RNA, 70 nt, Homo sapiens
aaaaggcccgggacccaggaaccaggacaaaccggcgaccacacacggggacgacggggaagccggacag

SEQ ID NO: 47615 - RNA, 82 nt, Homo sapiens
aacggaaccaaggcgaggagacgagggccggggagcccgagcgacccggggacgaggaagaggagcgaaaacaccaagaagc

SEQ ID NO: 47616 - RNA, 77 nt, Homo sapiens
gaagccaaggccccagacaggagagcagcagcaagagaggccgccgccgcccaagaccggcaacgggcaccggagac

SEQ ID NO: 47617 - RNA, 72 nt, Homo sapiens
gggccaagggaacggggggaagaggggggacggaaaaacaaaggaacagccaggacaaccggggcggacacg

SEQ ID NO: 47618 - RNA, 69 nt, Homo sapiens
gaagaaggaagggccacccaggacaggggcacccaggaagaagagagggcgaaggaggccacacagaag

SEQ ID NO: 47619 - RNA, 83 nt, Homo sapiens
ggaagcggacgcgggaggacggcacaccgcggcggagaccaaagaccagacggaggaagcagccagaagaggaaaggaaagga

SEQ ID NO: 47620 - RNA, 77 nt, Homo sapiens
gaggccacagaagaaacaagggggaaaaccagggaccgaggaacccgggagccaggaaggaaggagcgcccagaagc

SEQ ID NO: 47621 - RNA, 71 nt, Homo sapiens
cagccagagcggaccggggcagaccaaacggcaagaagagagaagaagcaaaccgggaccggaagcaccaa

SEQ ID NO: 47622 - RNA, 62 nt, Homo sapiens
aaggacacaacccggccgcagagcccaggcaagcagcaagaccagcgagacccaacagaggg

SEQ ID NO: 47623 - RNA, 79 nt, Homo sapiens
gacaagcagcaaggcgcggggggccacgcgaggccgaggacccaaagacaggaccacgcaccagcagagaaggaaagca

SEQ ID NO: 47624 - RNA, 75 nt, Homo sapiens
agcccgggccggacacagcccaagccccggggaccgggaaacgagccgagaccaccaggaggaggagcggggcgg

SEQ ID NO: 47625 - RNA, 74 nt, Homo sapiens
gacaaaagagagagcggaaacgagggaaagaccgggccaaagcccggcccacaaaggggaagcagcagcggagc

SEQ ID NO: 47626 - RNA, 72 nt, Homo sapiens
agcaacaccccaagcgaccgagggagaaaacacgcagagcccagacggcagaggcccagaaagagaaaccag

SEQ ID NO: 47627 - RNA, 55 nt, Homo sapiens
caggaccccccccaacgaggcgcagggcccagcggaaggccacaccagagacaag

SEQ ID NO: 47628 - RNA, 85 nt, Homo sapiens
ccgaggacacccccgccagaagggcccccgccacccaggccagaggcaggacgcagggcaggggagccccgaagggagcaagcgg

SEQ ID NO: 47629 - RNA, 78 nt, Homo sapiens
gcggaggagcgaggcagcgacaggacgggaacggggccaaaagggcggggaacggaccaccagccccaacgcacgcgc

SEQ ID NO: 47630 - RNA, 69 nt, Homo sapiens
gcaggaacagcaccagaccaagccagaccggccaggaggccacagaggagaaagaggagcccccgcgcc

SEQ ID NO: 47631 - RNA, 82 nt, Homo sapiens
cccgggaggggggagcggcgggaggccaccgccagagggcccaggcagcggcaagacggcccaagcgaccagacacagaagg

SEQ ID NO: 47632 - RNA, 87 nt, Homo sapiens
ggcggccccagcaacacggcgcgaggcaaggccagcgagaccgaaggagcagacgaggcacgagcgccagcgcgagacagacggggc

SEQ ID NO: 47633 - RNA, 105 nt, Homo sapiens
gggaggagaaggcaggcagcaagaagacgagcgagcggcaggcgcagcgcagccgccagcgcaagcccagcagagcaaaggcccgagaagcgggcccaccaccaa

SEQ ID NO: 47634 - RNA, 78 nt, Homo sapiens
agaagggagaccagcagaacccaccagggcagacacaaggaacagccagccaggagaaaaacgaacccaacagaccac

SEQ ID NO: 47635 - RNA, 79 nt, Homo sapiens
gagcggaagagaacgaaaagagaagaacaaggaacagcacaccggagcaaggccaagggaagaaagccgaaggagaaaa

SEQ ID NO: 47636 - RNA, 77 nt, Homo sapiens
gaaagcccacagccaaagccgggcggacgcgggccagcagggagaagaggaggaagcagaccaacccgacaagcagg

SEQ ID NO: 47637 - RNA, 62 nt, Homo sapiens
aggacacacagaggggcagccaaaagaagaaaggaaggcaagcagccacccgacagcaaacc

SEQ ID NO: 47638 - RNA, 76 nt, Homo sapiens
aagacgcgcaaggaacgaagcaggcccaggagaaagcacaggacagagccaggacaaaaccaggcagaaccaacac

SEQ ID NO: 47639 - RNA, 71 nt, Homo sapiens
ccaggcagcgggcggcgccagcggagaacagcccgaccacggcgggacaagggcgcaccggggcgcagcga

SEQ ID NO: 47640 - RNA, 104 nt, Homo sapiens
cgccgaaggggaaaaacaaggcccacacagagacaaaggcaagagggaacgcagaacggggcagcacccggaaggcagagagcccgggagaccaggggcccggg

SEQ ID NO: 47641 - RNA, 70 nt, Homo sapiens
gcgcgagaaaacgaaggccaaaaaggaggagaaccgggagccaagaggccacgacagaagaacagcaaca

SEQ ID NO: 47642 - RNA, 71 nt, Homo sapiens
caaaagcaaccgcgcagaaagagcgaacaccggcagcgagacaggagccacagggcccgagggcaggacag

SEQ ID NO: 47643 - RNA, 79 nt, Homo sapiens
gaggacggcacccccggagggaaccagaccgggacagagcccgcacgcggacacgcagccagcaaccggaccgaagccg

SEQ ID NO: 47644 - RNA, 89 nt, Homo sapiens
caggacaaaggaagccaagcaggaggcgccgaaaaaacggaaagaaaccacaaaacaggaaaagaaagaagaagccaaacgaaacgaaa

SEQ ID NO: 47645 - RNA, 83 nt, Homo sapiens
gcccagacccggaggaccgaagcccggacgacgaggaaccgcccaacaggcccggaggcaacgaaagcaaaccgagagcaggc

SEQ ID NO: 47646 - RNA, 39 nt, Homo sapiens
cagaagcaccacggaaaccaggcgcaagacaaaaacaaa

SEQ ID NO: 47647 - RNA, 83 nt, Homo sapiens
cgccgaggacgaggagcagcagcccaccgagacgagcgcagcagaacgacgcaaagcccgcgccgcaccaacgggaagggccg

SEQ ID NO: 47648 - RNA, 38 nt, Homo sapiens
cgagcccagccgaaggagaagggggcccaaacacagaa

SEQ ID NO: 47649 - RNA, 85 nt, Homo sapiens
agcgccaccaccacgccagccgcaccagccgcccaagccgcacagccgcggcggcagcagcaggagagcggcccagcaggagggc

SEQ ID NO: 47650 - RNA, 76 nt, Homo sapiens
cggcgaacggaaggccacgcccccccgccgccccccagcccgggcgggggcagagccagaggaacagaagacacca

SEQ ID NO: 47651 - RNA, 75 nt, Homo sapiens
cccgccaggcgggccgcggcggcccggacaggggccccagagacgacaggaggcacgagacgacaaggagaggcc

SEQ ID NO: 47652 - RNA, 72 nt, Homo sapiens
ggcacagccaccaaacaaccgcagcgggcggccaccaccacacagaacaagcgaggaaagacccagacaacg

SEQ ID NO: 47653 - RNA, 56 nt, Homo sapiens
gcgcgcccaacgccaacaggagaccggaaaccgagagaaacgaagacgaagaaaca

SEQ ID NO: 47654 - RNA, 79 nt, Homo sapiens
cacggccaccaaagggggcaaacgaacaggaacagaaggaggaaagagagcgcaacacagaaaaaggcagaaagggcag

SEQ ID NO: 47655 - RNA, 69 nt, Homo sapiens
cccgcaagccccagcacgagaacggcagcgcacccaggccaaaaaagggggcagacccaaaggaaacgc

SEQ ID NO: 47656 - RNA, 83 nt, Homo sapiens
ccggaagaggaccagaacccggccagccgcgacccaaggagaggcagcaacgggcgagagccaacaggaaggccgggggcagc

SEQ ID NO: 47657 - RNA, 67 nt, Homo sapiens
ggcacagccaagacgcccaaacccagaaacaagcggccacagcagcacgaggaaaacagaaaagcag

SEQ ID NO: 47658 - RNA, 83 nt, Homo sapiens
gacacaaaggaggcaccagacgccggcaacaaagaacacacggaaggggagccgccaccaaaagcagacggaaaacccacggg

SEQ ID NO: 47659 - RNA, 82 nt, Homo sapiens
ggaaaaaggaggaccccgccaagggccccaagagggcacacagcacacaccgacaggccacgaccaaaaggaggggagaagg

SEQ ID NO: 47660 - RNA, 61 nt, Homo sapiens
aaggaagccacggcagacacacaacccgacccgacgagagccccagcgagccagagggaca

SEQ ID NO: 47661 - RNA, 68 nt, Homo sapiens
cgcaccgcaggcagacaaaagggccaaagaagggagagagggcccaacaaaagaacccgaagaggaga

SEQ ID NO: 47662 - RNA, 55 nt, Homo sapiens
agagacaagccgagagaaagcaagcaaaggacacacagcaacgaagcaggggagg

SEQ ID NO: 47663 - RNA, 83 nt, Homo sapiens
ggacccggccccggcccacaggggggggcaaacccgagagaacgggggcaaagagaaccaggagaccccaccaccacagaaaa

SEQ ID NO: 47664 - RNA, 72 nt, Homo sapiens
gcccgcgcggccgcagaagcggcagccaaaggcagggaagaaaaagaagacaccagagaaacacgagagcag

SEQ ID NO: 47665 - RNA, 53 nt, Homo sapiens
acgggggaggaggcaacgccgcgaacccccaaagacaacaaggagcaccaaaa

SEQ ID NO: 47666 - RNA, 71 nt, Homo sapiens
cgcacccagccacaccggaaccgcgggagccgaaggcaaacggagagcaggagccacaggaaagagcagaa

SEQ ID NO: 47667 - RNA, 76 nt, Homo sapiens
agcgggacccaccaaaaaaaaagaaaaacagaaaaaaaaaacacgcaaagaccaccaggaaaccagaggaacagac

SEQ ID NO: 47668 - RNA, 38 nt, Homo sapiens
ccccgcgcggccagaccgcggcagaagaagaagagcgg

SEQ ID NO: 47669 - RNA, 67 nt, Homo sapiens
ggagccgcaaggcacgaagcacgaagcaaacaaaggcacaccaacggcaacggagaaggaaggaccg

SEQ ID NO: 47670 - RNA, 63 nt, Homo sapiens
gacgggcagcaagggcccccgcggaaggaagcagccaccccgccaggccccccgcccgccgcc

SEQ ID NO: 47671 - RNA, 60 nt, Homo sapiens
ggcacaacaaccaagaaaaacgggggccgccgccaagggcgaaaccaagaaccacagacg

SEQ ID NO: 47672 - RNA, 74 nt, Homo sapiens
cgggccggaccagaaaagggggccacaacaggaagccggaagacgggaaaggaaacgagaacgggcagcgcaga

SEQ ID NO: 47673 - RNA, 62 nt, Homo sapiens
cgcgggacaaagggaagcgaagccggagcgcgggcgccgcccgcgggcagcaagaaaacacg

SEQ ID NO: 47674 - RNA, 76 nt, Homo sapiens
aaggagggcgaagagcgaggagaggagaggagaaaaccaggggcggaaggaccgagccagagcaaagaacacgagg

SEQ ID NO: 47675 - RNA, 73 nt, Homo sapiens
ccagcacaaaggacccaaaaggaagggcaaacccacacggcaccaaagccaggcggccccgccgagcccgcgc

SEQ ID NO: 47676 - RNA, 56 nt, Homo sapiens
gagccagaggagccgccgcgaggcgacggcggccaagaccaccaaagagggccccc

SEQ ID NO: 47677 - RNA, 57 nt, Homo sapiens
gcacgcgccacccacggagccaaccagaccaaggcagaagaccccgcagggacagcg

SEQ ID NO: 47678 - RNA, 81 nt, Homo sapiens
cagccgcggagagaccgaggcgcagcgcgggcccggccgggcgcgcggcgggcggagggaaaggccaccgacagcgcacaa

SEQ ID NO: 47679 - RNA, 80 nt, Homo sapiens
ggcgaccacgcggaccggaaaaaagcgaacgcaaggggccaagaagagcagagcccgagcaagaagaggacgaaaagggg

SEQ ID NO: 47680 - RNA, 91 nt, Homo sapiens
ggaaacgaccggcagggagggaaggcaagagccaacccaaaaccaaggcccagaccaagccccaccaacagaagagccccacacacagccc

SEQ ID NO: 47681 - RNA, 68 nt, Homo sapiens
cgccccagcccgccccccgggccgacgccacaggcgggcggcggaaggcccccgcccagcccagagga

SEQ ID NO: 47682 - RNA, 83 nt, Homo sapiens
gacaccggaaacaagacacgggaggggcaaagaaaaaggagagaaaaagaggcaaaacaacaagaagaaaagagaaaaaagag

SEQ ID NO: 47683 - RNA, 61 nt, Homo sapiens
aacgcagcaccaaaggaaacaggccaaccagaaaaccaccgacaccagagacaacaaggaa

SEQ ID NO: 47684 - RNA, 57 nt, Homo sapiens
aacaagggacgggaaagaccgacccaacaagacagagcaaccaggggcagagagcaa

SEQ ID NO: 47685 - RNA, 77 nt, Homo sapiens
gacacgaggcaacacccgccgagcacaggcgaccggccacagccagggcagcaggaggggggaagcaggaggcacgg

SEQ ID NO: 47686 - RNA, 72 nt, Homo sapiens
agcgccgagccagagccagggaacggaggagcgagccacggcgggagagcagaaagacgagccgccggggaa

SEQ ID NO: 47687 - RNA, 79 nt, Homo sapiens
ccgcggagaagggagacacaaggacagcagcgacggggcccgcaccccaggagaggaagacgaggaagcagaagaacac

SEQ ID NO: 47688 - RNA, 72 nt, Homo sapiens
gaagaccagccacgacagcccccagggagccagaggccggaaaaagggaaagaacaaaacacacagcgaagc

SEQ ID NO: 47689 - RNA, 78 nt, Homo sapiens
ccagacgggcccagacccccgccaaacaggcgaagccgacgagcccgaacagacgcaccagcgggaggaagagggacg

SEQ ID NO: 47690 - RNA, 83 nt, Homo sapiens
gacccccaccacacgaggcaggagacgagaccacggcaagaagaaaacccgcagcccaaagggcagaagaagaagaagacgca

SEQ ID NO: 47691 - RNA, 80 nt, Homo sapiens
gggggggcccccgagcagcagacaggagcaagggaccagaccccacaagaaaacacacaaccacaggcccaagcaaacac

SEQ ID NO: 47692 - RNA, 57 nt, Homo sapiens
gccaggacgcaggggagcgcaggccgagaaaggagcgagacggaacacgggcaacgg

SEQ ID NO: 47693 - RNA, 47 nt, Homo sapiens
accgacggcggaccgacccgagccgacccccagcagagggaagacca

SEQ ID NO: 47694 - RNA, 65 nt, Homo sapiens
aaaaaagacggagacccccggaaccaaaggaaaacagacacgacccaaggaacaagcgggaaacg

SEQ ID NO: 47695 - RNA, 47 nt, Homo sapiens
gaaggaccaagaaccagggacacacaggaagacgaacacggaacggg

SEQ ID NO: 47696 - RNA, 40 nt, Homo sapiens
aagaccacagcagcacccaggcccggaagaaacggcgaga

SEQ ID NO: 47697 - RNA, 60 nt, Homo sapiens
ccggagagaaaccacggccaacaggaagaaagcggaccggacagcacccaaccccaacag

SEQ ID NO: 47698 - RNA, 68 nt, Homo sapiens
caagagagcgcgacagacgcaacagaagacagaccgcgaggccacacccaagaccgagcccaagcccg

SEQ ID NO: 47699 - RNA, 65 nt, Homo sapiens
cagcccacgcaccaagaaacagccccacggcagcacagaaaggggaggccacacaggaagaaaag

SEQ ID NO: 47700 - RNA, 77 nt, Homo sapiens
cggaagggggcggccacgaccaagaagaagccgcggacccgcgagagcccacgaacggcgggaacagaaagccagag

SEQ ID NO: 47701 - RNA, 76 nt, Homo sapiens
cgggaagaaacgaaggggggaggcccaggccaaaagagagaagagagcggacccacaccagggaagacaggggaga

SEQ ID NO: 47702 - RNA, 77 nt, Homo sapiens
caccaccagcagcaacaggaggaaaacgacccggcagagcccggggagcagcagccgcgggcgggccgcccccgccc

SEQ ID NO: 47703 - RNA, 72 nt, Homo sapiens
cgcgcgcgcacgggcggcgcggcggagaggagccaagcccaacgggacgggaaaacggccacagccaacgac

SEQ ID NO: 47704 - RNA, 68 nt, Homo sapiens
cgcagggcgcccccgaaacagacgcacgccgaaaaaaaacgaaccaggggagaaaaccagagcagcgc

SEQ ID NO: 47705 - RNA, 52 nt, Homo sapiens
cagcagcccccagagcggaacacagggacacggcagggggaaggacagacgg

SEQ ID NO: 47706 - RNA, 74 nt, Homo sapiens
ccgccaggaagaccccgccccgagcccaaaccagaagggagcaaagcccggaaaaacggggaagggcgagcacg

SEQ ID NO: 47707 - RNA, 73 nt, Homo sapiens
gaaaacgcaaggagaaacccaagagcagcggcagacaccacccaaacgccggcgaccccaagaggaagcccaa

SEQ ID NO: 47708 - RNA, 86 nt, Homo sapiens
cccgggcgaggcacaccccggagccaggagggcgggaggggcgaacggggaagacaggccgaggagcggggagaccaaccagcaga

SEQ ID NO: 47709 - RNA, 84 nt, Homo sapiens
cagcgggggaaccggcgcgccggcgcgcggcgcggacaggcccaaacgagcaagaacgaggccaaggaggagggacacagagac

SEQ ID NO: 47710 - RNA, 72 nt, Homo sapiens
cgccaggaggcaagagccccggaccgacccacggaaaggaagacaggacgcgccaacgagacagcaagacaa

SEQ ID NO: 47711 - RNA, 78 nt, Homo sapiens
aagaacaaggaaggccacagggaagcacgaggaagaacggaccaggcaaaacagaaccagggaagaaaaacagaagaa

SEQ ID NO: 47712 - RNA, 68 nt, Homo sapiens
gggagaaacacccgaacgaaggagcccggagcgagagcgagagaagggaccagccagaagaaacaacc

SEQ ID NO: 47713 - RNA, 76 nt, Homo sapiens
gagaaccggagcaggaagcggggaagcgccgcagaaagccgcaacaccgagaaaaaaaccacggccaccaaaggaa

SEQ ID NO: 47714 - RNA, 74 nt, Homo sapiens
gcgcccggcgcccgcacggaccgcggcaagcgggagcggacccacccaagccaccgaacccggcccgacggagc

SEQ ID NO: 47715 - RNA, 68 nt, Homo sapiens
gaaccagcaacaagccagcaaaaaaaagaggccgcacagcgaaagaaagcggaacccaggcaccaccc

SEQ ID NO: 47716 - RNA, 51 nt, Homo sapiens
gacggggcgccccacagaggggcgacgcgggccgccgcccggcgaaaaggg

SEQ ID NO: 47717 - RNA, 79 nt, Homo sapiens
cgggccgaaccgggagcgaggaaccagaacgaaaagcgccagaaaggcagagcgaaggaaaaccagagaaaaaagaagc

SEQ ID NO: 47718 - RNA, 54 nt, Homo sapiens
aaggcccccaaaagggcaaccagcaagagcgccacgccagggaccccccccaac

SEQ ID NO: 47719 - RNA, 77 nt, Homo sapiens
aagaccaccacgcccagggccagggaacagccagggcagggaaccaagaccaggacaaagaagacccggagagacaa

SEQ ID NO: 47720 - RNA, 58 nt, Homo sapiens
acagaaacggcacccaaaggcgcaggaggacgcggcacaccaagagacacccacgcca

SEQ ID NO: 47721 - RNA, 80 nt, Homo sapiens
cacacagcaaaacagggcagaaaagaacaaacagcaggcgagcgcccaaacaagaagccaaaggaggaaacaggaaaaag

SEQ ID NO: 47722 - RNA, 69 nt, Homo sapiens
cccccccgcgccgccggcacgcgcccgacaaaccgcaaggcaacgaagcaccgccgggacaggccacag

SEQ ID NO: 47723 - RNA, 69 nt, Homo sapiens
ggccacaaaggcagcacacaccagagcgaagcgagcccgagccccggcccaggccccccgagcgcacgc

SEQ ID NO: 47724 - RNA, 79 nt, Homo sapiens
aaccacggagacgcagggccagagaggcagcagaagcgcaacaaacgggccccaggcaggccgaagagcggggcccggg

SEQ ID NO: 47725 - RNA, 68 nt, Homo sapiens
ccggaaccgcaccagccaaggccaaagccaccgccccgcgccgccccccggccaccgcacaggcaaga

SEQ ID NO: 47726 - RNA, 79 nt, Homo sapiens
gcaaccaaacaccacccggacccgcgaccgcacaaagacgaacagcacgcaagccagaccacagaaagcaagccagcac

SEQ ID NO: 47727 - RNA, 106 nt, Homo sapiens
ggaaggggcccgaagcccccgcaggaaccacaacccaaccaggccacgaagacggcaaggaggaaaggaagaggaagacggcaagaagcgaaaaagacgaagaaag

SEQ ID NO: 47728 - RNA, 87 nt, Homo sapiens
accagcaccaccagcaggcacaggagaccggaaagaagggagaccgcggggaaaagagaaaggccaaccaaagaccaggagaaccag

SEQ ID NO: 47729 - RNA, 74 nt, Homo sapiens
aagcaagagaagacggggcgagcccccccagaaaggaagaaaaccagagacccagacacgcgaaggaacgaaag

SEQ ID NO: 47730 - RNA, 58 nt, Homo sapiens
cagaaacagaggacaaggcagcaaagaagagggacccagaccccaggaggcccacccc

SEQ ID NO: 47731 - RNA, 74 nt, Homo sapiens
gacccacacgaggccacccagcccaccaaacacgccggaaaccccgcccacagcacgaggcagccaaacgggca

SEQ ID NO: 47732 - RNA, 74 nt, Homo sapiens
aaaacgagaagcagagaacgcaaacaagaagacgacagcgaacacccgaaggagccagcaacagaggagaacac

SEQ ID NO: 47733 - RNA, 100 nt, Homo sapiens
acgaccggagcgaggagacccgagcgagcagacgcggcccggcgcccgcccgcgcaccaccaggcggaaacagaacgacagcccgcaccgacgccggcgg

SEQ ID NO: 47734 - RNA, 79 nt, Homo sapiens
ccccaccgggcggggaccccggcccggcagcagcgacgagagcccacgaacggcgggaacagaaagccagaggccggag

SEQ ID NO: 47735 - RNA, 37 nt, Homo sapiens
ccaaggccagagacggcagagagagacggggcgccag

SEQ ID NO: 47736 - RNA, 79 nt, Homo sapiens
gagaccacaggcacaccaaccagcaggaccaggagaggagaacaaccccgagacagaaaggcccgcacaaggacaccag

SEQ ID NO: 47737 - RNA, 60 nt, Homo sapiens
aggggaagacgagggaccccggccgccaggagcaggccgggcccgccagggcacgcgccc

SEQ ID NO: 47738 - RNA, 82 nt, Homo sapiens
aaggacaaggccacagagcggggccacggaaacccaccagagaaggcgcggccacccaggacccgggggaggcagcgaagaa

SEQ ID NO: 47739 - RNA, 75 nt, Homo sapiens
gaagagagcacacgggccaggggagagagaagaaccgagcaggacgaaaggaacccgcagccggcccagcccacc

SEQ ID NO: 47740 - RNA, 120 nt, Homo sapiens
gcgcccacggaagagggcaacaccccgacggccccagccgcagcccaccaggcccccgccccagaagggccagcgggccagcgagacaggcggaggccagccccggcccaccgccagcca

SEQ ID NO: 47741 - RNA, 76 nt, Homo sapiens
cggcaccgcgccgcgccggggcgcccggcacccgcgggaaaaagaccagaaggccacccccacacaccaaaggcaa

SEQ ID NO: 47742 - RNA, 92 nt, Homo sapiens
gcaagagaacagcagcgccgcccgccgacagccaggcccgggagaaggagagaaggcgcgcaggagagcgcagagacccgcccggaagcgag

SEQ ID NO: 47743 - RNA, 76 nt, Homo sapiens
aaaccgcgaccaagacagaaccagaggaccggcaacaacccgaggacgaaccaccccgcgccagcagcacagcacg

SEQ ID NO: 47744 - RNA, 64 nt, Homo sapiens
ccaccacgcggcgggccggcccgggcgcgccaggcacagccaagagcggaccggcagcggccag

SEQ ID NO: 47745 - RNA, 77 nt, Homo sapiens
gaagaagccaagaaaaaaaagaagagagcccaagaacaaagcgccccaaaaacaacccccgccaagaagagaagaag

SEQ ID NO: 47746 - RNA, 81 nt, Homo sapiens
ggacgacgcccggggagaagagaccccaagagggagcagcccacggcaaagaaggaacgaagcgcgcggcaggcgcgcgcc

SEQ ID NO: 47747 - RNA, 77 nt, Homo sapiens
cgggcccccggccgcaagcagcgccagaacacaaacaaaaccggaagaggccgaagaacgcccgaagagcacgggac

SEQ ID NO: 47748 - RNA, 57 nt, Homo sapiens
caaaggcaccggaaagccaggaaaaacacacgggagcgcggcgcacccgcgcgcagc

SEQ ID NO: 47749 - RNA, 84 nt, Homo sapiens
gggagaggcggaccggaccacggcgcggagcgccgccagaggagaagagccgacaaaaggacaaggggcgaagcccgggggaga

SEQ ID NO: 47750 - RNA, 55 nt, Homo sapiens
ccaccagagcgaacgcacacccgcaggaaaaccaagggaaaagaaaggccggcaa

SEQ ID NO: 47751 - RNA, 69 nt, Homo sapiens
gaccccacgcaacagacgggcgcgagaagacgaaccaaccagagagaggagggcaacagagagaaaagc

SEQ ID NO: 47752 - RNA, 66 nt, Homo sapiens
ccggcagccgcccgaaggacaaaccggcgaccacacacggggacgacggggaagccggacagcaag

SEQ ID NO: 47753 - RNA, 73 nt, Homo sapiens
gcagacaaggaaaaacccaaaaagaggggggacagcagcagcagacgaaagagaaggacgcggaccagacagg

SEQ ID NO: 47754 - RNA, 74 nt, Homo sapiens
gccggagagggccggaccgagcggccggggcacaccaaagggaaccaagaagggacccaaaaagacggacagcc

SEQ ID NO: 47755 - RNA, 79 nt, Homo sapiens
gaccccgaggacgaggagggagcgagacaggccggaaaccccccggaaggggaggaggcgggacaccgacccaagacga

SEQ ID NO: 47756 - RNA, 49 nt, Homo sapiens
gaggcgcggacacgcaaaccacacaaggggacccacagaaagggcccag

SEQ ID NO: 47757 - RNA, 82 nt, Homo sapiens
cccagcgcgcaaagcgcgaggggcgaggagaaaggccccgaggcaaggaaccacacccagcccaccagccgacgcccagcca

SEQ ID NO: 47758 - RNA, 57 nt, Homo sapiens
aaccccgccaggaggccacggacgaggcggcggagcaggagcaaaggagcaagaaac

SEQ ID NO: 47759 - RNA, 50 nt, Homo sapiens
gcggggacccgacgcccgcacgcacccgaagccaggccgcgcgggggcag

SEQ ID NO: 47760 - RNA, 68 nt, Homo sapiens
cagacgcaaccccacaaaccgaaacaggcacggcccaacaaaaagcagcgccaacgaaaaagaagaac

SEQ ID NO: 47761 - RNA, 68 nt, Homo sapiens
cagccgccgccccgcagccccccgcagcacccagccggccacgaaccaagccgccacagggagaaaag

SEQ ID NO: 47762 - RNA, 77 nt, Homo sapiens
cccagccaggcagaccccgggcagcaggcccagggcacccgaccgcccccccccaccgacgccccgagcgaaaaacg

SEQ ID NO: 47763 - RNA, 75 nt, Homo sapiens
gccgcacagagccaggcaaggcggccggagccccgggaaggccaacccagggaaaagagcacaaacgagcccaaa

SEQ ID NO: 47764 - RNA, 84 nt, Homo sapiens
cggagcccccagcgcagcggccgcgggcagcggcagcggaagagaaagggcagggcaggcccggcagaagggcacaccaggcgc

SEQ ID NO: 47765 - RNA, 74 nt, Homo sapiens
gagggacgcaaccgaaggcagcgcagcagccaaacggcggggggaaagccagaggcagaggcccaccccacacc

SEQ ID NO: 47766 - RNA, 79 nt, Homo sapiens
ccaacagaagaaaccacagaacagccagcagaagcacaccaacgacaggcccgaaagaaggcgagcacaggagaagagc

SEQ ID NO: 47767 - RNA, 73 nt, Homo sapiens
gacggcagacccgagcaagacgccaggaccggaagcagagaaagggagaacggaaaaaacaaagcgaaacagc

SEQ ID NO: 47768 - RNA, 75 nt, Homo sapiens
cgcaccgcgccccccacccggacggccaacaccaccggcacaggacggccagaggcgccccagagcacacagcag

SEQ ID NO: 47769 - RNA, 72 nt, Homo sapiens
gccgcgggcaccagaaaagggacaggacagaggaacacccccaccccggaccgcgcgaggacgacgggggaa

SEQ ID NO: 47770 - RNA, 67 nt, Homo sapiens
gaaaagcaccagcccagggcaagcaaggagacagagccccagaaccaaacgagacaaggaaaagacc

SEQ ID NO: 47771 - RNA, 75 nt, Homo sapiens
cacacgcccgggaggagggcccaggagaccaggcaagacgagaaacaaaccaaggccaaccacgggaacaaaaga

SEQ ID NO: 47772 - RNA, 79 nt, Homo sapiens
aggcggccggcacacgccacgagaagggggcagagaccaacgaggcagggaggcgcccgcacagcgagacgccggccgc

SEQ ID NO: 47773 - RNA, 73 nt, Homo sapiens
accgagaacccgaccccgcggagacagcgagacccgccaggagcaaagggagcaggaagaagagagccaagcg

SEQ ID NO: 47774 - RNA, 69 nt, Homo sapiens
aacaaacagcaagaaagaccacaagaccagaaacagagcggaaacagacacccaccacaagaaggaccc

SEQ ID NO: 47775 - RNA, 67 nt, Homo sapiens
cgggggaaggggaagccgcgacagcccgggcgccacaaggagagccggaggagccaccaacagaagc

SEQ ID NO: 47776 - RNA, 77 nt, Homo sapiens
aaaccggagggaagagggacaacccgccacaacgacaaaggaccccaaagaccccggaaggcggaccaggcacaaga

SEQ ID NO: 47777 - RNA, 59 nt, Homo sapiens
gacacgagacgaaaaagcaggcggcaaaagggaaagaagccgaaggagaccagagcacg

SEQ ID NO: 47778 - RNA, 69 nt, Homo sapiens
ggaacccgaagaagaaaggacgacagccagagagggggaagaggaagaagcaaagaggcagggcaccgc

SEQ ID NO: 47779 - RNA, 63 nt, Homo sapiens
aacccaaagacggcagccggcaggagagcgacaaaccaaggagggcagcgcacagcccagcgg

SEQ ID NO: 47780 - RNA, 58 nt, Homo sapiens
aacaagacacaaagaaccgaggacaaaaagagacgaggacgcgcacaggaaaggacgc

SEQ ID NO: 47781 - RNA, 74 nt, Homo sapiens
ccggacaagccacggccccgacccccaagacccggcgacgacccccggcagggaaggccgcgccagccaagagg

SEQ ID NO: 47782 - RNA, 61 nt, Homo sapiens
cgcccggccgcgagccggcgcagacggcagcgagagcccagagaagggaagaaagcggaaa

SEQ ID NO: 47783 - RNA, 86 nt, Homo sapiens
gcccggcgaagaaagaagggggagcggagagcgcaggcggggagggacaccgccaaacaaggaccgaaaggcggcgcaaggagccc

SEQ ID NO: 47784 - RNA, 53 nt, Homo sapiens
gcggggccccccgggcaggaagaaggagaaagacaaagccccgagaaagacca

SEQ ID NO: 47785 - RNA, 68 nt, Homo sapiens
gaaggacccggccgaggcgggcgcaagagaaggcaccaagagaccaaaagggacagaagagagagagc

SEQ ID NO: 47786 - RNA, 82 nt, Homo sapiens
cacggcgcaagcggcgcgccagagcggcacgaggcgaccccagcaccgccggaagcccagcgaggggaggaggaagggcaag

SEQ ID NO: 47787 - RNA, 58 nt, Homo sapiens
acgacccagcacggagcaccaacaacagccacggcccagcgcccaagccggcgaaccg

SEQ ID NO: 47788 - RNA, 73 nt, Homo sapiens
gagcagcgcaaccagcacaccgacagagaacccaggccaacacacagacagaggcagccaccccagacgaacc

SEQ ID NO: 47789 - RNA, 80 nt, Homo sapiens
cccgggccggggaagaacacgcccacagacgcagccacgcggcccagaagcaaagaggggcaacggcagaaacccaacgc

SEQ ID NO: 47790 - RNA, 39 nt, Homo sapiens
agggcaccagaccgaaccaaaggacgcagacacaccaag

SEQ ID NO: 47791 - RNA, 76 nt, Homo sapiens
cagcgccggcggcgcaccccaccgccaacccacggcgagcgggggccagccggccgacacgaagcggaccccggcc

SEQ ID NO: 47792 - RNA, 71 nt, Homo sapiens
gggaagcaacgcacaaacgaggagaaaaaggaacagggcgcggaaaaggggaacaagcaccagggccaaag

SEQ ID NO: 47793 - RNA, 62 nt, Homo sapiens
cacagcgccccaccccagcccccaacccccaggagggagccggaaacaaagaagaggagaaa

SEQ ID NO: 47794 - RNA, 80 nt, Homo sapiens
ccagcccccgaggagcgggacacagggagggcacaaggcgcgacgagcggagcggccgagcccggagagccggagagacg

SEQ ID NO: 47795 - RNA, 92 nt, Homo sapiens
gccgcaccagccgcccaagccgcacagccgcggcggcagcagcaggagaggggacgaagggaacccgccgggcggcccggcacccagccccc

SEQ ID NO: 47796 - RNA, 75 nt, Homo sapiens
caaaaggacgcaggaaaaaaagaacggcaggaggcagccgaccaaccggcacacccggccacgcccccagacagc

SEQ ID NO: 47797 - RNA, 86 nt, Homo sapiens
gggcggcggggccggcggggcagcggaggcggcggcggcggcggcaggacgcgccgggacgacaccccgacgacggagcaagcggg

SEQ ID NO: 47798 - RNA, 76 nt, Homo sapiens
gcaggcgaccggcggcggggacggaggcgaccccccccagacagccccgcaaagggccggcagagcaaaccggcag

SEQ ID NO: 47799 - RNA, 47 nt, Homo sapiens
cgcccaggagacaaaagcacaggaggccaaggccaaggacaaaccaa

SEQ ID NO: 47800 - RNA, 71 nt, Homo sapiens
gcgcgcccgcgcggcgcggggaccgcggcccgaacagagagaagggcgggagaaaccaaggaaagagaaaa

SEQ ID NO: 47801 - RNA, 82 nt, Homo sapiens
gccggggccaggcagcgccagggaaaaggggagagaccacaacacaggaccgccagacaggcccgagaaagggaaccaaagg

SEQ ID NO: 47802 - RNA, 80 nt, Homo sapiens
ggacacaggacgaggccacgccccaggagaacagggaagagcagcggagcagggcagaaaagaacagacccagaagaagc

SEQ ID NO: 47803 - RNA, 69 nt, Homo sapiens
gcggccggcaagagcggcggagcgcaggggagaaccggaagcaacggggcggcacacaaggagcgaagg

SEQ ID NO: 47804 - RNA, 72 nt, Homo sapiens
aacgggacgggagccgcaaagaacaaggcaagaaccccaccaacacagggacacacagccaggcccagcaaa

SEQ ID NO: 47805 - RNA, 89 nt, Homo sapiens
ggacccaacaagaggaccgccaccccacaccccaacaagccgccagggggcccagaagacaccgcgaggggccgccaccgagcccacga

SEQ ID NO: 47806 - RNA, 81 nt, Homo sapiens
gacagccacgcagacggaaacaaggcaacagaaagagcaacagcagggcaacagaagagcaaagcagcgccgggaagagaa

SEQ ID NO: 47807 - RNA, 70 nt, Homo sapiens
agcaacagaaggcgaggagaaaccaaagaacaggacccccagcagcggccacagacaggaggaagaagac

SEQ ID NO: 47808 - RNA, 58 nt, Homo sapiens
acggggccagggaacccggcaccgccccagccacgccgcaacagccccaagggggccc

SEQ ID NO: 47809 - RNA, 78 nt, Homo sapiens
aggccccccagccacgggaacgccccgagccccggccccaaagacccaaaacagagacaccccccagcccccgcgccc

SEQ ID NO: 47810 - RNA, 54 nt, Homo sapiens
cacgcaacacacagcgaagggaggggcagagcaaacacgaagcgggccaccaag

SEQ ID NO: 47811 - RNA, 57 nt, Homo sapiens
cgacaagccaccggcggaaagcgcaggggaacggcacagggaggggacagaccaacc

SEQ ID NO: 47812 - RNA, 73 nt, Homo sapiens
cccggcccaggagcgacgccagaaacagccaccagaaggcagcaagcagaaaagggaagaacccagcaaacga

SEQ ID NO: 47813 - RNA, 67 nt, Homo sapiens
agcagagggcgcaaccgagagggaaaagccaccccagaagcaaagaaacaggaggacagagaaagga

SEQ ID NO: 47814 - RNA, 55 nt, Homo sapiens
aagcaggagaagcagcaaacgccgagcagaaccagggggaaggccccgggcagcc

SEQ ID NO: 47815 - RNA, 75 nt, Homo sapiens
ggcgcacccagccggggccgcaaagcaccaggagacaaagccacaaaaacaccagaaaaaccaagcagaaaagga

SEQ ID NO: 47816 - RNA, 86 nt, Homo sapiens
gagcaacgccagagcccagggcccagaggaccccagccgcgcccgggagagcaaggaagaagacggcacgggacccccagcacagg

SEQ ID NO: 47817 - RNA, 72 nt, Homo sapiens
ccgccccccgccgacccagaccacgcccacccacccaagagagccagagacaggggacacgaacccgaaaca

SEQ ID NO: 47818 - RNA, 76 nt, Homo sapiens
cgccgagcggccgaggcgccgcggcggccgggaccgcggcgccccaggagagacagagagaggagaaagcggccaa

SEQ ID NO: 47819 - RNA, 61 nt, Homo sapiens
ggcaaagaaaaagaagaagcacacacacaggagcaggggggaggacccgcacgcacccagg

SEQ ID NO: 47820 - RNA, 101 nt, Homo sapiens
ccaaggggcccgcgggggaaaaagcagcgaacccgagaccaacgggaggagcggggggaagcacaaggcggcccaccaagggaccagcgcagcacccgaac

SEQ ID NO: 47821 - RNA, 51 nt, Homo sapiens
cacgcaccaaccgaggcaacggcacaggcgacaaaaccagacccccgacgc

SEQ ID NO: 47822 - RNA, 118 nt, Homo sapiens
agcacagcaaagggagacgcagcacagggaaccgaggggagccgaccacggacgccaggagaagaagaaagggccacccggcagaagacagaccgcagcgccagcacaagcgaggcag

SEQ ID NO: 47823 - RNA, 72 nt, Homo sapiens
gcagggggcaaacaagccgaccggaaaaaggcgccaagcccacgggcgcaccaacggagagccagagcaagg

SEQ ID NO: 47824 - RNA, 40 nt, Homo sapiens
gcccggcggcggcggcaccagcgagagaggaacgaggggc

SEQ ID NO: 47825 - RNA, 82 nt, Homo sapiens
ccacagccccgaccgagagaaccagcgccagggggccacggacggggccgagcacaaccacccaccggacgggaccggaccc

SEQ ID NO: 47826 - RNA, 81 nt, Homo sapiens
aacagaacaggaggggagagggcaggaaccaccgcccaaagaccaagcaaggaaccagcgagcaaacgcaaacacaacaga

SEQ ID NO: 47827 - RNA, 86 nt, Homo sapiens
acgggacgaccggacagagccaagcccccagcggcaagcgcgcgaccgacacaagcaggacagagacaggcccagggaaggccccc

SEQ ID NO: 47828 - RNA, 70 nt, Homo sapiens
aacaacccgaaaggccaggcagaacagcgcgcacacggcgagcaagcaaaccgacaccagcgacacaagc

SEQ ID NO: 47829 - RNA, 73 nt, Homo sapiens
ccacccaaacacggggcaaagaaccaggcacggcaggagggccggagcgagggagagcaggaacacagagagg

SEQ ID NO: 47830 - RNA, 84 nt, Homo sapiens
acacacacagaagcgcacgccaaggagcccggccgggcaggagggccggacaagaccagaggcacggccggaaggacaggcaag

SEQ ID NO: 47831 - RNA, 80 nt, Homo sapiens
cacgaagccccgcccagggaccaggggaagggaaagcaccaggaaacccagcggcggcagaaccagccggcacaaagccg

SEQ ID NO: 47832 - RNA, 73 nt, Homo sapiens
gccggcaagaacggacgggcgccacaagccacacggaggaaaggaagccgggggaccaacaacaaagcacacg

SEQ ID NO: 47833 - RNA, 75 nt, Homo sapiens
gagccagggacagccggccgacaggaccgggccgaccggcagcggagagacaagggaaccaacgaacaacgggag

SEQ ID NO: 47834 - RNA, 73 nt, Homo sapiens
cggcgaggaggggaaccggccccacccgggaggggggagcggcgggaggccaccgccagagcccaaaaggcag

SEQ ID NO: 47835 - RNA, 79 nt, Homo sapiens
caaagccaacgagcggacggcaagaaagccaaaccgcgaagcgacagcagccaggcgagcggcagggagacagcgcacc

SEQ ID NO: 47836 - RNA, 79 nt, Homo sapiens
cgagaacaagcaaaagcgagaccacagaaaagcaaacaaggcgggaagaagagacaagcagaccggaagaccgacggaa

SEQ ID NO: 47837 - RNA, 47 nt, Homo sapiens
gagcagcggagagacaaaccagaagcagaagaccgacaaagcgagcc

SEQ ID NO: 47838 - RNA, 81 nt, Homo sapiens
aagagggagcaccacggaccccaaggaagccacggcagacacacaacccgacccgacgaaccccgaagaagaagacgaagg

SEQ ID NO: 47839 - RNA, 58 nt, Homo sapiens
gcccaaacccaccagccccggcccagccacgacagaggcgcccagagaggccgcccgg

SEQ ID NO: 47840 - RNA, 87 nt, Homo sapiens
cagcagcagaagcagcagaaaggccgcggcagggcggcgcggccgagccaaaacggacaagccaaggcacgagccaaagaaacaaac

SEQ ID NO: 47841 - RNA, 65 nt, Homo sapiens
ccacaaagaaccgcggagaggaccacgccggcaggaaccagacaggacacagaacagagaagaag

SEQ ID NO: 47842 - RNA, 72 nt, Homo sapiens
gaagaaaagaaaggccaagaccaggaaaggaaggcgagaaaggcgcacaccaagcggcgcacaggaaccacc

SEQ ID NO: 47843 - RNA, 83 nt, Homo sapiens
agcgaggacacacccaggaaaagaccaggacggacaagcacagccggaagagacaggggccaggccaggggcaggggaagcac

SEQ ID NO: 47844 - RNA, 62 nt, Homo sapiens
gaagagaggacgggcaaagcagagaacagaagagagagacaggcccagggaagcaaggcgag

SEQ ID NO: 47845 - RNA, 76 nt, Homo sapiens
ccaaggggggagcgggaacacccaaaagcgagcgcaaggaggcagcagcaagaggaacagagaaacaccgagcagg

SEQ ID NO: 47846 - RNA, 70 nt, Homo sapiens
ccgccgcgcccgcccgacccgccaccgccaggccagagcggacggccaaggaggaggagcgcagcaccca

SEQ ID NO: 47847 - RNA, 76 nt, Homo sapiens
cccaggagcggcggcgaagaaggaggcaggcacgggagccgaaggaacgcagcccaccggagagcccccggggcca

SEQ ID NO: 47848 - RNA, 75 nt, Homo sapiens
cagcccgccccccccccgcagaggaaacaccaggcgcggcggcccagccccgacacagggagccgaaaaaacagg

SEQ ID NO: 47849 - RNA, 102 nt, Homo sapiens
acggaaagcagcgcaggagccaagaccacagcagcacccagagaaccaggagcggcagaccgccgccaggaggaggcacgcagcccgagaaggagccacgcc

SEQ ID NO: 47850 - RNA, 60 nt, Homo sapiens
gagacacagaaacaccaccaaacgcgccggccccaagaacgggaggagggagacaggggc

SEQ ID NO: 47851 - RNA, 73 nt, Homo sapiens
gcaggcccagagcgagcacagcaggaggagcgacaagcacaggaaagcggcaacagggaaacgcccggagagc

SEQ ID NO: 47852 - RNA, 85 nt, Homo sapiens
gcacgggggaaaagcaccggggcccagggagcccgaagaaaccgaagcagaagaccagggacacagcagagaaggaaccagcggc

SEQ ID NO: 47853 - RNA, 57 nt, Homo sapiens
ggcaagaacaagccaagacccagagaggcgaaggggcacacgagcgaggggggacga

SEQ ID NO: 47854 - RNA, 76 nt, Homo sapiens
cgacaccaggaacaccaccagggacgaggaaacaccaacaccaaaccagcccacacaggaaaacagagcgcccaaa

SEQ ID NO: 47855 - RNA, 78 nt, Homo sapiens
gcaccagggcggaccccggggccaggccggaagcagaccccagcagcagacaggacgacccggacaaccacccacaag

SEQ ID NO: 47856 - RNA, 75 nt, Homo sapiens
agaacgaaagacagcacgagcggacaggagaagagagacggggcaaacccacagggagagaaggaaagaagaaga

SEQ ID NO: 47857 - RNA, 66 nt, Homo sapiens
acgcccgccccgcagagagaccaaaacaagaaggcagacaggagggcaagaaaccgcaaccgcaac

SEQ ID NO: 47858 - RNA, 82 nt, Homo sapiens
cgccgcggcccaacggccccagcagagcccgcgaccagcccgccaaggagcacccccggggcacccccgccgaggcagcccg

SEQ ID NO: 47859 - RNA, 68 nt, Homo sapiens
gacacacaagcacaacaacaaaggccaaggagaggcagacccagacaggagggccagggaggcggacc

SEQ ID NO: 47860 - RNA, 81 nt, Homo sapiens
ccccaacaagaggaaagacacaccaccaagaagccagcaagcggccagcggcgcagcaccgcccgcggccaagggccagag

SEQ ID NO: 47861 - RNA, 37 nt, Homo sapiens
agaagagggggcaagaaagaaggggccgcccgaaaga

SEQ ID NO: 47862 - RNA, 80 nt, Homo sapiens
accaagacaaaaacaaaggccgggccgagaacgaacagagcggcgcagccaggaccgaggggaaacaagcaacaagcaag

SEQ ID NO: 47863 - RNA, 79 nt, Homo sapiens
gaggagcagcgaaaacggggagagccggaccccagaccaagacacccaggagaaagacagcggggaaaagaaaaaggag

SEQ ID NO: 47864 - RNA, 61 nt, Homo sapiens
cagacccgggcaacgagcggaccaacagccggaaggaaacgcacgagcacaaggacggcag

SEQ ID NO: 47865 - RNA, 77 nt, Homo sapiens
gggcacggcacgcccacccagaagagcaggaaaggagggcaccaaccacaaagacgaacggaaggacgaaccagcgc

SEQ ID NO: 47866 - RNA, 79 nt, Homo sapiens
aagaaccaccacgcggagaccggacggaaacaaggcacgcccaccgaaaggccccggacgaggggcggcagggggacca

SEQ ID NO: 47867 - RNA, 57 nt, Homo sapiens
agaacgacgccaaaacaaaagcaacaagggagccaaaacacaccggaagaccccacc

SEQ ID NO: 47868 - RNA, 72 nt, Homo sapiens
acaaaggaaaaggaaaaaacaaggggaagacccaaggaaccaggcgaagacaacaggcacaaagagagaagg

SEQ ID NO: 47869 - RNA, 71 nt, Homo sapiens
cgcaacaggggaagagaagggcggcagcaggaaacaacagggagccggacaggaacaagggaaaccaacgg

SEQ ID NO: 47870 - RNA, 53 nt, Homo sapiens
ccaccccgcaccaacagcagaccagaaaacgaccacaagaaggcacacggaaa

SEQ ID NO: 47871 - RNA, 60 nt, Homo sapiens
cacccacagcggggcggcggcggcggcggcgcggcccaaaaggaagagagaaggccacgc

SEQ ID NO: 47872 - RNA, 77 nt, Homo sapiens
ggcggcggcgcgggcgagcggcgagccgaaaagcgagcgcgaggaaaaggcggcgggagagagcacaggagcacggg

SEQ ID NO: 47873 - RNA, 72 nt, Homo sapiens
ccccgcgaaaggaggaggcacagagaagggggagcaacagacaagcccgaaaggaacagcagcaggaacgaa

SEQ ID NO: 47874 - RNA, 77 nt, Homo sapiens
cacggcacgcagcgcgcccgccagggcccagagcgggcaggcaggagagcccgagcagcaccaaaggcaagagcggc

SEQ ID NO: 47875 - RNA, 75 nt, Homo sapiens
gcgggacggacgaccaaccaaaagaaaaggacaaccggggaagcagaacacgacgaggaaggccccaagcacagg

SEQ ID NO: 47876 - RNA, 79 nt, Homo sapiens
ggcccagcaccccgagaaccgcaggagccagagggaaagggagcagcaccggccacacccacagcacgaccggaaccca

SEQ ID NO: 47877 - RNA, 83 nt, Homo sapiens
gggaccgcgcgcgagcgccggcccacgggcggccacgaagacggcaaggaggaaaggaagaggaagacggcaagaagcgaaaa

SEQ ID NO: 47878 - RNA, 83 nt, Homo sapiens
ccagggcccacgggccagccccgccgccccgcaaccggcagccgccgccgggaagaaagccgagccgggccagcccacacacc

SEQ ID NO: 47879 - RNA, 67 nt, Homo sapiens
cgcggcgggagcgcggcggggccgcagaggcagaaaaccgcgcgggagggggcaagccaccaggagg

SEQ ID NO: 47880 - RNA, 75 nt, Homo sapiens
ccaacgagaaaaccaagacagcaccccacaacccaaaaggaagcagaaaaccaacaaaacagggacacacagaaa

SEQ ID NO: 47881 - RNA, 78 nt, Homo sapiens
ccagccgaggagaagcaaaggccacggcgcccacggccaaacccgcacaccaccgacgagagacggggcaccggagcc

SEQ ID NO: 47882 - RNA, 55 nt, Homo sapiens
gaacccagaaagcagaaccaaccggaaggaggaaaggaggcccaagaggcgaaac

SEQ ID NO: 47883 - RNA, 42 nt, Homo sapiens
cagaaacagagaaggaacagccgcacaaacacgcagaggcaa

SEQ ID NO: 47884 - RNA, 75 nt, Homo sapiens
cgggaagcggcccccgggcgcgggcgaggccgggcggcgccgccccaccggacccgcagggcgcaaacagaagag

SEQ ID NO: 47885 - RNA, 99 nt, Homo sapiens
caggcaaaaagaaacggagccaccacaagcgcaagccaaagaacccagggaacccacgacaccacgaacaagaagccccagcaacaaaacaaagacagc

SEQ ID NO: 47886 - RNA, 70 nt, Homo sapiens
cggcgaaggaccaaaggaggaccgggggagcggccgaggacaagcacaagcagcaccaaaaggcagcacc

SEQ ID NO: 47887 - RNA, 115 nt, Homo sapiens
gagaaggaaaaagagaacaccgacacacagaagaacggaacgcacccaacacgagcaaaaaagacggggaacaacaggcaaagcaaaaagaagaacaagcaacccacgcagcccg

SEQ ID NO: 47888 - RNA, 77 nt, Homo sapiens
ccgaggagaggagaaaggagcgaggagagcgagaaaacggcgccaagaaaagagaggcaccacacggcccgccgacg

SEQ ID NO: 47889 - RNA, 78 nt, Homo sapiens
cagccaaaagggggggaggaccagcacgggaaaaggggagcgcgcgcccaggcggaggcaggggccacggccacgcaa

SEQ ID NO: 47890 - RNA, 81 nt, Homo sapiens
agccgccgacagaagaaagacggcggaccgcgggggagaacgagcccccaccgccacgccggaaccccaagaccaagcaca

SEQ ID NO: 47891 - RNA, 71 nt, Homo sapiens
caacccgccgcagccgcaggagaacaaccgcaacgaacaaacaggagacagagagcaagagcaccccaacg

SEQ ID NO: 47892 - RNA, 78 nt, Homo sapiens
gccccgaggaagcaaggccgcggggggagaccccaccaccgccaggaccggagaacaaggccggcggaaccagcgagc

SEQ ID NO: 47893 - RNA, 81 nt, Homo sapiens
ggcggcggcgcccggagggcagcgagaagccgcggagcggaggggggaagggggaggacccggaggcacagcggagccgag

SEQ ID NO: 47894 - RNA, 62 nt, Homo sapiens
ggcgaccccagcacggcaaagcccggagacaagcgcgggggagcgggaggagccagagcaca

SEQ ID NO: 47895 - RNA, 76 nt, Homo sapiens
aaagagaccacggcacgggaggaacacggccaggagcacccaaacaacaacggcaagacccagaacaggaagcaga

SEQ ID NO: 47896 - RNA, 74 nt, Homo sapiens
ccgcaaaccagacagaggaaaagggcccaaagggacgccagaaagcaacgacagaccccccacggcaaaacaaa

SEQ ID NO: 47897 - RNA, 57 nt, Homo sapiens
agggccgcggggaccgaaaggacagaacaggaccggaaagcacccagaaccggagag

SEQ ID NO: 47898 - RNA, 53 nt, Homo sapiens
cgggggccccagccccgcccgcccccagcccggacgccacaaacgggcacacc

SEQ ID NO: 47899 - RNA, 67 nt, Homo sapiens
gaaaaggcccaaaggccgccaggccgcagacgcgaaggaacggcaaaggcggggagaaaccaagaag

SEQ ID NO: 47900 - RNA, 87 nt, Homo sapiens
ccgcccgcggcgaggggcccggaccgcaggccccaagagagagcagccaaaaggaggcgagcgccacgacaggaaaacagcacccga

SEQ ID NO: 47901 - RNA, 77 nt, Homo sapiens
ccacccccggcgggcccgaggcggcgagagaggcaggcggagccgaccgggccaggaagagagaaggccacgcccga

SEQ ID NO: 47902 - RNA, 78 nt, Homo sapiens
gagcagaccgcagagagagaaggagaacaggaggaggaaaacagaacagccgagcgggaagcggaagagaaacaaggg

SEQ ID NO: 47903 - RNA, 86 nt, Homo sapiens
agaaacaacaaaagaacaaaggacgaggaacaagaggcgagaggcgcaggcagccacaaaaaagcaagagccagaacagaagagga

SEQ ID NO: 47904 - RNA, 75 nt, Homo sapiens
ggcaccaccaaccagaccgaccggggagagacggaggaacaagcagaaagcacgaacaacgagaacaagacacga

SEQ ID NO: 47905 - RNA, 82 nt, Homo sapiens
gagacaagcagagacgaaccaggcaaaggcacggccggaaggacaggcaagacccaggacggcggcgcaccgcagcccgagc

SEQ ID NO: 47906 - RNA, 60 nt, Homo sapiens
gcagcaacaaggaaacagccagcggaccacaagcaaacaaaagccaacacgaaccccaag

SEQ ID NO: 47907 - RNA, 83 nt, Homo sapiens
aggccccagcacaccagagacaggccaacggagaagcacaggcagagacacaagcagccgaaaaacaggcaccaaccgacagg

SEQ ID NO: 47908 - RNA, 58 nt, Homo sapiens
agcaaaacaagaagggaaaagccagaaaaaagaaacaggaagaggaacgccggaacaa

SEQ ID NO: 47909 - RNA, 75 nt, Homo sapiens
cccgcggccacagcgcaagcccggaccgacaggaaagaaggagcccacaaagaaaagaacaccgccagcagccag

SEQ ID NO: 47910 - RNA, 95 nt, Homo sapiens
cgcgggcgccgaaggagggccggcagcgcccgcggagacggaagagagccggaggagccaccaacagaagcaggagccaggaaaccaaaacccac

SEQ ID NO: 47911 - RNA, 83 nt, Homo sapiens
ggacccacggccgccccggagcccgacgcggacacggaaacggagaaaccaagggaaagaaacgaaggaaacagaaagaagaa

SEQ ID NO: 47912 - RNA, 38 nt, Homo sapiens
gcgggcgcggcggccgcgagaccagagaggacaaccaa

SEQ ID NO: 47913 - RNA, 70 nt, Homo sapiens
gaccacaggaagaaaggaacagggaaagcccagccccgggcaagcccaggaggacacacaaagaggaaac

SEQ ID NO: 47914 - RNA, 60 nt, Homo sapiens
cacaaccaagggcgcaagcagccaagaagagggggacaaaggccccccgggccggccgcc

SEQ ID NO: 47915 - RNA, 80 nt, Homo sapiens
cccaagcgcgcaccgcggcgccgacacaaacgccaagggacggaccacgcccgcaccaggagcgaccgggaggaaagcaa

SEQ ID NO: 47916 - RNA, 77 nt, Homo sapiens
caaacagcagagcgccaccaaaaagggaaaagcaccaggacaaaagaagggcagcacaaaggaaagccccaaacccc

SEQ ID NO: 47917 - RNA, 58 nt, Homo sapiens
cacgaacgcccaccccccgaacccagccgcaccgagacccaaaggcaagggaacagcc

SEQ ID NO: 47918 - RNA, 61 nt, Homo sapiens
gagcggaggacagccgagaggagagagcgggacgggcagaagaaaacccaccaaggggcaa

SEQ ID NO: 47919 - RNA, 87 nt, Homo sapiens
ggaccccacggggcagaggcgcgcgggggcgggagcggagacgaagcaagaagccaaaagagggcaggacgccagcacagagcccgg

SEQ ID NO: 47920 - RNA, 75 nt, Homo sapiens
cgggagcggaacaggacaccccgagccccaccccggccaacccaaccgggcccgagggcaggacagcaggcaccg

SEQ ID NO: 47921 - RNA, 83 nt, Homo sapiens
ccgcagcagaccgaggccccggggaagccaccccaccccccagggccagggaaggaccagcaggaggcagcccggggacaggg

SEQ ID NO: 47922 - RNA, 79 nt, Homo sapiens
ggcggagcggaggcccgcgccgccccgacaaacgggggccgccgccggaaagaggcccggcaggacacggacaaaaccc

SEQ ID NO: 47923 - RNA, 65 nt, Homo sapiens
caggaaccaccgaaagcggcgcaacgaggacacaggaaaaggaggcaaagaagaaccaaccgcac

SEQ ID NO: 47924 - RNA, 83 nt, Homo sapiens
ggacggggaagcccgaaccaagccagcaagacacccagccacaagagaacagcgagacggacaagcaacgaaccaggcaacac

SEQ ID NO: 47925 - RNA, 75 nt, Homo sapiens
ggccccgcaagggcgacgggcaccaccggaggccgcgaggggcgggcacaagggaagacagcgcccgggacccaa

SEQ ID NO: 47926 - RNA, 83 nt, Homo sapiens
gaaccgggagaacccaaggcggggaaccgcagcgcaggacaggcagaaccccggcgcggcccgagcgccggaaacaggccaga

SEQ ID NO: 47927 - RNA, 67 nt, Homo sapiens
gaggaaggacccggagccgaaacaccggaggagcggggagagcagcccgacggccaggaggcgaaga

SEQ ID NO: 47928 - RNA, 78 nt, Homo sapiens
ggacaggcacagacaaccagggccaaggagacggaagaagccaagaagaagcaagaaaacagaagcagaccagcggca

SEQ ID NO: 47929 - RNA, 75 nt, Homo sapiens
cgcgccacccagagcaacggaaggcagcccccaaccaggaaagcagaccagcccaagacacgcccaagaggagaa

SEQ ID NO: 47930 - RNA, 45 nt, Homo sapiens
gcagccgagcggggccggccacaggcaagcccgaccgcaggaccg

SEQ ID NO: 47931 - RNA, 79 nt, Homo sapiens
ggggagacccgacaagaacaggagcgcagagccggccacaaaagagccaacacccaggccaggccgcccggaaggaggc

SEQ ID NO: 47932 - RNA, 59 nt, Homo sapiens
gaacccagaggcgggaggggccgggaggcagaggggcagggggacacgggaacacagag

SEQ ID NO: 47933 - RNA, 72 nt, Homo sapiens
cacagggaagagaagaaggcaagaagacagcccaacaaggcgggacgacaacaccacagacacccccaaacc

SEQ ID NO: 47934 - RNA, 52 nt, Homo sapiens
caaaacaggacgacccgaggaacagagacagaggcacaaaaggagaaagcag

SEQ ID NO: 47935 - RNA, 106 nt, Homo sapiens
gcagccagccggaccgaccaaggcaccgggccccgcccaggccccggacaaaggggggaaagcaggccaccccgccacagagcccccgccaagagcaggagcgccg

SEQ ID NO: 47936 - RNA, 110 nt, Homo sapiens
acaaccagcagccagcccccagggcccacggaacagcgccccaagaacaggaaagcacacaaccacaacggaagacagcaaaaaggacggcccaaacccccggaaaaggc

SEQ ID NO: 47937 - RNA, 76 nt, Homo sapiens
cgcaagagagaggagggggcaccgagcaacgagggcaggcacaaaaagggcaagaaagagaagaagacaggaaaaa

SEQ ID NO: 47938 - RNA, 91 nt, Homo sapiens
gggaaaccagccaccaggccagaacggggcccccagagcagaagggaaaaaggagaccaagcacgccccacgcgaccagaaaggacacacc

SEQ ID NO: 47939 - RNA, 56 nt, Homo sapiens
gcgaccgaagaagcacgggcccacacccaggcggaggcaggggccacacagcacgc

SEQ ID NO: 47940 - RNA, 53 nt, Homo sapiens
ggagaaaaggcagccaaacgaaggagacccaggaagaaagggcgaaggacacc

SEQ ID NO: 47941 - RNA, 87 nt, Homo sapiens
ccgcagccccggcgcccccggccgcaccgccagggcgcaggcacagcccgagaaaccgcagcacacacagaggaaacagcggaggag

SEQ ID NO: 47942 - RNA, 75 nt, Homo sapiens
ccgcagcccggaaccacgcaccagacaacacaggagggggaccaaggagacaccaccacccacccggccgggcaa

SEQ ID NO: 47943 - RNA, 97 nt, Homo sapiens
caaaggcaccaggccaccacagaaacaaaagcaacaaagaggcgagaggcccggccagagaccgccgggggagcaaggcgaccgggcgcgcccgaag

SEQ ID NO: 47944 - RNA, 69 nt, Homo sapiens
gcggcaggcgaggagaaagcggcgcgcggaggacgggaccccggccggggcaggccccgggaccgacaa

SEQ ID NO: 47945 - RNA, 72 nt, Homo sapiens
cgggagggggagcccacaggagcagggcacaggcaccgcagcaccaaaccacccccacacaggagccaacgg

SEQ ID NO: 47946 - RNA, 70 nt, Homo sapiens
gcgggcccacgcggcgcagggcgggaaacgagcaagaaacaaaagaagagaggggacaaccgcccaccga

SEQ ID NO: 47947 - RNA, 52 nt, Homo sapiens
aggaaaaacacaacccaagaaacgggagaagacgcgcgcgcgcgaggaagga

SEQ ID NO: 47948 - RNA, 74 nt, Homo sapiens
agaaccaagcagacagccaacaaaagaagcgacagcccggggcgagacacaagagagcgccgaagaggaaacac

SEQ ID NO: 47949 - RNA, 63 nt, Homo sapiens
cagagagagaggggacagacgagagaacgaggacggcacacaaaagggcagaacaaaccacag

SEQ ID NO: 47950 - RNA, 83 nt, Homo sapiens
gcagcccgcggcagcaggacacagccgggaccagcggagaacaccaccaaacaaacacaaggaacccgagggacaaagcacca

SEQ ID NO: 47951 - RNA, 78 nt, Homo sapiens
gcaaaggaaccacccaggaaacagcgcaaggaaaccagggccgggaagcacacaggaggcgccacgggagcagcggaa

SEQ ID NO: 47952 - RNA, 67 nt, Homo sapiens
cacgaaaccgaaacacgcagaaagagagacacaagaagggcaaaccggggcgaagacacaccacgca

SEQ ID NO: 47953 - RNA, 82 nt, Homo sapiens
cggccaaccgcagccaggagaaggagcggcaggcgacgaggaggcggagcggacaaaggaccccacagccaccagcagcgcc

SEQ ID NO: 47954 - RNA, 37 nt, Homo sapiens
cgcaccaagagagagggacagcggggcaagcaggacc

SEQ ID NO: 47955 - RNA, 75 nt, Homo sapiens
caggggcaaccaccccaggcccccaacagacagccagaagaccaggaaacaggccgacagcggaaaagaacgacc

SEQ ID NO: 47956 - RNA, 67 nt, Homo sapiens
aaaaagggcggcaagccagacaaaggacagaggccaggaaggacaaaggaaaacgaacacaggcgag

SEQ ID NO: 47957 - RNA, 37 nt, Homo sapiens
ccacccagaggagcaacgacaaaaccacaaggcaaga

SEQ ID NO: 47958 - RNA, 75 nt, Homo sapiens
ccccggcccgcgggaagcaggacgcgccgcgccccaaggccggcaagaagccaacggagaaccaaggccaagacc

SEQ ID NO: 47959 - RNA, 71 nt, Homo sapiens
agcgaccacgagcccaagaaaccaggcccaaccagcacgcggagggccaagggcagggagaagggacaaca

SEQ ID NO: 47960 - RNA, 78 nt, Homo sapiens
cgcacccacgcggcccgcgaaagggcgcaaaggagcggcagcccacaagcaggaagaccagccccaggagggaaacag

SEQ ID NO: 47961 - RNA, 71 nt, Homo sapiens
cgggcaccgagagggacacggggcaccgcgccgcagcgcgaagagaaagcaaacaaaaaaaaccaaaaaaa

SEQ ID NO: 47962 - RNA, 71 nt, Homo sapiens
aagcagcagcgaagccggaaccaacagagggccagcaccccgcgcagaacgcggaaccccagagaggacag

SEQ ID NO: 47963 - RNA, 72 nt, Homo sapiens
gacggaaaaggcgcacacgacccggagaaccccacgaaacgagccggagcacaacggagcaggaggacaaca

SEQ ID NO: 47964 - RNA, 79 nt, Homo sapiens
gaggccgcaggaggagggaggcgaagcggccgacagaagcagaggcaggcaagcgagcgggccccgggagaggacccca

SEQ ID NO: 47965 - RNA, 81 nt, Homo sapiens
ccaaacccggagccggggcaagaagcgagaaacgaggaagagacggggaaacgccagaggaagagagggccgacgagagga

SEQ ID NO: 47966 - RNA, 65 nt, Homo sapiens
accacaccagcaagacgacgaagaacagcaggcggacccagaccgcggggaagcacggacgaacc

SEQ ID NO: 47967 - RNA, 79 nt, Homo sapiens
gcggccgcgcaccgccaaagacaagaacagaggggccgagaagccaacaaggcacacagggaccaagaagccccgggga

SEQ ID NO: 47968 - RNA, 74 nt, Homo sapiens
cccagcgcaccaccgagccggacgcgaggagcggcggaggcggaccggggggcccgggcccgccagacccgcag

SEQ ID NO: 47969 - RNA, 79 nt, Homo sapiens
cggccccggcccacaggggggggcaaacccgagagaacggcccagcagaccgggacccagccgaggccagcgaaggaac

SEQ ID NO: 47970 - RNA, 82 nt, Homo sapiens
ccaaacgacgcagccacggagagagagaacagaggagcgaaagccacgagaaagagaagaagggacagcccgccccccaagg

SEQ ID NO: 47971 - RNA, 61 nt, Homo sapiens
gaaagcagggggacgcaaaggccaaggggcggcaaaaagggagcggccaaccgcccggcag

SEQ ID NO: 47972 - RNA, 88 nt, Homo sapiens
ggcggccacaaggccgcccagccgcacgcgacgacagaaagcagggcgcaggcgaaaccgggccccaacagaggagagccagcaacgg

SEQ ID NO: 47973 - RNA, 81 nt, Homo sapiens
accaaacagcacccggcaagaagaacacagggggaagccaagcagaacaagggcaacacgggcagcggggaagccccaaac

SEQ ID NO: 47974 - RNA, 52 nt, Homo sapiens
gcccaggagacaaaagcacaggagccgaccgacagcggcacgagccaccgag

SEQ ID NO: 47975 - RNA, 67 nt, Homo sapiens
cacggcaggaacccgcgaagcgggaaggaaaagcagacgaaagaaaaaaaaaaccggagaggaagag

SEQ ID NO: 47976 - RNA, 89 nt, Homo sapiens
cgcggagccgcgcagccccggagcacgggagccaccagcgggcagcacaggaccccaccaccagccggcccgcgggccgacgccgccca

SEQ ID NO: 47977 - RNA, 67 nt, Homo sapiens
cgagcccacaccaacccgagacacagcagcgccacaggagccgcagaagcaaaggcaccgccaaacc

SEQ ID NO: 47978 - RNA, 72 nt, Homo sapiens
cgccacggggacccccaaagcaagccaaccaagagcgaggaagaggaaccgaccaagggggaaggaaccccg

SEQ ID NO: 47979 - RNA, 74 nt, Homo sapiens
aagcagccaagaagaggaacgaagaccacaaaacgaaaagaaccaaaacaagagagagaaaacaccagcagaga

SEQ ID NO: 47980 - RNA, 76 nt, Homo sapiens
cgccccaaggccagacaaaacggcccccagggagacacaccgccaccccgccaaggaccacccccccagcgagcgc

SEQ ID NO: 47981 - RNA, 79 nt, Homo sapiens
ccagcggcacccgcccagcgggggggcagcagaagcccagagcccagacgcagaccaagcaaggaaccagcgagcaaac

SEQ ID NO: 47982 - RNA, 65 nt, Homo sapiens
gcagagacgcacgaaaacacacaggcacaccgcacaagggcccaaaggagcgcaaaagcgccaga

SEQ ID NO: 47983 - RNA, 77 nt, Homo sapiens
aacgagggcgcgaaggcccacacaccgaccgaacccgggacacaaaaacacccaacagacaaaaggacagcgacaga

SEQ ID NO: 47984 - RNA, 74 nt, Homo sapiens
gggacgggcccagaggcccagggaggcaggggcagaaacagagaaggaacagcaggggaaagcgcgagcgagca

SEQ ID NO: 47985 - RNA, 52 nt, Homo sapiens
acagccccgaccgaggacgagggaccgccgccgaagaaacagaacgacagcc

SEQ ID NO: 47986 - RNA, 32 nt, Homo sapiens
cagaaagaacacacacagaggccagagggaag

SEQ ID NO: 47987 - RNA, 77 nt, Homo sapiens
gccagcaccgaaaaacgacagagaagccgacagcgagaaaaacggggggagggcaaccaggagacaaaaaccaaagc

SEQ ID NO: 47988 - RNA, 76 nt, Homo sapiens
acagaaggagcggcggacacacagacccccaccaagcagacagagcagcccacccaggcggaggaaggggcaacca

SEQ ID NO: 47989 - RNA, 53 nt, Homo sapiens
gcaggagcgggaaaaccgagcgcgggagaagaacaacgccacaaccccgaacg

SEQ ID NO: 47990 - RNA, 76 nt, Homo sapiens
ccagaggagacggcaaaccagccacggggccaggacagaagacacaaggggaagaacacgaggcaaagacccagga

SEQ ID NO: 47991 - RNA, 126 nt, Homo sapiens
gccgagccgagcccccgccgcgccagggccagaacgaccgagggcacggccgaggaccgccgaccagcggccccggaggcggcagcaggaggcaggacagcccggccacagccccaggagggagcc

SEQ ID NO: 47992 - RNA, 57 nt, Homo sapiens
acggcgaaggcccccgcgggcgccaacaggagccagagaccaagagcccagagaaca

SEQ ID NO: 47993 - RNA, 74 nt, Homo sapiens
aggaaccaccgaaagcggcgcaacgagcagcaacaggccacagggaaggcccacacacgcacccgaaagacgga

SEQ ID NO: 47994 - RNA, 69 nt, Homo sapiens
cccgaccccgccggccgcccgccggcccgggcccgagcccccacagccaggaaaacagcccccccagcg

SEQ ID NO: 47995 - RNA, 56 nt, Homo sapiens
gcccacgccggcaaaccggaaacaggacacaccaaaagaacacgaagccaacccgg

SEQ ID NO: 47996 - RNA, 77 nt, Homo sapiens
caacagagaggagaggaagggaaaaccgaggacacagaagccgagccgagagaagggagagccggaggagagaaacc

SEQ ID NO: 47997 - RNA, 78 nt, Homo sapiens
aggagaaggaaaagggaaggacaaggaaacaaacacaaacgggagagaaaaggaggaggacggcacaaaaaaaggcag

SEQ ID NO: 47998 - RNA, 52 nt, Homo sapiens
aagaagcaagagaacgaaaagacagcaagacaaagagacgaggcgccagggc

SEQ ID NO: 47999 - RNA, 80 nt, Homo sapiens
aggcggaaaggcaccggagacagaggcggaaccaaaagcagggaaaccgaaggaaggcagagcccacaaacccaagcagc

SEQ ID NO: 48000 - RNA, 81 nt, Homo sapiens
aagacaacaagcagccaagcccagacaagccccagggaagccacagcaccccagcacccaggaaggagggccccggagcag

SEQ ID NO: 48001 - RNA, 71 nt, Homo sapiens
accacccccacaggccccaggaaccacagaacccaccggccacgcccaaaggggccacgaggaaacgcgac

SEQ ID NO: 48002 - RNA, 79 nt, Homo sapiens
gaaagacacccaagaaggcaagaaacaacagcgcccgacaagccaggaaagagaaaggagaccacaagaccccgcgcca

SEQ ID NO: 48003 - RNA, 68 nt, Homo sapiens
ggacaaaggggcccagaaccaggcccgaaaaaacaagcccaagccacagaccaaaaagagaaagggag

SEQ ID NO: 48004 - RNA, 65 nt, Homo sapiens
ccccgccaaagaagcacgaagaaggaaggccgcggacccccccccccccaccccacaggagaaga

SEQ ID NO: 48005 - RNA, 68 nt, Homo sapiens
gggacagccccaacagcccgccggaccgccgcgccccccaacgaccaggccccaacaacacgcgcagg

SEQ ID NO: 48006 - RNA, 54 nt, Homo sapiens
gggcgacccggaaggaaaccgcggcccggagcaagcaagcagaagaggaacaga

SEQ ID NO: 48007 - RNA, 86 nt, Homo sapiens
aggacacgcaagccacaggccaccgccggaaccgcgggcccgaaggggaaccggggaagcggagccgagcaccagcacgagccggc

SEQ ID NO: 48008 - RNA, 69 nt, Homo sapiens
aggcacaagcaggacaagaaaacgaaccacagaccaggcacggacaaaaggaagcagggggagacagaa

SEQ ID NO: 48009 - RNA, 64 nt, Homo sapiens
cgcggacgaccgcacgggcagggggggccgcccgcccaaggcaggaagaggggccgcaaagaag

SEQ ID NO: 48010 - RNA, 36 nt, Homo sapiens
ccgaagggcgggagggcaaaggccagcaaagccaga

SEQ ID NO: 48011 - RNA, 70 nt, Homo sapiens
cgggagaaccaggacccgcaaggaacgaaagcgggaagacggaagaaacagggcaaacccgaggacagag

SEQ ID NO: 48012 - RNA, 75 nt, Homo sapiens
cggcggcgcggggcggcgggagagcccggcggcggagcggaggccggagaacccaggagccaagcggcgccaccc

SEQ ID NO: 48013 - RNA, 57 nt, Homo sapiens
ggaccgcaggacacccaggcacaccagaggagaccagggaggagaacaccaaacaga

SEQ ID NO: 48014 - RNA, 51 nt, Homo sapiens
gggaaccccggagaaaaggccaagaaggcagggcaagccccaggagaaacc

SEQ ID NO: 48015 - RNA, 72 nt, Homo sapiens
gcgggagcagcgaaagaccacggacagcaggcccacacccaggaaagagaaacgaaaagcaccagacagaga

SEQ ID NO: 48016 - RNA, 39 nt, Homo sapiens
aaacaacaccaaaaagccgcagggcgagaagaagaaaag

SEQ ID NO: 48017 - RNA, 91 nt, Homo sapiens
ggcgggacagcggcccccggagggggcagcccgggagaaccgcggcggccggagcgggcggagaacggaaaagcaccaggaagcagagagg

SEQ ID NO: 48018 - RNA, 82 nt, Homo sapiens
gccgccgcgcgccaaagcgcgccgccccgggcaaaagcccgacggccaggaggcgaagagacgaggaagcccaggagcccga

SEQ ID NO: 48019 - RNA, 71 nt, Homo sapiens
cgaaccggagcgccaaacgcccgaaagaagcggacggagaggcagcgagaagaaaaagaagagagagacac

SEQ ID NO: 48020 - RNA, 71 nt, Homo sapiens
gaaagccgaaggacagagccacccgacacccggcagaccagcagccaagaagcgcgaagacgggagacgga

SEQ ID NO: 48021 - RNA, 66 nt, Homo sapiens
aaaaacccgcagaaggcaggcacaggggcagggaaccagagaacaagagcacgaaaacggagaaaa

SEQ ID NO: 48022 - RNA, 67 nt, Homo sapiens
gccgagaggaccggggggacagcccgggaccggccgaaaggcgaggaaccgcgggaggccaccgccc

SEQ ID NO: 48023 - RNA, 79 nt, Homo sapiens
accaggacgcaaagacaaccccggaacggaccaaacaaagagcagaaggagcgagccagggaggaaagacccaagggaa

SEQ ID NO: 48024 - RNA, 73 nt, Homo sapiens
agaagcacccgcgcaggccgcaccacggcgggaagcggagaaaaccaggacccaagacagcagcaacagcaaa

SEQ ID NO: 48025 - RNA, 71 nt, Homo sapiens
caaagacaacagaaaacgaaggaaggaggacccgaggagagagaagacggaaaggaaacacggaagcacca

SEQ ID NO: 48026 - RNA, 77 nt, Homo sapiens
ccgacgcggaaaaaaagacccaggaggagcaacacgggaccgcgaaggagaggaaaagaggacaaggcaagggaagc

SEQ ID NO: 48027 - RNA, 50 nt, Homo sapiens
accaacaaagccgggaaaggcgaaacaagcacccagcaaccgaaccagaa

SEQ ID NO: 48028 - RNA, 80 nt, Homo sapiens
cagggcggagcagcgcagaggaaaggcggcagccaggaaggaccaacggggggacacaaaaccgaaagacacaaaaaggg

SEQ ID NO: 48029 - RNA, 75 nt, Homo sapiens
cggcggcggcagcgggggcggcagagaccacacgggaggaggcagcgcggcggggccgggcaacgcggggcgagc

SEQ ID NO: 48030 - RNA, 63 nt, Homo sapiens
agacgacggaaacccagcacggcggcccggaccaggacaccgggacaaggagcgcacaccaga

SEQ ID NO: 48031 - RNA, 78 nt, Homo sapiens
gcccgccacccaggaggggagaaccaaagagccccccccagcgccgaaggcccgacccagcagcccggcccggcaccg

SEQ ID NO: 48032 - RNA, 69 nt, Homo sapiens
gggacgcggcaacgcacaagaaagccgacccccaagggagaaacaaaggcagcgcgccccgggggagca

SEQ ID NO: 48033 - RNA, 76 nt, Homo sapiens
aaaaccgaagggaaggccagcagcgcgcggagaagaacggggagccagacggcccgccacgggccccgcagccgcg

SEQ ID NO: 48034 - RNA, 96 nt, Homo sapiens
ccagaccaagacccgacacaaggcagccccacagcaggggacagcacaggcgcgagaaacccaggccgcgcacaagaaccggcagcgaacaaggag

SEQ ID NO: 48035 - RNA, 85 nt, Homo sapiens
agaaagagacagccgcggaaccaccaggaaccagccaagaaccacggccacaccccaacacaaccagaggccacaacaggcccac

SEQ ID NO: 48036 - RNA, 74 nt, Homo sapiens
gccgcagggagaacccgaggcgggaagcccccccaaaaagcggcggccaccccggcgagcaggcccagggcaac

SEQ ID NO: 48037 - RNA, 93 nt, Homo sapiens
cgggcgggcaagccagacagcgggccggagcagccgcgggcgcccgaggggccgagcgagggaaagggagcagcaccggccacacccacagca

SEQ ID NO: 48038 - RNA, 83 nt, Homo sapiens
cccgggggccacacgcaggccccgcgccaggccagaaccagagaacagcagaggcccaggaaacagccaccaccccggccccc

SEQ ID NO: 48039 - RNA, 79 nt, Homo sapiens
agacgcacaagaaaagcgcaagaagaggaggaagccagcgagggggaagagaaagcgcgccggacccgccagggaaggg

SEQ ID NO: 48040 - RNA, 39 nt, Homo sapiens
gccccccacaggacgggaaggaaagaagggacgaggagg

SEQ ID NO: 48041 - RNA, 73 nt, Homo sapiens
gaaaaggagcagccaggagccggggagcccgggaccagggccagggacgcccgcgaccccaggcggacccccc

SEQ ID NO: 48042 - RNA, 71 nt, Homo sapiens
cggggccccccaccgcaggagccccacgagaaacccaggcgaacaagaggcgccagcgggcgcgccggaag

SEQ ID NO: 48043 - RNA, 76 nt, Homo sapiens
agcagagccggaagcggcaggccacaaagccacagacacgaagcagaggagccagacccaaagcccagacacaaga

SEQ ID NO: 48044 - RNA, 77 nt, Homo sapiens
ggaaagggagaaaagaggcggaggcagagaacgagggacaagagccggacagaagagagaggggagacagcagcggg

SEQ ID NO: 48045 - RNA, 53 nt, Homo sapiens
ggaagagaccaccaaacaggcgcacgaaagccaccgggccagggaagcagagc

SEQ ID NO: 48046 - RNA, 75 nt, Homo sapiens
gaagccgaacgagcgaggccccacggcccaggagccggagagcacagggccgcagaagagcggccggagcgaggg

SEQ ID NO: 48047 - RNA, 80 nt, Homo sapiens
gccgcgcagaggcagcagcagccgcggagcagagccgccggggagggagccagaagcaacgagggaggggacaccaaacg

SEQ ID NO: 48048 - RNA, 81 nt, Homo sapiens
acggcgcccggccggggcgccacggccacggcgcggcaccggggcgccggccagggccccccacgcgagaacccgggccgg

SEQ ID NO: 48049 - RNA, 48 nt, Homo sapiens
gcaagcggcgacacacgacggagaccccgcggaagacaccagaagggg

SEQ ID NO: 48050 - RNA, 38 nt, Homo sapiens
agccccagaccgagcgcagagaagcagccccaccaggc

SEQ ID NO: 48051 - RNA, 73 nt, Homo sapiens
gcgggcgcaccggcgacggcccccgggccacgggcaccagggcccacagggcacagagaacgaagaggcagag

SEQ ID NO: 48052 - RNA, 65 nt, Homo sapiens
aaagaccggaaaaacccagagcgccaaacccccaaggaaggaagcgaaaagagacaggaacagga

SEQ ID NO: 48053 - RNA, 57 nt, Homo sapiens
ggggaaaaccaaggggcaaaccaggccagaaaggccgaggaagcgccgacagggaaa

SEQ ID NO: 48054 - RNA, 54 nt, Homo sapiens
ggaaagcccagccaccggccacacgcgcccggccaccggacaagaagcaaccac

SEQ ID NO: 48055 - RNA, 85 nt, Homo sapiens
gccaccaccgccaccggaacccgagaccgagcagaacccgaggcgcggcggcgagaaaaagccgagagaagaacagggaggaaaa

SEQ ID NO: 48056 - RNA, 67 nt, Homo sapiens
agccgggcagacacacgacgagaaccggagaaagagcggcgagggagaccgaggaacacagcgaaaa

SEQ ID NO: 48057 - RNA, 84 nt, Homo sapiens
cacaaggccaagggcaaggagacaggaccccggaggaaaagcggaagcggcagcggcgaacgccggaacggaccaacaggaggc

SEQ ID NO: 48058 - RNA, 77 nt, Homo sapiens
ggaacccaaacagagccacccccacccaagagccagagaagaacagggaaaaccagcaaacacaagacaggcaaaaa

SEQ ID NO: 48059 - RNA, 52 nt, Homo sapiens
cgaaacaggagacggggagggcagcaggagcgacgcccccaggaacgaaagc

SEQ ID NO: 48060 - RNA, 66 nt, Homo sapiens
acacagggagcgagaacgggccaggcaggaaggaggagccaggaggagagaacaagaaaagcgcgg

SEQ ID NO: 48061 - RNA, 71 nt, Homo sapiens
gccaaacgagggccccgacgacacagcaacaagcaccgacacaggagaacaagcagggccaggccacggaa

SEQ ID NO: 48062 - RNA, 81 nt, Homo sapiens
aaacggggacaccccaggcagaacaacaagagggaagaagcggccgaagggagccgccgccagcaccaccagccacccaaa

SEQ ID NO: 48063 - RNA, 52 nt, Homo sapiens
caccaggacgcccgccgcaaaccgcaccccgccaggaagaggcggcggcgga

SEQ ID NO: 48064 - RNA, 57 nt, Homo sapiens
accaggaccggaaaagaaggagggacgaagagagccagggaaagccgcagcggggag

SEQ ID NO: 48065 - RNA, 75 nt, Homo sapiens
aaagcgcagcaaagcgggaagacaaaaaacgcacaaggcagagaagcaaggagcaaaaccccacacaccaacaaa

SEQ ID NO: 48066 - RNA, 82 nt, Homo sapiens
gccacgcagaggacgccggaacacccggaagccgagaaagagaggaaacagcggaggaggccacaggcacgcacgaagacgc

SEQ ID NO: 48067 - RNA, 72 nt, Homo sapiens
agagccgccccagcagcaggggcgccaggcaaaggagaagagaagggggaccagcagcgaagacccgcacgg

SEQ ID NO: 48068 - RNA, 68 nt, Homo sapiens
ccacagagcgaaaaaaaccaacacgcaaccagaaacaacagcgagacgacgggaccgaaggaccccgc

SEQ ID NO: 48069 - RNA, 78 nt, Homo sapiens
ccgaggaacccagccacagacaccaagcgagggagacggagcgccagggcaacagagcagcgagaacgccggagaccc

SEQ ID NO: 48070 - RNA, 62 nt, Homo sapiens
cccgcgccagccgcgcacaacggggcaccgagccgaacacccagccacccaccagcgacaag

SEQ ID NO: 48071 - RNA, 83 nt, Homo sapiens
agagccagggccgggagggcgccaggcagaggcgcccagccccaggccagcagccacggagcccggggcaggaagggcagcag

SEQ ID NO: 48072 - RNA, 76 nt, Homo sapiens
gaagagccggacagcgacccccgcaaggaaaggcccagaaagaccagagagggaccccccgcccagggccccggaa

SEQ ID NO: 48073 - RNA, 69 nt, Homo sapiens
cggccacaacagagacccaccaacggacaggagccccgccggccaggcaaccccgccacggagcagacg

SEQ ID NO: 48074 - RNA, 76 nt, Homo sapiens
caccccaagcacacccgcacgaggcagagaacaagacggacgcaccgacggaacgaacccgcaaacaccgcgcagg

SEQ ID NO: 48075 - RNA, 67 nt, Homo sapiens
ccgacagcagagacaggccggagacaaaacgccggcaaggagggaaaaaacaaaaaaagacagggca

SEQ ID NO: 48076 - RNA, 77 nt, Homo sapiens
gcccccgccggccgcccaacaccgaacacccccgaaaccgggccgaagacgcacacggagcagaggaaaggagacgg

SEQ ID NO: 48077 - RNA, 51 nt, Homo sapiens
agcaggccacgaaaacacaagcacaaggcggccgaccaagggaccagcgca

SEQ ID NO: 48078 - RNA, 74 nt, Homo sapiens
aaaaggccacgacccaccccgaagagcaacggaaccagcgccgagggcaccaaaagcggcaaacaaaacgaaaa

SEQ ID NO: 48079 - RNA, 72 nt, Homo sapiens
caggaacgcaagccagccgggaacaaaagcacaggaaggacaacccgggggacgccgccacgaagaagagac

SEQ ID NO: 48080 - RNA, 76 nt, Homo sapiens
agcggagaccgagagagaaccaaacgagaccaagagcgcgcgggcaaaggcacgaccagggagacaggcaggaaaa

SEQ ID NO: 48081 - RNA, 70 nt, Homo sapiens
gacaacgggacccagaagagaccccagggccaaaaagcggagacagagaagcagaaggaaaagccggaag

SEQ ID NO: 48082 - RNA, 82 nt, Homo sapiens
ggcccggagccggcgcgaaccggcccccgcagcgggacccggccgcaacgcccggggccccgcagcccgggcgaccccgagg

SEQ ID NO: 48083 - RNA, 81 nt, Homo sapiens
gacgaagccccgggaaccaggcgccagcagaggacacccgcgaaggcaaaagcagaccggaaaacccaccggcaagaccac

SEQ ID NO: 48084 - RNA, 68 nt, Homo sapiens
aaaagaagccgaccagccgagagcagacaaggaagaacgccgaacagccaaaaggaaaaaagaccagg

SEQ ID NO: 48085 - RNA, 63 nt, Homo sapiens
cgcagccagccgcaacggaggagaaacccgaccaaaaccacacgccgagcaaggagaaggacc

SEQ ID NO: 48086 - RNA, 72 nt, Homo sapiens
caaaagcaccacgaccagagcagaaacaacgaacgagcaaggaagggccaaggcagaccccacaccggagaa

SEQ ID NO: 48087 - RNA, 69 nt, Homo sapiens
ggaggggcaaaaacccggccaggaggacccccaaaaaggggagagaacagaaagaccaagcagaagaga

SEQ ID NO: 48088 - RNA, 58 nt, Homo sapiens
cggcaacaccagacaccaaggacagcccgcaagaacgaaaacaaacggaagagagggc

SEQ ID NO: 48089 - RNA, 66 nt, Homo sapiens
ccaaaagaccgcgggaaaggaggccacggccagaacagggccccgaaaggacagaacccaccagac

SEQ ID NO: 48090 - RNA, 85 nt, Homo sapiens
gagccgcgcggagccgcgcagccccggagcacgcaagaggagccaggagcacggggggaacaagaccgccgggacggaagacggg

SEQ ID NO: 48091 - RNA, 61 nt, Homo sapiens
ccagaacagagaagaaagcagccaggcccacgcacccaggccggggcccaacaagggccac

SEQ ID NO: 48092 - RNA, 56 nt, Homo sapiens
gggaacaacacggccacgaaccagagagggacgacggcggacaccaacgggagccc

SEQ ID NO: 48093 - RNA, 74 nt, Homo sapiens
acggggcaaggaggcgcgccaacaagccggggcacgaagacgacagacaggggagagacgggcaccaggcccag

SEQ ID NO: 48094 - RNA, 103 nt, Homo sapiens
aggacccccggccaccggcggcaagccagaacccaacaaggaggccagggcggccaggacccaaagacaggaccacgcaccagcagagaaggaaagcaaaccg

SEQ ID NO: 48095 - RNA, 82 nt, Homo sapiens
gcgggcgggccccgagagcagcagcgcagcgagagccagacaagccagacaccaagaccccacgaaagaccgggagccggag

SEQ ID NO: 48096 - RNA, 79 nt, Homo sapiens
agcgaggcagcgacaggacgggaacggaccaaacacccaacaccagagaacacaaagacagggacaggaagacaggacc

SEQ ID NO: 48097 - RNA, 77 nt, Homo sapiens
ccaaggaaacaggagcgaagcccagcgggccggacggggcggggggaacggaagccaagcaagagcgagagaaaggc

SEQ ID NO: 48098 - RNA, 60 nt, Homo sapiens
gcagaccacgccgacagaggcaagagcgaaggagaaaggcaacaaggcccgagcggggaa

SEQ ID NO: 48099 - RNA, 45 nt, Homo sapiens
acaggcgcgcgccaccagcccggcacacgggaggcgaggcaggag

SEQ ID NO: 48100 - RNA, 56 nt, Homo sapiens
cggagaagcgagcagcgcggagaggagcgaagagcgaagccagccagccgccgaac

SEQ ID NO: 48101 - RNA, 76 nt, Homo sapiens
ggcgggaagagccccagcacagagggaccgggagccgcaccaacggcgcgagccggcacgaaacaaaggagcgaga

SEQ ID NO: 48102 - RNA, 80 nt, Homo sapiens
cccggacggccggccaaaacaagaagcaccagaagcggagcagaggaggacagcagaggccgaaccagaagccggagcag

SEQ ID NO: 48103 - RNA, 73 nt, Homo sapiens
aaagaccacaaggaaccaacccgagcgcagccgggcagaagacagagacaggcagacagagaacgagagaggg

SEQ ID NO: 48104 - RNA, 80 nt, Homo sapiens
gccccgcaccggacacagcggaggagaagcgcaggagaaagcggacacagagaagaaaaaaagggagcccggaacaagcg

SEQ ID NO: 48105 - RNA, 91 nt, Homo sapiens
cagagacgcggcgcgcccgcccgcagcgcccaagcaggcgaagcggccaggcccgggcggacgcagagccagagcgccccagaggagcaga

SEQ ID NO: 48106 - RNA, 84 nt, Homo sapiens
gacgcacccacaggaccccaagcagaaggagcgggcacagaaagcgagagagccaaagacgagaggagaggaagcagccacacg

SEQ ID NO: 48107 - RNA, 80 nt, Homo sapiens
aggacacccggcccagccggcagacccccagcagagccaccggaaaccaaaggagggaaggaaaaccagaccagccagag

SEQ ID NO: 48108 - RNA, 74 nt, Homo sapiens
gcagcgggaacacagcaacacagcgccaccgcggcacccagggcccagggagagacaccaagaacgggcgggag

SEQ ID NO: 48109 - RNA, 80 nt, Homo sapiens
gcggcgccgggacgcaccgcaccgagggcgagcccaggcccagcagccaccacagcgccgccccggcccgaaacagcccc

SEQ ID NO: 48110 - RNA, 70 nt, Homo sapiens
ggggcaggaagaacacgcggggaagaagcaagaacagagagaagggcgggagaaaccaaggaaagagaaa

SEQ ID NO: 48111 - RNA, 76 nt, Homo sapiens
cacaacagcggagcgccggccgcaccaccacacgcggcaagcaacccccagccacaacgcgaaccgggcggacgaa

SEQ ID NO: 48112 - RNA, 61 nt, Homo sapiens
gccgaggaaggccaccaagacgaaagaggcggacgaacccaaggaggcaggaggaggccca

SEQ ID NO: 48113 - RNA, 84 nt, Homo sapiens
accaaggcaccgggccccgcccaggccccggacaaaggcgcccagaggggggagccaggaccgcccaacgaggaccagcaccga

SEQ ID NO: 48114 - RNA, 95 nt, Homo sapiens
gagaggcaagcgagccgcggacccaaggccagaaccaggaagaggagggggaaagagaacagcccaccaccacccgagcgcagcccagagacccc

SEQ ID NO: 48115 - RNA, 78 nt, Homo sapiens
gcggccagaggcgaggcagggaggacccacccccgggggaaaagaacgaggcaggcagcggaagagaaagaccgaggc

SEQ ID NO: 48116 - RNA, 67 nt, Homo sapiens
aggcgcagaaaccccggacaaggcacgccagacgacaccacgccacccaagagagagcaaaaaccga

SEQ ID NO: 48117 - RNA, 73 nt, Homo sapiens
gaaaacagaggaaccccagccccggcaccggcacggaccaccccaacaccgggggagaaccgggcccaccagg

SEQ ID NO: 48118 - RNA, 47 nt, Homo sapiens
agggcgcccccgcccccccacccaccagggagacaggcggcacgacg

SEQ ID NO: 48119 - RNA, 53 nt, Homo sapiens
gagcgcggcccgaggcccgcccagagcggcggagaaaccaccacaaacacgag

SEQ ID NO: 48120 - RNA, 75 nt, Homo sapiens
gccccacagggcgcagagcgagaagccaagggggcccacgagaagagcaggcgacgggggagagggagacagcgg

SEQ ID NO: 48121 - RNA, 72 nt, Homo sapiens
ccagaccacacaagggcaggggggaaaggagagggaacaacaggaaaacaagggcacgagcccaggacccaa

SEQ ID NO: 48122 - RNA, 75 nt, Homo sapiens
caccaagcgggagacacaccacgccaaggaagcgcggacaacaaacaaagggacccaaaaagcgaagagcacaag

SEQ ID NO: 48123 - RNA, 77 nt, Homo sapiens
cagcggacgagggagggccgccgcgcccaggagggcgggaagaagcgagagccaaaggggagacgcagcgagccggc

SEQ ID NO: 48124 - RNA, 87 nt, Homo sapiens
cagcacccaccccggagggggaccacaagacccacgacaggaaagaagacaaggcggaagaccagcaagccaccccccaaagcagaa

SEQ ID NO: 48125 - RNA, 75 nt, Homo sapiens
cagaggccgggggcagcgaggggccgggccggcggaggagcacaggcggacggcagagacgcgcaaagcggggag

SEQ ID NO: 48126 - RNA, 88 nt, Homo sapiens
aaagccaacgccccccaccacccggggcaggaggacggaagaaagaccccaaaaaagaaagacccacacagcaaggagaagagaaagc

SEQ ID NO: 48127 - RNA, 60 nt, Homo sapiens
gagacacgccgccggccgccggcggggaccggcacggcgcggacaaggagagcaacacgc

SEQ ID NO: 48128 - RNA, 76 nt, Homo sapiens
gaccgagagcggaccgagagcgcgaaacgcacgagaagcccgcagagaggggcagcggcaggaggccacgggccag

SEQ ID NO: 48129 - RNA, 65 nt, Homo sapiens
agagggccggagaaagaagaaaaagagaaaccagcggaagggaaagcgagggagcaggaagccac

SEQ ID NO: 48130 - RNA, 75 nt, Homo sapiens
cacccccgacagggggccgccgggggcgcggcgcccaggcggaagcagggcacaaccggccacgcaacccgcccc

SEQ ID NO: 48131 - RNA, 72 nt, Homo sapiens
caaaccacaacgaagcacgacaagagaccaaaacaacccgaaagaaccgaacaaagggagccaaggacaggc

SEQ ID NO: 48132 - RNA, 55 nt, Homo sapiens
cagcaaggcgcgcggcaccccggccaccggcaggggccggcccgagaccaccccc

SEQ ID NO: 48133 - RNA, 89 nt, Homo sapiens
cgcgcccccgggaccaccgcgccgccacgcaccagcccgggccagcgcaacgccggcaggagaaggcggaggggccgaggggaccaagc

SEQ ID NO: 48134 - RNA, 70 nt, Homo sapiens
acgcgcggaaggcagcgcccagcagcgcaggacccaagaagaacagaaggaagacaaagagacggcaccc

SEQ ID NO: 48135 - RNA, 39 nt, Homo sapiens
cccgagagcgagacacagacggcaagagacccagccgcc

SEQ ID NO: 48136 - RNA, 73 nt, Homo sapiens
aggagaaaagccagcaacccagaaaacagggacggacggagagcccaagaaagaaaggaaaaacccagaccag

SEQ ID NO: 48137 - RNA, 74 nt, Homo sapiens
aggggagcgggaggagcgggggccgccggcggcccggccagagaccgagcccagcggacccaaaggacccccgc

SEQ ID NO: 48138 - RNA, 76 nt, Homo sapiens
ggcgaagacgaaagagcgaagggggcagcgcgaaaacggggaaccgcagaaggagcccagccccacccccgcccca

SEQ ID NO: 48139 - RNA, 95 nt, Homo sapiens
cgacagcccccgacacagagaggacacccaaaacgaaacaacgaacgagcaaggaagggccaaggcagaccccacaccggagaacgcaaccagaa

SEQ ID NO: 48140 - RNA, 69 nt, Homo sapiens
gaagacggcccaaaacacagcgcaccacacacagagggaaacggaaagggcggaaacaggaggaaaacc

SEQ ID NO: 48141 - RNA, 84 nt, Homo sapiens
ggccacaccacgcagaacgcaacaccaaggcacaccaccccagaaccccacgaaacaggcgccaagggacaaacaaagccaagc

SEQ ID NO: 48142 - RNA, 82 nt, Homo sapiens
ggcggcgcccgaggcggagggacggaggaaacagcgagggggaggagacgcaccaggacaaaagaagggcagcacaaaggaa

SEQ ID NO: 48143 - RNA, 79 nt, Homo sapiens
ccccgccgccccgccggcacagcgggaagagcgccggcacagccacaccgagaagaccggcccaagaaccccaccgccc

SEQ ID NO: 48144 - RNA, 85 nt, Homo sapiens
gagagccagagcgcagggagcgccggccgcgagaacaagagcagcaccagcagaagagggcccgaccacggcaacccagaggcga

SEQ ID NO: 48145 - RNA, 65 nt, Homo sapiens
cagcacagccgcaaggaagaccaagcaagacaggaagagggcccaaccaagacgcccaaagcccc

SEQ ID NO: 48146 - RNA, 64 nt, Homo sapiens
aaggacgaagaacccacagaggcagagggaaccaaaaaaaacagacaagaaggaacacaaggga

SEQ ID NO: 48147 - RNA, 73 nt, Homo sapiens
caaagcgcaacccgaaggaacgggcggaccagggcgagcacgagcacccgccccaacgagccagaacggaaga

SEQ ID NO: 48148 - RNA, 66 nt, Homo sapiens
cggaaccacgcaccagacaacacaggggcaggaggacgcggcggcggcgaggagaccccggccccg

SEQ ID NO: 48149 - RNA, 83 nt, Homo sapiens
caccgcccgcgccaacagcccagccgcaggccagaacccggggaccggaagcgcgggggagcgaacaagcagcagcggaggag

SEQ ID NO: 48150 - RNA, 77 nt, Homo sapiens
agacagagccaccagccagaggcgcaaaacaaggaccggacagagcacgcacagaagccaccaaaaaggaacgagga

SEQ ID NO: 48151 - RNA, 74 nt, Homo sapiens
acggggggaggaccgaccagccgaagcgaggggaagacgaaagggaagagaaaaaaacaagagcgcaagagagc

SEQ ID NO: 48152 - RNA, 69 nt, Homo sapiens
ccggacacgccagggacacccaaagcgcacccagaggcgaaaaccggcgccaagcacggggacagcgag

SEQ ID NO: 48153 - RNA, 77 nt, Homo sapiens
aacccggaagagcgccccaggagaaacaacagcagggacgcaccaaaacggacagccgaagacaggcgacccaccac

SEQ ID NO: 48154 - RNA, 77 nt, Homo sapiens
cggcgacgacccacccgggggggcagcgcacggaggagcggcgggccagacaggcagcagagggaaaccggacaaaa

SEQ ID NO: 48155 - RNA, 38 nt, Homo sapiens
agaaaaagcggaaggccacacggcgggaaaaccgccac

SEQ ID NO: 48156 - RNA, 75 nt, Homo sapiens
ggaggcaccacggccgagcccgagacgaaccagaaggcgaaagaagaccaggggccgcgccaagcaaaggaacca

SEQ ID NO: 48157 - RNA, 76 nt, Homo sapiens
gcagaccaacaagaaaccgcccccgcaagagcccagaaaaacagagacgaagaggagcagaaccagaagggacaca

SEQ ID NO: 48158 - RNA, 85 nt, Homo sapiens
accaggggcgcggaaccagaacaaaaccgagcaacagggaagcagaggagaaccgggagccacagaaaaggggagcagagcgcag

SEQ ID NO: 48159 - RNA, 39 nt, Homo sapiens
ccccagaccgcggcgaaagggacagaacgaccgcccggc

SEQ ID NO: 48160 - RNA, 64 nt, Homo sapiens
gcaacaagacacggagcaaggaggaaaacacacggcgggaaaacggcacaaggcgacgagggag

SEQ ID NO: 48161 - RNA, 72 nt, Homo sapiens
caacagcccgacaaccagcaggacggaggaaacagcgccaaagcaagggacggggccaaggcaaccgggaga

SEQ ID NO: 48162 - RNA, 35 nt, Homo sapiens
gcacgcgggcgcccagaagcggcagcagaagcagc

SEQ ID NO: 48163 - RNA, 75 nt, Homo sapiens
ggcacgcacgcgaagacagcggcagggaaggagccaagacccaaggaccgccccagaaccacaacaccggaacga

SEQ ID NO: 48164 - RNA, 64 nt, Homo sapiens
gcagaggcacgggggaacaagacggcaagccccacacgcccgcaagggacagcacgccacagac

SEQ ID NO: 48165 - RNA, 74 nt, Homo sapiens
ccaaggacagcacagaaggagcaggacggaaggagaagagaaggaagaaacagacaccaggcgaagaaccggaa

SEQ ID NO: 48166 - RNA, 59 nt, Homo sapiens
cgcccagcgggccggcgcccggggccccggagaggggaccaggcggagccccgaagagc

SEQ ID NO: 48167 - RNA, 65 nt, Homo sapiens
ccaggaagaagacaacagcgacacagcaaacaaagaggaacaagaaaaggccgcgggcggaaaag

SEQ ID NO: 48168 - RNA, 71 nt, Homo sapiens
cacgagcaaaaggaagcaacccagaagagcgaaggacccagcgaggagggacgcaacaagcaaggcaaaca

SEQ ID NO: 48169 - RNA, 78 nt, Homo sapiens
gaacccggagggcggaccacaagggaaacacgccggcagcgagaccggcgcgagaggcccaacgccccaccccccccc

SEQ ID NO: 48170 - RNA, 38 nt, Homo sapiens
caaccggcggcgcagacccgaaagacggggaccacgac

SEQ ID NO: 48171 - RNA, 58 nt, Homo sapiens
acccaccaaaccagccgaaaggacaggggcaaggccgaggggaacagcacacagagag

SEQ ID NO: 48172 - RNA, 77 nt, Homo sapiens
accaaagacagcgacagaggcaccccaacaaagaagcaccaaacagccgacaaagccagggagcaggagcaaccagc

SEQ ID NO: 48173 - RNA, 80 nt, Homo sapiens
gcagcggaaaagccggggggacggagggaaagaggagccccccaaaagggagcacagcagcgcaccccccacgggcagca

SEQ ID NO: 48174 - RNA, 107 nt, Homo sapiens
ggaaagccagaggcggccaccagcccacggagaaaggagaaacagacccggccgaagaaaggaaaccacccgggaacggagccggagcgcaccaacaggagcaagag

SEQ ID NO: 48175 - RNA, 72 nt, Homo sapiens
gggaaccagccaaaagcccaaagcccagccaaggacccgaaaaacgagccacaccaaaagggaagaagagga

SEQ ID NO: 48176 - RNA, 79 nt, Homo sapiens
acacaccgcgggacgacaagaggaccccgcgcaaccggcacaacaggcagaggggaagcggcccgcaggggacagggaa

SEQ ID NO: 48177 - RNA, 80 nt, Homo sapiens
ggcccgcgcgcccggccaagaggcaaaggggaggacgcagcaaaccaccagaagaaaacccccaccagcgcagaaggaac

SEQ ID NO: 48178 - RNA, 78 nt, Homo sapiens
cacaccagggggcaggcccggaggcccagggagaaaaggaggccggacagagaaggcagagcacaggagaccaagcag

SEQ ID NO: 48179 - RNA, 81 nt, Homo sapiens
gaagaggcgacgggaaagaaaaaggcgagacacaagcgaagacccagccagagaggaagaaaaggcccaaccagcagagca

SEQ ID NO: 48180 - RNA, 75 nt, Homo sapiens
gcacgagaaggagagccagccccgaggaacccagccacaggccccgaggcaaagcccaacacaccgcgccacccc

SEQ ID NO: 48181 - RNA, 72 nt, Homo sapiens
gaaagaccgaccaggacacgagcgggaacgcaaacgaagggaccagcagcgcaaaaacaggcagggaaaacc

SEQ ID NO: 48182 - RNA, 70 nt, Homo sapiens
gaccccacccgggcgcgcggcggaaaggcacagacccggagcagcagaaaaaggggacggcaaaaaagag

SEQ ID NO: 48183 - RNA, 73 nt, Homo sapiens
agaaaacgacacacagcgcaaaaacgaaacgagggcgagaccgcacccgaaagcacaaagaccgacagaaaaa

SEQ ID NO: 48184 - RNA, 87 nt, Homo sapiens
cccgaagcccaccggccccaacgcacagccagggagccaagcgccgcccggccggcgcacccacgacgcgcacaccaccggcagacc

SEQ ID NO: 48185 - RNA, 62 nt, Homo sapiens
agcacgagggagagagagggaccgaaaccaccagagggcgacagaaaacgggcagggcagcc

SEQ ID NO: 48186 - RNA, 82 nt, Homo sapiens
ccgggacggcccaaggccagcccgcaggccgagacagagcgccccaggcggggccgcgcagcgcgcggagaagggacacacg

SEQ ID NO: 48187 - RNA, 74 nt, Homo sapiens
agccggccgccagccgggagaagacacgcggaaaccgcggccggcacaaaaccggcacacaaaacccgaaagcg

SEQ ID NO: 48188 - RNA, 78 nt, Homo sapiens
agcggcgagagcccccacggcccccaggcccgccgccagagggacaggagccaggccagaaaaggacggggcgggccc

SEQ ID NO: 48189 - RNA, 67 nt, Homo sapiens
aaacaaaagagaagccagaaacggaaacagaacaacgcaaagcagcccaggggcacgggcacagccc

SEQ ID NO: 48190 - RNA, 79 nt, Homo sapiens
caggccaccccagagggcccccaaacagaaccgaaggggaagcgcccggcgcccgcacgggaaagcaacggcgcaagcg

SEQ ID NO: 48191 - RNA, 83 nt, Homo sapiens
ccgcaccaaaaacagaaaaagcacaacagagggacaacaaaagccccacaagagccaccaaaaaccaggccaccggagacagg

SEQ ID NO: 48192 - RNA, 51 nt, Homo sapiens
ggggggaccagaggaacagagcgcaaaagaccaaccaggcacaggagagaa

SEQ ID NO: 48193 - RNA, 79 nt, Homo sapiens
gggagcgccggccgcgagaacagaggaggaagccaagaacgggagcgaagccacgcagcggcaccaacgaccgggcccg

SEQ ID NO: 48194 - RNA, 76 nt, Homo sapiens
ggcccaggcgccccgcagagcagggacaaagccaccgcccaaccagaggaaccaagcaagcacaagggacagagaa

SEQ ID NO: 48195 - RNA, 78 nt, Homo sapiens
agcaccaacggaaacagccacgagagacgagcaacccccgggaagccaagccgcagggcggaaaacaccccaaaagcc

SEQ ID NO: 48196 - RNA, 83 nt, Homo sapiens
gacggcggggccgggccggagacgcgcccgcgcgcaggggaagcgggcaggcggaaccagcggagccgcccgccagaagaaag

SEQ ID NO: 48197 - RNA, 73 nt, Homo sapiens
ccacgacccaccccgaagagcaacggaaccagcgccgaggagaagagagcggacccacaccagggaagacagg

SEQ ID NO: 48198 - RNA, 77 nt, Homo sapiens
aaggcaaaacacaacaagagggagccaggccagaaaacgggggaggggggaagacagggcccagcaccacaggacgg

SEQ ID NO: 48199 - RNA, 76 nt, Homo sapiens
gacgagaggcggacaggacagccaaggcaggaaaggaaagagacaaagaaaggccgacagagcaaacggagggaga

SEQ ID NO: 48200 - RNA, 77 nt, Homo sapiens
gcaccacgccgagacccacgaggagggcggagccccaaagcacgcaggccgaaacacccaacgagcacgcgccaaag

SEQ ID NO: 48201 - RNA, 69 nt, Homo sapiens
cgcacccaaacaaacgcccgccccggggaagggacaacagcagagaaaggcgggacgacagcggaaaag

SEQ ID NO: 48202 - RNA, 80 nt, Homo sapiens
gggagaagaaggaagccaacccacagcgaaaccagaacaaggcaaaaaagaacgcaagagaagcacccagaagaacgccc

SEQ ID NO: 48203 - RNA, 77 nt, Homo sapiens
gccagaagagaaaaagcccaggcaaaaacacccaaccaggcacagagaaagggcggagaacggaaaagcaccaggaa

SEQ ID NO: 48204 - RNA, 56 nt, Homo sapiens
caggagccagcacgcggccaagacagccccgacccgaaggcagagggggcgaggga

SEQ ID NO: 48205 - RNA, 76 nt, Homo sapiens
cgacaggcaagcggaacagaaggggaaaacggacgaaaccaagcggggaaccaaagaaaacacaagaaacagggag

SEQ ID NO: 48206 - RNA, 64 nt, Homo sapiens
agacaaccaaagacaaaccggcggaaaagcgccccggagaagcaacagacccacgagacaagaa

SEQ ID NO: 48207 - RNA, 85 nt, Homo sapiens
ggggagagccacggaagccgacagacaaccagcccacaaaccggaggacacccccagacgcagaagggcaggagacacagccgag

SEQ ID NO: 48208 - RNA, 82 nt, Homo sapiens
caggccacgcagaggcaagccgggaagaggagcggaaaaacaagcaaaagaaaaacagggaaagaggagaaagaaaggaaga

SEQ ID NO: 48209 - RNA, 80 nt, Homo sapiens
cagggaccgccagaaaccaaagacgagagaggaaagcccggccgcaccgcggagcccaggcacacagccccaggacacgg

SEQ ID NO: 48210 - RNA, 76 nt, Homo sapiens
ggacggaagcgagggcacgggcggcagcccgagaccgcagcagacaacaggcacaaagagagaaggaacacccaca

SEQ ID NO: 48211 - RNA, 75 nt, Homo sapiens
accgcgcgacaggccggggaaggcaagacccacaaaccaccaccaacacagaaagccagaacggccgagacaccg

SEQ ID NO: 48212 - RNA, 72 nt, Homo sapiens
aacacaccaggagaaacaggagcccagccccggagacccccgggggaccaacgaagaaaaaaaggcaagaac

SEQ ID NO: 48213 - RNA, 72 nt, Homo sapiens
agaggcgccggggacagcaaaggcgagaaacagaaggagcaggggagaagcagaccgcaccaggcgggaccc

SEQ ID NO: 48214 - RNA, 73 nt, Homo sapiens
cagagcgcaggaaagacaagccgggagcagacaagaggccggacaagcacacacaaaccacaagaaggggcgc

SEQ ID NO: 48215 - RNA, 75 nt, Homo sapiens
gcgcagccgccgccccgccccagaagggggaccacacagggcagcccacagaagaaggcccgccaggaggacaga

SEQ ID NO: 48216 - RNA, 60 nt, Homo sapiens
aggagcgaaggcggcggcagagaacgccgggccagcgagcacacgaaaggcacaagcgcc

SEQ ID NO: 48217 - RNA, 50 nt, Homo sapiens
gcagcagcagcagcagcaggagcagcagcagcagcagcagcagcagcagc

SEQ ID NO: 48218 - RNA, 76 nt, Homo sapiens
aaaagaggccggagggagccagcggccgaagcgagccaagagccagcacccagcagcggaaggaaggccgcggacc

SEQ ID NO: 48219 - RNA, 72 nt, Homo sapiens
aaaaccagggaaaaaacacggcacaaaacaaggaaagagagggccaaccagaagacggagcaggcaaaggag

SEQ ID NO: 48220 - RNA, 97 nt, Homo sapiens
ggaaaacagacgcccagccaaacaaaaaggaaaggagacaagcagagacgaaccaggcaaagggggcagcggcaagcaggggagccagccacacaga

SEQ ID NO: 48221 - RNA, 78 nt, Homo sapiens
gagcgccggaaacaccaacaggcaagggacaggccgcgcggccggcggacgcccacccgcacccaggggcacggcacg

SEQ ID NO: 48222 - RNA, 73 nt, Homo sapiens
cccacccaggccaaaccaaccgcaccccgaacccgcaaaccgccggcaaggcccagaagggcagagacggcac

SEQ ID NO: 48223 - RNA, 81 nt, Homo sapiens
caacgagaccagccaggcccagccccgaagggcacaccggagggcacgaagaacacaaagcaaaaaggaaaagaagagaag

SEQ ID NO: 48224 - RNA, 54 nt, Homo sapiens
cgggaccagacgaggaacagcaaaaagggaggggaacagaccgaggacagcggc

SEQ ID NO: 48225 - RNA, 98 nt, Homo sapiens
acgcggaacgacggggcgcaagcacaaggcccacgggcggcaggagcaaagagcaggaagcccggaaacaacaggaaaagccagcaagaaaaagaaga

SEQ ID NO: 48226 - RNA, 66 nt, Homo sapiens
gaagaagaggacagacaggaccccgcgagcaaaggaggaggaccacaccaaaagagcacagggcag

SEQ ID NO: 48227 - RNA, 74 nt, Homo sapiens
cacgagaacaagagccggaacgcgcggaccccagcagacagaggggagcgaggccggagcgggagaggcccggg

SEQ ID NO: 48228 - RNA, 77 nt, Homo sapiens
aggaaaacaaccgagggcagaaggcccacgcggaccggcagcgccaccggaccaccagacaaggacacggcccaagc

SEQ ID NO: 48229 - RNA, 85 nt, Homo sapiens
gccaagcaacccggaagaaaccgccacagagggggggaggagaacccaccaaacagacgaacacacgggaggaggcgaggaggag

SEQ ID NO: 48230 - RNA, 78 nt, Homo sapiens
cgaaccggaagggcaaggaaaccgaggaaggcagggaccggaaagaacaaaggcccaccggaagagcggcgaaaaaga

SEQ ID NO: 48231 - RNA, 60 nt, Homo sapiens
cgcggacgccgaggcaccgaggcaccagaggaggcgacaccgaaacccagagaccagccc

SEQ ID NO: 48232 - RNA, 81 nt, Homo sapiens
cgacaagaccaagagaggcaaagcacaaagagccaggacaaaaccaggcagaaccaacacgaacccaagcacaaacaagaa

SEQ ID NO: 48233 - RNA, 86 nt, Homo sapiens
ccggcagcccgcaggacagcggagcggcaacgcccacaaagagggaccgcaggcccaagagaaacaggcacgccgcaccacccacc

SEQ ID NO: 48234 - RNA, 81 nt, Homo sapiens
caaggcggccaagcacaacggcggcacccacgcagacaccagccgcgccagaggggggcgggccgagcacccgcaggcccc

SEQ ID NO: 48235 - RNA, 79 nt, Homo sapiens
agaccggagggcccgggcaaagaagcccgcagaacacaacgaccagagacgacgcaaccaaaggggggagggagcaaac

SEQ ID NO: 48236 - RNA, 81 nt, Homo sapiens
gaggggggcgagcagacccaggcagccgcgcaagaaaacaggacaggagaagaacacccccaagagcaaccccacaaacac

SEQ ID NO: 48237 - RNA, 84 nt, Homo sapiens
accagagggaacacaaacgggcggaaagcagaaaacacggaggaacacgagggagcaccgcagggcaggccccacgcccacagc

SEQ ID NO: 48238 - RNA, 76 nt, Homo sapiens
aaagcaccccccaaagccggagcggccgcagaaagcaacaaagcgagagcacaagaaaacagccccgagcaccaga

SEQ ID NO: 48239 - RNA, 112 nt, Homo sapiens
ccccagccaacaagaaaaagacaaggagaagaccagagacacgccacaagaacaccaaccagccggaagaacaccggaagaacaggcaggcgggaggacaaggacaccggcc

SEQ ID NO: 48240 - RNA, 79 nt, Homo sapiens
aaaccaccaacagaacaagaggagaacggaagccagagaaaaggaagagagagcaagagaggccacgcccacgaggcga

SEQ ID NO: 48241 - RNA, 87 nt, Homo sapiens
ccggcgccaggcccccgccgccccagaaccggcgaaaaccggagagggacaccggccagaacgccccggaacccaaaccgaagccac

SEQ ID NO: 48242 - RNA, 81 nt, Homo sapiens
gaccgagaccgcggccgggaccgagggggccccgcggcggacgcccccggggcacacacgcaggcgcggccgccgcccggc

SEQ ID NO: 48243 - RNA, 74 nt, Homo sapiens
aagggacggggacccccaacgggcccgcagcccagcagcccggcaagcagacagcaaccaaaccggcaaaccca

SEQ ID NO: 48244 - RNA, 38 nt, Homo sapiens
gaagcccccaaggagcgcagacacagagagacccagag

SEQ ID NO: 48245 - RNA, 78 nt, Homo sapiens
cacgaaaccagagccgaaaaggccggccaagcaaccaaaagcggaacaaacgaacggaagaggcagacgcgaccacga

SEQ ID NO: 48246 - RNA, 83 nt, Homo sapiens
acaggaagagaaagaggggagaaaaagggaggagagaaggagagacccaaaagacacgcaagacagaaagacagacgagacaa

SEQ ID NO: 48247 - RNA, 83 nt, Homo sapiens
caagcccgggccccgcagcgcaccggagaccggcacaagcagccagcgccacaggccacagaccccaccagcacgaagggaca

SEQ ID NO: 48248 - RNA, 75 nt, Homo sapiens
gaagagcgagagaagcggcggaggacgagcccgggagcgacccgcgcaaacaaacagcgagggcgccgaaggcca

SEQ ID NO: 48249 - RNA, 73 nt, Homo sapiens
aggagacgggaccagcccgcacacagaccgcagagcccagaacaaagggccaaccgaaaaaacaaccagagag

SEQ ID NO: 48250 - RNA, 78 nt, Homo sapiens
ggaagagaaagcgcaaagaccaggccaagacagaggcagaaccccgcagggaaaaagaaaaaaaacccaagaaacaca

SEQ ID NO: 48251 - RNA, 77 nt, Homo sapiens
aagaacagcgggaaagaaggcaaaacacgggagaaggaagaccaaagaaaaacacaaagcacgcaagccaaaagcgc

SEQ ID NO: 48252 - RNA, 68 nt, Homo sapiens
caccccacagccccagacggggcagagacgcaaggaagacggcgcagaaggcggccgggacggcgagg

SEQ ID NO: 48253 - RNA, 53 nt, Homo sapiens
cagggcaaaccagaaagacggaaggagggccccggagcagccacaccaccgag

SEQ ID NO: 48254 - RNA, 79 nt, Homo sapiens
cccacccaccaaaccggagggggaaaaaacccaaggcgcaaagggggggccagaagaaaagaagagagggaaacagaca

SEQ ID NO: 48255 - RNA, 75 nt, Homo sapiens
ccacgacagacagcaaacagagacgggcgccgcaccaggagcgaagagcgccgacaagaggcacccaacacgcgc

SEQ ID NO: 48256 - RNA, 74 nt, Homo sapiens
ggaccaggggacgaagggaacaggcacagcacggacgacggaaccacccggcaccccaaccaccgcacccccag

SEQ ID NO: 48257 - RNA, 80 nt, Homo sapiens
accacggagcaaagaaaagagccggaagcgaggagacagaagacagagccaaacacccagaacagacgaaagaccagaaa

SEQ ID NO: 48258 - RNA, 78 nt, Homo sapiens
cagagcgggcgagaggaggcgagaggcgcaaagcaccaggagccgaagacgaggaaaaaggggcgagcaacgagacgg

SEQ ID NO: 48259 - RNA, 59 nt, Homo sapiens
acacagacaagagcgaccagcagacaccaggcaaccagccagagggcaccggcaaccca

SEQ ID NO: 48260 - RNA, 67 nt, Homo sapiens
aagaaacacaacaaaaaagagagggaagcaaagaggacccaaggacccaagaagaaagaaaaaccaa

SEQ ID NO: 48261 - RNA, 76 nt, Homo sapiens
gaccgagaccaagaaccccgaaaagcacgcagggacggcccgggaccagccagggcacgcgcacagcggcaaggcc

SEQ ID NO: 48262 - RNA, 82 nt, Homo sapiens
cccccgcgaccgcgcggaccagggcgacaaagggacccgcacgagccagggagccgccgggaccggcccgggagacgacaac

SEQ ID NO: 48263 - RNA, 77 nt, Homo sapiens
gcacacacggaaaccaagaaagaagcccaggagcgcccagaacagcaaaagcaggggccgcaaggccaggcgcgcag

SEQ ID NO: 48264 - RNA, 77 nt, Homo sapiens
gaccaaccaccagccccaccacagaacccccaaaaaacaacaacggccacgagaaaccggaaacaagcccgacacgc

SEQ ID NO: 48265 - RNA, 81 nt, Homo sapiens
gcgcgcgggacggggcgccgcccggggcgaggcagggccagcagcaggcgggagaacagggaagcggaaccaaaaaaagac

SEQ ID NO: 48266 - RNA, 85 nt, Homo sapiens
ggaggaggcggcagaggacgccccagagcagcgcggccaggcggaaagaggccggggcggcgggcaggcccagaggaagagaaaa

SEQ ID NO: 48267 - RNA, 69 nt, Homo sapiens
cccgagaggaaacacccccagaagagggcgacgggacaaacacaggaaggaacacccggaccaaacaag

SEQ ID NO: 48268 - RNA, 86 nt, Homo sapiens
cgcggggaacccacaaccgcaagacgccagcaagccaagaggagcgggcagagcccagcgagccaccagcaggcggggaagccccg

SEQ ID NO: 48269 - RNA, 70 nt, Homo sapiens
gagcaaaaacaccagacaagagagaacaaccgcaacgaacaaacaggagacagagagcaagagcacccca

SEQ ID NO: 48270 - RNA, 55 nt, Homo sapiens
gcccacaggacggggagacagcagcaggaacacaggggccgcaaggccaggcgcg

SEQ ID NO: 48271 - RNA, 55 nt, Homo sapiens
gaagcccccaaagagagaaccggagagcacccaacaagacgaggacgcgcacagg

SEQ ID NO: 48272 - RNA, 80 nt, Homo sapiens
gaaaaacggaacaggaacaaaagaaaaccagggcacaaggccgagagcccccagcgaagcggaagcaagaaagggccaag

SEQ ID NO: 48273 - RNA, 59 nt, Homo sapiens
ggaaaagcgaagccgagcccaaacaaagggaagaaggccggaagggaacagagaaacgc

SEQ ID NO: 48274 - RNA, 76 nt, Homo sapiens
ggcaaccaggcagacccgaccccagcgggaacacagacacggccagaccaagaaacgcggccgagaacacgagagc

SEQ ID NO: 48275 - RNA, 54 nt, Homo sapiens
aggaagaggcggacggaggagcaggcgagaagagaagaagaaggagccccccga

SEQ ID NO: 48276 - RNA, 53 nt, Homo sapiens
gccgggggacaaacagagacaggcaaacgaagcacggcaggccaccagccggc

SEQ ID NO: 48277 - RNA, 69 nt, Homo sapiens
cggaccgcgggacaagaaaacagcggggacccacagcccggcgaccacggggaaccgaggcagaagcga

SEQ ID NO: 48278 - RNA, 67 nt, Homo sapiens
aaagggacggacacagggcccgcgaaaaagccagaaaacagcaggggcaccacacagaacccaaaga

SEQ ID NO: 48279 - RNA, 78 nt, Homo sapiens
cacacgggccagggcagggccacccaggcagcaagacaagaaacgccccgaaaagaggcagccgccagaaccaccccc

SEQ ID NO: 48280 - RNA, 79 nt, Homo sapiens
gccccccgagcgcccccagcagccgccccgccgaccaaacaggagccagagcgaggaaggcaacccccaccagacacag

SEQ ID NO: 48281 - RNA, 81 nt, Homo sapiens
gaaggcaggccaaaccaccgaccaggcagcaggaggagccagagcagggcagaagacaagcaacgcagaacaaacacagga

SEQ ID NO: 48282 - RNA, 71 nt, Homo sapiens
ccagcggagcccccgcgccccgacccaggaggcaaggaggccacggggccgaagacaccaaccgggcacca

SEQ ID NO: 48283 - RNA, 101 nt, Homo sapiens
cagcggaaaaagcggaaaaagggagggacaagagcagcaccaagcgcagacaacaggcacaaagagagaaggaacacccacagggcagacagagaaagaac

SEQ ID NO: 48284 - RNA, 76 nt, Homo sapiens
ggcgcggcacgcgggcccgagcgcagccgcgcagggagaagaggcacccaggagaggaaccgcacccaaggacggc

SEQ ID NO: 48285 - RNA, 67 nt, Homo sapiens
ccacacgccgccacccccaccggagccccagagaaagaaagcccaagaggagaaggagaggagaaga

SEQ ID NO: 48286 - RNA, 74 nt, Homo sapiens
caaggagacgagagaacccggaccaaggaagcacccgcgagaaagaagggcacagcgaaacagcccggccaaaa

SEQ ID NO: 48287 - RNA, 64 nt, Homo sapiens
gacagcgaaaaaaaaagaagaacggcaagacaacagggcaggaacaagccgcggggaagcaaag

SEQ ID NO: 48288 - RNA, 35 nt, Homo sapiens
gaggaaccgccaagagcgggaggcagagacacgga

SEQ ID NO: 48289 - RNA, 64 nt, Homo sapiens
cagacgcagggcgcccccgggaggaagaagagacagaaagcacagagaagcagaaagccggagg

SEQ ID NO: 48290 - RNA, 58 nt, Homo sapiens
acaaaagagcagaggaggaacaccaggcacaaggcgagccagaaacccgaaacgccca

SEQ ID NO: 48291 - RNA, 72 nt, Homo sapiens
gcaagcagcgcgccggccccaacacggaccggccaaaagccgcaggccagggaccagggacccagagagaaa

SEQ ID NO: 48292 - RNA, 70 nt, Homo sapiens
gaccccgcggagacagcgagacccgccaggagcaaagaggacgcgagaaaccgcagccagcaggagcgcc

SEQ ID NO: 48293 - RNA, 82 nt, Homo sapiens
aaaccggaacccacaccagaggacagagcccacagaaaagagccgacaagagagagagcaggagacggagggcagaggcagg

SEQ ID NO: 48294 - RNA, 80 nt, Homo sapiens
cgcccacaagcggcgccgcgccccggccgcacggagagcccagccaagccagaaccaggggcaacagacacagccaccac

SEQ ID NO: 48295 - RNA, 35 nt, Homo sapiens
aaaggccaagaaggcagacgggaaaagccggcagc

SEQ ID NO: 48296 - RNA, 69 nt, Homo sapiens
gcaacgggaaggggacgaaggcgaagacagaacgaccccgccgggaacccaagaaggcagaagccagcc

SEQ ID NO: 48297 - RNA, 35 nt, Homo sapiens
ccccccacagaaagggcgcgaccggagaaacaaaa

SEQ ID NO: 48298 - RNA, 78 nt, Homo sapiens
gccaggaaagaggagaaagaagaaagaaacaggacagccggagaaaaacaaacgaacacaagagacagggaacaccag

SEQ ID NO: 48299 - RNA, 79 nt, Homo sapiens
gagccccgccccaaaccgggcccagcagaagaggaacccgaaaaccccaggaaaccagggccgggaagcacacaggagg

SEQ ID NO: 48300 - RNA, 71 nt, Homo sapiens
gacgaagaaacccgcggaaagaaagccggaaaggaacagaagacacccacgaagcccaagcagcggcggga

SEQ ID NO: 48301 - RNA, 59 nt, Homo sapiens
aacagacagacagagagaaccaggcgcaacaggcgggggagcgggaggagccagagcac

SEQ ID NO: 48302 - RNA, 73 nt, Homo sapiens
ccggagaaggcgcgcggacccaaagacaggaccacgcaccagcagagaaggaaagcaaaccgaagcaggcggg

SEQ ID NO: 48303 - RNA, 81 nt, Homo sapiens
gacgaccaggaaagccggcgcggaacggcgggagaagaagagcgcgagaggacgggacagcaacccagacacacggaccac

SEQ ID NO: 48304 - RNA, 86 nt, Homo sapiens
gccggagagaggagggggccggccgggacgcggcccggagccgggaccgaccccaggcaggcacagcccccgccgggccagaccag

SEQ ID NO: 48305 - RNA, 84 nt, Homo sapiens
agcagcccagacgcggcacagagagggccgggagcgcgcagccagaccagagacaaggccccgagggaggagcccgaaggcgca

SEQ ID NO: 48306 - RNA, 58 nt, Homo sapiens
gaacagaacccaaaagccgacaaccccagaaacagagcaaaaaaaccagacgaacaag

SEQ ID NO: 48307 - RNA, 72 nt, Homo sapiens
caaagcgccaaagaaagaggacaagcgccggcacgcgaccgaacgcaaagggaacgcaagaagagagccgaa

SEQ ID NO: 48308 - RNA, 69 nt, Homo sapiens
cgccaggacccacccgggcaaagaagagcaaaggccaaggggggcgcaaagccccagcagaaccgggaa

SEQ ID NO: 48309 - RNA, 71 nt, Homo sapiens
cacaacgggaccacaccagcccagcggacgagcagccaaagcgacagagagaggaaaccaaaagaagacgg

SEQ ID NO: 48310 - RNA, 68 nt, Homo sapiens
gccggcggccaggggcgcgaccccccgcccaacaggccaacacagcaagcgccgaagccggaaacacc

SEQ ID NO: 48311 - RNA, 75 nt, Homo sapiens
cagcccccagcggagcagcaaagcagacaaaggagagacagcacaaccaggggcgcaacccagcaagagaaggac

SEQ ID NO: 48312 - RNA, 76 nt, Homo sapiens
cccacggccgggcagaccccaagagaaaggagccccccaaggacaacaaccgacagcccccccacaaaggcaagac

SEQ ID NO: 48313 - RNA, 72 nt, Homo sapiens
cggagaggaggagccgacggacgaggagccgcacagcggcaccccggggcagaaacgggacgggagcgccac

SEQ ID NO: 48314 - RNA, 95 nt, Homo sapiens
gccagcggagcgaacccgagagcgggagcgggcgggccaggaaaggcagcaggcgcccaaccaggagcaccaggccaaccgccaacaggaacagc

SEQ ID NO: 48315 - RNA, 84 nt, Homo sapiens
accgcaacgagaacaaagggccgggagcgaggcacaaaccgaagagcccggggcgggacgccacgaaagaaagggagacagacc

SEQ ID NO: 48316 - RNA, 73 nt, Homo sapiens
ccccgagagcggaacaggcaggaaaaaagaggcagaagcaaaaaaaaaaccgaaaggggcaacaaaacaggca

SEQ ID NO: 48317 - RNA, 85 nt, Homo sapiens
gacccgagaggcggacggcgccgcagcggcgcggcggcagcccaccgagagagcgcgggcacggaggaaaagacaagcggagaaa

SEQ ID NO: 48318 - RNA, 70 nt, Homo sapiens
gggcgcggcaaggacgagccggggcgcgaaggccgccccacaagccgcacaccgagggcgccagcgggac

SEQ ID NO: 48319 - RNA, 72 nt, Homo sapiens
ggggggaaacaggcgaggcggcggcgcccggagggcagcgaggcgaacaagaggcgccagcgggcgcgccgg

SEQ ID NO: 48320 - RNA, 74 nt, Homo sapiens
agcccccagcagagaaaggaaaacagcgccaaaggaaagacacgcagaccgcgaaacagaacggagaacagccc

SEQ ID NO: 48321 - RNA, 70 nt, Homo sapiens
ccagaagaacaacagcaaaagcacacaagcaccgggacccaggacggggggaccgcggggccaaaaaggg

SEQ ID NO: 48322 - RNA, 78 nt, Homo sapiens
gcagggagaaggaagaggggaaaaggaacagaggcagcgggaagagcaccacaaggaacccgaaaggaaagaggaaga

SEQ ID NO: 48323 - RNA, 108 nt, Homo sapiens
ggcgccccgaaggagagcggcaagacgaaggaccgcccgcacaaaggacagggcggagaagagaaacgagggcacacgcacagggggcaacaccagcggaaacagaag

SEQ ID NO: 48324 - RNA, 73 nt, Homo sapiens
agagagggccgggagcgcgcagccaggacaaggcacgaggcgcggcgaccaccacagcagagcccggcgaagg

SEQ ID NO: 48325 - RNA, 75 nt, Homo sapiens
agaacgcgccgccggccggggcgcagggacacggggggccaagggaccacacgagcgcacgaccggaggggggac

SEQ ID NO: 48326 - RNA, 67 nt, Homo sapiens
ggaaaaaaaaccacccaaaaggccaaccccgggaacaccgcccccggagccggcagaggcaagaagg

SEQ ID NO: 48327 - RNA, 73 nt, Homo sapiens
caaggacacgacaagcagagacgagggccaagcagcaagccacagaccacagaccgagcacggagcgcccagc

SEQ ID NO: 48328 - RNA, 67 nt, Homo sapiens
gcaaagaagccagagggcaggagcagaagggaagaaggacgaggacacaaggagcggaaaagacaac

SEQ ID NO: 48329 - RNA, 68 nt, Homo sapiens
gggaaaaaagagggaaaaaggcaacagagaaaagaaggagagaagggaagggaagagacagagacacc

SEQ ID NO: 48330 - RNA, 47 nt, Homo sapiens
gagggagcgagagggcaggagaaacaccaccagcggcggcgcggcgc

SEQ ID NO: 48331 - RNA, 71 nt, Homo sapiens
cccaaaaggcaagagccagcccggagaaaaaccccgaaccagaagcggcaaacagcacagccagcagacca

SEQ ID NO: 48332 - RNA, 63 nt, Homo sapiens
acccgacacagcggagcgcccagaggcgagcccggggaggaagaggcccacgccgcacgaggc

SEQ ID NO: 48333 - RNA, 91 nt, Homo sapiens
ggagcaccaggcggagcaggagcggcggcgacggccacaggggcggcgacggcgcaggcgaagcgaaacagagagggaagcgccggaggaa

SEQ ID NO: 48334 - RNA, 66 nt, Homo sapiens
cccaaccagggcagaagccgaacacgacagaaagaaaggccaaagcagcaggagagagagagagag

SEQ ID NO: 48335 - RNA, 78 nt, Homo sapiens
aagcaggggcaacccagaacccccaggcccacgggcagccacaacggcccgcaccgggcccaaaccccacccccagcc

SEQ ID NO: 48336 - RNA, 63 nt, Homo sapiens
cggaaagacccaaccagaagagacacaagggcgcagaaaggccagacagggaccgaacgacac

SEQ ID NO: 48337 - RNA, 75 nt, Homo sapiens
aagccacccggaaaaaaaggcccccggggccgacagcaaggaagcccagcacaagagcgggagcacggcggcgag

SEQ ID NO: 48338 - RNA, 79 nt, Homo sapiens
gacggcaggcgcacggaacagcgaggccagcaggagacggagccacggagcaggaggcccacaagcggcacccaccaag

SEQ ID NO: 48339 - RNA, 75 nt, Homo sapiens
caagcacacgggaggcagaagcgaggaaggcaggggacggcaggaagcagccgcacacgggagaggaccccagaa

SEQ ID NO: 48340 - RNA, 65 nt, Homo sapiens
agaagccaccgcaaaaacaaagggcacaagcccccgaagacaagaggccggggagaccgacaacc

SEQ ID NO: 48341 - RNA, 69 nt, Homo sapiens
aagccgacaaggggcggaggaagggaggagacccgaccccagaaggacagaggagaggcacaaagaaga

SEQ ID NO: 48342 - RNA, 69 nt, Homo sapiens
agcaccacgaagaaacgcccagaggagccagaaacagccaaacaacagagaggcaaggacaaaaaccca

SEQ ID NO: 48343 - RNA, 66 nt, Homo sapiens
ccagagacacggggggaacgacgaacagggcaaaccgcaggcacaacacaagccaaagaccacggg

SEQ ID NO: 48344 - RNA, 71 nt, Homo sapiens
cccagccacagggaaccaacccagccgaccccccaggaggaggagaacggggcgaggaggaagaagaagaa

SEQ ID NO: 48345 - RNA, 54 nt, Homo sapiens
caagagcacaggcagaaggcacaaggacggcccgccacgggccccgcagccgcg

SEQ ID NO: 48346 - RNA, 77 nt, Homo sapiens
ccgagagccgcccgggccagcggccgcgcacccccggccggaggcaccagcggacaagagaaaaaaagggcgggcga

SEQ ID NO: 48347 - RNA, 74 nt, Homo sapiens
cccccgggacccccccggaccgagccgacgccgcggggcagcgggccggcgccggcgcggaggggcggggagag

SEQ ID NO: 48348 - RNA, 88 nt, Homo sapiens
gggaccgaccggggaccccgccgaagaggcggggccccgggagacgggcgggagagagcaccaacccgagaacagcgagccaagacgg

SEQ ID NO: 48349 - RNA, 60 nt, Homo sapiens
gggaccgccggagggccggccggaagaacccggaaacaagggcccagaggcgcagacgag

SEQ ID NO: 48350 - RNA, 82 nt, Homo sapiens
gcgccggcggcgcggcgagagagcggcgacagaggggagcgaggaggggcagcagcaggacagggaacccgggagacagcaa

SEQ ID NO: 48351 - RNA, 76 nt, Homo sapiens
agcgcagccaaggggagagccagaagagggcggaacagaaacgggcccgcgcaggaagcccgaggccacacgggaa

SEQ ID NO: 48352 - RNA, 37 nt, Homo sapiens
gcccacaagagcgggaacagcccccaaccccagaacc

SEQ ID NO: 48353 - RNA, 72 nt, Homo sapiens
ccgagcccaggagcgccacgcgcggaaggcagcgcccagcagcgcagagggcgcagccaccacccacaagac

SEQ ID NO: 48354 - RNA, 70 nt, Homo sapiens
gagaaggaccaagaaccagcacggccaagaggcggacggaaagaaggacgccggcagggaccagcaaccc

SEQ ID NO: 48355 - RNA, 82 nt, Homo sapiens
gggggagccccgggagccgcacgcagaacaacagaggcagcaggcacgaacgccaaaacccacaggaacagcgaagagcgaa

SEQ ID NO: 48356 - RNA, 67 nt, Homo sapiens
gacgcaagaccacccaaacccaaccaaaagaacggaggcacagcacccaggaagcccgaaaagaaac

SEQ ID NO: 48357 - RNA, 79 nt, Homo sapiens
gaaaacaaaagaggagaaaggaagacagccggacacagagggcgcgggacacgggagacaaaccagcggccagggagaa

SEQ ID NO: 48358 - RNA, 73 nt, Homo sapiens
agcgagggggggcgcgccggaaaccggagcgcgcagcagggcagcggggaagaagaaaaggaaccgaggcccc

SEQ ID NO: 48359 - RNA, 84 nt, Homo sapiens
cgcgggacagccccgccggcgcacgcgggggggggccgaccggagcgggccaggccgggagggaggagcgcggcaagacaacca

SEQ ID NO: 48360 - RNA, 66 nt, Homo sapiens
gagcgagaccggagcgccgcggccacggccccccgccagaagccagagacaacggcaagcggagaa

SEQ ID NO: 48361 - RNA, 41 nt, Homo sapiens
ccccaggagcgggaacaggagggagcggccgagcacccaac

SEQ ID NO: 48362 - RNA, 86 nt, Homo sapiens
cgggagaggagccgcacccggccggcccggccccagccccaggaccccgagcagcagggccggaaagagggcgggcccgcacggag

SEQ ID NO: 48363 - RNA, 77 nt, Homo sapiens
gcccgcgacgcacgccgaggcaccccccaccaagggccccgggcgcggccggcaccagcgcaccccccggaggcggc

SEQ ID NO: 48364 - RNA, 73 nt, Homo sapiens
ggaaacaagacaacaaggggcagaaaccacaggcgaaccaaaccgaaagccgacagggcgaccgcagaacaag

SEQ ID NO: 48365 - RNA, 72 nt, Homo sapiens
gcggcgcccaagacagcaagggacagacgggaaaaaagagcaccagagaccggaaacgagagaaacgaagac

SEQ ID NO: 48366 - RNA, 77 nt, Homo sapiens
cccggaggagcccgaagacagccccgacgaaagagggaagaaagaggggcaagacaccgggaaagagaaaccacagg

SEQ ID NO: 48367 - RNA, 70 nt, Homo sapiens
ggaccagaccgaccaccaaaacccagggccgaaaagaaaacaggagaaccacccgccaacagcaagcgac

SEQ ID NO: 48368 - RNA, 70 nt, Homo sapiens
gaccggagccgagcggggaccccagaaaaacagaaggaaaagagccgaggagggacagcacaacagagcc

SEQ ID NO: 48369 - RNA, 76 nt, Homo sapiens
gccaggcggcagggggccccgaagcacggaggcgaagccgacgagcccgaacagacgcaccagcgggaggaagagg

SEQ ID NO: 48370 - RNA, 64 nt, Homo sapiens
gacagcagcccaccaagcacagacaagcaaggaggggcaacaaacaaccacccgcccagcagac

SEQ ID NO: 48371 - RNA, 79 nt, Homo sapiens
gcgcgcgggacggccgaggaaggaacggcccccccccagcccgccccaaaaggccagccaggaaagcgggagcgcggga

SEQ ID NO: 48372 - RNA, 56 nt, Homo sapiens
agaagagagaacaccaaacccggaaagagagccagcagggagaacggagaaacgag

SEQ ID NO: 48373 - RNA, 71 nt, Homo sapiens
ccaagccaaacgaaccagaagaaggaaccaagaggaccaaccaagaagaaacaacgaccaccaccaaaaca

SEQ ID NO: 48374 - RNA, 70 nt, Homo sapiens
aagacgccacaggccggcaacgccagaaaagcagcgcaccagaggacgccggcccgcgaagcccacagaa

SEQ ID NO: 48375 - RNA, 76 nt, Homo sapiens
gaacaagcaagagaagcccaagccaaccaccagcaaacagccggaagcgacaaaccaaaagcgaacgggagcagaa

SEQ ID NO: 48376 - RNA, 39 nt, Homo sapiens
gcgcaggaagccggggggcgggggggccccagcccggcc

SEQ ID NO: 48377 - RNA, 85 nt, Homo sapiens
cgaaaggaacgcaagaacagaagaagaaagcagggggacgcaaaggccaaggggcggcaaaaaggaagcggaaggccagcagagg

SEQ ID NO: 48378 - RNA, 69 nt, Homo sapiens
gagcaagagcagcaccggacgggcccaccgcccaagaccggcccgggccaacccggcaacaaccacaag

SEQ ID NO: 48379 - RNA, 89 nt, Homo sapiens
ggcagacggagggcaccaccggcccagagcgaggagcagagccaggccccggggccccagcggcaccagcggagaccacgggagccgcg

SEQ ID NO: 48380 - RNA, 77 nt, Homo sapiens
aaccccgacccagcagcaaggccagcaaccgcacaggagaagagagcggacccacaccagggaagacaggggagagg

SEQ ID NO: 48381 - RNA, 75 nt, Homo sapiens
agaagacggacagggcacacagaaccgaaaaagagcgggcccggggccgccgggaaccccagccaccaaggccac

SEQ ID NO: 48382 - RNA, 76 nt, Homo sapiens
agcggggccacacgaagagccaggcagagcacacgggagccgccccgggaagggcccacacgggaacagcacccgc

SEQ ID NO: 48383 - RNA, 67 nt, Homo sapiens
agagccggggggacgaccacaagaccggggagggagcaaaggacggcacgggaaaaacgccaaaagg

SEQ ID NO: 48384 - RNA, 55 nt, Homo sapiens
ccgcccggacagagcccgggcgcgcagaccggagagaacagaaaaaaagcggccc

SEQ ID NO: 48385 - RNA, 55 nt, Homo sapiens
acccgccacaagcaacgcgggaagagaaggccaacaaagaagccacacacggaaa

SEQ ID NO: 48386 - RNA, 32 nt, Homo sapiens
gaccgcacgaccccacagaggaccgccggccc

SEQ ID NO: 48387 - RNA, 84 nt, Homo sapiens
agccggagcgcggagcccggccccgcaccaggaggaggacgacagcacgggacgaacagcggggacgccccagcagaccgccca

SEQ ID NO: 48388 - RNA, 83 nt, Homo sapiens
cggaaaccggagcgcgcagcagccgagcaccaagggaagcggagcagggcgaaaggcccagaggaagccccggaccgcagaca

SEQ ID NO: 48389 - RNA, 72 nt, Homo sapiens
gcacacccgcacgaggcagagaacaagacggacgcaccgacggaacacaacggcaagcggagaagagcaagg

SEQ ID NO: 48390 - RNA, 78 nt, Homo sapiens
ggcacagacaacgggcgaagaggggccagcaagcaggccaaacgaccgcggggccacgacaaaggggacggccaaccc

SEQ ID NO: 48391 - RNA, 94 nt, Homo sapiens
cagaaaccagcacggagccagaacagaacccgggaggggaaccagcaccgcagcaaccacccagaaacccccccagcagcaggacaaccagaaa

SEQ ID NO: 48392 - RNA, 51 nt, Homo sapiens
cagcaccagcacagagaggcacaagggcagaaaacaaaagcagcaaaagcc

SEQ ID NO: 48393 - RNA, 91 nt, Homo sapiens
aaaagccgccggaaaaggccgccgccgccgccgccgcgccgagcggaggaggaggaggaggcgaggaggagagacgacccaaagacaggac

SEQ ID NO: 48394 - RNA, 56 nt, Homo sapiens
acaaggcccacaaccgagcgagggcgcggacaggacggcgagcgcccgaagggacg

SEQ ID NO: 48395 - RNA, 84 nt, Homo sapiens
gggaggcgaggcggcggccgaggcggcgacggaggaaacagaagagggaagcaccgggcacaagacgaagacccccgacgccca

SEQ ID NO: 48396 - RNA, 82 nt, Homo sapiens
ggcagccagagccggaagacagaggccacaccaggagaccaggcccaggaaggaacgaggaagggccagaacggagacgggg

SEQ ID NO: 48397 - RNA, 75 nt, Homo sapiens
cccacccccacgcgacggaccgcgacagcccacaggcaggagcgcccggggacgcgaccacaaggagaggcagac

SEQ ID NO: 48398 - RNA, 79 nt, Homo sapiens
acaaaagaccaacccgagggaagagaaaccaagcgcaccacgacaaagaagagaaaacgcggcagagcaacaaacacag

SEQ ID NO: 48399 - RNA, 62 nt, Homo sapiens
gggaggcgggcgcggagccgcccgggcgcgccaggcacagccaagagcggaccggcagcggc

SEQ ID NO: 48400 - RNA, 64 nt, Homo sapiens
aaaaagaaaagaaaaccagcggcgagcccggaagagcaaggaggagaaagagaaggaaacccac

SEQ ID NO: 48401 - RNA, 80 nt, Homo sapiens
aaccaccccgacacaacaccaccagcaaagagaagaaaccaagagggaagaggaaagaagaaacccagagaaagcaaaca

SEQ ID NO: 48402 - RNA, 62 nt, Homo sapiens
agaaaggacacaagagcaccgagaaggcagggaacagggcagcaacccgcgggccccgaccg

SEQ ID NO: 48403 - RNA, 96 nt, Homo sapiens
cggcggggcccagggagaaaggcccaccggccgggagggcccagggcggggcccgagacaacggcaagcggagaagagcaaggccgaaccgagagg

SEQ ID NO: 48404 - RNA, 99 nt, Homo sapiens
ggacccggaggaggacgagaccacgccaccaccgagaccgcaagcaggcccaggagaagggggggacacacgcaggggccacagagggagccgagcaag

SEQ ID NO: 48405 - RNA, 79 nt, Homo sapiens
aaacggcgcaccggagagacgcagaggggcggcgggggggacaagacggacagaaacgaacagcgggcgagccagggga

SEQ ID NO: 48406 - RNA, 84 nt, Homo sapiens
cggggcggccgcgacccccggcaacccggagaaggcacagagcggccgcgccagcgacgggacgggcggaggagcgcagaagga

SEQ ID NO: 48407 - RNA, 61 nt, Homo sapiens
cgccgccccgccggcacagcgggaagagcgggaggcaccgccccaacccccccccgcccgg

SEQ ID NO: 48408 - RNA, 68 nt, Homo sapiens
ccgccgacgaccaggcccaagcaaaggagcagccaaaacggcgagagccaggcaagggcaagggacca

SEQ ID NO: 48409 - RNA, 63 nt, Homo sapiens
cgcgcgccgaggagaacccagcggaaaaccagacgagagacagaagacgaaagggcaagaaag

SEQ ID NO: 48410 - RNA, 64 nt, Homo sapiens
gccccagcagcccccgaaggcccacaggacaggagagaaagacgccagaagaaagagagaccag

SEQ ID NO: 48411 - RNA, 93 nt, Homo sapiens
gcaggacaagaagcaagaaaaaccagggcgagacaacgaacaaacccagggagagccgcccagagaaagcacaaggacaacaggaaaagagca

SEQ ID NO: 48412 - RNA, 77 nt, Homo sapiens
gccaacaccagaagaagggacaaaagaagaaagacaaggcgaccgaaccaaggagcaggccagaaaagaccaggcag

SEQ ID NO: 48413 - RNA, 84 nt, Homo sapiens
gccagccccaccaggagcggccgaagcgccgcgcgcggaggacacggaccggcagcgaaggcccacggagacagaaccagcccc

SEQ ID NO: 48414 - RNA, 64 nt, Homo sapiens
ccggagacagcccaaaacccggaagagcgccccaggagaaacaagaaaagggggccaggaagca

SEQ ID NO: 48415 - RNA, 82 nt, Homo sapiens
aaggagacccaggaagcgaccagcacgagaccgcacagaagcaagaagccacagaggaaaaacacggaggaaacgggaagcg

SEQ ID NO: 48416 - RNA, 55 nt, Homo sapiens
ggccacccccagacggggagaagagcagaagaaggaccaggcgagcagccgggag

SEQ ID NO: 48417 - RNA, 66 nt, Homo sapiens
aaccggccccaaagcgggaaaggaagagacccgccacagagccgcgacgaacgcaccgggcgaaga

SEQ ID NO: 48418 - RNA, 38 nt, Homo sapiens
aaccgccaaaaagaaacaacgggcccaacaccacgagc

SEQ ID NO: 48419 - RNA, 76 nt, Homo sapiens
cagccagaacacagcacgccgagacacaaaaccagccaccacgggcccgcagagagaccgaggaccgaagcgccgc

SEQ ID NO: 48420 - RNA, 70 nt, Homo sapiens
cggggagcagggcgcacgaaaaaagcccgggcaaggggacgcgcagcgaggccgcgacccaggcgggcag

SEQ ID NO: 48421 - RNA, 61 nt, Homo sapiens
ggagcccggcagccgcccgcaagcagcaagcggaaaaccacggagcgccccgcacggagca

SEQ ID NO: 48422 - RNA, 82 nt, Homo sapiens
cggccgcccgccccggggagcccgaacgccccgcagccccacccccccgccagcccagccagggcagaaccaaaggcaagaa

SEQ ID NO: 48423 - RNA, 115 nt, Homo sapiens
aggccccgagccccgggaccgcggagcggagccggccgacgcgggcgcgagggcagaaccggcaaaagaacagaagggagaagccacaaccaaggccaagcccaaaaacagaaaa

SEQ ID NO: 48424 - RNA, 42 nt, Homo sapiens
cggaaaccggagcgcgcagcaggaagcgaagccagcagaacc

SEQ ID NO: 48425 - RNA, 81 nt, Homo sapiens
cgagcagcaaaggagacaagaaacaaaacccagccgagcagggcagcagcagggggccgaagaagccgggaaaaccaaaaa

SEQ ID NO: 48426 - RNA, 80 nt, Homo sapiens
gacccaacgaacagccccaggagagcaaaccaagaggagagagggaaaccgacgagcaagggccagcaaaccgcagcgga

SEQ ID NO: 48427 - RNA, 57 nt, Homo sapiens
ggaacacgaggcaccacggagcgcagacccaggggagcccaccagccagcaacaggc

SEQ ID NO: 48428 - RNA, 75 nt, Homo sapiens
gacagagggccccgccagcccggggcccgcgccggccccagggcggggggagcaaagacagccaccggggcggag

SEQ ID NO: 48429 - RNA, 64 nt, Homo sapiens
gcaagggacacaacgcaagaggccacaacgcaggcagaagcacagcggaggaaaccaggcacag

SEQ ID NO: 48430 - RNA, 56 nt, Homo sapiens
gagcaaccacagcggagacaggacccgaaagaccgccgcagaggacggcggaagcg

SEQ ID NO: 48431 - RNA, 74 nt, Homo sapiens
cacgaccgcccgcacggacaggaaagagagccacacaccacgcccagagccaccagaggacccgcggagggagg

SEQ ID NO: 48432 - RNA, 75 nt, Homo sapiens
ggagcagcccacacgcagagaccagaaaaccgagaaaacgggacaaagagccagcccgagcagcacccggcccaa

SEQ ID NO: 48433 - RNA, 64 nt, Homo sapiens
gagggggaagcggcccccgcagacgccggcaggggggagcgaagaaggcacggccccagggggc

SEQ ID NO: 48434 - RNA, 74 nt, Homo sapiens
aaacgaggaggacaaggcagaagaacagagccggaccagcagaggacagagaagggaagcagagccccgggccg

SEQ ID NO: 48435 - RNA, 68 nt, Homo sapiens
aacaaaaaccacgaaccggcaccaaaaggaagaggaggcgacaccagcaccccagccaacgaaagaag

SEQ ID NO: 48436 - RNA, 53 nt, Homo sapiens
acggagcagcacccacccgcacagccgagacaaaacaccggggcccacaggac

SEQ ID NO: 48437 - RNA, 70 nt, Homo sapiens
caaaaacgggcggacacaacaagcgcaacaggaccagcaaaaaaagaacccaacacgcaccccagagccg

SEQ ID NO: 48438 - RNA, 71 nt, Homo sapiens
gggaaccagaccgaccgcaacaagcaaaaccgagacgagcgcggccggccaacggagaacgaacacgacca

SEQ ID NO: 48439 - RNA, 65 nt, Homo sapiens
aagacagacgaaaaggaccgagaacccgcaggccgaaagaagagaaggcgagaggaaagcaaaga

SEQ ID NO: 48440 - RNA, 77 nt, Homo sapiens
ccgacagacaaccagaacaaaggcagggagggaaccgccggggccaacaacaagacggccgcccaccccgccaagag

SEQ ID NO: 48441 - RNA, 78 nt, Homo sapiens
ggaagcgcgggccagcgacccgcgccagcgcccagggggggaaaccaccgcaccccaggacaaaagcaaggaaaacag

SEQ ID NO: 48442 - RNA, 57 nt, Homo sapiens
agggacgcagaacaccaggccagcaccaccggcagcacgcagaagcaagaggggcag

SEQ ID NO: 48443 - RNA, 80 nt, Homo sapiens
gcaagggggaagagagagaaacaaaagcgccagagccaagaacggccagcgcagaagacgagaagccaggaggagaagcg

SEQ ID NO: 48444 - RNA, 75 nt, Homo sapiens
agccaccacaaaagcgaaagggcacaccacagagaacagaaagccaaagggaggacaccagagagaaacaccccg

SEQ ID NO: 48445 - RNA, 85 nt, Homo sapiens
ggagagaaggcggcaagaggcagaagagggaggggacgcacaaccaagaccgaccaagagaagcagcagggcagagacagccgcc

SEQ ID NO: 48446 - RNA, 79 nt, Homo sapiens
ccgcgaagacgaacaaacccacagccagagccagagacaccaaaaggaagcgggcacaaaaaaaagcggaagaaaggca

SEQ ID NO: 48447 - RNA, 75 nt, Homo sapiens
aaccggggcggcccaccccccacgcaccgcacaacaagaggccggcggggcgacaggggaaggggcaacggagca

SEQ ID NO: 48448 - RNA, 80 nt, Homo sapiens
gcgagcgaggcggagaagggacacggcaggcgccaggagaagaccagaggagaagggagggcggagagagagagacgaga

SEQ ID NO: 48449 - RNA, 36 nt, Homo sapiens
cccgagagcgggagcagggggcaagagcacgagaac

SEQ ID NO: 48450 - RNA, 80 nt, Homo sapiens
cgccaaggaggacgccagcaaagaagacgcacccaaaagggccggaccaagggcagcgaaccgggagaggaaccggccca

SEQ ID NO: 48451 - RNA, 76 nt, Homo sapiens
agaccacaaagcaggcagaagaaacgaagccaacacccccaagagggaaccagaggacagacaacaccgagaacac

SEQ ID NO: 48452 - RNA, 54 nt, Homo sapiens
agaagcggaggaaagagaagaaagaaccgaacaccccaagacgaccggaaaccg

SEQ ID NO: 48453 - RNA, 92 nt, Homo sapiens
gccagcgccacacagggcagacagagaagaaggcgcgcaccggaaaagagccccggaagggacagacggaagcacgcaaggaaaaacgaccg

SEQ ID NO: 48454 - RNA, 66 nt, Homo sapiens
ccgaccgagcaacccacagcaccgaagaaagccagagaacagagcaccccagcccgagaaggccga

SEQ ID NO: 48455 - RNA, 73 nt, Homo sapiens
gcacaccaccaggagcagaacggaaaacaagaaaaaggcgcagcccaacagaacccagaggaaccagaaggag

SEQ ID NO: 48456 - RNA, 75 nt, Homo sapiens
acgaaacagcgcagccaggaacaggacgaagaccagcgccagggaaagaaggcccgcagagggcagaggacgaaa

SEQ ID NO: 48457 - RNA, 79 nt, Homo sapiens
cacgcacggggacacgggcccaggcccgagggggccggaccgggagggcaggggccaggggagggcagcggagaggacc

SEQ ID NO: 48458 - RNA, 87 nt, Homo sapiens
cccaccacacagcaacggacaaagagaaaggacagggacaggaaagaaagaaaaagaaaagaaaaacagaaagggcaaagacaagga

SEQ ID NO: 48459 - RNA, 85 nt, Homo sapiens
gggcgggcgagcacaggcacacacaccgaggggcccggccgcggggcacagcagagggagcggcagaaaaaaaacccgaaaggcc

SEQ ID NO: 48460 - RNA, 60 nt, Homo sapiens
cagaacgggaaacggcgccacccagaagcagaccccgaccggagcagcggagccgcggaa

SEQ ID NO: 48461 - RNA, 72 nt, Homo sapiens
aaaagaaggaacccaaagaaccaccccaaacaggagaacggcaagggcgaacccgaaaaaccagagaaaaac

SEQ ID NO: 48462 - RNA, 82 nt, Homo sapiens
aagagaaccccgcggggaaggggggcagaggccggaccccagcacacagaagccgagacggaaggacaacccgggggacgcc

SEQ ID NO: 48463 - RNA, 75 nt, Homo sapiens
cccgagagcgggaacagaggccagcccaagcggccaggcgagggaccagcgaggagccgcaccgacacagaaacg

SEQ ID NO: 48464 - RNA, 86 nt, Homo sapiens
caagggcaaccgcggggaagcggggcggcaccggacaccaagacggaggcccagcccccggacacgggcggccggaaggcgaggcc

SEQ ID NO: 48465 - RNA, 57 nt, Homo sapiens
aacccagcaggggaggccgaggcgggaggggcgaacggggaagacaggccgaggagc

SEQ ID NO: 48466 - RNA, 75 nt, Homo sapiens
agaaggcagggcaaaccagaaagacgagccggcggcacgacagcaaaagccagggcacagggccgcaccccagcg

SEQ ID NO: 48467 - RNA, 73 nt, Homo sapiens
cagccgccagccccacggacggacgccagccccacaacaggaagagcaagaagagacgcgcaacgaggggaca

SEQ ID NO: 48468 - RNA, 47 nt, Homo sapiens
cgaagaggaggcggaagccaagaaccgaaggacgggcggccgggcag

SEQ ID NO: 48469 - RNA, 75 nt, Homo sapiens
ggaggagagcacaaggaaaggagacaggccaggccagacggaaggagaccaagccaccgcagagaaaaagaaggc

SEQ ID NO: 48470 - RNA, 74 nt, Homo sapiens
cgacccaagaaggcaggccacgagaggccaccgcacccgagggcagccccgacggaggacccccggagcccacc

SEQ ID NO: 48471 - RNA, 75 nt, Homo sapiens
aaacaagcgaagaaaggcacaggaccagagaaggcagaagcgcacaagccccagacaaagcaagaaagacacacc

SEQ ID NO: 48472 - RNA, 82 nt, Homo sapiens
caccggaacaggaacccagcaacaaccgccagggagagagaaggcccaaaagccaggggccgacggacaagaggaagaccag

SEQ ID NO: 48473 - RNA, 69 nt, Homo sapiens
cccaccgccagccacccacgccagcagagggacgaagcacggcaccggcccacgacaccggcccacgag

SEQ ID NO: 48474 - RNA, 75 nt, Homo sapiens
aacacagacccaccagcagagggaacacaagaacgcccaggaaaacagcgcaccacagaaaggaagacaagaagc

SEQ ID NO: 48475 - RNA, 73 nt, Homo sapiens
cggcgacaaagaagagcagcccagacccagccccgggccggcggggagacccacaacccccggaaggagcaac

SEQ ID NO: 48476 - RNA, 105 nt, Homo sapiens
cagagccggagcgcgaaggccgggacccggccccggcccacaggggggggcaaacccgagagaacgggcaggaggggaagcagaaagcaaacggccccgaaggag

SEQ ID NO: 48477 - RNA, 70 nt, Homo sapiens
cgaggcaaccgagggaaaacagacaccgaacgggacacaaccagagggaagcacgcccgggcacagcgga

SEQ ID NO: 48478 - RNA, 81 nt, Homo sapiens
acgggacccgaagcccagcggcccccgaccccaagggcaagggcagacgggggaggaggacgcaaagacaagccacagaca

SEQ ID NO: 48479 - RNA, 81 nt, Homo sapiens
cgaaggcaggagcagaggaaaaaacgaccaagccagagaacagcccccacgcagcccagaagacccccgcacggcacaaaa

SEQ ID NO: 48480 - RNA, 55 nt, Homo sapiens
caaggaggggaaaaaccgcgaagcaggggccgcgggaaggggggaccgcggggcc

SEQ ID NO: 48481 - RNA, 60 nt, Homo sapiens
agcagccaccaggagcccgagagagaaggccaaaggaaaggcacaacccagggcacaaga

SEQ ID NO: 48482 - RNA, 75 nt, Homo sapiens
accaaagcaaggacagggcaaacacgcagacacagccaagggcaccgaaaggggagcacggcgccccagcaggcg

SEQ ID NO: 48483 - RNA, 82 nt, Homo sapiens
ggagagcgcggaggggaaccccgagccgcaggaccggaggacagggcagagggccagacccccaacaaagccaaaggagaaa

SEQ ID NO: 48484 - RNA, 70 nt, Homo sapiens
acaaacagcgcacagggcacagagaggagagcaccgaccggacacccgaagaagccagcgccaggaaacc

SEQ ID NO: 48485 - RNA, 80 nt, Homo sapiens
cccaaggcccaggcgcccggagcaccgaaacgccgaaaacgagccgggcagaggacaacagcaaccaagaagacgagcac

SEQ ID NO: 48486 - RNA, 81 nt, Homo sapiens
cgaggccggggccaacgagccaacgccaggcgccgcccacagagggacggaaacagacgacgacacggacaggacggcgga

SEQ ID NO: 48487 - RNA, 39 nt, Homo sapiens
ccggaggaggaccgaagcagcggaggcgcgaggcccgcc

SEQ ID NO: 48488 - RNA, 57 nt, Homo sapiens
aacaacaacaaaaagaagcaacccccaccacagccgcccgcgacgagagggaacccg

SEQ ID NO: 48489 - RNA, 57 nt, Homo sapiens
cagcgcacacagcaagcacgagaaagccaaggacacgcaggacgaagaaggaggaga

SEQ ID NO: 48490 - RNA, 74 nt, Homo sapiens
cgcggggagcaggccgccgagagagacgggacacggcagcccgggaggagcaaccgcggcagacccagcccgcc

SEQ ID NO: 48491 - RNA, 95 nt, Homo sapiens
ccagcgcgcccccgaccgccgcccggagaccccgaggcccaacgagggaaagggagcagcaccggccacacccacagcacgaccggaacccagcg

SEQ ID NO: 48492 - RNA, 75 nt, Homo sapiens
gaaccggagcccccgccaagggcagcacgaggaggcagggcagagcacggggcagcagagagggacacccgggcc

SEQ ID NO: 48493 - RNA, 65 nt, Homo sapiens
gagcggacccgcagccccaaaccgagaaagcgacaggcaggcccggacgcccaaggcacccacgc

SEQ ID NO: 48494 - RNA, 74 nt, Homo sapiens
accccccggagcccggagcaagggcccagcggacaggcgaagcgcaccaggccggggcccgaccccgcgacccg

SEQ ID NO: 48495 - RNA, 74 nt, Homo sapiens
aaggacagaacaggaccggaaagggcacacaagcaacagaagaaaaggagggaagagggaacagaagggcacac

SEQ ID NO: 48496 - RNA, 78 nt, Homo sapiens
gcaggccaggcggaaaccaacagccacaaaggagaaagagcacaccagggagaacgagcagcgcagcgcaggaacaga

SEQ ID NO: 48497 - RNA, 79 nt, Homo sapiens
gggagagagcaaggccgcgacggaacccaaagccccgcccgaagcagcgacccgaccaagggagcaaggagcagccggg

SEQ ID NO: 48498 - RNA, 77 nt, Homo sapiens
ccggggggaggaggggcaggcccggcgaggcacgacacagcagggcggccagccagcagagggggaccaacgcggac

SEQ ID NO: 48499 - RNA, 81 nt, Homo sapiens
cggaacgggacccggggacggcacccagaggaccaggcggcgacagcagcgcccaaggacaagccaagcggcccaaaaccc

SEQ ID NO: 48500 - RNA, 76 nt, Homo sapiens
cccagcagacccgcggccccaggccaaagccagcccaccaccaccgcagggccgaagaccagcggccgagcccggg

SEQ ID NO: 48501 - RNA, 77 nt, Homo sapiens
gcggacgcaggaggaacacacaacggaagaagggacacagcaggacaggaacggccagcccgggggcccacagaggg

SEQ ID NO: 48502 - RNA, 82 nt, Homo sapiens
agccggggccgacagcccgccgggacgccggccgacgggacaccaaggaggaggaagccaagaacgggagcgaagccacgca

SEQ ID NO: 48503 - RNA, 58 nt, Homo sapiens
ggccccgcccccgaaggacaggagggccaaacaggggcaacccgaagaacgacaagca

SEQ ID NO: 48504 - RNA, 87 nt, Homo sapiens
ggcgacggccgcggggaccggagcgagaggagcgcgccggaccagcgcggagccccgaagaagagaaaggaaaaagaggcgacgaga

SEQ ID NO: 48505 - RNA, 80 nt, Homo sapiens
cgcagcccccgcgccgcgccggcgcgcgcacccgcagcgggaccgacaggaaacagaacgacagcccgcaccgacgccgg

SEQ ID NO: 48506 - RNA, 84 nt, Homo sapiens
ccggcaagagagccgcacaagcgccggccaaggcgaccccgcacacacacccaccagccacggcagcccagcggggacccagcc

SEQ ID NO: 48507 - RNA, 76 nt, Homo sapiens
caaaccaagacagggacgaaaacaaacgccgagagacaggaacaaggaaggagaaaagaaccagccgccaggcaag

SEQ ID NO: 48508 - RNA, 73 nt, Homo sapiens
cagaagcccggcggaaggaaggagaaaagacagcaaaacaaaagaaggaacgggaccagcggcagagagaaaa

SEQ ID NO: 48509 - RNA, 77 nt, Homo sapiens
ggaagcacacagccagcaaacccggcccagggagacggggggccccggcggaaaaaggcacagggccaggggggagg

SEQ ID NO: 48510 - RNA, 84 nt, Homo sapiens
agaccggcacccagacaggggcgaaggcagaggaggcggaaaacaccccaaaagccaaaagggaaaggaaaagaccaacaacag

SEQ ID NO: 48511 - RNA, 76 nt, Homo sapiens
ccaaacggaccaccacgagcacacgcagaagggggaaagagaccgggacagaacagggaagaaggaggcagcagcc

SEQ ID NO: 48512 - RNA, 79 nt, Homo sapiens
agaaagaagaagaacccacaagagccccagaaaagagcaggccggcagaggccgcccagacagagcacagggagcggga

SEQ ID NO: 48513 - RNA, 77 nt, Homo sapiens
gcccaacaggcgcaacaacgggagcacaaagcaaggaggagaggcagcacaagcagaagccgggccggcagcagcca

SEQ ID NO: 48514 - RNA, 72 nt, Homo sapiens
gcggacaaaagagaagaaccaaaacggccccgccgccccaggaggagcgacaagcacaaggggaacacacag

SEQ ID NO: 48515 - RNA, 79 nt, Homo sapiens
gccgacaccaccacggaggaggaaaggagagcgcccaggccacccgcgacggcacagggagggccgggaaagggcacgg

SEQ ID NO: 48516 - RNA, 64 nt, Homo sapiens
acagggagggggcgaccggagcgcaccacacacaagccacagcaaggggaacccaaaaacgcga

SEQ ID NO: 48517 - RNA, 86 nt, Homo sapiens
ggggggcgggcgaccgcaggcagcaccggaggcccaggcccggcagcccaacccagcaggacaagggggggccccagcccggccga

SEQ ID NO: 48518 - RNA, 83 nt, Homo sapiens
aaacgaggggcggaacacccgccaaagcagagaaaagcccccacagagagcacacaaacaaagcgaaaccacggaagaaaagg

SEQ ID NO: 48519 - RNA, 74 nt, Homo sapiens
accacaagggcacggccaacaacacgcccaggaaggcacaaccccagaagaacaggcccaaagacgcacccaca

SEQ ID NO: 48520 - RNA, 69 nt, Homo sapiens
agccacaggacccgagaagcccggaggcccaggaaccccagggggccgcaaggccaggcgcgcagaggc

SEQ ID NO: 48521 - RNA, 77 nt, Homo sapiens
cacgcagaggacagccgagaagaggaccgaaaaacggcccacccgaggcgcgggagccacagaagcagagaccccac

SEQ ID NO: 48522 - RNA, 74 nt, Homo sapiens
ccaacccgaagagacacgaaaacggacaaaacaaaaaaccaggaaggacggcagacaccaaaggcggcaaaacc

SEQ ID NO: 48523 - RNA, 41 nt, Homo sapiens
gaacagggggagaaccaggacagaccagcggagaccacaag

SEQ ID NO: 48524 - RNA, 60 nt, Homo sapiens
ggaaggggcgcgggagacaggacagaagacaagccagcgccagggagcacaaccacaagc

SEQ ID NO: 48525 - RNA, 71 nt, Homo sapiens
agaaggaaagacaaaacagggcaaggccagagaaggcgggagaaagacacgaaccacagaacgcaacagga

SEQ ID NO: 48526 - RNA, 72 nt, Homo sapiens
gacacacacagggcagcggacgacgagaaccagccggcacgaaaacacgccgggaacagcgagaggaggaga

SEQ ID NO: 48527 - RNA, 73 nt, Homo sapiens
cgccccagggagagcaggggggaaaaagacccgaacggaccagcaggcaagggacaaagcaagaaaaagcaac

SEQ ID NO: 48528 - RNA, 42 nt, Homo sapiens
ccaagaagggccaagagaagccccccaggcccaaaccaaagc

SEQ ID NO: 48529 - RNA, 58 nt, Homo sapiens
ggggaccccagaaaaacagaaggaaaagagccggccaagcaacaacaggcccacacag

SEQ ID NO: 48530 - RNA, 54 nt, Homo sapiens
cagaccacgggaaaacaccagcagaccgaggaagggccgagacggacgaaaaac

SEQ ID NO: 48531 - RNA, 69 nt, Homo sapiens
acgagagagaaccaggggcggaaggggaggcggggacgaccacagcccagagcagcaaggccacccccc

SEQ ID NO: 48532 - RNA, 69 nt, Homo sapiens
cccggccgcaagagaaccaagagaccgcgggccacccccgccgcagaacacaggacgggacgaaaaaga

SEQ ID NO: 48533 - RNA, 91 nt, Homo sapiens
cggagagagcggagccggcgggcggggaacccaggccccgccgaggcggccagggcgcccgcgccggcagaggaggcgagcacccgccagg

SEQ ID NO: 48534 - RNA, 86 nt, Homo sapiens
ccaagccggacacaccgcacgagagccagaggggaggagacacgaagcgacgcagagccagaagggaggcagggaacacgcggaac

SEQ ID NO: 48535 - RNA, 57 nt, Homo sapiens
gcgcaccagaaacgggcccaggagcagaggaggcagaaggcggcagcggagcacgca

SEQ ID NO: 48536 - RNA, 84 nt, Homo sapiens
gcggcgcggacgacagcgagacaccgcaccaccagggaaagaacgccggacaacagcggcgaagaaggcaaaccgaaggcccac

SEQ ID NO: 48537 - RNA, 103 nt, Homo sapiens
agaaaagaaagacaccaagaacacaggcacgggagaccgcaagagaaggcaaaagcagaccggaaaacccaccggcaagaccacacccgaggggagcccagga

SEQ ID NO: 48538 - RNA, 70 nt, Homo sapiens
ccgacacaacaagacagacgccagggaagcacaccgacccccaacgggccccaggggaagcagggagacc

SEQ ID NO: 48539 - RNA, 78 nt, Homo sapiens
gagcgacagaaagagagcgggggcagcgacagagccaaaacagagcggaaccgaggagagaggggaacacccacccgg

SEQ ID NO: 48540 - RNA, 76 nt, Homo sapiens
caagaggcggacaaaacgccaggcggaccagaaggccagcaaaggaagaagagagggcgaaggaggccacacagaa

SEQ ID NO: 48541 - RNA, 73 nt, Homo sapiens
agagagagagagaggaaaaaaggcacacacacccgcaggagagcgccggagaaaggaagaacccagacacaga

SEQ ID NO: 48542 - RNA, 75 nt, Homo sapiens
accaaaacacccaaaagaagcaacacacaaggcaccacgacgaacggcggcggagcacgaaaggaaaccaacacg

SEQ ID NO: 48543 - RNA, 72 nt, Homo sapiens
gcgacggacgagccggagagcaacgaacccgaagaagagggacagagaccgagaacacacacacaggaaccg

SEQ ID NO: 48544 - RNA, 41 nt, Homo sapiens
aacggaccacaagaggccggggcgaggaagcgccccgaaac

SEQ ID NO: 48545 - RNA, 58 nt, Homo sapiens
acaccaaaaacgggaaagcacacaaccacaacggaagacagcaaaaaggacggcccaa

SEQ ID NO: 48546 - RNA, 75 nt, Homo sapiens
aaaaagagaccgggaaaaagaagaaaagagcagcacccaaggacagcagaccacagcccggcaggcccaaaaacc

SEQ ID NO: 48547 - RNA, 84 nt, Homo sapiens
gcaccaccaacgcggccgacaacagccggcgccgccacggccccaaccacggagccaggggaaccgcccaccaccaccaccagg

SEQ ID NO: 48548 - RNA, 84 nt, Homo sapiens
agaagcgggcggcgcgggggagaggccccgagccccggccccaaagacccaaaacagagacaccccccagcccccgcgccccga

SEQ ID NO: 48549 - RNA, 86 nt, Homo sapiens
cgaaccaggcgaacaagacgacaccgccagcaccgaccaccgaggcggagggggagaacacccaggcaacagcaagagaaaagccc

SEQ ID NO: 48550 - RNA, 79 nt, Homo sapiens
ccacgggagaaaaacaagaaacagcagccaaccaggcccgagacaaaaaggaacaaaaggagcagaaaaccagcagaaa

SEQ ID NO: 48551 - RNA, 68 nt, Homo sapiens
agagcgcgaaacgcacgagaagccgagaagaaaccgcaagaaagaaagcgggcacaacaacccaaaac

SEQ ID NO: 48552 - RNA, 51 nt, Homo sapiens
acccaaacaaccccagggcgcggcacagggcaaacacggggaggaacgcca

SEQ ID NO: 48553 - RNA, 76 nt, Homo sapiens
cagcacagccaaagcgcccacggccggagacaagagcacggagaggacaaggaagagaggaggagcaaaaaggaca

SEQ ID NO: 48554 - RNA, 76 nt, Homo sapiens
gagcgagcgagggggggcgcgccggaaaccggagcgcgcagcaggcgaccccgcacacacacccaccagccacggc

SEQ ID NO: 48555 - RNA, 75 nt, Homo sapiens
cggagaaagagcgcaacaaggaaacacgaccaaaccaccacgcacacccccaaggcacaggcaaagcacagcgcc

SEQ ID NO: 48556 - RNA, 73 nt, Homo sapiens
ccaccgggcaaacaccaagcaagcgacagaccaccgcggcagagaccacggaaacgacaaacagcccccgaga

SEQ ID NO: 48557 - RNA, 82 nt, Homo sapiens
agcccgggcccaggccccggcagcgccgggacaagggcggagaacggaaaagcaccaggaagcagagaggaccgcagaaggg

SEQ ID NO: 48558 - RNA, 58 nt, Homo sapiens
cagcagccaccaggagcccgagagagaagggaacaacgccggcacaaacagacacgga

SEQ ID NO: 48559 - RNA, 86 nt, Homo sapiens
cacagagaaggaacgaaggcaggaaccggcggcagcgacaggaaggacgaccgaaggagaaggacaacaggcacccggacacgacc

SEQ ID NO: 48560 - RNA, 70 nt, Homo sapiens
gcaggggcaccgccgagcaggggcgaggagcgaaaacacacagagaaagccaacccagcgaaggaacaag

SEQ ID NO: 48561 - RNA, 64 nt, Homo sapiens
acacccggcacagcacgcaccacgagaccagagaaagccaaagcccccagcccccaaagcgacc

SEQ ID NO: 48562 - RNA, 77 nt, Homo sapiens
accaaccggggcccaagggcaccagaagagacaggacacccagcaacagaccgagaagacagcggcaaaaccagccg

SEQ ID NO: 48563 - RNA, 75 nt, Homo sapiens
acagcccccagaacagcaccaggcaacaaggcaccaggagacacccgaaacagggggcaagggacgaagggaaaa

SEQ ID NO: 48564 - RNA, 73 nt, Homo sapiens
caagggcaagcccaaaaggaaaaccccaggcaaccgcacaaaaaacaaccgagcacaaaaaaggcacccggag

SEQ ID NO: 48565 - RNA, 69 nt, Homo sapiens
gaggagcagaaacacagcaggacaggaggagcggcaccgaggaccgcggagggcgcggcccggcgagac

SEQ ID NO: 48566 - RNA, 85 nt, Homo sapiens
cagaggaagccaaaaggacagaacaagcgagggaggcggcgggcgcaggaccgggggaagggggccagcgggggcgaggagggac

SEQ ID NO: 48567 - RNA, 80 nt, Homo sapiens
ggaacgagaagcaagcaaaaccagagaaagaacacgcagcgaaacccacgacgacagacacggagaaccacggggaccaa

SEQ ID NO: 48568 - RNA, 53 nt, Homo sapiens
gacgcagggcgcccccgcaggggaaagcgcgagcgagcacccggagcagcaga

SEQ ID NO: 48569 - RNA, 82 nt, Homo sapiens
agagccaaaaggaagagccaaggcaacaagcagagaagaacgcagaaagccacagaagcggcggcacagccagcaggacagc

SEQ ID NO: 48570 - RNA, 72 nt, Homo sapiens
ccacggggcgaagaaaccacgagcaccgaacccagaccagacgcgaacccaagggacacacccggacccgcc

SEQ ID NO: 48571 - RNA, 62 nt, Homo sapiens
ggacgggggaggaggcaacgccgcgggacaagaacccaagaaacaggaaaaaacccaaaaca

SEQ ID NO: 48572 - RNA, 70 nt, Homo sapiens
agcccccaggagcgggaacaggcgacagagaagagagggacggcgcaaaccagggcgaggcgggacagcg

SEQ ID NO: 48573 - RNA, 65 nt, Homo sapiens
gcaaagaaggaaacaggaggcggaaaaccccccaagggcccggaaaagcaggcaagacgggcaac

SEQ ID NO: 48574 - RNA, 78 nt, Homo sapiens
caggagaaaacccagacagaacaccacggccagcgagcgccgacacccaacaagaccagcccccagcagagagcggcc

SEQ ID NO: 48575 - RNA, 75 nt, Homo sapiens
gagaggggaaaccccgaaaggggggcagggagagaagaaaccaagccgccgacgacaacggacggaacagcaacc

SEQ ID NO: 48576 - RNA, 81 nt, Homo sapiens
gggaccaggacagcgcgaggcgagggcagagccgcggggcaagacgcacagaagaaaggcagaaagaaaaaggacacagca

SEQ ID NO: 48577 - RNA, 73 nt, Homo sapiens
acaggaacaagaaaagcgcggcagcaggagaccagagcaaaaacacaacagccaaggaacaaccaggaaaaac

SEQ ID NO: 48578 - RNA, 80 nt, Homo sapiens
agcgcggggcccagagccaccacagagggcggaggcaggaccacccagaagggggacccgggggccccggcgaaggcggc

SEQ ID NO: 48579 - RNA, 74 nt, Homo sapiens
aagcgaaaacagaccgcgagcccagagacccagcagacgcgcgggcaaacagacagggaaaaggacaacagcaa

SEQ ID NO: 48580 - RNA, 73 nt, Homo sapiens
cagagccccgaagaaacagacccccagacggagacgccaccccgccccaccgaggccggcgggccacagcagg

SEQ ID NO: 48581 - RNA, 59 nt, Homo sapiens
gcgccgcccagcaaagcgaagagacgaggacgcgcacaggaaaggacgcggaacaagca

SEQ ID NO: 48582 - RNA, 73 nt, Homo sapiens
cgacacaccgaggccgccaggacagaggccagagacagaaggccggcccacagcccaaaaagaaacaggaccg

SEQ ID NO: 48583 - RNA, 77 nt, Homo sapiens
cggggcgcggagggccgagggagggccgagccagccgcggccggaggagcccccaggccaccacccaacacacaacg

SEQ ID NO: 48584 - RNA, 82 nt, Homo sapiens
cgaaaaagcgggaaggccggaaaggaccagaccgcccaggaaacgaaaaagcggggaaggggggcaaaaaaaagaagcaagc

SEQ ID NO: 48585 - RNA, 60 nt, Homo sapiens
ggagaacggccaaggaagcagagaacaaagagaccagagccacggagaagaaacagagaa

SEQ ID NO: 48586 - RNA, 87 nt, Homo sapiens
aaaaccaaacaggcccccagaagagcggagagacgaaagaggaccacaccacccggcaagaacgccacacggccccgccccagaagc

SEQ ID NO: 48587 - RNA, 74 nt, Homo sapiens
ccccaagagggacccgaccgcggcgcccagaggagaggaggagacaggaggggcccccgcagcagaggcgagcg

SEQ ID NO: 48588 - RNA, 75 nt, Homo sapiens
cgcagggcgcccccggggcaacacccccacaaagagcaagccagccggacgcaccacgggggggaagcaaaccca

SEQ ID NO: 48589 - RNA, 60 nt, Homo sapiens
gcgagcacagaagcacagccacagagcaggcgggagcgaccccggcaggaaggcgaccca

SEQ ID NO: 48590 - RNA, 79 nt, Homo sapiens
acacaacaagaagccagagacagcgggaagggggaaggacgaggggggagagaaacacccaggagccaccagcagaaag

SEQ ID NO: 48591 - RNA, 64 nt, Homo sapiens
ccccacagagcggggaacaagcacccacgcggaaacacggagccggaagaaaacagaagcggag

SEQ ID NO: 48592 - RNA, 72 nt, Homo sapiens
gacgaccaccggaaacaggcgaacagaacaagaaccaaagaaaacaaaaggggacaggagccccccgagaaa

SEQ ID NO: 48593 - RNA, 80 nt, Homo sapiens
caagacacagagcaacccgaacaagacccagggaagcgacccccgccaccacggccaggcaccaaggccagagcagcagg

SEQ ID NO: 48594 - RNA, 59 nt, Homo sapiens
gcaccgcaggcagacaaaagggccaaagaagggagagaggaaacagaaccgaagccgga

SEQ ID NO: 48595 - RNA, 76 nt, Homo sapiens
cagaccgaggaagccgccgacagacccagcagaagggcggaagcagcgcagcacagcgagcaacacgacaaacgcc

SEQ ID NO: 48596 - RNA, 54 nt, Homo sapiens
caagagagagacacggagcccacagacacacccaaagcagcccacacagggcag

SEQ ID NO: 48597 - RNA, 67 nt, Homo sapiens
aagcgccccaaaagacaggcccaccgaagcaacgagggggaaccaagggcggacagcccaacgacaa

SEQ ID NO: 48598 - RNA, 83 nt, Homo sapiens
cgcggccggagaccgggggcccccgggccgccccccggccgggcagacgcccgaaccggcagaaaccggaccacgcacaaccg

SEQ ID NO: 48599 - RNA, 78 nt, Homo sapiens
ccaagcgggaggcgccgcaaacaccagcaacacccgggacaaaaacgggggccaccacccccaccgaaccagcaccca

SEQ ID NO: 48600 - RNA, 82 nt, Homo sapiens
ccagagcacagagcaccacgaacaaacagaaagcgcgaagaggggaagcaaagcaaggcggcgacggcggcgcgaggaccga

SEQ ID NO: 48601 - RNA, 101 nt, Homo sapiens
acaaaaggcccaaacgggacaccgaagaaaacaagccgggccaagcagcagggagcaagaggcagacagaccgagacgggcaaccaacaagaaacagacac

SEQ ID NO: 48602 - RNA, 79 nt, Homo sapiens
gaagaacggccgggaaaccagggcggaaaacaccccaaaagccaaaagggaaaggaaaagaccaacaacagcgcaggac

SEQ ID NO: 48603 - RNA, 78 nt, Homo sapiens
ccagagcacagagcaccacgaacaaacagaaagcgcgaagaggggaagcaaagcaaaagcaccgcgaaaacgcgaaac

SEQ ID NO: 48604 - RNA, 83 nt, Homo sapiens
acaaccggccaagcgccaagaccaggaggaggagggcacccagcgggccaagacggccggggaacccagcccggagcagggcc

SEQ ID NO: 48605 - RNA, 67 nt, Homo sapiens
cccccccgcgcccgcgaccgccgcggcgaagaggaacacaagggcaagacagccgggaaccccaccc

SEQ ID NO: 48606 - RNA, 82 nt, Homo sapiens
gcgaggcacagggagagaaagggggcgcacaaggagggaacacaagccgagaacagccgagcccagccccacagagcccagc

SEQ ID NO: 48607 - RNA, 73 nt, Homo sapiens
acgaccaggccagagaaccgagcaccagcacccaaaagggacacaaaagcaaccgagagggaaacaaccacgc

SEQ ID NO: 48608 - RNA, 37 nt, Homo sapiens
aacccaagaacaggagggagcgaagaaaccgcaaagg

SEQ ID NO: 48609 - RNA, 72 nt, Homo sapiens
cagccaggaaggaacaagccaagaggacccgaagccacagccccaaggcagaaggcggcagggagcacgcac

SEQ ID NO: 48610 - RNA, 95 nt, Homo sapiens
acgcgcacgggaaccgaagagagccgggcaccacaagggcgcagaagccggcagagcccaagagacaacaagccgaaaagagaggcaaacgccag

SEQ ID NO: 48611 - RNA, 61 nt, Homo sapiens
gacgcacgaaacgccggcgcaaaggacaggcggccagaagccagccagcaggcaacaggcc

SEQ ID NO: 48612 - RNA, 69 nt, Homo sapiens
aaaccccacggaacaggcgcgagaccagacccacaacgaaaagagaccaccaggagaccaggacagaca

SEQ ID NO: 48613 - RNA, 83 nt, Homo sapiens
gccacggcagaaccaaacccaccgcaagacagggaagcggcgcgggagagcagccggacccagaccagggagcccaggaggag

SEQ ID NO: 48614 - RNA, 93 nt, Homo sapiens
cgaggcacccagcagccagcacggccaagcagccaccggacgggaagaagcaagccagaaagaaaccacccaagaggacacaaggaaaaccga

SEQ ID NO: 48615 - RNA, 84 nt, Homo sapiens
gcgccggcggcgggagcgcacggaagaagacgacacagagaagcaaaccaaggaggaaaccgaccgaggcgaagaaaaccgaag

SEQ ID NO: 48616 - RNA, 77 nt, Homo sapiens
aagcagccaagccagaggggagccaaagacccaaagaaggaaaaggaagcaaagggaaacccaaacaggccagaaca

SEQ ID NO: 48617 - RNA, 54 nt, Homo sapiens
ggggaaccccggagaaaaggccaagaaggcagagcgaggaaaacgccacgacag

SEQ ID NO: 48618 - RNA, 61 nt, Homo sapiens
agaaacaagccgggaaagggacaagaagggcaaagccgaaagaacggacgcaccaaccagg

SEQ ID NO: 48619 - RNA, 75 nt, Homo sapiens
acagagcgaggacacgcaaggaacagaggggaacagaaaagacggcgccaaggggccaagccacccgcagccggg

SEQ ID NO: 48620 - RNA, 69 nt, Homo sapiens
gcagccggagaccaagagaaaaccggacagaaccaggcgggcagcgaaaaagggggaaggagacgcaca

SEQ ID NO: 48621 - RNA, 66 nt, Homo sapiens
cacccaaaagaccaggagccacaaaggaggccgcacagaggacggccaaagcaagcaccacgacaa

SEQ ID NO: 48622 - RNA, 89 nt, Homo sapiens
acgagcccaggccacagacccacacgccggcggccaagcgaaggaagagccaggaaagcaaaagggcacccgcccccaaccaaagccac

SEQ ID NO: 48623 - RNA, 72 nt, Homo sapiens
gaacccacgcgcccgggagcacgagagccaacggcacgggaagaagccaaaggacacaccggaggagcaaac

SEQ ID NO: 48624 - RNA, 56 nt, Homo sapiens
cgaggccaccgaggcgaggagaggagagccagggaaaaagacacagcaaagccccc

SEQ ID NO: 48625 - RNA, 76 nt, Homo sapiens
gaaacgaccccggccgagcgaggagggaaacacaaagaagacaccagaagggccagcaccacgacaacacggcgac

SEQ ID NO: 48626 - RNA, 94 nt, Homo sapiens
cggaaagccgcccagagcccggaccaagcaccccaccaccaaaccacggaaggcccaacagcgaaagaagaagagcgagcggaagcgccgacag

SEQ ID NO: 48627 - RNA, 80 nt, Homo sapiens
ggacgggcgcggacccagaggggacggcgccgcaggagaagccggagggaagcaaaccggaaccagaaggaaccaacaaa

SEQ ID NO: 48628 - RNA, 71 nt, Homo sapiens
accaacaaaggacccgggcgaaaacgacaaaacgcacgcgacggggagccgagagcggccgggcccggaca

SEQ ID NO: 48629 - RNA, 75 nt, Homo sapiens
cgcagggagcgccgcggagaggggccggcgcccggcggggacgcaggcccaaagcccagccaaggacccgaaaaa

SEQ ID NO: 48630 - RNA, 84 nt, Homo sapiens
gggccagcaggaccaggagacaagagcaaccagaaagagagggacaagggaaccgagagacacaggggcacaagacgggacagg

SEQ ID NO: 48631 - RNA, 60 nt, Homo sapiens
cagggaggcggaagggaggcacggaagagaggaaggggaccaagaaaggcccagggacca

SEQ ID NO: 48632 - RNA, 35 nt, Homo sapiens
cacgcaaggggaacagacaacacaaagagggaggc

SEQ ID NO: 48633 - RNA, 63 nt, Homo sapiens
ggcaccaaggaaagcagaagacaacagagccccgagaggggcgcgcagaaacgggaagaaaca

SEQ ID NO: 48634 - RNA, 68 nt, Homo sapiens
gaccagggagagccaagcagaaacaggaaaagcagagaacaaaccacgcgccagcgaaggaagccagg

SEQ ID NO: 48635 - RNA, 73 nt, Homo sapiens
acagagcccccgaggccccagaacaccgaccccaaaggaaacgagagagagaccacgggggcccgacgagccg

SEQ ID NO: 48636 - RNA, 77 nt, Homo sapiens
cacggggggccaagggaccacacgaggggacacgggagcccagccagaacaccaccccgaagagacccacgcacgac

SEQ ID NO: 48637 - RNA, 73 nt, Homo sapiens
gaaagccccagacggaaagagcacgcgaaaaaaccgggagaagcggacagcaagaagcacccaagggccacac

SEQ ID NO: 48638 - RNA, 57 nt, Homo sapiens
agcaagggcaaaacgaaaaagccaagcccagaaacaggccagggggaaccgaccaga

SEQ ID NO: 48639 - RNA, 87 nt, Homo sapiens
ggggcggcaagagaagaccccgcgggagggaggaccgcgccaacaggacgaggagaccgaccaggagaccccagcggagacgaccgc

SEQ ID NO: 48640 - RNA, 70 nt, Homo sapiens
gacgcgcaggcacaacacagcagagaccgagggaacccacccccacccagccacagcagaagggggaaca

SEQ ID NO: 48641 - RNA, 84 nt, Homo sapiens
ccccagagccaagggggaccacagcagcacccccagcagcacacagagaaccagggagaaaagacaacgcagaagccaaagcgg

SEQ ID NO: 48642 - RNA, 61 nt, Homo sapiens
ggaacacccgggcgcgccgagcccgcagggccccggaccccggcccaggagcgccccagca

SEQ ID NO: 48643 - RNA, 61 nt, Homo sapiens
acacaggaccgccccggacaggaggagaaggccgccaagccgcgcgagaagcggaccaaac

SEQ ID NO: 48644 - RNA, 77 nt, Homo sapiens
cacagagaggcacagggaccaagggaaggcacagaaccgacacggccaaccgggaaaccaaacaacaaacgcccgaa

SEQ ID NO: 48645 - RNA, 69 nt, Homo sapiens
cacaccgccaccgaagacgggccccaacacccagagacgaaagaggcaaagcaaagaagagggaggaag

SEQ ID NO: 48646 - RNA, 68 nt, Homo sapiens
ccaccaaagaacccggaccaacgaccgcacggaaacgaagcgacacccaaagcaaacagagcagacca

SEQ ID NO: 48647 - RNA, 70 nt, Homo sapiens
agcaggggcggaagccacacaggccagaacgaggagcgcagccgggagaggacgacaaaaggaacagcgc

SEQ ID NO: 48648 - RNA, 79 nt, Homo sapiens
caccagaaccaaaaacacaagcaggaagagaagggggacaaagaaaaccagcaggaacagcgacaggagccagaagcgg

SEQ ID NO: 48649 - RNA, 73 nt, Homo sapiens
ccaaaagcgcccaggggaaccacaaagaagacaaagcacgcgcagaggggaagacacacgaagccggcaggaa

SEQ ID NO: 48650 - RNA, 34 nt, Homo sapiens
ggggcgcagagcgggcaaggggccgcagaagcga

SEQ ID NO: 48651 - RNA, 117 nt, Homo sapiens
gcccaggggccaggcgaagcacgagcagaccggcccgaccgcccacagacccaaacaaagggacacagcaggcaggagagacaacagcaacccagcaacagaaggccaaggggacaa

SEQ ID NO: 48652 - RNA, 82 nt, Homo sapiens
gccacgcggaaggcgggaccaagacgcgcgggagcccggcgccggagcccaagaacccaggccaagcagaaggcaggaacca

SEQ ID NO: 48653 - RNA, 69 nt, Homo sapiens
gacaaacgaccgggcccggaccaggcacgcacaaaaagagagcgcagaaaggagcaacgcgacagcacc

SEQ ID NO: 48654 - RNA, 60 nt, Homo sapiens
ggaggaggaagaggaagaagaggagaagagggacggcccagcacccagccacaccccacc

SEQ ID NO: 48655 - RNA, 83 nt, Homo sapiens
acccggagcgcgcggcggagaacaacggggggccgacgacgagccccgcgaggagcgcagcggagaggccagaacgcccgcca

SEQ ID NO: 48656 - RNA, 95 nt, Homo sapiens
gaacccggcacacgagggccgcacccccacacgcaggaaacacgaggaaaacagacacagaccccagagaacgcagccgcagacacgcgaagcca

SEQ ID NO: 48657 - RNA, 73 nt, Homo sapiens
acgggccagcgacaccgcgagcaacgcgcgggagcgaggacgacaggacgcaaaagaacaaacaaaacccgag

SEQ ID NO: 48658 - RNA, 62 nt, Homo sapiens
cgcagacggacccaggagcccacacagacaccgcagcgcccccagcgagcagacacagggag

SEQ ID NO: 48659 - RNA, 87 nt, Homo sapiens
cgggccccgcggacagaccgcggcaaccccgggaccgacgggaccaacaagaaaaggggaggagcgggagcacccgagcggaagacc

SEQ ID NO: 48660 - RNA, 81 nt, Homo sapiens
agagaaagggaacccggaaaaccaggacccagaagaacaagcagaggaaagacacgccagagaagaacaggacacaacagg

SEQ ID NO: 48661 - RNA, 79 nt, Homo sapiens
cgcagccccccaacaccgcccgccaggacgacggacccccagaaacggccaagcgaacgggaagaggcgagaccggaca

SEQ ID NO: 48662 - RNA, 74 nt, Homo sapiens
ggcaggagcccgaacccccccgcgccgggagccgggcccgaccagaccgggcaggcccaaagaagccgccccca

SEQ ID NO: 48663 - RNA, 78 nt, Homo sapiens
gccgagccgggaccaggcccgggggcggcggccacgccaaggacggagaaaaaccggaagggaaacccgcgacaccgc

SEQ ID NO: 48664 - RNA, 72 nt, Homo sapiens
gccaaagcccaagaacgaggaggcaaggaggccacggggccgaagacaccaaccgggcaccagccaaacgga

SEQ ID NO: 48665 - RNA, 78 nt, Homo sapiens
agcaccaaaccaagaggcggccagcaggaggcgagaagggcgcagcgaggaggggaagccccccgcaggaccagggaa

SEQ ID NO: 48666 - RNA, 84 nt, Homo sapiens
cgcccggaaggcaagcgcagcaacaacagagagcacgggaagcaggccggggaccaaggggacgcggagcggacggcggaaggg

SEQ ID NO: 48667 - RNA, 73 nt, Homo sapiens
accgacccgccaagcgcacacaaaagaggagaaaaccgggcgcagccgggagagcacaagcgaaaccaggccc

SEQ ID NO: 48668 - RNA, 87 nt, Homo sapiens
caggaccccccaggagagcgccccagggcaagccccgcccggccaacaacccgagcgggaagaagccgcagcaagccgcagcggcgc

SEQ ID NO: 48669 - RNA, 65 nt, Homo sapiens
cgagagcgaggcaagaaaaacagccaggggcacagaagggaccacaaacgagggccaagaggaca

SEQ ID NO: 48670 - RNA, 118 nt, Homo sapiens
gagcccaagggcaccagccaaccgcccgggcccgccccacaggagccggacacgcagacagcaaggaggccccgggggccgcggcccggccccaccaggagccagcgaggacgacaca

SEQ ID NO: 48671 - RNA, 73 nt, Homo sapiens
gagcacgcagcgagcgagaagaggaggacaacagcacaaccgggggcaaggagcgagagcgcacacgggcaca

SEQ ID NO: 48672 - RNA, 79 nt, Homo sapiens
aacgccacagaaaaacaccacaacaaccagggcagcgccgacacgagaggagcgaccaccgagacaagccggccaccgg

SEQ ID NO: 48673 - RNA, 73 nt, Homo sapiens
acacccagccacacgcggagaagagagcggacggccaaggaggaggagcgcagcacccagggaaggcagagac

SEQ ID NO: 48674 - RNA, 70 nt, Homo sapiens
agccacacggaaccagcaaaccaggaaacggcgaaaccgcccagggaaccaaccgggagccccccaagag

SEQ ID NO: 48675 - RNA, 68 nt, Homo sapiens
cgacaaaccaacgcaacgaaacaaagaggccagacacacgcggccccacaaagaaaacagaggaggaa

SEQ ID NO: 48676 - RNA, 61 nt, Homo sapiens
cgacccacagcgaaagagaagaaagagggagaaaacagaacaccaaggaaggaaaaaaagc

SEQ ID NO: 48677 - RNA, 67 nt, Homo sapiens
agcccagaggcggggagggcaaagacaacacaaccgagcggcggaagcggaggggagcgaccgcgag

SEQ ID NO: 48678 - RNA, 56 nt, Homo sapiens
agaaaaagcaggaagacccccagaaagccaacaacggaccaagaaaggcccaggga

SEQ ID NO: 48679 - RNA, 75 nt, Homo sapiens
aggcaagcgcagccgagaaggccaagaccggaacacgaaagaggcagagcgggaaaagaggaagaagggaaaaac

SEQ ID NO: 48680 - RNA, 67 nt, Homo sapiens
ccaagagagcacagaaaacacagagacaacccaagggacggccagaggggcccgagggcaggacagc

SEQ ID NO: 48681 - RNA, 82 nt, Homo sapiens
gcggcacgcacgcgaagacagcggcagccaccaggagagaacgccgcgccgcgcgacaacggcccggcaggcaaggccggcc

SEQ ID NO: 48682 - RNA, 83 nt, Homo sapiens
gcccacagagacagaaggcagccgaggggcgcaaagcccaacggaggccacccgggcaggaccaggacacagaccggaaaccg

SEQ ID NO: 48683 - RNA, 78 nt, Homo sapiens
gaacgcaaagagaccagcccccaaagccaaaagcgagcacaggaaaaagaaccgacagagcggcccacagaaggacaa

SEQ ID NO: 48684 - RNA, 75 nt, Homo sapiens
gcggccaaggggacgagcaaaggaagcgcgaacagcagcgcaggcacacgaaagcagaagcgccagcaagaaaga

SEQ ID NO: 48685 - RNA, 87 nt, Homo sapiens
cgcccccgacccaccgagggacggcccggggaagccgagacccccgcgagggacgagaggcggcccgcagcagaccacagcaccggg

SEQ ID NO: 48686 - RNA, 35 nt, Homo sapiens
cagcagggcaaaaccaggccaagaacccaaagcaa

SEQ ID NO: 48687 - RNA, 78 nt, Homo sapiens
cggaacgcagcaacgacccgagcacaaggcaagagaccaaccccagccccgaaagccaccaaagccggcacgcaaagg

SEQ ID NO: 48688 - RNA, 71 nt, Homo sapiens
ccgagggccccagacaaaaagccgaaaaccggagggaaaaaaggaagagaaccaagaaagaaaacgggagc

SEQ ID NO: 48689 - RNA, 81 nt, Homo sapiens
aaaaaacgaacagccacaaaggcacaaacaggaggaccaaaggggaaccccggaagaacggcggaaaaaccaggagaaggc

SEQ ID NO: 48690 - RNA, 78 nt, Homo sapiens
gaagcgccaggagaaagggaaagagcccggaagagagggagagacaagaggaccgcccaggaaccaagaaagaggaag

SEQ ID NO: 48691 - RNA, 66 nt, Homo sapiens
cacccacgacaccagcaacgcccaggagcaagacaggggaggccgggccagagcaaaggcaaaagg

SEQ ID NO: 48692 - RNA, 74 nt, Homo sapiens
ccacaggaacaagaaccagggagaagccgcccgaacaccagcacccaggccacagaggaggaaagagaggggaa

SEQ ID NO: 48693 - RNA, 85 nt, Homo sapiens
aagaggacacccacccggaccggcccggcgagaggcagccgcagggaagcggacgccggccagacagggccacgccggcagagag

SEQ ID NO: 48694 - RNA, 74 nt, Homo sapiens
agaaaagcagcccaacgaaaaccgcgccgggcagagccgaaagggagagaagaccgccaagcgggaaaacccca

SEQ ID NO: 48695 - RNA, 56 nt, Homo sapiens
aacgggagccaaagggccccggggggaccaaaacaaaacgagagcaagaggaaaga

SEQ ID NO: 48696 - RNA, 78 nt, Homo sapiens
ccccagaccacacgggggcaggacggcagggcgccggccgagcccgggaaaacgacagcagcagcagggccggaagac

SEQ ID NO: 48697 - RNA, 82 nt, Homo sapiens
ggcgagccgggccggcgcggggccggggagggcaaggaagaaaaggcggaccggcgaacgaaggccgaacgaggcggggggc

SEQ ID NO: 48698 - RNA, 57 nt, Homo sapiens
aggacggcggaacacggaggcgggaaagagagaggagacacaagaggaccaggcagg

SEQ ID NO: 48699 - RNA, 56 nt, Homo sapiens
gggcaaaggccacgcgaccacgagacgccacaggcccggccccgggcccgcacggc

SEQ ID NO: 48700 - RNA, 79 nt, Homo sapiens
agagcaaacggcccccagcgccccggaacgacaaggaggccaggaagaaggccaaacaaggccgcagaaggaacggcag

SEQ ID NO: 48701 - RNA, 87 nt, Homo sapiens
cccagaaaaccgagagggaagccccggaaccagcgagagacaccaagaacaagcagaaagcacgaacaacgagaacaagacacgagc

SEQ ID NO: 48702 - RNA, 77 nt, Homo sapiens
cgggcaagagcccggggaggcacgcaggaggccccccagaggcagcgagaagaaccacaggaccaggcggcgaaccg

SEQ ID NO: 48703 - RNA, 66 nt, Homo sapiens
aaggccgcgaagccaccagaccccagaaccccgaggagacggaagaccaccaaccacccaccacac

SEQ ID NO: 48704 - RNA, 94 nt, Homo sapiens
ggaaccccgcaagggcagaagggaagaacaggaggcagaaggcggcagcggagcacgcaccaggagcccgcggcccacccacagcgaaacaaaa

SEQ ID NO: 48705 - RNA, 66 nt, Homo sapiens
ggcgaaacacggggaacaaacggcaagagccagaagcccggcggaaggcggcaggagggaaagcaa

SEQ ID NO: 48706 - RNA, 74 nt, Homo sapiens
agagccgccccacacgcagaaaagggagaggccaaaaagagagaaaaaccagaaagaaaacagacgggagagag

SEQ ID NO: 48707 - RNA, 75 nt, Homo sapiens
caacccaaccacggggaaaaggcaaaaacccacaccgcaacccagcgagagaaagaacgcaaggagggacaggac

SEQ ID NO: 48708 - RNA, 81 nt, Homo sapiens
cgggccaaaggacagagaagacagagcgcgggagaagcacaggaagcagaggccagggaagagcagcgcagcaggaacgga

SEQ ID NO: 48709 - RNA, 77 nt, Homo sapiens
cccggaacgccggacccggaccccgggcaaggggaagccccgaggacaccaggggccacccagggcgagaccaaggg

SEQ ID NO: 48710 - RNA, 61 nt, Homo sapiens
aaccgaaaggcagcgacccgccacgcagagccccgccaggaagacacgccggggaacgaag

SEQ ID NO: 48711 - RNA, 81 nt, Homo sapiens
aaggcggagcaggccaaaggaagaagacacggcagcgacgaagagacgcgcccgacgcccggaagccccggaccacacaga

SEQ ID NO: 48712 - RNA, 48 nt, Homo sapiens
agagacaccggggccaacaacgacaaacaagaacagagccgcccgagg

SEQ ID NO: 48713 - RNA, 76 nt, Homo sapiens
gagcgggcacgggccaggcgcccaggggaagccgcacaccagcaggcaacaagaagagccagcagacaccaagaag

SEQ ID NO: 48714 - RNA, 79 nt, Homo sapiens
cacccggaagcacggccacggcaggagcacagcaggaggacggaacccagacggcccgccacgggccccgcagccgcgc

SEQ ID NO: 48715 - RNA, 77 nt, Homo sapiens
agacaggggagaaggggagacaagcacaagcaaagggacaccaccagcaggccagacacaacccagccccaagaacc

SEQ ID NO: 48716 - RNA, 71 nt, Homo sapiens
cgaaccgcacagcaagcccaggccaacaggcaaaaaaagcacaaggcaaacagggcaagagagaggagagc

SEQ ID NO: 48717 - RNA, 78 nt, Homo sapiens
ggcccgcgggcgcaccggcgacgccccacacgggcaacgcaaaagacaccagaaccacaccaggcacgcaaaagagcc

SEQ ID NO: 48718 - RNA, 58 nt, Homo sapiens
ccgccaagacggccaaggcacccggggcgaagagagaacacgcacggaaggaaggaga

SEQ ID NO: 48719 - RNA, 84 nt, Homo sapiens
accaaggcaacaaggacaacaagagacgggacaagacagggcaaaggacagaccaggacccaaagacaggaccacgcaccagca

SEQ ID NO: 48720 - RNA, 58 nt, Homo sapiens
caaacaccgcagccaccaaggaccagccacaagcagaagaaaggggcaaggaaaacga

SEQ ID NO: 48721 - RNA, 53 nt, Homo sapiens
ccaagaaaacaggaacgagagacaagggcagagccaagcgccgcccgggccca

SEQ ID NO: 48722 - RNA, 74 nt, Homo sapiens
gaagagcgaagagggagaagaagaaaagcacggaaacgcgcaacggcggaagacccaagagacagggcaccacg

SEQ ID NO: 48723 - RNA, 74 nt, Homo sapiens
ggcccaacacgccagcacgcccgccacgacagagcgcacacacgggccgaaggcgagacagagggaaagaacca

SEQ ID NO: 48724 - RNA, 63 nt, Homo sapiens
agacggcagccaggcgaggccaaaacccaagggggaggaaccacccacgaaaccggcaggggg

SEQ ID NO: 48725 - RNA, 98 nt, Homo sapiens
gcgcgccacggagccacccaagcggccgccacccggaacccacaaccagaccaggcagccaagaacgagaagcggggcagacaggaaggcaccacgcg

SEQ ID NO: 48726 - RNA, 79 nt, Homo sapiens
caaggcaacacccgaagaaacaagcacaggcacccgcagacaaggcccagcagggggggggaaaggcagcgcagcggga

SEQ ID NO: 48727 - RNA, 72 nt, Homo sapiens
cgacagcggaggcgccggcggcccacccggaagaacaagaaccacggcgggaaacgccagaaggagaccaaa

SEQ ID NO: 48728 - RNA, 80 nt, Homo sapiens
cggggcggcggcgacggcggcccggcaggaacccagaaccgcgggcagcaagaaccaccaaacaaggacaggagggaagg

SEQ ID NO: 48729 - RNA, 56 nt, Homo sapiens
ggcacccagagcagggaggacagccagcagcccccccaagggggacacagcaggca

SEQ ID NO: 48730 - RNA, 86 nt, Homo sapiens
gagaccacccacaagaaacggaacaccccagagagacacggccacgaccccggggcagccaagcgacaggcccaggagacaaggac

SEQ ID NO: 48731 - RNA, 71 nt, Homo sapiens
gggccgggccgcaagcacaacaaggccacacagccgcacgagaggaacgcgacaagaagacggagagaaga

SEQ ID NO: 48732 - RNA, 104 nt, Homo sapiens
cgaccgggggggcgggggagagagcgcaccgcgcgggacaagcgccggcggcgcccgacggagcagcagcagacacggcaagagccacggcgaaccaaacggac

SEQ ID NO: 48733 - RNA, 79 nt, Homo sapiens
gccggaggaagcaaaccacagaacaggcggcaggaaacaagggaaccagcggggaaacgaggccggggggagcgcagga

SEQ ID NO: 48734 - RNA, 46 nt, Homo sapiens
ggaaaagcggccccaaggcgaacaaaacgacaaggagaaaaagaag

SEQ ID NO: 48735 - RNA, 67 nt, Homo sapiens
gccggcgcggccgacggcgcgcgcccgcgcgcgcggcgacagcgcacgaaacacacaaagaaccacc

SEQ ID NO: 48736 - RNA, 81 nt, Homo sapiens
gacgacggaaacaacagagaagaggacagcaggcgacaaccgcgcgaagccacagaggacgagaaccagcggcagccaaag

SEQ ID NO: 48737 - RNA, 79 nt, Homo sapiens
agcagagggaaagggaaggagaaggagggacgcaggcgcaggccagaacccaccggcacaaccgcacgcaagcgacagc

SEQ ID NO: 48738 - RNA, 75 nt, Homo sapiens
acaacaagcccgagggcagccacagcgggaaaagaaagcaacgcgagcccgcacaccaaagcggacgccggccac

SEQ ID NO: 48739 - RNA, 38 nt, Homo sapiens
agaaccccacggagaaccagagggccgccggcccaggc

SEQ ID NO: 48740 - RNA, 70 nt, Homo sapiens
caagccgcaagaaccggggaagggagagacaccaacaaggaaagaacggaacgaccgagaaaaacaagga

SEQ ID NO: 48741 - RNA, 68 nt, Homo sapiens
aagagagaaccccaaccggggaggaaaaccgacgaagccgagaacaaagcggaagaaagccccaaacc

SEQ ID NO: 48742 - RNA, 76 nt, Homo sapiens
cgaagaaaaacagccgacggggccagaaccaggggcagaccaagacaaggggaaggaagaagaagggccgagaaaa

SEQ ID NO: 48743 - RNA, 38 nt, Homo sapiens
caccgccgcggacggccggcaagaggaaacaacagaac

SEQ ID NO: 48744 - RNA, 61 nt, Homo sapiens
aaaaggaagagagcacgcagccaggaaaccacgaggcccacagacgaaggcaagcggcaaa

SEQ ID NO: 48745 - RNA, 78 nt, Homo sapiens
gggaagagaggcagaagcggcagcgggagacaaagcccagaggacccagaggggcagcgggagccgcccaacccggcc

SEQ ID NO: 48746 - RNA, 73 nt, Homo sapiens
ggaaagaacaacgagagaccacggaggcagacccagcgggaaaacggcaaggaaaaacaagaaaaagggaagg

SEQ ID NO: 48747 - RNA, 71 nt, Homo sapiens
ccaggagcgaaaccaggggagagcgcgaaacgcaggggaacaccaggaaaaggagaccccaaggccggaca

SEQ ID NO: 48748 - RNA, 70 nt, Homo sapiens
ggccgagacaaaggcaccaggccaccacagaaacaaaagcaacaaagagggacacaccgagaagccgaaa

SEQ ID NO: 48749 - RNA, 57 nt, Homo sapiens
gcgagggaagccgagagaaggcgggaagggagaggcccccagcgcaggggcaaaaga

SEQ ID NO: 48750 - RNA, 88 nt, Homo sapiens
ccggagaggggaggaaacgcgccggaaaggaagaccaggacgcacagaaaaacaaccaccagcgagcaaaaaggcaaagaccaagacc

SEQ ID NO: 48751 - RNA, 69 nt, Homo sapiens
agccaggcgggccacaaggcggagcacgacgaagacacgcacacacagggggcggagaacggaaaagca

SEQ ID NO: 48752 - RNA, 72 nt, Homo sapiens
ggacccgcggggcacccgcaggggcagacagcacaaccagcggcgaggccgccaaagggagcgaggagacac

SEQ ID NO: 48753 - RNA, 63 nt, Homo sapiens
cgccgccgcccggaccccggcgcgcgaagcaggggaaacgggcccagagccgccaagaagcag

SEQ ID NO: 48754 - RNA, 66 nt, Homo sapiens
cacggaacagaacaacccagaacggagagccccccagaaaaggagcagagcagaggacaacgagaa

SEQ ID NO: 48755 - RNA, 72 nt, Homo sapiens
agcaaaagccccgagccccaaaaagaaagcacgcccggcagcaggagaggagggaacccgcccgcaaaaggc

SEQ ID NO: 48756 - RNA, 57 nt, Homo sapiens
gccgccaaagccaagccaccaaacgaagagccccagcaggagaggagcgcccggccc

SEQ ID NO: 48757 - RNA, 70 nt, Homo sapiens
gccgcaaagaccaggacagggggaaaagacaacacagacaagaaaaaccaaaggacgcaaaaaagcacag

SEQ ID NO: 48758 - RNA, 79 nt, Homo sapiens
gagcccccccagcagggagacaaccaaagagggggcacccgaggaggaagagggcagggcccacggaaagaagggaaac

SEQ ID NO: 48759 - RNA, 54 nt, Homo sapiens
gacaccaccaagaacggagagcgacgagaagagcaccccccagagcaccgaccc

SEQ ID NO: 48760 - RNA, 66 nt, Homo sapiens
agcaacgaaggggcaacaccccggaaacacgacaagccaaagcaaagaagacgcgcaagaccgagc

SEQ ID NO: 48761 - RNA, 84 nt, Homo sapiens
cccgaggaccggccgaacggcgcaggggccgcgcggcaaggaaaccccccaggcaagaggcgcaggaccgggaagaccaacaaa

SEQ ID NO: 48762 - RNA, 56 nt, Homo sapiens
aggcggagccgaccaggccgacgagaccaaaaggcagcaaaggcgagcaaaacaag

SEQ ID NO: 48763 - RNA, 75 nt, Homo sapiens
gaaagcaagagaaaagaagacgggaagacaaacgccaggagccgaagacaacaaccggaaaagcgaaggcagagc

SEQ ID NO: 48764 - RNA, 80 nt, Homo sapiens
ccggggccgggccgcaagcacgacgagagaggagcgcgggccgagagcggagagcgggacgcaaggaggaggacggacag

SEQ ID NO: 48765 - RNA, 84 nt, Homo sapiens
caaaggaagacgaaccggagaagaggccaaacacacaggaacgccagaccccagccgagggaggcaacagcaaagggacagcca

SEQ ID NO: 48766 - RNA, 56 nt, Homo sapiens
gaaaaggcgagaaccagcgcccaccccacgggaggccgggacgggacaacgaacca

SEQ ID NO: 48767 - RNA, 71 nt, Homo sapiens
gcgcgaagcagcagaccgacccgaacaaggccaacaccagcagaaaaccagaaggcaccgacaggaaagga

SEQ ID NO: 48768 - RNA, 78 nt, Homo sapiens
aaacccaaaaagagcagagaaaaccagaaaaaggccaaggaggggggaagacagggcccagcaccacaggacgggccg

SEQ ID NO: 48769 - RNA, 48 nt, Homo sapiens
gcggggcaaccgccacgagacaccaagggcccacggaaaagacggagc

SEQ ID NO: 48770 - RNA, 87 nt, Homo sapiens
ggggcgcaccgccaagagcggggagggggaagacagagaagaccacacaaccgaaggggccgggcaggacggcccggggcagcaaga

SEQ ID NO: 48771 - RNA, 102 nt, Homo sapiens
ccgcccaaagcgggcgggagggcgcagaccgccaccaagagacaagaaaaagaacccaacccagagggaccgccaagcagacgaaggagaacagacacgggc

SEQ ID NO: 48772 - RNA, 57 nt, Homo sapiens
cggagccagagaaggcagaagccgccaggagcaaggcagcgacccagggcacagcgg

SEQ ID NO: 48773 - RNA, 74 nt, Homo sapiens
agagcacgcggagcgacccgccacgcgggcgcgacagggaccgcggcagcagggaccggagaacccacccaagc

SEQ ID NO: 48774 - RNA, 56 nt, Homo sapiens
ccccgcccagcccccaagaacgggaagaggggaagaaggacggaaacgcgcaggac

SEQ ID NO: 48775 - RNA, 65 nt, Homo sapiens
aaccacacgcccaagggcagcaagaaagggaaggggagggacagcgggccccagaccggggaggg

SEQ ID NO: 48776 - RNA, 77 nt, Homo sapiens
gcgcccccacgcgggccgggggcgccggccacagcgaggcggggacgcgaagaagcccccaccaccacgagaccgac

SEQ ID NO: 48777 - RNA, 70 nt, Homo sapiens
ggagacggaaccggagaaaaacggggacagaagacccacgccgagccgcggcagaaccacaagacgagca

SEQ ID NO: 48778 - RNA, 82 nt, Homo sapiens
agggacgaccaaaaagcagcggacagcacaaggaaccacccgcggcagaggccaagggaccggacaagcgcacaggcaagac

SEQ ID NO: 48779 - RNA, 68 nt, Homo sapiens
gaaggcacagggagaagggaaacccacacccagaccccaggcgagggggcacagcaaagggaacgcag

SEQ ID NO: 48780 - RNA, 84 nt, Homo sapiens
agccgaccgccgccgccgccgagagagaggagaaggagaccacacgaaggggcagaagagcacaagacggaagagaggagcgac

SEQ ID NO: 48781 - RNA, 78 nt, Homo sapiens
ggagggaggccggccaggccggccgcgccgcgaggagacagaaggccagccaggaaagcgggagcgcgggagcaaagg

SEQ ID NO: 48782 - RNA, 77 nt, Homo sapiens
cagaggacgacgaagagacaaaggcaccggaaagccaggaaaaacacaccgaaccagccggccgacgaggagcaggg

SEQ ID NO: 48783 - RNA, 66 nt, Homo sapiens
acgaggaccgagaccgcggccgggaccgagggcccagacgcccggagacaacccggaaacacgaag

SEQ ID NO: 48784 - RNA, 75 nt, Homo sapiens
gaccaagaagcaaggggacaccgcaggagaaagccggggcagcggagaaacaagcagaagaaccgacggagaaga

SEQ ID NO: 48785 - RNA, 83 nt, Homo sapiens
ccagacagacgcgcaggaagaagagggaagccaaggcacaggggcccgacccagcaggacagaaaggaaagcgcaggcaggag

SEQ ID NO: 48786 - RNA, 79 nt, Homo sapiens
ccggaggagcgcagcaacagaagagaggccagccgggaggacacacaagcggccgaagcaagcgacaagggcggaaagc

SEQ ID NO: 48787 - RNA, 81 nt, Homo sapiens
ggagcacggcgagcagccaggccaggagagaccccagaaagagcaacagaaggagacagagcacggaaggacaaaaagaag

SEQ ID NO: 48788 - RNA, 72 nt, Homo sapiens
ccaagcaggaaggcccagcaaagagaagaaggggaaaaccaaaagaggccgaacaacgggcaaccgaagaga

SEQ ID NO: 48789 - RNA, 84 nt, Homo sapiens
cgcgccccggagggcgcggcgcgcgaggagcaggaaaagaaccccaaacgcagagaaggaggcgcaacagggcaaggcaaacag

SEQ ID NO: 48790 - RNA, 74 nt, Homo sapiens
gcccaccggcggccacgcaccgcgcgaagacggaagacgcgcccgcgccggagggagagcacggcgcaccaacg

SEQ ID NO: 48791 - RNA, 79 nt, Homo sapiens
ccccaggaccagaaccaaggccccccagccccaaaacagggaagaaaggaccaacccgaggaaagagaggcagaaccag

SEQ ID NO: 48792 - RNA, 81 nt, Homo sapiens
ggcggaagaccgacgcgagaagcccagaccgcagggcgggaaaaaaccaagcagcgagcaccagaagagacgaggcaccgg

SEQ ID NO: 48793 - RNA, 59 nt, Homo sapiens
ccaacgcgacggaaaggcacgaaagccaggcggagccaggccgcgaaaaccacaacgca

SEQ ID NO: 48794 - RNA, 37 nt, Homo sapiens
agaggcaggcgagcaggccagcggggcccggcgcacc

SEQ ID NO: 48795 - RNA, 80 nt, Homo sapiens
cgggagcggaggagcgcgccggagaacgacaccaaggcgaccaggccgcgggaagcgcggacgccccaccaacggcgcgg

SEQ ID NO: 48796 - RNA, 51 nt, Homo sapiens
agcacaggggaagaagcacagccacgagccaacacagggcgacgccaggag

SEQ ID NO: 48797 - RNA, 76 nt, Homo sapiens
gagaggaagacgagccgggaggaacggcccggaaacaggaggacgaaacgccaagagcgagcggacgaggagcccg

SEQ ID NO: 48798 - RNA, 68 nt, Homo sapiens
agagccgcccgggccagcggccgcgcacccccggccggaggcaccagcagggcagaacgaagcaaacc

SEQ ID NO: 48799 - RNA, 58 nt, Homo sapiens
gggacagggccaagcccgaggcaccaaaaaagaaaaagcggagccaggagcagccgca

SEQ ID NO: 48800 - RNA, 92 nt, Homo sapiens
acaacacacacagagaagcaaaagcacaaagcagcagcaagaagggaaaacaaagcaagacaccagaagccaacccagagaaccgaagacca

SEQ ID NO: 48801 - RNA, 76 nt, Homo sapiens
ggggggaggaggggcaggcccggcggaaaaagcaaaagggcccaaggcccgaccaggaacaaagagagaaagacag

SEQ ID NO: 48802 - RNA, 85 nt, Homo sapiens
gccaggagcaacagccaaaggcaggccgagcagaccacaaggacaccagaggaccagaacccacgagaaacagacgagccaacca

SEQ ID NO: 48803 - RNA, 70 nt, Homo sapiens
aggaagcagagcaggagggaagaggaggcaccaccgccgggagagcagggcgagaacaccgacccacaac

SEQ ID NO: 48804 - RNA, 76 nt, Homo sapiens
cccccggccgcccacgagccacagagcagaacagaaacaaacagaggcaccgcccggcaggagacagaacgagcga

SEQ ID NO: 48805 - RNA, 80 nt, Homo sapiens
ccggcgcacaaagaagcaacacgagcagcgaaggcgaagcggcacaaccggggaggagaacaccaaacagaggaacaggc

SEQ ID NO: 48806 - RNA, 96 nt, Homo sapiens
cgggaggagcacaagagcgacagcaccgcgcaggagacggaaggacacaagggggcagcacagcccagaagcaggaccggaaaacgcagcagcaag

SEQ ID NO: 48807 - RNA, 98 nt, Homo sapiens
cagcccacagagagcaaaacacaagagagcagggaggaggccccccccccggaggcagccggccccgggcccaggccagcggaccaagccagaacccg

SEQ ID NO: 48808 - RNA, 84 nt, Homo sapiens
cgggcgcagacggcgagaccccgcacagcccagaaggccgagcccggccacacagcaccgacacccgcggccgaaaccaccccg

SEQ ID NO: 48809 - RNA, 67 nt, Homo sapiens
gacacagggaccaacgggaaggggaagggccaggaccaaaggccagcacggccagggaacacaggcc

SEQ ID NO: 48810 - RNA, 67 nt, Homo sapiens
gccaccaccacaccgccaggggaaaaggagccgagggaaggccacaagagggggcggcacccaggag

SEQ ID NO: 48811 - RNA, 103 nt, Homo sapiens
gcgcaaaagacccaccccggaagaccaaagagaagaggcaaaacaaacacaagagaagaagaaggaggccgcggccagaaacccaagaaaaagcgaaggaacg

SEQ ID NO: 48812 - RNA, 80 nt, Homo sapiens
aaagaggaacaaggcggaggaacgagacgcgaaccagaacaacaagaaggagaaagacacaacgacagaagaaaaaacac

SEQ ID NO: 48813 - RNA, 79 nt, Homo sapiens
ggcagccggggggaccgagcggagaggagagcacacggcaccgagggagaacagcaagacggaacgcaaacgcccaaga

SEQ ID NO: 48814 - RNA, 125 nt, Homo sapiens
gagaagacccggggcaggcgcaggaggcacccaaggggaggaaggccgcgagaaggacagaagaggaccgggaccggcgggccgggggcgaaggagaagccccggggacgaagacgcccccccgc

SEQ ID NO: 48815 - RNA, 72 nt, Homo sapiens
cggcagccacaggagccaggcagaagcccccggggagagacagacagagggacacagagaggaagaaaggag

SEQ ID NO: 48816 - RNA, 86 nt, Homo sapiens
gaggagccgccgagcggagacccgggagcaggagcgggccaggcgcgcccgagggaacaggcacgccccacccgccagccgagccc

SEQ ID NO: 48817 - RNA, 57 nt, Homo sapiens
ccgggcgacaagaggccgggcgccccgcaggacacaaggcggggccggggagcccgg

SEQ ID NO: 48818 - RNA, 81 nt, Homo sapiens
acaaacaggaaggggggggggagacgaaggaggacaaaggacgcgcagaggagccagccagacgggcaccggcacacacca

SEQ ID NO: 48819 - RNA, 69 nt, Homo sapiens
agagcgccaagagagcgggcagaaaccggcggcaggacacaagcaggggaggaagaagacgacagaccc

SEQ ID NO: 48820 - RNA, 76 nt, Homo sapiens
ccccccgcagcacccagccggccacgggggcacccgaggaggaagagggcagggcccacggaaagaagggaaaccc

SEQ ID NO: 48821 - RNA, 116 nt, Homo sapiens
cccgcgaggacggacgccaacgcacccccgacaaacaccacgagaaccgcagcccacacgggaacgaccggggaagaagaggaacacccggaggaacgacaaggggaacaccccaa

SEQ ID NO: 48822 - RNA, 84 nt, Homo sapiens
gcggggcggcggagaggaaccggggcacgccccgagccgcccgccgccgagagcaccggccagaacaagccaaggagccaagac

SEQ ID NO: 48823 - RNA, 72 nt, Homo sapiens
gagccagccaaccccgcggcaccaagggacagcccaggacaaccagcaggacaagcggcagaaaaaacaaca

SEQ ID NO: 48824 - RNA, 58 nt, Homo sapiens
gaggcgcgggaggcgaggaggcggcggcggagacgggagccggaaagccagggaaaag

SEQ ID NO: 48825 - RNA, 58 nt, Homo sapiens
ccggaaagcccagaacagcacgagccccgggacgcaccaaagaagacagacacgcaga

SEQ ID NO: 48826 - RNA, 53 nt, Homo sapiens
ggagccaacgccggaccagcaaggcgagccgccgcagggcgaaggcgaggacc

SEQ ID NO: 48827 - RNA, 78 nt, Homo sapiens
accacgggaccgggcaagggaagaaaagcaccagcccgaagaagccgggcagaccaggcagcagcggaaaggagcagg

SEQ ID NO: 48828 - RNA, 54 nt, Homo sapiens
accccaaccggggaggaaaaccgacgaagggccggggacacaagcaacagccag

SEQ ID NO: 48829 - RNA, 80 nt, Homo sapiens
accggaggaggaagaaaccggaagaggaagaggaaagcaaaggagcagggaggcccccagacaaaggaaagggcgccaac

SEQ ID NO: 48830 - RNA, 33 nt, Homo sapiens
agaaggcagaggcgaggagcgacacgcagaccg

SEQ ID NO: 48831 - RNA, 83 nt, Homo sapiens
ggcaccccacccccagcccaacaacagacccccaccccaggagcaacccagccccaaggccaaccggacccaacggggaagaa

SEQ ID NO: 48832 - RNA, 73 nt, Homo sapiens
gagagaggccgggcgagcagcaggagcaccggcccaagaaacagacacacgaagagaagagcccggaaaagga

SEQ ID NO: 48833 - RNA, 82 nt, Homo sapiens
cgcggccaaggccacccaagaacggcccgccaccggagacaacgagaggagaacggcggccaaagcgccagacaagggccga

SEQ ID NO: 48834 - RNA, 71 nt, Homo sapiens
ggaacgaagaaaagaaaggccaagaccaggaaaggaaggagacgcagcaagacagagcggccaaagcaaca

SEQ ID NO: 48835 - RNA, 40 nt, Homo sapiens
caaagcaaaaggggaaaagcaggagccgacacgccagcag

SEQ ID NO: 48836 - RNA, 63 nt, Homo sapiens
cccagcccccgagggcgggaacaggaggaaccacgaaagacggagagagaaaacagagaagaa

SEQ ID NO: 48837 - RNA, 66 nt, Homo sapiens
cgaccgcgcggaccagggcgacaaagggacccgcaggcgcccaggagaaggccgcacagcaacgaa

SEQ ID NO: 48838 - RNA, 74 nt, Homo sapiens
ccgccccagagccagccgaaagccacaggaccaggaaaacacagaacagccaagggaaccaagcagaaaacagc

SEQ ID NO: 48839 - RNA, 80 nt, Homo sapiens
gcggcggcccaccggggaccgaggccgggggaggagcaccgaacagccagcccgagcaggggcccacgggacaaagaaac

SEQ ID NO: 48840 - RNA, 79 nt, Homo sapiens
ccaaagcccaaaccccaggccaagcaaccaccagcagcccccagagcggaacacagacccgggggcagcaggggaccac

SEQ ID NO: 48841 - RNA, 75 nt, Homo sapiens
aaacaccaagacacgagggaacaccccaggaccccagcagacaggcgaagggacgccgacacaaagaacggaaga

SEQ ID NO: 48842 - RNA, 57 nt, Homo sapiens
gaacgcaaagagaccagcccccaaagccaaaagcgggcagccaccagggaccaacca

SEQ ID NO: 48843 - RNA, 81 nt, Homo sapiens
ccgggcgcccaagcgacagcgcagaggggcaggagccgggagccaccgcgaagcaagaggagccaggagcacggggggaac

SEQ ID NO: 48844 - RNA, 80 nt, Homo sapiens
ggcgacggcccgaacggccagacccggagacgacccgacgaagcccacgccgggacccagcgcaggacaccccccaggca

SEQ ID NO: 48845 - RNA, 61 nt, Homo sapiens
acgaccagcagaagcgcacccgaagacacaaacgcaaaagcaagcaaagcagacaaaggag

SEQ ID NO: 48846 - RNA, 78 nt, Homo sapiens
ccacagccgagccagggcgaacggcccaaaaccccgacacccaccccagaaacgccggaccgaacacgcccccgacga

SEQ ID NO: 48847 - RNA, 70 nt, Homo sapiens
gggcaacgagaaccagaccgcacgcagaaaaccaggagaacggcacggggccaaaaaggcacgagggaac

SEQ ID NO: 48848 - RNA, 78 nt, Homo sapiens
cagccacgcaacccccccccaggccgccgaccgacaaccaaagaagccagccacacccgaccagcaaacccggagaca

SEQ ID NO: 48849 - RNA, 56 nt, Homo sapiens
ccaacgcgacggaaaggcacgaaagccagaagagagaagaagcaaaccgggaccgg

SEQ ID NO: 48850 - RNA, 71 nt, Homo sapiens
cagcacaacgcccaacacacacaggaagccggaaaagaccagaacaagagacaaagcaagaaagagaaacg

SEQ ID NO: 48851 - RNA, 76 nt, Homo sapiens
caccaacaacagccacggacagaagcccacgggccgggggccccaccagaacgccagccccaagcgcacccccacg

SEQ ID NO: 48852 - RNA, 86 nt, Homo sapiens
cccccacgcggccagcgaaaacgcccagggaccaagaaaggcccagggaccaaagcccggacaaggcccgagcaccaggaccgcag

SEQ ID NO: 48853 - RNA, 73 nt, Homo sapiens
cgcggcggggcaagaggcaacagccgcccgggcgcggcaacagccgggagaagaggcacaaggacaggcacag

SEQ ID NO: 48854 - RNA, 55 nt, Homo sapiens
cgaccgaaacaccagaaaaacgcaagggaaaagagaaaaagaaagcgacggaaaa

SEQ ID NO: 48855 - RNA, 63 nt, Homo sapiens
ggaaacaccacgaagcagccaagcaccaggagacaaagccacaaaaacaccagaaaaaccaag

SEQ ID NO: 48856 - RNA, 84 nt, Homo sapiens
aaaagaagaacaccagagaaacggccaagaccagcagggacacagcaggacaagaacgacagaaagagcaggcagcacacacag

SEQ ID NO: 48857 - RNA, 55 nt, Homo sapiens
accggaaacaccacccaggcaagaaaccccggacagaaggcacggcgaacaaagg

SEQ ID NO: 48858 - RNA, 78 nt, Homo sapiens
cagccggggggggcgcggcaaggggcacgccacccccgggccaagcagcacagagcagaaccagggccaacaccaaca

SEQ ID NO: 48859 - RNA, 43 nt, Homo sapiens
gcgagccccggagcgggaccccaggagccgacagcagcagaag

SEQ ID NO: 48860 - RNA, 69 nt, Homo sapiens
gcccagcccccgagggcgggacacagggggcccagagagggccgaaccggaggacaagccaggccacaa

SEQ ID NO: 48861 - RNA, 78 nt, Homo sapiens
agggcccccacaccgcgccgccaaggcaagggagggagagagcaaaaccagccgccgccagcgcgcacgcaaggaggc

SEQ ID NO: 48862 - RNA, 76 nt, Homo sapiens
caccccggccgccccacaggcaaggccacccccgccgcccaaggccgcgcagaacacaacacaagcgagggagaag

SEQ ID NO: 48863 - RNA, 91 nt, Homo sapiens
gaagcagccgacaggcggaggcccccgggcaagaggcgcaaacaagccaacccaggaggaaaaacgcccgggcgcgccaggcacagccaag

SEQ ID NO: 48864 - RNA, 69 nt, Homo sapiens
ccacggggccggacacaggggagaaagaagagagaccagaaacgagaggagaagaaaccagccagacag

SEQ ID NO: 48865 - RNA, 78 nt, Homo sapiens
gccagccgcaccagccgcccaagccgcacagccgcggcggcagcagcaggagagaaaagggaacaaccccaaaaaacc

SEQ ID NO: 48866 - RNA, 73 nt, Homo sapiens
ggccgcgagcccgaggccaggcgccggccggcgcgaagacgcgggggccgccccccggcagaaaggagcagaa

SEQ ID NO: 48867 - RNA, 63 nt, Homo sapiens
gccacgagaccgggagcggggggaagaccggggccgggccacaggaaaagaaaggaagagcag

SEQ ID NO: 48868 - RNA, 63 nt, Homo sapiens
caagggccaggggagcccagcggcgcgccggcagcaggaagggggaaaaggcaaacaagcaac

SEQ ID NO: 48869 - RNA, 79 nt, Homo sapiens
gaaacccagcggcccagccggagacgagagggacaggagcgagcaagcccagagcggccgccagcaccccggcaggagc

SEQ ID NO: 48870 - RNA, 81 nt, Homo sapiens
caaagccccgcgcaaagaccgcagaggccagcgcccaaggaggacaaaccaaccaggcacacccgaggccagcagcgaagg

SEQ ID NO: 48871 - RNA, 72 nt, Homo sapiens
acgcccaccaaagaggaaagcgaggaggagcgagcgcgagagagacgggccgagacccaaggccaagggaaa

SEQ ID NO: 48872 - RNA, 68 nt, Homo sapiens
aaacgagagaagacagggggcgcggggcagagcacggaggcagcagagagaggccagcaacgcgcagc

SEQ ID NO: 48873 - RNA, 81 nt, Homo sapiens
ggagccgggccgggccaggccgcccggagcggcgacgaggggcgccacacgcgcagcggaggagcaccggaacacagaagc

SEQ ID NO: 48874 - RNA, 72 nt, Homo sapiens
cacccgcaacaagccgccagcaccaagacccaccaaaaggggagcgggagcacagacccaggagaagaagac

SEQ ID NO: 48875 - RNA, 79 nt, Homo sapiens
agcggaaagccaccccgagccgacaagaaggacaaagagacaagccgagagaaagcaagcaaagggaagcggcaggagc

SEQ ID NO: 48876 - RNA, 67 nt, Homo sapiens
ggcgggcggaggaacagcggcagccacaggagccagaccgccccccgcagcagccggcccccgccca

SEQ ID NO: 48877 - RNA, 77 nt, Homo sapiens
aaaacaccgaacaaccccaggccggcagaggaccggccagaaaaaggccaaaaggaaggcaggaagaacaaaggaag

SEQ ID NO: 48878 - RNA, 54 nt, Homo sapiens
acacagggccaccagcaggacaaaaaacagacgggaacagaggggaagacccaa

SEQ ID NO: 48879 - RNA, 50 nt, Homo sapiens
gggacgggcagcgcccagggccccggccgggcacgccagccaaaacggcc

SEQ ID NO: 48880 - RNA, 74 nt, Homo sapiens
caagcgacaggggagggacccaggagaggagccaagcccaacgggacgggaaaacggccacagccaacgacgca

SEQ ID NO: 48881 - RNA, 73 nt, Homo sapiens
cgcaccgcgcacgagggcccccccagcggccccggggcgcgggcagccacgcccgcccaccaaagacccaaac

SEQ ID NO: 48882 - RNA, 72 nt, Homo sapiens
gcccgcccacccagggccggaaaagccaacgccggcgaaggcaccgacacgcggggccacgagaggggaccc

SEQ ID NO: 48883 - RNA, 58 nt, Homo sapiens
agacccaggacaccccgaagccgagaaagccggccccgagcgaggcaccggacccgac

SEQ ID NO: 48884 - RNA, 61 nt, Homo sapiens
caggaccaaaagggaaaagcaccggggaagaacacggaaaccggacagggacaggaaagaa

SEQ ID NO: 48885 - RNA, 87 nt, Homo sapiens
cagagaccggacagccccaggagaaaggcaccgcaagacagagagacagccccccaagcgccggccaagacaaggggcgcagagcgg

SEQ ID NO: 48886 - RNA, 81 nt, Homo sapiens
caccccagcacaaggagcgaggccgcgacaggggacgcaggaagaaacgacagccgcccacagaaacaaccgagccgaaga

SEQ ID NO: 48887 - RNA, 40 nt, Homo sapiens
gcacccggccgacacacggacaggacaaaccggcgaccac

SEQ ID NO: 48888 - RNA, 84 nt, Homo sapiens
gaaggcagagcggggcacccacccaagggaaagccaggccagaagaaggaaggccggggaggggacaggaaagacacaccaccc

SEQ ID NO: 48889 - RNA, 77 nt, Homo sapiens
gagccacgggaagcagagcaacgccaggagggagaagcaggccaggaggagacgaaagagggcacccacccacgaag

SEQ ID NO: 48890 - RNA, 56 nt, Homo sapiens
agaggcccaacccccaccccgcccaaggaggcccagcggcaggagaccggggaggg

SEQ ID NO: 48891 - RNA, 75 nt, Homo sapiens
cagcacacagcgaccgggagaacaagacgccccggcgcaggaacacaggacggccgaacacgacgcacacagaaa

SEQ ID NO: 48892 - RNA, 69 nt, Homo sapiens
acaccgagccagcaagcccccaacgaaagacagaacgcgggagagaacacaaccggggacccaaaaggc

SEQ ID NO: 48893 - RNA, 82 nt, Homo sapiens
cggcccggcgaagaaagaagggggagcggagagcgcaggcggaccgaggaagccgacaggaccgggggcacggaggggaagc

SEQ ID NO: 48894 - RNA, 56 nt, Homo sapiens
gcccagccgggaggagcagcagagcggaggggcaggggcgagcaccagcacaacaa

SEQ ID NO: 48895 - RNA, 82 nt, Homo sapiens
ggcgcgagggcgggggcagcggcaggcacagagggagaagagccccagaaaaaaagcacagagagacgaacagcgggccagc

SEQ ID NO: 48896 - RNA, 79 nt, Homo sapiens
cgaaaaccgagccacggacccagggccaagaggagagccagccgggcaccccaccgaacagacagacaccccaaacaaa

SEQ ID NO: 48897 - RNA, 65 nt, Homo sapiens
ccaggagacccgaccccaaggaacgcacaccagcaccagcccaccaaaccagcacgaccccggag

SEQ ID NO: 48898 - RNA, 82 nt, Homo sapiens
ggagccacgccccacgaccgccagaggcgggaggcggcagaagcagccagaggagggcacaggcggcgcggagcgcgccgag

SEQ ID NO: 48899 - RNA, 94 nt, Homo sapiens
gaagccccggcccagagaggcaggagccacgacccggggaccgaggcgacccgcggcgagagcccccccagagcgccagggcccgagaaggcgg

SEQ ID NO: 48900 - RNA, 65 nt, Homo sapiens
ggccggcccccccagcgcgagccacacgaaggcacggaccaagacccaaaaaagggggggggaga

SEQ ID NO: 48901 - RNA, 52 nt, Homo sapiens
ccgagggcccccaaaaggcgaccagccagcgcaaccacaaaccagacaacaa

SEQ ID NO: 48902 - RNA, 53 nt, Homo sapiens
ggcccaggaagaggcaagcaaccagaacaaagacaggagggcaggaaggacga

SEQ ID NO: 48903 - RNA, 73 nt, Homo sapiens
ccagagcgaggacgccggcagacagaagcgaaggggacagggggagaaccgccagggaaacccgggggacaga

SEQ ID NO: 48904 - RNA, 69 nt, Homo sapiens
ggggcacagacaccagaaacaacagacagcgggcaaaagacacgacaccgacacgcgaggcagaggacc

SEQ ID NO: 48905 - RNA, 53 nt, Homo sapiens
ccggccaggcgccagggcccaaggcgaggaggggaaggccggaacacgaagca

SEQ ID NO: 48906 - RNA, 79 nt, Homo sapiens
cccgcgccgacggcgccaaacacagggacccggcgccacaagaccaaggcgcgggccagacccgaggcgcccccccgga

SEQ ID NO: 48907 - RNA, 93 nt, Homo sapiens
cggcggcgacagccaggcccggaagcgagggcggccgcgccggcccaggaacaagacgccaaggagacgccgcagagacccccgggagcggag

SEQ ID NO: 48908 - RNA, 54 nt, Homo sapiens
cgggacacgcggcaggaacggacagaggcacaaaaggagaaagcagaagaaaca

SEQ ID NO: 48909 - RNA, 74 nt, Homo sapiens
cagacaccaagcaaacagagcaccaggaggcaccaagaacccggagaaaaccccacagcgaaagccacaccgga

SEQ ID NO: 48910 - RNA, 40 nt, Homo sapiens
caggaggcagcagacggacaccagcgggccacaccgcgca

SEQ ID NO: 48911 - RNA, 75 nt, Homo sapiens
gccgaggaagcggcgcccggcgccccccccggcggagagggacagagagaccgaagaggagcaaaagagacccga

SEQ ID NO: 48912 - RNA, 71 nt, Homo sapiens
ggagggggcaaccagaggggccaacggacgacaggcaggcagcccgaggcccacaagcagagaagagaaca

SEQ ID NO: 48913 - RNA, 61 nt, Homo sapiens
agacggacagcggggacgaggcggacgacgaccggccaacaagacggcaggagaacgagca

SEQ ID NO: 48914 - RNA, 79 nt, Homo sapiens
cacgaccaccaggcgccaggcagcaaacggagaggcgccggaagaagccgacaaaggcaagcagcaaaagccaggaaac

SEQ ID NO: 48915 - RNA, 81 nt, Homo sapiens
acaccaaccaacggggagcgagcgcgggcagcgccaagggagacaccacggcgccgccgggagacaaagacacagcagaca

SEQ ID NO: 48916 - RNA, 84 nt, Homo sapiens
cacagagcaccaacagccccaacccagaaagcagaggccagagcggagacagacgagagaaacccgaaaaccgaggcaacaaaa

SEQ ID NO: 48917 - RNA, 71 nt, Homo sapiens
gagcgcgaaacgcacgagaaggcgagcccaggcagagaacacagggagcgccgccgcgcgcgcgcccgcag

SEQ ID NO: 48918 - RNA, 79 nt, Homo sapiens
caaccgccacccaagccgcggagccaaaggagcaccgaaggagcagacagccccccggagcgcaaaaccgcggacgggg

SEQ ID NO: 48919 - RNA, 82 nt, Homo sapiens
cccagaaggcgccaccaggcggcgcccccgcagcccgcacccacccacgacaggacggacccgggccccagccagcagggcc

SEQ ID NO: 48920 - RNA, 76 nt, Homo sapiens
gcaagcacacaacaaacagaacgcaaagggaaagggagcagcaccggccacacccacagcacgaccggaacccagc

SEQ ID NO: 48921 - RNA, 77 nt, Homo sapiens
cgcgccaggcagacgggccagggaagacaacaccagggggaggccagggggggaccgggccccgaaggagggacagg

SEQ ID NO: 48922 - RNA, 78 nt, Homo sapiens
cacgccagcggccaggagcagagaagcacacaagagcaccccaacaaccagagaagagaggggggcgggccgagcacc

SEQ ID NO: 48923 - RNA, 58 nt, Homo sapiens
aacacagcagagaccgagggaacccacccccacccaccagagcacccgcaaagagccg

SEQ ID NO: 48924 - RNA, 87 nt, Homo sapiens
cgagaggaagacgagccgggaggaacggcccggaaacaggaggacgcgccgcgaggccgcggccaggccgagcccgccaccaggcca

SEQ ID NO: 48925 - RNA, 54 nt, Homo sapiens
gaggccccccagccagggaacgccacacccagcaagggacaaggaccggagacc

SEQ ID NO: 48926 - RNA, 82 nt, Homo sapiens
ccaacaggcggagaggcagcaacagggacacgggagacgggccaaccggcgaagccgacgagcccgaacagacgcaccagcg

SEQ ID NO: 48927 - RNA, 72 nt, Homo sapiens
agacagcaagagcacccgacccacaggccagagaggcggcccagggcagcagcacacaaacaaccacaaaca

SEQ ID NO: 48928 - RNA, 57 nt, Homo sapiens
ccgagcgcccagacacgacagagacccaacagaggaagccgcaagaaacgggacgac

SEQ ID NO: 48929 - RNA, 71 nt, Homo sapiens
caggggggaggcgccccagggacgagaggaagaccgaaggacaagaaacggcaggacacaaaacaaaggac

SEQ ID NO: 48930 - RNA, 75 nt, Homo sapiens
cgaaacgcacgagaagaggcaccagaccagagccccacagagaggaaacccacggcacacccaccggaaagccga

SEQ ID NO: 48931 - RNA, 72 nt, Homo sapiens
cacagcgcagacgcccgccggacacaggccgcaggcacaaaagacaccccgaggacggaagcccccagacga

SEQ ID NO: 48932 - RNA, 50 nt, Homo sapiens
ccccgcccaaggaggcccagcgggggcaaaacggagaggcccggccaaag

SEQ ID NO: 48933 - RNA, 75 nt, Homo sapiens
cgaagacaagcccaaagaaagggaaagagagggacgaaaccccagacacaagaaaaccagcaaacaggggaaggc

SEQ ID NO: 48934 - RNA, 77 nt, Homo sapiens
agcgcccccggcccaagaaggaccccagccaacagagcggggagaggccgccggaaacaccaggaggagggagcgaa

SEQ ID NO: 48935 - RNA, 76 nt, Homo sapiens
ccggaaacgcgcccggcacagcgcgcggacccaaagacagcagaggcaacgcagaagaagaccgaccgaaacgcgc

SEQ ID NO: 48936 - RNA, 93 nt, Homo sapiens
ccaccgcccacgggccgcagcagcgcagcgggcacagagcgggggcgcacggcggagaccggccccccaaacacccgagcccagccccgcccc

SEQ ID NO: 48937 - RNA, 73 nt, Homo sapiens
cacagagggggaaagccaaggaaaaacggagagccacaaaaaaggaagcgaaagagaaagacagcaaagaaaa

SEQ ID NO: 48938 - RNA, 37 nt, Homo sapiens
ggccagggccagagcaaagcccccggccacgcagggc

SEQ ID NO: 48939 - RNA, 71 nt, Homo sapiens
agacacaacaagacccacagcgggacagcaagcacaagccagacccagaaggcagagggggcgagggagga

SEQ ID NO: 48940 - RNA, 75 nt, Homo sapiens
cggcgcgggccgcggcccaccaccggcacacgagaccccgaccggagaacacacccgccgagcgccaagcaccaa

SEQ ID NO: 48941 - RNA, 72 nt, Homo sapiens
acacgccagccaaggcaagaaccgcaaaagcacccaacgccacgggaaccacaagggccgccacacccaggc

SEQ ID NO: 48942 - RNA, 73 nt, Homo sapiens
aaccgagaggaaccggggcaggaagaaggcgaaagacagacagaagcaagggggcaaggagaccagaccagac

SEQ ID NO: 48943 - RNA, 58 nt, Homo sapiens
ggaaacccagggaacacaccaggcaaagcggcagggccccagcgcccacggaacgccg

SEQ ID NO: 48944 - RNA, 109 nt, Homo sapiens
gcagggcgcgccgggacggagacgacaggcgggaggccccccgcgccgggaaccaggagaaaagaaagccagaaggaaggaagcaacgaaccaagaaaaaacggaacag

SEQ ID NO: 48945 - RNA, 73 nt, Homo sapiens
aaagccgcaccaacaggacgacaagaggcagcagcgaccagaaaagcaccaacaaggagaagggcgcagcaca

SEQ ID NO: 48946 - RNA, 68 nt, Homo sapiens
ggacggcggcgaagccaaaaggacgccaccacaagacaagacgagacagaacaccacccggggaaccg

SEQ ID NO: 48947 - RNA, 74 nt, Homo sapiens
aagaagaaaacaagaagagcagacaaaccccagaaaagggacacaaggacgagcaaaggaggacgaaaagacca

SEQ ID NO: 48948 - RNA, 74 nt, Homo sapiens
cccacccaaacaagaacacgggggaggggaacagcagcggagaacacggcagagacaaaacggaccaccgcgac

SEQ ID NO: 48949 - RNA, 80 nt, Homo sapiens
gcaaacaacgggccaagagcaggacagcacgagcagacagacaggaaaggaggacaaaaggaaaaaaaaaaagggaagac

SEQ ID NO: 48950 - RNA, 82 nt, Homo sapiens
cagacagccaggcgcccagaggggccccggagccagacacacgccacgggcacagccagaccggccagaaacgggcaggacc

SEQ ID NO: 48951 - RNA, 80 nt, Homo sapiens
cagccccaccagaccccggccgccgaccgcggccccgccggccgccggccgcgcgggggaggacagccccgggggaggcc

SEQ ID NO: 48952 - RNA, 67 nt, Homo sapiens
gggcagaaagcagaaggacagccccagcgcaaacacgagcgaagggacagggaccccaagagccccc

SEQ ID NO: 48953 - RNA, 80 nt, Homo sapiens
agcacaccaggaagccaagcagaggacagaagaagacagggacagggcagccgacagacgcagaaaacagacacacagcg

SEQ ID NO: 48954 - RNA, 74 nt, Homo sapiens
gacgaagaaagaaagaaccgagagaacgagcacccccgaagcacccaggagcagcgagaagagccagagaagaa

SEQ ID NO: 48955 - RNA, 87 nt, Homo sapiens
cgaacgccgcggccaaggagccgccaaagccagacgggacaagaacccaagaaacaggaaaaaacccaaaacaccaaaaggaccagc

SEQ ID NO: 48956 - RNA, 83 nt, Homo sapiens
aggagcccgaccgaagccggaaacgaggcaccagggaagagccagcaaggccagcggagaacagccgagggaggggaggcccg

SEQ ID NO: 48957 - RNA, 83 nt, Homo sapiens
cgaggcggccgaggcggccaggggaccgggaggggcgaaggcgggcggcagaggcgacagagaccccaccggggccccggaag

SEQ ID NO: 48958 - RNA, 85 nt, Homo sapiens
gacgaggcacagaggaaggggagggccagcccgcgaaccggccggagaaacggcgaggaaagagaggagccccggaaagaaaagg

SEQ ID NO: 48959 - RNA, 79 nt, Homo sapiens
gccgccaaggacgccggcccgggaagagaagccagaacggaaagccaggccagaagaaggaaggccggggaggggacag

SEQ ID NO: 48960 - RNA, 73 nt, Homo sapiens
aacccgcgaggaaagggaaggagcaagccggagcaggaggaagaaacaagagagcaacggagaaagaaaaaga

SEQ ID NO: 48961 - RNA, 35 nt, Homo sapiens
ggaccagcaaagcggaggcaccgagaagacgccaa

SEQ ID NO: 48962 - RNA, 79 nt, Homo sapiens
agggccgccaccaacagagaagacagagcaccaacgaggaaaacaaaaggagaagacaaaagagagaaaagaaaggaga

SEQ ID NO: 48963 - RNA, 79 nt, Homo sapiens
cggacaccaccccgacaccagaccagaaggaccacgggagaagcagacgagcgaaggacgcgcggcggcccccagaggc

SEQ ID NO: 48964 - RNA, 84 nt, Homo sapiens
ggggaaggaggcgcggcccgggcagcagggcggcagcgcccgagagaggagccgcccgccggagcagccgggggcgagccaggg

SEQ ID NO: 48965 - RNA, 59 nt, Homo sapiens
accagcaccggcccgaaacgccgaaaaacccaagggaggaaaaagcggccaacaggggg

SEQ ID NO: 48966 - RNA, 78 nt, Homo sapiens
gggcggagacagaagaggcgccaggacgaaggcccacgggcaagaacaggggccagggccagcccaggaggcggccca

SEQ ID NO: 48967 - RNA, 68 nt, Homo sapiens
gaaggaccaagaaccagggacagccacccggaggacgagggacgaagaaaagggcggaacaacacgac

SEQ ID NO: 48968 - RNA, 83 nt, Homo sapiens
acgccgccggcaggcccgcgcaccagagacgccccacaaccgcccgggcgcggacggggcccggcgaaccccggcgcggcaga

SEQ ID NO: 48969 - RNA, 71 nt, Homo sapiens
agcccagcagccccagcaacgcagacagaaccagacagcaaacgagcccgcgcgcccaacagcagggagga

SEQ ID NO: 48970 - RNA, 54 nt, Homo sapiens
aacacagccaacacgaggccaggaagacacggccgaagcacacgagcggaggac

SEQ ID NO: 48971 - RNA, 79 nt, Homo sapiens
gaggaacagaaaccgaagagaaaggccaacgagaacaagcacagggggggaggagggacaacacacaacgcaggcgcac

SEQ ID NO: 48972 - RNA, 80 nt, Homo sapiens
aggacaggccaaacggaaagacgaaggggccccagagccaaggaggaaggggccggggagcgcagggagaaagcgaaaca

SEQ ID NO: 48973 - RNA, 75 nt, Homo sapiens
gccaccgggcagcacagaagaggcaagggcggaccggccacgcaaccccgccccgggcaaacgacccgcccagcc

SEQ ID NO: 48974 - RNA, 72 nt, Homo sapiens
cggcacccccccgcgcgcgggcccagggcccacaacggcaggccacagcgggaaaggggagcccgaagaacc

SEQ ID NO: 48975 - RNA, 56 nt, Homo sapiens
aaacaccacgcgcggaaacacgaaggacccggcgggggcaaggaagcacggaggcc

SEQ ID NO: 48976 - RNA, 55 nt, Homo sapiens
ccgcggcaccgaaccacaaggaggacgagacaggaagggaaggggcggagacggg

SEQ ID NO: 48977 - RNA, 78 nt, Homo sapiens
ggagcggacgcgggaggaggcggcggcggcgaacgaaaacaaacggaagagagggcagcaagaaagaacaagaaagcg

SEQ ID NO: 48978 - RNA, 73 nt, Homo sapiens
gggaaaggagaggaaagagacaggcaacaggaagaagaacccacaggggccaacagaggaaggaacaaaggaa

SEQ ID NO: 48979 - RNA, 47 nt, Homo sapiens
caccgccgcaccaaacaggccaccccacaggaaggccgcggaccccc

SEQ ID NO: 48980 - RNA, 73 nt, Homo sapiens
cagaaggacacggagaacccagcggacaggccacacgcaccaggcagcaaaaaccgagaagcggcccacggga

SEQ ID NO: 48981 - RNA, 74 nt, Homo sapiens
agggccgcgcgggagcccgccgcccgccgcggccaaggcaagagcccagaaaccaggcgccaggaacagcggga

SEQ ID NO: 48982 - RNA, 61 nt, Homo sapiens
caaccagcagcaacaaggaaacagcaggcgaccccaagaagggacagcgacggaaaacaga

SEQ ID NO: 48983 - RNA, 68 nt, Homo sapiens
gccgcccgggacagaggggacgccaggagacagaaccacaagcagccggaaccccacggacccgcagg

SEQ ID NO: 48984 - RNA, 91 nt, Homo sapiens
ggcgccgagaggccggcgggacgcgggcgccaggaccggccgaacgcagagcacaggaagccggagaaccgaaggaccgcggaccaggcgg

SEQ ID NO: 48985 - RNA, 75 nt, Homo sapiens
caggcccgaagcgcggacgcggacgggaagaccacaagaggggcagcagagccccagaagaaccccagccaaaac

SEQ ID NO: 48986 - RNA, 77 nt, Homo sapiens
gagacaacaagagagcaaaaacaggcgaggaaaagcacccagcagcgaagagcaaaggacccaccacgagaaacaag

SEQ ID NO: 48987 - RNA, 76 nt, Homo sapiens
ggaaagcaggagcacagacggagaggggaaaaaagacgaggcaccccgcccggcagccaccagagaaggcaggaag

SEQ ID NO: 48988 - RNA, 74 nt, Homo sapiens
cagaagaggagagagagcaagagaggaagaagaacgacccgcccggggcagcaggcccgcaagggccgagaggg

SEQ ID NO: 48989 - RNA, 78 nt, Homo sapiens
ccggaaccaggagcagaaaaagagcgacgaaaagacaggaggggaaggaagggccccacaccaaaccgccacgcaaca

SEQ ID NO: 48990 - RNA, 78 nt, Homo sapiens
gcacgacgcagagaaccgcaccgacggggccaccgagcagggggcgggcggacccagccccccgcggaggccaagccg

SEQ ID NO: 48991 - RNA, 59 nt, Homo sapiens
agcggacccgcagccccaaaacccagagcccagagaaagaggacaggcagaagccggac

SEQ ID NO: 48992 - RNA, 62 nt, Homo sapiens
gacagaacagggaacggaaacgccggccaaaccgaacacaccaagggcagcagcccagccaa

SEQ ID NO: 48993 - RNA, 82 nt, Homo sapiens
ccgaccccgcggagacagcgagacccgccaggagcaaagagcccaaaaggcagagcgaggagagaagaaggagggaaagcca

SEQ ID NO: 48994 - RNA, 70 nt, Homo sapiens
ggaacggggaagggccagccgccagggggacaaccggacgcaaggcccagcagaggggagaggacgggga

SEQ ID NO: 48995 - RNA, 59 nt, Homo sapiens
gacgcgggcaacagcgagggcaaagagcggggcccagggaaaaaaaaggaagcacggag

SEQ ID NO: 48996 - RNA, 64 nt, Homo sapiens
aacaaaccaaagggcaaggcggacacaaccaagggcacaacaagccagcaacagaaccccacgc

SEQ ID NO: 48997 - RNA, 70 nt, Homo sapiens
gcccaccgggcccgggcaccacgggcggcgccaggccggcccagccagggagaccagggggcaggggagg

SEQ ID NO: 48998 - RNA, 69 nt, Homo sapiens
cgccccagaaagagacaacacaggaacaagcaccacagaggaccaaaaccaggcacaggcgcacccgca

SEQ ID NO: 48999 - RNA, 76 nt, Homo sapiens
caggagaacaagaccacgggcgcggaagagaccgacaaccggacgagcagaaccggaagcaccgccccagccgacg

SEQ ID NO: 49000 - RNA, 50 nt, Homo sapiens
gcggagaagcgcggaggggaaagccggggccccggggacccgcggcacgg

SEQ ID NO: 49001 - RNA, 79 nt, Homo sapiens
gcgcgccgcccggcgccggcccgcccccgcagcagcgccagcccccagaaacccacaaagccccgaggggcagggagcc

SEQ ID NO: 49002 - RNA, 85 nt, Homo sapiens
aaggcggcgcgcgagcggagcaccgcgacaccagaggaccagaacccacgagaaacagacgagccaaccagaccccaggagccaa

SEQ ID NO: 49003 - RNA, 84 nt, Homo sapiens
cccccgccggcggccacacgccacgccaccagcggcaaggggccaggagcccccgaaggagcgacaaggagaaagccggagagc

SEQ ID NO: 49004 - RNA, 69 nt, Homo sapiens
acggcccggaaacaggaggacaaaagcaccgaagggaagagacgaggcggaaacccgaagaacggcgag

SEQ ID NO: 49005 - RNA, 83 nt, Homo sapiens
accagccgcccagggaagcggggcgggcaaccagaagggcccaggaagggaaaaggccgaggcacagcgggaagaccgcaaag

SEQ ID NO: 49006 - RNA, 61 nt, Homo sapiens
ccccagcaggaaacccagagaaacccaacgaccaacaagacccagccagaccccaaccagc

SEQ ID NO: 49007 - RNA, 79 nt, Homo sapiens
ccaaggccgagagccggaacaaacgagggcccgggaggaccgacgcagccaggaggaagggaagaacaaggaaacagac

SEQ ID NO: 49008 - RNA, 91 nt, Homo sapiens
gcgagagagccggggaggcggagcccgcccgccggcagcgccgcccccagggagggagccgcagccgaggagcccagaaacaagagcacca

SEQ ID NO: 49009 - RNA, 70 nt, Homo sapiens
ccgagaaaacgaggccccgagccagccccgacagcgggaaccgaggaccgggggaaagcaaaaaaaccac

SEQ ID NO: 49010 - RNA, 56 nt, Homo sapiens
ccaaagggaaaacagaaacaggcaaaccgacaccagcgacacaagcgcgagggaac

SEQ ID NO: 49011 - RNA, 72 nt, Homo sapiens
gacgccaggaggcggggaccccaaagagcagcccgacggccaggaggcgaagagacgaggaagcccaggagc

SEQ ID NO: 49012 - RNA, 73 nt, Homo sapiens
cggagagccaaaggacggacgagcgcgggcaacaaaggagcaagaggggggggcccccccgaagaaaggaacc

SEQ ID NO: 49013 - RNA, 72 nt, Homo sapiens
accgagcaaagaacccgaagaaagaggcaagaagaagccacacacagaagacccaaagagaacacaggagag

SEQ ID NO: 49014 - RNA, 78 nt, Homo sapiens
cgaaaagacaggagggaggaacagacaccgagccagcaagcccccaacgacagcagcgcccaaggacaagccaagcgg

SEQ ID NO: 49015 - RNA, 73 nt, Homo sapiens
agggccaaagaagggagagagaccggccccccccccagaagagaacgacccaagagacccaggaagaagggag

SEQ ID NO: 49016 - RNA, 81 nt, Homo sapiens
cggagacagcccaaaacccggaagagcgccccaggagaaacaacccagcgacaagcgcccccccccaagaccaccccgaag

SEQ ID NO: 49017 - RNA, 68 nt, Homo sapiens
cgagacccaagcagccagaaagccagcgcgcaggcccggaggagcgggaggccagaaacaaagagcag

SEQ ID NO: 49018 - RNA, 80 nt, Homo sapiens
ggcgagaacccagcagccagaaccaaaaaggagagcgggaggaggcagcgcacccagacaccggggcccaaggaggggac

SEQ ID NO: 49019 - RNA, 75 nt, Homo sapiens
gagaaaggaaaaagaacgaaacaagaaggcccaaacaggccaacacaggaagggagcaagaggaccagcgaaagc

SEQ ID NO: 49020 - RNA, 77 nt, Homo sapiens
ccaagccacggaccagagacacgccaagcagccagcccaggagaggagaagcaaaacacagaggaaaagggaaagag

SEQ ID NO: 49021 - RNA, 70 nt, Homo sapiens
agaccaggaaagacaggaggccacccccaaagaaaagggcgaaaacacagaaacaccaaagaaaagacaa

SEQ ID NO: 49022 - RNA, 71 nt, Homo sapiens
aacgaggcaccacaccgcacagcaagcgggcaggaaacaagaacaacgggcccaacaccacgagcagccca

SEQ ID NO: 49023 - RNA, 76 nt, Homo sapiens
ccggccccccgcgcccccgcgcgccgcggcccggacccggccgcccgcggcgcagcgcggcgaggcgggaaaacgg

SEQ ID NO: 49024 - RNA, 65 nt, Homo sapiens
aacgccgaaacggaaagcccaagaggagacgacaacaccagaagcagccgaaacgaaccaagaac

SEQ ID NO: 49025 - RNA, 69 nt, Homo sapiens
ccaacagaagaacgagaggaaaaaggacacccgccaagcccccacaacgggcagccccagcagaaaaac

SEQ ID NO: 49026 - RNA, 82 nt, Homo sapiens
cagaggcgacgccggcggcaagggggcggcccaccgacacacgcggacgccccgccgcagggcggagaacggaaaagcacca

SEQ ID NO: 49027 - RNA, 80 nt, Homo sapiens
agaacagaggaccgcggggacgggagacccaaggccaccaggcaccggacagggaggaaccggccagcgggaggacaggc

SEQ ID NO: 49028 - RNA, 72 nt, Homo sapiens
agccacacgacgggaccgacacaggaaaagccgaagcaacgccagaaaccacggagagcggagaagaaaagg

SEQ ID NO: 49029 - RNA, 64 nt, Homo sapiens
cggcagcaaagagggaacagacaacggcaagcggagaagagcaaggccgaaccgagaggaaggg

SEQ ID NO: 49030 - RNA, 77 nt, Homo sapiens
ccccccccccccccccccccccccccccccccccggccgccggagccgcggggcgagcgccccgacaagggaccggg

SEQ ID NO: 49031 - RNA, 52 nt, Homo sapiens
acagggaaaggaaccgcggacaggcagcaagaaaacacggcaggggaaaccc

SEQ ID NO: 49032 - RNA, 54 nt, Homo sapiens
ccgggaaacgccgcaacgacaggggacggaaaaggcgcacacgacccggagaac

SEQ ID NO: 49033 - RNA, 74 nt, Homo sapiens
aagggcccagcggcaccaggcccacacccaaggcacacgaaagcagaagcgccagcaagaaagaacagaagacc

SEQ ID NO: 49034 - RNA, 76 nt, Homo sapiens
ggaccaggccccaagaaaggccaagggcagggagccagcaccggccaacgggcggagcacgggagggacagcacag

SEQ ID NO: 49035 - RNA, 77 nt, Homo sapiens
agagagcagcgagaaaccagaaaacacggaacaaagaaacggaggaagcagcaccggcagcagaagaggaaaagaaa

SEQ ID NO: 49036 - RNA, 77 nt, Homo sapiens
acaccaggcaacacagaacaccgccccaagccagaacgcccgcacacggacacagccgaccgaagggaaggggaagg

SEQ ID NO: 49037 - RNA, 78 nt, Homo sapiens
gccgacagcggccaacccccacccagcccagcaacggcgaagccgacgagcccgaacagacgcaccagcgggaggaag

SEQ ID NO: 49038 - RNA, 73 nt, Homo sapiens
gcggcgagcggccggggcagcaacggggcggcacacaaggagcgaagggcagggagaacgccaggcacagcac

SEQ ID NO: 49039 - RNA, 73 nt, Homo sapiens
ccgggagcacgcacccacgaggccggcacaaaccgagccggcagagaccaggaggagaaagccacagcggaga

SEQ ID NO: 49040 - RNA, 91 nt, Homo sapiens
gcacgccgaagccaccagaccaccacaccccaccggccggagcacgccaagcagcccccacgcccggaaacggcgcagcccgcccccaagc

SEQ ID NO: 49041 - RNA, 43 nt, Homo sapiens
aaaggcgacagccccggaacaccaggagcgaaaacgccacaac

SEQ ID NO: 49042 - RNA, 70 nt, Homo sapiens
aaagccagaccacggacggaagacaaaagagggaagaaacccgcgccgagcgccaacggggcggcaccaa

SEQ ID NO: 49043 - RNA, 64 nt, Homo sapiens
aaacacaaacaccgccgccgcggagaggccggaaggaccacggaaaccccaccaagacagcaac

SEQ ID NO: 49044 - RNA, 73 nt, Homo sapiens
aaggagccaagaaagagaagaggcgggaagcgcgggagaaggggccaagaccaccaagcaacaacaagaaaga

SEQ ID NO: 49045 - RNA, 86 nt, Homo sapiens
cccggagcccccagcgcagcggccgcgacacaccccaagcagcccaccaggggcggacaccccggaaaacccgcccaagcaacaga

SEQ ID NO: 49046 - RNA, 114 nt, Homo sapiens
gacggagccgccacccagagcgcacggcgacgccccaggggaaaacccccgggaccaggaaccaaaggggagaaaaggaccggaaaggaaaacagagaaaccaggaaaagaaac

SEQ ID NO: 49047 - RNA, 77 nt, Homo sapiens
ggaaaagggccaaggggaaggaacagaaggaccacaggggccgcaagccagaagaaacccggaccagaacgaagcaa

SEQ ID NO: 49048 - RNA, 54 nt, Homo sapiens
gccacacgcagaaagccacacacagacgaaaccacagggagaaaacgggccgga

SEQ ID NO: 49049 - RNA, 75 nt, Homo sapiens
cccaaggaaaccagagaccagaagaggagaacccacgcgaggcccggcccacaacaggaccgacgaagaaaacag

SEQ ID NO: 49050 - RNA, 82 nt, Homo sapiens
cggacacaagagaacccaccgaccccccagcccacacccagggcccccaaacaaaggcgcagccggggccggaccgggcagc

SEQ ID NO: 49051 - RNA, 84 nt, Homo sapiens
caaaagccaagaggaggacagcgcacacagcaagcacgagaaacccgagaggagcaggagcaaccgacaggcgggccggacagc

SEQ ID NO: 49052 - RNA, 64 nt, Homo sapiens
accacaagacccaggccacgccgagccgccaggcagcaggacggaagcaggagaacaaaaacac

SEQ ID NO: 49053 - RNA, 71 nt, Homo sapiens
gcagaagcaaagcgaagcaaagcggagaggccacaagcggcgagcgaccacaccggccacagaggaagcgg

SEQ ID NO: 49054 - RNA, 73 nt, Homo sapiens
gaacaccgcgagagcgaacgagaaaacccaggggaaacaacacgggagccaaggagaaagagaagcggaacca

SEQ ID NO: 49055 - RNA, 76 nt, Homo sapiens
gggggggcggcccggccccgcagggcacgcggaccacccacccaaagagcaccgacacccacacgcacacgaagaa

SEQ ID NO: 49056 - RNA, 67 nt, Homo sapiens
gacagcacaacaccgcacggggagccaagccgagaagacaggcacaaaagagcacaagaacccaagg

SEQ ID NO: 49057 - RNA, 74 nt, Homo sapiens
caccccaggccaccaccagcccgagacgagaaccccacacaagagcccggcgaacagagacgggaccaccaggc

SEQ ID NO: 49058 - RNA, 59 nt, Homo sapiens
ccaccccgaaacgccccgaaaagacgggcaacaggcaggggacagcaggaagaaacacc

SEQ ID NO: 49059 - RNA, 72 nt, Homo sapiens
acaacggcaaaacggaaacccacagccgaaaacaaaggacccacgacgagcaggagagaagcaaaaggagaa

SEQ ID NO: 49060 - RNA, 96 nt, Homo sapiens
caagccacgaacccgcgaccaggcggagagcccagaaacagggcacaaggccaagacggccaagggagccacagggcccagagcacggaaccggcc

SEQ ID NO: 49061 - RNA, 87 nt, Homo sapiens
ggaaacaaacgaaaccagagaaaaaaaggaccaagcaagacaaaggaaacaagagcagcccgacggccaggaggcgaagagacgagg

SEQ ID NO: 49062 - RNA, 65 nt, Homo sapiens
gaccggcggggcccgggcaagaaccggaagacaggcaggagacagcaacaaggaccacagagaca

SEQ ID NO: 49063 - RNA, 37 nt, Homo sapiens
gccgcgcgcggcaccaccaagggaccccgacggagag

SEQ ID NO: 49064 - RNA, 80 nt, Homo sapiens
gcagcgcgaccgggaggcccaggaggagcaaccgaaagaacgacaagcagaaaagaagcacccagaagcagaaagaaggg

SEQ ID NO: 49065 - RNA, 99 nt, Homo sapiens
ccccccccacccgggccggcgggggagcgaccaggagcgccgaagaccagcgcgagagagagggcgggaaacgggcgcgcagcagaagcgccgcccccg

SEQ ID NO: 49066 - RNA, 61 nt, Homo sapiens
agccagcaacaccgccccgggcgcccacgcccgcagccccacacggacagcggggagggag

SEQ ID NO: 49067 - RNA, 84 nt, Homo sapiens
agcaccgcagaggcaaggggccaccaggaggccagggggcgccaggaacccaacagagccacgaagggggagagaagcgccagg

SEQ ID NO: 49068 - RNA, 68 nt, Homo sapiens
gaagaaaaacgcgggggacacccagccacacgcggagaagagaaggccaaagcggcggagagcaacga

SEQ ID NO: 49069 - RNA, 76 nt, Homo sapiens
cggaaagacgagggagaaagggacccaggaagagaagaaagaggacaacagacgggagacagccaagccgaagccc

SEQ ID NO: 49070 - RNA, 71 nt, Homo sapiens
agcgaaggacccagcgaggaggcagaagaggcggccacccacgagccgacggcaaacgccagggagccacc

SEQ ID NO: 49071 - RNA, 40 nt, Homo sapiens
ccgggcggagcggacgggaggaggagcggccgcagaaggg

SEQ ID NO: 49072 - RNA, 37 nt, Homo sapiens
gcaggggccgcgggaagaccaggggagcaacccacca

SEQ ID NO: 49073 - RNA, 81 nt, Homo sapiens
accaggcccacccagggcagggcgagcgccgcccaaggaccaccaccgcgaagcacgagggcggagcccgagacgggccaa

SEQ ID NO: 49074 - RNA, 71 nt, Homo sapiens
acccggccgggaggaagccgcaggaccggaccaggagccaacagggagggaagccggaagcggcaacagca

SEQ ID NO: 49075 - RNA, 76 nt, Homo sapiens
gcaccagccaaacccagccgcaccaccgcacgcaggggaaccagagacaagcagagcaggagaccgcaggacgggc

SEQ ID NO: 49076 - RNA, 57 nt, Homo sapiens
ggggccccgcgccgcggccgagcagcggaaaagacggggacgagcggcagacccacc

SEQ ID NO: 49077 - RNA, 57 nt, Homo sapiens
gacgccccggaagcaagcaagaggaggaacacacacaagcccggaggcagaggacgc

SEQ ID NO: 49078 - RNA, 83 nt, Homo sapiens
cggaaggaggaagcaacccacaggacacaggaacgccacaagaaacaacagcaaggcgagggccacgaaacagaggagaagaa

SEQ ID NO: 49079 - RNA, 63 nt, Homo sapiens
aaccggaaaccgccaaaaccccccacacaccccgccggcacccacggagcgagagagacccgc

SEQ ID NO: 49080 - RNA, 76 nt, Homo sapiens
cccagcgggacgggcaacccgggcagagggacccccgggagacaaccccgccccgccgcccagagaaggaccacca

SEQ ID NO: 49081 - RNA, 78 nt, Homo sapiens
cccagggacccccagaaggaacggagacaaaaacggcccggagaggagcgagaaaggagcacagacaaaaaagagcca

SEQ ID NO: 49082 - RNA, 72 nt, Homo sapiens
gcccgccggcacgccgccagccccgggggccacgagcgggaagggcgggaaggagaacaaagaaaaacacaa

SEQ ID NO: 49083 - RNA, 74 nt, Homo sapiens
aagcaccacgaggcgccagacacccccccaaggccaaagaccgcccaggcaacacgacaggcacggaccccaaa

SEQ ID NO: 49084 - RNA, 73 nt, Homo sapiens
gccgagcgcgcggaggcggaggcggggcacaggaagagggcggcacgcggccagagagcacaacgggaggaag

SEQ ID NO: 49085 - RNA, 68 nt, Homo sapiens
gcgacccgaagcaagagggaaaagaacccggaccccgacggagagacaaagaagacggagggggggcc

SEQ ID NO: 49086 - RNA, 70 nt, Homo sapiens
ccaccaaggagaggagcccaagaggcacgcaccccacaaaaaaaccaagcaaagaaggcccgccagcaac

SEQ ID NO: 49087 - RNA, 112 nt, Homo sapiens
caccaccacgccagccgcaccagccgcccaagccgcacagccgcggcggcagcagcaggagaggccccgagccccggccccaaagacccaaaacagagacaccccccagccc

SEQ ID NO: 49088 - RNA, 77 nt, Homo sapiens
ggagcagcaaggaaaaggaaaccgcccgcccccagggagaacaaagaaagaggacacaggaaagccagcaaagggga

SEQ ID NO: 49089 - RNA, 74 nt, Homo sapiens
ggaggagaagaagagaggcacaggaggaaaggagaaagaccaaacaggacgggagagaagcaaccaccagggcg

SEQ ID NO: 49090 - RNA, 71 nt, Homo sapiens
ccacaaacgaagaaagaacacaaaagcaacgagagccggaagaagaacaccgacgaccccgccgccaccga

SEQ ID NO: 49091 - RNA, 71 nt, Homo sapiens
cagcaagacccgagcccagacaccgccgcccagccacaggaccgacaccgaaaaaggcaaccacgaggaaa

SEQ ID NO: 49092 - RNA, 53 nt, Homo sapiens
gcaaccgacacagaagcacggagcccaaggcggcggaagcagaaggggcggga

SEQ ID NO: 49093 - RNA, 77 nt, Homo sapiens
cggcacgagacaggaagggaaaggagagacagcacaagaaaagggaacagcaggccaggagcgacacaccacacaac

SEQ ID NO: 49094 - RNA, 73 nt, Homo sapiens
agcccgggcgggggcagagccaggacaagacaggaggacacccgaaacaagggggcgcgacacaggacaaaac

SEQ ID NO: 49095 - RNA, 75 nt, Homo sapiens
gagcaaacgccgcggccccagggcggagaacggaaaagcaccaggaagcagagaggaccgcagaagggaaggaga

SEQ ID NO: 49096 - RNA, 71 nt, Homo sapiens
cccgccccgcggggcggcgagaaaaggcccggggcccgggacgagggaagacaggaagggaaggggcggag

SEQ ID NO: 49097 - RNA, 71 nt, Homo sapiens
acggaccaaagcggagagagaggagaaaagggaaagggagcagcaccggccacacccacagcacgaccgga

SEQ ID NO: 49098 - RNA, 83 nt, Homo sapiens
ggacaggaggagccagggcccggcccgaaaggagagccgcgaacagaagcgaaaacagacgaagggcgcggaagaagaacagg

SEQ ID NO: 49099 - RNA, 70 nt, Homo sapiens
gaagacaccaaaaagcaaacggaccagaccgaccaccaaaagaagcaagaggcagcccccggagcaaggc

SEQ ID NO: 49100 - RNA, 40 nt, Homo sapiens
ggacccagccccagaacgaggccgagcccgaaacaacccc

SEQ ID NO: 49101 - RNA, 79 nt, Homo sapiens
ccacccgaaggacccggagagaacaggacgaacccgggcagccgcccggccaggggccccagacacgacgcccccggcc

SEQ ID NO: 49102 - RNA, 62 nt, Homo sapiens
gcccgcgccgggcgccggcaccgcggcaggaacaacaggagacaaagaaaccagccaacaga

SEQ ID NO: 49103 - RNA, 76 nt, Homo sapiens
accaggagaagcagacgaagccagagcagaaaagagccaggaaagggaaaccgaaacgaaccagcggaagaaacag

SEQ ID NO: 49104 - RNA, 80 nt, Homo sapiens
aggacggcagcacacaacaaaacacaggagggggaacaggacgggagaagagaaaccacaacaacaaagagaaaaccccg

SEQ ID NO: 49105 - RNA, 118 nt, Homo sapiens
gaggggaccagcagaggaagggccagcagcaaaaacccgaccaagcaggcaggaggaagaggaaagggccaaccccggaagagaaggggaaagcagccaggccaagacgagaggaaca

SEQ ID NO: 49106 - RNA, 74 nt, Homo sapiens
aggcggccggccccacagggcccacaagacccccaaaccccggcaccggagggaggcacccccgaacaacaacg

SEQ ID NO: 49107 - RNA, 73 nt, Homo sapiens
cgccccaggccaagagggacccacccggcggcacacagagaaaaaaagggaacaaaacacagcaagcagacaa

SEQ ID NO: 49108 - RNA, 101 nt, Homo sapiens
agccagaaccaagacacacagggagccagcaccgagcccccgggccagcagaacacgcccaggacgggacagaagccacgagaccgccaaacacccgcacg

SEQ ID NO: 49109 - RNA, 68 nt, Homo sapiens
agacgcgagacccgcccgacacaccggcacgaaaaacccgcaggcaggggcaggaaccagcaggccac

SEQ ID NO: 49110 - RNA, 86 nt, Homo sapiens
acccacacgcgccccacccagccagggcagcgccagcacagccagacgcaagggacgaacagcggggacgccccagcagaccgccc

SEQ ID NO: 49111 - RNA, 89 nt, Homo sapiens
gcgggagaaggcgcaacgcggcgcgcgcaagacaaggcccgcgggccaagacaaacaccacacaagaccccaggcggggcgaggagccg

SEQ ID NO: 49112 - RNA, 72 nt, Homo sapiens
gccgaaggacggaagcggacacgggagcggcgacagacacgggaagcaagagaacggcgcagcggacaagga

SEQ ID NO: 49113 - RNA, 98 nt, Homo sapiens
gccgcgggacaagaaaagcgggcaaccgaaagagacccccagaccaggaaagacagggacagcggaggaacggaggccagagggaccaagaagaaccc

SEQ ID NO: 49114 - RNA, 56 nt, Homo sapiens
cacgccggaaaaggccgaagggcacgaaagaggcaagagagacaaagagagaagcg

SEQ ID NO: 49115 - RNA, 79 nt, Homo sapiens
gaaagagagaggaagccagcagccgacgaaggccccagggaaaggaccgaggcaggaaagaggccagacgcagggaccg

SEQ ID NO: 49116 - RNA, 76 nt, Homo sapiens
aacgacagcgacggcacgccgaagcaccgccggggggaagccccgcgccggccgcccggggcccaccggaccgggc

SEQ ID NO: 49117 - RNA, 62 nt, Homo sapiens
ggaagacgccgcgccaccgagccggaccggagacggggccaacagagcccaccgcacccagg

SEQ ID NO: 49118 - RNA, 70 nt, Homo sapiens
ccgcgagcccccgccgcgccccacgccggcacacacacagagacaaggccgacgcgcacgaacacggggg

SEQ ID NO: 49119 - RNA, 48 nt, Homo sapiens
gaaaggaagagagccacgggaagaagaaccagaaagacagccccgaac

SEQ ID NO: 49120 - RNA, 72 nt, Homo sapiens
gagcagcgcaccacgcgacccacgggaaaaaccacgcggagaagggagagacaacaaaaaacaaggaaaggc

SEQ ID NO: 49121 - RNA, 79 nt, Homo sapiens
gcaacaccagggaggccaagcgaccacccaaagaaggccaggcagcgcgaccaaacgaaaaaggcacagaagcgcgcag

SEQ ID NO: 49122 - RNA, 68 nt, Homo sapiens
cgggggaagaccggcaaacccccggccgaagaacaggacaacagaaagccgggaaggaccagaagagc

SEQ ID NO: 49123 - RNA, 69 nt, Homo sapiens
gccagcgcaagaggagccaagcaaacagaagcgcggccaagagagggagagaccagaggcgcccccacg

SEQ ID NO: 49124 - RNA, 72 nt, Homo sapiens
gcagcaacagcagcagcaacagccgaaggcgaccccgccagaacacccaggcgacagaggccgcgaagcgcc

SEQ ID NO: 49125 - RNA, 76 nt, Homo sapiens
ccccgcacccccgcccgacccgggccccgccagcccccggcggaaagcaaccagccaagggaccgcagggagacgg

SEQ ID NO: 49126 - RNA, 73 nt, Homo sapiens
agggggacggacacgcccagccccgggcacggaaaggaggaggaagccaagaacgggagcgaagccacgcagc

SEQ ID NO: 49127 - RNA, 85 nt, Homo sapiens
cggccgccaaaccccagcggaacccggccacagccagcagcagagcgagccaaggcagcaaggagacgacagccggagagcgggc

SEQ ID NO: 49128 - RNA, 69 nt, Homo sapiens
gcccccagccgcagccacaacaccggcaggaaccaccaggacagaggccgagggcgggggccggggggg

SEQ ID NO: 49129 - RNA, 57 nt, Homo sapiens
cagcgcccgcagggcgccggcggagggaaggcgcgggaggcggccagggaccccaca

SEQ ID NO: 49130 - RNA, 74 nt, Homo sapiens
aggcggaggacccagaaacgcagggcccagagagcaaagcccgaggacggacccggccaccagacagaaccaga

SEQ ID NO: 49131 - RNA, 58 nt, Homo sapiens
aacacaggacacaacggaagagcaccagcaaggaaacgaagaccgagaccaaacaagg

SEQ ID NO: 49132 - RNA, 76 nt, Homo sapiens
agcaaagagccagcaagaacaccccaaggccagaaccaaacagacgacaaagagcacggacaaaccggcgaccaca

SEQ ID NO: 49133 - RNA, 56 nt, Homo sapiens
ggaagaacccaggcagcagacagcggacgggaaaaggcaaacaagcagcaaggacc

SEQ ID NO: 49134 - RNA, 77 nt, Homo sapiens
ccccgcccgcccgggacccgcggccccgccgcgcccgggcgcgccaggcacagccaagagcggaccggcagcggcca

SEQ ID NO: 49135 - RNA, 75 nt, Homo sapiens
aaaacggccgaaaaaaagcaccagaacagaagaggaacgacagcgccaccccccagaaggcgacaacagaaggca

SEQ ID NO: 49136 - RNA, 78 nt, Homo sapiens
ccgggcccgggaaacaggaggagcaagcgacccagcgagggaaaacggaggggaaaacaccccaggagaagcacgcac

SEQ ID NO: 49137 - RNA, 80 nt, Homo sapiens
gcgacagccgcgccaggggaaaaggaacaaccgaaggagaaggacaccaagccgaacagcgagcagaaccagccaaagcg

SEQ ID NO: 49138 - RNA, 77 nt, Homo sapiens
ccaacaacgaaaaccggaggggaacggcgcggagcggagcggcaggacacacaggcaagacccagaccacgcccaca

SEQ ID NO: 49139 - RNA, 72 nt, Homo sapiens
aaggccgccggacagcgcagagccaagacggagaaacaagccagggcaggacagcagcccgcaacaggccgg

SEQ ID NO: 49140 - RNA, 86 nt, Homo sapiens
ccgcgcgggccgggaggggacggccgccggagccgcgaggccaagaaggacgcccagagaccggcagcgcaaacacccggggagga

SEQ ID NO: 49141 - RNA, 80 nt, Homo sapiens
caccgggacggaccgagaccggaccgagagcggaccgagagcgcgaaacgcacgagaaggaagcaaagaaccgcccgcag

SEQ ID NO: 49142 - RNA, 77 nt, Homo sapiens
aaaagggcagggacagcgcaggcagcaggcggaggcagggcgagaccgaccacgcaggcccgacccccagcaagcga

SEQ ID NO: 49143 - RNA, 69 nt, Homo sapiens
aagcagagcgcagaggcccagcaacgggagcagaaggaaaaaaaagcagaaacggcacaacagcagcga

SEQ ID NO: 49144 - RNA, 93 nt, Homo sapiens
gcaccgcagaggcaaggggccaccaggaggccagggggcgccaggcagccggcacccgcacaacccagggggccgaacccagaccaacaaaag

SEQ ID NO: 49145 - RNA, 38 nt, Homo sapiens
acaacgaaaggaaaaggaacggaaaacagccccaaagc

SEQ ID NO: 49146 - RNA, 69 nt, Homo sapiens
aagcagggccacgggaagaacccaacagaggcccgagcacgccaagacaggaacacagagagcaacaga

SEQ ID NO: 49147 - RNA, 90 nt, Homo sapiens
ggcgcgcgacgcccagagccgcggccggggcgcgggaggcgggggagcaaggaaaaggaggcaaaacccccacaggaagaccgaaagggg

SEQ ID NO: 49148 - RNA, 57 nt, Homo sapiens
aaacacccagggaccagcgggcggagaacggaaaagcaccaggaagcagagaggacc

SEQ ID NO: 49149 - RNA, 70 nt, Homo sapiens
gagggcgaaccacccacagaccagccggaacaagagacccgacacacacccacgggaaggaagaaagcag

SEQ ID NO: 49150 - RNA, 73 nt, Homo sapiens
ggaaaggacacaccaagcacccacggagagcgcaccagacagggaggaagcgcgaaggggaaacggagaagga

SEQ ID NO: 49151 - RNA, 98 nt, Homo sapiens
cagggagggagcccaggacacaaggaggacaccaacagagagacaggaaaggggggccagcaagaacgaaccgagccacaacagccaaggaaaaaaag

SEQ ID NO: 49152 - RNA, 78 nt, Homo sapiens
aacaagaccagaagcgcacgacgacgccagaggaggccaagaggaggggcacgcccggaagaccagacccgcagccca

SEQ ID NO: 49153 - RNA, 58 nt, Homo sapiens
gccccgcccgcccccagcccgccgagagcggcccaggaggaacaaccagcccacccgg

SEQ ID NO: 49154 - RNA, 69 nt, Homo sapiens
acggcagaggaccccggagagcaaggaagaaagcagcccaggccccgaggcaaagcccaacacaccgcg

SEQ ID NO: 49155 - RNA, 83 nt, Homo sapiens
gggacgcgggcgccaggaccggccgaacgcagagcagcgaggagggggggaagccccgcggagggcgccagcagccgaacagc

SEQ ID NO: 49156 - RNA, 74 nt, Homo sapiens
caaacggccggcaaagggaagagcagcaccgcggaccggacacacaaggccaacagccgcagacgccgggaccc

SEQ ID NO: 49157 - RNA, 80 nt, Homo sapiens
cggcccgacaccagcacagcaaacccgccgggacaaaggaccagcggcagcagggaagagaccgagaccaggaaccaggc

SEQ ID NO: 49158 - RNA, 51 nt, Homo sapiens
cgaaccaacggccccgcaccagccgcgaccagggaccaggaggagaagcaa

SEQ ID NO: 49159 - RNA, 68 nt, Homo sapiens
accagccgacaaagagggggcccaagaaggacaaagcggcgcacgcacggagacgacgggaggagcga

SEQ ID NO: 49160 - RNA, 87 nt, Homo sapiens
ccagccgggaacccccacgcggccagcgaaaacgcccagggaagcggaggcggaccggaaacgaccacagaccggccgagagcaggg

SEQ ID NO: 49161 - RNA, 80 nt, Homo sapiens
cgggcccgcgcgcccggccaagaggcaaaggggaggacgcagcaaaccaccagaaggagacagcccgaagacccaagaga

SEQ ID NO: 49162 - RNA, 52 nt, Homo sapiens
gcggcaacagaggccgacccaggcagcccgccccgcgcagcagcacacagaa

SEQ ID NO: 49163 - RNA, 73 nt, Homo sapiens
ggaccgagagcgcgaaacgcacgagaagggaaaccccggccggcggcggggacaccaggacgacccacaaccc

SEQ ID NO: 49164 - RNA, 81 nt, Homo sapiens
ccgcagcgccagcagcggacaggcacagacaaccagacccagaaaccacagccaacccaacagcaagccagcagggcacca

SEQ ID NO: 49165 - RNA, 71 nt, Homo sapiens
accgggacaacacgagcgggcagagaagcggcccaccgcggcgcagcacgagagggaaacgcagaaaagac

SEQ ID NO: 49166 - RNA, 75 nt, Homo sapiens
ccgccccggcgagccgcgacggcgccgcccacggcgaggagagagcaggcccaagagacgcagaagacagggacc

SEQ ID NO: 49167 - RNA, 76 nt, Homo sapiens
gcggccgcacccccgccccaggagcagcgacccgccgggcccagggccccagggacggccaagaagaggcgagcgc

SEQ ID NO: 49168 - RNA, 77 nt, Homo sapiens
gcgcagccggacaagccgccaccgggcgcccccaagcccacagcgaagaagggccacccccgacgcccgggcccgag

SEQ ID NO: 49169 - RNA, 80 nt, Homo sapiens
ggaagacacgaggggcagaaagagaccgcagagacagccaacacggcacccacagggaaacggaaacgcacaacacaccc

SEQ ID NO: 49170 - RNA, 86 nt, Homo sapiens
gaaaggaagcaccaagacgaggcgcaccggcaggagacacagcaggccccacagaggaaggccggaaggcgccagcaacgggcaga

SEQ ID NO: 49171 - RNA, 33 nt, Homo sapiens
agcgcgacgacagggccagcgagacagaccgaa

SEQ ID NO: 49172 - RNA, 67 nt, Homo sapiens
agcgaaggacagaggcggagaacgcgagacgggcgcggcccccgccacccgccccgccgcccgcgcc

SEQ ID NO: 49173 - RNA, 91 nt, Homo sapiens
aaggagaagaccaggaagagaaagagaaaggacaagcaggaacccccaggaccacggcccacacccaggagcagcagaaaagaacaaccag

SEQ ID NO: 49174 - RNA, 54 nt, Homo sapiens
gaaaaacggagacggagagggaaagacagggccaagcacggaaaaagggggggg

SEQ ID NO: 49175 - RNA, 69 nt, Homo sapiens
cgcgaagaacacaaaccgaaccaaaggcaagggacacgccagggccccgcaaagggcacaccaggagag

SEQ ID NO: 49176 - RNA, 66 nt, Homo sapiens
aagaacgcagggaaggagaaggaagacggcgagcgcagaaccggccgaaaagcacaaacagcaaga

SEQ ID NO: 49177 - RNA, 70 nt, Homo sapiens
ccggccagcgccggaaaccaacaagcgcccgagccggaaaagcgaggacgcccgggagccgcccacagca

SEQ ID NO: 49178 - RNA, 78 nt, Homo sapiens
ggaacggggccaaagcccccgcccccagcacccacccgggggcagggggcccgggacaggcgcggggaggcccagccc

SEQ ID NO: 49179 - RNA, 70 nt, Homo sapiens
acaagcaccgccgaaacagacccaagaaaaggaagaggcgccacaccaagaccgaggccacagacaacga

SEQ ID NO: 49180 - RNA, 69 nt, Homo sapiens
agacggaacggaaaaaccgggcaacaggggcacacacacgagaaagagccacgcaagcagagagggagc

SEQ ID NO: 49181 - RNA, 64 nt, Homo sapiens
gaagaaggagaaccgaaggcgcgcaggaggagagcaagcgagcccggccggagccccagaccag

SEQ ID NO: 49182 - RNA, 68 nt, Homo sapiens
ggcgacccgacgggccaccggaggagggagaggaaaacgggaaaccggcggccagcaggccgcaagaa

SEQ ID NO: 49183 - RNA, 56 nt, Homo sapiens
aggaggacagcgcacacagcaagcacgagacgcgccaggacccacaaccccagccc

SEQ ID NO: 49184 - RNA, 82 nt, Homo sapiens
cgcccgcaagagcgagccgccgccccgggcgcagacagagcaccagcaccagcagagggcacaaaaccgccccagccaggag

SEQ ID NO: 49185 - RNA, 74 nt, Homo sapiens
agaagaacacaacaagacccacggacgacaagcacggcccaggcggaggaagggcgcgaccggcccacgcaacc

SEQ ID NO: 49186 - RNA, 76 nt, Homo sapiens
gaacaggcggaaccacgcacccggcgagagagcgggaaagagcaaaaaacaacagggaacggaggagccaggaggc

SEQ ID NO: 49187 - RNA, 59 nt, Homo sapiens
gggcgaggccgggcggcgccgccccaccggacccgcagagcaaacaacagacaagggca

SEQ ID NO: 49188 - RNA, 73 nt, Homo sapiens
acgccgacagccgcagaaccggagccgagaggcaaaaccggaggcccacgaaacaaggcacaggggagccagg

SEQ ID NO: 49189 - RNA, 87 nt, Homo sapiens
acaccaagaagcgccgcgacaagcaaggcagccccaaggccggggggggcacagagccccggaagacagcccccagcgaccagaccc

SEQ ID NO: 49190 - RNA, 57 nt, Homo sapiens
aagaacacagcccgggaaagcacagaaagccaaaaggagcagagcgaggcagggccc

SEQ ID NO: 49191 - RNA, 76 nt, Homo sapiens
ccgagcgccacccagcaccggaaggacaccggacccaaaacaggggaagaggagagcccggacgcagagaaaagaa

SEQ ID NO: 49192 - RNA, 58 nt, Homo sapiens
cgcagggcgcccccggcaggccggaaggaccaggcagggagcaggacaggaagcagaa

SEQ ID NO: 49193 - RNA, 51 nt, Homo sapiens
gacaagaagggcaaagccgaagaagcaacgaagcagcaaagcccaaagccc

SEQ ID NO: 49194 - RNA, 84 nt, Homo sapiens
ccacgccgagggccaccaggccgccgggggccgcgcgcccgggccacaccacgaggcgagccaagagcgaggcagccgccggac

SEQ ID NO: 49195 - RNA, 72 nt, Homo sapiens
cacgcagacggaaacaaggcaacagaaagagcaacagcagggcaacagggaagaaaagggaaccagcggagc

SEQ ID NO: 49196 - RNA, 73 nt, Homo sapiens
agagaaccgccaacggaccccgaggacaggaaaaacaggaccggaggggaacagcagcgaaaggccgggcaac

SEQ ID NO: 49197 - RNA, 55 nt, Homo sapiens
ggcaggggaccgcacagagggaagacaagagcaccaacggacaagcacaagcaag

SEQ ID NO: 49198 - RNA, 73 nt, Homo sapiens
acaccggccagagaagacacgaaaacgcaggaacgcgcagaggcggaccaaccagcgaggaacgccaggaagg

SEQ ID NO: 49199 - RNA, 73 nt, Homo sapiens
ggaaaaacgaacagacgcacaccacagggaaaccaaggcggcaaagaacaaagaaaagaaccgaccagaccgc

SEQ ID NO: 49200 - RNA, 61 nt, Homo sapiens
ccagggaagcgaggcgaaccgcacggagggggcccagagcaggcggacaggagcgagaaag

SEQ ID NO: 49201 - RNA, 79 nt, Homo sapiens
gcagcagagcggaggcgcgccacgaaaccgaccgcggcaagagcagagcccccaggacccagagggagacgagcccacg

SEQ ID NO: 49202 - RNA, 72 nt, Homo sapiens
cggagaggacacccaaaacaggaggcacgcagacccagacaacgccagaaaaccagagaccggccagaagaa

SEQ ID NO: 49203 - RNA, 76 nt, Homo sapiens
ggacgaagcccgcagggggggcgggaccccacagagaaaacacggaacggagaaggggaaaaacagcaacgcagag

SEQ ID NO: 49204 - RNA, 68 nt, Homo sapiens
aggaagcgaagcagccgaagcacaaaagagagacgcccaggcgggaccaggacggaccaacacaagca

SEQ ID NO: 49205 - RNA, 71 nt, Homo sapiens
gccaccccccggaaacccagaaccgacgggggcgaagacaagaggggagaagcagaccgcaccaggcggga

SEQ ID NO: 49206 - RNA, 72 nt, Homo sapiens
agcagcagggagccacaccaagccaacagaaccccggaaaaggagacagaagcgcaagaacccgacaagaag

SEQ ID NO: 49207 - RNA, 84 nt, Homo sapiens
acgcgacgcgccaaaacccgcccggaaaggggacaccggagaacggaagaggacaagagacgacacgcaagcaggcaaccgaaa

SEQ ID NO: 49208 - RNA, 73 nt, Homo sapiens
agagccaggcaccaggacagcggcggcgggccgggcagcccggccgacaaccacgagcccagcaacacaacag

SEQ ID NO: 49209 - RNA, 84 nt, Homo sapiens
gcgagcaggacaagcgaggacacagcacccaaagcaccaccccaggagcaggagccggggcagagggagaccacacggaggagg

SEQ ID NO: 49210 - RNA, 81 nt, Homo sapiens
gaacagccagacgagagccagccacacgaggagacggaaccggagaaaaaaacaacgaacgagcaaggaagggccaaggca

SEQ ID NO: 49211 - RNA, 68 nt, Homo sapiens
agacacacaggaccccgggggaaagccggacacaagagggcaagaaaggcgcgacgggccgaaaaggg

SEQ ID NO: 49212 - RNA, 71 nt, Homo sapiens
ggaaacggcacgagacaggaagggaaaggagagacagcacaagaaaaggggcaagaaaagcaagacagcac

SEQ ID NO: 49213 - RNA, 79 nt, Homo sapiens
cccagaccaagcacaggccggagaacagggggcaccaacacacaagacagcaacaacacacaccacggaaccacccagg

SEQ ID NO: 49214 - RNA, 82 nt, Homo sapiens
ggacgcccgcggagagagccaccccgcccacgcccacgcccccgcgccggagccccgggccaggacgcggcgcagcaacaaa

SEQ ID NO: 49215 - RNA, 79 nt, Homo sapiens
cgcaagaacaagacccggcaggagccccaggaggacacgagcccagccaggcgagccagcgccaaagaaaaagaacaag

SEQ ID NO: 49216 - RNA, 81 nt, Homo sapiens
cgagagagcaaccagaggaacaacggacagcagggaaaaagaacagacacagaccaagaacagagcagaaagaacaaggga

SEQ ID NO: 49217 - RNA, 75 nt, Homo sapiens
cacaaggaagaagagcagagcggagaagccccacaacgcacggagacgccacccggggccagaggaagaaaggga

SEQ ID NO: 49218 - RNA, 87 nt, Homo sapiens
ggcgccgccgcgggcgccgggagcgagcgggagggagccgcgcgccggcgcgcgccgagcagggccgggccagcgccaccgcccgga

SEQ ID NO: 49219 - RNA, 73 nt, Homo sapiens
agccagcagcaagcagcacacaagccagccggacagcaacaggaacggcccgccccaacaagaacgaagcgag

SEQ ID NO: 49220 - RNA, 89 nt, Homo sapiens
cggggagcaaaaccaacgccggccggagcagcagcccgagccggaaccaaaaagaagccccagagccggggccaggagccccaagcgcc

SEQ ID NO: 49221 - RNA, 61 nt, Homo sapiens
cccaggcgcagcagacaaccaggacaacccgggcagggcgcgggaagggacgccagggcac

SEQ ID NO: 49222 - RNA, 69 nt, Homo sapiens
cgggagacaccgcggcggagaccagacccgaacgacaacacgaagaggaagagaacacagagacggacc

SEQ ID NO: 49223 - RNA, 76 nt, Homo sapiens
cagacgcagggcgcccccggaccgacaggagcggacccgcggaggggcgggagcggccgagggccgggcgcggcac

SEQ ID NO: 49224 - RNA, 74 nt, Homo sapiens
ggaccgcccccgagcccggaggggggagaaaagcaagaggcacggagcccaggcgccggaacccggaccaagga

SEQ ID NO: 49225 - RNA, 83 nt, Homo sapiens
ggaacaggcacgcgccaccaccccaggagaggccaaagagaagccaccgaaacgagggagagggaggccgcacgcaacacggg

SEQ ID NO: 49226 - RNA, 83 nt, Homo sapiens
cggccacgcaccgcgcgaagacggaagacgcgcccgcgccggggcagcagggaggaagaaaaacagagcagaacaacaggacc

SEQ ID NO: 49227 - RNA, 60 nt, Homo sapiens
caccgaccagagacccagcaccgaccagagccacgcgcccaggcgcaggcaggggccaca

SEQ ID NO: 49228 - RNA, 83 nt, Homo sapiens
ccggggacccgaccacagggacagggagcaaaaaaaaagaagaaaggaaaagccagaaaaaagagaagaaaggaaccagaaga

SEQ ID NO: 49229 - RNA, 43 nt, Homo sapiens
gcccaagcggaaagcacgcgcacagaggacaggagagacaacg

SEQ ID NO: 49230 - RNA, 76 nt, Homo sapiens
acagacggcaaacgagcaaccaaaacagcagccgagagccaagggcaagggaaacggcgagggggccccaaaggcc

SEQ ID NO: 49231 - RNA, 80 nt, Homo sapiens
gcccccggccgcagcgcaggcagcccagcagagcaccacaagcaaggaacaaaagaaagcaaggaaccaaaaaaacaaag

SEQ ID NO: 49232 - RNA, 81 nt, Homo sapiens
ggaggacagcgcgcggcgcggccccgacccccgcccggcgccggcccgggccgccagggcagggcaagaaagccagagccc

SEQ ID NO: 49233 - RNA, 77 nt, Homo sapiens
agcaccgagaggcagagagcaggacaggcaggggagaccaggagggacgaggaagacccacaggcagaacggccaca

SEQ ID NO: 49234 - RNA, 76 nt, Homo sapiens
ggcaagcacgggaagaagcagcggacccgccaccacacggcaccgggcggggccggggagcccgggccagaccccc

SEQ ID NO: 49235 - RNA, 73 nt, Homo sapiens
cggccccggaacggggccccgcaaggccggcgcggaggaggggagcagcgcgcaagcacaaagcggacgaccc

SEQ ID NO: 49236 - RNA, 69 nt, Homo sapiens
aacacagaaacaacgaaaaacccgaaaaggaagaaacggcaagaaagccgagggaagggagaaagcaca

SEQ ID NO: 49237 - RNA, 56 nt, Homo sapiens
gacacgccacacccaccggcggcggcaccccccgaacagaaaccccacgagcccgg

SEQ ID NO: 49238 - RNA, 81 nt, Homo sapiens
caggacaagccaaggggcgcagaagcacgcggagccagaggccagaagcaggccgggacgaggaccccagcccggcacaaa

SEQ ID NO: 49239 - RNA, 41 nt, Homo sapiens
agccccgagagcggggcacagggacccagccccaacacgcc

SEQ ID NO: 49240 - RNA, 64 nt, Homo sapiens
ggagcgaccagcgccagaaaaacagcaagcacaacaggaaccagccccacaccaggagaagcac

SEQ ID NO: 49241 - RNA, 76 nt, Homo sapiens
accacagagcccagggccaaaaagacaaaaaacccaggcggcagcagcggaaggggcgagagaaaaagaagaacag

SEQ ID NO: 49242 - RNA, 77 nt, Homo sapiens
cagagagccccagcaggaaggccaccgagggaacccgaccggacccagccccagaagccccaccaaagccaccaagc

SEQ ID NO: 49243 - RNA, 58 nt, Homo sapiens
ggcagcaaaagagcccagaagaggggggaggaggccgcagccgaagagagggagaaga

SEQ ID NO: 49244 - RNA, 76 nt, Homo sapiens
caggccccgcccgcgggccagggcgccggcgcagaggggggcgggccgagcacccgcaggccccgcagaggcgccc

SEQ ID NO: 49245 - RNA, 120 nt, Homo sapiens
ggcccccgccccgggccgacccaccccgcccggacccgcggaaggccaaaccacgcgagcagccaaagccgagcgccgggaggaccgcaggacgagcggggcggcagcacagccaggcgc

SEQ ID NO: 49246 - RNA, 83 nt, Homo sapiens
ggcgaccaagcaagacgccaggcccccggaaaccagaaaggggggcggggcggcccgcgacgagccggcgaaggaggcacaga

SEQ ID NO: 49247 - RNA, 58 nt, Homo sapiens
cggggcgggccgccagcggggacaggcagcccaacaggaaagagaaagaagacccaag

SEQ ID NO: 49248 - RNA, 59 nt, Homo sapiens
cagaaaccgcggagaagaggcgccacgccggcagaagcagggacaggggcccggcggga

SEQ ID NO: 49249 - RNA, 86 nt, Homo sapiens
agaacgcccccaccaccgcaaacagaggcgggcagcccgcagaccaggccagcacggcagccagaggccccagagagccccgagaa

SEQ ID NO: 49250 - RNA, 68 nt, Homo sapiens
acaacagcgaggagcaggcggagcacccaccacggagggaaagaccaggcaggcagaacaagaagggc

SEQ ID NO: 49251 - RNA, 37 nt, Homo sapiens
gcaaaccccgcaccgcggggggaccccacaccacaaa

SEQ ID NO: 49252 - RNA, 68 nt, Homo sapiens
gcggaccggcaaaaaagcaaagaaagaagcaccgaaggagaaaacccggcaaacgaacacccaaaaca

SEQ ID NO: 49253 - RNA, 71 nt, Homo sapiens
cgacagaccccggccaggagcagccaacaggagcacagccagcagggcccccaagccggcaggggaacgag

SEQ ID NO: 49254 - RNA, 45 nt, Homo sapiens
ggggagagaaacgacaaggacggacaaaagcgcaaccgcaaaggg

SEQ ID NO: 49255 - RNA, 75 nt, Homo sapiens
gccaggagaggaagccacagagacaggccagacccgcccccgaaaggaaagcgcacggcagcagcaaaaccacag

SEQ ID NO: 49256 - RNA, 73 nt, Homo sapiens
gacccaacccagaaccgggagaaaggacacacgcaaggccagagaccgacaaaccagaggaaggaaggacccc

SEQ ID NO: 49257 - RNA, 33 nt, Homo sapiens
gaaaccaccagaggcgaccggcccgaggaccgc

SEQ ID NO: 49258 - RNA, 64 nt, Homo sapiens
ggcggccacggaggcaccagaagaagcaccagagaaccaggagcggcagaccgccgccaggagg

SEQ ID NO: 49259 - RNA, 67 nt, Homo sapiens
aagcccgcacgccaaccagacgagcaagaagacaaacaagggaaggccgcacaggccaaggaggaca

SEQ ID NO: 49260 - RNA, 52 nt, Homo sapiens
ggagaaagcccgaaagcagcaggccaggaccccggacaaaccggcgaccaca

SEQ ID NO: 49261 - RNA, 85 nt, Homo sapiens
aaaacacagaccgcacccccagcagaggcaggaggagcgcaccggagaaacccgagcagccccacgcaccagcgcggcccagacg

SEQ ID NO: 49262 - RNA, 74 nt, Homo sapiens
cggcaccgggaccacgccgcgcgaggagagggaaaccgaacagagcaacagcaaaagaaaggaaacacggcggg

SEQ ID NO: 49263 - RNA, 71 nt, Homo sapiens
gggcacgaggccggaaccgcccagccccgggcgccaaacagagcaagaggaacagcagcagaaaggagcag

SEQ ID NO: 49264 - RNA, 72 nt, Homo sapiens
gcaggacaggagggggagaacgggaccgacccgggacagcagaccacagcccggcaggcccaaaaacccaaa

SEQ ID NO: 49265 - RNA, 54 nt, Homo sapiens
cgaaaagaccgaagaaacggacgaaaacgcaaacagcagacggaagaccccacg

SEQ ID NO: 49266 - RNA, 67 nt, Homo sapiens
cccacgcggccccaccagcaacgaaagcaaaccgagagcaggcgaaggccgggacccaggcccacca

SEQ ID NO: 49267 - RNA, 73 nt, Homo sapiens
ggagaagaggggagagggaccacacagaaacggaagccccaacagcgggcacccggcaggcagcaagacaaag

SEQ ID NO: 49268 - RNA, 78 nt, Homo sapiens
ccgggcccgaggaggcagccaagccgagccgccacccggcagcaccggggcgcacaagaccccacacagagggcccgg

SEQ ID NO: 49269 - RNA, 72 nt, Homo sapiens
ggaaccggacaccgagggcaacggcagaaaaaggaggcggcaacagggaacgccgcgcagagcccagcccgg

SEQ ID NO: 49270 - RNA, 79 nt, Homo sapiens
cgcgaggccgcagagcaaagggggcccccagggaggccgcacggcccacgcgagagccagggacacagagcagaagcgc

SEQ ID NO: 49271 - RNA, 117 nt, Homo sapiens
cggaccccaggacccaggccccggaccgaccaaaaaacaccagacggcagcaacacaaagggaaaacggcccgggaagcggcagccaggacaaccgacagacaggaagggacggcac

SEQ ID NO: 49272 - RNA, 80 nt, Homo sapiens
aggaaggagcagcagaacgaaaagaagcacagagggaaggagaaggagacacagaaggagcagcaggagacagccagccg

SEQ ID NO: 49273 - RNA, 82 nt, Homo sapiens
cgcccagcccccaagagcgggaacagagcgcagcgcccgaggagagccggccccacaacagccccccggccggaacagcaca

SEQ ID NO: 49274 - RNA, 82 nt, Homo sapiens
gcaaggacaggcacacaaagaaggagacgggggcacgggagcaggaagggaggagcgcggcaccagaaaccaccacaacagc

SEQ ID NO: 49275 - RNA, 40 nt, Homo sapiens
accgcaccgccaccggcccgacccaaaaacagacgacgag

SEQ ID NO: 49276 - RNA, 80 nt, Homo sapiens
caacaagcagccaagcccagacaagccccagggaagccacagcaccccagcacccagggcccccggccaaggcggaggag

SEQ ID NO: 49277 - RNA, 82 nt, Homo sapiens
ggcggcggcgaaaggaacggcgaaggcccacgggagaaaaccgggcgcaagacaagcagaccggaagaccgacggaagacca

SEQ ID NO: 49278 - RNA, 106 nt, Homo sapiens
caagcggagcagagaacaccacccagcggaccaacaggcccagcccacgggagaaagagacggcgccgaggaagcacaggcaacaccacccgcgccgcgcccggcc

SEQ ID NO: 49279 - RNA, 68 nt, Homo sapiens
cccgccaccagaagacagaccgcgaagcgacaccgccagaagcaccaggacagccacaagggcccacc

SEQ ID NO: 49280 - RNA, 79 nt, Homo sapiens
caacggccgacacgagaccaaggagaccaagaccagaagggaaaagggaaaacacccaaagaaaacgaaggaaggagga

SEQ ID NO: 49281 - RNA, 63 nt, Homo sapiens
gaccggcacacagcagagaggaaggaaaggagggagcggcccagcgccacgccacacaaaaac

SEQ ID NO: 49282 - RNA, 89 nt, Homo sapiens
gccacacaggagcaggggaagccccggcgcaggagccagagcgcaggcgagcccccaaggaggagccgcgaggagaccagagggagcac

SEQ ID NO: 49283 - RNA, 64 nt, Homo sapiens
gcccccagccagggaacgacccaaccagcgacccagaggcggaaggcagcgaggacccaaacag

SEQ ID NO: 49284 - RNA, 81 nt, Homo sapiens
cagacaagggcagacccgaagcaaagggacaggagaccggagaaagcaaacaagaggagagaaagaacccacgcaggacga

SEQ ID NO: 49285 - RNA, 73 nt, Homo sapiens
aaacaaagacaaaaggagacgagaagaagacaagaggaacaggaggagaaaagaaggaaaacaagaaccgcca

SEQ ID NO: 49286 - RNA, 80 nt, Homo sapiens
gagaacgccacgcgggccggcgaaagcgacagaagcgaaggggacagggggagaaccgccagggaaacccgggggacaga

SEQ ID NO: 49287 - RNA, 79 nt, Homo sapiens
acaaaacaggacagcacaggcacagaaggccaaaaaggcaaccacagagagagagagggagggggcgcacaaaagagca

SEQ ID NO: 49288 - RNA, 78 nt, Homo sapiens
cgcacacgccggcgcgcgaccgcgcaaaacggaccgcaagggggagacagccgagacagcaaagaaagcacgagagag

SEQ ID NO: 49289 - RNA, 81 nt, Homo sapiens
gcgggcggcgggcggcaaaggagcagccagagggccgggcccagcaccgaccaagggaccagcgcaaacggagaacagagc

SEQ ID NO: 49290 - RNA, 80 nt, Homo sapiens
cagaccaggaggagaaaaggaaccaaagaaggaacacccagccacccaccagcgacaaggcagggccagccaacagccag

SEQ ID NO: 49291 - RNA, 82 nt, Homo sapiens
caggaggagggcggccggcgcagcccgaccagccaagagccggcggcagacgagcaaggcagcaccccgacgacaagacacc

SEQ ID NO: 49292 - RNA, 75 nt, Homo sapiens
ggcccggcaccccaggcgggagcggaaccgcccggcagcaggccagacgcagacagccgacacggagcgacccgc

SEQ ID NO: 49293 - RNA, 86 nt, Homo sapiens
gcgccacgagccaggagaccaaggaccagccaccacggagaacacaccggaggaagagcaagcaggcccgagggacaaagaaggca

SEQ ID NO: 49294 - RNA, 78 nt, Homo sapiens
aaacaccccagcccacaggcacggcagaagagggaaagcgcagaaaacgaaacccgaagccggcaagagcagagaaga

SEQ ID NO: 49295 - RNA, 82 nt, Homo sapiens
ccaggccccgcaagaagggccgggggcgagccggagcgaccccggcagagcaaacacaggaaggaagaagccaaaagaagga

SEQ ID NO: 49296 - RNA, 78 nt, Homo sapiens
gggaccgcggccacaacaaggggcgagacgggacacccccggaacacaggcccaggcaggcaacacaggacgggcaag

SEQ ID NO: 49297 - RNA, 85 nt, Homo sapiens
cggaagcggcaggccacaaagccacagaaccgcggaaggaggaacaagcaacaggaaggcgaaaaaaacgacagacaggaacagg

SEQ ID NO: 49298 - RNA, 68 nt, Homo sapiens
gagccgcgcggcgcggggccccgcggcggagacagcacaaggggggggccgggcgggccggaccggac

SEQ ID NO: 49299 - RNA, 72 nt, Homo sapiens
aaagcgaaagggagagcacggccaaacaagagcccagcaccgagaaggcagggaacagggcagcaacccgcg

SEQ ID NO: 49300 - RNA, 69 nt, Homo sapiens
ccaaaggggcgccgaaaggacaaaacaccacaggaggcccggccgcccaaagaacaaccccccggcccc

SEQ ID NO: 49301 - RNA, 52 nt, Homo sapiens
gaaacgcaccaggccaaagaaagagaaccaggaaccagaacgggacacgccg

SEQ ID NO: 49302 - RNA, 81 nt, Homo sapiens
ccaggagcagacaagcgagacccgggggcaacgccgagacagagcgccccaggcggggccgcgcagcgcgcggagaaggga

SEQ ID NO: 49303 - RNA, 78 nt, Homo sapiens
ggcgcagggacccgggacagcggagaggcgcagaagcacagagaccgaagggagagcgcgacccccggccaagaagag

SEQ ID NO: 49304 - RNA, 68 nt, Homo sapiens
caaccaggaccagaacaagggaagaggaagaggagcaggcccggcagagccggccaagacgaacagca

SEQ ID NO: 49305 - RNA, 72 nt, Homo sapiens
ggacccaggaggaggacagaagcgggacgcaacccaccacgaagcggagagcaggaaggggggccaacccag

SEQ ID NO: 49306 - RNA, 73 nt, Homo sapiens
ggaaagagccacgaacacaaaggagggacagcagcaagagccccaaagccaccaggaggacggaagaaagacc

SEQ ID NO: 49307 - RNA, 80 nt, Homo sapiens
ccgcgcgacgccgagcgcgccgcgagaccccgccccccagacggagaaagaagaacaaacacaaaacacacaccgagcag

SEQ ID NO: 49308 - RNA, 55 nt, Homo sapiens
accggagcgccacggccacggcccccacaagaagcagcgaccacgccacaccaca

SEQ ID NO: 49309 - RNA, 82 nt, Homo sapiens
gaggcgcacacggcaagagccgagaggggaggcccgaaggaggacggggaccaggcaaggcggagccggcgggagagggcgg

SEQ ID NO: 49310 - RNA, 63 nt, Homo sapiens
cggacccgcagcaggcacaagcacccagccacaccccaccgcccagagaagggaagagaggag

SEQ ID NO: 49311 - RNA, 83 nt, Homo sapiens
gcgaaagagaaagcaccgaccaacacccaggagaagagcgccaggcgccgcggggggcacacaccccaggagggggagggggg

SEQ ID NO: 49312 - RNA, 77 nt, Homo sapiens
ggaacaagaccccaaacccaggacagggaaggccaccagacgaagcccggcaacaaacacgaaacgaaggcagcagc

SEQ ID NO: 49313 - RNA, 95 nt, Homo sapiens
agcgggccgagaaagcaaacagaaaggccaaaacccccaagggccaaaaagcagaaaaacaaaccagcccaagaagcgacaaagcccgcgaccaa

SEQ ID NO: 49314 - RNA, 61 nt, Homo sapiens
aacacgcgggaccgcgggcaccagaccgcagcagacgcccacagggcccggacccaagacc

SEQ ID NO: 49315 - RNA, 51 nt, Homo sapiens
acaccaaaaagccgcagggacaacgcgggaacggggacagccggacccaga

SEQ ID NO: 49316 - RNA, 38 nt, Homo sapiens
agaagcacaagcagcacacaagaaaaacacggccagag

SEQ ID NO: 49317 - RNA, 73 nt, Homo sapiens
caccaccacgagccagaaaacagggaagcagcagcgcaaggaccccccagggcccaaccaagaccgaacccaa

SEQ ID NO: 49318 - RNA, 83 nt, Homo sapiens
ggacaggcaccaccagcgcgccaccgcaaaaccacaccgaccaaggacaagagacccaccaggagaaggaagggcccagagcc

SEQ ID NO: 49319 - RNA, 36 nt, Homo sapiens
caggggcgaaggcagaggacccacggggacgcgccg

SEQ ID NO: 49320 - RNA, 77 nt, Homo sapiens
ccagacgccagcgggacgaggaccgagaccgcggccgggaccgaggccccggcacaaagcagaccgccccacgggcg

SEQ ID NO: 49321 - RNA, 54 nt, Homo sapiens
ggacgaagagccccccccccaacaccgcgacacgcaggagaagacagaggagcc

SEQ ID NO: 49322 - RNA, 77 nt, Homo sapiens
ccgcacccggggacaagcgcgggaacggcgcggaaggaaaaaccagaagagaaaaaacaaaggggagaggcaccccg

SEQ ID NO: 49323 - RNA, 71 nt, Homo sapiens
gcgagccggagcgccagcccaccggacacgagacgggacggcagagaacgccggagcacgaagacaaagaa

SEQ ID NO: 49324 - RNA, 73 nt, Homo sapiens
cgggggcaggcgcccgcccccaggcgcgcccagccccgcagccagggcgaacccccgcaggcggacgggcccc

SEQ ID NO: 49325 - RNA, 88 nt, Homo sapiens
gcaaagaaaaggagaaaagaagccaaagggacacggcaaaagcagaccggaaaacccaccggcaagaccacacccgaggggagcccag

SEQ ID NO: 49326 - RNA, 39 nt, Homo sapiens
cccgcccagaccaagaaagacagcccaacaaggcgggac

SEQ ID NO: 49327 - RNA, 78 nt, Homo sapiens
gaccaccgcagagcacaagacccggagaccagcgggcccacagcccccaagacagaccccagaacgaacaccagaacg

SEQ ID NO: 49328 - RNA, 75 nt, Homo sapiens
gcgacaagcaaggggaggagcagcagcgcggcagagcaggggcgccacgcagagccccgccaggaagacacgccg

SEQ ID NO: 49329 - RNA, 74 nt, Homo sapiens
agagacaccaaggagacgcccaaggaaccccgccggccaccggcgaaagaagcggcacggaaggaaacggccca

SEQ ID NO: 49330 - RNA, 80 nt, Homo sapiens
cccaaaggaacccaacgcaggcagaccagccggcaagacgcgagagcccggccaccccgccacaaacgcagcaggggacg

SEQ ID NO: 49331 - RNA, 51 nt, Homo sapiens
gccgcgggagagaggacccccccccccccccaagcaccacgcgcgcccgag

SEQ ID NO: 49332 - RNA, 54 nt, Homo sapiens
gccagaaagcgaacaagcagaaagacgaccaggaaaagacgagcaaacaggaga

SEQ ID NO: 49333 - RNA, 86 nt, Homo sapiens
gccccaccccgcgacacgggagcagggccaggcccgcagccaccccaggacagaaagcaaggagaggccaccaaggagaagcgcag

SEQ ID NO: 49334 - RNA, 81 nt, Homo sapiens
gaccaccgccaaagcgggaggcgccagacgaaggcccggcaagccaaggcgcgccgcacgccccgcgccccgcgcgggccc

SEQ ID NO: 49335 - RNA, 73 nt, Homo sapiens
gcgcggggcgggacagacggccggcgggagacgccgcggcggagaaaccaccacaaacacgaggccagcaacg

SEQ ID NO: 49336 - RNA, 62 nt, Homo sapiens
aacgaacaaacggggaggcacacggcgcaacagaggccccccaggaagggaacgagcagccc

SEQ ID NO: 49337 - RNA, 80 nt, Homo sapiens
cgggcaagcgcgcccgccgggaaaccgcgggcgccgggcgaagcccgggcagggcgggaaggaaagacgagaggccgcag

SEQ ID NO: 49338 - RNA, 87 nt, Homo sapiens
caccacagcccaccacaacagcacaccacccccggagaggcagagcgaaccagaacaagggaccccccaggacacagcgggacgacc

SEQ ID NO: 49339 - RNA, 79 nt, Homo sapiens
cacggccaagagcgggcaccaggaagcgaaggcgggaaagacaaggagccgggccgagaaaccgaaccagagaccagag

SEQ ID NO: 49340 - RNA, 101 nt, Homo sapiens
gccccgaaacggacacgagcaagaccggaccggcaccaccaggaaccacagggggcacaccaggccccagaccagcccacaaggacggaaccaccagcagc

SEQ ID NO: 49341 - RNA, 76 nt, Homo sapiens
gaaaacagccaaaccaaagcacaaaagaccccacagcgagagagagcaaacgaaacaggcaaacgagacaaaggac

SEQ ID NO: 49342 - RNA, 64 nt, Homo sapiens
agacgagccgagcgcagcggccacaacacagcagcccccaggagagcaggaaaagccggagaag

SEQ ID NO: 49343 - RNA, 82 nt, Homo sapiens
ccaccggcgggaggaacaaaagaaaaagcggggaaggggggcaaaaaaaagaagcaagcgaagcaccgagcacccacccgag

SEQ ID NO: 49344 - RNA, 38 nt, Homo sapiens
cggagagacacggcggggggggagaagaccccaacgac

SEQ ID NO: 49345 - RNA, 59 nt, Homo sapiens
accaagccccggagcagcccgcagggacaaggaggaggagccaccaagcccgaaggagg

SEQ ID NO: 49346 - RNA, 83 nt, Homo sapiens
aaggaccagcgcaacggcaaggacccgcccccaagacgggagccgcccggcaaagcgaaagcgcaggaccgaggagaaggagc

SEQ ID NO: 49347 - RNA, 63 nt, Homo sapiens
gcgcaggaggacgaccggggggcaggaggcacccggggcagcaaaacagccaccaccccaaca

SEQ ID NO: 49348 - RNA, 78 nt, Homo sapiens
agggagggaaaaacaagaacaaacgaaaagaagagccagcaggaaacgcgagccccaccccaccgccggcggcaacca

SEQ ID NO: 49349 - RNA, 74 nt, Homo sapiens
caacccaccaacccacgcaaggagaacgcgacacacaccaagcgaagcccggagcccgagacgggaaaagaggc

SEQ ID NO: 49350 - RNA, 91 nt, Homo sapiens
gcagcgggacccggcgaagacgcgaccgcggcgcgagcaccaggccagcacccgcccgaggacagagaggcgagcgcccggaggggagaga

SEQ ID NO: 49351 - RNA, 97 nt, Homo sapiens
gagcagcgagggcccccagccagcccgacagccgcaaaaccccccaccgaggcccaacaccacaccaccaccccggagggggaccccgagggcccgc

SEQ ID NO: 49352 - RNA, 81 nt, Homo sapiens
gggggggacagcagacccccaccacccaaccggcggcgcagacccggcaccccgcaacccgcagagaggacccggcccgac

SEQ ID NO: 49353 - RNA, 77 nt, Homo sapiens
gaccagaacaaaagacagagggcaggcgagccaccacacaggaccagagaaggcagaagcgcacaagccccagacaa

SEQ ID NO: 49354 - RNA, 77 nt, Homo sapiens
accgcagacgggggacgcagggaggagcgggacaccccggaagcgggaaagcaaggcgccaccggaagaaacgggag

SEQ ID NO: 49355 - RNA, 70 nt, Homo sapiens
gcccgcccggaacaaccggaccgaacgacacggcggaaacgacgcaggagcaccaaggaagaagagacac

SEQ ID NO: 49356 - RNA, 74 nt, Homo sapiens
gccacgacaccggcacccagcaccacccggaggagaccggcagcaggaggacccgcagacacaacggaggcccg

SEQ ID NO: 49357 - RNA, 72 nt, Homo sapiens
gggggcgcgccggaaaccggagcgcgcagcaggcggcgggccagagaagcagacgcccagcgaacaagcagg

SEQ ID NO: 49358 - RNA, 77 nt, Homo sapiens
ccaggagagagcggaagacccagaagaccccgccagaggcccccccaggcagaggaaccggggcccgcccccccccc

SEQ ID NO: 49359 - RNA, 68 nt, Homo sapiens
gcaccccacaggggagacgccaggaagccggacgcgcagggaaaacgagaggacccagccacgggggg

SEQ ID NO: 49360 - RNA, 32 nt, Homo sapiens
cgcgcaccgcccagaggaaacacgcacaggag

SEQ ID NO: 49361 - RNA, 72 nt, Homo sapiens
ggaccaggccgggacacaagaaacaaacgaagcacccccaggggacgcacagaaaagacaaaacaaagacgc

SEQ ID NO: 49362 - RNA, 68 nt, Homo sapiens
cggaacagagcacacccccggggagacggcaccaggacaagcgagggagacacgggcggaagccgaga

SEQ ID NO: 49363 - RNA, 58 nt, Homo sapiens
gaagaccaccaggcagaggcaacagaggagcaacaaggagaaaggaaagagaggagaa

SEQ ID NO: 49364 - RNA, 82 nt, Homo sapiens
aagcagaaaagaaaggagagagaaaaaggcagaagagggaaaccaacggaggaaaagcaaggcagaaaacagcccggaagcg

SEQ ID NO: 49365 - RNA, 77 nt, Homo sapiens
cagaaggccaaaaaggcaaccacagagagagagagggagggagccgcgaagcagccacggaccccagcacgaaaaga

SEQ ID NO: 49366 - RNA, 85 nt, Homo sapiens
gcgcgggggcgacggccgagcaggcgccgaccccgacagaacgggccccgcacccgcggccccggggcagcggaggccgggacgc

SEQ ID NO: 49367 - RNA, 59 nt, Homo sapiens
cacggcagacacacaacccgacccgacgaggaacgcccccaagcccaaggaaacacgga

SEQ ID NO: 49368 - RNA, 67 nt, Homo sapiens
gggagaggaccacacaaaaccaggcgaacgaagaagcgggccacccacaaaagcagcaaggcgaacc

SEQ ID NO: 49369 - RNA, 54 nt, Homo sapiens
cggcccaccaaacagaaacgagaggcacccggagaagagggagccaagagcaaa

SEQ ID NO: 49370 - RNA, 65 nt, Homo sapiens
ccaccacacccgccaggcccggagccaaccccccacagcaggggaaagggaagcgcccgcaggca

SEQ ID NO: 49371 - RNA, 133 nt, Homo sapiens
gaggccagggagcggcacggggaggccaccaggggcagacacgccggacccacccgcagacggccccgggccaggaaagccacaccccaacccaaccgcagcaagggaaggagcccccagcccgaaccacggg

SEQ ID NO: 49372 - RNA, 57 nt, Homo sapiens
gccgcccccgccgccgggaacgggcgcaccaaggccagagccaaagcagacccccaa

SEQ ID NO: 49373 - RNA, 72 nt, Homo sapiens
cagcaaggccaaccagccggagaccgagaaccagcccaaaccagagacagagagaaagcaaaagacagaaac

SEQ ID NO: 49374 - RNA, 69 nt, Homo sapiens
ccgcggagggaacgggggagcaaccgcggggagagaagcagaacccgacaaccgagggacggcagggaa

SEQ ID NO: 49375 - RNA, 84 nt, Homo sapiens
ggagcggcccaagcacgaccggagcgagcagggccaaaaaacagaggggcaacccgacgaagcggcgcaaggcccgggaaggcg

SEQ ID NO: 49376 - RNA, 79 nt, Homo sapiens
ggaaaggaaacacaacaccaagcccacaagacaggacacagaacagagaagaagcagacgagacagaaaaagaaccaga

SEQ ID NO: 49377 - RNA, 61 nt, Homo sapiens
gcgagagcggcagcagcaccagcccaagagaaggaacgcaccgcccagcagacggcccccg

SEQ ID NO: 49378 - RNA, 78 nt, Homo sapiens
cagggagacagccaaacgcagcgcagaccgcgcccgccgagggcgaccagacgaggggagacggacgggggagagagg

SEQ ID NO: 49379 - RNA, 84 nt, Homo sapiens
cggacacaaccgcgggcccgggacagacacagcaggcagcaacagcccaggagcggaaacagcgcaaaaaccccgaaccacgaa

SEQ ID NO: 49380 - RNA, 71 nt, Homo sapiens
caccccgcaggagaacgagcccccaccccggcaagaaagggaacaaccggacggcacccccggcaagggga

SEQ ID NO: 49381 - RNA, 75 nt, Homo sapiens
cggaagagaaaagcccgcaaagcaagagaggcaggccaccagccaaagaggggaaccgcccaaaagcccgccaga

SEQ ID NO: 49382 - RNA, 80 nt, Homo sapiens
ggccccgaagacaaaacccgaggcccgggaggagccaacaagcgcacggagccccaagcaagaacggcagaaggggaaaa

SEQ ID NO: 49383 - RNA, 100 nt, Homo sapiens
ccgggccaagaagcggccggccaggaagaagcgagcagcagcgcgccaggaaaagaccagggccacagacggccagcggaggaccagaggcgggaacgag

SEQ ID NO: 49384 - RNA, 56 nt, Homo sapiens
ggaaaggaaagcagcccgaaaagaaggaacacagcagcccaacacagacaggaacc

SEQ ID NO: 49385 - RNA, 76 nt, Homo sapiens
aaccgaaaccaaaacccccagcccagaaggacacacaccaaaccgggccagcggaccaaagggagccacagcacag

SEQ ID NO: 49386 - RNA, 86 nt, Homo sapiens
agcggaggagccacggaaggacgacgacaaacacgcagaggaaggagcagcgcaagacgcagcccagagagggggcagcgagcgag

SEQ ID NO: 49387 - RNA, 50 nt, Homo sapiens
gcaaaaaaagcacggaagcccaaaggcggggccagcaggccccaagccgg

SEQ ID NO: 49388 - RNA, 84 nt, Homo sapiens
agaaagcgcaacacgcccgcccgcgggccaagaaacggagaaaccggaggacccgccgcaaggcgaagcgcccaggggagaacc

SEQ ID NO: 49389 - RNA, 112 nt, Homo sapiens
gcgcagcaacaagggagggccaccggagcagacccacggaaaccaggcaagacacaagggaggcgaggacggacaaaaggaaacggacgggaggccagccagcagaaggagg

SEQ ID NO: 49390 - RNA, 80 nt, Homo sapiens
gggacgcaccacgagccaaaacggacagaagaaggaaacaacacaggaccaccaacagacacaaaaggagagacacggaa

SEQ ID NO: 49391 - RNA, 87 nt, Homo sapiens
gacaagaccaaggcaacaaggacaacaagagacgggacaagacagggcaaaggacagaccaggagcagggccgccccgaggagagcg

SEQ ID NO: 49392 - RNA, 75 nt, Homo sapiens
cggcccgcccgccccaacgcgggacagcgagaggacgaaaagcccagaagagcccagcccagcaggaggcacgag

SEQ ID NO: 49393 - RNA, 84 nt, Homo sapiens
gggcccgaaccacgaccccgccgcggcccccgcaaaacaaggcagggagccgagcggagccagggccccaggggaccgacccaa

SEQ ID NO: 49394 - RNA, 74 nt, Homo sapiens
ggagcaaagggggcacaggagggcccagggacaggacggccaagacgccacgggcacgggcaccaccagaagaa

SEQ ID NO: 49395 - RNA, 87 nt, Homo sapiens
agagcaaggggcacgcagaaggaccggccacggaacccgcccacgccagcgaagccgacaggaccaacgacaggcgcccccccccag

SEQ ID NO: 49396 - RNA, 77 nt, Homo sapiens
caaagaaggcaaggagagaagagaagaacagcacaggacagcccaccacagcggagaagagaacccgaccgaagaag

SEQ ID NO: 49397 - RNA, 72 nt, Homo sapiens
acgaagcacgcaacccgaggcgcggaccccggcccacaacgccacgcacagaaaaaggcagccgagcagaac

SEQ ID NO: 49398 - RNA, 87 nt, Homo sapiens
cgagggagggccgagccagccgcggccggaggagcccccaggccgaccaaagagcaggcaaggaacacggaacaccacccccagccg

SEQ ID NO: 49399 - RNA, 82 nt, Homo sapiens
cgacagcaccgcaggcgaaggacaggaaaagccagagagcggcagagaagaagggaggcccaaagagcaaacaaagaacaaa

SEQ ID NO: 49400 - RNA, 78 nt, Homo sapiens
cacccagcgggccagcgcccgccccacgcgccccgccggccaggccgacgggcaccccgagcagggaagacacaccca

SEQ ID NO: 49401 - RNA, 64 nt, Homo sapiens
gaagcccaccggggcgcccgaggaacgcacagaccacagagaagcaggcgaccaggcgcgcggg

SEQ ID NO: 49402 - RNA, 82 nt, Homo sapiens
gaccacaggcccagacgagcggaggaggcacagggcgcggaccgcacgagcgcgccggcacagccacaccgagaagaccggc

SEQ ID NO: 49403 - RNA, 81 nt, Homo sapiens
gaggaaagaaacaacagggaaccccagaccccagagacgaaccccccagggcagccgcaccagaggcccagcgggggcagc

SEQ ID NO: 49404 - RNA, 79 nt, Homo sapiens
ggaaggcccgccgcccgccccagagccaggcggcgcgcaggagcaccccgccggggagcgcgcccaggcgaaagccagg

SEQ ID NO: 49405 - RNA, 76 nt, Homo sapiens
aagaacgacagcgaggaaccccacaccaggcaaaaaccccccaaggaaaagaaagcagaggggaaacagagcaaag

SEQ ID NO: 49406 - RNA, 69 nt, Homo sapiens
aagacccagaaccaaaaacccggaggagcaacccgcgcgccgccgcaacaggggcaagagaggccgacc

SEQ ID NO: 49407 - RNA, 100 nt, Homo sapiens
ccacacgccagagccggagcgcgaaggccgggacccggccccggcccacaggggggggcaaacccgagagaacgggacagacgcaaagagacaggaggga

SEQ ID NO: 49408 - RNA, 86 nt, Homo sapiens
aaagaggaggggaggaggaggaggacagggaaaggagcggggagccccgcgccacagcggcagaggaacggaagccccgaggcaac

SEQ ID NO: 49409 - RNA, 88 nt, Homo sapiens
cagacacgccaccccaaggagcacgcagggcgagggaacagagagaaacccggcaagaaaccccacagagaccaccacacacgcggag

SEQ ID NO: 49410 - RNA, 64 nt, Homo sapiens
cggcaaccacaagccaggaagaagagggaaggggaacaggaccggccacagacagccccccagg

SEQ ID NO: 49411 - RNA, 76 nt, Homo sapiens
ggaagcgcgaacagcagcgcagccagaacaagccgggagaggaacagcgcgccgggcgcacgaacagcagaagacc

SEQ ID NO: 49412 - RNA, 59 nt, Homo sapiens
cggaaaaggcccacgccgggcgaggccaggcgcgggccaccccacggggcaacaagggc

SEQ ID NO: 49413 - RNA, 76 nt, Homo sapiens
gcgagccaacaagggcgacgcccgggcgcgcagaacaggcgcgcggcgacacccacccggaccaccggcccaggcg

SEQ ID NO: 49414 - RNA, 45 nt, Homo sapiens
gggaaaggagaggacccggagccgaaagacgagaaccaggacgaa

SEQ ID NO: 49415 - RNA, 36 nt, Homo sapiens
acaccacaagaagggcgccagagcccagcaagacca

SEQ ID NO: 49416 - RNA, 66 nt, Homo sapiens
agacgcagggcgcccccgagcccaaaaggcagagcgaggagagaagaaggagggaaagccaaacaa

SEQ ID NO: 49417 - RNA, 81 nt, Homo sapiens
ccaccgcagggaagaacccgagcgaagcgggaagaggcgcagacaagccgcagggcaacgacagaggaagaaccaagacgc

SEQ ID NO: 49418 - RNA, 74 nt, Homo sapiens
gcaggggaaagaacgagagccaggccgcaggcgaagggagggccgccccaaccgacgcaccagccggaggagga

SEQ ID NO: 49419 - RNA, 77 nt, Homo sapiens
acaacgaccggaagaaacaggccccaggaagaggagaagaccagaggcacagcagacacgaagccacccccagaacg

SEQ ID NO: 49420 - RNA, 68 nt, Homo sapiens
cccaacagacccaaacagacaacaaagcaggagaaaaccggaagagaaaggccgggaagcaggaaaga

SEQ ID NO: 49421 - RNA, 40 nt, Homo sapiens
cggcgcggagcagcagcagcagggcaggcgcgcggacgac

SEQ ID NO: 49422 - RNA, 75 nt, Homo sapiens
cagagacccaaggggacacgaacagagccccgaggcaccggggagggcacaaggagaacggcagggaccaacgcg

SEQ ID NO: 49423 - RNA, 87 nt, Homo sapiens
cccgggcaggggcggggcaacgcggaaggacgcacaagaccagccacgcaccgcacacgaccgccacaggaacggaccgcccagaga

SEQ ID NO: 49424 - RNA, 65 nt, Homo sapiens
ggggaaagcgccccagggcaccccaagggaggaagaaaccgaagagggaaaccgaccgccacaaa

SEQ ID NO: 49425 - RNA, 68 nt, Homo sapiens
cgggacccaagcaacccaagggaaccgggcccagacccaaagagacggcagacagggcagaaaaagag

SEQ ID NO: 49426 - RNA, 41 nt, Homo sapiens
cccagacaggggcgacggcagaggaagacggagcaccaggg

SEQ ID NO: 49427 - RNA, 79 nt, Homo sapiens
aaggacaacaagagacgggacaagacagggcaaaggacagaccagaccgaggagagcgcaaaaagaccaaaggacgggg

SEQ ID NO: 49428 - RNA, 93 nt, Homo sapiens
aagacggcccaaaacacagcgcaccacacacagagggaaacggaaaggacagggacaagcgcacagcggagaaagcagcgcggccaggaggcg

SEQ ID NO: 49429 - RNA, 76 nt, Homo sapiens
gcgcacggcaggacggagaggaaagaacccagggaccaagcgaaacgcaaacggaacccaccccaaaaagaaagaa

SEQ ID NO: 49430 - RNA, 77 nt, Homo sapiens
gggaaaaaggaccaaccggcaagggacaacggccaagagccaagccagcagaagagacagaaagagaccagaaacga

SEQ ID NO: 49431 - RNA, 52 nt, Homo sapiens
aggacggaggaggacagagacgccgccaggggaggggggcgaaaccgagcgc

SEQ ID NO: 49432 - RNA, 83 nt, Homo sapiens
cgaaagaaagcaggaacacgaacaccaagccccgaagcacacagaaagacccagcgggaggaagaagaggccgccagcagcag

SEQ ID NO: 49433 - RNA, 84 nt, Homo sapiens
gcagacgggagcgcaaggcgccccaaggccagacaaaacacaaagagagacggaaagcccggccagaagcagaaggcacgcagc

SEQ ID NO: 49434 - RNA, 79 nt, Homo sapiens
gaccgaccaggaacccaggcccgcgacaggggcagagccagaaggagagccaagcgccagagaacaggaggaggcaggc

SEQ ID NO: 49435 - RNA, 83 nt, Homo sapiens
aggcggcgagagaggcaggcggagccgaccgggccagggagggcacaccgcaccagggacacgggcgaagaaagcaagagggg

SEQ ID NO: 49436 - RNA, 55 nt, Homo sapiens
cagcccccgggagcgggacacagggcccggcggccagaacaacaccacacccgga

SEQ ID NO: 49437 - RNA, 59 nt, Homo sapiens
ccagcggaaagcaacaaaagacacacaccagagggagcaccgacggcaacacggagggg

SEQ ID NO: 49438 - RNA, 89 nt, Homo sapiens
cgagacccagcaggaccgggccagggcaggacaaggacaaggacgacgagaacggcaggagcccagcggacggaggccgcccacagaga

SEQ ID NO: 49439 - RNA, 72 nt, Homo sapiens
gaggggaagcaaagaccacaaaaagaaggagaccagaaaggaggcaaaccgaccaacggcggagagggcgag

SEQ ID NO: 49440 - RNA, 76 nt, Homo sapiens
ggccacgaccaccaggcgccagagggcagaagacgacaaacaccaaaaccagaaaccggaaccggcacagagaggg

SEQ ID NO: 49441 - RNA, 53 nt, Homo sapiens
cgggaacccccacgcggccagcgaaaacgcccaggagaccgccaaagacgacg

SEQ ID NO: 49442 - RNA, 64 nt, Homo sapiens
cagcagacgagacgcggaggcgggccaggccagcgggccggggagcgccagccgagaggagcgc

SEQ ID NO: 49443 - RNA, 61 nt, Homo sapiens
cgccccacaaaaccaagcgaggccaggccgccggaccgccaagggagaccacgaaggagag

SEQ ID NO: 49444 - RNA, 87 nt, Homo sapiens
acgagagaggcaccgggacggaccgagaccggaccgagagcggaccgagagcgcgaaacgcacgagaaggcccagccggaccaccca

SEQ ID NO: 49445 - RNA, 79 nt, Homo sapiens
ccggagccggggcgggcggcagcgagcggccaggggcccaaggagaggaagcaggagcagagagacccacggcaggggg

SEQ ID NO: 49446 - RNA, 73 nt, Homo sapiens
ggcgggaggagccgccccgaggagaagacagaggagccagaccaagagacagcacaggcgagcgagcagagac

SEQ ID NO: 49447 - RNA, 59 nt, Homo sapiens
ccaaggaaaaacgagcagaaagaagccaggcaggagacagagagaaagcaacagcaggc

SEQ ID NO: 49448 - RNA, 83 nt, Homo sapiens
caggggaggaagccacccgagagaacacaaggaacgaaaggaagggaagaagcagaaccaagacaaaagaagacccccagcaa

SEQ ID NO: 49449 - RNA, 54 nt, Homo sapiens
cagcagggaagcagaagggaccccccacaccgagcggcccacgcggccccccac

SEQ ID NO: 49450 - RNA, 81 nt, Homo sapiens
gcgcgcccgccacggcgccgagccgcggccgaaaagaagacaccccggacccccccacgccaaaacacaagaagccagaaa

SEQ ID NO: 49451 - RNA, 70 nt, Homo sapiens
gcgggggcgccccgcacccgccgggccaacaccgcggcaacgccagccagcaggacccaggagcggaccg

SEQ ID NO: 49452 - RNA, 85 nt, Homo sapiens
ccaccgaccccaacggcaccagcccgcacccgcagcaaaaacggccacacgacacacagcaccaaagaccgcacagaagcagaag

SEQ ID NO: 49453 - RNA, 90 nt, Homo sapiens
ccagcgcagggcagcagccgcccagaagaccagggccaacaccaaccaagaagaaacacggagccgagacaccgaggaaaaaaagaagaa

SEQ ID NO: 49454 - RNA, 52 nt, Homo sapiens
cgcaccacgaaccagaccaagcggggaacacagggcgccggaagagggaacg

SEQ ID NO: 49455 - RNA, 78 nt, Homo sapiens
caagagacagcgacagggaccccggcggagaacggaaaagcaccaggaagcagagaggaccgcagaagggaaggagag

SEQ ID NO: 49456 - RNA, 77 nt, Homo sapiens
gggagaccccagcaagacgccaggccccggaagccagaaaggccaccccagcagacaggccaaggcccgggcaagcc

SEQ ID NO: 49457 - RNA, 80 nt, Homo sapiens
aggcgacgcccggagaagccaccagccgaagcaccaccaagaagcgcaaaccgggaaccaggagaaagacagcaaagaaa

SEQ ID NO: 49458 - RNA, 74 nt, Homo sapiens
gagcaaggcaaagagcccggaggggagagaggggcggaggccggccagacaggaaagggggaggaaaaggggca

SEQ ID NO: 49459 - RNA, 71 nt, Homo sapiens
aaaaagaggagagaacaaacccggcccccaaggcaaaaggcagaccgaaaaaacagacggaaacaaaaaca

SEQ ID NO: 49460 - RNA, 64 nt, Homo sapiens
ccgggggaccccgcacacgaagagacgccgggcaccccaacacgcgggcgcggacggcaggggc

SEQ ID NO: 49461 - RNA, 86 nt, Homo sapiens
agcgaggaggcgccggggccgggcggggaggcggagccggagcgcggccaggcggggaggcaccacagcgaacacaacccccgggg

SEQ ID NO: 49462 - RNA, 72 nt, Homo sapiens
cccagcccccagcagcgggaacagacaagaaaaaggcgcagcccaacagaacccagaggaaccagaaggagg

SEQ ID NO: 49463 - RNA, 61 nt, Homo sapiens
ccagccagagagccaagaagaacagacagacaggcccaggcgcgagagcgcggagagccag

SEQ ID NO: 49464 - RNA, 60 nt, Homo sapiens
ggacccagcgccgcggcgcccgagcggcgggccgcagagacggagccgccgcgcccaggc

SEQ ID NO: 49465 - RNA, 85 nt, Homo sapiens
caccggcggggggcgagcaacaccggggaagaggagcggaaaaacaagcaaaagaaaaacagggaaagaggagaaagaaaggaag

SEQ ID NO: 49466 - RNA, 80 nt, Homo sapiens
gaaccagaggcgaagagcagagaacaagcagaagcacccaaaagagagaagaacgccaggcacaaaacaggaccacaagg

SEQ ID NO: 49467 - RNA, 68 nt, Homo sapiens
cggaaagcgaaggaaagagccaaagagggaagcccaacccagaaagaacaccgaccgaggacaacagg

SEQ ID NO: 49468 - RNA, 73 nt, Homo sapiens
gcggaaaccgacgcccgggggaaacagagaaagaaggcggccaggccaaccgaaggaccgacagcccccagga

SEQ ID NO: 49469 - RNA, 71 nt, Homo sapiens
ccagccagacaccgggaaaacagggaccgagcaagcaggccacaacagagaggaaagaaagaaagaacgaa

SEQ ID NO: 49470 - RNA, 56 nt, Homo sapiens
gcgggaagcgaaagaacgcagaggcccacagcaagacaggaggaacagaagggaaa

SEQ ID NO: 49471 - RNA, 39 nt, Homo sapiens
ggcgggaggccaccgccagccaagcgaaagacagaggcc

SEQ ID NO: 49472 - RNA, 75 nt, Homo sapiens
caaggagggcgccaccgaggaagagaaccgcggacagggccgaggagggccggcaccaggggggcgcgagagcac

SEQ ID NO: 49473 - RNA, 55 nt, Homo sapiens
ggaggaggcgagggcacgggaaaagacagcagaggcacacaaacggaaccgcaca

SEQ ID NO: 49474 - RNA, 73 nt, Homo sapiens
aagaggcggccaaggggacgagcaaaggaagcgcgaacagcagcgcagcacaggaagccggagaaccgaagga

SEQ ID NO: 49475 - RNA, 72 nt, Homo sapiens
cacaaaggcaccgggagcaggaaaccagaccgcaacagagaccaaggaaggggaagccaaggaggcccacca

SEQ ID NO: 49476 - RNA, 76 nt, Homo sapiens
aggacccagggacccagaaacagggaagaaggacgcagacggggaaaacgaaagccagggagaagaaccaacaacg

SEQ ID NO: 49477 - RNA, 80 nt, Homo sapiens
acaagcgggacaagcccgggaacaacacaccagagaaggcgaagaaaacccgcgggagagacaagccacgcagaagagga

SEQ ID NO: 49478 - RNA, 36 nt, Homo sapiens
ccgcagaggccgacgggaagggaccccgacggagag

SEQ ID NO: 49479 - RNA, 38 nt, Homo sapiens
cagcaggagaaggcagagaaaaaggcacacacacccgc

SEQ ID NO: 49480 - RNA, 77 nt, Homo sapiens
ccgccggaggaacgagccgggaaaccgaagaaggcagagaaggcaaacaggaggcgcgggacaggaggcagcaaaga

SEQ ID NO: 49481 - RNA, 71 nt, Homo sapiens
gggagcgggccccgacagacgccgggcaggggaagggggccagacaaccagggaagcacagacacgcgcac

SEQ ID NO: 49482 - RNA, 77 nt, Homo sapiens
cggagccgacgccgggaacccgccgcgcgccgcgaccccaagcaggaaagcaaaaccagaggcccagaagagaacca

SEQ ID NO: 49483 - RNA, 34 nt, Homo sapiens
acaaccaccgcgcaccaaggagccaagggacgga

SEQ ID NO: 49484 - RNA, 55 nt, Homo sapiens
gccaggaacaagggagcccgccagaccagggcaagaccaaaacccaggaagcagc

SEQ ID NO: 49485 - RNA, 76 nt, Homo sapiens
ggagggaagcaaaaacaaagagagacgcaaagcacaagaggaccgcccccaaaggggaagagagggaagggagaaa

SEQ ID NO: 49486 - RNA, 76 nt, Homo sapiens
cgcggcggcgggcacccggaggcgcccgagcggccgagacgcaccagagccggaccggggacgcgaagcaggcccg

SEQ ID NO: 49487 - RNA, 83 nt, Homo sapiens
aaaacggaggagcagagcgaaacggaagagaaaaccgaaaaagcagaagcacaagccaaacgagcacaaagccggccgcccag

SEQ ID NO: 49488 - RNA, 72 nt, Homo sapiens
agcgcgcgccaagggccgacacaacaccgagacaacacagccaagcaccgaacaggacaacacaaacaaaaa

SEQ ID NO: 49489 - RNA, 106 nt, Homo sapiens
gggaggagcggcagccgcgaggaggcgcgggagggcgagaacgaccccgagacgcaggggaacaggaaccgaaaagaacaggagcccagggagaagagcaagacag

SEQ ID NO: 49490 - RNA, 80 nt, Homo sapiens
cgggccccgagggcggaccgagcaaagcagacaaaggagagacagcacaaccaggggcgcaacccagcaagagaaggaca

SEQ ID NO: 49491 - RNA, 83 nt, Homo sapiens
gcgggggagccccgggagccgcacgagcgagcagagagaaggagccccagcgccccggaggaaggcggaggccaacaaagaaa

SEQ ID NO: 49492 - RNA, 76 nt, Homo sapiens
agcaacagcgcaaggcagggaggacagccaggcagagccacacgggaggaacacggagccaagaggaacacggagc

SEQ ID NO: 49493 - RNA, 86 nt, Homo sapiens
cacggcccgagacacaccaggccggcaggcgagaaaagcgagaccgcggcgaggaccggagcaacgacaaggacagaacaccaggc

SEQ ID NO: 49494 - RNA, 81 nt, Homo sapiens
ggcaacgccacaagcccgccccaccgagaccgaaaagacagggccaaagcggcaggagaaggaagggaccggaaacgacaa

SEQ ID NO: 49495 - RNA, 78 nt, Homo sapiens
gcgagagcggcagcagcaccagcccaagagaagcacacaccacgggacacaggggaaaggcgcgcaagccgcggacaa

SEQ ID NO: 49496 - RNA, 66 nt, Homo sapiens
cacccgcgcgggcacacaaaacaccaaccaaaagacaccggacacgcagagccacggcgcccaggc

SEQ ID NO: 49497 - RNA, 68 nt, Homo sapiens
gcaccccgggggccggcaagagcaggccagaaaggggaagggggccagacaaccagggaagcacagac

SEQ ID NO: 49498 - RNA, 58 nt, Homo sapiens
gcagacaaaagggccaaagaagggagaaacgcgccaagaagagagaccaggagcaagg

SEQ ID NO: 49499 - RNA, 67 nt, Homo sapiens
acaccgagcccaagcggaaagcacgcgcacagaggcgagcccagacaccagaagcgaaggagaaggc

SEQ ID NO: 49500 - RNA, 73 nt, Homo sapiens
gagagaagaaggcaagcgacggcccgaacgagcggaggccaacaaagaggggaaagcgcgaaaaagggcgcaa

SEQ ID NO: 49501 - RNA, 74 nt, Homo sapiens
aggaacagaacgcggccccagccacaccaagcaggaggacagcaaggagaccaaaaaacaagccccagcagccc

SEQ ID NO: 49502 - RNA, 79 nt, Homo sapiens
ggggggcgccagagaccaggggcgaccagggcaaagaagaaccagagccagaggaccaaaagcgccaccacacacaaag

SEQ ID NO: 49503 - RNA, 75 nt, Homo sapiens
gggcgcgaggggaacggaggccagagcgcgacaccaaaaaggcaaggacagaacccaagcaggccggagaaaaga

SEQ ID NO: 49504 - RNA, 74 nt, Homo sapiens
agccggggaagagacccaaacgccaacagaaacgcaccaccaagccaaaagccaaaagccgagaacgacgaaga

SEQ ID NO: 49505 - RNA, 75 nt, Homo sapiens
caccacacaggagaacgaacaagaggcagagaagccaaacgccaagccacccggccagccaaaacgggaagacaa

SEQ ID NO: 49506 - RNA, 69 nt, Homo sapiens
ccagaccacagcacagccgggaaggggagccaccagcccccgaccaccccacacagaccgcgccccagg

SEQ ID NO: 49507 - RNA, 80 nt, Homo sapiens
acaccccggcacaggacagcgccagacgcaccgccagaagcgcggccaacgcacacccaaaaagaggagccgccgcaccc

SEQ ID NO: 49508 - RNA, 77 nt, Homo sapiens
gaaagagccccagcaccgccccccggaagaaggaagagccaaggccgacaaaaccggccgggaagcaagaaaccgac

SEQ ID NO: 49509 - RNA, 74 nt, Homo sapiens
cccggcgccccggcccccgccccagcccgccggcggcggcggaaggggggcagaaagaagaggaggacaacaag

SEQ ID NO: 49510 - RNA, 76 nt, Homo sapiens
ccaccgcagccagggcaacgccaagcccgaacagagccacacgaccccgcggccaaggagggcggggcagagcagg

SEQ ID NO: 49511 - RNA, 79 nt, Homo sapiens
gggcccgcaacggcccgaaggccaggagggggcaggagagccgcagccgaagaagggcaagaaggaacagacaaaaacg

SEQ ID NO: 49512 - RNA, 70 nt, Homo sapiens
gcaaccccagaccaacacacagaaagggagacgaaggcaccgaaaggcaagggaccagagccgagcacgg

SEQ ID NO: 49513 - RNA, 76 nt, Homo sapiens
cgggcacccaccggcagccaggaaagaggcagcgcagcccggaaagaaacaaagaaacaaaacgagcaaggcaaga

SEQ ID NO: 49514 - RNA, 78 nt, Homo sapiens
gagacacaacgcaaaacgaaaacagcacaagccagaagaaagaggaaacgaaaacgaagcaagaaaaggagcaagaac

SEQ ID NO: 49515 - RNA, 87 nt, Homo sapiens
caggcaaagcgaagaagaagaggaagagccaaagagcaacaacgagcgacaccaaagggcgaaccgaccaagaacaacacccagagg

SEQ ID NO: 49516 - RNA, 69 nt, Homo sapiens
cggaaaacgcaagacacaagcaaaagaagcccgagggaagaaagaggagacgcggacggacgacccaag

SEQ ID NO: 49517 - RNA, 68 nt, Homo sapiens
gacagaggagaacaagaacccccccaagagccagagaggacgggacccaggggagcgcagcaaagcag

SEQ ID NO: 49518 - RNA, 72 nt, Homo sapiens
ggcgacgaggcacagcgcgcaagaagggagggcggagaacggaaaagcaccaggaagcagagaggaccgcag

SEQ ID NO: 49519 - RNA, 68 nt, Homo sapiens
cagaggagggaaggccggacgaagggcaccacggagagaagcagaagacaagaagaagccaagagaaa

SEQ ID NO: 49520 - RNA, 81 nt, Homo sapiens
ggaaggccaaaggccaccgccgcgcgcccgcacagaagaggggaggaagcggcccccagaagccggcgagcaggcacccgg

SEQ ID NO: 49521 - RNA, 68 nt, Homo sapiens
cgaagcccaggagaagaagccacaaaaccgaggggaaagagaccgggccgacgggcgggaaagaggaa

SEQ ID NO: 49522 - RNA, 58 nt, Homo sapiens
ggccggaaacgggcgggagagacaacagcagcaaggcgccgggccagccagggcccca

SEQ ID NO: 49523 - RNA, 79 nt, Homo sapiens
ggcaaaacagacagaacgcagaaagcaggcggggcaccagaggcgagcacaacccacacaagcagaggaccaggccgcc

SEQ ID NO: 49524 - RNA, 58 nt, Homo sapiens
gccagacaaccggagccacgccccacgaccgccagcaggcaggagaagggcaccgggg

SEQ ID NO: 49525 - RNA, 39 nt, Homo sapiens
ccccgagggcgggaacagaagacccgaggaccgggaacg

SEQ ID NO: 49526 - RNA, 60 nt, Homo sapiens
aaagggccaaagaagggagagagaccccaagacagcgggcgcgaccaaggaaacaaagga

SEQ ID NO: 49527 - RNA, 66 nt, Homo sapiens
caacccaggagcacgaagggaagccaaggccaccaaaacaggcaaacggccccagcagccgagcgg

SEQ ID NO: 49528 - RNA, 75 nt, Homo sapiens
cccccgaaaggaagcacaggggagaggcaagcacggaccaggacaggcgccccgcgggaagcggcagagcccaga

SEQ ID NO: 49529 - RNA, 79 nt, Homo sapiens
gagagaaaagacacaggagaacgggaggcgcagaaagaggaggagagaagagaggaagcgagcagcacgggcaagcggg

SEQ ID NO: 49530 - RNA, 76 nt, Homo sapiens
ccgaaccggaagggcaagaccaaaaagagccaagcgagaagagagaaccacaaagggcagagcaaagacccagaac

SEQ ID NO: 49531 - RNA, 98 nt, Homo sapiens
cgggaagggcaggcccggcgccgccacgccgcagccaggagaggcgggccagcggagccgggacggagagggaaggagagaaggagagagacccagcc

SEQ ID NO: 49532 - RNA, 70 nt, Homo sapiens
acacaaaaaggaaagagaagaagcacccgagaaaaagagagacaacgagggaggagggagcgggaccgag

SEQ ID NO: 49533 - RNA, 48 nt, Homo sapiens
gagggaggagagagggagagccaaagaagaaaaggcaacgcaaaggag

SEQ ID NO: 49534 - RNA, 71 nt, Homo sapiens
agcgcccccaaacgccccccgccccccccgcagcgcgcagagcccggccaagaacaagcagcagccgaacc

SEQ ID NO: 49535 - RNA, 107 nt, Homo sapiens
cagacacgagaagcaaagacagggacaggacagcgagcgaggacgaggaacggcgggcagcggggaagaagaaaaggaaccgaggccccccggcgacacggcgaaga

SEQ ID NO: 49536 - RNA, 73 nt, Homo sapiens
caaaagagcccccagagagaaaggggacaacagagccgacacagccaagaagcagagcaaaacaggaaaaaca

SEQ ID NO: 49537 - RNA, 87 nt, Homo sapiens
cgggccggagcgggccggacccccacccgccgaggggcccagggaggacgcgggacgccacgagccggaaagcgacccagagccaag

SEQ ID NO: 49538 - RNA, 86 nt, Homo sapiens
cggaccacaaaccgcgccagaaaaaccccaaacgacacaagaccacagagaaaacccgccaaacgcccagcaagggacaggaaccg

SEQ ID NO: 49539 - RNA, 83 nt, Homo sapiens
cgaggaaaggggagcgcagcggcgggcggcggcggcggcggcagcggcagcgcggcggggccgggccccgagccccggcccca

SEQ ID NO: 49540 - RNA, 74 nt, Homo sapiens
gcaggcacaggggcgcaccgcaccgaaggccggccagcaagccagaccgcagaccagacacacccgaaacacgg

SEQ ID NO: 49541 - RNA, 68 nt, Homo sapiens
ccaggaaggcaagaaagcaacagcaaaaccgggagacaagacgaagagcaagaaaaacaaaaaaaagc

SEQ ID NO: 49542 - RNA, 91 nt, Homo sapiens
cgcccccccagacaagaggacaccgcggaggaagaggcagaggaggggacacggggacgcccggcggcccgcagagggcggcaacacgagg

SEQ ID NO: 49543 - RNA, 69 nt, Homo sapiens
cagaggaccccagccgcgcccgggagagcaagggacaggcccaaggcaagccacccccccggaagagag

SEQ ID NO: 49544 - RNA, 79 nt, Homo sapiens
cccacccaggccccgcaagaagggccgggggcgagccggagcgaccccggcagggggcgacagacagcggaaagcccca

SEQ ID NO: 49545 - RNA, 66 nt, Homo sapiens
aagcggggaccaccaaggaaaaaggacacaggaaacagaaaacaccagacagacccgaacccgccc

SEQ ID NO: 49546 - RNA, 39 nt, Homo sapiens
cagaaccacccagaggggaggaggaggagaggaaggccc

SEQ ID NO: 49547 - RNA, 72 nt, Homo sapiens
ccagaagacagagaacagagcagacggcaagacccaggccccccgggccgggcacgggcgccagcggcacgg

SEQ ID NO: 49548 - RNA, 78 nt, Homo sapiens
ggacgaaaaggggcggaagaaaaacaaacacacgcaaaggagaaaggaaccgacaggaccgccgaacccaggccggaa

SEQ ID NO: 49549 - RNA, 75 nt, Homo sapiens
ggagcggcgcagaccgagacccggacagggcaggaaacagagcaaaaagcggaaccacaagaagaaagcaacgac

SEQ ID NO: 49550 - RNA, 74 nt, Homo sapiens
aagaaaggaccagaagagcgcgggcaggggacccgggaacgcggagacgccagcgacgaaccgaagacaagagc

SEQ ID NO: 49551 - RNA, 72 nt, Homo sapiens
ccagcccggggccggcgcagggcggaaggacaacagcccgacaaccaggcccagaaggggaagacccccagc

SEQ ID NO: 49552 - RNA, 74 nt, Homo sapiens
gcagggaaggaacgcaaaacacgggaaaagagcaggccgaggacgcgaagccgccgccgccacaacccagggcc

SEQ ID NO: 49553 - RNA, 66 nt, Homo sapiens
ggaaaagcccaagaaacaaacaggacacagagccacaaaagaggaaacaaacaggaacgacaaccg

SEQ ID NO: 49554 - RNA, 74 nt, Homo sapiens
gagaggcggccaacaagacaggcacacagcacccgagggagagcgcaccaccccacgcgccaggcgagacccca

SEQ ID NO: 49555 - RNA, 79 nt, Homo sapiens
ccggcgcgggaagcccgcggcgcgcgccccccggacccgcagggagagcacaacaaggcaggaaccaaagggacaaggg

SEQ ID NO: 49556 - RNA, 79 nt, Homo sapiens
ccccgccgccagacagcaccaggagaccagaacagcccagggcgggaggccaggcagcacgcagacaagaagcgcagga

SEQ ID NO: 49557 - RNA, 73 nt, Homo sapiens
caaaccaaaaccacacccacccagaccgccagagggaacaggggaaagcagaagagagaagaagcaaaccggg

SEQ ID NO: 49558 - RNA, 76 nt, Homo sapiens
gcaccggaagcaccagcgaggaagaccagaggacaagacaaagggagcaagacaagccaaagaggaaaagcaaagc

SEQ ID NO: 49559 - RNA, 37 nt, Homo sapiens
cacaaagcagaaaaaggaaccagcaacgcagagccga

SEQ ID NO: 49560 - RNA, 34 nt, Homo sapiens
gccacaagacaggggaccccacgcagaaacaaac

SEQ ID NO: 49561 - RNA, 72 nt, Homo sapiens
gaagaaggaagggccacccaggacaggggcacccaggggccagagaacaagcccagacagcaagacgcgagc

SEQ ID NO: 49562 - RNA, 74 nt, Homo sapiens
gccgccgcgcaccgcagcgccggggcacgacacaaaaacagacaccacaccgagcagagagcagaaggaaacag

SEQ ID NO: 49563 - RNA, 76 nt, Homo sapiens
ggcaggcaggcgagagcacacggcaccagcacgcccagagccagcagaagaggaccagacgcccgggggggcggcg

SEQ ID NO: 49564 - RNA, 73 nt, Homo sapiens
acagagggaccggaggaggaaagccacagaaaaaaaagaacggagccagaagcgggaggagaaacaccccaga

SEQ ID NO: 49565 - RNA, 74 nt, Homo sapiens
gggcaagcagccagacggggaaagcggccagcggagagagagcaagccaggcacagcaagaaccaccacaggag

SEQ ID NO: 49566 - RNA, 77 nt, Homo sapiens
cacgaggcaacacgcaaggccgccaccagagaccgagcccagcggacccaaaggacccccgcgagagccccaagaac

SEQ ID NO: 49567 - RNA, 49 nt, Homo sapiens
accacccccaaagagcgggacggggcaggcccggacccaggggcgcaaa

SEQ ID NO: 49568 - RNA, 81 nt, Homo sapiens
gcccagcccccaagagcgggaacagcacacagagccaagaaggcagcagcagaaccccggccgccggaaaggagaaaagga

SEQ ID NO: 49569 - RNA, 77 nt, Homo sapiens
acacccggcccaggagcgacgccagaaacagccaccagaagacgggcagaagagcgacaccagggaagcagcacggg

SEQ ID NO: 49570 - RNA, 74 nt, Homo sapiens
cggcgaaacagcaagaacgccggcagggaccgcgcccaggcggaggcagaacggcccagcaagcccacaaagcc

SEQ ID NO: 49571 - RNA, 71 nt, Homo sapiens
gagagaggcacacccaaagacgggagcaccagcccccacacagcagggcccgaaggagaccgaacagaacc

SEQ ID NO: 49572 - RNA, 70 nt, Homo sapiens
cgggggaaccggcgcgccggcgcgcggcgcggacaggcccaaacggaagagaccagaagagcaggaggaa

SEQ ID NO: 49573 - RNA, 79 nt, Homo sapiens
cggccccgccaccgagcgccaccggcggagcgagcgggaaacggccgcggagccaggaacaggagggagagggccagag

SEQ ID NO: 49574 - RNA, 77 nt, Homo sapiens
aaggcaagagggagccaacgcgcagaagcccagggaccgccaggaggaagcaagaccaagagggcgggaaagcccaa

SEQ ID NO: 49575 - RNA, 65 nt, Homo sapiens
gacgacgcaccgcaggcagacaaaagggccaaagaagggagagagccgaaacaaaggccacgccc

SEQ ID NO: 49576 - RNA, 111 nt, Homo sapiens
caacagagaccaaagagagacaaacaagaagcacgacagacgcacagggcaggagccggggggggcacagagccccggaagacagcccccagcgaccagacccagggccag

SEQ ID NO: 49577 - RNA, 73 nt, Homo sapiens
ccccaggagcggcagcacgaaaggaggaggccgacaacaaccagaaaaggccaggaaccaccggacaaacacc

SEQ ID NO: 49578 - RNA, 73 nt, Homo sapiens
aggaagacagagaagaggcccgcgaagacaaaaaacccaagaacccaaacgcgaaagcagcaacggggagcag

SEQ ID NO: 49579 - RNA, 74 nt, Homo sapiens
gaggaagaggaggaggaagaagaagggaggggcggggcagccgggggggggaaggggcagggggaggcaaagga

SEQ ID NO: 49580 - RNA, 84 nt, Homo sapiens
gaggcagcgcgggacccagcccaggcggcgcggacggggcggggcaagacacagcagcagccaagcgcaggccgcgaggcgaga

SEQ ID NO: 49581 - RNA, 78 nt, Homo sapiens
cgcgggagcccagccaggaaaggacagaagggcagagcaacgagaaaaagacgccggcacgggggcccgccgaggcca

SEQ ID NO: 49582 - RNA, 81 nt, Homo sapiens
gaggaagccaagcaccgcagcccagcccagcaggagacacgagcccacccgagaccacgccggacccgccccgccacagaa

SEQ ID NO: 49583 - RNA, 107 nt, Homo sapiens
acgcaaaaccgagaaagccacacacaagggacggccacacaacagcagccccgaaacagacaagggcaaaaaaagacccagaagcccaaccaagggcagaaggaaag

SEQ ID NO: 49584 - RNA, 59 nt, Homo sapiens
gccaccagccaggccacaagggacgaaacgcccaccccgggaagcaggacgcgcacaga

SEQ ID NO: 49585 - RNA, 79 nt, Homo sapiens
cgggcacagaggaacacaccccaaaacggcccacgggagcagaaacgggagaaaggaaagaagaaggcaacaagcaagg

SEQ ID NO: 49586 - RNA, 58 nt, Homo sapiens
ggagacagagagcccggacaacagcaagcccggacgaaagggagaaaagagcaaaagc

SEQ ID NO: 49587 - RNA, 81 nt, Homo sapiens
aacagaccacagggaccaccgggggccgaagggcccacggggaccagccagggccccaggacacgggagagcacaggacca

SEQ ID NO: 49588 - RNA, 71 nt, Homo sapiens
cgaggagacgcaaagaacgagagaaccaagccagacaacagacggacagcaaccgccccacggaaaaccag

SEQ ID NO: 49589 - RNA, 77 nt, Homo sapiens
gcccgccccggcgggcagagaccagcaccggagaagacagaaggacagagaagaacccagaaaaaagcaaggccgaa

SEQ ID NO: 49590 - RNA, 56 nt, Homo sapiens
ggagaacccgcaggaccaggaggggcacagaacgaagaggagcaggaaacagagaa

SEQ ID NO: 49591 - RNA, 71 nt, Homo sapiens
gcacaccgacccggggacccccggggagcgcgcggccgcggccaccggaagcagggccgcaaggccaggcg

SEQ ID NO: 49592 - RNA, 98 nt, Homo sapiens
cgcaggaggaaccccaggcccccagcggggccacacgcacacagggggacaacagcaggagcaagggacagaggacgcgccgggccagagagggaaga

SEQ ID NO: 49593 - RNA, 49 nt, Homo sapiens
aaccaacggcccgggaccaccggcgacagcagaaagagagagagagaga

SEQ ID NO: 49594 - RNA, 72 nt, Homo sapiens
aaggggacaaaccaacagaagggcaaccaggacggaaccacagacgcggagaagaggagcagccaccaggga

SEQ ID NO: 49595 - RNA, 90 nt, Homo sapiens
cgcgggggccgcgcgaagacaggaccagggcacggaggcgcaaggaagaagagacgccgcgcggcagacaaggcccggcaggcaaagcgg

SEQ ID NO: 49596 - RNA, 68 nt, Homo sapiens
caagccccagggaagccacagcaccccagcacccagggaggggggaagacagggcccagcaccacagg

SEQ ID NO: 49597 - RNA, 72 nt, Homo sapiens
ggccgggagggcccagggcggggcccgaggcaggagccagaagccaggagccacgagaggagcagcacaaaa

SEQ ID NO: 49598 - RNA, 76 nt, Homo sapiens
gcacaggacagaacaggcgaaccgcaccagcggccacgaggaaaacaaaaggagaagacaaaagagagaaaagaaa

SEQ ID NO: 49599 - RNA, 77 nt, Homo sapiens
accaaaagcgggggaagaagagaggacggaggaccgcaggaagaaggcaagaagccacaaccaccgagcccccgccc

SEQ ID NO: 49600 - RNA, 81 nt, Homo sapiens
gcagcaagaaagggaaggggggcagacccaaaggaaacgcacgaaagaaacaggagagcgcagcgaagcccggggaagcac

SEQ ID NO: 49601 - RNA, 67 nt, Homo sapiens
cacgaccgggcaaaaaccagcaagccaggcccgagaggaaacgccaaaggagcaagaaaaaggaagc

SEQ ID NO: 49602 - RNA, 49 nt, Homo sapiens
gccagagccgaaccaaagagcagcaggagacagagcccaagagacacag

SEQ ID NO: 49603 - RNA, 88 nt, Homo sapiens
gaggagcggcagccgcgaggaggcgcgggagggcgagaacgaccccgagacggccggcggacacccaggaccgggcgggccacaggaa

SEQ ID NO: 49604 - RNA, 76 nt, Homo sapiens
gaccgcaggagcaacacggaggcacacaggaccgacacaaggacagagcaccaagaccgaagaaacggcacaaaag

SEQ ID NO: 49605 - RNA, 78 nt, Homo sapiens
gcccgggcaccagagcgacgggcaggaaggagggggcgcacaaacgaggcccacccgggcaggagaggccgaccaccc

SEQ ID NO: 49606 - RNA, 80 nt, Homo sapiens
agccggagcgccgacgaccaagaggcgaagaggccggaggaggcggaggccagccgagacaccacgacgccacacgacag

SEQ ID NO: 49607 - RNA, 58 nt, Homo sapiens
aggagggagaacacagcaaccgaccaggacaaggcagagaagagcaaaagaaagcgag

SEQ ID NO: 49608 - RNA, 73 nt, Homo sapiens
caacgcgacaaaggagagaaacagccaaaacagcacaacagcaaccagagacaaagcacccagaagggaagaa

SEQ ID NO: 49609 - RNA, 76 nt, Homo sapiens
agcggcggagaagacgaggccccacgcagcccacgggccacgaaacggagcaaacagcaagagggaaacagaaaaa

SEQ ID NO: 49610 - RNA, 77 nt, Homo sapiens
cggagccgaggcgagcgccgcgcgcaccacggcggggccggggagcccgggccagaccccccagacccagcccaccc

SEQ ID NO: 49611 - RNA, 72 nt, Homo sapiens
cagggagagcaggacaccagcacaccgcggaggcgcccaggcacaagaccggcagggaggaagccaagaaaa

SEQ ID NO: 49612 - RNA, 86 nt, Homo sapiens
acaagccgcggcagccgcggaccaccgccgccaggcggaggcacccaccacgggccaggcgggccagaggcaagccgcgggagcca

SEQ ID NO: 49613 - RNA, 64 nt, Homo sapiens
ccaacagcaggccaaccccaggcaggcccaggaagacacgagaagcccgaggaggcgaagccaa

SEQ ID NO: 49614 - RNA, 69 nt, Homo sapiens
ggccagccccgcgacggcccacgagccaagcccaggcagcggcccagcgcaagccaaagcaggaggcag

SEQ ID NO: 49615 - RNA, 81 nt, Homo sapiens
gagagcccccaggggagccggcggaagagccaagccgccaggccaccacagcccggggagcccacagcgccacgccggaac

SEQ ID NO: 49616 - RNA, 67 nt, Homo sapiens
gcccccgacgccaccccgcgcgcgcgcccccgcgcgcccccaggccgggggacgcgccacagacggg

SEQ ID NO: 49617 - RNA, 73 nt, Homo sapiens
aagacagggagcaagccagaccggcccggaccgcccccagagcagaaggagaaacgggggagaaagccaggag

SEQ ID NO: 49618 - RNA, 72 nt, Homo sapiens
cgcagggcgcccccggcccccgggccacgggcaccagggcccacagggcacagagaacgaagaggcagagag

SEQ ID NO: 49619 - RNA, 83 nt, Homo sapiens
agcggacgccggccgccgcaggagagcggaccgcgaagagagacacgcaggaaagccccagccacccacaaacagagagaagg

SEQ ID NO: 49620 - RNA, 75 nt, Homo sapiens
ggaccaagacacccgcgagagagccaaggcccgaaaaggagccaaaagcaacacccaggcaaagagggaacgaaa

SEQ ID NO: 49621 - RNA, 74 nt, Homo sapiens
gaggacccagaggggcagcggacgaagggaagggccaagagacccacagaagcacaggaggccccaaaacagcg

SEQ ID NO: 49622 - RNA, 63 nt, Homo sapiens
gcccgaagcgggaaggcgagagccaaccagaccccgagaaaaagaagacaaagaagggcacac

SEQ ID NO: 49623 - RNA, 78 nt, Homo sapiens
ggccgccaggcaccgagggaccccgcagccggagaaccaccaggcggcagccgggcaggggaccgggagccgcagggc

SEQ ID NO: 49624 - RNA, 63 nt, Homo sapiens
caacagaagaagcgcaggcacgacggccagggcacggaagagcaccccgaggagaagcaaacc

SEQ ID NO: 49625 - RNA, 86 nt, Homo sapiens
cagaagagcggaaagcaaacgggagcggcccccagggcggagcagccagccaggccagggagagggaacccagaagccggcagcgg

SEQ ID NO: 49626 - RNA, 77 nt, Homo sapiens
caaaagaccccgaagaggaagacaagaaaggggagcaagaagaaagagcagggaggagggagcgacaggaagaaaga

SEQ ID NO: 49627 - RNA, 60 nt, Homo sapiens
ccgcccgggcgcaagaaagaagccaggaaccagaacgggacacgccgcagggcgaggccc

SEQ ID NO: 49628 - RNA, 81 nt, Homo sapiens
ccccgagccccccggagccggcaccccacgaaacgcaaggagcagacagaaccacaccaccggaggaagccccagcaagac

SEQ ID NO: 49629 - RNA, 59 nt, Homo sapiens
ccggagaagccaccagcgcggagccgagagcgagacgaccaacggacagcaggcgccgg

SEQ ID NO: 49630 - RNA, 68 nt, Homo sapiens
gggaggcgcggccgccccgcgggggacgaaacagggagcagggcggcagacccgcaggaccacacacc

SEQ ID NO: 49631 - RNA, 96 nt, Homo sapiens
ccacccccacgggacagaaacgaagaggccggaaagccaaggagaaaacacacggacggagcgaaccaggcaggccaccgaaggcacgggacagag

SEQ ID NO: 49632 - RNA, 69 nt, Homo sapiens
aggcgccgccccagcccgcgaacgacgaagagagaaaggcagggcaccccaccacagcgacaaagaccc

SEQ ID NO: 49633 - RNA, 78 nt, Homo sapiens
cccccccagacccccacccaggaccgacagcagaggagcgcaagaacggagaacaccgacggagaaaacaggagcgcg

SEQ ID NO: 49634 - RNA, 44 nt, Homo sapiens
ggagcgcccccagcgcagagacagaaagagaaaagggacagagc

SEQ ID NO: 49635 - RNA, 87 nt, Homo sapiens
cggcacgaggggcccgccaccacgcacgggcgcacggaggacgggaaaaccagcagcagcggaacgcaaaaacaagcaggcccagag

SEQ ID NO: 49636 - RNA, 72 nt, Homo sapiens
caggagcacagaagagcgaggagacagaagacaggcaaaagaaaacccgaagagcaaggaaacgaaaaacag

SEQ ID NO: 49637 - RNA, 71 nt, Homo sapiens
aacaccaacgagccggaaagaagggcaacaaagaacaaccaagggcgagaagagacaaacagaaaacaacc

SEQ ID NO: 49638 - RNA, 69 nt, Homo sapiens
cagacccacaacaccaggcgccagggcggaaccaaagaaaaacagaaagaggaaaaccagagaaacaag

SEQ ID NO: 49639 - RNA, 89 nt, Homo sapiens
caccgccggcgcgggaaacgggcgaagcgacgagccgcgaggaggaagggaccacagaccagcacgccggcgccacgaaccgagcgaca

SEQ ID NO: 49640 - RNA, 82 nt, Homo sapiens
agcaggcagcggcagcaccgggagcagcagaggaagcaaacaagagcacgagcacaccgagcaggacggaaagcaacgcgaa

SEQ ID NO: 49641 - RNA, 71 nt, Homo sapiens
ggggcggccaggccgcaggccaggggaacccaccagacacagccaccggcagcgcaaaaaccgagaacagg

SEQ ID NO: 49642 - RNA, 57 nt, Homo sapiens
gcacacgacgggacccacgagagccagcaacacgggaaacaaggggcaggcggcaag

SEQ ID NO: 49643 - RNA, 74 nt, Homo sapiens
gacaccgagggcccccaaaaggacggagcccggaggcaggagaagcgaagccacaggaaagcagaccacagggg

SEQ ID NO: 49644 - RNA, 71 nt, Homo sapiens
cagacggcgccccaagaccagccgcacccagaggaagagggcccggcgggccggcccagaccggcacagaa

SEQ ID NO: 49645 - RNA, 87 nt, Homo sapiens
agggggggaaccgggcgccgccaaggcggccggaggggagcggagcggcggcggcggcggcggcggcggcggcggcggcggcggcgc

SEQ ID NO: 49646 - RNA, 73 nt, Homo sapiens
aacgggaagagagggaacacgcaggaggggcccaggcagcgcagagccaacagacgagcagaagccgcaagga

SEQ ID NO: 49647 - RNA, 78 nt, Homo sapiens
cgacaagccacccagagcaagaaaaagcggcgcccagcaaacacaccgcacgcacaggagacagggaaacgaaaacca

SEQ ID NO: 49648 - RNA, 74 nt, Homo sapiens
ccccagcaaacgagaaaaacccagcgaccgacgaccgaaacaccgcggacgacaaccggagaaccaaaagagca

SEQ ID NO: 49649 - RNA, 82 nt, Homo sapiens
acgggccgcgacagcagccacgaggcgagccagagccgcagcccacacgaaaacggaaaaacgggagcccaagaaaccacac

SEQ ID NO: 49650 - RNA, 72 nt, Homo sapiens
gggcacacgcagaagcacggaggacaagccaccggaaggccgcgggggaaggaggacgcagagagggcacac

SEQ ID NO: 49651 - RNA, 75 nt, Homo sapiens
acggcgcgcccagaagaagggaaggcgcgaggaggaaaggaggacgagagcacggggaccaggggagggggggac

SEQ ID NO: 49652 - RNA, 77 nt, Homo sapiens
cacagcccggaacgcacagcacagagaacgggagagaaggaacccgccagccaaaaagccagaagaaggaagggaga

SEQ ID NO: 49653 - RNA, 78 nt, Homo sapiens
cgaggcaggccccaaggcagcggaaggcacgcggacaaaacgcgagcccaccgacccagcccacaacaaaaagggaga

SEQ ID NO: 49654 - RNA, 100 nt, Homo sapiens
ccacagaccccccaagaggagcccgcaaaaccacaccaaggaccgccaccacccaaggaggagagcagcagaggccgcacccacacaagcaacagaggaa

SEQ ID NO: 49655 - RNA, 78 nt, Homo sapiens
gaagaagcaagccgacgcagaaagcagcggcggagaaaccaccacaaacacgaggccagcaacgaccaacaagacaga

SEQ ID NO: 49656 - RNA, 84 nt, Homo sapiens
gcccagccaaacaaaaaggaaaggagacaagcagagacgaaccaggcaaagagggagaacaagaccaagaggaaagccagccag

SEQ ID NO: 49657 - RNA, 73 nt, Homo sapiens
aaggccaaaaaggcaaccacagagagagagagggaggggaacgcggcaagagaggagaacaaaccccagcaaa

SEQ ID NO: 49658 - RNA, 63 nt, Homo sapiens
ggcccagcacaacaacacggagacagagccgaaggccggcagaaggggcagccaccacagcac

SEQ ID NO: 49659 - RNA, 65 nt, Homo sapiens
agaaacagagccacgggggggacgcagccaaaagaaacagggaagaccaaggaccaagaaccccc

SEQ ID NO: 49660 - RNA, 36 nt, Homo sapiens
gaagaacccaccccggaagcaaggagagccaaaaaa

SEQ ID NO: 49661 - RNA, 78 nt, Homo sapiens
cagggcagaacggccaagaccggccaacacagaaaaccaccccagaggaaggaagggcagaaaaacggagaaaggcgc

SEQ ID NO: 49662 - RNA, 57 nt, Homo sapiens
gaaggccccaccacccacaagggaacccagcaccgcgccgagccacgcggccacgca

SEQ ID NO: 49663 - RNA, 69 nt, Homo sapiens
gcccccagcagcagaccggaagaggaacgaggaaacaacagcggagcccggaaccccaccagagaagag

SEQ ID NO: 49664 - RNA, 86 nt, Homo sapiens
agaaggcaagcggcgagcagagggggcgcagccagcggaacacagcagggcagccgaaggagcaaagcgggccaacggcacaaaag

SEQ ID NO: 49665 - RNA, 53 nt, Homo sapiens
cagcaagcacccaaagggaccaaaccacagcaaaaacaccaggaaagacaacg

SEQ ID NO: 49666 - RNA, 40 nt, Homo sapiens
ggggcaggaaacagaagaggccggacacggcagcggcccc

SEQ ID NO: 49667 - RNA, 77 nt, Homo sapiens
ccagcaaagccaaagacaaagaggaggggaaagaagggacaggacagggagcaggcccagggcaaaacagaaacgaa

SEQ ID NO: 49668 - RNA, 44 nt, Homo sapiens
cgaggagcgcgcagcggaggggcaggagcgcggcgccaagagag

SEQ ID NO: 49669 - RNA, 37 nt, Homo sapiens
gacaaacggcaccaagaggggagaagggccggagagc

SEQ ID NO: 49670 - RNA, 73 nt, Homo sapiens
ccaacggaaaacaacacaggaaacgcccccgcgcagcacggaaaacccacaccccgggagggaaagagcccaa

SEQ ID NO: 49671 - RNA, 80 nt, Homo sapiens
aggcagcaccagggggaaggacagcaagccagggccagcggagcggccaaccaggccgaaacgcagagccaagaaccagg

SEQ ID NO: 49672 - RNA, 84 nt, Homo sapiens
cagcccgaccggcgaggcggcgcggcagcggagggacggcagccgcgcggcacacacggcagccgccagagaacccccagaccc

SEQ ID NO: 49673 - RNA, 122 nt, Homo sapiens
agggcgccagggggcagggaaaccggaaccaccaccgcccaccaagccagccgccccgcagggaaggaccaacgcagcgggcaacaagaggagcgcgaaagcagcaagaagaggaggggccg

SEQ ID NO: 49674 - RNA, 71 nt, Homo sapiens
aacaggccaagagagccgaacccaccgagccagggaggggccgcaaggccaggcgcgcagaggcacccaac

SEQ ID NO: 49675 - RNA, 87 nt, Homo sapiens
gcagccacccggaaggccgcgcggggccgggcgggacccggcacgcgagcccgggcgcgcaggggaggcccacccgccgcagacacc

SEQ ID NO: 49676 - RNA, 68 nt, Homo sapiens
cacagagggggaaagccaaggaaaaacggagagccacaaaaaaggaagcgaaagcaaagaccagcaag

SEQ ID NO: 49677 - RNA, 67 nt, Homo sapiens
cgcggggcgggcccaggcccaacaacccccaaggacgccccgaaaggccagggaacgggaggcggca

SEQ ID NO: 49678 - RNA, 87 nt, Homo sapiens
gcgccgggccgccggcgaaccgcccgcggcccaaggacgcaggacccagacccacccgagaaccacaggaagaaaaaggacgcagga

SEQ ID NO: 49679 - RNA, 47 nt, Homo sapiens
ccagaaacgaccgagaaggaggacagcaacgcccgccagcccccaga

SEQ ID NO: 49680 - RNA, 69 nt, Homo sapiens
aagcacccaaccggcccacgagacaagaggaagcagcaggagacccccacccagaagaccagcgggaca

SEQ ID NO: 49681 - RNA, 75 nt, Homo sapiens
agcgggcgccaggacaccgaggagaaacgcgggagggacccagaaggaaaggaagagagaaggccacgcccgacc

SEQ ID NO: 49682 - RNA, 68 nt, Homo sapiens
ccgagccggggcaaacaggaaccagcgaaaggaaaccaggggaaaagcgagagcgaccagcaggacag

SEQ ID NO: 49683 - RNA, 75 nt, Homo sapiens
ccaagaggaggacagcgcacacagcaagcacgaggcaagagggagaagacagcgaccagggaggcaacaacaagg

SEQ ID NO: 49684 - RNA, 59 nt, Homo sapiens
cgacacaaagaacgaaccaagggggggcaaggcaggcagcgcccggagccggaacggca

SEQ ID NO: 49685 - RNA, 76 nt, Homo sapiens
cggggacaaggaggggaacggcaaagcagggagcagagccagacagccaccacccgaaacgaaaaaggcagaagaa

SEQ ID NO: 49686 - RNA, 76 nt, Homo sapiens
ccgaaacgaggacaaggcccgccgccagcaaagacaaccagacggcacccggccaggcaaggcccagcagcacaca

SEQ ID NO: 49687 - RNA, 60 nt, Homo sapiens
agagaaaacagcggagcgggccacaagggacccccgcagagagagcagcgggaaaagaga

SEQ ID NO: 49688 - RNA, 63 nt, Homo sapiens
cgcccggaaaggcgccgaagagagaggaagaagacggcacgggacccccagcacaggcagcag

SEQ ID NO: 49689 - RNA, 80 nt, Homo sapiens
cccggccccaagagaggaggagacaacagaacaaggcagcccgagacaaaggcagggaggaagggaacaacgcggccgga

SEQ ID NO: 49690 - RNA, 59 nt, Homo sapiens
aaaagccccgcccgcccggaagaacgaaggcagaagcagcaaggaccagagagagggaa

SEQ ID NO: 49691 - RNA, 70 nt, Homo sapiens
gagcaacccccgggaagccaagccgcagcgcggcagaggacggccaggagcgagaggaagcgggcccaac

SEQ ID NO: 49692 - RNA, 73 nt, Homo sapiens
aggaaaccccagacgaaaagagggcggggaaggcacaaggaaggacaacaagacggacccaggggccggcgga

SEQ ID NO: 49693 - RNA, 81 nt, Homo sapiens
cgggcagggagacacgagggcccgccgaggacacgacagcaccgcaggcgaagcccgaagcggaggacccggcccagccgg

SEQ ID NO: 49694 - RNA, 80 nt, Homo sapiens
aagggcaagaacaaaaaccaggaaccagaacgggacacgccgcagggcgaggcccacggcccaaccgaccccggcagacc

SEQ ID NO: 49695 - RNA, 58 nt, Homo sapiens
ccgccgggacccggccaccagcaagccggcccagcacgacagagacccggaaagcgag

SEQ ID NO: 49696 - RNA, 75 nt, Homo sapiens
agaaccccgaaacccagcacaaaccacaggaacagccaggacaaaaacgcggaggggaccagagaccaaaaaaaa

SEQ ID NO: 49697 - RNA, 85 nt, Homo sapiens
gcgccggccccccggcggagaagaagcgcggccgcaccggccaagcgccaaggaaagaaaacccagaagacacgagaaaaaccca

SEQ ID NO: 49698 - RNA, 72 nt, Homo sapiens
cgacgccccgcgggaccccccgccggaccccacagcaacaagacaacgaagagaggaaagaagcggaaagga

SEQ ID NO: 49699 - RNA, 71 nt, Homo sapiens
gaagacgcagaggcaaaaaccacaagagcgaagagcagcaagaccaaggaacaacagaccggggacagcaa

SEQ ID NO: 49700 - RNA, 56 nt, Homo sapiens
aaaacaagcaaagccaccaaaacgggcggcggggcaaggaccccccagagcagaag

SEQ ID NO: 49701 - RNA, 78 nt, Homo sapiens
gacgcgggcgcggcacgcgggcccgagcgcagccgcgcagggagaagaggcacccaggcagcccacggaagggccaag

SEQ ID NO: 49702 - RNA, 69 nt, Homo sapiens
gcgaaagcagaacaacaagggcaggcgccgggaggggccgggggccagcccggacccagccggaaaagg

SEQ ID NO: 49703 - RNA, 77 nt, Homo sapiens
cgacagcacaacaccgcacggggagccaagccgaagacgaccccgacgcaggccaggagccgcggacagaagccgag

SEQ ID NO: 49704 - RNA, 62 nt, Homo sapiens
gaggcccccgagccagggaaccaaacgccagagaaccaaagcagaaagacgccgggaggaag

SEQ ID NO: 49705 - RNA, 83 nt, Homo sapiens
ccggaggccagagaccgagagcccgagcgcccagcgccgcgccgggagaccgggccaggagcagaccgaagcaagaccaagag

SEQ ID NO: 49706 - RNA, 85 nt, Homo sapiens
aaacgcaccgcaaaaaaaagaggcaaacgcaggcggccggcgaacaggagcccagcagcagccaaggaagcccgagaaagaacac

SEQ ID NO: 49707 - RNA, 75 nt, Homo sapiens
gcgacaaaccaaccgcgagacgcaagaggagcaaaaaggacagagcacagagccagcacaggaaggagacgacga

SEQ ID NO: 49708 - RNA, 78 nt, Homo sapiens
ccgccccggagcccgagaagacaggccacgcccccacgcaggccaccggcacagcccggacacagcacgccacgccgg

SEQ ID NO: 49709 - RNA, 73 nt, Homo sapiens
cagccgaaaccgagccagcacgccgccgcagaaagccggcgcgggcagcccgagaggacaggggggacacagc

SEQ ID NO: 49710 - RNA, 74 nt, Homo sapiens
cagcgggcacaaggacggaccaggccccgcaaaccaaggcacacggaagcggcccacggacaaacagagaacgg

SEQ ID NO: 49711 - RNA, 82 nt, Homo sapiens
cccggggagcccggcggcagcgcggagcgagagcgggagcgggaagaggaagggcacgagccgccgacggagcagcacagca

SEQ ID NO: 49712 - RNA, 76 nt, Homo sapiens
agagcagcccacaggggggccgacacaagagcgcgagaccaacagaggcccgccaggggagccccacgccggcccg

SEQ ID NO: 49713 - RNA, 34 nt, Homo sapiens
aggcgaagcaaacacaacggacgccgccagccac

SEQ ID NO: 49714 - RNA, 72 nt, Homo sapiens
gagaggagacagcagacgcaccaaagggacagaaccaaagacaaaagcacccagacaaaaaccggcaagaga

SEQ ID NO: 49715 - RNA, 71 nt, Homo sapiens
agacccgagggaacagaaccaaacaagacaacgagcgaaagcgaaaaacagcgaccagacacgaaagccac

SEQ ID NO: 49716 - RNA, 71 nt, Homo sapiens
aggagagccccgccaggaacaaaccaaggcaacaggaaccaaggaaaaggacccccgaaccacgccgcgaa

SEQ ID NO: 49717 - RNA, 83 nt, Homo sapiens
gaggcagcggcaggccagggcagccgcggcgaggcccgggcagcgggccagcgggaggggccccggcccgcccagggagccca

SEQ ID NO: 49718 - RNA, 52 nt, Homo sapiens
acagaggagagaacgagccagacagcgaacgcaagcagacggaagaagacga

SEQ ID NO: 49719 - RNA, 60 nt, Homo sapiens
gagaaggcaagccccagcgcaagccagagaaaccaacagaagggccgaaacggagcagga

SEQ ID NO: 49720 - RNA, 50 nt, Homo sapiens
aaggcaggcaccacaaaaaggacaggcaaagaagaggaagcagcaggagc

SEQ ID NO: 49721 - RNA, 72 nt, Homo sapiens
caggagcgccacgcgcggaaggcagcgcccagcagcgcagcgagaaaagccgacgcaagagggaaagcggag

SEQ ID NO: 49722 - RNA, 61 nt, Homo sapiens
cccggagagagagccgcgcacgcacagacaagaagccagaggacaacagagcaaccagccg

SEQ ID NO: 49723 - RNA, 74 nt, Homo sapiens
cccgccccccgaccacccagcgaagcgccagcaacgagggggcaggacaggcggaccacccaagcacgggacag

SEQ ID NO: 49724 - RNA, 81 nt, Homo sapiens
gccgccgccgcgcgcgcccgcgcgcggggaagggagagcacaccgcgacggcgagaggagacacgggaagacaaagcaacc

SEQ ID NO: 49725 - RNA, 77 nt, Homo sapiens
gggccggaagcagagcgcagcgcagaacaaaaaaggaaacaaaaaagggccaagacagcaacaaggaccacggacag

SEQ ID NO: 49726 - RNA, 61 nt, Homo sapiens
gagagagacgcaggggagcccaaaaggaaacccggcagccacaagaggaggaacaagccag

SEQ ID NO: 49727 - RNA, 69 nt, Homo sapiens
cccaccaaaaggacgcgccgccgccaccagcacacgacagcacagccagcacgagagaaacagaggacg

SEQ ID NO: 49728 - RNA, 71 nt, Homo sapiens
aacagagggaaaaaaaaggagggcaaggagaaacgaagaagagcaaagcagcgccgggaagagaacaccag

SEQ ID NO: 49729 - RNA, 77 nt, Homo sapiens
aagaaggcccggacacagcaaaccgggccacagagagcgaaaaccccagcggaaacccagccaagaacaaagagaca

SEQ ID NO: 49730 - RNA, 67 nt, Homo sapiens
gaggaacgggacccaagcaacccaagggaaccgggcccagggggcacacagagacaaaacacaaccc

SEQ ID NO: 49731 - RNA, 80 nt, Homo sapiens
ccaagagccgaggcgcggcgcgccgaggcgcccaccagaaaaccggcgcagagccaaaaggaaccgaggaaaagcagggg

SEQ ID NO: 49732 - RNA, 89 nt, Homo sapiens
cgagccgccaccgcaggcgaggacggcggaccccgcggcgggaggagccgccccgaggagcggcagcccacaagcaggaagaccagccc

SEQ ID NO: 49733 - RNA, 84 nt, Homo sapiens
acgggagggcacagcgcggcagcagcgggacgacccgggacagcccacggggcagaccagcgaccaccggcacagccgcagaga

SEQ ID NO: 49734 - RNA, 81 nt, Homo sapiens
cgacagagagggagcggagaacacaggaacgggccccgggcgcaccccccgcgccggccccgccagcagaccccgcgagcg

SEQ ID NO: 49735 - RNA, 63 nt, Homo sapiens
accccaacagcagagaaacaagggggggggggaagaaagaaggagaaggcggaggagggagag

SEQ ID NO: 49736 - RNA, 69 nt, Homo sapiens
ggcagaagggcacggacgaggagccgcgaacgccaccaccccgcagccccgccaaagagcaagccaacc

SEQ ID NO: 49737 - RNA, 85 nt, Homo sapiens
cggacaggcgacagcgaccgcggcaggcacgcacacacagcaccgaagaaggagagccccgggggaaggagaacaagaagaagca

SEQ ID NO: 49738 - RNA, 72 nt, Homo sapiens
gaagcccccgaagcccccgccgccgcgagaaggaagcgaacgaacaggccaaaggacccagaaaaacccacg

SEQ ID NO: 49739 - RNA, 72 nt, Homo sapiens
gggaagagaaaaggaacaaggcccccgcccccccgggcaggaagacaaaaacaggaaggcacggcgcaaacg

SEQ ID NO: 49740 - RNA, 80 nt, Homo sapiens
cgagaccaacgcccacaagaagaccagaagggaggggaggaagagccaccaggaacggaaacgccaggaagaaacccaag

SEQ ID NO: 49741 - RNA, 74 nt, Homo sapiens
agaaagaccagaagccagcccgcccagcagaccgggaaaaacagacagacgggaaacgaaagaccggcgagaag

SEQ ID NO: 49742 - RNA, 107 nt, Homo sapiens
cggacccgccagaggaccaacagggacggagcggagaaaaggaaccggccccggggccagcagaagggaagcaccaaaaaaagaccagaagaaggaccgaagcggca

SEQ ID NO: 49743 - RNA, 73 nt, Homo sapiens
cgcagcccggccgagcgcaaccgccccgccaacagaggccgcgccaacccgacgacccgccgagcaaaaaaag

SEQ ID NO: 49744 - RNA, 57 nt, Homo sapiens
gccaccacacccagcggagaaacacgcacgaacacagaacaaaaagaccacacaacg

SEQ ID NO: 49745 - RNA, 83 nt, Homo sapiens
gagcaaggaggccccagcggaccgaacaggcaaaagcagaccggaaaacccaccggcaagaccacacccgaggggagcccagg

SEQ ID NO: 49746 - RNA, 73 nt, Homo sapiens
caaaaagcaaacggaccagaccgaccaccaaaaaaaggccacagaaagccgccagcgagaagagagcccacgc

SEQ ID NO: 49747 - RNA, 80 nt, Homo sapiens
agcccggcagcgccggcggcgcggcgagagagcggcgacagaggggagcgaggaaccagagggccagagggaacacagcc

SEQ ID NO: 49748 - RNA, 81 nt, Homo sapiens
cagccgcgccgagggcgcaccgcggagacccgccagccgccggccgcggccagagaaggacaagaagccaagccgaaagga

SEQ ID NO: 49749 - RNA, 54 nt, Homo sapiens
cggaggacacaggcaccagacgggacagaaaaccagagggaagggccccacacc

SEQ ID NO: 49750 - RNA, 58 nt, Homo sapiens
acgaccggggggcaggaggcacccggggcagggaagcccgcggcgggaagccccgggg

SEQ ID NO: 49751 - RNA, 72 nt, Homo sapiens
ccgcggccaaggagccgccaaagccagacgggaaaccggcacagggaagagaaacagagaaaccgcgaccaa

SEQ ID NO: 49752 - RNA, 76 nt, Homo sapiens
ccgagcccgcgcgccaggccgcggcccgaggcgcagcagcaggaggaggaccgcagcaagccaacgaaagaaggcg

SEQ ID NO: 49753 - RNA, 59 nt, Homo sapiens
cccaggccacaagggccgcaagccccgcacggggaccggagaagagagcaggcagccag

SEQ ID NO: 49754 - RNA, 76 nt, Homo sapiens
cgcaccaaagggacggggcacgccgcaaggaccacggcagagagcccaaggacacacacccggagagcacagcccc

SEQ ID NO: 49755 - RNA, 76 nt, Homo sapiens
cagggagaaaggcccaccggccgggagggcccagggcggggcccgaggggaaacacccagcagcaacccaggcgca

SEQ ID NO: 49756 - RNA, 80 nt, Homo sapiens
aaaaggacaagacgggaaggaaggacgaagccaagaccgcagacacagcggaccagaccgaagaagaccaacaccgggag

SEQ ID NO: 49757 - RNA, 72 nt, Homo sapiens
gcacccaagggccaaacgcaggacccaacccccggagcggcagggacagccaaagaccacccaggcaaacca

SEQ ID NO: 49758 - RNA, 71 nt, Homo sapiens
aggcagcgcccagcagcgcaggaaccggaccaaagacaaggccagcgacgagaaagaaaaaaaaacccgga

SEQ ID NO: 49759 - RNA, 70 nt, Homo sapiens
ccccgaaaccaagcgccgacagaaaagaaaaccccggcgagcaagaggaacaaccccaaaagcgagaggc

SEQ ID NO: 49760 - RNA, 59 nt, Homo sapiens
gcagcagcgaacaaagaaacggcagcggccaaacgcacccaggcgccgccccaggcgga

SEQ ID NO: 49761 - RNA, 70 nt, Homo sapiens
cgaagcaggccagcgggccggcggacggagcacgcagacccgcaaaggacagcagaccacagcccggcag

SEQ ID NO: 49762 - RNA, 87 nt, Homo sapiens
cggacaggcgggcacagcgaaggaggagcccggagacacacaggcagacccaacgccgcaggggaagcccagccagggggagacagc

SEQ ID NO: 49763 - RNA, 77 nt, Homo sapiens
gacaacaggaggccggaagacccaaagcgaggaacaggaggcccggacccccagcacaagcgcaggccagggggaga

SEQ ID NO: 49764 - RNA, 74 nt, Homo sapiens
cgccgagcaaacagaggcgccaccacagagccacacgaggagagagagagagagaggaagcgaagaaaaagcgc

SEQ ID NO: 49765 - RNA, 54 nt, Homo sapiens
cggcaaacaccaacaaagggaaggagaacaaaggggcaaagcaaagcaacaaga

SEQ ID NO: 49766 - RNA, 77 nt, Homo sapiens
ggaagggaagcacagcgaccccggcggagaaaccaccacaaacacgaggccagcaacgaccaacaagacagacccgc

SEQ ID NO: 49767 - RNA, 81 nt, Homo sapiens
gaaaaaccgagcggacaaagagagaggaccagaaccagaccggaaagcaccaggcaaagaaaaaaacaggagccaagaagg

SEQ ID NO: 49768 - RNA, 69 nt, Homo sapiens
acgaaaagcgccagaaagcacacagggggccaggggaaggaccgcccacagccccccagcgccccgccc

SEQ ID NO: 49769 - RNA, 86 nt, Homo sapiens
ccccggcgggagccccgcgacgcgcccggcccggagcccccagcgcagcggccgcggaagaagacggcacgggacccccagcacag

SEQ ID NO: 49770 - RNA, 81 nt, Homo sapiens
cgaggaccgccgggcccgggaaccggaaaggacccaaccgcggcacacagaaaacccggacccaccccgcccagaaccccg

SEQ ID NO: 49771 - RNA, 76 nt, Homo sapiens
gagaaggaagaacacccccaccggccaggcgagaaaggcaggacaaccagggaagcagaaggcaaggaccccggca

SEQ ID NO: 49772 - RNA, 95 nt, Homo sapiens
ccacaacgagaccaaccccaaggccagaacgcaccccggggcgaacagcaaggcaacacaccgaaaaaagggaagcggagaggagcagagacgac

SEQ ID NO: 49773 - RNA, 76 nt, Homo sapiens
aagggagagagaggaaggccgccggcagcaccacaggaggggcaggaaacgaagcccgccaaggacaggcgaggcg

SEQ ID NO: 49774 - RNA, 79 nt, Homo sapiens
caagaccccaacaacaaggcccccacgacaagggcggcccacgagaggccccggcaggcgaggggcaagacagaaaagg

SEQ ID NO: 49775 - RNA, 85 nt, Homo sapiens
ggaccgacacacagcacaaacacaccaaagcgaacccgggaagaagcaaaccagccagcacgggggcccagccagccagcagcga

SEQ ID NO: 49776 - RNA, 81 nt, Homo sapiens
ccagcccgggaggggggaggaccggccccaggcgcgccacagccgagccgaaaacccccaccagcgcagaaggaaccgagg

SEQ ID NO: 49777 - RNA, 53 nt, Homo sapiens
agcagcgcacacaacaagcgggcacgggggacccagcgacgccacgaggccgg

SEQ ID NO: 49778 - RNA, 61 nt, Homo sapiens
gaaggcaaaaccaagaggaaaagagccgagcccaggaaggcgccccccgggcggggcgcgg

SEQ ID NO: 49779 - RNA, 74 nt, Homo sapiens
ggaagagcaaggaacagcaggagaagaccaacacagggacgacgggggacagaagaggaaaacaccacaaaagg

SEQ ID NO: 49780 - RNA, 55 nt, Homo sapiens
cgaacagacccggaaggacggcgaggaacagagagaagggcgggagaaaccaagg

SEQ ID NO: 49781 - RNA, 77 nt, Homo sapiens
caggaaccaccaggacagaaggcaaccaacacaaggacagagacggaaagggcaaagaagcgcccccacagagagga

SEQ ID NO: 49782 - RNA, 53 nt, Homo sapiens
cggaccgccggccgggcggccccgccacccacagccgcccgacacacggccaa

SEQ ID NO: 49783 - RNA, 81 nt, Homo sapiens
caaagcccccaagaaaggaagaagaagagagggaggagaggcggccccaacaagcgaacaaggaacaggaggcccggaccc

SEQ ID NO: 49784 - RNA, 69 nt, Homo sapiens
gacacacccaggaagcagccagaccaagaacaaccgcggacacggagaggaaggacacaggcgcgcaag

SEQ ID NO: 49785 - RNA, 88 nt, Homo sapiens
cggcggcggcggcggcggcgcgcgcgcgcccgcgccgaggccgcgggcggcgggcccggacaggacccagaccagccaaagagaagaa

SEQ ID NO: 49786 - RNA, 83 nt, Homo sapiens
cccccacccccgaccgggcggcgcggcggccagaggaaccccgagagcccagccaaaggcacgcaccaaacgcgccgccaggg

SEQ ID NO: 49787 - RNA, 79 nt, Homo sapiens
agagagggacaagcagcagcgcaggcaagggcccaaacagaccagacgggcaccccacgaggacggcagacggaggggg

SEQ ID NO: 49788 - RNA, 73 nt, Homo sapiens
ccgccgcgccgccccgagcagcccgccagaaacgaagagagaagaagaacagggagaaacccgagggacacca

SEQ ID NO: 49789 - RNA, 75 nt, Homo sapiens
cgcgcgccgagggcgaggcggacgcgcggcgcgcagccacggaacccagaacaggccaagccccacaggccacga

SEQ ID NO: 49790 - RNA, 66 nt, Homo sapiens
gagagcccgccccggaacagaaggcgcggccgaaaaaggcaccagacacgaaagagcagaaggcaa

SEQ ID NO: 49791 - RNA, 73 nt, Homo sapiens
cacggcagacagccaccagcaccagaagaacacagacacgacagccaggaagggcggaaaaggcaaaacagcg

SEQ ID NO: 49792 - RNA, 83 nt, Homo sapiens
cggcgccgcgccccggccgcacgggccggagcgggagccaggggggcaggcaccgcggccacagccgggccgagggcgcggag

SEQ ID NO: 49793 - RNA, 84 nt, Homo sapiens
cagaaaccgccccagcgaggaagaggacaggagcggagagagcgggacaaagaaggacaagaacacacggagaagaggaaagga

SEQ ID NO: 49794 - RNA, 86 nt, Homo sapiens
agcggagcccagccagggacaccgaggacacgcaggagccgggacagccgagggggaagacagagaagaccacacaaccgaagggg

SEQ ID NO: 49795 - RNA, 59 nt, Homo sapiens
ggagggggcggccgaggccgagccgagccggggcggagcgcgcgacaagggacagagac

SEQ ID NO: 49796 - RNA, 76 nt, Homo sapiens
ccggcccacgacacaggaagaagacagggcggagaacggaaaagcaccaggaagcagagaggaccgcagaagggaa

SEQ ID NO: 49797 - RNA, 54 nt, Homo sapiens
accgaagaaaacaagaggcggagaagaacccaaccaaaaccaggcggcaacccc

SEQ ID NO: 49798 - RNA, 79 nt, Homo sapiens
caggagcgggccagcccaccgcaaagaacaccagaccgcgagggagcgcagagagacacccaaaggacggcgggaagag

SEQ ID NO: 49799 - RNA, 73 nt, Homo sapiens
caggcaggacacagaaaaggccagagaacaaggggcggcagggggaccagccagcaacccgcccccggaccaa

SEQ ID NO: 49800 - RNA, 78 nt, Homo sapiens
ggccccgaaccgccagggcacagccagggcgaaagaagaccccgccaccggcccccacgcaccaccaaagccgcacca

SEQ ID NO: 49801 - RNA, 67 nt, Homo sapiens
agagcaggcagggcagaagaaaaggcgaggccgccaaagggagcgaggagacacgaagcagaagcag

SEQ ID NO: 49802 - RNA, 82 nt, Homo sapiens
agacccggaaagaagagacacagaggagccacacccccagagacccaaaggcaagggaacagccaagggggaagaaaaggag

SEQ ID NO: 49803 - RNA, 79 nt, Homo sapiens
cagcacagccaaagcgcccacggccggagacaagagcacggagaggacaaggaagagagagcaaaaggagaagccaaac

SEQ ID NO: 49804 - RNA, 67 nt, Homo sapiens
ggagccccgcacccgcccggccccacgggccgagaccaaagcaccacaggggaaaacaagcagaacc

SEQ ID NO: 49805 - RNA, 36 nt, Homo sapiens
cagcaagcagcccccaaaaacggcagcccagaaaca

SEQ ID NO: 49806 - RNA, 81 nt, Homo sapiens
gaagcacggcgacccagcggggagaggccccagggccgcggcgggcggaagacaccgggaggccaggacgacaggcaggca

SEQ ID NO: 49807 - RNA, 69 nt, Homo sapiens
ggaagcgcgacccaggaccacaccagacagacggaaggagggggaagaaccaaccccggcaacaacccc

SEQ ID NO: 49808 - RNA, 86 nt, Homo sapiens
cgcgcgggggggagagccacgacgccgggaccgggaccgccgccgccgccgccaccagggcagcgccgccagaagaccagggcccg

SEQ ID NO: 49809 - RNA, 71 nt, Homo sapiens
agggcaagcaaaaggaaaggcacccaaaagcagggacggaccaggcacaggcgggaacaaggaacccagga

SEQ ID NO: 49810 - RNA, 64 nt, Homo sapiens
ggcagagggccagccccaagaccaagacagcgggaagaggcaggccgacggaccacacaccgaa

SEQ ID NO: 49811 - RNA, 77 nt, Homo sapiens
caccaccccagccaggcagcaccccagcaaagcacacggacccgacaccggcgccagcgcaagaaacgagcagaaga

SEQ ID NO: 49812 - RNA, 73 nt, Homo sapiens
cagaagcacacagaagaaagaccgacggagccccacgcgagaacaacaagcggaccgcagccgcagggcaacc

SEQ ID NO: 49813 - RNA, 70 nt, Homo sapiens
ccggcaccggcgcccagcgcgcccgggccgcgccgccccgccccaggaagaaacccgcgccgagcgccaa

SEQ ID NO: 49814 - RNA, 40 nt, Homo sapiens
ccgggacagcgccacacgccgggaacagagaagacagcga

SEQ ID NO: 49815 - RNA, 86 nt, Homo sapiens
gcggccaacgagaggaacggccacgcgccaggaggcgccagggcccgggggagccagcgccgaggagcccagcgggcaggcacacc

SEQ ID NO: 49816 - RNA, 58 nt, Homo sapiens
aagagagaaaagaagaacccaggacgaccgaaaacccagccagacaaaagagaagcag

SEQ ID NO: 49817 - RNA, 81 nt, Homo sapiens
caacaaaaagaaagcgcgacacaggcgagagggcaagaaggaacagacaaaaacggccggaaggaaacacaggacaccagg

SEQ ID NO: 49818 - RNA, 74 nt, Homo sapiens
acgaaaaaggcagaccgagcagagggacccacagcacaaggaaccaaaggggagagaaaaccaaagaagcagaa

SEQ ID NO: 49819 - RNA, 65 nt, Homo sapiens
ccaagccaacaagaaaagccgaaaccaaacggagccaggagaaaacaggacaggagaagaacacc

SEQ ID NO: 49820 - RNA, 79 nt, Homo sapiens
ccgaggaggcagcgcgaccccgcacgcggcggagaaaccaccacaaacacgaggccagcaacgaccaacaagacagacc

SEQ ID NO: 49821 - RNA, 119 nt, Homo sapiens
gggcgcgcgcaaagagccgagcacgcgggcgcacagcgcgacgggcggacggaggagggcggaaaacaccccaaaagccaaaagggaaaggaaaagaccaacaacagcgcaggacacga

SEQ ID NO: 49822 - RNA, 72 nt, Homo sapiens
gggaggaggagaggacaggaccagggagcccacagcgcccaaaaagccacaagaaggagagacgcagagcca

SEQ ID NO: 49823 - RNA, 65 nt, Homo sapiens
gggcgccgaggagagccgggggcgcgcgggggacagccgagcccccacagaagagggaaacagaa

SEQ ID NO: 49824 - RNA, 54 nt, Homo sapiens
gaagagcgggaaggccggcccagagcagggaaccgacaccgggaaggcaccaac

SEQ ID NO: 49825 - RNA, 74 nt, Homo sapiens
gcgcggcaccccgacaagcaacggggcggcacacaaggagcgaagggcagggagaacgccaggcacagcacgac

SEQ ID NO: 49826 - RNA, 74 nt, Homo sapiens
cccagaggaagccaaaaggaccgaaaagacgcggccccaaaggaaacacccgaagaacacagcgccagcccaac

SEQ ID NO: 49827 - RNA, 79 nt, Homo sapiens
caagagagacgagaaagaacacgcggccaaacccggaggaggaggggcggggaaagaagaggaaccagaaaagaaggga

SEQ ID NO: 49828 - RNA, 77 nt, Homo sapiens
agggggcaacaccaggccaaggcagcaggggaagcgcaagcccacgcaaaacacgggcaaaggagccgccagacacg

SEQ ID NO: 49829 - RNA, 36 nt, Homo sapiens
ccacccgcaggagccccacagccgcgggagcagcag

SEQ ID NO: 49830 - RNA, 67 nt, Homo sapiens
ggccccaacgaggccaaaccaccgcggccgcaccgccacgaccgggagaccgcgaccggcccgagga

SEQ ID NO: 49831 - RNA, 68 nt, Homo sapiens
ccaggcgaggagagcgaacaaccccagaagagggacacagagccacaaaagaggaaacaaacaggaac

SEQ ID NO: 49832 - RNA, 80 nt, Homo sapiens
gcccaggggaccccaagaagaccacagagggacccggacaaccagaggcagccagcagggggaggacgcggcagaaacag

SEQ ID NO: 49833 - RNA, 59 nt, Homo sapiens
gggcccggaggagcgaacaaggcgacaacacaggccggcgcggaagaggccggcggcgg

SEQ ID NO: 49834 - RNA, 92 nt, Homo sapiens
caccgggcgaaaaggaggaaaagaagccagaccgagcgggaggaagcacgaaacaacacaaaacccaccaagaacgaaccccggggagagca

SEQ ID NO: 49835 - RNA, 75 nt, Homo sapiens
ccgccggcgcggccggcacacgaggcgcagcaggagccgcaaagggcaagacaaaacggcaggaaaaaccagaac

SEQ ID NO: 49836 - RNA, 70 nt, Homo sapiens
gcgcaggcaggaagaaaggggacacggcgaaagggcgggggcgccgaggaagaaccgggggggacagcca

SEQ ID NO: 49837 - RNA, 80 nt, Homo sapiens
cacccaggccccgacgccccgaggcacccgcaacaccagacggccacgccacccggggcaagacagcaacgagaaccgga

SEQ ID NO: 49838 - RNA, 38 nt, Homo sapiens
agagaggagagagaccagagagcgaggaacgcggggag

SEQ ID NO: 49839 - RNA, 70 nt, Homo sapiens
gaagcaacaagaaaaccccaacaacagagagcgcagcgaggacagccacccccgccgcgagcgaaggcac

SEQ ID NO: 49840 - RNA, 77 nt, Homo sapiens
acccagaggccgcgcgcgcgaagcccacgccgagccgagaggggacggccgccccgcggaggagaaggagaaaaccg

SEQ ID NO: 49841 - RNA, 82 nt, Homo sapiens
ggaggaccggcagccggggggaagacaaggagggaggccagcagaaacagcagcagggggggagacgccaaaagggcaccgg

SEQ ID NO: 49842 - RNA, 74 nt, Homo sapiens
gcgccacagaagaagcaaaaccaacagggcagagcaggggaacaaggacagccggaagcccgggaggaaacggg

SEQ ID NO: 49843 - RNA, 65 nt, Homo sapiens
ggaaccgccgaaacaaaaagagaaagagggggaagcaccaaaagagacagacaccccaaacaaag

SEQ ID NO: 49844 - RNA, 79 nt, Homo sapiens
gccgcgggagggcacccgggggaccccgcacacgaagagacgccgggcaccccaacacggccagcacaacagaaaagaa

SEQ ID NO: 49845 - RNA, 73 nt, Homo sapiens
gggaacgcgcgccagcgcgggacccgccagaccggaccaggcagaaggcggcagcggagcacgcaccaggagc

SEQ ID NO: 49846 - RNA, 74 nt, Homo sapiens
gcgcacacagaagcggaagcgagccacgaaacacaaggaaagcgacgacggaggagaaccaggaccaaagcacc

SEQ ID NO: 49847 - RNA, 68 nt, Homo sapiens
ccaaggagacgcccgcccgcgccaagacagggacaagagaaaaaaagggcgggcgaacaaaaagagca

SEQ ID NO: 49848 - RNA, 77 nt, Homo sapiens
agcccgccggcggcggcggcggcgagcccagaacgaagcggcccagcgggcccaccgggcgaaagagaggaagagcc

SEQ ID NO: 49849 - RNA, 71 nt, Homo sapiens
cagggcacggacggaaagacaaagaccacggacgccgcaagaaaacagaaaggaaccgcagccacaaaaca

SEQ ID NO: 49850 - RNA, 78 nt, Homo sapiens
cggggcggaggacgcggcagcccgggagcggcgagggaaaagcgaggcaaggcaggcgggagccaacccgggaagagc

SEQ ID NO: 49851 - RNA, 76 nt, Homo sapiens
agaaaaccggcccgaggggacgggggaacccggggccagagaaaccacaagccgccgggaaccaaaggaagaaggc

SEQ ID NO: 49852 - RNA, 75 nt, Homo sapiens
ccacacccccggcacccccacagcacccgagggacccgaggagcccaccaagccgaccgcaggcaagggccgggg

SEQ ID NO: 49853 - RNA, 56 nt, Homo sapiens
gccgcaagaggagcaggaggaagggggcaggagcacccagggaagaagggggagga

SEQ ID NO: 49854 - RNA, 73 nt, Homo sapiens
cgcgggagcgagaccggagcgccagggccacggcccaccacccggcacgcagaagccagcggacgcccgcaac

SEQ ID NO: 49855 - RNA, 71 nt, Homo sapiens
agaaaaaagccacacccaaaaggcaacagagcaagagggacagcccaagaaggggaagggaacaaaccccc

SEQ ID NO: 49856 - RNA, 35 nt, Homo sapiens
agaaaaccagggaagggagaaccaagcagaagaac

SEQ ID NO: 49857 - RNA, 55 nt, Homo sapiens
cggggggaaaagcgcaaacagcccagcgcgggacaacccgcacgaccacccagca

SEQ ID NO: 49858 - RNA, 71 nt, Homo sapiens
gggggagcgggcccggggggacggggggaggcaggaccggaccgcaacaggaaacaagccacacccgggga

SEQ ID NO: 49859 - RNA, 36 nt, Homo sapiens
acccccagagagaggacaccagcaggaaaacacggg

SEQ ID NO: 49860 - RNA, 87 nt, Homo sapiens
cagcccccacccaggccgagcgaagcccacaaccccgccgggcacaggaaagacaggggcaaggccgaggggaacagcacacagaga

SEQ ID NO: 49861 - RNA, 71 nt, Homo sapiens
gcgccccggcaccggagcaaccacagaacgcggacaagaaaccgcacccaaagcccagaggcccggaaggc

SEQ ID NO: 49862 - RNA, 85 nt, Homo sapiens
gcccacaacagggaccggaagagcccacggacacacaggaacgggggccacgcacggagaagagcacagaccagcgcgcgaccgg

SEQ ID NO: 49863 - RNA, 76 nt, Homo sapiens
gacacaaggagggggcagagcgagggcaaacagaaacacaggggaaacacgagagagcaacagccgacagagcggc

SEQ ID NO: 49864 - RNA, 70 nt, Homo sapiens
aaagggagcaaagagagaaagagcacgaggagcagcacggacgagagaccgcacaccggaggcaggggac

SEQ ID NO: 49865 - RNA, 71 nt, Homo sapiens
agccgcagcggaaagcaggagcacagggaagaaagccgaaggagaaaacaccccgcacgccaggaggaaaa

SEQ ID NO: 49866 - RNA, 68 nt, Homo sapiens
caagaaacccaggaaagaacaggccgccgacccccggcaaagcaccagaggaagaggaggaacgaggc

SEQ ID NO: 49867 - RNA, 73 nt, Homo sapiens
agcccagaccgggcagccggaggcccccaagccggacacaccgcacgagagccagggacaaaaccaagaagca

SEQ ID NO: 49868 - RNA, 76 nt, Homo sapiens
ccaagccaacaggagagcgcgaaacaggcagaccacacgaaacccagcgggaggaagaagaggccgccagcagcag

SEQ ID NO: 49869 - RNA, 75 nt, Homo sapiens
cagagacaaaaacacaggacaaccaaacaaaggacggcacgggaaacacgagaccggcgcagcagagcagaaaca

SEQ ID NO: 49870 - RNA, 76 nt, Homo sapiens
gcaggaagacggccaggccggccggccggacaagcccaggagccgaccagagagcagggggggccccagcccggcc

SEQ ID NO: 49871 - RNA, 80 nt, Homo sapiens
aggccaggagcgagaccagacggcaacaaggagacccgccacaaaaggcgggaggccaggcagcacgcagacaagaagcg

SEQ ID NO: 49872 - RNA, 31 nt, Homo sapiens
caccagaggaccgaaacgcaagggcaacggg

SEQ ID NO: 49873 - RNA, 70 nt, Homo sapiens
caacggggaggcgggccaacaaggaaaggagcgagaaaccaacaaggcgaaagcccagagccaggacccc

SEQ ID NO: 49874 - RNA, 77 nt, Homo sapiens
ccgcgggggaaggcgccaggacggaagaccccggccaaagcgaaaggcagcccagcaagggcagcgaaccagaccgg

SEQ ID NO: 49875 - RNA, 84 nt, Homo sapiens
gcccggacaccacgcgagccgcgcgccggccaggagcacaccaggaaagaacagagccgaagcagagcaagaccaggcgacgca

SEQ ID NO: 49876 - RNA, 86 nt, Homo sapiens
ccaacggggcgccccacggacgaccaggacgaaggccggcggcagcaaaagaggcggcaaggcagcccaggcaaagaagaaaggcg

SEQ ID NO: 49877 - RNA, 77 nt, Homo sapiens
gagcaagggaggagccggaccggaaccagaccacaagacggcacccagcgcacggcagcgagacaaacagaaaaggg

SEQ ID NO: 49878 - RNA, 79 nt, Homo sapiens
ggcgacaggacgggcggggagccccgggcggcggggaccgccagcccagcgaccagcagggcggagaacggaaaagcac

SEQ ID NO: 49879 - RNA, 60 nt, Homo sapiens
aaaccggacaagaggccaaccaaccggaggggaagagcaagcgaggaaaaacaccaacag

SEQ ID NO: 49880 - RNA, 105 nt, Homo sapiens
cgcggcaccccacgcggaccccgaagccgcaacccggggagggcccgcggcgcgaggcagccggcacccgcacaacccagggggccgaacccagaccaacaaaag

SEQ ID NO: 49881 - RNA, 75 nt, Homo sapiens
aaaaagaagggccccagccgggaccgaagaacagacaaggcaaaagcagaccggaaaacccaccggcaagaccac

SEQ ID NO: 49882 - RNA, 71 nt, Homo sapiens
gaaacagccccccccgaccacacaccagaaccggaggaggaccgcggagggaacaccagcggggcccggcg

SEQ ID NO: 49883 - RNA, 48 nt, Homo sapiens
cggaacacccccagagaagaccgcaggaaagcaggaaggcaagaaagc

SEQ ID NO: 49884 - RNA, 76 nt, Homo sapiens
gccagccggaccagcaccccaccacgacacgggaggacgggaaggagacacggcgagcagacagaaaccgagaccc

SEQ ID NO: 49885 - RNA, 75 nt, Homo sapiens
gcaacagccagcaggagccacaacgaaagcagacaaaggcccgaccgggggagacggcaggggccggccaccggg

SEQ ID NO: 49886 - RNA, 65 nt, Homo sapiens
ccaacagagcccgcagagcaccaggcccaccggaaagaacacccagagaggaccaagagaacagg

SEQ ID NO: 49887 - RNA, 73 nt, Homo sapiens
cgcggccgccgccccgcccccaggagagcgacggggacgagagccccggcacaaacggaccaccagaaagcac

SEQ ID NO: 49888 - RNA, 55 nt, Homo sapiens
cagcagggggagacgggcgccagcgccggaacgggaggaagcggagggcaccacg

SEQ ID NO: 49889 - RNA, 65 nt, Homo sapiens
gggagagagaccaaagacgagagaaacggcgaggaaagagaggagccccggaaagaaaaggacag

SEQ ID NO: 49890 - RNA, 59 nt, Homo sapiens
gacccggacaaccagaggcagccagcagggggaggggaccggacgggaagaagggcgcc

SEQ ID NO: 49891 - RNA, 71 nt, Homo sapiens
acacagcccacccagccggaagcaaacagggcccacccacacaagaccgacggaaacaaacgacgccagac

SEQ ID NO: 49892 - RNA, 57 nt, Homo sapiens
cacggagaccaagccgcagacaacaggcaaggcccgccgagaggggcccccgggagg

SEQ ID NO: 49893 - RNA, 74 nt, Homo sapiens
gggaacgaggaagcgcccaagcggaaaagccagggcggaaaccggcaagaggaagagaaagaaaaaaaacccag

SEQ ID NO: 49894 - RNA, 85 nt, Homo sapiens
ccacacccaccaacaacaccacaaaaccacagccaagcgcagaagacaaagaaacaagagacgagacaggaaaacaagaaacgga

SEQ ID NO: 49895 - RNA, 91 nt, Homo sapiens
gaagacaaagaaggaaagaagaaggggaagaaaagaaggggaagaagacaaaacccaccagccccaggccagaacgaccgacggaacacaa

SEQ ID NO: 49896 - RNA, 80 nt, Homo sapiens
gcgccgcacgaaaggaaagacggacgcgcgcagagaccagcgccgacggggcagaggcgaggcagcacccagggacaggg

SEQ ID NO: 49897 - RNA, 78 nt, Homo sapiens
ccccaggagggcgcgggacacccccggcggagcgacagcggcaaaaagcaaagccagagaagcagaaagagccagagg

SEQ ID NO: 49898 - RNA, 77 nt, Homo sapiens
gccaagggagccaccacaaaacagaaccggcccaccccccaggaggagagcaagaagagggcgcccccaaaggcccg

SEQ ID NO: 49899 - RNA, 88 nt, Homo sapiens
cgagcgcgccgccgccgccgccagaacaaccgggcgccgacgagacggaggggggcgggccgagcacccgcaggccccgcagaggcgc

SEQ ID NO: 49900 - RNA, 74 nt, Homo sapiens
agccgccccccaggcagggaacccgggccccccaggaacacagaccaccaggagccagccggccaccaggaaaa

SEQ ID NO: 49901 - RNA, 61 nt, Homo sapiens
aaggaagccggacccggccacaagaccagcacaaggacaggaccagcccaaaaccaggccc

SEQ ID NO: 49902 - RNA, 78 nt, Homo sapiens
aaagagcaccgcgagcaagcaagacgacaacaggcacaaagagagaaggaacacccacagggcagacagagaaagaac

SEQ ID NO: 49903 - RNA, 86 nt, Homo sapiens
cggagccgccgccgccgccgcggccccgccaggccgagaaacagacaacccacagaacaaagcggaccaaggcacccccagagcga

SEQ ID NO: 49904 - RNA, 92 nt, Homo sapiens
ccggaaagagcgaaagaaagaagggggaggaggaggagaacggccgggaagagcgcggcaggaggggaagccaagcaggagaagacaagagg

SEQ ID NO: 49905 - RNA, 71 nt, Homo sapiens
gaagcggccagagagaacagcgcagggcacggaaggggcccagcacagccggccgacccccagggcacaac

SEQ ID NO: 49906 - RNA, 79 nt, Homo sapiens
aggcaaggagcaaagcagcggcgcagcccggggaaccacaccaagaaagcaaagaacccgagcacaggcagcccggcag

SEQ ID NO: 49907 - RNA, 84 nt, Homo sapiens
agcggcacccgcggaggcgcccaggacaggcgccaaaccagccagcacgggggcccagccagccagcagcgaggggggacggag

SEQ ID NO: 49908 - RNA, 54 nt, Homo sapiens
cccaggcggaccgcaacaggcgcgacccggggcgcccccgcagccgagggccaa

SEQ ID NO: 49909 - RNA, 57 nt, Homo sapiens
agagcggaaaacgggccaaagcaggaaacgcccagaaggagcaggcccagaaagaac

SEQ ID NO: 49910 - RNA, 87 nt, Homo sapiens
aggcaaggagcaaagcagcggcgcagcccgggcgggcgacgcacgaggcacacaggaaggaggggagcagggacgcgcggcggcggg

SEQ ID NO: 49911 - RNA, 87 nt, Homo sapiens
gccccccagccacggaaacgagcgccccaaaagaaacaaagccaaccaggcaacagaagaaagagcaaaaggcaccccccagaaccg

SEQ ID NO: 49912 - RNA, 75 nt, Homo sapiens
gaagagggaagacacgcggaaacagcaacccccagccacaacgcgaaccgggcggacgaaggaggcggcaacagg

SEQ ID NO: 49913 - RNA, 67 nt, Homo sapiens
gaccccgccccacgcccaggagcaggaaagagccggggcgagaaaaaagagacacccccgccgaggg

SEQ ID NO: 49914 - RNA, 72 nt, Homo sapiens
agcccagcacgaagggcgaagcaacaagagagaccagcgaaaaaaaagagcggcagacaaagacggcaaaac

SEQ ID NO: 49915 - RNA, 72 nt, Homo sapiens
gcggcgccgggaccgcgcgcccacgccgcgccagacaggaccaaagacagagacaagcggggaagaacggcg

SEQ ID NO: 49916 - RNA, 85 nt, Homo sapiens
gccagagcccagcaggagccgccacaccaggcaacaggcagaaccaccagccggacagggaccacacggcgacgcagggacgggc

SEQ ID NO: 49917 - RNA, 83 nt, Homo sapiens
aaagggaggggccagcacgcacggacacccgagcacagagacgaagaggaccaggagcaaacagaaaaacagcgagaacggag

SEQ ID NO: 49918 - RNA, 78 nt, Homo sapiens
aaaacccacaccgcaacccagcgagagaaagaaaccagcaggagccaccggaacgacggagcagaggagaggaggagg

SEQ ID NO: 49919 - RNA, 66 nt, Homo sapiens
agcggcgcagccaacaaaaacagacaagcccacgagacaggacgacccggacaaccacccacaagc

SEQ ID NO: 49920 - RNA, 75 nt, Homo sapiens
accccccggacgacggggcgggaccggcgccaccgcagggaagaaggaggcagcagccggcaaaaagcgggagac

SEQ ID NO: 49921 - RNA, 77 nt, Homo sapiens
agcaaaggcacaacaaaagggccccagggcagccaaccccgcggcaggcacggccaccggaacagccggagagcacc

SEQ ID NO: 49922 - RNA, 83 nt, Homo sapiens
gcagaggagcagggaggccacaggggccgaaacacagagcaagagggagcgccgagcaacccacggccggaccccagagccca

SEQ ID NO: 49923 - RNA, 62 nt, Homo sapiens
ccacgcagagcacaagggcggcccacgggcaccagaaggcaagaagagagaagaagcaaacc

SEQ ID NO: 49924 - RNA, 85 nt, Homo sapiens
ccgggagcggcagggaaccgaccccagaacccggacgggcggcggcacccccgaaggccaccgcacacaccaacaggcagaagga

SEQ ID NO: 49925 - RNA, 85 nt, Homo sapiens
gacagcgcagaccgccagcgcagcaggacgccagcgggagcccagagccgcggggaggagagacgaggacgcgcacaggaaagga

SEQ ID NO: 49926 - RNA, 74 nt, Homo sapiens
agaaaccccgccaggagggcccgcagacaccccccagccagcaaccagaacaaagacaggagggcaggaaggac

SEQ ID NO: 49927 - RNA, 36 nt, Homo sapiens
gacaacgggacccagaagaggccaggcaagcacaaa

SEQ ID NO: 49928 - RNA, 88 nt, Homo sapiens
gagaggagccagccccagcaggcccagaacaagccaaaccgaaccaaacagcgcaacaacgcaaggccggggggaacggcacgggggc

SEQ ID NO: 49929 - RNA, 77 nt, Homo sapiens
gcacagacccggagcagcagaagagcgggacaaacgagaagacaacagaaacccccacacacccagcggaccccacc

SEQ ID NO: 49930 - RNA, 76 nt, Homo sapiens
ccacacggcccaaaaaaccccggggcaaaagcgagacaggggggcagacacaggagccgcagacagggggagccgg

SEQ ID NO: 49931 - RNA, 74 nt, Homo sapiens
ccgcgcgaccaggcacgccggagccggccgaccgcaccacaagggcaagggccaggcaccggaccccgcgagcc

SEQ ID NO: 49932 - RNA, 79 nt, Homo sapiens
gcggacggacacccagcggcgacacgcgacgcgccaaaacccgcccggaaaggggacaccgaccacaggaagaggaggc

SEQ ID NO: 49933 - RNA, 86 nt, Homo sapiens
ggaaaggaaggcccaggacccaggagccagggagcggaaggagggagcaggcccgcagcaggccaggcgagcagcggcccgggccc

SEQ ID NO: 49934 - RNA, 76 nt, Homo sapiens
aaagccgaacaacgaaaggaagaaacgaaaaaaaaaccaaagcccgaagcgcggagcgggaaagacacggagcagg

SEQ ID NO: 49935 - RNA, 75 nt, Homo sapiens
cagcgacacgagacaagggcacagaacggcacccacgaacccgccgagagagaagcaaaaaaacagcgagggagg

SEQ ID NO: 49936 - RNA, 79 nt, Homo sapiens
aacgaagacgggacggagaacagcaaagccggaagcaagccgccgggagaaggaagaacggcgagcgaacggagccaac

SEQ ID NO: 49937 - RNA, 85 nt, Homo sapiens
gaccggaggccgggaagccaacgaccacacgcaacaggccgacggcgcaaggccacggcaagcaccgggagcagcagcgaagcca

SEQ ID NO: 49938 - RNA, 51 nt, Homo sapiens
gcaggacccaccaaccgcagaaaagccgaggcgacgggccacacgaaccca

SEQ ID NO: 49939 - RNA, 75 nt, Homo sapiens
aacccacagaaggaagagagacagagaagacgcagaagaagaagaggagggggagaaggacccagaagccgaccg

SEQ ID NO: 49940 - RNA, 48 nt, Homo sapiens
gaacaaggcaaaaggggccaaggggggcgcaaagccccagcagaaccg

SEQ ID NO: 49941 - RNA, 77 nt, Homo sapiens
ccaaagccgacgagccccggagcaggcgacaggccggacgcggggcagccgaacccagcacggggaggccgagacgg

SEQ ID NO: 49942 - RNA, 74 nt, Homo sapiens
gagcccaccacccacccgagcggagaagcgaggacacacaggcgcagaaccggccgaaaagcacaaacagcaag

SEQ ID NO: 49943 - RNA, 63 nt, Homo sapiens
gaaaccgaggagaaagacaggagacaacacaggaagggaaggggcggagacgggcggaacgca

SEQ ID NO: 49944 - RNA, 72 nt, Homo sapiens
caaaaacaccgacacagaggccccagcaaaggaaaggggggcaaagagaaccaggagaccccaccaccacag

SEQ ID NO: 49945 - RNA, 108 nt, Homo sapiens
ggcagaacggacaaagagaaaagaaaacacagcagaaccagccaacaaacaccggagcagacaaagcagaccagaaaaagagcaaaggccaacccaaacagccaccac

SEQ ID NO: 49946 - RNA, 74 nt, Homo sapiens
gagccgacggacgcacaggccgcgccccaggagacagcagcccccagggacccaaggacgaccacaggacacgg

SEQ ID NO: 49947 - RNA, 78 nt, Homo sapiens
gcgacgcaggcagaagcgagacggcaaggaaacaggagaagggcacccaagaagaccgaaggggagcaagcaggccag

SEQ ID NO: 49948 - RNA, 73 nt, Homo sapiens
cggaaaagacgcgcaaggaacgaagcaggcccaggagaaagcacaggacagggggcagaggaaagagggagca

SEQ ID NO: 49949 - RNA, 71 nt, Homo sapiens
gaagaagacgaaaaaaacccaggggcgaagacagcggcgggaccgacaggcaccaggcagcgcccggaagc

SEQ ID NO: 49950 - RNA, 56 nt, Homo sapiens
gcggagcaggaaggcaaaccagagaaagacagcaaagaaaaggagaagaaaggaaa

SEQ ID NO: 49951 - RNA, 64 nt, Homo sapiens
ccgagaaacacccagaacacaagagccgcccccaacaccaaagggcacacggcacggacagggc

SEQ ID NO: 49952 - RNA, 59 nt, Homo sapiens
gaacggacgggcccacagcccggagccccacagggcgcgcaggccgaacacaccggcaa

SEQ ID NO: 49953 - RNA, 72 nt, Homo sapiens
gacaacacaaaacccgcaaacacaagaacccaagggcaacccaacaacagccaccgggacacccgcaggccg

SEQ ID NO: 49954 - RNA, 82 nt, Homo sapiens
ggccgcgggggcaacggagaaaacccggaaccgcgacggcggcagaacaaacaccgcgcagaacagaaccagagacaaaaaa

SEQ ID NO: 49955 - RNA, 55 nt, Homo sapiens
gaacccgcagcacaccagggggcaggcccgggaagcgcgagaaacaccacgcaac

SEQ ID NO: 49956 - RNA, 49 nt, Homo sapiens
cagcagcagaccggaagaggggacgcacagaaaagacaaaacaaagacg

SEQ ID NO: 49957 - RNA, 63 nt, Homo sapiens
gacaagcacaaggaggaggccccaaacggggacagggaagacgccagaaggcccaccaaaagc

SEQ ID NO: 49958 - RNA, 78 nt, Homo sapiens
caccacgaaaagggaaacaaagcgaagaggaaagggcgaacggagaggccagcgcggaacgagaagcccaagaccaaa

SEQ ID NO: 49959 - RNA, 73 nt, Homo sapiens
gcggagaaaacccagcgcacagagcggggaggagacaaaggagacgaaaaaaaggccaacacccggaaagccg

SEQ ID NO: 49960 - RNA, 74 nt, Homo sapiens
cacaccccaggaaaaagacagcccgcagcacgaccagcaggaacgagagaggaccaagcagagaccagacaggg

SEQ ID NO: 49961 - RNA, 89 nt, Homo sapiens
ggaaaccccagggcccgcccaggacccccaagccgccgcggacgcagaaggccgccagaagacagccaaaacacccaaacagaccacgc

SEQ ID NO: 49962 - RNA, 79 nt, Homo sapiens
cagcacacaccacacccaggccggggcgccagagcgccaagcagcaaaggagaggcaagaagcaagcaaccaggcgccg

SEQ ID NO: 49963 - RNA, 81 nt, Homo sapiens
gacccgagcgaagccaagccgggcggcagacgcaaacagcagacggaagaccccacggcaaaaccacacccgaggcgagcc

SEQ ID NO: 49964 - RNA, 72 nt, Homo sapiens
gcaacaacggagaaaagaagacgacacaggcaggaaaccgaagaagaacccgagccaaagggaggaaaacag

SEQ ID NO: 49965 - RNA, 61 nt, Homo sapiens
acgaccgcgcccagaagcgaagggagagcgccagagaagggaaagcgaacgcgaaaagaaa

SEQ ID NO: 49966 - RNA, 78 nt, Homo sapiens
gggggcgcaggaccggccgcaggccaccgacacgagacaaccgggagccggaacccggccgcggccgagcgcgggagg

SEQ ID NO: 49967 - RNA, 80 nt, Homo sapiens
cccgggcccgaggaggcagccaagccgagccgccacccggcggaacaggcaggaaaacgacccaaaacagccaccaacga

SEQ ID NO: 49968 - RNA, 39 nt, Homo sapiens
gcccccaagagcggaacacagacggcgagggcaaagcaa

SEQ ID NO: 49969 - RNA, 50 nt, Homo sapiens
gaccgggagaaaggaagggccccgagacagcgccgaacgcaacagaccga

SEQ ID NO: 49970 - RNA, 79 nt, Homo sapiens
ggacggaccgagaccggaccgagagcggaccgagagcgcgaaacgcacgagaaggcgccaagcccacgggcgcaccaac

SEQ ID NO: 49971 - RNA, 72 nt, Homo sapiens
cgagacagacagcaacgaaggggcaacaccccggaaacacgacaagccaaagcaaacaacggcaagcggaga

SEQ ID NO: 49972 - RNA, 76 nt, Homo sapiens
agcggccaccgaccccgggcgcacaacgcgggagcccgccagcggcccccgagaagcgcgggacacgggccacagc

SEQ ID NO: 49973 - RNA, 70 nt, Homo sapiens
ccggagcaaccacaacccgcaggaaacacaaagaagacaccagaagggccagcaccacgacaacacggcg

SEQ ID NO: 49974 - RNA, 70 nt, Homo sapiens
ccggacaaccagaggcagccagcagggggagcgggggaccaagaggaccaccaacagcaaggaaaccggc

SEQ ID NO: 49975 - RNA, 66 nt, Homo sapiens
aacccgcgagaagcccaagacagcccagaggaaaccgggagcgcgagccccgcggaccgggacacg

SEQ ID NO: 49976 - RNA, 62 nt, Homo sapiens
gacgccaaccacgacgaagcggaaggcagaagggaggggggaagacagggcccagcaccaca

SEQ ID NO: 49977 - RNA, 82 nt, Homo sapiens
ccgcgagccgaggaggggcgcgaggagggacggaagcacacacgagaaaaagcagccaaggaaaaccagaaagaaggagaaa

SEQ ID NO: 49978 - RNA, 78 nt, Homo sapiens
gcaacccggagcaaccccccaggacgggcggaggcggggggaccggcgggcgggacagcggccgaagccagagccggg

SEQ ID NO: 49979 - RNA, 60 nt, Homo sapiens
aagacggcgaagcgcgcgccgcgcccggaccccagggggcacggaccacaacaggaaaca

SEQ ID NO: 49980 - RNA, 77 nt, Homo sapiens
gacagggagcgcagaggacgccgaggagggggacccacgcccggcaggagaggagaaggccggaacaacgaagggga

SEQ ID NO: 49981 - RNA, 83 nt, Homo sapiens
ccaagagccagcaagggagccagagagcagcgaccggcacaccagcaagagcgaggaggaggggacacaaaggaagaggcagc

SEQ ID NO: 49982 - RNA, 79 nt, Homo sapiens
accacgaaaggagcaagagcaagacaccggacaccgagggcccccaaaagagacacgcaggaccagcccgccgggagaa

SEQ ID NO: 49983 - RNA, 59 nt, Homo sapiens
caaggaccgcccagcccccaagagcggaaacaggccgcccaaagaccaacagggcagca

SEQ ID NO: 49984 - RNA, 81 nt, Homo sapiens
gcacccaacagcggagcaacggcccaggcacacccccgcagagcgcccacaaacgggaaccagaagaggagccccacaaag

SEQ ID NO: 49985 - RNA, 72 nt, Homo sapiens
ggccagcaagggcgggcaacccggcggaacgaaagcccgcgccgaccccgccgccccccagcgcgcagggcc

SEQ ID NO: 49986 - RNA, 61 nt, Homo sapiens
cgggcccgcaggagccaggaccccgaaacagggagaagaccacaaccaccgggcccgcgca

SEQ ID NO: 49987 - RNA, 67 nt, Homo sapiens
gccgcgcggcgagcggcccgcacaaggccggcaggggaaacagggacgacagaaaaaaaaaagccgg

SEQ ID NO: 49988 - RNA, 73 nt, Homo sapiens
aaaccggacagcagcgaaaccgcccacagcagaggagcaccgcagggaggagagcaccaagaagcgccagggc

SEQ ID NO: 49989 - RNA, 67 nt, Homo sapiens
ccgagaccaccgaggagagccggaggcaggaaagggacacagccggcgcgagcgggaggccccaggg

SEQ ID NO: 49990 - RNA, 73 nt, Homo sapiens
ggcaccgcaggaaacaagcccacccagaaaaaggcccgggacccaggaaccaggagacgcagcggcgcccaaa

SEQ ID NO: 49991 - RNA, 90 nt, Homo sapiens
gccgcccccgggaggccggcgccgcagcccgggcccaggccccggcagcgccgggacaaggcgccccaaccaacaccaacaagaagagga

SEQ ID NO: 49992 - RNA, 83 nt, Homo sapiens
aagagcgccacccggcgggaaagagagacagggggaccagacagaagaagaaaacagcacacagaaagagggagaaggaaaaa

SEQ ID NO: 49993 - RNA, 70 nt, Homo sapiens
cagaaagaaaacaccgaaaagaggcaaaagaagagagaagaagcaaaccgggaccggaagcaccaaggag

SEQ ID NO: 49994 - RNA, 79 nt, Homo sapiens
aaacgagaagggagaggacacagcaggaaccacagaaccgagagcaacacagcacccggcggcaaaccaaacaaaacca

SEQ ID NO: 49995 - RNA, 58 nt, Homo sapiens
ccagcccaagccgcgcccggccaaggaaaaggaacagagagagcagaaccgaaacggg

SEQ ID NO: 49996 - RNA, 52 nt, Homo sapiens
gggagaaggcgcaacgcggcgcagaaggacaagagacagcccagacagggaa

SEQ ID NO: 49997 - RNA, 60 nt, Homo sapiens
aagggcgcggagggacgcacccccacagggcagaaggcacccccagcaggacagcacacc

SEQ ID NO: 49998 - RNA, 63 nt, Homo sapiens
ccgcgccacagccaccagagccggcagcaaagagggaacaggcgggaaaaccgccacaaagcc

SEQ ID NO: 49999 - RNA, 80 nt, Homo sapiens
caagcaccaagaaaacgccaaggaacgacaagggaggcgaggacggacaaaaggaaacggacgggaggccagccagcaga

SEQ ID NO: 50000 - RNA, 75 nt, Homo sapiens
ggaggagcgaaggacaaacacagaaggagccccagcggagaaagaggaaaggaaagcaagccaggaggaaacgac

SEQ ID NO: 50001 - RNA, 83 nt, Homo sapiens
gagaaaccggcagggaagggcagaaggagggccacaaagggcaaagaggaagaagacggcacgggacccccagcacaggcagc

SEQ ID NO: 50002 - RNA, 71 nt, Homo sapiens
gcaagcggggaagcgccccagccaaagaaagagggggcggagcccggacggaaagaaacacgagcacgccg

SEQ ID NO: 50003 - RNA, 65 nt, Homo sapiens
cgagacagagaccagccccaggccccagcgcgagagacacaggaacgggacgggggacaggaaag

SEQ ID NO: 50004 - RNA, 81 nt, Homo sapiens
gagacacaaaacccagacaccgacgggccgcgaggggaagaggaagcaaagccaagacccagcggcaagaagcaacagaaa

SEQ ID NO: 50005 - RNA, 59 nt, Homo sapiens
gcagcggccggagccgggccgggcagcagcagggcgccgggagccgggcgcgagcagcg

SEQ ID NO: 50006 - RNA, 87 nt, Homo sapiens
gagagcacgcccagcggagaaggagaagccgcaggacacccccgaggggaccgagacccgacgagagagacgaggggaagagaggaa

SEQ ID NO: 50007 - RNA, 115 nt, Homo sapiens
gagaaggaaagcaccagacgccaccacgggcacccgcgccgggcaccgaggaccagccaagacagaagagacggaggagcaaagaagaagccccagagggaccgccccacacgag

SEQ ID NO: 50008 - RNA, 69 nt, Homo sapiens
gaggcacacggaccaacgggaaaacggagcagggccgagagccaggggaaaggccagcgcagaaacgca

SEQ ID NO: 50009 - RNA, 84 nt, Homo sapiens
cagggacggcagcccacgccgcaacccgccccagagccggcccgggggaacgcaggagcagccagaaggagaaggaggaacgga

SEQ ID NO: 50010 - RNA, 60 nt, Homo sapiens
ccagagacacggagaggcaaggacgcgcgaccggggcgggggccccgcccggaaggacgg

SEQ ID NO: 50011 - RNA, 38 nt, Homo sapiens
cccgccggaaagcggagaagacgcaccacgacggggaa

SEQ ID NO: 50012 - RNA, 83 nt, Homo sapiens
acggggcaagggcgagaccggagagccgcaggacggcgcggcagagccccgacgccacagaacggccacaggagaaagccgag

SEQ ID NO: 50013 - RNA, 90 nt, Homo sapiens
aggagaacgcaaggaagaacaggaaccagcagcaaagaaggcacggaaagagagggaccaagaaaggcccagggaccaaagcccggacaa

SEQ ID NO: 50014 - RNA, 52 nt, Homo sapiens
aagccaaagcaagagcaggcgacacgcaggaggcaaggccccagcccaagcg

SEQ ID NO: 50015 - RNA, 59 nt, Homo sapiens
aagaaaacggggacaccgaggacccagagccggaacacgcgggccaggcacgacaccgc

SEQ ID NO: 50016 - RNA, 40 nt, Homo sapiens
ggggggcaaacccgagagaacggggagaacacccagcaga

SEQ ID NO: 50017 - RNA, 38 nt, Homo sapiens
cagacaacacaaaagggcaacacaaagcagaagacgag

SEQ ID NO: 50018 - RNA, 61 nt, Homo sapiens
ccagggccggcgcaccaccaggccacccaggggcgccaggaacgcacaccagcaccagccc

SEQ ID NO: 50019 - RNA, 75 nt, Homo sapiens
aggaaagcaccgccaagcggagaaacagccggaaacgccaaaccccagcaagcagaaggccacgaccggaagggc

SEQ ID NO: 50020 - RNA, 71 nt, Homo sapiens
gaccacaagacagggaaccaaacagcaacaccgcaagcggagcagccccaccaggcaagaacggaagcacg

SEQ ID NO: 50021 - RNA, 82 nt, Homo sapiens
cagcggcaagaggcagccgggggccacagcgccaggccggcccagggagaacgcaaaaccaccacccccacaaaaaacgcag

SEQ ID NO: 50022 - RNA, 76 nt, Homo sapiens
ggagaggacgagaggagacgaagagagaggagacgagacgagaggaagagcccgacacgggaagagaagaggaggc

SEQ ID NO: 50023 - RNA, 62 nt, Homo sapiens
gacgcccacgagcaaccaagaaagagagcggaggaaggacagagagcggcagcgacaccggc

SEQ ID NO: 50024 - RNA, 75 nt, Homo sapiens
aaggccggaggaagcagcccgcaggaagagcgaacgaagggccgagccgccacaccccgcaccgggacacccccg

SEQ ID NO: 50025 - RNA, 83 nt, Homo sapiens
ccgggccaaggcccggagcgcacagcggcgcaagccaacgcggggggaaacggaaggacgggaacgaaaggcggggccaaaca

SEQ ID NO: 50026 - RNA, 74 nt, Homo sapiens
acacgccccaaaccagcagaagccacccaaaagaagaacaaaacccagggaaacccagacgacaaggaaggcca

SEQ ID NO: 50027 - RNA, 85 nt, Homo sapiens
cgccaggagacagcaggagccggagagcccaaagagagcgcccaaccaaacgcaaagcaccgcgccagggacagcagcagcagac

SEQ ID NO: 50028 - RNA, 49 nt, Homo sapiens
ggagaaggaccaagaaccaggcgcacagaaacggaggcagacaccaacg

SEQ ID NO: 50029 - RNA, 55 nt, Homo sapiens
ggaaaacaaccgagggcagagagcaggacacgagacacaggccgcacgcacgcgg

SEQ ID NO: 50030 - RNA, 75 nt, Homo sapiens
agaaaggaccagaaagcccagaaacacaggaggcagcacaaaagccgcacaggggcgcagggaagggcaaaggcc

SEQ ID NO: 50031 - RNA, 82 nt, Homo sapiens
aggagcgcagggcggcgcaaccagcccagggcggcggagggagaagaaaggggaccggggacacacccacgaacacaaaggg

SEQ ID NO: 50032 - RNA, 76 nt, Homo sapiens
ccagggaggcggcggcgggaacgagggcgagcagaggacgacaggccgggagaccaggaaacaggccgacagcgga

SEQ ID NO: 50033 - RNA, 40 nt, Homo sapiens
gcaaagcaacgccgaaagagcgaccagggaacaccacgga

SEQ ID NO: 50034 - RNA, 58 nt, Homo sapiens
gacgcaccgaaacaagaaacgagaaaacgaaggaaggaggacccgaggagagagaaga

SEQ ID NO: 50035 - RNA, 46 nt, Homo sapiens
caagaccagccaaccacaggccagggccagcccagacagagagaag

SEQ ID NO: 50036 - RNA, 88 nt, Homo sapiens
gggaagaaagaagagacgccaagcgaccaaacaaaagagagaaaaaccggacccaaggggccgcacaacaaaaaagaaccgcgaacaa

SEQ ID NO: 50037 - RNA, 79 nt, Homo sapiens
acgcggacagcgggcggagccgacgagcggcggcgagccagcagcaccggaacaccaagagaagacacccaccgggaca

SEQ ID NO: 50038 - RNA, 78 nt, Homo sapiens
acggagagaaggcggcgcgggagggaaggcgcgggggcggagaacggaaaagcaccaggaagcagagaggaccgcaga

SEQ ID NO: 50039 - RNA, 43 nt, Homo sapiens
ggaagagcaagagcagcagggagagcgccgggcacaggcacgc

SEQ ID NO: 50040 - RNA, 75 nt, Homo sapiens
caaagaaggccgagggcggcaggaaggaaacacaacgaagagaggagaaaaacacaagccgaaagcagacagaga

SEQ ID NO: 50041 - RNA, 82 nt, Homo sapiens
cagggcaagcgagggcaaaagccacagacaccgagagccggaaggagccagcagcgaccacccgagaacggaagggaaaggc

SEQ ID NO: 50042 - RNA, 87 nt, Homo sapiens
gccgcccgggggcgccgcccaccgcgcccgccgacgcccaggaccacaccgcagcgaacgcaggccccagcgaaaaagggggaaagc

SEQ ID NO: 50043 - RNA, 71 nt, Homo sapiens
gacaaaggaacaagcgccaaaaagagccacaaggacagcaacgccccaggccgcagaggaagcccggggcg

SEQ ID NO: 50044 - RNA, 57 nt, Homo sapiens
aagcacccggcaaaccgaagcagccggcacccgcacaacccagggggccgaacccag

SEQ ID NO: 50045 - RNA, 118 nt, Homo sapiens
gcgacagcggcggcgggagcggcgccgagaggccggcgggacgcgggcgccaggaccggccgaacgcagaggcacacagagaaaaaaagggaacaaaacacagcaagcagacaaaagg

SEQ ID NO: 50046 - RNA, 75 nt, Homo sapiens
aggaaggaggcgaaacagagaaacgcagccaccaaaggacaggagaaaagaaagcaaccagccgagacaagcagc

SEQ ID NO: 50047 - RNA, 78 nt, Homo sapiens
cccggcggcgccaccagaccgggagccggccccgaaagacagaaccagcacagcaaaaaaggcagcgcaccgacccca

SEQ ID NO: 50048 - RNA, 80 nt, Homo sapiens
ggcgcgcccaaaggcccgcgccgacgccgcaggaagcagaggggaaaagcagggaccgcgccgcccaggggagcgccaac

SEQ ID NO: 50049 - RNA, 73 nt, Homo sapiens
ccaaaaacaaaacgaaccaggacggcaaggcaggacccgaggcgccagcagcagcaagaccgggggaccaggc

SEQ ID NO: 50050 - RNA, 73 nt, Homo sapiens
ccgggccagcggggcacccgcaccggccacccccccggagcccggagcaagcacagccagacaggcagaccgc

SEQ ID NO: 50051 - RNA, 51 nt, Homo sapiens
gaaagcgcagaaaagcggggaaggaccacgagaccgcgaaacacgacggcg

SEQ ID NO: 50052 - RNA, 55 nt, Homo sapiens
gaggacgcgcaaacccaacccgggagcggaggagcccacaggcgcaaagagcgga

SEQ ID NO: 50053 - RNA, 79 nt, Homo sapiens
caaccagccaagaagacacaagcgcaagcacacccaccgaaacaagacagagcaccacaacacaaacaacaggaccggc

SEQ ID NO: 50054 - RNA, 67 nt, Homo sapiens
gcaaaacaccaaaccagcaagaggggaaagaacgcggcagaacggaggcaggcagcacgagacacac

SEQ ID NO: 50055 - RNA, 72 nt, Homo sapiens
cagccccccgcccggaggccgggaaggacccaaagacaggaccacgcaccagcagagaaggaaagcaaaccg

SEQ ID NO: 50056 - RNA, 80 nt, Homo sapiens
aaaccaaaacggcgcgagagcggggacccgcgggacccgcagccccgcgcgggcaccaggccgccaggcacagagaaggc

SEQ ID NO: 50057 - RNA, 75 nt, Homo sapiens
caccggagcaaccacaacccgcaaccgaggacaccagaacaaccgaggagcgcaagaaccgaggaaaggaaaaac

SEQ ID NO: 50058 - RNA, 81 nt, Homo sapiens
gccgaaaagcgagcgcgaggaaaaggcggcgggaggagaaggcaaccaaaggcaggacacaaaaacaaccgaaagaggcga

SEQ ID NO: 50059 - RNA, 86 nt, Homo sapiens
gcccccaccgagggagggaagaacgacaaagggagaccagagagccacgcgcccaggcgcaggcaggggccacacgcgcacgcaac

SEQ ID NO: 50060 - RNA, 74 nt, Homo sapiens
gcacagccccaaaagaaaggcagggaaggagccgggagaggccaggccccccggacgcagccgcccggggcccg

SEQ ID NO: 50061 - RNA, 85 nt, Homo sapiens
agaagcggcagccagaagggcccggagaagaacggaggcgccaggcaaaggcagacacggcgaccgaccccgagagccagccgag

SEQ ID NO: 50062 - RNA, 76 nt, Homo sapiens
aggacagagaccagaaacacaggcagacggaagcacagaagcgcaggcaagggcagacgggggaggaggacgcaaa

SEQ ID NO: 50063 - RNA, 73 nt, Homo sapiens
agaccacaaaagagcagaggaggaacaccaggcacaaggcccgaaaaggagccaaaagcaacacccaggcaaa

SEQ ID NO: 50064 - RNA, 107 nt, Homo sapiens
ggagagagagaaggacagcaggacagacggaagagaagaaacggagcaagagcagaggaagaccagcacaggacgcccgaaaccggggcaacgcggaggaaggcagc

SEQ ID NO: 50065 - RNA, 82 nt, Homo sapiens
cccgcccccaagccgcggccaggaccggcggaccggccgcccggcccagccaacaccgacggcagccacaaaccgcgggacc

SEQ ID NO: 50066 - RNA, 76 nt, Homo sapiens
gcccggcccgagcgcaccggagggacggcacagggaggccagccggagaagcgagcagcgagagcaccacgaggac

SEQ ID NO: 50067 - RNA, 76 nt, Homo sapiens
aggcgagccaaaccaagccaaggaggccacaggacagccaccccgaggaaaagccaacagacgagcagcgcaaaag

SEQ ID NO: 50068 - RNA, 83 nt, Homo sapiens
accccgagggcgggacacagagcacggcgacagcccgccacggcccccacggggaagccgacaacgcggaccagcgggcaggg

SEQ ID NO: 50069 - RNA, 77 nt, Homo sapiens
aggacagagaggcgagcgcccggaggggagagagcggaggacagccgagaggagggcggagaacggaaaagcaccag

SEQ ID NO: 50070 - RNA, 68 nt, Homo sapiens
gggaagcccgggaagggaccggcccaggccccccgccccgcgcagcaggacgcccaaacggaacagcg

SEQ ID NO: 50071 - RNA, 66 nt, Homo sapiens
gggcacggcaaaagaccaagagcacagcagaagcccacacacgcgaccaccaaggcaaaccacaga

SEQ ID NO: 50072 - RNA, 76 nt, Homo sapiens
acagagacggcggagaccccgaaggcgcaaacgacaccacccgaccgagacggaacagagaagcaacccaacagac

SEQ ID NO: 50073 - RNA, 88 nt, Homo sapiens
gggcgcaggcgccccggggaggcgcgcggaccggcggcccaggcacggagaggcggcgagaccgcagggcggagaacggaaaagcacc

SEQ ID NO: 50074 - RNA, 78 nt, Homo sapiens
gacgaaagagaaacccggagggcgccgggaccaaaaacagagcgccaaaaggccaagaggagcagcaagcaggaacag

SEQ ID NO: 50075 - RNA, 79 nt, Homo sapiens
ccacggagaaaaacggccaagaggcagaccaggaaaggggcggagggaaaaaagaacgaaggggccccagcaggaacga

SEQ ID NO: 50076 - RNA, 66 nt, Homo sapiens
aaaaggaaaggacagccgaacagaacaaaacgcgcaacccccaacacacaggacaacaccgaaaca

SEQ ID NO: 50077 - RNA, 76 nt, Homo sapiens
cgaggaagcaaagaacagagaacgcgaccagcagcagaaggggccccagacacgacgcccccggccggcccgggcc

SEQ ID NO: 50078 - RNA, 62 nt, Homo sapiens
ccaggagcccgagagagaaggacagcgaacccacccaacacggcaaaacaaagacaccacac

SEQ ID NO: 50079 - RNA, 55 nt, Homo sapiens
cgcccgcccccacccgcggcagcggaagcagccagccaccaagggaggagagaag

SEQ ID NO: 50080 - RNA, 60 nt, Homo sapiens
gaaacccaaccggcgacccagaagacacgcaccccagaggggggggagacacgccacgcg

SEQ ID NO: 50081 - RNA, 84 nt, Homo sapiens
cacgaagaccgggcgccagggccgccgccccgcccggaggcgaggggacggcggggagcgcaggacagacgcccccgcgagacc

SEQ ID NO: 50082 - RNA, 78 nt, Homo sapiens
caccagcaagaccggaaacagagaaaagaacaagcagaaagcacgaacaacgagaacaagacacgagcaaaccccacc

SEQ ID NO: 50083 - RNA, 80 nt, Homo sapiens
gagagaaaagaagacaaggaaaaagcgccaagaagggacaaagacaagaagaagcaaaagagaaggaaagcggagcgcca

SEQ ID NO: 50084 - RNA, 79 nt, Homo sapiens
acggagacaccgccaggacaaccaagcacagaaacaaccccaaaaaaggaagggaaccaccaggcaacacaccgaaaaa

SEQ ID NO: 50085 - RNA, 81 nt, Homo sapiens
gaggaacgccggcccgagaaagcccgccagcaggagaaagcccaaggagacaggcaagaggggaaacagaggggccgcggg

SEQ ID NO: 50086 - RNA, 38 nt, Homo sapiens
aagacacgccacaaccgggaccccaacagaaagagccc

SEQ ID NO: 50087 - RNA, 74 nt, Homo sapiens
gagcagggggggcgacccagaggagagcccaaacagacgacgcaaaggagaccgaaggaccaccggcagcggga

SEQ ID NO: 50088 - RNA, 61 nt, Homo sapiens
ggaacacggagggaccagcagccaggaccggccggagccggcgcaagccagcgagccccag

SEQ ID NO: 50089 - RNA, 55 nt, Homo sapiens
ggagccagaaagaaacaggacgcaggagcggcaaacgagggaacggcaaaaccag

SEQ ID NO: 50090 - RNA, 82 nt, Homo sapiens
gcaaaaaaagagcccgcaagaagaacagagacagcagccaaacccccagggccgcaagcagggggaacacccgcccagccgc

SEQ ID NO: 50091 - RNA, 87 nt, Homo sapiens
gcagccccaggcgggcgcggccagcagccagagaagccaacaaaaccgcaccagcacccggggccccgaagagcggcgcccacaccc

SEQ ID NO: 50092 - RNA, 82 nt, Homo sapiens
agaccagccgcgggagcagccccaggcggaaagccaccccccccgaccaccaccgcgggcccgccgccccggggacccgccc

SEQ ID NO: 50093 - RNA, 77 nt, Homo sapiens
caccaaagggcagaaggaggccgccgccagcggaagacgcgccaccggagcggaggccggcgcggaagaggccggcg

SEQ ID NO: 50094 - RNA, 72 nt, Homo sapiens
caaaacgccagggccagacggaggacaacaggcacaaagagagaaggaacacccacagggcagacagagaaa

SEQ ID NO: 50095 - RNA, 78 nt, Homo sapiens
accccaacgggagacaagaagacgccaacgagcggcgcggacggcgcgcggacaccagccaggccagcagaaaacgcc

SEQ ID NO: 50096 - RNA, 84 nt, Homo sapiens
gcccggggagaagagaccccaagagggagcagcccacggcaaagaagggagcaggccgggcccgccagggcacgcgcccgccac

SEQ ID NO: 50097 - RNA, 84 nt, Homo sapiens
ggcccggccaggcggacaacgagaaacggacaaccaacggccaagaacaagaacaaaggccgcgacggaggacaggagaagagg

SEQ ID NO: 50098 - RNA, 76 nt, Homo sapiens
caaaggagcccaaccagagcggagcgcagaccgaggaaaaggagagagaggcgacccgcggcgagagcccccccag

SEQ ID NO: 50099 - RNA, 75 nt, Homo sapiens
aaaaacaccgacgacccccagagcagccccaagaagaggagaccaaacagaaccggcaacggaaaaacccaaggc

SEQ ID NO: 50100 - RNA, 72 nt, Homo sapiens
ggaaaccagagaagaagagagacggaacgcggcaagagaggagaacaaaccccagcaaagagggcacagggg

SEQ ID NO: 50101 - RNA, 37 nt, Homo sapiens
gcagccagggacccgggagaggagcagacaagggccc

SEQ ID NO: 50102 - RNA, 82 nt, Homo sapiens
gaggggcgcgcgccgcccagcgcagcccccgaacgcggcccgcacagggagacaggcaggcaaaccacgaaggacacgcaac

SEQ ID NO: 50103 - RNA, 87 nt, Homo sapiens
gggacacgaccagacagaagccaaaacagagggagacgagaaaagggccgagcacaagccaagaaggcgccccaaagcagcgaccgg

SEQ ID NO: 50104 - RNA, 61 nt, Homo sapiens
accacaccccccccacacccaaaggccccaggagagccaggcgggggagcgggaggagcca

SEQ ID NO: 50105 - RNA, 75 nt, Homo sapiens
agccgaccagccgcggagccgggggcagggcccacggccccacggggcgacgagccacgggcgggcccaccgcag

SEQ ID NO: 50106 - RNA, 75 nt, Homo sapiens
agacacaccaccagccggcgaaacagcaaaaagacaaagaaggcccaggcggaggagaacggaagaggacaagag

SEQ ID NO: 50107 - RNA, 75 nt, Homo sapiens
gccgacccgccagaggaggccccccagccacggaaacgcggccaaggaacaagacacagaaggaagaaggagccc

SEQ ID NO: 50108 - RNA, 73 nt, Homo sapiens
cacacacaagaaaggcaacaaaaccacgcaggaaggaccaacggggggacacaaaaccgaaagacacaaaaag

SEQ ID NO: 50109 - RNA, 73 nt, Homo sapiens
ggccgagggcacggccagcccgacgccagacaaagagacgggaacccgggagggaaaccagaccacagaccga

SEQ ID NO: 50110 - RNA, 79 nt, Homo sapiens
cgggcccagcaaccacagaaacaagggaaggggggcagaaagaagaggaggacaacaagccaacagagagagacgaaga

SEQ ID NO: 50111 - RNA, 86 nt, Homo sapiens
cgcgggcgagcggcggggagcggcgaagccgcgggcgaggcgccgcgaggccgcggccaggccgagcccgccaccaggccaggcag

SEQ ID NO: 50112 - RNA, 72 nt, Homo sapiens
gggccggaccgaccccaggcggcggaagaaaaacgcccaaagacaggacacggagagcgccgcgacgagaca

SEQ ID NO: 50113 - RNA, 86 nt, Homo sapiens
ccacgacggcaggcgcacggaacagcgaggccagcaggagacggagccacggagcagcaaagaaggcacagaaaaagaccaaccag

SEQ ID NO: 50114 - RNA, 72 nt, Homo sapiens
gaaggacgagacagaggcccggagacggcagacccaaccggggagagagcggccggcccgggaaaggccacc

SEQ ID NO: 50115 - RNA, 75 nt, Homo sapiens
aaggggagaaggcaggcaccacaaaaaggacaggaggaggcaaaacagacagaacgcagaaagcaggcaccgaca

SEQ ID NO: 50116 - RNA, 73 nt, Homo sapiens
cagccacgcggaggcggcggggagccgcgcgcggcagacaacggcaagcggagaagagcaaggccgaaccgag

SEQ ID NO: 50117 - RNA, 36 nt, Homo sapiens
gcgaagcccggcgccagacaggaagagagcgcacca

SEQ ID NO: 50118 - RNA, 86 nt, Homo sapiens
aagaggagccccggggaacccgcagcacaccagggggcaggcccgcaggacaaggacagcccggaggccaccaggaccgaacgccc

SEQ ID NO: 50119 - RNA, 73 nt, Homo sapiens
gggacaccggaagccgagaaaggaagaacgaagcgcgcagaaaacacagaaggcaaaagcgcaaaaacaaaac

SEQ ID NO: 50120 - RNA, 82 nt, Homo sapiens
cgcggcccgcgagagggaaaaggacgccgcggccccaggcgcgcggagagcagaggaccgagcgaaaaaaaacgaaagagaa

SEQ ID NO: 50121 - RNA, 84 nt, Homo sapiens
gccagcgggacgaggaccgagaccgcggccgggaccgagggaacgcaaggcggggaaaaaaaggcagcacacagacgcagcaac

SEQ ID NO: 50122 - RNA, 79 nt, Homo sapiens
aaagaggccgaggacagccaggagaagaagagaaaaggagggaacacagacccagccgccaagaacggcagaccaagaa

SEQ ID NO: 50123 - RNA, 79 nt, Homo sapiens
gcagcccggcagacgcagaaccagcagacacgagagcacaacacagcgacgagcccgaaccggggggaccagggggaag

SEQ ID NO: 50124 - RNA, 75 nt, Homo sapiens
gacaaggggcccgaacagaggggaaaccgggcgccaggccgcaccgcgcacacccagcacaccgagacaaagccc

SEQ ID NO: 50125 - RNA, 81 nt, Homo sapiens
gaaaagaaggaggaacacacagcgcaaaaggaagagggaccagaaggaacgccaaaaggccacgaccggaagggcaaaaca

SEQ ID NO: 50126 - RNA, 103 nt, Homo sapiens
cgcgccgccgaccccccggcgccgcgccggcggcgggcacagacccacaagaggagaacgggcagagcacagccgccaagcggggcgccccccgacgcccgag

SEQ ID NO: 50127 - RNA, 84 nt, Homo sapiens
cacagagaagcgagcaggcccagcggcccggaccgcccaaacgcgaccaacacaaccagcagagacaggggccaggccaggggc

SEQ ID NO: 50128 - RNA, 79 nt, Homo sapiens
gggggcggccccccgggccgcggcccacgcccgcggagcagccggacaagaaaaccccaggacacagagcggggagccc

SEQ ID NO: 50129 - RNA, 73 nt, Homo sapiens
ggaacaaaccgaagaacagcgggaaagaaggcaaaacacggcccccggaaagagccgcccgagagacaaaccc

SEQ ID NO: 50130 - RNA, 72 nt, Homo sapiens
aggccacgcagagccacgccggcaaccccgcccccaccacccggacaagggaaccgcccggcccgagcaacc

SEQ ID NO: 50131 - RNA, 76 nt, Homo sapiens
aagaaaagggagcagaacggacggcaagcaaaagcaaaaggccagagcacaaggcacccggacacgaccaaaaccc

SEQ ID NO: 50132 - RNA, 52 nt, Homo sapiens
gggagagagaccaaagacgagaggaaaagaacacccaacacaacgcccgacc

SEQ ID NO: 50133 - RNA, 71 nt, Homo sapiens
ccgccgcccacaagcggcgccgcgccccggccgcacgggaaaacgaaaaacgggcagggacaaggcgcgca

SEQ ID NO: 50134 - RNA, 36 nt, Homo sapiens
aaggacgggcgccgccagggagggcgcgcgcccaga

SEQ ID NO: 50135 - RNA, 106 nt, Homo sapiens
gggcagccacaggggggcggcaggggcggcaggaaccggggcagcgacaggcagccagggaacagccaaaaggagccccccaggaagcggaccgaacggacagaca

SEQ ID NO: 50136 - RNA, 77 nt, Homo sapiens
caccccgggggaccccacgacccaagaccggccaacccaagaccaagggaacggaagccccagcccgcgcgagccag

SEQ ID NO: 50137 - RNA, 72 nt, Homo sapiens
caaccagcaccacccaacacagaccgaacaacggggaacaccaggcaggaaaacaagcaacacgcccacgac

SEQ ID NO: 50138 - RNA, 77 nt, Homo sapiens
ggcggagcgacggggaggcgcggccaacggggccacaaggcaaagccccggaacaagacaacaggagaaagaaagaa

SEQ ID NO: 50139 - RNA, 77 nt, Homo sapiens
cacaggaccccccccaacgagaccaaacccgacgacagggacaccacccacccagcccacaagggcacacgcaaggc

SEQ ID NO: 50140 - RNA, 60 nt, Homo sapiens
ccgggcccaagcagcacgggggaaagaaacccacgcccaccaagcaggacacaggcggcc

SEQ ID NO: 50141 - RNA, 80 nt, Homo sapiens
ggacccggccccggcccacaggggggggcaaacccgagagaacgggacacaggaacgccacaagaaacaacagcaaggcg

SEQ ID NO: 50142 - RNA, 67 nt, Homo sapiens
cagacagcgaaagggaaaacccccacacggaggggacgaagacaaaaaccaggagagagagagagag

SEQ ID NO: 50143 - RNA, 74 nt, Homo sapiens
cgcgaagaagaagagacaggccacgggaggaaaggagaacggggagcccagcagggacagcggcaaaaccacca

SEQ ID NO: 50144 - RNA, 77 nt, Homo sapiens
aaccaagcaccgacggaaacaggcgaaaaacaacgacgaaggaagaaaaggacaaggagcaccaagaaccgacccag

SEQ ID NO: 50145 - RNA, 85 nt, Homo sapiens
cgagccggagagcgggccaccacgggacccaccgcccggcgccccagccgccccgcccgagcgggaagaagccgcagcaagccgc

SEQ ID NO: 50146 - RNA, 75 nt, Homo sapiens
ccgcgcgccacccacaaccaggccccccagaggagaccacagagaagacgagacgcaccgcagccggaggagcgg

SEQ ID NO: 50147 - RNA, 73 nt, Homo sapiens
agaaacaagagaggaacggagcaagaagcgacacaaggagaaaagacaccgggaagggcacgacaggaaaaga

SEQ ID NO: 50148 - RNA, 39 nt, Homo sapiens
gggggccgccgggcgcggcaaggaaaaaccagaagagaa

SEQ ID NO: 50149 - RNA, 68 nt, Homo sapiens
gaacacaaaacagccgagaaaagagacaaggccagggagagacccaaagacaaaccaaggagaaacga

SEQ ID NO: 50150 - RNA, 79 nt, Homo sapiens
ccaggaagagggacggaaccaccagaagccagcccccaggcggaacgcccgccccgcagagaggaagaccgcaggaaag

SEQ ID NO: 50151 - RNA, 84 nt, Homo sapiens
gcgaggcagacagaccacaaaccacgaggaccaccgcgcccaggggcaggcgccaacgggccgaagagcgaaagcgaaaaaggc

SEQ ID NO: 50152 - RNA, 74 nt, Homo sapiens
ggccgcggacgggaggaaagaaggaaaccagcaggagaggcaccggaacccaacaacgccgaagcccagaaaag

SEQ ID NO: 50153 - RNA, 71 nt, Homo sapiens
gggaaacccacccgccccaaagcgagggggggggacacagagaccagagagacggcgagcagaggcaagag

SEQ ID NO: 50154 - RNA, 86 nt, Homo sapiens
accggaagggcccagacagcagacgccagggcacagccagggcgaaagaagaccccgccaccggcccccacgcaccaccaaagccg

SEQ ID NO: 50155 - RNA, 53 nt, Homo sapiens
ccgcggccaggagaaacgcaggggccccccaaggccggcagcaggcgacaggc

SEQ ID NO: 50156 - RNA, 73 nt, Homo sapiens
gccaccagccggacagccggcggcaaggcaccagcagaacagacacccccaaagaccagacacgagggcaaaa

SEQ ID NO: 50157 - RNA, 77 nt, Homo sapiens
gcggacccagcagggaaagaggacacgcccacagccaaagaacaagagcaaacggcgaaaccggcacagaagcacgg

SEQ ID NO: 50158 - RNA, 80 nt, Homo sapiens
ccgagcccagccgaaggagaagggggagaacagacccccaagagcgaccccaccgccagcaacccgccgccaggaccacc

SEQ ID NO: 50159 - RNA, 72 nt, Homo sapiens
aggaggaagcgaggccagacagcaagagcacccgacccacaggccagagagggggggccgcccgcccaaggc

SEQ ID NO: 50160 - RNA, 83 nt, Homo sapiens
cagccaaagaaacaagccgggaaagggacaagaagggcaaagccgaagggaggacgcgagcggaagagaagcaaaaagacaag

SEQ ID NO: 50161 - RNA, 68 nt, Homo sapiens
acgcaggccccgcgccagggagaaacacagaacggagagacaggcgaaggcacaaccacggaaggcaa

SEQ ID NO: 50162 - RNA, 64 nt, Homo sapiens
gagaaggaccaagaaccagggggaacacgcaggagcgcccgccacccaggacacaggcagccac

SEQ ID NO: 50163 - RNA, 81 nt, Homo sapiens
cggcagcacgacagcgccggcaacacgcggcacaagacaacggcggccaaagcgccagacaagggccgagccccggagagc

SEQ ID NO: 50164 - RNA, 80 nt, Homo sapiens
aacagcaagcgaagccgaaaaagcgcccgagacgggcccgccgaaagaaaaacagcccgccgggacacaccccaggaaaa

SEQ ID NO: 50165 - RNA, 72 nt, Homo sapiens
gggaaacaagccaaaccgaaaggaagaacgcggcagaacggaggcaggcagcacgagacacaccacaagagg

SEQ ID NO: 50166 - RNA, 58 nt, Homo sapiens
ggagaccagcgcacgcaccgacaccggggcccccgccaggcaccccagaaagaagaaa

SEQ ID NO: 50167 - RNA, 75 nt, Homo sapiens
gacacacaacccgacccgacgaggacaagcaaggggccaaggagccaaggaggaaacccacaacagaggacagaa

SEQ ID NO: 50168 - RNA, 56 nt, Homo sapiens
cgcgcggggacccacgaggacgcacccgagcaggcaacaggaagaagaacccacag

SEQ ID NO: 50169 - RNA, 77 nt, Homo sapiens
caccaccgcgaggggcgggcgaggcaccggagacccgagcaccccaacgggcaggcccgaaaagaaagcgaacacac

SEQ ID NO: 50170 - RNA, 89 nt, Homo sapiens
cgcggagcccggccccgcaccaggaggaggacgacagcacgcggcccagcaggagggcggggccgcggcagccacccccacagcacgcc

SEQ ID NO: 50171 - RNA, 69 nt, Homo sapiens
aggaacgagacgcgaaccagggcaggagacagaacgagcgaaaggaggaaacaagaaacagccagccca

SEQ ID NO: 50172 - RNA, 73 nt, Homo sapiens
aagcgagcaacaaggcgccagcaaaacaagaaacaaaacgacaaggaggagccgaggaaggcgccaccacgac

SEQ ID NO: 50173 - RNA, 66 nt, Homo sapiens
cgcggaaccccagagcacgagagagcaagagcagacaggaaggaaaaaaggaaaaagcgcgcagac

SEQ ID NO: 50174 - RNA, 102 nt, Homo sapiens
gagggccagaaaaaacagaccagaaggagcaccgggacggaaagggggcaggaaagggagaaaacgggccggaggaaaagggcggcaggggaccaccacaca

SEQ ID NO: 50175 - RNA, 73 nt, Homo sapiens
ggagcacccgagagccaccaaaggaccggcccgggaggccggccgcgggcggacggggccccagaacccacca

SEQ ID NO: 50176 - RNA, 73 nt, Homo sapiens
gaagcaacaaacgagcaaacaagggaccaggagaacacagcgaaaaagggcggggaaaaaagaagaggaacag

SEQ ID NO: 50177 - RNA, 81 nt, Homo sapiens
gcgcccccgcgaccccggggagcgggacacgagggcgcccaagccagaaccgcgcgcaccgcgggagaccgccagaagaca

SEQ ID NO: 50178 - RNA, 79 nt, Homo sapiens
aagcgcgagagaggagaggcaggacggcggaggacgccggcgcccgcggaccacgacgcaggcggccgagacaagggcc

SEQ ID NO: 50179 - RNA, 72 nt, Homo sapiens
ggaggacacaccggcgccgcggggcgcgaaaacgcaaacaagagagcggggcagggaaccagcagacgagag

SEQ ID NO: 50180 - RNA, 76 nt, Homo sapiens
cggaccccgcacaacgaggacgccccagcacggcacgcgaggccaagccacccacaccgagagaaaagagacaccg

SEQ ID NO: 50181 - RNA, 116 nt, Homo sapiens
gggggagcagaggcaccaggcaaaaccagagacggcgccacagccagagccaccccaggagggagcagaggcgagcagaccaggaccgagaaacaggaaagcaagaaacagaggag

SEQ ID NO: 50182 - RNA, 84 nt, Homo sapiens
ggggaagcacaaaaacaaaccgaagaaagagaccagggaagagcaccaggacacacaaacgggagaccggaacgggggaggccg

SEQ ID NO: 50183 - RNA, 37 nt, Homo sapiens
caggcagcgcccccaaacgcaggcagcgccaacaaaa

SEQ ID NO: 50184 - RNA, 69 nt, Homo sapiens
ggccacggaaagcagccccgcaggagaagcgaaaagaaacccaagaaggggccaaggggaaacgcagga

SEQ ID NO: 50185 - RNA, 77 nt, Homo sapiens
agcgcagaagggacggagcccagccgaggaccgcgaagaggaacaaggcaccggcacggaccaccccaacaccgggg

SEQ ID NO: 50186 - RNA, 79 nt, Homo sapiens
gcgacagcaacagccgccggcggaagagaacggcaacagggagaaaaagaacaaaaacaaccaggaggagagaagcgga

SEQ ID NO: 50187 - RNA, 72 nt, Homo sapiens
gacgaccggagacccgccacaccagggaggccaacagacccaacccagaaggcaccaaacggagggggaaca

SEQ ID NO: 50188 - RNA, 71 nt, Homo sapiens
ccgggggaggccggggggccacggaagcaccagcgcacacaacggccgacccggcacccgcagagaaagag

SEQ ID NO: 50189 - RNA, 89 nt, Homo sapiens
ggccgaggaaaccccgggacaccccgagaccagccaccacacagggaggccagcagagccagagcgcggcggagagggcccccaccacc

SEQ ID NO: 50190 - RNA, 80 nt, Homo sapiens
agggcaccacacagagaggagccagccccgggcaacaaagggaaaggagaggagcagggaaaaaaacgcaacacccaaac

SEQ ID NO: 50191 - RNA, 73 nt, Homo sapiens
gggaacggagcgaggaaaagagcccggagagagggaagaaacacagcacaggcgcgggcacagggagggcgga

SEQ ID NO: 50192 - RNA, 73 nt, Homo sapiens
gggaacagcgagaaacgagaagcgcagaaccaacgaggggccgaaccccaggaacaagggcgccaacggggag

SEQ ID NO: 50193 - RNA, 77 nt, Homo sapiens
gacggggcgagaccccgcccggaccgcagagagggacaccagggggaaaacaggaaacgaagcccgagcgacaacag

SEQ ID NO: 50194 - RNA, 75 nt, Homo sapiens
cagacagcgaagggacaacagagacgcaagaccggaaagcagccccacgccaagcaccaccgagcccagcgaagc

SEQ ID NO: 50195 - RNA, 92 nt, Homo sapiens
gcaagcgagccgagccgagccgagcgggggcgcagagcgcgggaggcggcggcggcgcggagcccaggacaggcagaaaggccagggaaggg

SEQ ID NO: 50196 - RNA, 58 nt, Homo sapiens
ggagagcacgaagagacaaagggaaacaggacagagagcacaggggcccccaggggag

SEQ ID NO: 50197 - RNA, 59 nt, Homo sapiens
gcagggcagggccccgcccggcggggaagggccccgcggacgccgggccgcgggagagc

SEQ ID NO: 50198 - RNA, 83 nt, Homo sapiens
ggaggacaacagagggcgaacaccgggaaggaaggcacggagccggacaacaaaacggggccgacccccacaccggcaaaaga

SEQ ID NO: 50199 - RNA, 77 nt, Homo sapiens
ggggagaagccacagggaaaaaccaaagccccgcgcaaagaccgcagagaggcgagggcgaaaaagagaccgaaaca

SEQ ID NO: 50200 - RNA, 73 nt, Homo sapiens
gcagggaccaccaaagaggaccaacaaaaacagaccagaagaaccaaggcaaggcagcaccccgacgacaaga

SEQ ID NO: 50201 - RNA, 73 nt, Homo sapiens
cagaaaaggaaccaagacaagcaagcagggcagcagccccaagaggagcacaggcgagaggaccgagggacgg

SEQ ID NO: 50202 - RNA, 80 nt, Homo sapiens
gagacccggcgggaaggcaggcaaagccggcgacccgcacagccgcaccccaacccccaggccgcccaaagaccaacagg

SEQ ID NO: 50203 - RNA, 56 nt, Homo sapiens
gggaaacaccacgaagcagccaaggacaaaccggcgaccacacacggggacgacgg

SEQ ID NO: 50204 - RNA, 61 nt, Homo sapiens
cgaaagaggaggaaaaacgagccaaaccggaaagaggagaccggcagcacacagcgcacaa

SEQ ID NO: 50205 - RNA, 84 nt, Homo sapiens
ggccacgagcgcgcaccccgagcgcacaccagggcccagcggaagcaccgcaaggaccccaggggccaagacaagcaaacccag

SEQ ID NO: 50206 - RNA, 73 nt, Homo sapiens
gaggaagagacggaaggacgacccaagccaggcaaggcgcagcaacccggccaaccagaccgaaaccaggacc

SEQ ID NO: 50207 - RNA, 46 nt, Homo sapiens
ggcgggcgagcagaaggaggaaccccccgcggccagccggagcccg

SEQ ID NO: 50208 - RNA, 68 nt, Homo sapiens
cccggacgaaaaccaaaccggagcgggcgccaagcaaagaaggcccgccagcaacagcaggagcggga

SEQ ID NO: 50209 - RNA, 67 nt, Homo sapiens
caggaaccggcaagaagaaagccaaagcagaacgaaaagaagaaagcgaggaggccgggcgcacccc

SEQ ID NO: 50210 - RNA, 73 nt, Homo sapiens
ccaacagggaagaaaacccagaaagcaacacagagaccggagagcacacggcgaaacagaggcaggaagagaa

SEQ ID NO: 50211 - RNA, 70 nt, Homo sapiens
gcccccgagagcgagaacagaagcaccagcaccaagaccagccagggagacgacccgcgggaacccacgg

SEQ ID NO: 50212 - RNA, 62 nt, Homo sapiens
gagcgagggaggagagagggagagccaaagaagcgagccgagggaccggaagggcgcgaccc

SEQ ID NO: 50213 - RNA, 91 nt, Homo sapiens
gcagaaagagaacggcacaggggacagaaacacagcaaggagaacaaaaaaaagaggcagagaaaaggaaggggaaccacagcaggaacga

SEQ ID NO: 50214 - RNA, 70 nt, Homo sapiens
cccagacgggaggccaaggcgacccacaacggggacccaacggcgaacggaccgggcaaagcaaagaacc

SEQ ID NO: 50215 - RNA, 44 nt, Homo sapiens
gaaccaaggacggagaaaacagggaggagaaggaggaaggacca

SEQ ID NO: 50216 - RNA, 81 nt, Homo sapiens
gccgcaacaggaaagcagcccgaaaaagacgcgagaagccacacgaacggcacagccaacaagagaacggagcggacacca

SEQ ID NO: 50217 - RNA, 70 nt, Homo sapiens
caccagaaaacaaagggagagccagaggagcggagggagcacacgggcgaagaacccccaaaccaaccag

SEQ ID NO: 50218 - RNA, 74 nt, Homo sapiens
agaccacacaaaaaaggcccaacacaaggccagagcagaggcggagaggggcagacccagggaccgaaacgaga

SEQ ID NO: 50219 - RNA, 84 nt, Homo sapiens
agggcgcagagcccaggagacgagccaggacaaaaccaggcagaaccaacacgaacccaagcacaaacaagaaaacgagcaggc

SEQ ID NO: 50220 - RNA, 82 nt, Homo sapiens
agaaccgacccacaccaaggacagcgggaagggggaaggacgaggggggagagaaacacccaggagccaccagcagaaagga

SEQ ID NO: 50221 - RNA, 70 nt, Homo sapiens
cacgaaggggcccggacacaccccaaaaggaagaacagcagccaggacagaaaaccagagacgggcgccc

SEQ ID NO: 50222 - RNA, 77 nt, Homo sapiens
gagaggcccgcagaggaggagaccagaccgggacaaccagaggcgaagagcccacccgccaaccggagcagagaccg

SEQ ID NO: 50223 - RNA, 68 nt, Homo sapiens
ccccccccccgcaggagaacaaccgcaacgaacaaacaggagacagagagcaagagcaccccaacggc

SEQ ID NO: 50224 - RNA, 69 nt, Homo sapiens
agcagccacgaaggccccaagaaggcaggacaaggcggcacccagcgagcagaggaccacgagcgaccg

SEQ ID NO: 50225 - RNA, 77 nt, Homo sapiens
aggcaaggagcaaagcagcggcgcagcccgggaacaggagagagcagccgggcggcccagccaaacaggccccgaga

SEQ ID NO: 50226 - RNA, 72 nt, Homo sapiens
acagaaaaagccgggcccgacacggccgaagcgggagggcgcacccccgagagagccacggaagggcgccaa

SEQ ID NO: 50227 - RNA, 90 nt, Homo sapiens
ccgccagaacaaccgggcgccgacgagacggcccgagcgggaagaagccgcagcaagccgcagcggcgcgcaccgggcggcccaggaccg

SEQ ID NO: 50228 - RNA, 76 nt, Homo sapiens
agagaaaccagaaacccagcgccacaaggaaacacaaaaggcaaacagaagcaccgaacagggaaagaagacaaaa

SEQ ID NO: 50229 - RNA, 73 nt, Homo sapiens
cacacggggagacacagcggaagagaggaaggagacagagagagcaaagaaaccagaggagagagacgacgac

SEQ ID NO: 50230 - RNA, 74 nt, Homo sapiens
cgagaggaagcagccggccgcaccagagaccccacccagggggccacacgcacgcagcgccagacccggccacg

SEQ ID NO: 50231 - RNA, 86 nt, Homo sapiens
agcggaacggcccgcggagcccagcacggcagaaacagccaagcagacaggcagcaaagaaaggaggagaagcccagccgcgcgag

SEQ ID NO: 50232 - RNA, 70 nt, Homo sapiens
cgaccggaccgacggagggaccgggccaggagcgagacccaggagaccagagacagagagccccgaaaac

SEQ ID NO: 50233 - RNA, 81 nt, Homo sapiens
ggccaaagggcgagggcacaaaaaaccacaccccccaccgaggaagagcgggagaaaggggcagccacacaaaagggaagc

SEQ ID NO: 50234 - RNA, 75 nt, Homo sapiens
aaacagcgcacccagaagcaggggcggcagggggaccagccagcaacccgcccccggaccaagcaacccccaccc

SEQ ID NO: 50235 - RNA, 78 nt, Homo sapiens
gaaccagccaagaacagaccacaacagaagaagagaagaggaccacaagggggccaccaccacaacagaagacgagac

SEQ ID NO: 50236 - RNA, 58 nt, Homo sapiens
gacgaaggaaggcggagaacaccgcagccaggggcggcgccgagcgaggggcgcaggg

SEQ ID NO: 50237 - RNA, 78 nt, Homo sapiens
aggcacagaagaacgcagcccaggcaggaggggcaaaaaagaaggagaccaaggggacaaagagagagggagaacagg

SEQ ID NO: 50238 - RNA, 81 nt, Homo sapiens
cccaaagacaggccagacacgagcagaggccacgcgggaggggggcaaaggagaacggaagccagagaaaaggaagagaga

SEQ ID NO: 50239 - RNA, 74 nt, Homo sapiens
acccgcagcagaaaacaaacagagacgcacaacaaaggcacagaagaaaagagcggagagcacaacaaacagga

SEQ ID NO: 50240 - RNA, 89 nt, Homo sapiens
gacgcggagcccggagcggggcgacgaggcgagcgggggccgggcaggagcggcaggccaccacgagaagcagggacgccgcccgacga

SEQ ID NO: 50241 - RNA, 78 nt, Homo sapiens
cagaggccgcaacccgaaaagaggcaacgggggcaccgggaccagggggcagggcagagacggaccagagaagccgag

SEQ ID NO: 50242 - RNA, 38 nt, Homo sapiens
gaagggaccagaggccgaagaagcccacaacaagggac

SEQ ID NO: 50243 - RNA, 67 nt, Homo sapiens
caggcgacccgacacagagggaacgaaggaagaaaaacgcccaaagacaggacacggagagcgccgc

SEQ ID NO: 50244 - RNA, 82 nt, Homo sapiens
caccaagcagaggaacaagaacgcgcccccgccgcgcccgggcggggaggcaccgccccaacccccccccgcccggagaacc

SEQ ID NO: 50245 - RNA, 79 nt, Homo sapiens
agggcaacaaccggaacaaggccgccaggaccagcgcacagccaggacgggagcgacgccggcagccagcagcaggcca

SEQ ID NO: 50246 - RNA, 70 nt, Homo sapiens
caggccacacacgccccgccccgaggaggacacgccccgggcaaggggagcagacaacaaaacgagcaag

SEQ ID NO: 50247 - RNA, 76 nt, Homo sapiens
gggaggccggccgggccagcacccggccgagacggcggcagcagcggcacagacaaggccgacgcgcacgaacacg

SEQ ID NO: 50248 - RNA, 78 nt, Homo sapiens
gaaaggagggggcgagaaggcgggaagccgaaggcagccacagggagacaacagccacacaaagcagcaacaggagca

SEQ ID NO: 50249 - RNA, 76 nt, Homo sapiens
cgccggcgagaagcggccgagccagcagcagaggaaccagagaaggagaaacagcagggccaaaggcaagaacccg

SEQ ID NO: 50250 - RNA, 78 nt, Homo sapiens
cggccagagaggaggccgagacaacagaacgcgggcgaacgagcaccaacgcacccaccagaagcccggggaaaaacc

SEQ ID NO: 50251 - RNA, 70 nt, Homo sapiens
gccgcggccaggagggaagcgcagacccgcgaacagaggagggcgggacacgcggaggaaggcagcacaa

SEQ ID NO: 50252 - RNA, 75 nt, Homo sapiens
ccaacaggaccagagaaaccagaagcccaagggacaagggcaacaaggccggccagagggcccaaagcggagagg

SEQ ID NO: 50253 - RNA, 82 nt, Homo sapiens
ggagcagaccggaggaggcgggggcgccggcagaggaccaggcaccaccggccccggaaggcccaccagcccggccgggcga

SEQ ID NO: 50254 - RNA, 55 nt, Homo sapiens
acagaccagaggacggcacaaaggagaggaacaagcacaaggaagagcccacaga

SEQ ID NO: 50255 - RNA, 70 nt, Homo sapiens
acgggacgaagcagaggaacggggcaacgcgagcagaacagcccagccaacccgagagccaagcaaagaa

SEQ ID NO: 50256 - RNA, 74 nt, Homo sapiens
caaaggagagaccagaggaggaagagcaagcgggggaccgaacaaggcaaaaggggcgccggaccgaaggcgcg

SEQ ID NO: 50257 - RNA, 72 nt, Homo sapiens
cagcgcgagccagcccgaaaaagagcccggaacgccagagcggaaaggaagagaacgccggaagcgcaacac

SEQ ID NO: 50258 - RNA, 72 nt, Homo sapiens
agaccacccccggcgcaacggggcggcacacaaggagcgaagggcagggagaacgccaggcacagcacgacc

SEQ ID NO: 50259 - RNA, 79 nt, Homo sapiens
gcgacaggacaccagacgaaaacagacacagccagccagccacacggcagaaaaagaaggaagaaacaagcgagaggaa

SEQ ID NO: 50260 - RNA, 90 nt, Homo sapiens
gccgaggagaggggaggaggagaggacaaggccgcggggccagcaggcccagcagagcagcagcagaacccagaggaagagcagccagga

SEQ ID NO: 50261 - RNA, 51 nt, Homo sapiens
cagccccaaggcaaaaacacaaagaaccgcaaagaggccgcaacaagcccg

SEQ ID NO: 50262 - RNA, 74 nt, Homo sapiens
gacgccggcagaacacgcgcgggaccccgggcacggcgcgcgggagacggggcaccaagggcgcaggaaagcac

SEQ ID NO: 50263 - RNA, 48 nt, Homo sapiens
accaagaaccagaacaagagaagcagggagagcaccaaagagaacacc

SEQ ID NO: 50264 - RNA, 71 nt, Homo sapiens
aaccgcacggccccagagaaaccagaaaaaggcacaaacccagcacagagaagacggcgacaagcaaaaga

SEQ ID NO: 50265 - RNA, 122 nt, Homo sapiens
aaaggccaaaacgcacagggaaggcacccagaaacgagaagccaaagaaccagacaacagagggacaagggagaaacagacacagcccgccaaggaggcaaagcagcaaagaagcaaaaagg

SEQ ID NO: 50266 - RNA, 75 nt, Homo sapiens
cagggccccggggcaggcaccccaggcccggccacagcagacccaacagaggaagccgcaagaaacgggacgaca

SEQ ID NO: 50267 - RNA, 80 nt, Homo sapiens
cgaaacgcacgagaaggggcgccggacccgccccagagggaggcccgcccacggcgggcacggacccaggacccccgcgg

SEQ ID NO: 50268 - RNA, 79 nt, Homo sapiens
gaacgcagccaacagcagcaaagcaagcagcagccagcagccacaaaggacacaccggaacaaagaaaaccaaaacgca

SEQ ID NO: 50269 - RNA, 43 nt, Homo sapiens
aggcggaggcagggcgcaaccgccgggcaacaagagcgaaacc

SEQ ID NO: 50270 - RNA, 78 nt, Homo sapiens
cgccgggagccgcgcaagcggggagaagcgcagcgccaacccgaaaagaagcagaacaaaaaagcgcccaaccaaaaa

SEQ ID NO: 50271 - RNA, 76 nt, Homo sapiens
cgggcagcccgcgggcgcccagcagaaaggacccaggagcgaaacagaaacaaaaagaagcggggaacccacaagg

SEQ ID NO: 50272 - RNA, 41 nt, Homo sapiens
gaccaacgcaacccaaggagccggcccaggagcagcaggga

SEQ ID NO: 50273 - RNA, 81 nt, Homo sapiens
aaacagaaccgccaggagcggcagacggcaggccagcgcagagcccggcagggaaccaacccagccacaaccaccccaggg

SEQ ID NO: 50274 - RNA, 62 nt, Homo sapiens
cgaagaggagagagcgcgggcccaggaagcaaccaccgaaacgggcgaaaaagaagaacagc

SEQ ID NO: 50275 - RNA, 62 nt, Homo sapiens
gccacgcgcagaccagaccgccgaccggcgcccgccggccgaccgcgggccgcgcacccacc

SEQ ID NO: 50276 - RNA, 71 nt, Homo sapiens
gacgggggcgcaaggggagcggcgccaccagccgcaggacaagagcacgaaggaaaagaacgcgcgagaag

SEQ ID NO: 50277 - RNA, 31 nt, Homo sapiens
gaggggacgccagaagaacagcacgaaagcc

SEQ ID NO: 50278 - RNA, 105 nt, Homo sapiens
cgcgcgaagcggccaaagccgcccagacggccaccggcgggaggaacaaaaggacggccggagcagcagaacaagagcggagaccaagggagccccgcagcagca

SEQ ID NO: 50279 - RNA, 75 nt, Homo sapiens
gacccagaggagcaagagagccaccccaaccccccgaacccccaggaaacaggaacacgaaagaggaaaaacgca

SEQ ID NO: 50280 - RNA, 85 nt, Homo sapiens
cccagccccagcggcagacggaaacgacagaagcagaggagcaagccagagccaaaacgcaaacgcccccggcgcccgcacccag

SEQ ID NO: 50281 - RNA, 95 nt, Homo sapiens
cgcacaggaagaggagaagcccgagggcaaaacccagaggagggaccaaggccacaaacgaacagcgaaacggagaacggaagaaagccccagca

SEQ ID NO: 50282 - RNA, 56 nt, Homo sapiens
aaaacgaagccgggccacaccaaagagcagagccaaacgaaaaccagaaggcaccg

SEQ ID NO: 50283 - RNA, 77 nt, Homo sapiens
ggcaccggagcgccaaggagggccgggaacaggcccaccgcccgccaaccagggccaggcgcggccggccccggacc

SEQ ID NO: 50284 - RNA, 50 nt, Homo sapiens
cccgaagcaaaccggaggacacagaaagacacacaggaacagagccagaa

SEQ ID NO: 50285 - RNA, 72 nt, Homo sapiens
cgcccagaaaagaggaaaccaagggcaaacagaaggagggacaggcaacccccacaaaagccaggcgccgga

SEQ ID NO: 50286 - RNA, 72 nt, Homo sapiens
ggaacgccgggcgcgggcccacgcggcgcagaaggcagcggaaaaccccacccccagccccgaggcagcccg

SEQ ID NO: 50287 - RNA, 78 nt, Homo sapiens
accagccaggagaagcgccgccaacgaggggcggcccacgagaggccccggcaggcgaggggcaagacagaaaaggcc

SEQ ID NO: 50288 - RNA, 77 nt, Homo sapiens
gaggagcacccaccgagggagcagcgcaacgagacacagcggccccagcagaaggcaggaaaccacgagaacgaagc

SEQ ID NO: 50289 - RNA, 69 nt, Homo sapiens
cccaaaagcagccgggaaaggagccggccggcggcaaaggacccgagccccaaagacagaaaagccccg

SEQ ID NO: 50290 - RNA, 88 nt, Homo sapiens
ccggcgcgagcacagaggcgaacgggagccaaagggccccgggaagaaggaaccagcaaagcgccacgaagcacaagcaagaggacca

SEQ ID NO: 50291 - RNA, 70 nt, Homo sapiens
gccagagaaaggaggcaggcaagaaaaggagaagaaagaagaaaaaaaagagcaaaacaccggaaaaccc

SEQ ID NO: 50292 - RNA, 95 nt, Homo sapiens
agcgagggggggcgcgccggaaaccggagcgcgcagcagagacgggaaagcgcggcgaggcccccggagcagggaaggagaaccagccaaaaaaa

SEQ ID NO: 50293 - RNA, 82 nt, Homo sapiens
cggagagcgagagcgcgaaggaaacggccgccgccgccgcgagcgccccggccccaaccacggagccaggggaaccgcccac

SEQ ID NO: 50294 - RNA, 88 nt, Homo sapiens
ccaggccgggcccgggaacgccgccgccgccgccgcagagcgcagccggggccgaggggggcagggcccagggaccggaaagcaggac

SEQ ID NO: 50295 - RNA, 84 nt, Homo sapiens
cccacaaggcccccaggggaaaggaaacccgggcaggggagagaagaagagcgaaagccagggggcgaaacaaaacaaaaagga

SEQ ID NO: 50296 - RNA, 55 nt, Homo sapiens
caaccgagcccccacagcacccaccgcaagccccaaggaccaaggagcggcgcgg

SEQ ID NO: 50297 - RNA, 70 nt, Homo sapiens
gaagcgagacccagacggggaagcggagcacagggaccaggacaagccggaccaaggcagacaacagaga

SEQ ID NO: 50298 - RNA, 76 nt, Homo sapiens
agcccacacacgccccgcgcacaacaggcgaaaccccacacaaggacaacaccaacccgcgaccacccagaccgcc

SEQ ID NO: 50299 - RNA, 74 nt, Homo sapiens
gcccggccgagaccccgcgggaggaacaagaagcgggcaggccgcagggccaccaacacaaagcaacgggaccc

SEQ ID NO: 50300 - RNA, 76 nt, Homo sapiens
agggagccaaggacagcgccgcggcggagcgacggacggcaagagcgaaggagaaaggcaacaaggcccgagcggg

SEQ ID NO: 50301 - RNA, 87 nt, Homo sapiens
gccccccgcgacacagccacacacacgaccaccaggaccgcgggacaagggaacccgaccagcccagggccccagagcaggaggagg

SEQ ID NO: 50302 - RNA, 70 nt, Homo sapiens
acaaggcacgggggccagcaaccaccaagggaacagcacagacaacggcaagcggagaagagcaaggccg

SEQ ID NO: 50303 - RNA, 74 nt, Homo sapiens
agcgaggcagcgagaggaggaggcagcagccggcacccgcacaacccagggggccgaacccagaccaacaaaag

SEQ ID NO: 50304 - RNA, 82 nt, Homo sapiens
cgcagccacccaaaaacaggagaaggcccccaaaacagccccgggaagcgaggggaaaccagacaagaagagagaccaaaga

SEQ ID NO: 50305 - RNA, 48 nt, Homo sapiens
gcaacaccaaaaacaaaacgaaccaggacggcaagaggggggagccca

SEQ ID NO: 50306 - RNA, 79 nt, Homo sapiens
aagcgagagccgaagagggaccaggaccggagacgcacaagagggccagggaccaggggacgcccaagacggccacccg

SEQ ID NO: 50307 - RNA, 55 nt, Homo sapiens
cgcaaaaccagccaaaccaggaaaggacaggggccgcaaggccaggcgcgcagag

SEQ ID NO: 50308 - RNA, 63 nt, Homo sapiens
acacacccaacgcaagcaacaagaccacagggaaagaaggcaggcggcagccgccgcaaaggg

SEQ ID NO: 50309 - RNA, 77 nt, Homo sapiens
gaagaaagaggccagacaggaggcgaagccgacgagcccgaacagacgcaccagcgggaggaagagggacggcccag

SEQ ID NO: 50310 - RNA, 68 nt, Homo sapiens
cggaacagaccaccaggccgcacagcagaccaccacaacccgcaacgccacagcgagaacagaccacc

SEQ ID NO: 50311 - RNA, 64 nt, Homo sapiens
cgacgcaccgcaggcagacaaaagggccaaagaagggagagaggggcaaagaaaaaggagagaa

SEQ ID NO: 50312 - RNA, 61 nt, Homo sapiens
caagagccagcaaagaacagcagcagacaaccgagcacaaaaaaggcacccggagaacaga

SEQ ID NO: 50313 - RNA, 50 nt, Homo sapiens
cgcccccccagaccgccaggaacgaggcgcgacacaccagcggagcgggg

SEQ ID NO: 50314 - RNA, 67 nt, Homo sapiens
gcaacagaacacaacgaacaggggagagaaacaagacagcagacgcagaaaggcggaacagaagcgc

SEQ ID NO: 50315 - RNA, 72 nt, Homo sapiens
gaaaccagcaacagcaacccgagcccagagacccaggcggggcggcaccaccgagcccacgggcacggcacc

SEQ ID NO: 50316 - RNA, 60 nt, Homo sapiens
ggccaggccccagacacagacgagcaggggaaggggaggcaagcaggggggcaaaggaaa

SEQ ID NO: 50317 - RNA, 75 nt, Homo sapiens
gcggggggcagacgcagcggccagagagcggcacagggcccgcgcaccgcccagaggaggcgacacccgaagccc

SEQ ID NO: 50318 - RNA, 51 nt, Homo sapiens
cacaacacccacaaggcaagcggcagccacacccggagaaggagccgccca

SEQ ID NO: 50319 - RNA, 86 nt, Homo sapiens
ggcaccgcggccacaagaaaagccagcccccagaaagaaccgcccacgggccgcgccaggaggagaaggcagagcccccccaggca

SEQ ID NO: 50320 - RNA, 87 nt, Homo sapiens
gcaggaggccggcgaggagcgccgcgcccgcccgggcagcgggggcagagacggggaacagggccacccacacggacgccaacgcgg

SEQ ID NO: 50321 - RNA, 95 nt, Homo sapiens
cccgaacggggcgcccaggccgcccgacccaaagggaaaacagaaacagggagcgggaaacgcacaacagagaacagaaaagacccgcagacaac

SEQ ID NO: 50322 - RNA, 40 nt, Homo sapiens
aagccagaggccaaaggcaggaggcagccaacgaagggga

SEQ ID NO: 50323 - RNA, 78 nt, Homo sapiens
gccagagagcagcgaccggcacaccagcaagagcgaggcgcgcgcgcacacaaggccagcgcggaaggcaggacaaca

SEQ ID NO: 50324 - RNA, 57 nt, Homo sapiens
gggcgagaccggcgcgacccgaccacccagcgagcaggcgacccaaaagagcgaagg

SEQ ID NO: 50325 - RNA, 43 nt, Homo sapiens
aaaagaacagcgaacccagacagggccgaggacaccggagcca

SEQ ID NO: 50326 - RNA, 89 nt, Homo sapiens
ccaaagccagcacagaccccgggcccacaggccaggaagaccagcacacggaagacaggagaacgagacgacgagcgcgcaggagcgag

SEQ ID NO: 50327 - RNA, 75 nt, Homo sapiens
cggcaccggcggggggcacgaggaaagagccaagggagggacggacagggagcagagccggaggagcaaccccgg

SEQ ID NO: 50328 - RNA, 60 nt, Homo sapiens
ccaccgggacaggcaccagcaaaagggaaccaaaagccccagacccccagcggccagggg

SEQ ID NO: 50329 - RNA, 71 nt, Homo sapiens
cccagaggaccgcggcgaagcaaaggaacgcgccggaagaaaaggccaacggacaccagggcccaggcggc

SEQ ID NO: 50330 - RNA, 67 nt, Homo sapiens
ggcgcggcacgccggcccgcagggaaggacccaaccaggaaaaggaggacggccaggaggcgaggcc

SEQ ID NO: 50331 - RNA, 52 nt, Homo sapiens
gagggggccgaggcaaacagagaaacaacagcggccgggacccaacagacag

SEQ ID NO: 50332 - RNA, 78 nt, Homo sapiens
gccggccggccggacaagcccaggagccgaccagagagcaggagcagcaaggccccggacaaacagacacaacaagaa

SEQ ID NO: 50333 - RNA, 76 nt, Homo sapiens
ggggaaagaggcgggagagggaggagcccagaccgggcgacccgccaacacagcccggccagcgggccgaagaccg

SEQ ID NO: 50334 - RNA, 68 nt, Homo sapiens
gcgaggcccggcccacaacaggaaggacagggaacaagaagagccaaaaagggcccgggagcacaaaa

SEQ ID NO: 50335 - RNA, 66 nt, Homo sapiens
gggccgggcccacacccgggcgcggccacacgcgacgggggagccgcgggcgcaaggggacggaaa

SEQ ID NO: 50336 - RNA, 76 nt, Homo sapiens
aggaggcacaaaggaagaccaccaacgcaagcagggaccaaaggaaaacgggcaaacaacaccggcggcacacgga

SEQ ID NO: 50337 - RNA, 59 nt, Homo sapiens
cgaaaacaacgacaacgagcacaggacgaccgaaaacccagccagacaaaagagaagca

SEQ ID NO: 50338 - RNA, 80 nt, Homo sapiens
gccagagcggggcgggccccaggaccagcgaacacgcccaggacgggacagaagccacgagaccgccaaacacccgcacg

SEQ ID NO: 50339 - RNA, 41 nt, Homo sapiens
ggcccggggcccacgcggcggccggaaccaaaaagaagccc

SEQ ID NO: 50340 - RNA, 85 nt, Homo sapiens
caaccaccgccaccagccacggagggcagagcaagaggagccaggagcacggggggaacaagaccgccgggacggaagacgggag

SEQ ID NO: 50341 - RNA, 71 nt, Homo sapiens
cgcagccgagcggggccggccacagggaaccgagcaagggggcgagaggggaacgccaccggagggagaag

SEQ ID NO: 50342 - RNA, 75 nt, Homo sapiens
aagcaggaacgccaaaagaacaaggcgaaacagcagcaaaaaacaccagcaaccgacggcagcaacaaggacagg

SEQ ID NO: 50343 - RNA, 64 nt, Homo sapiens
aagcaacgggacggaggcacaccaaaaacagcacaggagaaaccacagcacggccgccgcgaag

SEQ ID NO: 50344 - RNA, 67 nt, Homo sapiens
ccaggaagcagcagcggagaaacagggacgggcccccgagacaggagcaggagagggagggggacag

SEQ ID NO: 50345 - RNA, 80 nt, Homo sapiens
acacaaggacaggacaccaggaaaaacacagagagccgacggcagcagaccagggccagagcaccagaccagcagaggag

SEQ ID NO: 50346 - RNA, 87 nt, Homo sapiens
cacgccagccgcaccagccgcccaagccgcacagccgcggcggcagcagcaggagagaaaccaagggagggaaccgggaacggcgcg

SEQ ID NO: 50347 - RNA, 65 nt, Homo sapiens
gccgccaccagcccaaaacggggacagaccagagcaggaccaaaggcgcacagagccgaacccca

SEQ ID NO: 50348 - RNA, 74 nt, Homo sapiens
caaggaagaagggccgccgcgccgcgcgccgggccgcgcccccaggagaaccaagaggagagaacagaaagacc

SEQ ID NO: 50349 - RNA, 61 nt, Homo sapiens
caccacaccgagcccaagcggaaagcacgcgcacagagggcggagccgagcgaggccccag

SEQ ID NO: 50350 - RNA, 82 nt, Homo sapiens
aggccggcaacccgcaagaggaccgaggccaaaagaaaggaagaaaacccccaaaaagccaaaaggccaagacaagaagaag

SEQ ID NO: 50351 - RNA, 65 nt, Homo sapiens
cgaaaccagccagacccagcacgaaggaggagggagacaggggcaaaaaacggcagggaagaggc

SEQ ID NO: 50352 - RNA, 57 nt, Homo sapiens
aagagggggacacgacccggagcacccgaccccgagcacccccgaaggccaccgcac

SEQ ID NO: 50353 - RNA, 80 nt, Homo sapiens
gagcaccagacgacagggggcacagagccagcaggacaggcacacccgggcagccccagcccgcagaagcccagaacaag

SEQ ID NO: 50354 - RNA, 59 nt, Homo sapiens
agaaccgcgccaccagagacggccgcagacaggaagagagcccccgccgagaaaagacg

SEQ ID NO: 50355 - RNA, 78 nt, Homo sapiens
acacccgaaccaagaccaggaaggcccgccgaaggagaagggcaggaagacccagcaggccggcccagagcaggcgca

SEQ ID NO: 50356 - RNA, 69 nt, Homo sapiens
agacgcagggcgcccccggagaaggaagccaacaccggagccagaaagccgaacccacggccagaggaa

SEQ ID NO: 50357 - RNA, 64 nt, Homo sapiens
ccgcgccgccgccgcgcgcgggagacagaacagacagaaaaaacaacaagaaacccacaaccaa

SEQ ID NO: 50358 - RNA, 76 nt, Homo sapiens
cagggcccgagacccgccgccgaggaggcccggggagcgaaggagcgcagcaccagggcgcaagcagccccagaca

SEQ ID NO: 50359 - RNA, 39 nt, Homo sapiens
cccaagggcaccagaagagccacacacccccacggcgag

SEQ ID NO: 50360 - RNA, 77 nt, Homo sapiens
cggaaggccccaacacccggagcagcgccacaagggacaggcaagcagcggcggccgcgcccaccggcagggaagac

SEQ ID NO: 50361 - RNA, 54 nt, Homo sapiens
gagaagaggaacaggagcgccaagcccagagccaagagagaaaccagcaaaaaa

SEQ ID NO: 50362 - RNA, 81 nt, Homo sapiens
ccgagggggcgcggcccaggacggcggcaggccgaggcagcccccggagcccaggggacaaaggcagagagggcgagaaga

SEQ ID NO: 50363 - RNA, 86 nt, Homo sapiens
agggagcggggcccaaggacggccgaccggagccggacgagggccgcggaaaaggagagagggaagaagaggaagaagaagaagcc

SEQ ID NO: 50364 - RNA, 77 nt, Homo sapiens
ccagacaggaacaaaggcagcggaggcacggacaccacacacacacagcgcccgcgacacagggagaccagggaaaa

SEQ ID NO: 50365 - RNA, 70 nt, Homo sapiens
gggaaaacccccacacggaggggacgaagacaaaaaccaggggaacaaaggccgacaaagaacacaaggg

SEQ ID NO: 50366 - RNA, 70 nt, Homo sapiens
cccgcacggacagcgacccgccccacccgcagcagaacaagaggccgagagacccgcgaacgagcacaag

SEQ ID NO: 50367 - RNA, 43 nt, Homo sapiens
gagcggcgcgcgcgggacaagcagaacaacggcccaagagcac

SEQ ID NO: 50368 - RNA, 72 nt, Homo sapiens
cagacccgaggagcccgcaggacagcccaaggcggaaaagcgaaggaagccacaagcacagcccacacaaac

SEQ ID NO: 50369 - RNA, 76 nt, Homo sapiens
agagcaaaaccgaacccaccgacaggccaaggccacagccaaaaacaagagaccacccaacagcgaacaaacccac

SEQ ID NO: 50370 - RNA, 78 nt, Homo sapiens
cgagagcggaccgagagcgcgaaacgcacgagaagagaccgaagagccagaggaacaaggcaaggcgcaaacaggaag

SEQ ID NO: 50371 - RNA, 65 nt, Homo sapiens
gccagggaaaccgaaacccccacagcgcgcggggagcccccacccccaaaaacgcggaagacggg

SEQ ID NO: 50372 - RNA, 76 nt, Homo sapiens
gcaccggcccaagggcacacggacgaggccggagcgaagaaggaacacccaggggcccgggagggacggaccggag

SEQ ID NO: 50373 - RNA, 66 nt, Homo sapiens
ggggaagaccgcgcccgcggagagcccaaacaccaccaccaaggcgaggaccggcccagccaggcc

SEQ ID NO: 50374 - RNA, 81 nt, Homo sapiens
gcggcgcccccaggaccccgcacgggagaaaacccggaaaggacagagcgggagccaccagcgccaaagggaagccaggag

SEQ ID NO: 50375 - RNA, 82 nt, Homo sapiens
caggagcacagagacgcccagaacgaaaagggagaaccgaagaacaggaggccagcagaggggaacaagagaagagaccgcc

SEQ ID NO: 50376 - RNA, 57 nt, Homo sapiens
cgaacaaaaagcagcaaaccggaccaccccgaagaaagcacagcagagggacaaaaa

SEQ ID NO: 50377 - RNA, 74 nt, Homo sapiens
ccccacccccaagaaccaacccccaaaggcgggacagagagacgcggcaccgggcgacccgacggaccacccgc

SEQ ID NO: 50378 - RNA, 80 nt, Homo sapiens
cacagacccggaagaaagccccccacacaggggggggaagacaacccggagaacacccaggggacgcccagaccaaacaa

SEQ ID NO: 50379 - RNA, 82 nt, Homo sapiens
cgccgcgccccgcaccccccgagcagcccggggaccagcacgcagcggcggagaaaccaccacaaacacgaggccagcaacg

SEQ ID NO: 50380 - RNA, 79 nt, Homo sapiens
ccgggaggagcagccgcgcgccgagaagcacccgcgacccagaagcccgacggccaggaggcgaagagacgaggaagcc

SEQ ID NO: 50381 - RNA, 71 nt, Homo sapiens
gaccgccaacccaaccggagccccgagaaagaggcaaggagacgacagcaaagcaacaacagaagaacgga

SEQ ID NO: 50382 - RNA, 81 nt, Homo sapiens
acgcaccgagcaccaagccaggcagccggcgaggggggagcccagcaggagcgggaaaaccgagcgcgggagaagggaggg

SEQ ID NO: 50383 - RNA, 70 nt, Homo sapiens
gcccgccggagcagccgaggccccccagccacgccgacagccgcagaacagggcccagaccgaagccaac

SEQ ID NO: 50384 - RNA, 77 nt, Homo sapiens
agccccaaggcaacaagcccacccgaaaccacaaggccgaccaacgggacccaggggagcgacagccaaagcaacaa

SEQ ID NO: 50385 - RNA, 93 nt, Homo sapiens
cgcgaggaagcaccacaaggaagcagcccagaacaaaagcagacccagagagagcagggagggggcggggcacccggcccgcagcggacaaaa

SEQ ID NO: 50386 - RNA, 71 nt, Homo sapiens
caagcgcacaggcccgcgcagcgcagcaggagagaagaaaacggaaccagggggaaggccccgggcagccg

SEQ ID NO: 50387 - RNA, 75 nt, Homo sapiens
ccgcggcgggcgcacaccacgccggagagcgcgggcgacggggcgagagagccggggggacagcagacgagcgag

SEQ ID NO: 50388 - RNA, 70 nt, Homo sapiens
agagggaccgacccgaggccagcagggaaagccccgcagcaacagacgcagacagccagcaagggggacc

SEQ ID NO: 50389 - RNA, 73 nt, Homo sapiens
ggagagagggcaccaccaaaaggaggccacccaggggcgacggccggcaagggcaggggcggggaacaccagc

SEQ ID NO: 50390 - RNA, 54 nt, Homo sapiens
agaggaagacaccgggaccaccagcacacgaaaggcacaagcgcccgacaccga

SEQ ID NO: 50391 - RNA, 38 nt, Homo sapiens
ccaaaggcgggagcaggcgaagagagagaaacgaaaaa

SEQ ID NO: 50392 - RNA, 89 nt, Homo sapiens
acggcgacgcggacgcggcgcagcaggaccacgcgacagaccccaagaagaagcggaagaggagccgcggaaccaagacacaaggaaca

SEQ ID NO: 50393 - RNA, 76 nt, Homo sapiens
acagggaaggcacacagcagagcggaaaaggaggagaaagccgcagccgaacaaagccgccgcgcaaaacaagaga

SEQ ID NO: 50394 - RNA, 80 nt, Homo sapiens
caagagcaccaacgagggcagcaagaagggaaaacaaagcaagacaccagaagccaacccagagaaccgaagaccacaga

SEQ ID NO: 50395 - RNA, 39 nt, Homo sapiens
cgccggacagcaggaaaagaagccaggaaaaagcccagg

SEQ ID NO: 50396 - RNA, 69 nt, Homo sapiens
ccaggcgcccccgcagccgcccgggcccgccgccacgagagcgcaccacaagacaaacgccacaccgcc

SEQ ID NO: 50397 - RNA, 52 nt, Homo sapiens
cagggagaaaaaacgcaggcaaagccgaaaggggggaggcccagggacaaag

SEQ ID NO: 50398 - RNA, 81 nt, Homo sapiens
aaaaacgcaggcgaagaaaacaccagggcacagaacgggcccgacacaggcgaccccaaccggggcggagcggaggcggcg

SEQ ID NO: 50399 - RNA, 95 nt, Homo sapiens
ggaggggcggagggcaagagcgccgaccgggcggcgaggaaggcgccccgggggggggcacacgaaaagccacgcccccgggaagagcaagaagg

SEQ ID NO: 50400 - RNA, 77 nt, Homo sapiens
ccaagaccagcagcaccaggagccccccgcccagacaagggcacgcaaaaaaaccaagggaaaagagacaagaccga

SEQ ID NO: 50401 - RNA, 77 nt, Homo sapiens
gaagggcagccccgcaacgaagcggccccagcccgaaagcaaccgggcgcaggccacaggaaccaaacaagacaaag

SEQ ID NO: 50402 - RNA, 79 nt, Homo sapiens
caagggacgcccgagccccaaggagccgcggcgcggcagcaggggacagcggagaggagaacaaccgcaacgaacaaac

SEQ ID NO: 50403 - RNA, 73 nt, Homo sapiens
ggagcccccccaccacccccgagccaagaacccaaagcaaggcgagacaaggggccaaccagccagggccaac

SEQ ID NO: 50404 - RNA, 71 nt, Homo sapiens
cagaagcgcgaggacccaggcaccgcccgccgacacccaccagcgcggagccagcgcccggcaaggagcga

SEQ ID NO: 50405 - RNA, 45 nt, Homo sapiens
aggaggcggcggcggcggacggcggggagcaggagccagcgaagc

SEQ ID NO: 50406 - RNA, 68 nt, Homo sapiens
cccaaacccccagacaagaacacaacccaaacccgcccggagacagcccgaagacccaagagaaaaga

SEQ ID NO: 50407 - RNA, 85 nt, Homo sapiens
cggcaaccgcagagccaacacgccaacacacgacagcccaacacgagaagaggaggcggggagaccgaagcgagggaggaggggc

SEQ ID NO: 50408 - RNA, 62 nt, Homo sapiens
ccagccccacgcgccacagaggcacacccagaagccacaggagaagcaagaggcggcccccg

SEQ ID NO: 50409 - RNA, 77 nt, Homo sapiens
gcccgacacacgccggaggagccggacccaacagaggaagccgcaagaaacgggacgacaggaaggccagagaaggc

SEQ ID NO: 50410 - RNA, 69 nt, Homo sapiens
gccccaccccgaaacgccccgaaaagacgggcaacagacaccagccacaaggagaggaccccccgcaca

SEQ ID NO: 50411 - RNA, 57 nt, Homo sapiens
aaagaacggaaaaaaacagcggagaagagaaacaggaaagaccacagcaagaccacg

SEQ ID NO: 50412 - RNA, 58 nt, Homo sapiens
cgggccaagcacgccacccggaaggcaaagaaggagaaagccgagcacacgaggaaga

SEQ ID NO: 50413 - RNA, 74 nt, Homo sapiens
aagcaagcgggccaccacagaaaagaccaagggaacggaagccccagcccgcgcgagccaggcgcccacaggag

SEQ ID NO: 50414 - RNA, 59 nt, Homo sapiens
aaaggaacaggagccgccaggcgacacaccggaagcagagcgcgcccaggagaagggag

SEQ ID NO: 50415 - RNA, 75 nt, Homo sapiens
ccacccacccaccacgagaaacacagcccaaagaaacacacccccccacaacaaggcccaaagaaaagggaccag

SEQ ID NO: 50416 - RNA, 75 nt, Homo sapiens
cgcaccacgccagccgccgggacagccccagggggggacgcgcggagggaaccaagaccaggacaaagaagaccc

SEQ ID NO: 50417 - RNA, 73 nt, Homo sapiens
ccagggcagcgcgagacccagaaggccaggaagaagcaaaggaagacagaaaagacgccaccccagcccgaca

SEQ ID NO: 50418 - RNA, 73 nt, Homo sapiens
accgggggcaccggaccgagcgagaggacggcagaccgagagaccaggcaggcaagcgcagacaaccgacccg

SEQ ID NO: 50419 - RNA, 72 nt, Homo sapiens
cggacaaagaaaaagcgccccgggaggagccaccagacccccagcagcggccacagacaggaggaagaagac

SEQ ID NO: 50420 - RNA, 73 nt, Homo sapiens
aaaagagggacagcagagaccaccgaagacgcacgccaagacaggaaggagggccccggagcagccacaccac

SEQ ID NO: 50421 - RNA, 78 nt, Homo sapiens
agcacagcccgcgcccgccaggcgacaggggaacagacagaaggagcaggaaccaaagggaagaccgcaggaaagcag

SEQ ID NO: 50422 - RNA, 86 nt, Homo sapiens
gccaagagaacaagaaggagggacgccacggagggcaagagccggagggccagaggacagacaggccagacgaggaacaacaaagc

SEQ ID NO: 50423 - RNA, 61 nt, Homo sapiens
caggccacacccacccaacagacgcacaggaacagaggggcccacggcccagggccggaga

SEQ ID NO: 50424 - RNA, 52 nt, Homo sapiens
accaacgacgacccagaaagagcaaccggagcagcaggggaacaaacgaaag

SEQ ID NO: 50425 - RNA, 75 nt, Homo sapiens
cccccaccccgacccacgcccggccccgacacgccaggaagaggccgaccagcagccagacccggcgaagccaac

SEQ ID NO: 50426 - RNA, 82 nt, Homo sapiens
agcaaggccggaggacgccggcagcacggcacagccccagagagcaaacgccagggccaacaaaagcagcaggcaggaccag

SEQ ID NO: 50427 - RNA, 72 nt, Homo sapiens
gacaagacaaaaagagggagcgagcacaaacgacacacgcaaaccacaaagcccagcaacccgaagagaggg

SEQ ID NO: 50428 - RNA, 45 nt, Homo sapiens
agcggaagcccaggaaacacaggcagcggaggagccgccgcgccc

SEQ ID NO: 50429 - RNA, 78 nt, Homo sapiens
gcccccggcccgcagcccccgccggccgcccaacaccgaacaccgcgaacaagcccaaacacggaagcaggaagcagg

SEQ ID NO: 50430 - RNA, 75 nt, Homo sapiens
caggaacaacggcagcagcagccccccaagggagaagaaaaagcagaaaggaacagaaaacaaaagaacaaggca

SEQ ID NO: 50431 - RNA, 77 nt, Homo sapiens
agaacacgaagaggacccgggaggccgaagccagcgcgcggaggcaccaggagaaacagaaacggaaaccacgccca

SEQ ID NO: 50432 - RNA, 57 nt, Homo sapiens
aggggacagaggcaccgcagcgagaggagcagccaaggagaccagggaagggacgag

SEQ ID NO: 50433 - RNA, 45 nt, Homo sapiens
gcgaaagagcacacaaaaccgcggagggaaaaaccaaaaaccaga

SEQ ID NO: 50434 - RNA, 65 nt, Homo sapiens
agaggaaaaaccaaaggcgaacagaagacgagagcagcagaaacccacgcaggccgaggaaacac

SEQ ID NO: 50435 - RNA, 88 nt, Homo sapiens
gccgcccccgggaggccggcgccgcagcccgggcccaggccccggcagcgccgggacaagggacaaacagcaggggccaagaaagaag

SEQ ID NO: 50436 - RNA, 84 nt, Homo sapiens
cgaaggcccgcggcgccccggcgcagggcacagaacggcacccacgaacccgccgagagagaagcaaaaaaacagcgagggagg

SEQ ID NO: 50437 - RNA, 86 nt, Homo sapiens
acggagcgaagagaggagccgaggagaaaacagcaggcacccaagcgggcggcagagggaacaggcacgccccacccgccagccga

SEQ ID NO: 50438 - RNA, 75 nt, Homo sapiens
cgacaccgcgcccggccgcaccacaccacgagcccccgggcacgccagcgcgccagcggagcccggcaggggccc

SEQ ID NO: 50439 - RNA, 43 nt, Homo sapiens
cacggcggaacacacacagcaccagaacagcccgggcccccac

SEQ ID NO: 50440 - RNA, 73 nt, Homo sapiens
ggacaggagaagaagagaccgacacaaggaaagcgaagcggagcgaaggacaggccagaaaggccaagccggc

SEQ ID NO: 50441 - RNA, 71 nt, Homo sapiens
gcacaggaagagaaggaaacgacagaggggaccacaaaagcaggcccgagggccaaccagaagacggagca

SEQ ID NO: 50442 - RNA, 76 nt, Homo sapiens
aacgcagcgcaagggggaacgcgaaggaagccccggacagggggaggaggagccgccaagcgcagaacccagacca

SEQ ID NO: 50443 - RNA, 84 nt, Homo sapiens
aaacaaggcgccggagcagccaggccagcagaaaacgcccgggaaacggacccaggggcaaccccacggggaggggaccgcaca

SEQ ID NO: 50444 - RNA, 35 nt, Homo sapiens
gggaaccgaggagggggggaaacaagaccaagaag

SEQ ID NO: 50445 - RNA, 72 nt, Homo sapiens
agaacgaaggaaaccacagcccacacaggaaaagggaccgacaagaaaaagaagggacaaaaacagaaaagc

SEQ ID NO: 50446 - RNA, 83 nt, Homo sapiens
cgggagaggcgggggccccgagcgcgagggagggacaggacagcggccaggcccgcccccccccgaacaccagggagggagag

SEQ ID NO: 50447 - RNA, 82 nt, Homo sapiens
ccaagccgcacagccgcggcggcagcagcaggagaggggggccacgggccccgaccgcccacaagcgcacgggggcacccaa

SEQ ID NO: 50448 - RNA, 60 nt, Homo sapiens
gagcaaaggaagcgcgaacagcagcgcagcagaagacaccgcacccgcgcaagaacgacg

SEQ ID NO: 50449 - RNA, 77 nt, Homo sapiens
acagaccacacgcgcacagggaccagaaccgagaagcagcccgggaggagaaaccaacagaccccaccagaaaccag

SEQ ID NO: 50450 - RNA, 78 nt, Homo sapiens
ggaggagacgggccgcacccgccccccgcgcccgccaccggccgccgcccggcccagagaacagcggggagcgcccgc

SEQ ID NO: 50451 - RNA, 82 nt, Homo sapiens
cgaccgaggcgcccgcggggcggggaccgccgcccgggaacgcagggaggccgaccagaaccaggggggggccggaagaccc

SEQ ID NO: 50452 - RNA, 70 nt, Homo sapiens
gaaaaacacccacgggggaaccaccgaaggcaagaaggcaggcagggaaccagagcagcccgccagagga

SEQ ID NO: 50453 - RNA, 84 nt, Homo sapiens
ccaaggcaccgggccccgcccaggccccggacaaaggcaagaagaagaaaggcgcggcaaagagacaccggaaccagagagcac

SEQ ID NO: 50454 - RNA, 84 nt, Homo sapiens
gaagcggagagcaacagcgcgccgcgggaaaaagccaaagcaggccgccacaacgaaaagccaaaaaggagggaaaacacaggc

SEQ ID NO: 50455 - RNA, 95 nt, Homo sapiens
caaaacgacgaccaggaagaacggagcacgacagaaacacagccgcaggaagaacgaagcacagcggaacaagcgaaccacaaagaaaccgaccc

SEQ ID NO: 50456 - RNA, 36 nt, Homo sapiens
ccagcggagacccccgagccaggacaaggcacgagg

SEQ ID NO: 50457 - RNA, 70 nt, Homo sapiens
cggccgcgcagggggaagggagggaacccaggacgaaaacagaacagcagagaaaaggaccccccccaac

SEQ ID NO: 50458 - RNA, 69 nt, Homo sapiens
gagaaggaccaagaaccaggacgagaagcggccaggaagaaaaccaccccccaagggggaccgcggagc

SEQ ID NO: 50459 - RNA, 79 nt, Homo sapiens
agcggggagcgcccgcgacagaggagggaggaaaacaaccgagggcagacgggagagggaaagcggagaggggaagagc

SEQ ID NO: 50460 - RNA, 56 nt, Homo sapiens
gcacagacaaccaggcgcgcccaccccgcagggagagagcagcacgaggcagcaca

SEQ ID NO: 50461 - RNA, 106 nt, Homo sapiens
ggaaaaaaacggcaacccgaaaaagagcacagagacaccaagccagcgcacaaagccacgaaaggccggagagacacagggccgccagaagcgacagccccgacga

SEQ ID NO: 50462 - RNA, 86 nt, Homo sapiens
cgggggccgcgcgaagacaggaccagggcacggagacaggacccagaccagccaaagagaagaagaaaggaagcaaaacaaagaaa

SEQ ID NO: 50463 - RNA, 52 nt, Homo sapiens
accccccgggaaagcggaacagacagaagcagaccccaagaagcaggcagac

SEQ ID NO: 50464 - RNA, 94 nt, Homo sapiens
cagcacccagggccgcaaaaacacagggagagggggcagacccaaaggaaacgcacgaaagaaacaggagagcgcagcgaagcccggggaagca

SEQ ID NO: 50465 - RNA, 74 nt, Homo sapiens
cagggaagcgaccaggggcacaggaacacaaacggaaaagccaacagcagaaaggagacaagcgcaagcagcca

SEQ ID NO: 50466 - RNA, 79 nt, Homo sapiens
agagaaagcaaagagaaaggaagcaggcccgggaagggggcaccaagcagccgaagagaaacaagggacagcagacaag

SEQ ID NO: 50467 - RNA, 80 nt, Homo sapiens
cccccaccacacaacgacccgaccggcaggcgccagcccggccggcggaggaccccccaaccgcggagaggcggacacga

SEQ ID NO: 50468 - RNA, 79 nt, Homo sapiens
gccccccgaggccccacgaagcccccgggcccacgggccaccgaccagcaggacaaagccaggcagaagacgcaagccg

SEQ ID NO: 50469 - RNA, 75 nt, Homo sapiens
aaacagcagccaacaaggccaggggaaaaaacccgccacgcgcgcggagagacgggacagcaccccaaacccgag

SEQ ID NO: 50470 - RNA, 64 nt, Homo sapiens
gcggcggcagcgggcgggccccgagagcagcagcggcagagagggcagcgcccgagggcggagc

SEQ ID NO: 50471 - RNA, 57 nt, Homo sapiens
ggagccgcggggaggaggcgaagccacacagagggcaagcagaaaagcacacgaggc

SEQ ID NO: 50472 - RNA, 63 nt, Homo sapiens
aagaacccacgcgcgacgaaaacggagccccgggcccagcaggaggcggcccccgcggaccgc

SEQ ID NO: 50473 - RNA, 76 nt, Homo sapiens
acagacccagacaaaaaccacccaaaggcagagggacgaggccacagcagaaaaaaccgggaggaaaaacgaaaac

SEQ ID NO: 50474 - RNA, 76 nt, Homo sapiens
ccaggagacggcggaggggcggacgccacgccaaagggaacgaagaaggacagaacggacaaggcagagcaaggaa

SEQ ID NO: 50475 - RNA, 70 nt, Homo sapiens
gacacgaccaagaaagaccaggcccaccgccaacgcgggaaggccaccccggcagaagggaacgcaagga

SEQ ID NO: 50476 - RNA, 63 nt, Homo sapiens
ccaccccacgacccaccccaaagaacacagaccaccaaggagaggccgaagagggaccagacc

SEQ ID NO: 50477 - RNA, 65 nt, Homo sapiens
gcacccaccccagaaggaaggaaaccgagaggaaccggggcaggaagaacagggccggaagaaac

SEQ ID NO: 50478 - RNA, 63 nt, Homo sapiens
gaagagaagacgggacacagagcacaagcaacacaagccgaacccgaggagcagggaaaaacc

SEQ ID NO: 50479 - RNA, 75 nt, Homo sapiens
ccaaccaccaccaggccggagaacgccccaaggagcaagcccaggggaaaagcacagaaagagacacagaccggg

SEQ ID NO: 50480 - RNA, 68 nt, Homo sapiens
gcccccacgcgaagcaccgagccagcgcacaagacaaaagcgacaagccacaggacaccaagccacag

SEQ ID NO: 50481 - RNA, 68 nt, Homo sapiens
aaacggaaggccagcgaagcacaaagaggaccacagcaacagggaggcccccggcccccaaagcacac

SEQ ID NO: 50482 - RNA, 39 nt, Homo sapiens
gagagccaggaagcaaggaggaaggaacaacgacgagag

SEQ ID NO: 50483 - RNA, 47 nt, Homo sapiens
aaagcgggcagacgggaggaagagcgcagagagacaaggcggcggcg

SEQ ID NO: 50484 - RNA, 71 nt, Homo sapiens
acccgccgcgcaccgacccgacgcgccggcccacgcgcggccaaggggcaggaaacacagggagagccgca

SEQ ID NO: 50485 - RNA, 71 nt, Homo sapiens
agagccaacccagaagagccaagacacagacgcggccaaccacccaaagaggagcaaccaaggggaaagcc

SEQ ID NO: 50486 - RNA, 61 nt, Homo sapiens
ggaccaccgagcgcggagcagagaagggcagcacgagcagcgccgcacgcacgagcaccag

SEQ ID NO: 50487 - RNA, 80 nt, Homo sapiens
acagggcagacgagcggaggacacccaacccgggggaaaggaggagcaggaggacgaggacaaggaggaccccggacacc

SEQ ID NO: 50488 - RNA, 54 nt, Homo sapiens
gaaggaccaagaaccaggggggggcagggcccaggggaccgcccgcagaaccgg

SEQ ID NO: 50489 - RNA, 79 nt, Homo sapiens
cgccgccgccgccgccgcgggcgccagaaggaagaggcggacggaggagcaggcgagaagagaagaagaacgagcggac

SEQ ID NO: 50490 - RNA, 65 nt, Homo sapiens
gccagacgacaagcacacacaggcgcgaaacggaaaaaggacagaacacaccggaccaacacaca

SEQ ID NO: 50491 - RNA, 51 nt, Homo sapiens
gcacacccaggacaacgaaaggccagcaccagggaacagagacgccaagcc

SEQ ID NO: 50492 - RNA, 68 nt, Homo sapiens
caaggccagaaaacccgcgagcaggaaccccaggaaacggccaggaaaacaggaaaagccaaccggga

SEQ ID NO: 50493 - RNA, 73 nt, Homo sapiens
cgcagcccaggaggcagcaccaagcccccaaaacacaagaggacggagaagcgacgaaagaagccgggacaag

SEQ ID NO: 50494 - RNA, 71 nt, Homo sapiens
acagaacacacccagaaccagaggaccggcaacaacccgaggacgaaccaccccgcgccagcagcacagca

SEQ ID NO: 50495 - RNA, 76 nt, Homo sapiens
ggggccggccagagcaggaaaaaagcgaaggcaacaggagcgggaaacggaaggaaaacacccggcagggaaggaa

SEQ ID NO: 50496 - RNA, 38 nt, Homo sapiens
aaaacaagagaccacagaaggggggacaggaggagaga

SEQ ID NO: 50497 - RNA, 53 nt, Homo sapiens
acgcacaccacagcggaaggagacccaacaccccggccagacgggccaccagg

SEQ ID NO: 50498 - RNA, 71 nt, Homo sapiens
aaccagccggacaaaaacacagcagaacagcgccccccgcaccgaacacaaggcaggagcgagaagagaga

SEQ ID NO: 50499 - RNA, 70 nt, Homo sapiens
agccagcccggcaagagcaccagaagcggccgaggcggcaaagaaacgggcccgccgagaggggcccccg

SEQ ID NO: 50500 - RNA, 80 nt, Homo sapiens
cgcacaaccaccgcgaacaaacgaaggaggcccaaccacaaaaggagccgacggaacccagacggagaacaaaaggaaga

SEQ ID NO: 50501 - RNA, 74 nt, Homo sapiens
gcgagccggagaagcaggggggccaggaggggagaggaggcaggcccgcgccaagcccaaccaagccgggggcg

SEQ ID NO: 50502 - RNA, 83 nt, Homo sapiens
acccaggccccgccgaggcggccagacaggggcaaggccgaggggaacagcacacagagaggaggcggaagcacgccagcagg

SEQ ID NO: 50503 - RNA, 53 nt, Homo sapiens
cagggacagccaagaaccaaaaaggaccacgaaggaggccagagaggagccca

SEQ ID NO: 50504 - RNA, 83 nt, Homo sapiens
gcagagggaggcgcagacgggagccgggagccggcagccacgaaccgacggggaccccaagaggaaggaaccggagacgcagc

SEQ ID NO: 50505 - RNA, 72 nt, Homo sapiens
cgacagccgcgacggcgagcccgggccgcgcccgagggaaggcacaaacagccggaaaacagaaccacgcca

SEQ ID NO: 50506 - RNA, 61 nt, Homo sapiens
caaacccaccgcaagacagggaagcggcgacaggagccaagggaaaacacaccaaacggaa

SEQ ID NO: 50507 - RNA, 71 nt, Homo sapiens
agcacaccaaccacaaaaaggccgggagagagcgcgaaccggaaaaagaacgacggaagaaggagaaacac

SEQ ID NO: 50508 - RNA, 82 nt, Homo sapiens
ccgaaacaagaaagcagaaccagcagcaaaaggggcaaggggaaaagacaggaaaaagaacagaggccaacccgacaagagg

SEQ ID NO: 50509 - RNA, 86 nt, Homo sapiens
ggaagagaacaacggcggcaaagccgagaaggagaacaccccgagcgaggccaacccaggaggaggaggagggcacggagcgggga

SEQ ID NO: 50510 - RNA, 70 nt, Homo sapiens
gagaggaaaacagaagcgggcaagggaggcggagaagagaggaaccaggcaaggcaccgagcaaggcgcg

SEQ ID NO: 50511 - RNA, 81 nt, Homo sapiens
aacacagagagaagaaaacaggagccccagcgccaccgccgaccgaagccgcaaaagaggccgcgggggagcgacgaccag

SEQ ID NO: 50512 - RNA, 70 nt, Homo sapiens
ggaggagcagccacgaaggggcagcacagggaaaaagaagagcacaagaccagcagacgaccacagcaac

SEQ ID NO: 50513 - RNA, 71 nt, Homo sapiens
gagggaagacgcgacaagacccaccggaagggagaccaggaaaaagcgaacggaggaaccacgcacagagg

SEQ ID NO: 50514 - RNA, 56 nt, Homo sapiens
gaaaagcgacagccaacggccagcaacagaagaaagcaagcaccggggaaagcggc

SEQ ID NO: 50515 - RNA, 83 nt, Homo sapiens
gaccgagccaccaacgcggcccggcggcggaccgccgcgacccgccgcgcgcgcacgcccagccaaccggccggccgcaaccg

SEQ ID NO: 50516 - RNA, 65 nt, Homo sapiens
ccccaagcgaccaaggaggagccgccagaacgcggaagcgaggaccgccagcagcagccgaaaac

SEQ ID NO: 50517 - RNA, 77 nt, Homo sapiens
agcagagcgacagcggcgagcagaacacggcgagcgggaagaccgaggagcagggagcaaccacaaggaaaggaaac

SEQ ID NO: 50518 - RNA, 55 nt, Homo sapiens
accgggcgcaccccacccgggccgcccgaagcgaacaacgacgggagcaggccca

SEQ ID NO: 50519 - RNA, 68 nt, Homo sapiens
ggccaagcgggaggcgccggcaggcagggccaaagacccagggacaggacgggcaacaggggaaccaa

SEQ ID NO: 50520 - RNA, 64 nt, Homo sapiens
ccaaagaacagcgggggaggaaaccaaccagaaggacacaggaacgccacaagaaacaacagca

SEQ ID NO: 50521 - RNA, 72 nt, Homo sapiens
cgaaagaggcggcccaggagcggcggcgaagaaggaggcaggcacgggagccgaagcgcccaggaggaaaag

SEQ ID NO: 50522 - RNA, 78 nt, Homo sapiens
gggggcgagggcgaagacgagaccagccgcgaacaaacacgccaaagaaggcgcgcgggcagaggaaaacgcccaaga

SEQ ID NO: 50523 - RNA, 74 nt, Homo sapiens
aaaccaggcgccaggaacagcgggacccaggaagcgcggaacaaaggaaccacaaaagcacagggagacacaag

SEQ ID NO: 50524 - RNA, 74 nt, Homo sapiens
gggagaccggggcacggacgcacgccacccgcgaccagcaaagccggaaagaacacacggcaccacagcacaca

SEQ ID NO: 50525 - RNA, 69 nt, Homo sapiens
gcacggaacaggagcaacagcacagggagacagagaaacgacccaaccaagcaaaaacccggagaagcg

SEQ ID NO: 50526 - RNA, 80 nt, Homo sapiens
accgccagcagacgccgcgcagcccggccaaccacggagcgaaggagaccaggcaaaaaggagaggaaaaacgagacgca

SEQ ID NO: 50527 - RNA, 73 nt, Homo sapiens
aagaggggccagcagagcaggaaaacgaagaaggcaaaaccaagaggaaaagagacaacaggcacaaagagag

SEQ ID NO: 50528 - RNA, 82 nt, Homo sapiens
gacaaggaggaaaggacgcgacgagcccggcaaggaggagaggaaccgcacccaaggacggcggaggcccagcccccgcccg

SEQ ID NO: 50529 - RNA, 80 nt, Homo sapiens
gcaggcgggcgccgcgcgagccacccagcgaggcaacgcggaaaaaagccggggggacgcggacagcgcccaagggcgcg

SEQ ID NO: 50530 - RNA, 82 nt, Homo sapiens
cgcgcccccggacggccacgagaccgggacaaagcagcgcggccacaggacagccacagacggacaaaccaggcagagaaca

SEQ ID NO: 50531 - RNA, 76 nt, Homo sapiens
acgacgacggaaggagcagaacaaacggccaagaagggccaccccacagacggggggcccagaagaaccagcggaa

SEQ ID NO: 50532 - RNA, 76 nt, Homo sapiens
gggaacaacacaaagcacaccgccaaacccaggccagagcacaggcagagaaagcaagagacgcaaccgaacgcag

SEQ ID NO: 50533 - RNA, 79 nt, Homo sapiens
ggagccggccccgcccacccgcaaacagacccagcccgcggaaggcggaaaggacagacaaggcgccaagccagaagaa

SEQ ID NO: 50534 - RNA, 80 nt, Homo sapiens
aagacagcccggacaccgacagcacagacagaacccgcaccaggcggagaacggaaaagcaccaggaagcagagaggacc

SEQ ID NO: 50535 - RNA, 58 nt, Homo sapiens
cacgacacccgaagccgggaaaggccacaaacgaacagcgaaacggagaacggaagaa

SEQ ID NO: 50536 - RNA, 64 nt, Homo sapiens
gggagcaccgaagagagccagcagcaaaggagcgcccgggaacaagccaagggaaccggccgca

SEQ ID NO: 50537 - RNA, 79 nt, Homo sapiens
agcccgcccaaccccagcggagagcaagccaaacagaggaaagagcggagcccgccagaaacagacaccacggggcgga

SEQ ID NO: 50538 - RNA, 79 nt, Homo sapiens
cagacacagccacgcacgaccggggacccgagcgaccagaaagccaacggcccacggccagaaggcccaaacgcaacgg

SEQ ID NO: 50539 - RNA, 106 nt, Homo sapiens
agcaccgaggcagaagagaggacaaccaccaacaacgaggcacccaaaagggcacacccccgacgaccccacagcagcgcggacagcccagaccgacaccccccaa

SEQ ID NO: 50540 - RNA, 36 nt, Homo sapiens
aagcaggaaacgcccagaagaggcgagaggcccggg

SEQ ID NO: 50541 - RNA, 58 nt, Homo sapiens
ccaacagccaccccgccaccaggggacacgggaacacagaggagccaagcgcccgccg

SEQ ID NO: 50542 - RNA, 69 nt, Homo sapiens
aagggaacccggggcgagaggaaccggagaccagaaaaggaggacccaaagcaaacggaacgaaagcgc

SEQ ID NO: 50543 - RNA, 72 nt, Homo sapiens
aaaacagagcacccagaaacggggaggcagacgaaaggcaaaagcaaagcacaagcacaccaggagcgggag

SEQ ID NO: 50544 - RNA, 80 nt, Homo sapiens
gagacccgggccaaaccccagccacgacaggaagaagcaacgcgccaaacaaacgcaagggaagacagcaagaaaaaacg

SEQ ID NO: 50545 - RNA, 61 nt, Homo sapiens
cccgcccgcccgggggaccgcagacagccgccaggaagcaacgcagcgcggaaaggcacaa

SEQ ID NO: 50546 - RNA, 81 nt, Homo sapiens
cccccagcaagaacgggaacaaaaccgcccggacgagaccagccagagagcgacccccgggaagggaccacgggagagggg

SEQ ID NO: 50547 - RNA, 107 nt, Homo sapiens
cagaccaccagccccccaggggggaaggagggccccgggacggagaggagccgggcccccaagagccacagaaacgaaccccaagggacacaagggccagcgaaaga

SEQ ID NO: 50548 - RNA, 81 nt, Homo sapiens
caggagagccggccgcgacaggacgcaggcccccacgggaacgacgccgcgagagccagggagccaaagaccccccacacc

SEQ ID NO: 50549 - RNA, 76 nt, Homo sapiens
ggaccccggccgggggcggcggccgggggcccagcccgggcggcgcggccaggggaaaggaaaccaaaccaggaaa

SEQ ID NO: 50550 - RNA, 79 nt, Homo sapiens
ggcccgggggaggccgacccccccgcaccaccgacggagccggaaacagccccgccccaggccagcagcgcagcgcccg

SEQ ID NO: 50551 - RNA, 75 nt, Homo sapiens
agcaaagcacccaccagaaagaggcacagccccaaaagaaaggcagaaaaccgagaaaacgggacaaagagccag

SEQ ID NO: 50552 - RNA, 74 nt, Homo sapiens
cgggacgcggggacgccgcggccccaacgcgccccgggacgcacacggcaccaaaccagaaacggggggggagg

SEQ ID NO: 50553 - RNA, 77 nt, Homo sapiens
caagagcaacagaacacacgagagggacccacacaacaaaagcaaaagaagggaaccgaacagacgaaaagaaggga

SEQ ID NO: 50554 - RNA, 71 nt, Homo sapiens
gggaaccaggcgaggagccgccgggggccggcaaggaaacccaaccccagggcgacaacccggaaaccaca

SEQ ID NO: 50555 - RNA, 78 nt, Homo sapiens
gaagaggacgcggagacaagagacggccaagggaacgggaggccaaagggggccaccggaggcgggacacccagcacc

SEQ ID NO: 50556 - RNA, 64 nt, Homo sapiens
gcgggaaaaaaaaaagacacgcagacgcggaagcgcagacgccacgaagcaccaggcaaaggga

SEQ ID NO: 50557 - RNA, 58 nt, Homo sapiens
gcgacagcccgggacaccaagaaagaacgccaaaaagagagaaaaaccagaaagaaaa

SEQ ID NO: 50558 - RNA, 57 nt, Homo sapiens
cagccgcgcgggccaggagaaaagaccagaaggaaaacacaccaggcacagaaaggc

SEQ ID NO: 50559 - RNA, 74 nt, Homo sapiens
gcggagcggacccacaccccggaccgagggacgcggaccggagagaacagaaaaaaagcggcccgggaccagga

SEQ ID NO: 50560 - RNA, 75 nt, Homo sapiens
aacacccaggcgacaggaaaaagacaagggcagagcagccggggaaaagggccaagaagcagaaaagagcacccg

SEQ ID NO: 50561 - RNA, 75 nt, Homo sapiens
gagcgagagggcagggaccagcgacacacagcccgccggggagcccggagggaccaccagagagcccaagggacc

SEQ ID NO: 50562 - RNA, 74 nt, Homo sapiens
caggcagggcacgccgaccgagagacccaggcacccagggaaacgagaggggagaaggcgcacaagcagaccga

SEQ ID NO: 50563 - RNA, 72 nt, Homo sapiens
gacaccggaagcgggaaagcgccggaggaagagcggaaaaggcggagacgaaaaccgggaaggacagccgac

SEQ ID NO: 50564 - RNA, 80 nt, Homo sapiens
cgggccgcgccaggagccgccccccccaggacagccaggaaggcaggaacagaccaacccccggcccccggaaaaccaac

SEQ ID NO: 50565 - RNA, 84 nt, Homo sapiens
acgaccgccggcgccgccagcacgccggccaacggcaaaagcagaccggaaaacccaccggcaagaccacacccgaggggagcc

SEQ ID NO: 50566 - RNA, 68 nt, Homo sapiens
cgggagacgagaagccgaaaagcgcagcgagcggagccgccggagaaggacagaaaacgggccccaga

SEQ ID NO: 50567 - RNA, 69 nt, Homo sapiens
gccccacacccagccgaagaccaccccccagaggccgcgacgacccccagggggaaacccgcccagggc

SEQ ID NO: 50568 - RNA, 78 nt, Homo sapiens
gagaagccccaacaaaaggcgacaaacgggccacaaagcacggaacgaaaacgagggaccacacaaagacagccacag

SEQ ID NO: 50569 - RNA, 58 nt, Homo sapiens
gccaagagaagaacaacaaacggcaaagaacacgacgagagggcagaaaggacaggaa

SEQ ID NO: 50570 - RNA, 68 nt, Homo sapiens
ggagagccacggaagccgacagacaaccagaagagcggagccagaggagcggcaagagacaaccacgc

SEQ ID NO: 50571 - RNA, 84 nt, Homo sapiens
aaagggccgaaagcagaagaaaagggacgcaagaaacccaggacgagaacagcaacaggacagagcccggcagaaagcaggcca

SEQ ID NO: 50572 - RNA, 74 nt, Homo sapiens
acggaaaagcaccacaaccaggacaacgagaagccacaagaacggaagcagaagcacgcaagcagagacagaga

SEQ ID NO: 50573 - RNA, 80 nt, Homo sapiens
gaagggaaggccagcagcgcgcggagaagaacggggagccagggccaaccgccccccagcagcaggcacgggcgaacccc

SEQ ID NO: 50574 - RNA, 67 nt, Homo sapiens
acgaggggacccagagaggaacggaacggacccaccagggcaacgggcagaggaggaggcagcgccg

SEQ ID NO: 50575 - RNA, 75 nt, Homo sapiens
gccaggaggaagcgcagacccggggagcaacgaagaccaaaaaagaagagccaaaaaggccccacaaaagggaag

SEQ ID NO: 50576 - RNA, 58 nt, Homo sapiens
acgccggcccaccaaacagaaacgaggcaaggacccacagaccggcgacacaagaaaa

SEQ ID NO: 50577 - RNA, 81 nt, Homo sapiens
ggcccggcccggagaagccacagccgcaaagacaggaggaggggcccggccagagggccggggagaggcggaacagcacgg

SEQ ID NO: 50578 - RNA, 74 nt, Homo sapiens
cggaaccgggcagagaaagaggcaagaagaaagagacgagagggccggcagaaaacggcggaggcgaggcagac

SEQ ID NO: 50579 - RNA, 82 nt, Homo sapiens
caacggaagccagagaaaggccacggggcgccggccacgaggggcggaagaccaggcaggacagccacccggaggagaagag

SEQ ID NO: 50580 - RNA, 71 nt, Homo sapiens
cggccgggggcgccagagcaacggcacgacgacggagagaggaagaagacggggcggcaccacgcgacagc

SEQ ID NO: 50581 - RNA, 79 nt, Homo sapiens
cccgcccggccggcccgcgcccccgccgcgcccgggagacgccccgccgcccacccagcacgcaacgacaggcgccccc

SEQ ID NO: 50582 - RNA, 83 nt, Homo sapiens
cggccgggacaccgagggggagcagcgcggggccgggagcaccggggcccgcacgcggaggcgcaaggaagaagagacgccgc

SEQ ID NO: 50583 - RNA, 77 nt, Homo sapiens
aagcgcggaggcagggcagggggccagccggaccagcaccccaccacgacacgggaggacgggcccagagccgggcc

SEQ ID NO: 50584 - RNA, 77 nt, Homo sapiens
gagggaagagacagccagcacaccccgcgagcaagggcacaccagcagccagcggcagcagcacagcaaggcagggg

SEQ ID NO: 50585 - RNA, 53 nt, Homo sapiens
aggacaccacgacgaaaccgaggacaccagaacgccggagcacagaaaacgaa

SEQ ID NO: 50586 - RNA, 85 nt, Homo sapiens
cgccaagaagaccgagagcaccacaaggccaagggcaaggagacagaaggaagaggcccagcagaagggaccgcgagccaccccc

SEQ ID NO: 50587 - RNA, 80 nt, Homo sapiens
gaccccagacgacgcccccgcccacggggacggcgccggcgcggaaggagagagagagagcccgagggaaaagacaggca

SEQ ID NO: 50588 - RNA, 91 nt, Homo sapiens
caagcaggaacaggggcacggggcaaggagcacgggcagcgcaggaaacaggacagcccagagcaagcacacggaggcccgggagccagac

SEQ ID NO: 50589 - RNA, 62 nt, Homo sapiens
caggaagcggaggagccccggaggcagagcggcgccagccagaccagaccgaccaaccggaa

SEQ ID NO: 50590 - RNA, 79 nt, Homo sapiens
gacaacggggcaagcggcgacaaccaaaccaaagaggcaaggaagcgagcagcgcaaagcacaaagaacgcacaccacc

SEQ ID NO: 50591 - RNA, 66 nt, Homo sapiens
ccgagaggagccacaaggagacgccgccgcgcccccgcgcagcaagccgggcggggagaaccagag

SEQ ID NO: 50592 - RNA, 52 nt, Homo sapiens
gcgcacaggcccacgacaggacagaagccccgagccccggccccaaagaccc

SEQ ID NO: 50593 - RNA, 72 nt, Homo sapiens
gcggcagccccacacccaggcaagcacacccaggaccaccaccacagccacagcgaaaagaaggaggccagc

SEQ ID NO: 50594 - RNA, 80 nt, Homo sapiens
agggcaagcgcacgcgaggccgaggcggagaaggggcccgagcgcccagacacgacagagggcccccggccaaaaggcga

SEQ ID NO: 50595 - RNA, 65 nt, Homo sapiens
aaaagaaacgcccacagaacaccgagccggagaacaccgggccccacaggcccccccgaggcacc

SEQ ID NO: 50596 - RNA, 95 nt, Homo sapiens
aggaagaagcgggacccgcagggcaaaggggggaagaacaagggagcggcaggggaggcgaagaagagcccggacagaaagacgacaaaaaaacc

SEQ ID NO: 50597 - RNA, 75 nt, Homo sapiens
cggaaagccggcaagacgagaaagcaggacagggacaagcgcacagcggagaaagcagcgcggccaggaggcggg

SEQ ID NO: 50598 - RNA, 99 nt, Homo sapiens
gagcgcggaggcgccccgcgcagcgcgcgcccaaggaccacccagaaaaagacaccaaacaagaacagaagaaggaaacagacaaagcacgaaaaggaa

SEQ ID NO: 50599 - RNA, 72 nt, Homo sapiens
aacaagccgaaaggaaagccaaacgacagagcaaaccgccacccgggacaacccaccaaaaagaagcccacc

SEQ ID NO: 50600 - RNA, 60 nt, Homo sapiens
gcggccccccagccgcggagaaggagaacgacggcaccggaagccccgggcgccccgccc

SEQ ID NO: 50601 - RNA, 82 nt, Homo sapiens
cgcagccagcaggagggccacgccagcccggagcagcagagcagacagaagagaagcgaaggacgacagccaggggaggaca

SEQ ID NO: 50602 - RNA, 77 nt, Homo sapiens
gccgccaccgaggaaaaggaacgacgagccgcaccagaaccccacccggacacaggcggagaccgggagacgggcca

SEQ ID NO: 50603 - RNA, 74 nt, Homo sapiens
cgggcccaaccacaccgaccccaccggaagccagcgccccgagacaacggcaggaccccgcagcccccgcgccg

SEQ ID NO: 50604 - RNA, 53 nt, Homo sapiens
ggagaaaaaaaaaacccagaggcaagaccggagaaggggagaagccgagccac

SEQ ID NO: 50605 - RNA, 78 nt, Homo sapiens
cccaccgacgcggcaggacgcgcggaggaaacacccaggacacggccacaacaccaagagcccacaccgggggcacgg

SEQ ID NO: 50606 - RNA, 58 nt, Homo sapiens
aaggcacgccacaaaagaagagcagcccgacggccaggaggcgaagagacgaggaagc

SEQ ID NO: 50607 - RNA, 74 nt, Homo sapiens
gcggaagaagcaggaggcaagaaaggggaaccccggagaaaaggccaagaaggcagagaggacacaccagacac

SEQ ID NO: 50608 - RNA, 61 nt, Homo sapiens
ccaggacaagcgccccaaaccagaggccgcacgccgaaaagaaggggcgacgagcaccgaa

SEQ ID NO: 50609 - RNA, 78 nt, Homo sapiens
caagaccgggaccgggcgccacgcgggggcaagacgaagccaggggaggcgcggcccgccacgaagaagagcaacgga

SEQ ID NO: 50610 - RNA, 80 nt, Homo sapiens
gagggccgacgccacaggccaacgaggaaccaaagggagaggaaaggcagagaggcagcggcgaggcaagagacgaaagc

SEQ ID NO: 50611 - RNA, 79 nt, Homo sapiens
agcgacaacaccgaggacaaggaaagaacggcccgcgaaggggggaaacagcacggccgcgacagaggaggacaacagg

SEQ ID NO: 50612 - RNA, 75 nt, Homo sapiens
gcagccaagccggggcagcagcccaccccaaagcaggccggaaggggggcgacgcggaaggcacaacacggcaac

SEQ ID NO: 50613 - RNA, 70 nt, Homo sapiens
gagggccccccggggccccccgggcaagagcggcgccgcaccaggaaccagagaaacacgagcccgacac

SEQ ID NO: 50614 - RNA, 80 nt, Homo sapiens
acgccaggaaaccgccggcacaccaaacggcagagcgaggcagccaacccagagaagcagacgggaggcagcagcccggg

SEQ ID NO: 50615 - RNA, 73 nt, Homo sapiens
cggacacagccacaggggggagacgggaccagcaagccgagaaagggaggcggaacagcgaaggagaggaaaa

SEQ ID NO: 50616 - RNA, 65 nt, Homo sapiens
ccgcgcgccggcgcgcgccgaggaaacaaacagaagcgcacgagaacccaggccgcaaggaacga

SEQ ID NO: 50617 - RNA, 60 nt, Homo sapiens
accacaacacagagcccaaagcacgagaagagaagcccagagcaaaacaccccaaaccag

SEQ ID NO: 50618 - RNA, 73 nt, Homo sapiens
ccgggcggccggacagcaaggacaccaacacagcagaaacacacaaaccaagggagacaaagcaaccaaaaaa

SEQ ID NO: 50619 - RNA, 52 nt, Homo sapiens
caagaaacgcaacacggagacggaggggccggaggacgcggggaaccagacc

SEQ ID NO: 50620 - RNA, 72 nt, Homo sapiens
cgcagcaaagccacgggggagaagggagacgggacggaggaacgaggcaggcagccggggacagaagggcgg

SEQ ID NO: 50621 - RNA, 69 nt, Homo sapiens
gaagcggagacaccaaagaaccccaggacaggagccagggaacgagagcacagaaacgaaagaaaaagc

SEQ ID NO: 50622 - RNA, 64 nt, Homo sapiens
gcagcacgccgggacccccgaccccacggcggaagccggacccaggcacagcgaagacccggag

SEQ ID NO: 50623 - RNA, 76 nt, Homo sapiens
gccagcgcggccaagacccaccgcaaggcagagggcccaccccggagagaccccagggcccccaaggggacccccc

SEQ ID NO: 50624 - RNA, 65 nt, Homo sapiens
agaaggaccaagaaccagggaagcgagagcagcggaaaaccgggcaccagccagagcaagcacaa

SEQ ID NO: 50625 - RNA, 81 nt, Homo sapiens
caggcagggggcagcacaggaggggagccacagggcccaggggcccgggccgccccagggcacggcggaaccgcgaggccc

SEQ ID NO: 50626 - RNA, 66 nt, Homo sapiens
cgcaaaaacaagacggggcgccccacagaggggcgacgacgaaggaagaccaaggaagaacaggca

SEQ ID NO: 50627 - RNA, 81 nt, Homo sapiens
gagagccgcgagcgcccggccgaacccgcgaggaaaagcccagcggcccgccaggcccgggaagaaagcacgggaaaaggc

SEQ ID NO: 50628 - RNA, 60 nt, Homo sapiens
caggccaagagggacccacccggcgccgaaaagacgaggcgaggaggcgagacacccaac

SEQ ID NO: 50629 - RNA, 82 nt, Homo sapiens
agagaggaacccgaagaagaaaggacgacagccagagagggcaacccaacaacagccaccgggacacccgcaggccggggca

SEQ ID NO: 50630 - RNA, 78 nt, Homo sapiens
agcaccacgaacaaacagaaagcgcgaagaggggaagcaaagcaagcacggcaccccacccagcccagaacagcagaa

SEQ ID NO: 50631 - RNA, 76 nt, Homo sapiens
gggagagaacgccccaacagaccaggggccgaaaagccccaaggagagccaaaaccaccgacgagagcaaggaaga

SEQ ID NO: 50632 - RNA, 90 nt, Homo sapiens
aggccgccgagcccccgcagcccagaagcacaggccacccacagcccgggagccaggccccgcaaccccaggggcaacaggccaacagca

SEQ ID NO: 50633 - RNA, 76 nt, Homo sapiens
agaaagaagccacccagagagaaccaggccaccagcccccgggccaagagcagcacggagacagagccacacaccg

SEQ ID NO: 50634 - RNA, 58 nt, Homo sapiens
ccagaaaccaggagccacggacaagaccaaaaggcggacgaaagaaagaaggagcacc

SEQ ID NO: 50635 - RNA, 105 nt, Homo sapiens
acgcccgacgaggagagcacgacggaccaagacgagcccagcgcaaccccaagcgcccaaagggagccggcccaggaggacagaccggaacacccagaagaaagc

SEQ ID NO: 50636 - RNA, 66 nt, Homo sapiens
cccaggcgcaggccaggcaggccccgcgaacacccccgggacggaaagacgaggcacgggcgacgc

SEQ ID NO: 50637 - RNA, 50 nt, Homo sapiens
gaagcgcgaacagcagcgcagggccagacagccaccgaaggggcccaggg

SEQ ID NO: 50638 - RNA, 40 nt, Homo sapiens
gacagccaggggcgaggaccacaacgaccggcacccaccc

SEQ ID NO: 50639 - RNA, 80 nt, Homo sapiens
gggcccgagggcgcgccgcgccccaccacgcagccagacccaacggacacgcagaccccacacaaggagagcaagcaggg

SEQ ID NO: 50640 - RNA, 70 nt, Homo sapiens
ccgggcagaagcgaagcgggacagaacagccaccaaaacagaaggggaagaaggaccgggaaaaggcccc

SEQ ID NO: 50641 - RNA, 74 nt, Homo sapiens
cgggcgacccaaccaagggaccagacccaacagaggaagccgcaagaaacgggacgacaggaaggccagagaag

SEQ ID NO: 50642 - RNA, 79 nt, Homo sapiens
cagagcaaggggcacgcagaaggaccggccacgaccgagagagcgacggaaagaccgaccagaagagaagacgaaaccg

SEQ ID NO: 50643 - RNA, 59 nt, Homo sapiens
cacggcgacgccccaggggaaaacccccgggaccagcccggacaagacgacggacaagc

SEQ ID NO: 50644 - RNA, 60 nt, Homo sapiens
gccgagcggaggccgaggcacccgcgcagagagggaaaagcagcaggcagcccggccaaa

SEQ ID NO: 50645 - RNA, 79 nt, Homo sapiens
cgcggggggcggggccgcgacaaggccggccgccagcgggagccgacaagaccgcagaggaccaccgcagccagagcag

SEQ ID NO: 50646 - RNA, 81 nt, Homo sapiens
cccacgagaaacaaagacaaccgcaccaggggaaggaacaaagcagagaaaccaaaaggccagacgaacacgagagggagc

SEQ ID NO: 50647 - RNA, 74 nt, Homo sapiens
cagccaaagaaacaagccgggaaagggacaagaagggcaaagccgaagcagaagcgaggaagagcacgaacgca

SEQ ID NO: 50648 - RNA, 76 nt, Homo sapiens
caccaccacgggggcgcagagcaacggggggcaaagcagagaaacagaaaacagccaaaaggacagggacagcaaa

SEQ ID NO: 50649 - RNA, 111 nt, Homo sapiens
cgaagaagacgagaagcggaacccaaagcggcagcggaaccaaagcaggacgaagaaagacgcagaaaaaccacaggaagaagaaggcaaaaaaacgacagaaaagcaaga

SEQ ID NO: 50650 - RNA, 83 nt, Homo sapiens
cccagccccgagggagccggggcgccgggcccgggccgggcaggaacgcacagcacgaagcagccacggccaccggagacggg

SEQ ID NO: 50651 - RNA, 77 nt, Homo sapiens
gccacaacccccacgcgaagacagcgcacaggcccgcgcggcaagggccaccagacccggagagaagacaagccccc

SEQ ID NO: 50652 - RNA, 80 nt, Homo sapiens
gccgcaagcagcaagaggaaggggcccggccaggaccggggaagggggccgagagcagcgagacccggggcacgcccagg

SEQ ID NO: 50653 - RNA, 87 nt, Homo sapiens
ccacaggccaagagggcgggggccgcggccaagaacgccggcgccccaaccgcacaccaaggaagaccccaagcagcagcaaaaagg

SEQ ID NO: 50654 - RNA, 78 nt, Homo sapiens
ggagaccgagacaacaaggacccccagagcaagagcgcacaagccccggaggcagccaccaaagaacaaggccaagca

SEQ ID NO: 50655 - RNA, 73 nt, Homo sapiens
ggaggccaacaacacaccagaccaggaggagaagccgcgggagcggaagacaggcccggagcccgacggaccg

SEQ ID NO: 50656 - RNA, 75 nt, Homo sapiens
acagacgcagggcgcccccggagccggaaagccagggaaaagcagagacagaagcacaaccagaacagcagacca

SEQ ID NO: 50657 - RNA, 96 nt, Homo sapiens
caagccggacccgaggcagccgaaagaacgcaggaaggagaaacacaggacagcggcagggaaggaggcgccacggcgcacgggaccacagagcca

SEQ ID NO: 50658 - RNA, 55 nt, Homo sapiens
agggcccagggcggggcccgagcgaaggagaggaaaagaggacaaggcaagggaa

SEQ ID NO: 50659 - RNA, 73 nt, Homo sapiens
acaggcagccagggaaacgcaacccaaggccaggcagcgccaaggaccgggacagacaaacccaaaagacccc

SEQ ID NO: 50660 - RNA, 57 nt, Homo sapiens
ggcggcgccaggccggcccaagaaggacggagaagcgaaagccagaccggcaagagc

SEQ ID NO: 50661 - RNA, 74 nt, Homo sapiens
gagccgagcgcgggcggaagacgaggccacagacaccgaaggaagaaccgcgcacacagaagcggaagcgagcc

SEQ ID NO: 50662 - RNA, 79 nt, Homo sapiens
cagaagcaagagaagcaccgcacccagagaaagcgcggacaacaccaggaaaagacagagaggggcgggcgcacagggg

SEQ ID NO: 50663 - RNA, 83 nt, Homo sapiens
cggaccgagaccggaccgagagcggaccgagagcgcgaaacgcacgagaagaacaaaccaaagcccaaaaaacggaaaacaga

SEQ ID NO: 50664 - RNA, 72 nt, Homo sapiens
ccagccgccgccccccgggaacgccggagccaggcaaaaagaagcgaaggagaggaggagcggagaaggaca

SEQ ID NO: 50665 - RNA, 68 nt, Homo sapiens
ggcaacaagagcgaccgggcgcccggaggccggggagcgaaccccaagcccgacggggacccaccccc

SEQ ID NO: 50666 - RNA, 81 nt, Homo sapiens
caaggcagagggacggccgggaccaccagagggaaagcggggcgccaaacacccagaggaaaacgaacccaggaaacaggc

SEQ ID NO: 50667 - RNA, 77 nt, Homo sapiens
acccgcccaccacgccagcagcgcgacggcagggaagaaaaggacccccagagagcaaaaacaaacaaaccaagcgg

SEQ ID NO: 50668 - RNA, 85 nt, Homo sapiens
ccgcgcgccgccggccgggggcacccgccccgccgaaaggaggcacaccagaggcagaaccacaacccacccaaggagaaggaga

SEQ ID NO: 50669 - RNA, 70 nt, Homo sapiens
accgacgccgcccaccggcacagcggaccccgcccgagacaagagcaccaagagagaccaggacacacca

SEQ ID NO: 50670 - RNA, 30 nt, Homo sapiens
acagccggaaggacccccggcggccaagac

SEQ ID NO: 50671 - RNA, 34 nt, Homo sapiens
ggccggggcgggcaggccacaggagaaagccgag

SEQ ID NO: 50672 - RNA, 83 nt, Homo sapiens
cgccgggaacccgccgcgcgccgcgaccccaagcagccagaagacagggccagaaacggcgagccacgagggacaggaggacg

SEQ ID NO: 50673 - RNA, 37 nt, Homo sapiens
cgggccggaacaagccgcaggcaaacgccggaagaac

SEQ ID NO: 50674 - RNA, 66 nt, Homo sapiens
cccaacccacgggcgccggccccgggcacgcaacccccccccgaacagccagaccccagcgccccc

SEQ ID NO: 50675 - RNA, 83 nt, Homo sapiens
accggacacgacgaccagcaggggcaaccaccccaggcccccaacagacagccagaagacggccgaagcccgcagcccacgca

SEQ ID NO: 50676 - RNA, 75 nt, Homo sapiens
caccgccccaacccacgagaggacagcccagcgaggcacagccaacccccaagagccacagaaaagaacacacag

SEQ ID NO: 50677 - RNA, 62 nt, Homo sapiens
ggagcccaccacacaggagcagacaggacgagcagggggaggaacaaagcgaggaagggaag

SEQ ID NO: 50678 - RNA, 75 nt, Homo sapiens
gccgaggcccgggcgggggcggcccggggccaggagaagacagaggagccagaccaagagacagcacaggcgagc

SEQ ID NO: 50679 - RNA, 70 nt, Homo sapiens
aggaccaagaaccagaaaccagagaaggaacagccagaagaagacaggcgggaagagcgccacaagaggg

SEQ ID NO: 50680 - RNA, 80 nt, Homo sapiens
gggagcacacgagccagacgcgccagcggagcgaaggccaagaacagccgacagagaaaggcaacgcgacaggaagggca

SEQ ID NO: 50681 - RNA, 75 nt, Homo sapiens
ggggcggcccaggcgagcggggagaccagcacgagccgggcgggacgccggaaggggcacaagacacgcacaagg

SEQ ID NO: 50682 - RNA, 57 nt, Homo sapiens
ggcccacacagcccggggccccccaacccaacccaggcgcccagacgagcccaccac

SEQ ID NO: 50683 - RNA, 85 nt, Homo sapiens
ggggaggacgcagcaaaccaccagaaggacccaaggccagccagccccaggcaccagcggacaggacagggaggacgaaggcccc

SEQ ID NO: 50684 - RNA, 70 nt, Homo sapiens
gagggggacccacgcccggcaggagagcaccgccggccaggaggagagcgcaccaccaaaaaggcaaaca

SEQ ID NO: 50685 - RNA, 78 nt, Homo sapiens
cagcccacgccaaaccagaccccaggccgccagcccagcgccaagggaagaagcagaagcaagcccagggcaaggacc

SEQ ID NO: 50686 - RNA, 71 nt, Homo sapiens
ggccccagggcagagacgggcgggaaagaagggggaagcagaccaagaagacagaaggggcccgccaccgc

SEQ ID NO: 50687 - RNA, 72 nt, Homo sapiens
ggaagggaaacggagaagagagacacgaagcaaagaagaacagaacccaggaagagccagaagggagacggg

SEQ ID NO: 50688 - RNA, 73 nt, Homo sapiens
acacggggcgcaaagaagggagcagaagggcagcaaaccgaagagagaggccggagaaaagcgagacggaaga

SEQ ID NO: 50689 - RNA, 71 nt, Homo sapiens
gcgcaccaacacaagcgaagaggagaggaaggcaccaaagacagaacaaagaagagaaccgaggaagaaac

SEQ ID NO: 50690 - RNA, 77 nt, Homo sapiens
gaaaagaagaacgggggacaacggcaaccaaagggcaccaacaaccgcggaagcgcaacaaggaggggagagggccg

SEQ ID NO: 50691 - RNA, 75 nt, Homo sapiens
cagcccaccagcacggcagcaaagggacaggagccagcggcccaggggcgggggaggaaacagagacacagcagg

SEQ ID NO: 50692 - RNA, 74 nt, Homo sapiens
gaccacaaggaacgaggggccccaagagcacagaccagcagccgccaaaggcgagacaaaggaaaacccacccc

SEQ ID NO: 50693 - RNA, 65 nt, Homo sapiens
ccaggcagcgcccccaaacgaaacaggggggcgaaggagcgcacgggggaccgaacacaggaaac

SEQ ID NO: 50694 - RNA, 72 nt, Homo sapiens
aaaagcgcaaaccggagccagaaacaaccgcaaccacccaacaaggagagagacgaggaaagaaggaagcag

SEQ ID NO: 50695 - RNA, 82 nt, Homo sapiens
ggcgccgccccaccccggaacccgcggggcggaccggagaagccccgagcaccccacagacaccacggcaaggacaccaaaa

SEQ ID NO: 50696 - RNA, 73 nt, Homo sapiens
cggaggcggcgggcagcgcccggaagcgaggaggaaagagagcccaccaaggcaccagaagccgagaagagaa

SEQ ID NO: 50697 - RNA, 81 nt, Homo sapiens
agggaaaaaggagcgaccacagagaacaaagacgagacaggacacaccggaacaaagaaaaccaaaacgcaacagaaacaa

SEQ ID NO: 50698 - RNA, 72 nt, Homo sapiens
accgggagccgcgcccccccccaacgggacccgcccggcgaaggcccacccccccggcgcaaaccagcgaag

SEQ ID NO: 50699 - RNA, 60 nt, Homo sapiens
cggcggcggaccgcgcgagcagggcgcgccccgcagcagaccggaaacaggcacagaaca

SEQ ID NO: 50700 - RNA, 78 nt, Homo sapiens
ggagaccacccggacaccaaagaagaacgacccgaaaagagagacaaaaccagacaaagcaaaaaacagggaaagaaa

SEQ ID NO: 50701 - RNA, 76 nt, Homo sapiens
ccacaaaacaccagagcgaccaagaaggagagcgacagcccaagcaccaggcggggccggggagccccgggccaga

SEQ ID NO: 50702 - RNA, 73 nt, Homo sapiens
gcaacgggacaagggggaaccagcgccccaccaggacacggagggccagaacggcaagaaagcgcaaggggaa

SEQ ID NO: 50703 - RNA, 56 nt, Homo sapiens
accaagaaccaggagaagacgccccaccacggaccagggaagaccgcggcagcgac

SEQ ID NO: 50704 - RNA, 82 nt, Homo sapiens
aaaagcgcagaggagcagaccgcaaagcgccggaagaagcgccgacgaccccagcccgggggcggcgaggaggagcggggga

SEQ ID NO: 50705 - RNA, 81 nt, Homo sapiens
acagaagggaacaggcacaggacggcgcccaagggaacaacagaaaaaacaagagaggaagcccagaggaacaagggaggc

SEQ ID NO: 50706 - RNA, 78 nt, Homo sapiens
cacagcacagccgggaaggggagccaccagccccccggagaaccacagagagccgaggaaaaccagcggaacccccag

SEQ ID NO: 50707 - RNA, 36 nt, Homo sapiens
caggacccgaagacgagacaagcagaccggaagacc

SEQ ID NO: 50708 - RNA, 79 nt, Homo sapiens
gcggcccagcgcgcccgcccagcagacgcgagacaagggccacaccggcaaccgacacgaaggagggcgcagcaccccg

SEQ ID NO: 50709 - RNA, 84 nt, Homo sapiens
cgagacgcgcccgccccggcagcaccggccagaaggcgccccgccgcacccaggcgcgcagaagagagaggaccacagggaagc

SEQ ID NO: 50710 - RNA, 79 nt, Homo sapiens
ccgaggccgacgcaggggcccggaagggaaacgcgaggcgaagggaccggggaccgaggaagggccccacaccaaaccg

SEQ ID NO: 50711 - RNA, 119 nt, Homo sapiens
gccgggcccccgccgcaccacggcccagggcggccagaccagaggcacagcgcccgggaccgggagggaggaagaggcgcggcaagggcgcggcaagaaaaccggggccgccccaccca

SEQ ID NO: 50712 - RNA, 79 nt, Homo sapiens
ccaggcccccccgcagcagcaagacccccgcccagccgcacccgccccagagggcggacggcagacaggcagcaaccgg

SEQ ID NO: 50713 - RNA, 58 nt, Homo sapiens
cacccgggaggggggagcggcgggaggccaccgccaggagaagaaacgaggccggaag

SEQ ID NO: 50714 - RNA, 71 nt, Homo sapiens
cgcgccggcccgggcacgcagcccacgcccagaggaaacacaaaccagggagggaggacacaaaaaaacaa

SEQ ID NO: 50715 - RNA, 89 nt, Homo sapiens
gcggccgcgccccagggcgcggggacggaaagagcaaagaggacaggaagggggggagagggcagaaggccccgagcccagggcggaac

SEQ ID NO: 50716 - RNA, 72 nt, Homo sapiens
caacgcagacccccggccagaaaaagcacacaaagaggcagccggggcagcagggccggaaagagggcgggc

SEQ ID NO: 50717 - RNA, 40 nt, Homo sapiens
gaccggcagggaggacaggccagaggcccagcgccccaac

SEQ ID NO: 50718 - RNA, 76 nt, Homo sapiens
caagggcagcaccagcagcccgaccacaccacccccgccagcagagcggaacggagaagaaaccccaagccccaga

SEQ ID NO: 50719 - RNA, 75 nt, Homo sapiens
cggcaggcgcagccgggcccggccccagccgacgaccaaaccgcacaaacaaagccaaggaacaaagaaggcggc

SEQ ID NO: 50720 - RNA, 71 nt, Homo sapiens
gaagagcaggcggaggaacaaaggcgacccaagacacccagagagggacagcacccaccaaggcccggagg

SEQ ID NO: 50721 - RNA, 63 nt, Homo sapiens
gccgccggcccccgacagcagaacgaagcgcgcggcaggcgcgcgccgccccaggccgcaaga

SEQ ID NO: 50722 - RNA, 76 nt, Homo sapiens
ccaaaggaagccaagaacagccggaggagaaagacagcaaagaaaaggagaagaaaggaaaaaaacaaccccgggc

SEQ ID NO: 50723 - RNA, 58 nt, Homo sapiens
cagcacgggcagagccagaggacaagaacaaggaaaacaagagaaccgaaaaagaaca

SEQ ID NO: 50724 - RNA, 68 nt, Homo sapiens
agcgcgcccagaacggacgcgagaacagaaacagcgaaccagcaggggaacggcgagggaacccagga

SEQ ID NO: 50725 - RNA, 70 nt, Homo sapiens
gagacagagaccagccccaggccccagcgcgagagacacaggaacgacacaagcgggacggaagaggccc

SEQ ID NO: 50726 - RNA, 76 nt, Homo sapiens
gagcgggcagccgccgccaccccgcggccgcacccccgccccagggagaacggcagaaccaagggaccaaagcggg

SEQ ID NO: 50727 - RNA, 76 nt, Homo sapiens
accacccagccacccgaccacacacaccaggaaaaaggacgagcagggaccaaaccacagcgccggaaaaacaggg

SEQ ID NO: 50728 - RNA, 79 nt, Homo sapiens
cagcgaacgggggcgaacggggcgagccggaggagcacccaaccccgcgccaccaggagagaacgccgcgccgcgcgac

SEQ ID NO: 50729 - RNA, 87 nt, Homo sapiens
aacggagaccagaccacgcagccacgcgggcgagcggcggggagcggcgaagccgcgggcgagcccccgggcgcgccggacaggccg

SEQ ID NO: 50730 - RNA, 74 nt, Homo sapiens
cccccccccccccaaggaaagaccacagcaagaccacgcccccagccgggggaccaggccgaacgacccggaca

SEQ ID NO: 50731 - RNA, 78 nt, Homo sapiens
ccggagagccgcaggacggcgcggcagagccccgacgccacagaacgccagaccccagcgccccccgcccacggacgg

SEQ ID NO: 50732 - RNA, 62 nt, Homo sapiens
gagacacggagagacacagagagccgaggacaaaccggcgaccacacacggggacgacgggg

SEQ ID NO: 50733 - RNA, 76 nt, Homo sapiens
ccgggagcgacccgcgcaaacaaacagcggaggcacccaccacgggccaggcgggccagaggcaagccgcgggagc

SEQ ID NO: 50734 - RNA, 73 nt, Homo sapiens
gaagaaacagagaccacagagcgggaaaagggaacccacaggcaggcaaacaaggggagcccagcacgcccca

SEQ ID NO: 50735 - RNA, 58 nt, Homo sapiens
ccccgcccacagcacgaggacagggcagaccgccagcagcacagcaagccacagagag

SEQ ID NO: 50736 - RNA, 35 nt, Homo sapiens
agcccacgcagagcaaagggggggaacagcgccag

SEQ ID NO: 50737 - RNA, 53 nt, Homo sapiens
aagggaagagcagaacacggggagagccccagggcggccgggggggcaacaac

SEQ ID NO: 50738 - RNA, 80 nt, Homo sapiens
accagggcgcagcgcgcggacgaggggccccagaccgagagccgcccggaccacaccaagagacagggcccccgcacccg

SEQ ID NO: 50739 - RNA, 97 nt, Homo sapiens
cacaacaagagcccaaccaacagcccaggccgccgacgcacgagaagcaagcgaagcgacaggaccaacacaggacagaaggcaggaccccaaggga

SEQ ID NO: 50740 - RNA, 73 nt, Homo sapiens
ggggcggcaaagcagccacccggggaaacgacaacagcgcaagcagaaaacccaaacccagaacccaaggggg

SEQ ID NO: 50741 - RNA, 79 nt, Homo sapiens
cgcagagagacgcaggccaaggaaaagccagacggaagccaaccggcgccgaagcggaaaggcaggagggaaccccaca

SEQ ID NO: 50742 - RNA, 102 nt, Homo sapiens
cgcagcgcccgagcgagcaccccccaacgggcaaaccccgcccagcaggaaacacacgaacgccggaggaggaggggacccgcgcgcgagacacgcaaccaa

SEQ ID NO: 50743 - RNA, 41 nt, Homo sapiens
ggacacaaacacccagcgcaggaacaaagcaaagcagcggc

SEQ ID NO: 50744 - RNA, 50 nt, Homo sapiens
acacaccggagagcacgagaaggcgaagccgacgagcccgaacagacgca

SEQ ID NO: 50745 - RNA, 75 nt, Homo sapiens
cggccaacaaccgggcaagaggaccacagagcgccccgcccgcccagcaggaccagaacaaggacgcggaaagga

SEQ ID NO: 50746 - RNA, 73 nt, Homo sapiens
aaaacggagccgccgcgcaggaagggaaaagcagcgcgggaaagcaacaaaacgaagccgcaaaaccacggga

SEQ ID NO: 50747 - RNA, 77 nt, Homo sapiens
gccgcgaaaaaggggggccgaggcaagaggaagaaacagcgcccccaccccaccccagccccaggagcgcccaggcc

SEQ ID NO: 50748 - RNA, 60 nt, Homo sapiens
cgaaaccgacagcaacggaggccacagaaaaagcgcacccaggggaagacaagaacagcg

SEQ ID NO: 50749 - RNA, 52 nt, Homo sapiens
caaacaagacagaacgagagggaaccgacggcgggcaccgcaaccgggccgc

SEQ ID NO: 50750 - RNA, 73 nt, Homo sapiens
ggggccaagggaccacacgagaaccacacccacaagcggccgaggggaagaagggagccggcggggaaaaccc

SEQ ID NO: 50751 - RNA, 47 nt, Homo sapiens
agcaggccagaggacacaaaagggagcggcaggggaggcgaagaaga

SEQ ID NO: 50752 - RNA, 76 nt, Homo sapiens
ggcaaagagacaggcgacggcaacaaccagggaagccacggcagccgccaccagcgcgacccgagccccaaagaca

SEQ ID NO: 50753 - RNA, 64 nt, Homo sapiens
gagacgagaagccgaaaagcgcagcgagcggagccgccggagggacgaccaaggccagcaccaa

SEQ ID NO: 50754 - RNA, 69 nt, Homo sapiens
agggagagccagaccaagaaccgacacaccggggaggagcacaaacgcccaccacacagcagaaacggc

SEQ ID NO: 50755 - RNA, 72 nt, Homo sapiens
aggggaaggcggcgcgggagccacacccagagcgggaccgcaaaccgcccgcagaccagcacgcgagagcga

SEQ ID NO: 50756 - RNA, 83 nt, Homo sapiens
aacagggccaaaggaaacaacgccgagcacagcaacaagagggcaagcgggagggcgggcgcaggcggagaaggccccggccc

SEQ ID NO: 50757 - RNA, 108 nt, Homo sapiens
aaacccaaaaagcagcaaagaaagaacagaacagaacaaagagaagcggcaggaaagcggcgaagagccaccagcggcgacgcaggccaaaaccaggaccggagaaca

SEQ ID NO: 50758 - RNA, 85 nt, Homo sapiens
gggcccggacagaagagggcagaagaaaccagccgaaccagggccaccgcgcaaggaggggagggggggccagcggcggagcgga

SEQ ID NO: 50759 - RNA, 90 nt, Homo sapiens
cgcggagcgagaccacccgaacgacgcgggcgagcggggcggacgccggggagacgcaggcgagaacaccccaccagaccacccagcaag

SEQ ID NO: 50760 - RNA, 73 nt, Homo sapiens
ccagagcccaacggcgccggacaccgagcgccaacaccccgaggaaaaacaaccaaagaaaagggacgcagaa

SEQ ID NO: 50761 - RNA, 58 nt, Homo sapiens
gcaaagcgacaagagacagcagggaacaaaaaccggaagcaacccccacaggcaacag

SEQ ID NO: 50762 - RNA, 69 nt, Homo sapiens
gaggacaagagcaagaccccggaacccgaagcgggaaagggaagagagcgaaagcgcgggaggcggaca

SEQ ID NO: 50763 - RNA, 81 nt, Homo sapiens
gcgggccggcagaggcggcgacggggcgcccccccacagggcccggccacaggaggggcgccaggccgggccccccgcccc

SEQ ID NO: 50764 - RNA, 77 nt, Homo sapiens
gcgaaacagccaccaaaagaaggagacaaacaccacaccagacaccacccgaggggaaaggacggcggccaccacgc

SEQ ID NO: 50765 - RNA, 51 nt, Homo sapiens
caggcgagcccgccacagagccgaaaggggacaccagcagcgccgccggac

SEQ ID NO: 50766 - RNA, 85 nt, Homo sapiens
gcggaggcccccgggcaagaggcgcaaacaagccaacccaggaggaaaaacgggcaacggagacagaaaccaggaggccaagcaa

SEQ ID NO: 50767 - RNA, 85 nt, Homo sapiens
accaccgggcgcccaaggcgccagcggcacagcagacgcacccccagacgccgacccagaaagccagggacaccaaaccccgagc

SEQ ID NO: 50768 - RNA, 77 nt, Homo sapiens
agaccccacaacgggagggccgcgacaggcaggacaggaacagcagggaacaccggaaaacaccgaggcgaaacaca

SEQ ID NO: 50769 - RNA, 71 nt, Homo sapiens
aggagggcccaaccccaggacaccccgagagcccaaaaaaagggccaaaagggcaaaaagggagaagagcc

SEQ ID NO: 50770 - RNA, 80 nt, Homo sapiens
ccaacagcagacaacagcaacagcaccccaccaggagacgggcagacaacgaacaagcgaagaaccagcagcaagacaac

SEQ ID NO: 50771 - RNA, 72 nt, Homo sapiens
gacgggaccgggccaagcgcgaaacgccccgcgcggcacaaggcgcaaagggaaaaccccccaagagggaca

SEQ ID NO: 50772 - RNA, 77 nt, Homo sapiens
caggcaacacacaggcaacggcgggacagcaagggaggcagcagacgggaagaagagagaaaacaaaagcgagacag

SEQ ID NO: 50773 - RNA, 75 nt, Homo sapiens
gaccaggcaacacagagaacagaaggggggcagaaagaagaggaggacaacaagccaacagagagagacgaagaa

SEQ ID NO: 50774 - RNA, 82 nt, Homo sapiens
gagccgcgccgcccgcaccacagacccgcccgccccgccggcccaccccggggagcaacaggagcaccaagggaaaggaaag

SEQ ID NO: 50775 - RNA, 83 nt, Homo sapiens
agcaagccccgcaccaccaacgcagcaccccggccaaggggggggagcgaccgcagggccggccgggcccaagccgaaagccc

SEQ ID NO: 50776 - RNA, 77 nt, Homo sapiens
cgcggggggaacccgaggaaaaacgcaccgcggaaccgagcagcaggagcggacggacggaagaagccagccaaggg

SEQ ID NO: 50777 - RNA, 86 nt, Homo sapiens
cgcacgcaccggcccccaccacaccacccacccggaaggcgggggcgcaacacacagagggagaaaacccccagcgaagaaccgag

SEQ ID NO: 50778 - RNA, 73 nt, Homo sapiens
gggaacgggagaaacaggacagaacaagcacccacgaggacagcaaacaagggcaccacaggaggcagggagg

SEQ ID NO: 50779 - RNA, 82 nt, Homo sapiens
gcaaaggagaaaggaaccgacagggacaaacagcaggggccaagaaagaaggagagggggcgacaggacaccagacgaaaac

SEQ ID NO: 50780 - RNA, 79 nt, Homo sapiens
cagagggcaagaggacgccacaaacacccaccacagcagaggccacagaccccaccagcacgaagggacacgggggcag

SEQ ID NO: 50781 - RNA, 79 nt, Homo sapiens
aagaaaaaagagagagaaaaaggacaaaagccaagaggaggacagcgcacacagcaagcacgagacagaggcacaaaag

SEQ ID NO: 50782 - RNA, 57 nt, Homo sapiens
ggaaacaggcgaggcggcggcgcccggagggcagcgagacgaagaaccaagagaaaa

SEQ ID NO: 50783 - RNA, 71 nt, Homo sapiens
gacaagggcagcccaaggacacaaggaaagacacaggacaaagggccggagagagcccgcaggccaccagc

SEQ ID NO: 50784 - RNA, 62 nt, Homo sapiens
ccagcccccgagggcgggaacaggcagccccgcccacggcccaaaggaaacaagcacgaaaa

SEQ ID NO: 50785 - RNA, 94 nt, Homo sapiens
gaagaaggagagcccaagccggaacagccaacaaagagaggcaagagcaacgaaccaaagcaaaggaggccgggggaagacggaaaagagagac

SEQ ID NO: 50786 - RNA, 53 nt, Homo sapiens
cgcccagacgaacacaagcgggacgggagagaaaccacccagaagccaggcaa

SEQ ID NO: 50787 - RNA, 91 nt, Homo sapiens
ggggccgggacgcagcccggcggcagcagagccagcagccacccccgcccagccaacaccccccaggcccaagggggacgcggcccgaaga

SEQ ID NO: 50788 - RNA, 65 nt, Homo sapiens
ggaaaagcaccaagggcaccaaacacccagaacaacaaagaggaaggagggccccggagcagcca

SEQ ID NO: 50789 - RNA, 74 nt, Homo sapiens
cagccccgcgccgccgaccccccggcgccgcgccggcggcgcgagggcgcagaaccccgaagagcgaaaacaca

SEQ ID NO: 50790 - RNA, 62 nt, Homo sapiens
ggccgaaacacagagcaagacccacaggaccgcgaacaaggaggccacaaaacacccggacc

SEQ ID NO: 50791 - RNA, 74 nt, Homo sapiens
cgcggcgaccacggacaaaccgcccaggcaagcggacccgggaacggacccgagccccaaagacagaaaagccc

SEQ ID NO: 50792 - RNA, 80 nt, Homo sapiens
gcagcccaggacgcggccgcacccggagcagagaaaccaaaagggggaagagaaaagcacgagaaagagaaaaaagagcg

SEQ ID NO: 50793 - RNA, 77 nt, Homo sapiens
ggggaccagagaggacggcaccagccaggaggcggaacaccaaagaggacacaggccggagcacaccacaaagccag

SEQ ID NO: 50794 - RNA, 84 nt, Homo sapiens
gcggacggcgcgcgcccgaggcgaggaggagcgcggcggccggacaaagggaacagcgaagccaacagccaaaagaggaaagaa

SEQ ID NO: 50795 - RNA, 88 nt, Homo sapiens
gccgagacaccagcccgaaacaccaccaagcgcgggccaggcacgacaccgcaacgacacagcagcgaagcgccggagaacgcacggg

SEQ ID NO: 50796 - RNA, 74 nt, Homo sapiens
caaaccagaccccaggccgccagcccagcgaaaagagcaccggccagcagaaccagccggggccggcaagcccc

SEQ ID NO: 50797 - RNA, 33 nt, Homo sapiens
aaaagaggccggacaaagacgcacccccagacg

SEQ ID NO: 50798 - RNA, 56 nt, Homo sapiens
agaagccaaggggaagaaccccaagaaaggcacagggcggagggggaggacacagc

SEQ ID NO: 50799 - RNA, 76 nt, Homo sapiens
aagcgaacaaaaagcagcaaaccggaccaccccgaagaaagcacagggaaaagccacgggaaagccagacacacag

SEQ ID NO: 50800 - RNA, 88 nt, Homo sapiens
cacacgcccacagcggaggagggcacagcagggccaaagaagagaccggacaagcaggacccaaagacaggaccacgcaccagcagag

SEQ ID NO: 50801 - RNA, 56 nt, Homo sapiens
gacaggcgcgacggagacccacgcagagacggccaccaccgaccccggaggcccgc

SEQ ID NO: 50802 - RNA, 76 nt, Homo sapiens
cagggagccagacagagaccgcagaggacccaacaccgagggaaaggacacagccagggcaaacaaaaaaagccac

SEQ ID NO: 50803 - RNA, 71 nt, Homo sapiens
accagagcggggaccccaaacaagcgcgcaaaagcgaggagggccgcggcaggcacggccgcgaaccaagg

SEQ ID NO: 50804 - RNA, 69 nt, Homo sapiens
agcgaagcgaacaaaaagcagcaaaccggaccaccccgaagaaagcacagaaccgccgcgcccgggaaa

SEQ ID NO: 50805 - RNA, 75 nt, Homo sapiens
agaagaccaaggagcagcagcagaaaaaacagagggcccgagggcaggacagcaggcaccggcgaagcacagaga

SEQ ID NO: 50806 - RNA, 61 nt, Homo sapiens
acccgcagggccgaccggagaagcaagagccgcgcaggaggaccccaaaggacaagaaagc

SEQ ID NO: 50807 - RNA, 78 nt, Homo sapiens
ggaaagggacaagaagggcaaagccgaagggacccaagggagagagggaacggcgaaagggcagcccggaaggagcac

SEQ ID NO: 50808 - RNA, 35 nt, Homo sapiens
gcaccgcagaggacccaaagcaggggagcacgcac

SEQ ID NO: 50809 - RNA, 68 nt, Homo sapiens
gcacacaaagaagagacagagagcacccccgccagccagaacgaagggaccccaaaacccccgaagcc

SEQ ID NO: 50810 - RNA, 79 nt, Homo sapiens
gagcgacccggggaccgaccggggaccccgccgaagaggcccaggaggcaagagcgagaagagcgcaagacagaaagcg

SEQ ID NO: 50811 - RNA, 55 nt, Homo sapiens
aaaaacaagacggggcgccccacagaggggcgacggcgaccggcccgaggaccgc

SEQ ID NO: 50812 - RNA, 71 nt, Homo sapiens
aagaaccaacgccaaggcagcgcggacaagacccccagcacaacacaccggccagccaggacggaacccgc

SEQ ID NO: 50813 - RNA, 76 nt, Homo sapiens
ggaaggaaggcccgaacgcgggacggagcgcagcgggggggaccaggaaacagcagccggcccagcccaccccagg

SEQ ID NO: 50814 - RNA, 39 nt, Homo sapiens
cggaggaaggcgagcgccgcgccagacgcgaggagaccc

SEQ ID NO: 50815 - RNA, 61 nt, Homo sapiens
ggcccaaggcgcgggacacaaggggaccgggcaaggggccgaagaagacaagaggcacaca

SEQ ID NO: 50816 - RNA, 83 nt, Homo sapiens
ccaccaccgcgaggcaggagagaggaggaggaggcggcgcggcggccccgggaccaaggagaccgaagaacaggaacaacgag

SEQ ID NO: 50817 - RNA, 74 nt, Homo sapiens
gccggaagccaagacaagacagcaaaaagacgcaaagcaagagccgagagcgccggaggaccacacccggccac

SEQ ID NO: 50818 - RNA, 65 nt, Homo sapiens
gccgcgcagccccggagcacgcacccaccaaggcccggaggccccacaacaggggcagacaccca

SEQ ID NO: 50819 - RNA, 69 nt, Homo sapiens
gcgcgcgcccccgcgcgcccccaggccggacacgggcgcagccccgagcccacagccccagccgacaga

SEQ ID NO: 50820 - RNA, 60 nt, Homo sapiens
aaccagcaccagagaaggagcacccgggccacccaccgaagaggcgaacaaaaaaaccca

SEQ ID NO: 50821 - RNA, 87 nt, Homo sapiens
gcccgccccaccggcaccagcagccgacaaagggaccagcggaggaggcgcgccagacgacgcgggggcacaccaggagagccggga

SEQ ID NO: 50822 - RNA, 83 nt, Homo sapiens
ggaggcgggaggagcggcagccgcgaggaggcgcgggagggcgagaacgaccccgagacggccaaaacagaagaggcaaagcc

SEQ ID NO: 50823 - RNA, 92 nt, Homo sapiens
gcgcagcggcggcagcggagagcgagagaggggagcaggaagggccaaagccccaagaacccagccacgcaaagcggggagaggaccacccc

SEQ ID NO: 50824 - RNA, 67 nt, Homo sapiens
ccccagccgacagccagggcggaagcccgccccagagcagaccacaccgcaggaaggacacccacga

SEQ ID NO: 50825 - RNA, 63 nt, Homo sapiens
cgcggcggccgcgcagccacccaagccccagggcgaagacccccccccagggcaaaccaccag

SEQ ID NO: 50826 - RNA, 71 nt, Homo sapiens
caacaagagaacagggcagggcagggcccaaagcaacgcaaggagcagcaagagaagcaagaggagagaaa

SEQ ID NO: 50827 - RNA, 70 nt, Homo sapiens
ggacgacaggaagaaaggaggaagaagcagaaaggaaagacagaaccgaaaacagcagccaagccgagag

SEQ ID NO: 50828 - RNA, 73 nt, Homo sapiens
gcgggagcccgccagcggcccccgacaagcagaccggaagaccgacggaagaccacaccccgagggagcccag

SEQ ID NO: 50829 - RNA, 65 nt, Homo sapiens
cccacgcgccgcacccaaacccagccgcgcagcccgaagagggaaagcaggcaggagggagagcg

SEQ ID NO: 50830 - RNA, 70 nt, Homo sapiens
agaagacaggggaaaaagggacgggcggacagggaagaaaacgccagagaagcagagcagcccggagcga

SEQ ID NO: 50831 - RNA, 75 nt, Homo sapiens
gaagcccacgcagaaacccaccagacgcagaccagccagccccaagcagccgcacgacaaagaacgaagacaaga

SEQ ID NO: 50832 - RNA, 93 nt, Homo sapiens
gagggccgagggagggccgagccagccgcggccggaggagcccccaggcccggacccccgagggccaccaacaagcccaggggggacacccac

SEQ ID NO: 50833 - RNA, 58 nt, Homo sapiens
cgcgcggaaggcagcgcccagcagcgcagaggacaagaacaaggaaaacaagagaacc

SEQ ID NO: 50834 - RNA, 76 nt, Homo sapiens
gggagcgcgacggcccggcgggcaggggaaccaagaccaggacaaagaagacccggagagacaagccggaggacgc

SEQ ID NO: 50835 - RNA, 78 nt, Homo sapiens
gaacggaaaagaagagagaaaagaaacacggaaaaagcaacaagggacaccgaaaagcaaagggagaggacacacgag

SEQ ID NO: 50836 - RNA, 78 nt, Homo sapiens
ccaggccggggggggccgaggccgccggagaggagggcccgcccgcggccagcaaaaaagacagaccagcgcaggacc

SEQ ID NO: 50837 - RNA, 88 nt, Homo sapiens
gcaggccgggaggagccgcagcgccgggcgaccccgcccgggcccggaacccaggagaaacgagagggacagcaaggaagacgccaga

SEQ ID NO: 50838 - RNA, 58 nt, Homo sapiens
cccaaccagccccgcaacccggaccagcagaaaccagaggaagcgagagaaaacgcca

SEQ ID NO: 50839 - RNA, 73 nt, Homo sapiens
gcccacgcagcccgggcaagggccgggcccaaaagagagacaagcaggagagccgacgcaaacccagaggaca

SEQ ID NO: 50840 - RNA, 76 nt, Homo sapiens
accgcagaggaagaaagcggaaagagcgacaaacaaagaaagacggacggccagcacaacagaaaagaacggggcc

SEQ ID NO: 50841 - RNA, 80 nt, Homo sapiens
accccaacgcccaccaaagaggaaagcgaggaggagcgagcgcgagagacaggcggaccgccaaagaaaaaaaaagcagg

SEQ ID NO: 50842 - RNA, 71 nt, Homo sapiens
ggcagccacgaggggaccaaaccccacacccaggggccagccggcgccccgcccggcaagcgggcggggac

SEQ ID NO: 50843 - RNA, 74 nt, Homo sapiens
caccggggaaaggaccacacagcccagagggacagaaccaaagaggccaaaacggacaagccaaggcacgagcc

SEQ ID NO: 50844 - RNA, 82 nt, Homo sapiens
ggaaagcccgacagaagcaccgagacccaagaaaggccgcagccaagccggaacaggagcggcgagcccaaacgcaaggggg

SEQ ID NO: 50845 - RNA, 72 nt, Homo sapiens
aacgagaccaaagaggcaagaaaaaacaccagcagcccagcaaccaaaaagaagaccgcacccaaacaaggg

SEQ ID NO: 50846 - RNA, 37 nt, Homo sapiens
caggcacccaaaaaaacgagggacaaaacaagagaag

SEQ ID NO: 50847 - RNA, 75 nt, Homo sapiens
agaagggcaacaaaagaaacagaccaaaggcagaaagcgcgcgcccggcccaggagaggacacccgaccgccagc

SEQ ID NO: 50848 - RNA, 76 nt, Homo sapiens
ccaagagcgcacgggggaaacaagcgaaaaacaggcaagggaagccacgccccaccagggaaagcagaaaacaaaa

SEQ ID NO: 50849 - RNA, 82 nt, Homo sapiens
gcagcgacggcgcgggagagcgcgccagccggccgcgaggagagaccgacagggagcaaggcaagacccaccaccgcagcaa

SEQ ID NO: 50850 - RNA, 73 nt, Homo sapiens
aaagcaccacgaagccgcagagagcaaaacgcgcacaaacgcaaggaaaaggaagagagaccgacacccaaga

SEQ ID NO: 50851 - RNA, 80 nt, Homo sapiens
gggagccgccaaccagcgaggccacggcgcaccgcagcagcccacccaggcccgccagcgggaccccccacaacaacccc

SEQ ID NO: 50852 - RNA, 78 nt, Homo sapiens
agcagacggcgcagacgccccccccggccagccccgggcgcgggaagaaaacaggcgaaacaaggcacccccagcgcc

SEQ ID NO: 50853 - RNA, 60 nt, Homo sapiens
ccaaggaggaacgcaaaacggagagacggaccagcaggcgagaaaggaacagagacagac

SEQ ID NO: 50854 - RNA, 82 nt, Homo sapiens
aaccagagagcacgcccagcggagaaggagaagccgcaggacacccccgaggcaccgacgagagggcgcaccgcgccggagc

SEQ ID NO: 50855 - RNA, 71 nt, Homo sapiens
gaacgaccgaaacaccagaaagccagacggagaaggaaagcacaccggagagaaagaaaaaaacccgcaag

SEQ ID NO: 50856 - RNA, 67 nt, Homo sapiens
ggaacggaacaggcgaaaagcagacaaggcaggggaacccaacagcccgccaacgaagaacgaacca

SEQ ID NO: 50857 - RNA, 73 nt, Homo sapiens
ggcaggggacacgggacaccaggaacccggccacagcaacggaggcgcccagccaaccagccaccaagcaagg

SEQ ID NO: 50858 - RNA, 69 nt, Homo sapiens
aaaaacaaaaggagccgccagaaagcacgggggcggaagggggcgcccgccagagcaccaccgcgacac

SEQ ID NO: 50859 - RNA, 66 nt, Homo sapiens
gcccccgcccacggggacggcgccggcgcggaaggagagagagcacagcaaggccgaaggcggaaa

SEQ ID NO: 50860 - RNA, 67 nt, Homo sapiens
gcacaagaaccaagagcagaaaagcgagcgggaagaacaaggggggcagaaagaagaggaggacaac

SEQ ID NO: 50861 - RNA, 71 nt, Homo sapiens
ccaacccagagaccaccccacagaaacggcgcccgaagcggcgggccaaaggagaaacaagaaggagacaa

SEQ ID NO: 50862 - RNA, 49 nt, Homo sapiens
caaaaagaaagcgcgacacaggcgagaggccccccacccggcgccccgg

SEQ ID NO: 50863 - RNA, 62 nt, Homo sapiens
cccccggcagccaggcgcaccaggaagaaagcagagaacgggaagggccacaccaccgccag

SEQ ID NO: 50864 - RNA, 71 nt, Homo sapiens
ggcaagcaagccagaccaagcgcgcacaagcccgccaccacccaaagagggagcgcccacaagccacggaa

SEQ ID NO: 50865 - RNA, 70 nt, Homo sapiens
agaagaaagaggcaacaccacagaaacaagaaagccaggaacgacaggacccgacgaaggcaggcacagg

SEQ ID NO: 50866 - RNA, 60 nt, Homo sapiens
cgggccacacgcagcaggcacagcagaggaggaggccaagaacagaaccaggccaagaaa

SEQ ID NO: 50867 - RNA, 78 nt, Homo sapiens
agccaggagaggcccaagcccagagaccaaggagaacacacaggcgaacggaaacggcccccgcaagccaaggacccc

SEQ ID NO: 50868 - RNA, 74 nt, Homo sapiens
gccgcgccgcgaggagacagaaggaaggaaaaacccgacagccaacccgagggcgcgcacaggggccaaacccg

SEQ ID NO: 50869 - RNA, 74 nt, Homo sapiens
aaggcaaaggagaacccgcaagccagaaagaaacagaaagaagggagaagaaccgcccagagaagaccacgcag

SEQ ID NO: 50870 - RNA, 69 nt, Homo sapiens
cgaaagagagcaaggaaacagcgacagaagccagcacaccaccacaacagccaacacacggagcacaga

SEQ ID NO: 50871 - RNA, 79 nt, Homo sapiens
agagacccccagggaccagcccccgggggaaaaggcaacaggaccggagccaaacgagaggcggagggcagggcagacc

SEQ ID NO: 50872 - RNA, 66 nt, Homo sapiens
cgagaagcgggcccaggacaagacagaagagccggagaaagcgggaacagcacaaggagggacaaa

SEQ ID NO: 50873 - RNA, 68 nt, Homo sapiens
ccaaaggcgccaggcgcaacgccccgcccacccggaccgccccaaagacccagggaggaccgagcagc

SEQ ID NO: 50874 - RNA, 41 nt, Homo sapiens
gcccccgagagcaggaacaggcgaggcaggagaacgcgaac

SEQ ID NO: 50875 - RNA, 81 nt, Homo sapiens
aagaaaagcgcgaaagggaagaggagagccagaagccaagaagacaggacaacccccaagaaagggagcccagaacgaaac

SEQ ID NO: 50876 - RNA, 87 nt, Homo sapiens
cgcagaacccccagaccacaagccaggccccggggccccagcggcaccagcggagaccacgggagccgcgccggagccagcggaagg

SEQ ID NO: 50877 - RNA, 65 nt, Homo sapiens
aaaaacaaagccaaggaaaccccaacacagagccaagcgccaagccagaagcaccgacagaccag

SEQ ID NO: 50878 - RNA, 66 nt, Homo sapiens
gcggcacccggcaaaggaaggacgaagagagaaaggcagggcaccccaccacagcgacaaagaccc

SEQ ID NO: 50879 - RNA, 70 nt, Homo sapiens
cccaaagcaacggagccacagagacacacacccagacacagaaggacacaaccaccagagcgcgggcgga

SEQ ID NO: 50880 - RNA, 88 nt, Homo sapiens
cgggagcccgggagggcggccgcagacccgccaggagcgggagggccgccgcgagagcccgaagccggagaaccccagcaagccaacc

SEQ ID NO: 50881 - RNA, 58 nt, Homo sapiens
gaaaaccggcccgaggggacgggggaacccggggccagagaacaagacccaacagcaa

SEQ ID NO: 50882 - RNA, 72 nt, Homo sapiens
ccgaccccaggccccccacagaaaaggaaagggaggaaccacggccaaccgaaagaacaacacggacaggaa

SEQ ID NO: 50883 - RNA, 70 nt, Homo sapiens
ccggcgcgcgaagaacaagcggaaagcgacagaagcagcaaaacggaagggcgaccgaaccccggcccac

SEQ ID NO: 50884 - RNA, 69 nt, Homo sapiens
agggggagaggcggaggccaggcagcgaggaccccagaagggccccgagggaggagaaagacccgcaca

SEQ ID NO: 50885 - RNA, 68 nt, Homo sapiens
aaaccggacgcgacgggacgagggcgggagagacgacaaacaaaaagcgagaagggggacggcaagag

SEQ ID NO: 50886 - RNA, 73 nt, Homo sapiens
aggcccacccggagaaccccacggagaaccagagggcacacaaaggaacagaaaacaacacgaggaggagaaa

SEQ ID NO: 50887 - RNA, 77 nt, Homo sapiens
aaggcaccggccgagaggcaaggaaggcgcgcgcccaccgcgcgcagggggcgccaggcaggcaccaccaggaccag

SEQ ID NO: 50888 - RNA, 40 nt, Homo sapiens
cgaacccgggaggcagagggcgacgggaacggagcccccc

SEQ ID NO: 50889 - RNA, 76 nt, Homo sapiens
agcgagccagcaggagcggcgcggagcggcgagggacccgcagggagccaccgaagggaaacccccggaaacaggg

SEQ ID NO: 50890 - RNA, 75 nt, Homo sapiens
gaacaacgccgaaccaggcagacaggagaggcacagccaccaagaagaaggcggaagcccaggacaggaaaccac

SEQ ID NO: 50891 - RNA, 68 nt, Homo sapiens
acgccacccacggaccagcagcgccgagggaaacccggagaccaaaccggcaaaggaacagagcacac

SEQ ID NO: 50892 - RNA, 71 nt, Homo sapiens
ggaagaaggccaggggggagaagcaacagcagaaggcccaaaagcgacaaacagagagaagggggaggacg

SEQ ID NO: 50893 - RNA, 79 nt, Homo sapiens
cggaaggaaaagaacaccggaaagaccgacgcagaagagaagcgagaacagccagagaggccacacccgaaggaaggcc

SEQ ID NO: 50894 - RNA, 77 nt, Homo sapiens
cgggggccgcccgggccccagaaaccccccgaagaagaccccccacacgggacaagccacacaagaaggagaaaaaa

SEQ ID NO: 50895 - RNA, 79 nt, Homo sapiens
gagagggaggaaccagagggagcacaccggagcagggacccaaggccgggacagggagcagcaggaccgcagcaacaag

SEQ ID NO: 50896 - RNA, 44 nt, Homo sapiens
gcaacgccgggacagcgcaaggaccgccgggagagccgcccacc

SEQ ID NO: 50897 - RNA, 74 nt, Homo sapiens
gagacaaggccaccacgcccgccgggccgcaggcaggggggacccgcccaaccccggggccgcaaggccaggcg

SEQ ID NO: 50898 - RNA, 71 nt, Homo sapiens
aagccagaaaaaggcgccccgccaggcccccgaggagacggcgacaggagaaaacggagcggagaagaaaa

SEQ ID NO: 50899 - RNA, 44 nt, Homo sapiens
gcggcggcggcggcggcggcggccagggggccgacccaggcgac

SEQ ID NO: 50900 - RNA, 68 nt, Homo sapiens
cggcacggagaaacaccccggcggaggcacccaacaacccaggagacaaaacaccggggcccacagga

SEQ ID NO: 50901 - RNA, 64 nt, Homo sapiens
cagaaacgaccgagaaggagaccagaggaaggcggggaggcggaagaccaggagaaagcacgac

SEQ ID NO: 50902 - RNA, 77 nt, Homo sapiens
agacaaagcaagaaagacacaccgagcccaaccggacaccgagcccaagcccccacaccaggcaggagaggcggaag

SEQ ID NO: 50903 - RNA, 61 nt, Homo sapiens
gcgagacccagaggccgcggccgcgacaagcagaccggaagaccgacggaagaccacaccc

SEQ ID NO: 50904 - RNA, 61 nt, Homo sapiens
cccgcggagaggaggcagacgaggcagcagaccgacgcgcaggcggccccggagaaggccc

SEQ ID NO: 50905 - RNA, 80 nt, Homo sapiens
gccacccaacccggaaaggcagaagggaaggagcagaacggaggggaacacaaaaaggccgacgccccccccagggcagc

SEQ ID NO: 50906 - RNA, 63 nt, Homo sapiens
agaaacgagagggcgagcaaagagacaggaaagcgagacacgagagggacgcgagagcccacg

SEQ ID NO: 50907 - RNA, 63 nt, Homo sapiens
agcaacgggcagcgggcgcaggaccccgccccacgcccagggccgaggacaccggagccagcc

SEQ ID NO: 50908 - RNA, 40 nt, Homo sapiens
cccggagaccagcacgaccgaacgccagcacgggcgaaga

SEQ ID NO: 50909 - RNA, 80 nt, Homo sapiens
agaaaacccggagacccggccaaacagcccacgccaagcagccacagaagacggacaaggggcggggggaaagaagacag

SEQ ID NO: 50910 - RNA, 68 nt, Homo sapiens
cacgccaacaagggccgccgcggaccgaaggagaagaaggagaaggggaggagaaggcaagccggaaa

SEQ ID NO: 50911 - RNA, 81 nt, Homo sapiens
agaagccgggcgcggggaacggaagcggagcagggaagacggagcggcggcccgaagagaacacaaggaacgaaaggaagg

SEQ ID NO: 50912 - RNA, 82 nt, Homo sapiens
gcgcccgcaggacgccccagccagaggccgaagacaagccccggcacaggaggagagaaaccagccgaggcagccgaacacc

SEQ ID NO: 50913 - RNA, 77 nt, Homo sapiens
cggcacaccaggcggcaggggcaaccagacgggccaaggccgggcccgggaggagcaggggcagaggggagaaccca

SEQ ID NO: 50914 - RNA, 69 nt, Homo sapiens
ggaaagcaccaaaacgcaggggggcccaggcagaccgaggggaaacaccagcgaagagaggcaaccagc

SEQ ID NO: 50915 - RNA, 77 nt, Homo sapiens
ccgggcagcccaagcccgcacggcaacgcaaacgccgccagagcaggagacaggcggagaacggaaaagcaccagga

SEQ ID NO: 50916 - RNA, 71 nt, Homo sapiens
acacagagagaagccccacaggcgcggcaggaaagggcacgagcaaaaaaaagccccgagcaacaaaccag

SEQ ID NO: 50917 - RNA, 59 nt, Homo sapiens
cccagccccccacccaacgcgacccaacagaggaagccgcaagaaacgggacgacagga

SEQ ID NO: 50918 - RNA, 76 nt, Homo sapiens
gaagagaggaagaaaggacagggagagaagccaagaaagacagcaaaagggagaccacaacagccaccaaacagaa

SEQ ID NO: 50919 - RNA, 79 nt, Homo sapiens
caacccggagagcggcgaggggacccaagggagagagggaacggcgaaagggcagcccggaaggagcaccaccaccgga

SEQ ID NO: 50920 - RNA, 77 nt, Homo sapiens
caaaggaagaagcgaagacggaaacgaggaaaccgggaaagccaccgaaaagacccacaaccccaagagcagcggcg

SEQ ID NO: 50921 - RNA, 71 nt, Homo sapiens
ccacgggacaacggaggggagcggccccaaccaagaacgaaagcggcgaacgaccccacagccccgccaga

SEQ ID NO: 50922 - RNA, 75 nt, Homo sapiens
aagggaaagaacccggcggggaaaagggaaggaaaagagacgcaggaacaacacaagccgacagaagcaacacac

SEQ ID NO: 50923 - RNA, 77 nt, Homo sapiens
cggagcacaccaggaaaaggcccccacagagagcacacaaacaaagcgaaaccacggaagaaaagggcaaaggaaga

SEQ ID NO: 50924 - RNA, 70 nt, Homo sapiens
cagaacccgaagggaaccaaagagcaagagaaccacccaaaagaccgaagcagaagacaccacggacagc

SEQ ID NO: 50925 - RNA, 61 nt, Homo sapiens
gccaacggcagcaccgaggggacaagagaaaaaaagggcgggcgaacaaaaagagcagagg

SEQ ID NO: 50926 - RNA, 73 nt, Homo sapiens
aggcaagggccccagaaaacgggacaaaccaggggaagacagccccagcacagaggaaagagaaagagccagc

SEQ ID NO: 50927 - RNA, 69 nt, Homo sapiens
gcccggaggaccgccccgcaggcggcgcccagcggccacacgccccaagcgccacgcccgggcgcccac

SEQ ID NO: 50928 - RNA, 60 nt, Homo sapiens
gaccgccagccagagaacgcgagaccggggcgaaacaaggcaccccccgagcccagccca

SEQ ID NO: 50929 - RNA, 84 nt, Homo sapiens
ccccaggcgggcccgggaggcccgggaagcggggcaccagaagagagaaacagagagggccgaggcagacaagggaaaggccgc

SEQ ID NO: 50930 - RNA, 82 nt, Homo sapiens
cggacgggcaagcccggccgggcaggggaccccgacccaggacggaccggaaggcccagaaccaagacgcgagagcgggagg

SEQ ID NO: 50931 - RNA, 58 nt, Homo sapiens
caggccccacagagaaggcagaagagcaggcccagaaagaacagacaaagaccgaaaa

SEQ ID NO: 50932 - RNA, 81 nt, Homo sapiens
gggagagagcggagccgaaaccaagccggacccgaagaccagccgcacaaacacgcagaggcaagaagagaggcaggaggg

SEQ ID NO: 50933 - RNA, 84 nt, Homo sapiens
gggcgccgggaaagccagaaaaaaggccgcagcaaggagcaggcggcacagagaagaggacagcggaaggagcccagcccccgc

SEQ ID NO: 50934 - RNA, 74 nt, Homo sapiens
ccgcgcccgcccgacccgccaccgccaggccagaacaaccgccagaggcagcggaggcaagagaagacagcgga

SEQ ID NO: 50935 - RNA, 81 nt, Homo sapiens
agacacgcccaaagcggaagacgagaaaagagagacaccagcagaaaacgaagagacaaaggccaccgagaaacaggagaa

SEQ ID NO: 50936 - RNA, 68 nt, Homo sapiens
ggagagcgagcggggacaggacgaaaagacgagcccgccaagcgcccccgggcacgagagcggacgag

SEQ ID NO: 50937 - RNA, 74 nt, Homo sapiens
aacaagaacggagaaccggaacccagcagacggcacccgaaaacagaaaggcagcgggaagacacagaaccaaa

SEQ ID NO: 50938 - RNA, 80 nt, Homo sapiens
cgaggagccaaggaggggcagaaaccagcagcacaaccccggagacgacggccacgaccgcgagagggccggaaggcgga

SEQ ID NO: 50939 - RNA, 75 nt, Homo sapiens
aggaagggcgggaccaacagggagccagaagaaagaaggacgacacagcccacgggacaacaagacgacccccag

SEQ ID NO: 50940 - RNA, 86 nt, Homo sapiens
agcgccgaccgaccggagggcggagagacaaagcgaaaggacccaaagacaggaccacgcaccagcagagaaggaaagcaaaccga

SEQ ID NO: 50941 - RNA, 33 nt, Homo sapiens
ccgcccagaacagaagaacaccaccacccacgc

SEQ ID NO: 50942 - RNA, 79 nt, Homo sapiens
aaacacagggcaagccaaaggggacacacccagaagggcagaaaagaaaaggccaaacccacccacagcccgcagacac

SEQ ID NO: 50943 - RNA, 72 nt, Homo sapiens
gagcccccagggagggccaccaagggacaaacgagaaagacagaccagaacagagggagcaacaggacagac

SEQ ID NO: 50944 - RNA, 81 nt, Homo sapiens
gggaggcacgaaggcaccgggcccagcacagccagcaccgcacgcccgcaagggagcgccaccaaaaaggggaaccgagac

SEQ ID NO: 50945 - RNA, 75 nt, Homo sapiens
acgggaccaccgagaagcagggcaggccaaggaggcaaagaacagagcaggcaaaagacaacccaaaccccaccc

SEQ ID NO: 50946 - RNA, 58 nt, Homo sapiens
ggaaccggccgggccgaaggaggagaggcacagaagcccgcacggcaaagcaaagaag

SEQ ID NO: 50947 - RNA, 41 nt, Homo sapiens
ccaagagacagagaaggacaagggacaggaccggcccaaca

SEQ ID NO: 50948 - RNA, 74 nt, Homo sapiens
acacaagcgaaaacagcaagcgagcgaaaggaagcagacaagcgacaagagggggacggaaagcaagccgcaga

SEQ ID NO: 50949 - RNA, 121 nt, Homo sapiens
cggggacgaggggacacaagacggcgaggagaagacacaaggggcccgcgagcaccgacccgcggcccccacggcgcacccgagaccccgcccggggacggggggcacggcgcaacacgac

SEQ ID NO: 50950 - RNA, 74 nt, Homo sapiens
gggcgagcgcccccgccagggccgaccaggccacaggcgcaccccagcaggccaggagcgacgcaggaaggagg

SEQ ID NO: 50951 - RNA, 78 nt, Homo sapiens
agacaccggaggacgaagagggggagacaagcagaccggaagaccgacggaagaccacaccccgagggagcccaggac

SEQ ID NO: 50952 - RNA, 57 nt, Homo sapiens
ggacggacaaccagggccaggcagaccgaaaagggcggaaaaggaccaaggcccgca

SEQ ID NO: 50953 - RNA, 62 nt, Homo sapiens
cgcacgaaagcccaggccaaaaagaggaacagggcgccacaaaaaagacaggccaacaaggc

SEQ ID NO: 50954 - RNA, 56 nt, Homo sapiens
agccccagcggcgccgagaaaggaggaaggggagaagaaaaagcagcaaaagagaa

SEQ ID NO: 50955 - RNA, 80 nt, Homo sapiens
ggagaacaaagcgaggccagagaaagagaagcggcacccccaggaagcgcgggagaagcggagagaggagaagagaagaa

SEQ ID NO: 50956 - RNA, 88 nt, Homo sapiens
ccagggccggcccccccaggacaacccagaggcaacaaaggcgagccaaaacagagggagacgagaaaagggccgagcacaagccaag

SEQ ID NO: 50957 - RNA, 82 nt, Homo sapiens
ccagcgcgccgcgccggccccaccccggcccgaccccgacccggcccggcaggccccaaccaggacccaaggccagccagcc

SEQ ID NO: 50958 - RNA, 70 nt, Homo sapiens
cgaccacgagcccccaggccgagaagggaagagcaagggacaacagacaccaaacagccagaggaaggca

SEQ ID NO: 50959 - RNA, 82 nt, Homo sapiens
cgggaagggggccccacccacccccaggagcccggaaagacaaggaggaggcagaggccacaagcagccaaggccgaggagg

SEQ ID NO: 50960 - RNA, 67 nt, Homo sapiens
agcgcaggcgaggcagggagcaacgaacaagaacaccgccgggcaaaggggcggaggaaggcaagag

SEQ ID NO: 50961 - RNA, 73 nt, Homo sapiens
ggacgggaggggcgccgcggcggcgggcgcccccagggggcagcggcaagcaggggagccagccacacagaga

SEQ ID NO: 50962 - RNA, 86 nt, Homo sapiens
gagcgaaaaaaacaaaaagaaggaaggaaaaccacaagagaggaggagaccgagcgccccagcagggagagcaccacagcaaccag

SEQ ID NO: 50963 - RNA, 78 nt, Homo sapiens
cagacgagcgcgccaggccgacagccgcggccgggcccgaggcccaagagccacaaagaagcacaacaacagcccgac

SEQ ID NO: 50964 - RNA, 67 nt, Homo sapiens
cgagacgggcggagaggagaagcagaagaaggaagcaagagaagaaccagccggggagccggcggaa

SEQ ID NO: 50965 - RNA, 73 nt, Homo sapiens
cagccccggcggcccccagagccagagcgcccgccaagcaagcgagccgcagcccccaagccggacacaagag

SEQ ID NO: 50966 - RNA, 60 nt, Homo sapiens
ccgccgccaagaggagcgagcggacccgcgaggggcggagaacggaaaagcaccaggaag

SEQ ID NO: 50967 - RNA, 70 nt, Homo sapiens
aggaagaaagcagcccagcacaccgcccaaggagagagaaccagcgcagggagaggagggggccggggag

SEQ ID NO: 50968 - RNA, 65 nt, Homo sapiens
cgggggagccggaccgcccccagccgacaggcacggggccaaaaaggcacgagggaacgggaaag

SEQ ID NO: 50969 - RNA, 84 nt, Homo sapiens
agcagaagcccgggccgcgccggcggggagggccgaagccggcgagcaagcaccagggcaccacagccacgagacccgaggggc

SEQ ID NO: 50970 - RNA, 73 nt, Homo sapiens
ccaaaaacgcgcaacaagggaaaaacgaggaggccaggagccgcccagcaaaacccaacgggaacccgccgga

SEQ ID NO: 50971 - RNA, 76 nt, Homo sapiens
acaccaggggcagagcacgggacaccgcaagcagccgccgccagcgcgcacgcaaggaggcggcggaacgcccagc

SEQ ID NO: 50972 - RNA, 70 nt, Homo sapiens
cccagaaggaacggagacaaaaacggcccggagaggaggcaggcaggggcagaaggcgacccagcgcaga

SEQ ID NO: 50973 - RNA, 73 nt, Homo sapiens
aaagggcagggacagcgcaggcagcagggaggcaaaacagcaggcgggacagagggaagaaggccggagagag

SEQ ID NO: 50974 - RNA, 80 nt, Homo sapiens
caccaaggagacgcaggcacccaggggccgccccaggacacgccggacccccccgcgaacgaccggaccggggcggccag

SEQ ID NO: 50975 - RNA, 74 nt, Homo sapiens
caccacaggaagccacggagcagaccgcagggacaccgagacccggcagcgcggggcggacaaagcaaggcggg

SEQ ID NO: 50976 - RNA, 81 nt, Homo sapiens
cagccccccccgcagccaccacagagccacagcagaccagagcccacaggcggggagcgcccccaggagcagcggagcggg

SEQ ID NO: 50977 - RNA, 74 nt, Homo sapiens
acaagaccagcacaaggacaggagcagacgagccaccgagcccgggagccggcgaaggaggacggggcaggccc

SEQ ID NO: 50978 - RNA, 38 nt, Homo sapiens
ccaggcacggaggagggaaagcacagacgggagcagcc

SEQ ID NO: 50979 - RNA, 71 nt, Homo sapiens
gagaggaggcagccggaaaggaaaaagccaagacccaggaaaagccgaagcaggagagaaacaacacaaga

SEQ ID NO: 50980 - RNA, 81 nt, Homo sapiens
ccggcggcacggcgccgaccagcaccaggggaagcgggacaacgggggccgcggaagaccagcgggagcccacgccgcgcc

SEQ ID NO: 50981 - RNA, 70 nt, Homo sapiens
cgcacaccacagcggcgaagaccaacgcagcagcgaggagaggggcccacagaagcaaaggacacggccg

SEQ ID NO: 50982 - RNA, 88 nt, Homo sapiens
cgaaaaccccccgggacaggcgcggcggcacccccaggccaggggcacccggggggcagaaggccagagaccagccgcaggcacaacg

SEQ ID NO: 50983 - RNA, 29 nt, Homo sapiens
gcccccccccgcgagcagaaacaacggca

SEQ ID NO: 50984 - RNA, 60 nt, Homo sapiens
cagcaaaacccgcgacaaagggcccgaaggagcaaagcgcggccaagccagggggagccg

SEQ ID NO: 50985 - RNA, 62 nt, Homo sapiens
ccccaagcagcgggacacagggagacgcacgaacgccgccccaagccgagggggacaccgaa

SEQ ID NO: 50986 - RNA, 104 nt, Homo sapiens
cggcccggaaagacgccaaaaacagggaaagggccagcacaggagagggggaccacacagggcagcccacagaagaaggcccgccaggaggacagagcaaccac

SEQ ID NO: 50987 - RNA, 73 nt, Homo sapiens
agacccgacgaggaagaagccggagcagccccaggaccaacagaccgagccaccacaagaaaccagccccacc

SEQ ID NO: 50988 - RNA, 72 nt, Homo sapiens
ccagccccccaggaccacagccccgaccgagagaaccagcgccaggggcgggccaagaagagcggagaagca

SEQ ID NO: 50989 - RNA, 87 nt, Homo sapiens
gcgccgccaccagccgggcccgcgcgcccggccaagaggcaaaggggaggacgcagcaaaccaccagaagcccgggcgcgccaggca

SEQ ID NO: 50990 - RNA, 80 nt, Homo sapiens
aggcgccaaggagccgcggcagaccgaggggcaccgaccgcacgggccacccaaaacaggaccacggccccccggcgcag

SEQ ID NO: 50991 - RNA, 73 nt, Homo sapiens
accacccggcgaagcacgcagaaacagcagacggaggccgggagcaggcaaagggaagcgcgacgccaccccc

SEQ ID NO: 50992 - RNA, 70 nt, Homo sapiens
gaagaacacgcggggaagaagcaagaacaggacaggcccagacggacagcaaccagaggccagggacaac

SEQ ID NO: 50993 - RNA, 64 nt, Homo sapiens
accggcccccagcggcagccgagcccgcccgcgcgccgaccgagggcagaggcaacccggagga

SEQ ID NO: 50994 - RNA, 60 nt, Homo sapiens
ccacacacggaaacaaagacagccaaaggccgagacacagggcagaacggacaggcacgg

SEQ ID NO: 50995 - RNA, 62 nt, Homo sapiens
ggcgcggaggcgaccgccaggcgcccaaacccggaccagacccaacagaggaagccgcaaga

SEQ ID NO: 50996 - RNA, 74 nt, Homo sapiens
aaagcagcaaacagcgaccgccaagagacacacagggcaccagaccgagacagaaagagaaaagggacagagcg

SEQ ID NO: 50997 - RNA, 77 nt, Homo sapiens
cgaaggcagccacagcgcccagagaggaaagggccgagaaagaagagaggaagaagaggaggaggaggaagaggagg

SEQ ID NO: 50998 - RNA, 85 nt, Homo sapiens
gcaggagggcaggcgaggggcagagccggagagcagccccggcccccgagcagagagaaaccaaggagcggaaagacagagccga

SEQ ID NO: 50999 - RNA, 82 nt, Homo sapiens
gaaaggagagggaaccaacggacaagcaccgagacggagccagaacgagcccagcggagcagagacagcaggaaaagggccg

SEQ ID NO: 51000 - RNA, 76 nt, Homo sapiens
cggacgcagccgccaccgagacgagagaaacacagcccaaagaaacacacccccccacaacaaggcccaaagaaaa

SEQ ID NO: 51001 - RNA, 77 nt, Homo sapiens
ggggcccaagggggggaagagacgcacccgcgcgacggcaagcgacaccgcacggaggggagaagggggagaaagcc

SEQ ID NO: 51002 - RNA, 65 nt, Homo sapiens
gagacgcaaacaaagacccggacccgaaagaagggacaaaggaaaaagaggaggaaaacagcagg

SEQ ID NO: 51003 - RNA, 60 nt, Homo sapiens
cggccgcagggcaaccaggcgccaggggagaggaggcagaaggagaccgcgggacagaac

SEQ ID NO: 51004 - RNA, 82 nt, Homo sapiens
cgggcccgaggaggcagccaagccgagccgccacccggcgaaccgaccaagaacaacacccagagggccaggagaaggcgaa

SEQ ID NO: 51005 - RNA, 74 nt, Homo sapiens
aagacaaaacacacacccaagaaagaccgcagcccacagagcgaccagaaggcacagaaaagagcaccggccag

SEQ ID NO: 51006 - RNA, 48 nt, Homo sapiens
cagaagagacgaaaaagacgggcacaaggcccacaaagaaaaaaacac

SEQ ID NO: 51007 - RNA, 45 nt, Homo sapiens
caaggcgaaaaacaacgccgcaggaagcgagcagcgcaaagcaca

SEQ ID NO: 51008 - RNA, 79 nt, Homo sapiens
gaccggagcggccagcaagaagggccgagaaggaagagcccagagaccaccgccggacccaaacacgagagagaggccc

SEQ ID NO: 51009 - RNA, 70 nt, Homo sapiens
gaggcccagggaggcaggggcagaaacagagaaggaacaggaacacgaaacccgaagaaaggggggccag

SEQ ID NO: 51010 - RNA, 40 nt, Homo sapiens
ggggagccacgacaacacgaaaagagagccggaggcagag

SEQ ID NO: 51011 - RNA, 81 nt, Homo sapiens
cgaacgaagacgcgcagaccagaagcaaaaaaaagccaccagaaagcgccaaggaaagaaaacccagaagacacgagaaaa

SEQ ID NO: 51012 - RNA, 67 nt, Homo sapiens
gaaggaaccacccacgcaggcagcacgggagcaacaaaggcaacacagagaaagggccaacacaacc

SEQ ID NO: 51013 - RNA, 77 nt, Homo sapiens
gggaggcaacgaggcaccaggcgagcgggaaagccgaagaaaggagggcgagagcacggagcaggggccgggaagca

SEQ ID NO: 51014 - RNA, 69 nt, Homo sapiens
aagaacagagagaacaaaagagcagggccagcacaacagaaaagaacggggccaaaccaaggggcacac

SEQ ID NO: 51015 - RNA, 90 nt, Homo sapiens
ggacggaccgagaccggaccgagagcggaccgagagcgcgaaacgcacgagaaggcaagcagaagaggaacagaagaagcagagcagaga

SEQ ID NO: 51016 - RNA, 63 nt, Homo sapiens
gcccgagacgggcccgccgaaagggaaagggagcagcaccggccacacccacagcacgaccgg

SEQ ID NO: 51017 - RNA, 71 nt, Homo sapiens
ccacaacgccgcggacgaccgcacgggcagacacgaagcccgggcaagacaacaaaacccgcgggcagaaa

SEQ ID NO: 51018 - RNA, 61 nt, Homo sapiens
aacaaaggacacgccaaccgaaagaggccggagggaagagggcgggacaaagccccaagca

SEQ ID NO: 51019 - RNA, 66 nt, Homo sapiens
accgccaaggccaccacccccacaggaaaaagaaccacacaccaaggaaggaccgccaagcaacag

SEQ ID NO: 51020 - RNA, 79 nt, Homo sapiens
gaagccagcagccacaccagacgccaccccgccccaccgaggccggcgggccacagcaggcgccccgccggagaacccc

SEQ ID NO: 51021 - RNA, 72 nt, Homo sapiens
cagcaggaagagcgggaggaagaacagcaagggccaacggaagccagagaaaggaccagaacagagaagaaa

SEQ ID NO: 51022 - RNA, 104 nt, Homo sapiens
agaggacccacggacaggaagccagagaaacgccaaccaaaaagggaggggcaaagaaaaaggagagaaaaagaggcaaaacaacaagaagaaaagagaaaaaa

SEQ ID NO: 51023 - RNA, 61 nt, Homo sapiens
gcgcggagggacgcacccccacagggcagaaggcggggaaggaaaacagcaacacagagcg

SEQ ID NO: 51024 - RNA, 87 nt, Homo sapiens
cccgccgagccccggccccaagaacgccgccgccccggagccgccacaggacacagaacagagaagaagcagacgagacagaaaaag

SEQ ID NO: 51025 - RNA, 77 nt, Homo sapiens
agccccagcccgggagaccgccgaaggcgggaagggaagcggccaaggcacggaggccgcgagcggggcccggcgca

SEQ ID NO: 51026 - RNA, 73 nt, Homo sapiens
cgaggcgagcgagacccccaggaacacccgagagccaagcccagagccagccaagggccacgaccggaaccaa

SEQ ID NO: 51027 - RNA, 79 nt, Homo sapiens
aggaagcgcgggcggacgacagaggagccgaaccacccacacaccgacagagaacccaggccaacacacagacagaggc

SEQ ID NO: 51028 - RNA, 35 nt, Homo sapiens
agcccaagcagaaaaagcgaggaccccccccagag

SEQ ID NO: 51029 - RNA, 74 nt, Homo sapiens
acgcagcggagcgagggaccgacaagagaaaaccagaggcgccaccacaaggacagcacaaagagaagaaaaaa

SEQ ID NO: 51030 - RNA, 57 nt, Homo sapiens
gcagaggacgccggaacacccggaagccgagaaagaaaaaaaccggggaaacgcgcc

SEQ ID NO: 51031 - RNA, 53 nt, Homo sapiens
gggaccgcccgacggcgaagaaagccagaccccccagggcagcggcggccgcg

SEQ ID NO: 51032 - RNA, 77 nt, Homo sapiens
ggggaggcacagaaacgacgggcacacggagggagaacgagcaggagaagaaaggaagagacgacagccagcaggca

SEQ ID NO: 51033 - RNA, 66 nt, Homo sapiens
acacgagccccagcaacacaaacacaggccacccggcggccgggagcgccggaggagcccccgcgc

SEQ ID NO: 51034 - RNA, 83 nt, Homo sapiens
gaagcccggacgacgaggaaccgcccaacaggcccggaggaccacccgagcacgaagagaccagaaaagcgcagagcagacca

SEQ ID NO: 51035 - RNA, 73 nt, Homo sapiens
cccggcgggggcgcggcccacaagagagggaaggagaaaggcagacgagggacagccacggccacgaaggaca

SEQ ID NO: 51036 - RNA, 68 nt, Homo sapiens
gggcggagggggaggaagcaggggaaagcccgggccaagcgggaggcgccggcggagaacggaaaagc

SEQ ID NO: 51037 - RNA, 70 nt, Homo sapiens
ggcccgggggccgccccggcgagccgcgacggcgccgcccacggcgaggcaggaagaagaccagcgacaa

SEQ ID NO: 51038 - RNA, 54 nt, Homo sapiens
gggccgaaacggccagggacagggcagaccgccagcagcacagcaagccacaga

SEQ ID NO: 51039 - RNA, 71 nt, Homo sapiens
caccgaagaaagagccaaacgccaaggcggcagagaagaagcagaagaagacaaagcagcaaaaacaaaga

SEQ ID NO: 51040 - RNA, 108 nt, Homo sapiens
aagaggggcacaagcacgcaggagaagaggggaggcagaccagccgaccaaagaaacaacacacgaggccgaaaggacaagaggcagacacacacccccgagggcgca

SEQ ID NO: 51041 - RNA, 39 nt, Homo sapiens
cagcgccagacaaagagcaaggccagaacgcaaagcaga

SEQ ID NO: 51042 - RNA, 69 nt, Homo sapiens
gaccggcggcaaccggaaggaacggagggggcccgggaggggaagaccccgcaccagccacaccggggg

SEQ ID NO: 51043 - RNA, 86 nt, Homo sapiens
caagacagagaagaaaggaggagcagaagccagagcagagaggagcccaggggaagagaggggccgaggggggcacacgaggaaac

SEQ ID NO: 51044 - RNA, 84 nt, Homo sapiens
ccgccgccgaggaggcgagcagccgggagacaccgccaccgccaggcaggccgcggaccaacccccagaccggcagcacaccac

SEQ ID NO: 51045 - RNA, 61 nt, Homo sapiens
gccacacacaaggcggcaaagcgaaggagaagagagaaggaagcggcggcccgaggacaag

SEQ ID NO: 51046 - RNA, 90 nt, Homo sapiens
cgcgaaccgagcgggcggcgggcgcgcgcaccagggggagaaacccgggaccaggcacaggggcacccaccacaaggagacccccccccg

SEQ ID NO: 51047 - RNA, 82 nt, Homo sapiens
ccggggggaaaagaaggaccgaggcaagacgagcacaccaggagagagcggccaagagaagcaggaggaggagaccgcccac

SEQ ID NO: 51048 - RNA, 82 nt, Homo sapiens
cgccaccgccgccagaagaagcagcaaccgcagaagcagcggcaaccagaccggggcaggcgagaaagaaccccagaagaca

SEQ ID NO: 51049 - RNA, 79 nt, Homo sapiens
agaaggcgggggacaccagacgggaagagcacgaacccagcggccggccagggcagacagaggaaaaaaagaaggggag

SEQ ID NO: 51050 - RNA, 81 nt, Homo sapiens
cccgggacccgcaagaccgcgggccccccggagccccccgagaagcggaggagacaagaaggggcgccccagcaccgccgg

SEQ ID NO: 51051 - RNA, 61 nt, Homo sapiens
caccacaaaaccacagccaagggaggacagagcccaggaccaagagcacaacaacacggac

SEQ ID NO: 51052 - RNA, 46 nt, Homo sapiens
gaaaaaagaagaaaccaacaggagaagaggaagccggcaggagcca

SEQ ID NO: 51053 - RNA, 73 nt, Homo sapiens
ccgccagcaaacaccgccaagccgggcgaaacgacccggcgccgaccgcgagacggcaggaagagcgaacggc

SEQ ID NO: 51054 - RNA, 72 nt, Homo sapiens
acggagcccgcggagaacaccagagcaaagccaccccccgaggaaaaagggggccagagcacagcacgagaa

SEQ ID NO: 51055 - RNA, 76 nt, Homo sapiens
caccgcagccacacccaggcaggcggccaaccacgaaggggcacaaccacagacaacgacaccaaaccgagagacg

SEQ ID NO: 51056 - RNA, 80 nt, Homo sapiens
accgcgcccgccgcccccgaaccacccgcgcgaaacaacacagaagggaacaagcggacagaaaaagagaacaagccccg

SEQ ID NO: 51057 - RNA, 82 nt, Homo sapiens
cagcaggggacagcggagaggcgaagcgcgaaagaggcagaagaagggggagagccaaagaagggcccaacaagaacaagag

SEQ ID NO: 51058 - RNA, 56 nt, Homo sapiens
gccaggacacacgcagacaagccagcgccagggagcacaaccacaagcccaggaga

SEQ ID NO: 51059 - RNA, 73 nt, Homo sapiens
gaggaagcacagagcggccaacacagggcccgggggcaggccccgagccccaaggggcgaacgccacaagcgc

SEQ ID NO: 51060 - RNA, 76 nt, Homo sapiens
cagagcaagacagcggaagaagacccagggaaacccccaggccaagccgacgccagcgggcgccacccaacaggcg

SEQ ID NO: 51061 - RNA, 59 nt, Homo sapiens
gaggcgaggcggaagggcaccccacccgcaaagggggagcgccaggagagaagagaccc

SEQ ID NO: 51062 - RNA, 75 nt, Homo sapiens
ggccagaaaacagaaggccacgcggaaacaaggcgaccccagaaagagacccaggccacagaagccgcaccgcgc

SEQ ID NO: 51063 - RNA, 72 nt, Homo sapiens
ccgccacgaggagcaccacgcggccaggacccggacaagccgagaagaccgcaggagacacagcaacaaaag

SEQ ID NO: 51064 - RNA, 69 nt, Homo sapiens
ggcaagacaacaacaagaggacggaaaccgagagaacaaccaccggagcgcaggagccccaaacgagaa

SEQ ID NO: 51065 - RNA, 59 nt, Homo sapiens
cgccgcgccccggccgcacggaacaccccaccagaccacccagcaagcccacaaaaaag

SEQ ID NO: 51066 - RNA, 74 nt, Homo sapiens
ccgaaaccgcaaaccccaaagccgaagccacaaccgaacgccgccgcggacgacaagccgacaccgaccgcggc

SEQ ID NO: 51067 - RNA, 35 nt, Homo sapiens
gcgacaccagggccgcagagacaacaggcacaaag

SEQ ID NO: 51068 - RNA, 84 nt, Homo sapiens
gggacaagaacagggccacagcaggaaaccaaaccccccaaaggcccaggacaggacgaagcccccgcggggcccccccacaga

SEQ ID NO: 51069 - RNA, 82 nt, Homo sapiens
cagagagcagccgggcgccagcgacccacagcggggccgggccccgaccacccagagaaaggaaaggagccagagaaggagc

SEQ ID NO: 51070 - RNA, 83 nt, Homo sapiens
cccggcccgccgggccgccgggcgcggggcgcggccgcgcccggaggcgccgccagcacagccagccaccgcagaacaagaga

SEQ ID NO: 51071 - RNA, 70 nt, Homo sapiens
ccccgagagcggaacaggggccggcacagcagcaagaccggaacccagaagccccccccccggaaacaaa

SEQ ID NO: 51072 - RNA, 72 nt, Homo sapiens
cggacgccaaccagccccggcaagaccgaaggcgccggccaaaagagaacaagacgggaaccgaccaccaag

SEQ ID NO: 51073 - RNA, 107 nt, Homo sapiens
ccaaccagccggccagaaaaggaagaacccaggcagcagacagcggacgggaaaaggccgcgccagcagagcgaaaaagggaggagagagagccaccagccaggaaa

SEQ ID NO: 51074 - RNA, 69 nt, Homo sapiens
agcaagagaacgcaagagacgaacaagacgcacagggcaggaaaggaggacacacagcagaaaagaaag

SEQ ID NO: 51075 - RNA, 57 nt, Homo sapiens
gagaccacaaaagagcagaggaggaacaccaggcacaaggaccccgcgggcacggcg

SEQ ID NO: 51076 - RNA, 73 nt, Homo sapiens
ggaggaagacccaaaagcgcgccacgcgccgggagaggcccggggcccgccggcgcccggagcccgcgcggcc

SEQ ID NO: 51077 - RNA, 84 nt, Homo sapiens
agcggaacccggggacacgacgccccaaaccgccaggagaaaaaagaggcaccccagcaacaccccgccacgccgcccaacccc

SEQ ID NO: 51078 - RNA, 76 nt, Homo sapiens
gcagagcacccccaaagacagagaagaaagcagagacagaaccgacagaagaaaaggcccaccgggcagacaaccc

SEQ ID NO: 51079 - RNA, 57 nt, Homo sapiens
gaaggggccgagacagaaccgcagacgccgcagggccgcacgccccaccccgagccg

SEQ ID NO: 51080 - RNA, 72 nt, Homo sapiens
agacaaggaggccaaggaccgcacaaccagagagaaccccacccaagagacaaagaccaacgagccaccaca

SEQ ID NO: 51081 - RNA, 87 nt, Homo sapiens
aggcggacagaaacaaaaaaagcaagaaaggcaggaaccaggaacaggggccaaggcgacagcaaaacggagaaagaggagagggca

SEQ ID NO: 51082 - RNA, 69 nt, Homo sapiens
agacccaggaagccgcgggcaaaccagaccgaagggacaagaacccaagaaacaggaaaaaacccaaaa

SEQ ID NO: 51083 - RNA, 88 nt, Homo sapiens
cagccgcggagcagagccgccggggagggagccagaagcaacgagagaacgacaacccgagagcggagcgacccgacgagcgaaggga

SEQ ID NO: 51084 - RNA, 76 nt, Homo sapiens
aaaaacacagggacgagccaccagagacaaagggagccaaaggaaaaaagaccccagacccgcagaaaaccacagc

SEQ ID NO: 51085 - RNA, 72 nt, Homo sapiens
ggaacaaggaaacaacggaaaaggccagaacccggagccagcacgaacgcacccaacggggagccggggaac

SEQ ID NO: 51086 - RNA, 81 nt, Homo sapiens
ccaaaagacgcagagccccagggcggacagcagcccggggcaaccggagccccccaggaggggaagcacagcacagcagaa

SEQ ID NO: 51087 - RNA, 80 nt, Homo sapiens
cgagaagagaaagaaggggaccagaagccaggagaggcgccgggacgggcgcacgccacgcaagaccaacacgcacagcc

SEQ ID NO: 51088 - RNA, 61 nt, Homo sapiens
ccccccgccgccccccagcccgggcgggggcagagccagcacccacggccccgccccccac

SEQ ID NO: 51089 - RNA, 75 nt, Homo sapiens
ccgagaccaggaaccagcagagaaacgggaaggagagaaaaggcgaaccgaaagagaaaaccaaacagaccacgg

SEQ ID NO: 51090 - RNA, 75 nt, Homo sapiens
gccaaaaaaacggcggaaaaaagcggagaagagggaagaagaagccaacaacagcaaacaagaagagcagacaga

SEQ ID NO: 51091 - RNA, 57 nt, Homo sapiens
aaccgcggcccgagccgagccagagggcggagaacggaaaagcaccaggaagcagag

SEQ ID NO: 51092 - RNA, 72 nt, Homo sapiens
ggaaacaagcacgggcgagccaggacacgaccacaacacagcccacagggcgcgaggaacgcgcaagaacgg

SEQ ID NO: 51093 - RNA, 87 nt, Homo sapiens
ccggagaaagcaggggagggcgaacccggacacaggggaccccgggaggcggagcaccccccagcgaggacccacggacgcgggcag

SEQ ID NO: 51094 - RNA, 108 nt, Homo sapiens
cccaccgagaccaagaaggaccagaaaaccgacaacccccagaaagccaagccgggcaaaagcagaccggaaaacccaccggcaagaccacacccgaggggagcccag

SEQ ID NO: 51095 - RNA, 70 nt, Homo sapiens
ggagcccgagagagaaggccggaaacgaaacagcgcagccaggaacaggacgaagaccagcgccagggaa

SEQ ID NO: 51096 - RNA, 73 nt, Homo sapiens
acagaccgacgaagagaaaccaacaaaagacagccacgcccacacaacagcaggcccagaagcacagaaaacg

SEQ ID NO: 51097 - RNA, 40 nt, Homo sapiens
ggaccagcagaaaccagaggcgcagcaacggaggagagac

SEQ ID NO: 51098 - RNA, 36 nt, Homo sapiens
cccccagcgggcgcggcagaagagcacgacgacggc

SEQ ID NO: 51099 - RNA, 48 nt, Homo sapiens
agccaggcaccccccacagaaagggcggagagaacaaaaggggcacag

SEQ ID NO: 51100 - RNA, 80 nt, Homo sapiens
cgcggcgacggggcggcgagcagcgcagcgaccggggaccggagcgacgccaagaggccaaaccaaaaggaaagcaagcc

SEQ ID NO: 51101 - RNA, 77 nt, Homo sapiens
acgaagggccaaacacagggggaccccggcagagggagcggacgccaagcgcagcgcagggaaaccgcccggaccaa

SEQ ID NO: 51102 - RNA, 113 nt, Homo sapiens
cgagcggcgagccggagcgcggagcccggccccgcaccaggaggaggacgacagcacggcaaaagcagaccggaaaacccaccggcaagaccacacccgaggggagcccagga

SEQ ID NO: 51103 - RNA, 78 nt, Homo sapiens
agaacggggagcgggacaaggccggagcgcgaagacgcagggaaagcggcacacgaaaggggcacggcaggacgagcg

SEQ ID NO: 51104 - RNA, 77 nt, Homo sapiens
ggggacgacaagcgcccacgaggagacgcggaggacagcccgcaggcacacaagacaaaggcgccgcagcacccccc

SEQ ID NO: 51105 - RNA, 77 nt, Homo sapiens
acagagcccccagagcccaagcgagagcacaggcacagcaacgagacagcaaccaagaggcaagaaaccgggaggca

SEQ ID NO: 51106 - RNA, 78 nt, Homo sapiens
agagacccagaagcaaacgaagagcgaaaagaacaagcccgacacccggaagcaggcgaacgaaggcaaacgagcaga

SEQ ID NO: 51107 - RNA, 45 nt, Homo sapiens
ggccgagaccgcgcagccggcggaacagaaaaacggaggaaagca

SEQ ID NO: 51108 - RNA, 64 nt, Homo sapiens
cggcggagaccccccaggacaacagcacacgcacccaagcgcggcgccgacaccggaacagcgc

SEQ ID NO: 51109 - RNA, 65 nt, Homo sapiens
gaagaggacgcggagacaagagcgaaacaacggacccaccgaagaaccggaggccagaaagacca

SEQ ID NO: 51110 - RNA, 77 nt, Homo sapiens
cccgcggcgaagggaagaggcccagccggcccgcgggggagccccgggagccgcacgcgggaacaagccaagacgag

SEQ ID NO: 51111 - RNA, 70 nt, Homo sapiens
ccccgcgggcgccccaacacccagcacaccgcgcccaggcaggacccagaggccaggcaggggccacgca

SEQ ID NO: 51112 - RNA, 66 nt, Homo sapiens
cccggcgcgggggcaccacaacccaaaacagggaccagaggacgggggacggggaaggaagccaca

SEQ ID NO: 51113 - RNA, 87 nt, Homo sapiens
aaccgcaggagccagaggcacgagaagagaagcccagagcaaaacaccccaaaccagaccaccgacgccgggccaagcgccaaacga

SEQ ID NO: 51114 - RNA, 64 nt, Homo sapiens
cgacgcaccgcaggcagacaaaagggccaaagaagggagagagagcaacgggcaggaaaggaag

SEQ ID NO: 51115 - RNA, 72 nt, Homo sapiens
gaaaagaggggaggggaggggaagggaaacacacggagacaaaccacaaaacgaaggccaagacgggaaaag

SEQ ID NO: 51116 - RNA, 71 nt, Homo sapiens
aaccggcgcgccggcgcgcggcgcggacaggcccaaacgagagaagaggaaagacccaaaaaagcgaggaa

SEQ ID NO: 51117 - RNA, 74 nt, Homo sapiens
aagcgagccaagcgaaagaagcccaaccgcggagaaaaggggacaggcaaaagcagaccggaaaacccaccggc

SEQ ID NO: 51118 - RNA, 57 nt, Homo sapiens
acaaaggaggaggaggaggacgacgacgaggggaacggaggcccacccgacgcggag

SEQ ID NO: 51119 - RNA, 56 nt, Homo sapiens
cggagcgacagcgcgcaccacccgcagggcacacagagaaaaaaagggaacaaaac

SEQ ID NO: 51120 - RNA, 71 nt, Homo sapiens
gacagcccaaacgccccacgaccaggcccccacagagagcacacaaacaaagcgaaaccacggaagaaaag

SEQ ID NO: 51121 - RNA, 77 nt, Homo sapiens
aaacaagggaacagcagagcggcgaccaccagaagacaaggccagcgcagaagacgagaagccaggaggagaagcgg

SEQ ID NO: 51122 - RNA, 70 nt, Homo sapiens
ggacaacagaagacggacgaagagagaagcaaaaagccacgagggacacaaggccagcagggcccagcca

SEQ ID NO: 51123 - RNA, 78 nt, Homo sapiens
acgcaggcggccgagacaggggccaccgcggagcgcagcccagacagaaaaccgagaacagggggggcaaaaccaagc

SEQ ID NO: 51124 - RNA, 79 nt, Homo sapiens
gggaagaggcggagcgcgcggccgagcgcaagagggcacgacacgccggaaggcggcacacacacaagccgcaccaggc

SEQ ID NO: 51125 - RNA, 81 nt, Homo sapiens
aaggagccacacacccggcacacaacccaggacccaccggccagaagggcccaacgccaccacaaggccggcggaccagag

SEQ ID NO: 51126 - RNA, 72 nt, Homo sapiens
accgggagagccgagcagccccagcagggaccaaaagccagccccacggaggaacccgggaccggccacccc

SEQ ID NO: 51127 - RNA, 56 nt, Homo sapiens
agaggcccgcacgaacgggaggagcgagaagagaggaagaaacaaacagaagcgcc

SEQ ID NO: 51128 - RNA, 77 nt, Homo sapiens
aacgagcggcagaaacacaagaaccacaaggaaacagacagagagggaaagggcgggggcaagacccagagaagaca

SEQ ID NO: 51129 - RNA, 89 nt, Homo sapiens
cggcgccaggcaggggaagcaggcccgccacccccagccagaccccaagaagaagcggaagaggagccgcggaaccaagacacaaggaa

SEQ ID NO: 51130 - RNA, 62 nt, Homo sapiens
cccccgggccgacgccagaagacaaagagccaagaaacccggagagcagaaagacgagccgc

SEQ ID NO: 51131 - RNA, 70 nt, Homo sapiens
agccgcgaagacgcccagcccaaggggaaaaacggggaacgggaaccaccaacagaccggccgacacaag

SEQ ID NO: 51132 - RNA, 63 nt, Homo sapiens
ggcccccacgccagccacagaagggaacaaagagcagaggccagcagccaccgacagcccgcg

SEQ ID NO: 51133 - RNA, 77 nt, Homo sapiens
cacaccggaggaagagggaccgccagccccaaccaggacgaggccggcccgaaaagaaagcgaacacacaaaacaag

SEQ ID NO: 51134 - RNA, 81 nt, Homo sapiens
cagcaccacacggagcagagcacgaccggcccgaggagccacgcagcacacagaggggggccgaccccgggacacacccag

SEQ ID NO: 51135 - RNA, 51 nt, Homo sapiens
ccgaggcgcccccaccacccacaaggacagagcgggagccaccagcgccaa

SEQ ID NO: 51136 - RNA, 80 nt, Homo sapiens
cggggccaagccgcgccggagcggagcgcgggcgccggggagccaggcagagaggagggcaaaaagacaaacaccaccgg

SEQ ID NO: 51137 - RNA, 70 nt, Homo sapiens
cagaagaaaaagggcgaccagcgcagggcccgaaaaaggaaccaaaccgaggacaaagcccagccacgag

SEQ ID NO: 51138 - RNA, 73 nt, Homo sapiens
accccggaagagggaacccacaaagcagccggggggcgcaaggggcgacgcgggagaaacaaaaagacagacc

SEQ ID NO: 51139 - RNA, 61 nt, Homo sapiens
cgcgagcagcggacgccggccgccgcaggaggagagaccgcacgcagggccacagcagcac

SEQ ID NO: 51140 - RNA, 71 nt, Homo sapiens
gcgcagaccagagcacgcaagagagaaggggagaacagagagcacggggaccaggggagggggggacagga

SEQ ID NO: 51141 - RNA, 77 nt, Homo sapiens
aggacagagaagaggacgggaaaagagagaaggacaaggacggagagaagagacagaggacacaagagagaaaccga

SEQ ID NO: 51142 - RNA, 64 nt, Homo sapiens
aagggaccacggcaccgccccaggaaaccccccaggcaagaggcgcaggaccgggaagaccaac

SEQ ID NO: 51143 - RNA, 79 nt, Homo sapiens
aaccccgaccgcagcccccgggcacgaccccggacacgggcaggcaggggccggcgccgacacaggaacccggaaacaa

SEQ ID NO: 51144 - RNA, 47 nt, Homo sapiens
aaagaagggggcagaagaggggacaaccccagaacaagcaggaaagg

SEQ ID NO: 51145 - RNA, 79 nt, Homo sapiens
acggaagggggcccagggaaccacgccagcgccgcaacaccagcccgaggaacccgaaggcccgaagacaacccgccgc

SEQ ID NO: 51146 - RNA, 56 nt, Homo sapiens
caccgagcgcacaccagggaggaagcggagcggacgcaggggccgcaaggccaggc

SEQ ID NO: 51147 - RNA, 37 nt, Homo sapiens
cagccaaaagagaaagaccaggaggaagcagcaaagc

SEQ ID NO: 51148 - RNA, 77 nt, Homo sapiens
cggcaaggagcgagggaacagacacccccgaggcgcagcccagagggcacccgcaaacagcgggaccccaccagcaa

SEQ ID NO: 51149 - RNA, 71 nt, Homo sapiens
aacaagcgggagaggcaaccggaagagaccgccacagaaacagaaagagggaacaaccgcgaagagaagaa

SEQ ID NO: 51150 - RNA, 70 nt, Homo sapiens
caaggacagggcaacaccgaagaaagagccaaacgccaaggcggcaaacagagagaagggcgggagaaac

SEQ ID NO: 51151 - RNA, 75 nt, Homo sapiens
cgcgcaggagcgggcaccacccaaagaagcgagccaggaggccgcacaaccaaaaaacacacccggagaagagca

SEQ ID NO: 51152 - RNA, 72 nt, Homo sapiens
gcggggccggggccgcgcgcccacccaacccgagcggcagcaagcaaaacccagaaccagagggcgggcaca

SEQ ID NO: 51153 - RNA, 84 nt, Homo sapiens
agggaaaccacgcaggcaaacgagaaaaagccgagaaggccagacgggacagaggacccgagaacggaagagagggagcaaaag

SEQ ID NO: 51154 - RNA, 67 nt, Homo sapiens
ccaacacacgaaaaacacgaagaagagggaaggcaccaggagaaggcaccgggaaacagaaagcaag

SEQ ID NO: 51155 - RNA, 56 nt, Homo sapiens
gaaaaaggagcagcccgggcaccacagaaaaggacaccccccaggcacagccacac

SEQ ID NO: 51156 - RNA, 75 nt, Homo sapiens
ccagggacacagacaggagcaggaggcacaaaagaccccccaaagcccaccaggggggaagcagaacagaggcac

SEQ ID NO: 51157 - RNA, 75 nt, Homo sapiens
caagggaaggcgccccaacaaagggcagcggaaaaggagaaagcaagcgccagcaaaggaaaccggaagaagcaa

SEQ ID NO: 51158 - RNA, 83 nt, Homo sapiens
ccaagaccacagcagcacccaggaacacgacacagaccccggccggaacccagggagaccagccccccccacgcaccagaaac

SEQ ID NO: 51159 - RNA, 89 nt, Homo sapiens
acagaaggggaaggggagccgcacaagagggggaaacggggaaaaggcaagcagagcggccggcccaggcggaggcagggcacgacggc

SEQ ID NO: 51160 - RNA, 81 nt, Homo sapiens
gggggagagaaaggaaccagaaacaggaagaaaacggaaccagaggcgaagagccggaggagcccgacaccacaacacggg

SEQ ID NO: 51161 - RNA, 93 nt, Homo sapiens
gcgggagcgcgcccgccgagcgcaacagcggcgggcggggcaccccaggccgcaggagggaagcgcacggaaaccgccccgggaggcacagag

SEQ ID NO: 51162 - RNA, 75 nt, Homo sapiens
ggaacacaaaggaaaccaaaggccggagaggaacaggagccaaacacgccagcccggaagacggggcaggaagac

SEQ ID NO: 51163 - RNA, 73 nt, Homo sapiens
gaaaggaacgagcaagggcccgggacaacgcgacgagcaacccagcgccgaaaacggccgagcgaccaggaga

SEQ ID NO: 51164 - RNA, 73 nt, Homo sapiens
ggcaagaaaaggagcagcgacagggcaaacgaagaaaacgacccagccagaggacaaaggaccgaggacaggg

SEQ ID NO: 51165 - RNA, 77 nt, Homo sapiens
agggcgccccccccgaccggaaccagcccccggacagcccaacaggcccacccccaccggagagaccggacaccagc

SEQ ID NO: 51166 - RNA, 52 nt, Homo sapiens
cgggaagaccacaaccagcggagcagaccaccgcccagcaaaaagcggcgga

SEQ ID NO: 51167 - RNA, 69 nt, Homo sapiens
gagacccggggaggcagaacaggcggccagcccggaaaaacagacaaggcgggcaacaaacgggagaag

SEQ ID NO: 51168 - RNA, 92 nt, Homo sapiens
agcacggaaccgccaccagggcagcgagcgcaaacccaggccgagggagcaacccacaaggacagaagcgccaggaacaaggagaagacgcc

SEQ ID NO: 51169 - RNA, 70 nt, Homo sapiens
ggccggaaggaccaccagccccaaggaggacacaggacaccgccgcccagccacaggaccgacaccgaaa

SEQ ID NO: 51170 - RNA, 77 nt, Homo sapiens
cggagacagagcaagaaaagcccgggagcagaagggaggcccaagacccacaacaaaaggaagcgcaggcgcagcaa

SEQ ID NO: 51171 - RNA, 70 nt, Homo sapiens
cagccacacccgggggcagagagggccggagccagggaggaagcagaaggaaggcgggaagaggagacgc

SEQ ID NO: 51172 - RNA, 70 nt, Homo sapiens
gaacgaaaaaaagggaagccaggcggggccggggagcccgggccagaccccccagacccagcccaccccg

SEQ ID NO: 51173 - RNA, 41 nt, Homo sapiens
gaaccagcaaccccccacgagaacaaacaagacagacgaag

SEQ ID NO: 51174 - RNA, 36 nt, Homo sapiens
ggccaagaaggcaggaaaccggagaagacacaccac

SEQ ID NO: 51175 - RNA, 77 nt, Homo sapiens
aaaaacaaggcccacacagagacaaaggcaagagggaacgcagaacggggcaaagcaaccaggagacaaggcagaga

SEQ ID NO: 51176 - RNA, 73 nt, Homo sapiens
accgcaggcgcaaagcaagaaagccacgaagaccagaacggcaagaagcaccggagcacgacgacagcagaag

SEQ ID NO: 51177 - RNA, 78 nt, Homo sapiens
caacgccggcgacaccggccggcgcagcgggaggccaccgccccaccagcaggcaacgccacagaccgccagcgccag

SEQ ID NO: 51178 - RNA, 82 nt, Homo sapiens
cgcacggcaccccgggcggggccgcgcccccccagggaccagcaccggcagaggcacacccagaagccacaggagaagcaag

SEQ ID NO: 51179 - RNA, 84 nt, Homo sapiens
gggcgcaggggaccgggccacccaagcaccggcagacaagagcagcgcagacccaggggagcccaccagccagcaacaggcccg

SEQ ID NO: 51180 - RNA, 76 nt, Homo sapiens
gcggagcgacggggaggcgcggccaacggggccacaagcaacagagcagccccagacaaggaccaaagggcaaaag

SEQ ID NO: 51181 - RNA, 80 nt, Homo sapiens
ccgcgggaacgcccagcgcggagcaggccgggcccgccagggcacgcgcccgccacgggaagcccgagaagccgcgcagc

SEQ ID NO: 51182 - RNA, 61 nt, Homo sapiens
ccaggggccgggagggcgccagaaccccaccggggcccgcccacgggaaccagcaacagcc

SEQ ID NO: 51183 - RNA, 74 nt, Homo sapiens
ggacaggaggagaaggccgccaagaaaagcgccaccacaaggaacaacaacccaccaaacagagaagaagaacc

SEQ ID NO: 51184 - RNA, 85 nt, Homo sapiens
ccggaaaggagagagagacagaaccacagacaaggggagcggcggggaaaaagcaaccggcggcccaggccgagccgagcaccgc

SEQ ID NO: 51185 - RNA, 64 nt, Homo sapiens
gcgccggagcccagcggcggcgggaggggaagaaaccgccaggaagagaggaggccacagagga

SEQ ID NO: 51186 - RNA, 81 nt, Homo sapiens
aagggcgagggaaccgaaaagccccaacagcaaggcggggaagagcgggcgaccaagagccgaaccccaaccgcggccggg

SEQ ID NO: 51187 - RNA, 76 nt, Homo sapiens
accggagaagcagaggcacgccggagcgcaggccagcgacgacagagacccaggaaaccaaagcaagacaagcgaa

SEQ ID NO: 51188 - RNA, 84 nt, Homo sapiens
cgccggcaggccggcccggggcgagccccaggggggcaacaacgccggccacacggggggggagggaaagagacgacccaccgc

SEQ ID NO: 51189 - RNA, 76 nt, Homo sapiens
gaccgcggggagagagaacgacggagaaggggccggacaaggacgacagcaggggagccgcagaaagcgccaaggc

SEQ ID NO: 51190 - RNA, 35 nt, Homo sapiens
agaggaccccccacgaacccaccagccccaggaac

SEQ ID NO: 51191 - RNA, 74 nt, Homo sapiens
cagcaagaagaagagaaagcgaagcgaaaaagagcaggacccgaggaacaggaaaaaagcggacaagagccggc

SEQ ID NO: 51192 - RNA, 73 nt, Homo sapiens
agggaaggagaaggagggacgcaggcgcaggccaggcccgggcggggcacgggcgagaccaccagggcacccc

SEQ ID NO: 51193 - RNA, 87 nt, Homo sapiens
acaagaccgggaaggggaacggggccccaggaccccacaacaccagaacaaaaggcaggaaaaccagagacccagacacgcgaagga

SEQ ID NO: 51194 - RNA, 78 nt, Homo sapiens
ggcggggcgcaaaccgagacaagcaccccgaagcgccggaacaagcagaaagcacgaacaacgagaacaagacacgag

SEQ ID NO: 51195 - RNA, 54 nt, Homo sapiens
gcccgagaaagcgcgcagcggaagggcggagaacacgcggcggccgcaccggag

SEQ ID NO: 51196 - RNA, 74 nt, Homo sapiens
acagcgaacccgccaggagcgccaaaccacgggcaagcggcccaggccaaggggggcgcagggccacgcggggg

SEQ ID NO: 51197 - RNA, 77 nt, Homo sapiens
gcccggaccaccaaggagcagccgagacgccgaaagagcgacccggagcccggccgcggggagaggccggcagagaa

SEQ ID NO: 51198 - RNA, 78 nt, Homo sapiens
aagacaacaggcagcacaaccccacgggggaagggaccaaaacaggcacaaaagggaacaaaaagcaccgaagaggag

SEQ ID NO: 51199 - RNA, 69 nt, Homo sapiens
ccgcgcagcgcccccccagaccggaaacaggcacagaacagaaggaaaggacgaagagcccaggaacac

SEQ ID NO: 51200 - RNA, 77 nt, Homo sapiens
cccaagacacccagagagggacagccagggacccacgaccccagcgggccagccagaacgcaagaagaacccagacg

SEQ ID NO: 51201 - RNA, 58 nt, Homo sapiens
acaaagccagcaaccacagagggcgagcagagaggcagcagcaaggggggagcgccag

SEQ ID NO: 51202 - RNA, 89 nt, Homo sapiens
ccagccaccccgcaggacagccgacgaagcggagcaggggggggggagacgagacggaggaaggagcacacgacccacaggacaccggc

SEQ ID NO: 51203 - RNA, 56 nt, Homo sapiens
gggcccccacaaacacgacgccacgacaagcgggacacagagccacaaaagaggaa

SEQ ID NO: 51204 - RNA, 85 nt, Homo sapiens
cggcagcggagagccgagcccaaggcaagacccaaggcgacgaccgacaggggggaaaggaggcacgcggaccccagggccggcc

SEQ ID NO: 51205 - RNA, 78 nt, Homo sapiens
ggaaccgccccgagaggaaacacccccagaagagacacgagaggcgagggacgacagagcaagcggcagagggcaagc

SEQ ID NO: 51206 - RNA, 83 nt, Homo sapiens
caggacggccacacggcgcaggagcaagaaaaaggcaggcacccccgaacccacacaagaacagccggacacgcagaaagggc

SEQ ID NO: 51207 - RNA, 76 nt, Homo sapiens
ggggccagggaacccggcaccgccccaggggaaccaagagcccaggacaaagagaaagagcgccaaaaagaacaaa

SEQ ID NO: 51208 - RNA, 71 nt, Homo sapiens
caccagggaagcaccacagccaccacaccaagacaccaggggagaccggacacggaaagcaggcgaaacaa

SEQ ID NO: 51209 - RNA, 81 nt, Homo sapiens
cggccccgccccgcgcgcagcccccgccgagccgccccgagcccgccgccacacccgaggacagaagacggaagaaacgga

SEQ ID NO: 51210 - RNA, 58 nt, Homo sapiens
gaagcagagcgcacagcggcaggcacgcggagaccagaaagcgggcaacaccaaccga

SEQ ID NO: 51211 - RNA, 51 nt, Homo sapiens
aggaaacgagggacaacacagacccaccagcagagaagagagaaggccacg

SEQ ID NO: 51212 - RNA, 75 nt, Homo sapiens
gcagacgggcccgcgcacagagacaggacaaggaaggcccgccgaaggagaagggcaggaagacccagcaggccg

SEQ ID NO: 51213 - RNA, 72 nt, Homo sapiens
ggagaagaaggcccagagaggggcaacaagggaccaccacacgaaaccaaggaaaaaccgggaacagcagag

SEQ ID NO: 51214 - RNA, 68 nt, Homo sapiens
gaaagcgacaaggaacaagggagaaaggaaaccaaagggaaaaagagcgagaagaagagaggcggccg

SEQ ID NO: 51215 - RNA, 82 nt, Homo sapiens
caagaaagcagaaccagcagcaaaaggggcaaggggaaaagacaggggcagaggaaacccagcaacagacccaggcacccga

SEQ ID NO: 51216 - RNA, 78 nt, Homo sapiens
gacgggcggcgaacggcggaggcaggggccagacccagaggcacgcagggcaggaggagccaggcgagcagcagaagc

SEQ ID NO: 51217 - RNA, 69 nt, Homo sapiens
gacgaaggacacccccgcagcacccaaaaaagcaaggcccgagacggacgagaggaaagaggcaagacc

SEQ ID NO: 51218 - RNA, 58 nt, Homo sapiens
cgggccgcccgacggcggccaccggaacagaggcagcgggaagagcaccacaaggaac

SEQ ID NO: 51219 - RNA, 86 nt, Homo sapiens
gcccccacacccggccgaggggggagagagccagcccccgcagagcccccaggacagagcgggagccaccagcgccaaagggaagc

SEQ ID NO: 51220 - RNA, 74 nt, Homo sapiens
accaggaggggccaccaggccccccccgcgacaggagcgcgaaaggggaacccacagggggcagcgggaccagg

SEQ ID NO: 51221 - RNA, 46 nt, Homo sapiens
aacggaaagggaaggaccggacaccccaggaacacaacacgccgcc

SEQ ID NO: 51222 - RNA, 35 nt, Homo sapiens
ggaacaaagagagagaaggggagaagcagaccgca

SEQ ID NO: 51223 - RNA, 74 nt, Homo sapiens
aaggagcaagcacagcgcgagccagcccgaaacagggcagaaaagaacagacccagaagaagcgaaaggggaga

SEQ ID NO: 51224 - RNA, 51 nt, Homo sapiens
gagaccacagacacaccccagaggaccagaagaagaagaagggacagagaa

SEQ ID NO: 51225 - RNA, 54 nt, Homo sapiens
gagcaagcgaagaacccccaaacgacccaggggaggcacggggccaaaaaggca

SEQ ID NO: 51226 - RNA, 78 nt, Homo sapiens
aaggccggaaggaagggaaaccgggggccccggacaacccgagcagggcgggacgaccccacaacccgagcgcccaag

SEQ ID NO: 51227 - RNA, 55 nt, Homo sapiens
caagggggccgaagcaaccagaagccgaggccgccagcgccaagaaaaaaacaag

SEQ ID NO: 51228 - RNA, 67 nt, Homo sapiens
ccagcccaggcccaggccgcggccccccgcgcgcccgggaacgagaccagagcccagcccccccccc

SEQ ID NO: 51229 - RNA, 50 nt, Homo sapiens
ggcagacaaaagggccaaagaagggagagagggcaaggggggccacaccg

SEQ ID NO: 51230 - RNA, 55 nt, Homo sapiens
agccaagaggaggacagcgcacacagcaagcacgaggacgggccacacggggcga

SEQ ID NO: 51231 - RNA, 40 nt, Homo sapiens
aggccggaagacccaaagcgagagaccggccaccaaacca

SEQ ID NO: 51232 - RNA, 72 nt, Homo sapiens
acgccgcccggggcaggaaggaagagaaccgaagaagaaaaccaaaaacgaaaaagcaagggagagcacaaa

SEQ ID NO: 51233 - RNA, 59 nt, Homo sapiens
ggcacaccccacacaagcacgccaagaagcaacccaggcacccccaacaggcacccacc

SEQ ID NO: 51234 - RNA, 103 nt, Homo sapiens
aaaaggacgaacaaagcgccaaacccgcggaaccagcagaagaacagggccgggaggagcaggccgggaacagcagcggccgcgacggacgcccccccgccca

SEQ ID NO: 51235 - RNA, 41 nt, Homo sapiens
gcagaggacgggcaccaaagccacacgaaaacgacggcacc

SEQ ID NO: 51236 - RNA, 70 nt, Homo sapiens
cccgaccccgaagcgaagaaaaggaacccgacaaggagcccagccaccccggccgcggcagcaacgcagc

SEQ ID NO: 51237 - RNA, 46 nt, Homo sapiens
acaaagacccggacccaagccaaaggcgacagacacagcaccggcc

SEQ ID NO: 51238 - RNA, 89 nt, Homo sapiens
ggacgccgcccgacgccagcggagagagcgggagaagcggcgaggggcgcaagacagcccacccagaacgagaggagcgaaggccgagc

SEQ ID NO: 51239 - RNA, 76 nt, Homo sapiens
cgcggggagaggaacaacggacaagggaaagcagaaggccagagcagggaagaaggcacgggcacgcacagccgcg

SEQ ID NO: 51240 - RNA, 75 nt, Homo sapiens
ggaaaaggaagaaagcaggaaagagcacagaagaacaaggaaggccccaggaaccccaaagaggcccggaggaaa

SEQ ID NO: 51241 - RNA, 78 nt, Homo sapiens
ccgcccggcccgcccccaagacgcgaccaaacggaccagacgcaggaaggagcccgagggcgaggcccggcggcgacc

SEQ ID NO: 51242 - RNA, 59 nt, Homo sapiens
ggagacgagccgagcccagggccgcggggacaagagacaaaaggccacgcaagagagag

SEQ ID NO: 51243 - RNA, 83 nt, Homo sapiens
gcggaagcaacgccgccgccgccccacccggggcaggggccagggccaggacaagcccaaccagggaccaggccaaaaccaga

SEQ ID NO: 51244 - RNA, 67 nt, Homo sapiens
gcagggccagggcgcagacgccgggaaagagagggacgaaaccccagacacaagaaaaccagcaaac

SEQ ID NO: 51245 - RNA, 50 nt, Homo sapiens
aagagaggagggagaacacagaaaccggccccagacagaaggcagaggag

SEQ ID NO: 51246 - RNA, 82 nt, Homo sapiens
ccggcagagcagaggaagaagaccaacccaacgcacagcacgagacccgcagaccacgccagagcggggcccggcgcaccca

SEQ ID NO: 51247 - RNA, 74 nt, Homo sapiens
cacaaggcgaggcggaaagaggacagagaccaggggccacaacggaaaccaggaaaccgcagaagaaaaggacg

SEQ ID NO: 51248 - RNA, 72 nt, Homo sapiens
gggcccaagcccccggaagagggccggagacccagagccgggcgggaaagggcgccccaaaagaagcgccga

SEQ ID NO: 51249 - RNA, 80 nt, Homo sapiens
caccaccgcacgacaacacacgcccgaccaacaagaggaagggcaagacacagcagcagccaagcgcaggccgcgaggcg

SEQ ID NO: 51250 - RNA, 81 nt, Homo sapiens
cagacacacgcccacaaagcccagaagaagggcaccagcgaagagcagagaaagggggaggcggacccggcaacacgaacc

SEQ ID NO: 51251 - RNA, 86 nt, Homo sapiens
gggacccagacccggagcccagggaagcagccgaccagccgcggagccgggggcagaaacgggagcaggagaagaagccaggggca

SEQ ID NO: 51252 - RNA, 69 nt, Homo sapiens
ggcgcccccggagccgccccggaggagaagagacaacagaggaagaggcgccagacggagaagaaacac

SEQ ID NO: 51253 - RNA, 81 nt, Homo sapiens
gggaaccgggccccgggaaaaggaacccaggcaaacagcagcccagcccaaacaccgaaggcgacagacgggcaagagcag

SEQ ID NO: 51254 - RNA, 78 nt, Homo sapiens
acgggcaagcggggccgcaagcaggcaagacccaccccacggacccaccgcgcagaaaacacgaaccccggaaggaag

SEQ ID NO: 51255 - RNA, 60 nt, Homo sapiens
cggaagaaaagcaacggaaacacaagcgccaagaaaaccagacgagagacagaagacgaa

SEQ ID NO: 51256 - RNA, 82 nt, Homo sapiens
agcaacagccaccaagacaccccgaccagcacacacgcaaggagacagcacaacgaagagaagcgcccaacgacggagaaag

SEQ ID NO: 51257 - RNA, 71 nt, Homo sapiens
gggcacgccccgagccgcccgccgccgaggaccaaaacagggaaggaagaaccaggagggaaaaccccagc

SEQ ID NO: 51258 - RNA, 86 nt, Homo sapiens
cccagcggagccgagcaaggagcgggccgcgcggagccggagggcgggaggaacagacacgcggagcggcgcaaaccggcacggcg

SEQ ID NO: 51259 - RNA, 96 nt, Homo sapiens
ccaggcccaggccgcggccccccgcgcgcccgggaacgagaccagcggcggagaaaccaccacaaacacgaggccagcaacgaccaacaagacaga

SEQ ID NO: 51260 - RNA, 68 nt, Homo sapiens
ccgacgcccgcgccggcgccccgggaaaacagcaagagagcagacgccaaagagacggccgggacaga

SEQ ID NO: 51261 - RNA, 71 nt, Homo sapiens
cagggaacacgaccccaagggaccaggcccggagacgcgacgggcaccacagacgccaccccgccagcgag

SEQ ID NO: 51262 - RNA, 77 nt, Homo sapiens
acgccagccgccaggcggcgcagggacaacgaacgaaggagacacacaagaacaacgacgagaagagaaaggaagaa

SEQ ID NO: 51263 - RNA, 126 nt, Homo sapiens
aaagcgcgccgcgccggagccggagaacggccaggcggccccgagcggaacggagaaagcgagggaagaggggaagagccagggaagaaccacccgcccgacagcaccaacggagcaaaggcacaa

SEQ ID NO: 51264 - RNA, 77 nt, Homo sapiens
agaacacccggggaagggagagaccacaaggacgcgcgcacgagggcaaagaaaaaggagagaaaaagaggcaaaac

SEQ ID NO: 51265 - RNA, 74 nt, Homo sapiens
aggagccagagaccaaagccacaaaaaaaaggggacaacaccaacaagaacaagcagaaagcacgaacaacgag

SEQ ID NO: 51266 - RNA, 71 nt, Homo sapiens
gaaacacagaaagaccccaaggacacagagcacaagcccgggaacggcacagggaggggacagaccaaccg

SEQ ID NO: 51267 - RNA, 55 nt, Homo sapiens
cccggaaccggcaaacaaggcaggcaaggccacgacacaggagggcccaaacccg

SEQ ID NO: 51268 - RNA, 45 nt, Homo sapiens
ggccaaccgccgagacaggaaggacacagggaacacacggcggag

SEQ ID NO: 51269 - RNA, 84 nt, Homo sapiens
caaacccccccacgacaccgaagcagcgacggcacagcgggaagaaggacaacaaaaacacggacccaacccacaaccggcgaa

SEQ ID NO: 51270 - RNA, 69 nt, Homo sapiens
gacaagcagacccaagaagagcgacgggggcgcaacaggccacagcccccggcagcgagcgggcgggag

SEQ ID NO: 51271 - RNA, 79 nt, Homo sapiens
gggacggcgccacgcaccggacgacgcccggcgccagcacacgcagggaaaggaggcagcccgagagcagcacccaccg

SEQ ID NO: 51272 - RNA, 71 nt, Homo sapiens
aagccaaccaacgccaaagaagcccgagagagacgcagcgcaaggccgggggaggccacaaaacaaagcga

SEQ ID NO: 51273 - RNA, 79 nt, Homo sapiens
cccggagagcccagccagcgcccggcagcccgacgcgagccgccggagcgaacgccgggacaccacagcaagaggaacg

SEQ ID NO: 51274 - RNA, 49 nt, Homo sapiens
acgccccaccgccgacgcccccagccaccagcgagccgagcaaggagag

SEQ ID NO: 51275 - RNA, 59 nt, Homo sapiens
aaaagagcagcacccaagcaaaacagacgaggacgcgcacaggaaaggacgcggaacaa

SEQ ID NO: 51276 - RNA, 59 nt, Homo sapiens
cccaggagaagcgggcagcagccagaagaggacgagcagcgaagccagaaggaaaccgg

SEQ ID NO: 51277 - RNA, 100 nt, Homo sapiens
gcccggaaaaccagaccagaaacggaggagcccgccgaagcagccggacggaccccaggggcagagacgccacagggaccagccacgggccagggcgcgg

SEQ ID NO: 51278 - RNA, 52 nt, Homo sapiens
ggcccaccggcaaccacaagccaggaagaagaccgcagccagaccacgcgag

SEQ ID NO: 51279 - RNA, 75 nt, Homo sapiens
ccgcccggacaccacaccgaaaagcgcaacagacaaggacagcagccccggaaggagggagaggagagagcggag

SEQ ID NO: 51280 - RNA, 72 nt, Homo sapiens
gaggaccagagcaacacaaaagccaagggcggcaggcccccggccccagacgcaagggcaaaggcaggcaag

SEQ ID NO: 51281 - RNA, 69 nt, Homo sapiens
gaagggcccaacacccacagaggagagggaccggaagcccgggaacgaagaagcacccggagagccgac

SEQ ID NO: 51282 - RNA, 56 nt, Homo sapiens
ggaggagagccacaggcggagaaggccgaacggccacagggacaggaacccacagg

SEQ ID NO: 51283 - RNA, 87 nt, Homo sapiens
gcaagcggcccccaaccgggagcggccacggcggaggacgacgcgccaaccagacgcgcgggagaggagcagccgcgcaagggggaa

SEQ ID NO: 51284 - RNA, 51 nt, Homo sapiens
gccgggaaccaggacgcacagcccaagaagaagggggaggaaaagcccgcc

SEQ ID NO: 51285 - RNA, 82 nt, Homo sapiens
ggaccggccgagaggaagacgagccgggaggaacggcccggaaacaggaggacaacccaggagaaacgagagggacagcaag

SEQ ID NO: 51286 - RNA, 84 nt, Homo sapiens
gccgccgccgccgccgcgggcgccagaaggaagaggcggacggaggagcaggcgagaagagaagaggcaagaaagacacaaaga

SEQ ID NO: 51287 - RNA, 80 nt, Homo sapiens
aggaggcgggggcgccggcagaggaccaggcaccaccggccccggaaggcacgcgagaaggggagggggagaaagaagag

SEQ ID NO: 51288 - RNA, 82 nt, Homo sapiens
gccacagaagaaagcgcagcagacagggccgcgccacacaggcggaggcaaggcacagcaagccacgcaacccagccccaca

SEQ ID NO: 51289 - RNA, 76 nt, Homo sapiens
gccaagggacaccaaagccgccgggagcagaaccaagggccccggggccggcgaagcccacacaggaaggcacccc

SEQ ID NO: 51290 - RNA, 80 nt, Homo sapiens
ggcccaagcgcgcaccgcggcgccgacacaaacgccaagggacggaccacgcccgcaccaggaaaccaccccacccaacc

SEQ ID NO: 51291 - RNA, 80 nt, Homo sapiens
aacacagacgggccaaggagaccaaggacacccaaagccagaaagcggccggaccggcccagcaaacccgagagggaaga

SEQ ID NO: 51292 - RNA, 42 nt, Homo sapiens
ccccagaggccgggccgcaccccccccccggaaagagccgcc

SEQ ID NO: 51293 - RNA, 73 nt, Homo sapiens
ccaggaacccggacagaagccagagggccgggaccggagggaaaacacgaggcgcaccacccagcaccccaaa

SEQ ID NO: 51294 - RNA, 78 nt, Homo sapiens
gagcgagcggcgcgggcccagaccgccgggcaagcaccagagaggggcggggaacagaccagggaaggggaggagaag

SEQ ID NO: 51295 - RNA, 51 nt, Homo sapiens
cccaagacaaaaaacgaccccagaagggaggacagccaggcagagccacac

SEQ ID NO: 51296 - RNA, 85 nt, Homo sapiens
ccggcgggacgcgagccgccccgaacaagcagggcggcggggaccacagaaagagcggccgaccaccaggcacccacggcacgcg

SEQ ID NO: 51297 - RNA, 65 nt, Homo sapiens
ggccgccaggcgccaacaggaccgggagagaccggcggacagaaggagaccgcaggaaacacaca

SEQ ID NO: 51298 - RNA, 39 nt, Homo sapiens
aaccagagaggaagacaacgagacaaccgagcacaaaaa

SEQ ID NO: 51299 - RNA, 78 nt, Homo sapiens
gccacccgggcccacgaggcagcgcccagccgcgagcacggggggcccccagaaacacacagccccaccgacacgcaa

SEQ ID NO: 51300 - RNA, 80 nt, Homo sapiens
cccaaggaagcggaagccaagaccggagaggcgccggggacagcggcccccacaaaaaaaacaacggccaaagcacagcc

SEQ ID NO: 51301 - RNA, 109 nt, Homo sapiens
gaagaaggccgacaaggaaggaagaaggcgcacaccccagcgcgcaaagcgcgaggggcgagggggaccagggagaggacgcccaccaggaggcagaggcacagaagca

SEQ ID NO: 51302 - RNA, 72 nt, Homo sapiens
gcagccagcaacaggggacagccaaaggacagacagcacagaagcgccccagaaacggcgagcaaacagacc

SEQ ID NO: 51303 - RNA, 73 nt, Homo sapiens
agcgaagaacaaacacccgagcgcgaggaacccgcgcccagaagggaaggccacggacggggaaacgcaaggc

SEQ ID NO: 51304 - RNA, 59 nt, Homo sapiens
caggaaacacaagcccgccgggcccaccagaaaacacgaaggagaagcgcaaaggaaaa

SEQ ID NO: 51305 - RNA, 74 nt, Homo sapiens
gcccgaacggggcaaaaaggcgaccgaagcgccggccagaccaggcgagccgagagagaggacaccgagccaga

SEQ ID NO: 51306 - RNA, 75 nt, Homo sapiens
agcggaagccgccgccccgggagacaagacccagcagagagaaaacggcacaaggaagacacagcccaaggccca

SEQ ID NO: 51307 - RNA, 37 nt, Homo sapiens
gagcgggaccggccggaggaaccacaagcagcaaggc

SEQ ID NO: 51308 - RNA, 119 nt, Homo sapiens
gggccgccgacgagccgcggggccgccccccgaagcccagggagagcaaggcgcgcggcgacccgagcggccgccaccccagccgcagaggggaagagcgccgacgccaggacggagag

SEQ ID NO: 51309 - RNA, 99 nt, Homo sapiens
cagaacagccagaccaaagcggcccggagaaagccaagggccgagcaacggaaagggcccaccggaggcaacaggaggcaccaagcggggcggaacagg

SEQ ID NO: 51310 - RNA, 77 nt, Homo sapiens
gagaagcacgaaagcgggagagggaccggaacggcggcgacaaggggcccgaacagagggggaggggacagccgaaa

SEQ ID NO: 51311 - RNA, 82 nt, Homo sapiens
ccaggcccacaaccagcccagcagcagcaagcaggaaagcagaggggagcgaaagccacaccagacaaacaaccacccagca

SEQ ID NO: 51312 - RNA, 78 nt, Homo sapiens
agagaaagggagagcacaggagcgagacgcaaccagagccagagccacccgacccgcccccgggcccagcagaaaccc

SEQ ID NO: 51313 - RNA, 79 nt, Homo sapiens
gaagcgaacaaaaagcagcaaaccggaccaccccgaagaaagcacaggccagaacacccagcgaaccaacagaccacgc

SEQ ID NO: 51314 - RNA, 73 nt, Homo sapiens
acccgagaccaaagccagaaggcggagacccggagcagagcacagccgacccagcgcccgcacgcaaggggag

SEQ ID NO: 51315 - RNA, 75 nt, Homo sapiens
ggccgaaaagaaacccagaaggccgaaaggcgccagccaagaacacaccaagccagcaagaacaacacccaagcc

SEQ ID NO: 51316 - RNA, 59 nt, Homo sapiens
ggcaacggcggggcgcccggagcccgagagcagaaggagaaacgggggagaaagccagg

SEQ ID NO: 51317 - RNA, 53 nt, Homo sapiens
cggggcggggcccaggagacggaggaagaagagagggcgaaggaggccacaca

SEQ ID NO: 51318 - RNA, 52 nt, Homo sapiens
cgagacgggagccccggccccggggccacccccaaccaggaccaaagacgac

SEQ ID NO: 51319 - RNA, 72 nt, Homo sapiens
aggcccaaccgaagaaaacaagacagaccagacggaagacagaaaagaaaagggaaacccagcaacaacaag

SEQ ID NO: 51320 - RNA, 84 nt, Homo sapiens
cgcggggcgcagacgaaaggcgccgccagcgaaagggccagagcagaggcggagaggggcagacccagggaccgaaacgagaaa

SEQ ID NO: 51321 - RNA, 81 nt, Homo sapiens
gggagaaggcgcaacgcggcgcgcagcaccgggaccggaggcccagagcgacggacggagaaccaggcccgcagcagcagc

SEQ ID NO: 51322 - RNA, 76 nt, Homo sapiens
gaccagccggccgccccaggagcaaaaaaaggccccagccccagccaaaccccccacacgaaccagcaagggaggg

SEQ ID NO: 51323 - RNA, 70 nt, Homo sapiens
aagaagagagccccccagggacgggaccgacagaaaaaaaacaaccgaacccagacagaacaccagaaac

SEQ ID NO: 51324 - RNA, 66 nt, Homo sapiens
gcaggcaagcgaaaacgcgagagaaggaggcgaagacgcagcgaagaaggaaagcgacaccaagca

SEQ ID NO: 51325 - RNA, 71 nt, Homo sapiens
cacgcaagcaggcaaccgaaacaggcagaccgaccaaacagggagcagcggacaggagacaggaaccaaga

SEQ ID NO: 51326 - RNA, 38 nt, Homo sapiens
gggaaggcacacagagacaggacagccccagagcagaa

SEQ ID NO: 51327 - RNA, 58 nt, Homo sapiens
cccacaaggccccccgacagacccagagcgaggacgcgagaaagaaggaacccagcaa

SEQ ID NO: 51328 - RNA, 74 nt, Homo sapiens
cccacccgcgggccgcggcgcccggggaaagccgggccccgagggcggaccgaggaaacagaaccgaagccgga

SEQ ID NO: 51329 - RNA, 79 nt, Homo sapiens
gccagcagcgaggacgagagcgaggaggggagagggcacgcacggagaaaggaagacagcaaccgggaagccagacccc

SEQ ID NO: 51330 - RNA, 81 nt, Homo sapiens
ccccaagggcgggaacagcgccagcaaagcacggacagagaaggaggagaagcgagccaggccagcaacaggcgggcccag

SEQ ID NO: 51331 - RNA, 80 nt, Homo sapiens
agacacgcgaagagcgaagagagagaaagcccaggggcggggccccagacccacgaaaaaggaacaccagaagccagcac

SEQ ID NO: 51332 - RNA, 89 nt, Homo sapiens
gaggagccaacaagcgcacggagccccaaggggagaaagaagacaaggaaagaacacgaacgagagacagaaggaaaagacgacaaaaa

SEQ ID NO: 51333 - RNA, 70 nt, Homo sapiens
aacgccccaacacgcgagcacacacaacgcgagcacacccccagaagccaacgagaagcaccggagacaa

SEQ ID NO: 51334 - RNA, 77 nt, Homo sapiens
accagcagccggagaccaagagaaaaccggacagaaccaggcgggcagcgaaaaaagacagaaaaggagacgaaaag

SEQ ID NO: 51335 - RNA, 67 nt, Homo sapiens
cacagaccggagccaccgagccaaaggacagccagacaagaccccaacgaagggccagaaaagggag

SEQ ID NO: 51336 - RNA, 51 nt, Homo sapiens
gcagacaggacggagcagagcacaaaccaggaagaaaaccaccacgacacg

SEQ ID NO: 51337 - RNA, 65 nt, Homo sapiens
cgcaggcagacaaaagggccaaagaagggagagaggcaggaacagaaccggagcaggccgagagc

SEQ ID NO: 51338 - RNA, 73 nt, Homo sapiens
cacacggaccgagagaggggacccggacaagcaagggggaaaaagcgcaagggcaaaaaacgacacagagagc

SEQ ID NO: 51339 - RNA, 77 nt, Homo sapiens
gcaggagcagggagcgcaaaagcgaaggcaccgccaccggaaaccaggaaaagggaggaacacggccaaccacaaag

SEQ ID NO: 51340 - RNA, 79 nt, Homo sapiens
caaccaaaaagaaaccagcaacaaaaagaaagcgcgaaggcaaagcagaggaagaacagaggcagagaggagggcaaaa

SEQ ID NO: 51341 - RNA, 61 nt, Homo sapiens
cgagagcgggagcgggcgggccagaaggccgcgggaaaggcaaaaccccaagaggggacga

SEQ ID NO: 51342 - RNA, 72 nt, Homo sapiens
gcgaccaaggaggagccgccagaacgcggaagcgaggcggcaccaggacgccgaaaagcgaccggacgcagg

SEQ ID NO: 51343 - RNA, 61 nt, Homo sapiens
acaccgacgcgccacgcggagcccggaaaagcccagaaacagagaagggaagggacaaggc

SEQ ID NO: 51344 - RNA, 77 nt, Homo sapiens
acagcacgggcgggggacgggcagaaaaacagaacaacaaccagacgaccgaacggacagaccggaaccaagccgga

SEQ ID NO: 51345 - RNA, 68 nt, Homo sapiens
cggcaaaagagcccccagagagaaagcagaagcacccgagcagggaaccccggcggaggaagggagcg

SEQ ID NO: 51346 - RNA, 77 nt, Homo sapiens
agaagccagccgacaagggcagaacgaacaggaacaaagccagacgaacaccagaggaagacaaaagaagagagccc

SEQ ID NO: 51347 - RNA, 82 nt, Homo sapiens
cggggaaaaggcggacgggaaggcgggagacgagaagccgaaaagcgcagcgagcggagccgccggagacggaccagagacg

SEQ ID NO: 51348 - RNA, 75 nt, Homo sapiens
agcgcggggacggaaccgggacccgggcgcccgcgcccgccccaacccagccacagaggcaagaacgcacaaaga

SEQ ID NO: 51349 - RNA, 75 nt, Homo sapiens
caccgcgggcggcgccaccaccaggacggagaaggaccggggggcacacccagggacaagaaaaccaggaagaaa

SEQ ID NO: 51350 - RNA, 42 nt, Homo sapiens
caggaaccaccaggacagagcgaaccgagaggaagggcagcg

SEQ ID NO: 51351 - RNA, 89 nt, Homo sapiens
ccggccggagccccagggccgaggcgcacaggcacagcaccaagccacggccccaccaggagccaggcagcgccccaagaacaagaagg

SEQ ID NO: 51352 - RNA, 32 nt, Homo sapiens
gagagcccagagacagacgcaaacagcagacg

SEQ ID NO: 51353 - RNA, 85 nt, Homo sapiens
ggaacccggcgggcgaggaaggaggaggcacccacaggcgcgggaggagagcaaaggaagagagaagggcacagaccaagacaac

SEQ ID NO: 51354 - RNA, 77 nt, Homo sapiens
acagcaagacccaggaccccggaagccagaaaggaagaagaaccgcagagaggaaaggcgccacacacccccagcgg

SEQ ID NO: 51355 - RNA, 87 nt, Homo sapiens
ccaaaccagcagccggggaaagaagaaaaagcagaagggaagagaggaccaaggagccggcaagagaagaggaaccacaaagaccca

SEQ ID NO: 51356 - RNA, 81 nt, Homo sapiens
ggcaccggcggggggcacgaggaaagccagagacgcgcacgaaacgacgaagaggcccgaggacagaggagcaaaggaggg

SEQ ID NO: 51357 - RNA, 77 nt, Homo sapiens
gggcaaccagaggggccaacggacgacagggaccagaccccacaagaaaacacacaaccacaggcccaagcaaacac

SEQ ID NO: 51358 - RNA, 55 nt, Homo sapiens
cacccaggcggcccggcagccaggaggggccccacacccacccacgagagggcaa

SEQ ID NO: 51359 - RNA, 83 nt, Homo sapiens
cccgccagggagcgcgccccggcaccgggcccccggagggcgggcccaggcggcgagcggcaagcccggagaaaacaggaccc

SEQ ID NO: 51360 - RNA, 80 nt, Homo sapiens
gaaaagcagcgccaagcgcagcagagcaaagccgaaacggagcggcggacaccagaagagaaaagggcaagccagacgca

SEQ ID NO: 51361 - RNA, 96 nt, Homo sapiens
ccggccagaacaacgggaacaacagacagggccacgaaaagggaaggcaggggaacccgggcagacacccacaagcaagagaggagaacgaacccg

SEQ ID NO: 51362 - RNA, 69 nt, Homo sapiens
gccggcgagcgcagcgcgaccgggaggcccagaacccaggacgagaaaaaacagagcggaacaagcggc

SEQ ID NO: 51363 - RNA, 76 nt, Homo sapiens
gagagaaaaaacccagcgagaccgggccggaacgaaagcaggacggaggagcgaccaccggacaggagagacaacg

SEQ ID NO: 51364 - RNA, 77 nt, Homo sapiens
agacaccgcaaaaaaaagaagaccacgcagagggaaggcgaaccccaaagaagaaaaccagcaccaagaccaggcac

SEQ ID NO: 51365 - RNA, 81 nt, Homo sapiens
agcgcgagccaggacccgcagggccggaaagagggcgggcccgcacggagcgcggggagaaaccggagacacggcaaggcg

SEQ ID NO: 51366 - RNA, 69 nt, Homo sapiens
aggcacagaacgaaagggcggagaacggaaaagcaccaggaagcagagaggaccgcagaagggaaggag

SEQ ID NO: 51367 - RNA, 66 nt, Homo sapiens
gcagggccacggagcccacgccccggaccggggaaacaagcagaccggaagaccgacggaagacca

SEQ ID NO: 51368 - RNA, 72 nt, Homo sapiens
gggccaacggcggcgggagggccccaaggcggcagccccgaccgacggggcaacgcgaagaaacaccggaga

SEQ ID NO: 51369 - RNA, 76 nt, Homo sapiens
ggagcagggaagacgccgcgccaccgagccggaccggagacggggccaacaggaaaagaaggaggccagcgggaca

SEQ ID NO: 51370 - RNA, 85 nt, Homo sapiens
cgcgggccgaccgggcgcaccgaccaggccccaaagccccaaggcgacaagaccggaccggcgcggggaggcccagcccgccgca

SEQ ID NO: 51371 - RNA, 76 nt, Homo sapiens
aggagagagcgaccagccgacgggaagaggagcggaaaaacaagcaaaagaaaaacagggaaagaggagaaagaaa

SEQ ID NO: 51372 - RNA, 77 nt, Homo sapiens
ggagaaaaagacacccaaggggccgacacaacaggcagggagacgggcaaggacgcgacaaagagggggccgaggca

SEQ ID NO: 51373 - RNA, 68 nt, Homo sapiens
aggaccacgacggccaaaggggagcgaaaacaaggcacaaggccgacccagagaaacccacccccaga

SEQ ID NO: 51374 - RNA, 73 nt, Homo sapiens
ccagaaccgcaaagaagaacaccaagaaccagggcacggaagaagcaaacaggagcacaagcaccgaaaaggc

SEQ ID NO: 51375 - RNA, 40 nt, Homo sapiens
gccacgcaagccgcccccaggagcggacgaacggaaggaa

SEQ ID NO: 51376 - RNA, 79 nt, Homo sapiens
gccaacggcggggcagcaaagcccacaggcaagacaagagcacacagggcacgagagaggggcaagcgaacaaaccccg

SEQ ID NO: 51377 - RNA, 82 nt, Homo sapiens
aaggccgggacccggccccggcccacaggggggggcaaacccgagagaacgggccagggcaggacagcagcccgcaacaggc

SEQ ID NO: 51378 - RNA, 73 nt, Homo sapiens
ggagagccgcagacccacaccagcccacgggcacggcggaaaccggaagcccccagacacgaaacagaccagg

SEQ ID NO: 51379 - RNA, 74 nt, Homo sapiens
acaggacccagcgcgggacagccaggccagggcgaccgggcaaggaacgggagacgcaggaaaccaaaggagag

SEQ ID NO: 51380 - RNA, 42 nt, Homo sapiens
cccaaacccaaagggccggagccgcgaagagcaagcagaggg

SEQ ID NO: 51381 - RNA, 79 nt, Homo sapiens
gcggggcacccgcaggggcagacagcacaaccagcgaggaacaaccgcaccagaccaacagccaccgaggaggaccagc

SEQ ID NO: 51382 - RNA, 77 nt, Homo sapiens
cggaaagccgaccagggaacccagacgacaggcagggcacgagcagccgggggaagcagcggcagaaccacagcaca

SEQ ID NO: 51383 - RNA, 67 nt, Homo sapiens
cggcggccaggggcgcgaccccccggagcagcccaggggcccgccggacgggaaaagaagccccccc

SEQ ID NO: 51384 - RNA, 69 nt, Homo sapiens
agcggagcccaacgaaaccgaacaggcagaagagacaacacagaaaccagggcggaggcaggaacagca

SEQ ID NO: 51385 - RNA, 51 nt, Homo sapiens
agggccccgcccggcggggaagacaccacgccacccaagagagagcaaaaa

SEQ ID NO: 51386 - RNA, 93 nt, Homo sapiens
gagagcagccggcagggcacagcagagggcccgccccagcccgggccgccacccgcagcggaagaaaacacgaaccccggaaggaagagcagg

SEQ ID NO: 51387 - RNA, 84 nt, Homo sapiens
gccaggggaggaggagcgcggaggcgaccgcaggcgacaccccaagagggccgccaccacgaggagcaacccccaaaagagccc

SEQ ID NO: 51388 - RNA, 73 nt, Homo sapiens
ccagaaccgcaaagaagaacaccaagaaccagggcaaggccagagaaggcgggagaaagacacgaaccacaga

SEQ ID NO: 51389 - RNA, 82 nt, Homo sapiens
ggagcacccagaagcagggacagggagcggggggaggaccagaaacaggagaacgccgcgccgacacgggcaacaggagcgc

SEQ ID NO: 51390 - RNA, 79 nt, Homo sapiens
cggacggcgcgcgcccgaggcgaggaggagcgcggcggcggaaagagaaaaggccccccccaaagagccgagaccgagc

SEQ ID NO: 51391 - RNA, 85 nt, Homo sapiens
gggcgggggagcggcagcggcggggcggggacagccggcagcgccgcccccgcggcaaaggggcaaacccaaaagacacagaaac

SEQ ID NO: 51392 - RNA, 81 nt, Homo sapiens
gcaaacacgggaaagaacaagggagggggcaggggggcggcgcgcccccccaggggcaggggggagaccccgaagcccccc

SEQ ID NO: 51393 - RNA, 82 nt, Homo sapiens
ccgcgaccacccggaggagcccggcagagcgcgacgggagcggcccgcggcgagagaggcaaaaagaaaccccagggccgga

SEQ ID NO: 51394 - RNA, 71 nt, Homo sapiens
cgcgcgccaagccgcacgcaaccaccgcccggccacaccaggacaccacgccacccaagagagagcaaaaa

SEQ ID NO: 51395 - RNA, 57 nt, Homo sapiens
ggcgcccccggagccgccccggaggagaaggccaccgggcaacagacggacaaaagg

SEQ ID NO: 51396 - RNA, 75 nt, Homo sapiens
aacaagaggaacccgcacagaagaccacgggagaaacaaagaccacaccagccaaacggcaagacgcagcaagaa

SEQ ID NO: 51397 - RNA, 78 nt, Homo sapiens
gaaggaccaagaaccagcaaaaggaccaaccccgaacgcaggagcagcgaagaccgaaagacgcagccaaagaagggc

SEQ ID NO: 51398 - RNA, 74 nt, Homo sapiens
agcggagcaaggaaaccggagaggcggagccacaagcacgcggaagagccaggacagggaaagacggccgcacc

SEQ ID NO: 51399 - RNA, 76 nt, Homo sapiens
aagaccccggcccagaagacgaacgccaaagcgagaagggagacgacagggaaaggaggacaaaaggaaaaaaaaa

SEQ ID NO: 51400 - RNA, 69 nt, Homo sapiens
gaggaagaaggagaacagcaacagacggcggggccccccgggcagggcggagaacggaaaagcaccagg

SEQ ID NO: 51401 - RNA, 72 nt, Homo sapiens
gaggcagggcgcgagggcgggggcagcggcaggccaagaaaccagcaccagaaagccccgggaagaagccca

SEQ ID NO: 51402 - RNA, 76 nt, Homo sapiens
gcgcggaagaggggcggagcccaccgcgagaagagcaagacagggggccgggaaacaccccagacaaacccagacc

SEQ ID NO: 51403 - RNA, 77 nt, Homo sapiens
gcggcgggcaggagagcgcgcgaacccaggcagagccgggcacagaagcggcgggcagaaggacagcgaccaggcgg

SEQ ID NO: 51404 - RNA, 75 nt, Homo sapiens
cacaaaggaaaccaaaggccggagaggaacagcgccaccaggcagaaggagggcgcgagcgccgcaggcccagaa

SEQ ID NO: 51405 - RNA, 73 nt, Homo sapiens
gcacaggacggccgcaggaacaggcaagggcgaggaagcaggcacgcaagaagaaggcacaacacgaaaggag

SEQ ID NO: 51406 - RNA, 86 nt, Homo sapiens
cggcgccggcgcgggcccgggccccgagcgcccgaacaggacgagaacccccgcgaaccagaggaacccagcgagcgagagcggac

SEQ ID NO: 51407 - RNA, 80 nt, Homo sapiens
gaaccacacgcaccgacgcgacgaacccgagcaaccccgagaagagaagaaccccaaggccggaacagcccaaggagaag

SEQ ID NO: 51408 - RNA, 34 nt, Homo sapiens
ccaaggaggcccagcgacacaagacacccaagaa

SEQ ID NO: 51409 - RNA, 104 nt, Homo sapiens
acaaaaaggcaaaagaagaaaggggcaaaacaaaagaaggaagaggggacccaacaagccccaggacagaaggaaagcccgcacaaagggcgcgcgaggaaagc

SEQ ID NO: 51410 - RNA, 73 nt, Homo sapiens
agcccaaggacacaaggaaagacacaggaaacgagggaaagagcacggaccgcggaagcaagaagcagccagg

SEQ ID NO: 51411 - RNA, 72 nt, Homo sapiens
gagcagccagaggagggccggaccggcggggcccgggcaagaaccggaagcgacgaagcagaaagggaacaa

SEQ ID NO: 51412 - RNA, 79 nt, Homo sapiens
accacccaaaccccccaagaaggagacagggaaacgaaaaccaccgggcaccacgagcccacgagagaggacagcccca

SEQ ID NO: 51413 - RNA, 78 nt, Homo sapiens
gaccaggcaccggagaagaacaagacggccccggagcgccggcaggaagcggagaaagcaagcagccaccagggagag

SEQ ID NO: 51414 - RNA, 69 nt, Homo sapiens
gcagcagggccagcagagaaagaacagagcccaggcccagccagcagagccacgccagagcaccgggga

SEQ ID NO: 51415 - RNA, 72 nt, Homo sapiens
aaacgcaaaaaaaagcaagaggcaggccaaagagagcagggagcgaagacagggaagaaggggggggaacgg

SEQ ID NO: 51416 - RNA, 59 nt, Homo sapiens
aagaccagcaccggcccgaaacgccgaaaaacccaaggagcagagagaacgggacacgc

SEQ ID NO: 51417 - RNA, 72 nt, Homo sapiens
gaggccagcgcagcggggccgcgccagaacagggcgccacaggagccgcagaagcaaaggcaccgccaaacc

SEQ ID NO: 51418 - RNA, 38 nt, Homo sapiens
ccaggggccgggagggcgccagcacagggaccagcagc

SEQ ID NO: 51419 - RNA, 60 nt, Homo sapiens
ggggacaagcgcgcagacgcagggacacagaaggccacccccacccccaccggggcggca

SEQ ID NO: 51420 - RNA, 59 nt, Homo sapiens
gcgcgaggggcgccgaagcgagggccccccaaaacgcccagggaggcagcggaacaaga

SEQ ID NO: 51421 - RNA, 78 nt, Homo sapiens
caaaaacgggcggacacaacaagcgcaacaggaccagcaaaaaaagaacccaacacggaaggacccacaagaccaagc

SEQ ID NO: 51422 - RNA, 51 nt, Homo sapiens
cccgcaggaggaggcacgccccgggcggcacgggcccccgcacccaggcgg

SEQ ID NO: 51423 - RNA, 77 nt, Homo sapiens
gccgggcccgcgcgcccggccaagaggcaaaggggaggacgcagcaaaccaccagaagggaggccaacagacccaac

SEQ ID NO: 51424 - RNA, 58 nt, Homo sapiens
cgcaagagaaaacgacgaacagaacgaacagaaagagaagcgacaaccgagcacaaaa

SEQ ID NO: 51425 - RNA, 91 nt, Homo sapiens
caagagcggccccgagagccgcgccgcagggcgcccggccgccaggccagcggggaggggcgaccccggggcccggccagcacgaccgagg

SEQ ID NO: 51426 - RNA, 55 nt, Homo sapiens
gaaacacacagaaccaacaggaagagagcagccaaccaggggcaccagcgagaaa

SEQ ID NO: 51427 - RNA, 114 nt, Homo sapiens
ggccccgccccggcccgagagaaccgcggcagaagccgagcaacaccccggccaccgacccacaagacaagcagaccggaagaccgacggaagaccacaccccgagggagccca

SEQ ID NO: 51428 - RNA, 72 nt, Homo sapiens
ggagcgagagcggagaagcgggaggagaccacccaaacgcggcacgggagaaggagagaacggggacaaggc

SEQ ID NO: 51429 - RNA, 61 nt, Homo sapiens
aaggccagaacaaaaaaggggccaggaaaaccaggaaggcacaacaacacggccagagcgg

SEQ ID NO: 51430 - RNA, 79 nt, Homo sapiens
ccagcggagccagcacccccacaagcagcaggcaaagagccaagcgaccacaacgaagagacacaggaagaggcagaga

SEQ ID NO: 51431 - RNA, 39 nt, Homo sapiens
gaggagcaggcgagaagagaagggccgggaggaacaagc

SEQ ID NO: 51432 - RNA, 73 nt, Homo sapiens
gcaaagaacacgggccacagggagaaaagcgagaagccgcagcaagcgggcggcaaagagagaagagagcaga

SEQ ID NO: 51433 - RNA, 74 nt, Homo sapiens
gaaagcgacaagggaggcgccgccagcggccgggaccgaacaggcgggaaagacaaggagccgggccgagaaac

SEQ ID NO: 51434 - RNA, 63 nt, Homo sapiens
ggcacgcccagagcaagaagggcgacaggccggccgcaaacggccgcaaaaccaccggagaag

SEQ ID NO: 51435 - RNA, 68 nt, Homo sapiens
cccgggggcgccaggcgaccggagcgaacgccacgccggggccagcgcgggccgccagcggcggccac

SEQ ID NO: 51436 - RNA, 41 nt, Homo sapiens
accagagagcaaagccgaggaaagacgaagcggcggagagg

SEQ ID NO: 51437 - RNA, 75 nt, Homo sapiens
ccgagacggaaaaaaacaggcgacggaacgaggagggaggccaacagacccaacccagaaggcaccaaacggagg

SEQ ID NO: 51438 - RNA, 67 nt, Homo sapiens
caccaagcacccaacagaagaagagggaggcagaaacagcagccaagacaaaaacagaacaacaagg

SEQ ID NO: 51439 - RNA, 74 nt, Homo sapiens
caagaagaggcccgacagagagccaccacaggaagcgcggaaggcgaggagagcagacccgaccgagaacgaca

SEQ ID NO: 51440 - RNA, 60 nt, Homo sapiens
agacaagacgagcccaccacggacagcaaacagagccgaggaaggcaccaggagaggagg

SEQ ID NO: 51441 - RNA, 83 nt, Homo sapiens
ggagccgagcgcccaagcgcgaggaccgggcaaggagggacagcccgaccaagcccggaggagaaggcggggccgacaagcgg

SEQ ID NO: 51442 - RNA, 74 nt, Homo sapiens
gaagaccacaaaaaagagacccacagccagcaacaccgccggaggaacaccgagaggggaacaagaacaagaaa

SEQ ID NO: 51443 - RNA, 77 nt, Homo sapiens
gacggacaaggccggaaggaagggaaaccgggggccccggacaacccgagcagaggaggcacccgggaagcggaaaa

SEQ ID NO: 51444 - RNA, 67 nt, Homo sapiens
caaggaccagaagaaacgcaccggaaaggccaccagaacccaccaacaaccacacccaggaagccag

SEQ ID NO: 51445 - RNA, 70 nt, Homo sapiens
ggacagaaacaagaggcaacccacacaacggacaacaagcagggcacgagacgaaagcaaggcaaaccag

SEQ ID NO: 51446 - RNA, 60 nt, Homo sapiens
ggccggacccccccccggcgcccaagcggaagaacgaggaaagagagccaagcccaagcc

SEQ ID NO: 51447 - RNA, 89 nt, Homo sapiens
cacccagacgagcggagaaggcgcgcgcaggcaggcggaggaggagaagacagcacggggagcccacaggccaccacccggcagaggag

SEQ ID NO: 51448 - RNA, 72 nt, Homo sapiens
ccccagcgagagcccgcggagggaaaaggacaccccgcggccccgccaagacagccacacgaacacggaccc

SEQ ID NO: 51449 - RNA, 75 nt, Homo sapiens
gcagaagaagaagggaccccaaaagagccaagcccagagaggcgggagggaaaccgccaaagccaccagggaaag

SEQ ID NO: 51450 - RNA, 72 nt, Homo sapiens
gcccggaagaaaggcagaagaccggaaacaccagcagggcacgacaacgaaagcaaccgagaaaagaggcgg

SEQ ID NO: 51451 - RNA, 77 nt, Homo sapiens
gaacaaccaggaccaaggcgcggaggacggcccaggcagaacaagaagggcaaccaggggggaaggagggagcggag

SEQ ID NO: 51452 - RNA, 79 nt, Homo sapiens
cggcgccggcgaggaggcgcccggagcggccgccccagcgccccgagccccggccccaaagacccaaaacagagacacc

SEQ ID NO: 51453 - RNA, 82 nt, Homo sapiens
ggggcccagggggcgccggggagcccgaaggccgagaagagacaggcaggccggggcagcccagccgcgccagcgagaccca

SEQ ID NO: 51454 - RNA, 65 nt, Homo sapiens
cgaaggcgggcggcagaggcgacaggcaccgcggccacaagaaaagccagcccccagaaagaacc

SEQ ID NO: 51455 - RNA, 40 nt, Homo sapiens
cccggccccgagacagaagccggcagcccacagcaagcac

SEQ ID NO: 51456 - RNA, 86 nt, Homo sapiens
ggaaggaagaaacgcgccggacaaggagaacaccggaagggagaaggcaaaagcagaccggaaaacccaccggcaagaccacaccc

SEQ ID NO: 51457 - RNA, 54 nt, Homo sapiens
cgaggggaccaccaggaacagaggggcacaaagcaaagccccggaacaagacaa

SEQ ID NO: 51458 - RNA, 63 nt, Homo sapiens
cacaacacagcagagaccgagggaacccacccccacccagcgcagggagcaggagaagcggag

SEQ ID NO: 51459 - RNA, 55 nt, Homo sapiens
cgcaggacgcacaggagagcaagagaggagccaagcccaacgggacgggaaaacg

SEQ ID NO: 51460 - RNA, 83 nt, Homo sapiens
aaaagcccaaagcgagccaaagggccggagggcggagaacggaaaagcaccaggaagcagagaggaccgcagaagggaaggag

SEQ ID NO: 51461 - RNA, 84 nt, Homo sapiens
gggcggccacgaccaagaagaagccacggacccgcggggcccgacagcgcgcaggaaacaggccaaggcccgaacagaaccgcc

SEQ ID NO: 51462 - RNA, 75 nt, Homo sapiens
gagccaggagcgcacacacgacaggagaaaggaggaaggacaaagagaaggcaagccaaagccggaagacccaga

SEQ ID NO: 51463 - RNA, 60 nt, Homo sapiens
cccccaccaggcggcgaaaacagaggggccgaaggagagagccaacaacagcaaggcaag

SEQ ID NO: 51464 - RNA, 75 nt, Homo sapiens
agcaaagaggaggaaggagggaccggcccccagcaagccccagacagcgcgggagccaggaaacgcagacccccc

SEQ ID NO: 51465 - RNA, 83 nt, Homo sapiens
gggccgccgggccgaacccggcaccccggaaggaggagggcgcccaaaccaccccgggggagaggaagaagaaaaaccccggg

SEQ ID NO: 51466 - RNA, 86 nt, Homo sapiens
gaagaggaggaccaccggagcgaggaaccggaccccggcagcccgagagcggcccaggaggaacaaccagcccacccggagagggc

SEQ ID NO: 51467 - RNA, 76 nt, Homo sapiens
gcaccaggacaagcaaaggcagcaagccgggcggggagaaccagaggacggaccggaaaccgggaaaaacaccgcc

SEQ ID NO: 51468 - RNA, 93 nt, Homo sapiens
agaagcagcaagcccggagaagccaaggacgggccggaccagacaggcagggaggaaagacaggaaagaagccaccacagaaaccgaagagcc

SEQ ID NO: 51469 - RNA, 80 nt, Homo sapiens
gaccggcagaaaaagaacaccagaaacgggagaggaaacaaagcagcaggagaggagagccagagaaggacagggaagca

SEQ ID NO: 51470 - RNA, 61 nt, Homo sapiens
gcaaaggaagagaagaggaagaaacaaaagggcaccggcacgaccaaaagaggccacacac

SEQ ID NO: 51471 - RNA, 82 nt, Homo sapiens
gagagcggaccgagagcgcgaaacgcacgagaagggaaagggagcagcaccggccacacccacagcacgaccggaacccagc

SEQ ID NO: 51472 - RNA, 69 nt, Homo sapiens
ggagaacaagcaacggcggaagcaaaacggaccaaggggccaggcgaagagaaccgcacgcaccaaccc

SEQ ID NO: 51473 - RNA, 84 nt, Homo sapiens
accggggacgacagccaggcccgccgggcgccacccccaccaccgaaagccaggaacgaggaggaccagaagacaaagaggaag

SEQ ID NO: 51474 - RNA, 95 nt, Homo sapiens
caacaaggggagcgggggcgacagcgcccggcacaagcccagaaacagccgaagccaacaagaaagggaaacgaggagaaccccaacgagaagaa

SEQ ID NO: 51475 - RNA, 60 nt, Homo sapiens
cgcgcgggcacacggggggagggcaacgcgacacagagccagccaaccgacggcaccacg

SEQ ID NO: 51476 - RNA, 99 nt, Homo sapiens
cggggggcgcagaggacacgaggcggcgggcggagacaggaccgcggcgagcaagggaagaaaacgccagagaagcagagcagcccggagcgaggggag

SEQ ID NO: 51477 - RNA, 65 nt, Homo sapiens
aacggggaccaaaaggaaggaaggagcagccggccacaccgcaggagaaagaagagcacaagggg

SEQ ID NO: 51478 - RNA, 73 nt, Homo sapiens
acccagcgggagacccgcgacgaaggagaaaacacaggcaggaagaaagaaacagacacggagccgaggcacc

SEQ ID NO: 51479 - RNA, 88 nt, Homo sapiens
gagagccacagcgacaacagccggaccccgacaggaaacagagccaggcagcccacaaagccagggcccacagcaacaagcggcagag

SEQ ID NO: 51480 - RNA, 78 nt, Homo sapiens
gagcgagggggggcgcgccggaaaccggagcgcgcagcagggcacggccgagcagagaggacggggacgaccgggcca

SEQ ID NO: 51481 - RNA, 71 nt, Homo sapiens
caccaacaaggagacccgggaggaccaagccgagagaccgagccgggcaggggagcggaccaggccaggac

SEQ ID NO: 51482 - RNA, 65 nt, Homo sapiens
aaagcacgaccgggacacaggcaacccggcaaccaagggcagaccgcacaagcagccccggaaca

SEQ ID NO: 51483 - RNA, 82 nt, Homo sapiens
ggcgcccggcgaggagcgccaggcgagaacgccaacgaagccaacgcaaagcaaagcgagcccccagaccaggacccagacc

SEQ ID NO: 51484 - RNA, 71 nt, Homo sapiens
aaaagaacaagagaaaagagcgaaaaagacgaaccagggcccgagggcaggacagcaggcaccggcgaagc

SEQ ID NO: 51485 - RNA, 79 nt, Homo sapiens
cagaagggagaccagcagaacccaccagcaccagagacacgacgcaaaggccaccaggcagccgcgagacacagcaaac

SEQ ID NO: 51486 - RNA, 78 nt, Homo sapiens
ggagcgggacaccccggaagcgggaaagcgccgcaacagacggacaggggggcaacagaaagcccgacccggccgcag

SEQ ID NO: 51487 - RNA, 78 nt, Homo sapiens
gacccagacccggagcccagggaagcagccgaccagccgcggagccgggggcagccacccgccacccgggcacccagc

SEQ ID NO: 51488 - RNA, 72 nt, Homo sapiens
gaagcgggccaaaggggcgccgaaaggacaaaacaccacaggaggaaggaaaagcgagcgagcccaggccgc

SEQ ID NO: 51489 - RNA, 63 nt, Homo sapiens
accaccagagcccagaaaccaggcgccaggaacagcgggacccagcggccgcgagaaccgggc

SEQ ID NO: 51490 - RNA, 71 nt, Homo sapiens
aacagggagagcaggacaccagcacaccgcggaggcgcccagcggcaaacgaacaaccagaaacgccaagc

SEQ ID NO: 51491 - RNA, 53 nt, Homo sapiens
gccagaaaccgcccggagcacgaccgaggcgaaagcaagccagcaccaggggc

SEQ ID NO: 51492 - RNA, 72 nt, Homo sapiens
gggaacggacccaccagaggagaaaggagcccagggcagaccgggagacacaaagaaacacgaggggaaaag

SEQ ID NO: 51493 - RNA, 65 nt, Homo sapiens
acacagcgcaggaaaagacccaccccaaggggggagaaaaggccaagggcaggagacacgagacg

SEQ ID NO: 51494 - RNA, 50 nt, Homo sapiens
gaaaggggggcagggagagaagggcacaagaaagaaaagcgaggccacaa

SEQ ID NO: 51495 - RNA, 74 nt, Homo sapiens
ccggggcacccacccgcaggccccaggacagagcgggagccaccagcgccaaagggaagccaggagcccggggg

SEQ ID NO: 51496 - RNA, 77 nt, Homo sapiens
caggagggcggcgcgccagaccaaagcaacggaacaacccgggaggaaaaggacaaggcaagcggaaagaaagaaaa

SEQ ID NO: 51497 - RNA, 49 nt, Homo sapiens
aggaacccacgaaaaggagggagccaaaggggcgaccggcccgaggacc

SEQ ID NO: 51498 - RNA, 72 nt, Homo sapiens
gaaagaacaggaaagaccagcgaagagagaggacaagccgcagaagccgggccgaaccccaccgacagccgc

SEQ ID NO: 51499 - RNA, 52 nt, Homo sapiens
accacaccgcaggccaccgacgacacagaaaaagaaccgggcagaaagggcc

SEQ ID NO: 51500 - RNA, 70 nt, Homo sapiens
cagaagcgagaggaaaaggcaaacgacgcagacagagggaaaaaagacaagcggaagacaagaaacacag

SEQ ID NO: 51501 - RNA, 69 nt, Homo sapiens
cgaagcagcgcggagcacggaagaaggcagacagggaccgagcgagggggaaaagcaaaagcagagggg

SEQ ID NO: 51502 - RNA, 69 nt, Homo sapiens
acccaacacacaaaaccaccgccagcccagaggaagaagagacacgaagagcacggagcggaagaggag

SEQ ID NO: 51503 - RNA, 75 nt, Homo sapiens
gccgccacccgaggaagacgaggacaggacagagcccccgaggccccagaacaccgaacccaggagaaacgagag

SEQ ID NO: 51504 - RNA, 90 nt, Homo sapiens
acaccaacgcgggcgcgaccgggagcggaccccggggagcgccccaaaagaaacaaagccaaccaggcaacagaagaaagagcaaaaggc

SEQ ID NO: 51505 - RNA, 53 nt, Homo sapiens
gaggcgcccgcagcaggcgagagccacagaaggaggaggggacagcagcagga

SEQ ID NO: 51506 - RNA, 76 nt, Homo sapiens
gccgagagccagagagagcggacgacagaacccggccgacccggaccaacaaccccaagacaaaagcacccagaca

SEQ ID NO: 51507 - RNA, 86 nt, Homo sapiens
gaagagcgccccaggagaaacaaggcggcgacggcggcgcgaggaccgaccgggcccgcggacgaagaaggcacccccccgccggc

SEQ ID NO: 51508 - RNA, 70 nt, Homo sapiens
gggaagccaggaaggaagaaccagcggccaacagggcgccagccagggccacagccggccagaccgcagc

SEQ ID NO: 51509 - RNA, 72 nt, Homo sapiens
aaagcagagcccaggagaaaccggacgcgacggggaagaagaaccgcagagaggaaaggcgccacacacccc

SEQ ID NO: 51510 - RNA, 56 nt, Homo sapiens
gaccacccacggacaggcgaggaggcgggagacgccggcgccagcaaccagcgcgc

SEQ ID NO: 51511 - RNA, 72 nt, Homo sapiens
ggcgccagcccccggacagccgcccgggagaaggccacagcagggagcaaagaacgaacgagcccgccaggg

SEQ ID NO: 51512 - RNA, 38 nt, Homo sapiens
cggggcccgcaccccagcccacagacacacccaaagca

SEQ ID NO: 51513 - RNA, 78 nt, Homo sapiens
acgaaggaacagccgagggagccccccaaggagaacagagagcacccggccccaccccgccacaaacgcagcagggga

SEQ ID NO: 51514 - RNA, 56 nt, Homo sapiens
gcgcgggggcgacggccgagcaggaacaaaagacccgggccaccggggacggagcc

SEQ ID NO: 51515 - RNA, 63 nt, Homo sapiens
acgggacaacaaaagagccacccaagcgggccgccgcccggcgaaaagggggcccacgcaaca

SEQ ID NO: 51516 - RNA, 57 nt, Homo sapiens
cgacaagaggcgacgcgaaccgagaaggagggggcagagcacggcaggcagaagggg

SEQ ID NO: 51517 - RNA, 80 nt, Homo sapiens
cggggacggcgcgcgggacggccgaggaaggaacggcccccccccagcccgccccaaaagaccagcggacccaaaaacaa

SEQ ID NO: 51518 - RNA, 66 nt, Homo sapiens
accaagaaccagagaggaagggcgccccaaaccacagaggcggcgaggccgagcgcgagaaacaga

SEQ ID NO: 51519 - RNA, 79 nt, Homo sapiens
ggccaggccggggcgaccaacgacccaacaaaagcacaccccaaccgcggcggcccgccagaagacacaagacacacca

SEQ ID NO: 51520 - RNA, 73 nt, Homo sapiens
ccccgcagggccagggaaagggccagaagacgcgcacagaacaaacagagacccacaggaccgcgaacaagga

SEQ ID NO: 51521 - RNA, 70 nt, Homo sapiens
ccgaggcgccccaagacgcagcaaaggggaacgaagcaggcacggagccggaaacacaagcccaaggcaa

SEQ ID NO: 51522 - RNA, 82 nt, Homo sapiens
aagcacgccggagggaagagcgagggagagagcccacgagaaaaggaagaccggcggcagcagaggagcccgggagcgaagg

SEQ ID NO: 51523 - RNA, 86 nt, Homo sapiens
ccaacaccacacaaagcagccgagagacagagaaggcaagagcgaaggagaaaggcaacaaggcccgagcggggaacacgagagcc

SEQ ID NO: 51524 - RNA, 64 nt, Homo sapiens
aagccaagcaaacgcagaaggacgcccacgagcaaccaagaggcacgagcagccgggggaagca

SEQ ID NO: 51525 - RNA, 78 nt, Homo sapiens
agccccccgcggcggcagccacagagagcccacgaacggcgggaacagaaagccagaggccggagagcgcagacacag

SEQ ID NO: 51526 - RNA, 32 nt, Homo sapiens
aagcagccgaaaggagggaggaagagaccgac

SEQ ID NO: 51527 - RNA, 65 nt, Homo sapiens
ccaccacacaaccaaacggaaggagaccaagagccggagaaagcgggaacagcacaaggagggac

SEQ ID NO: 51528 - RNA, 55 nt, Homo sapiens
gcgaacacagaggaaaccgcaccgcccggagaccggcggcacacggacaaccggg

SEQ ID NO: 51529 - RNA, 61 nt, Homo sapiens
cgcacgcgcaagaccgcgaggcgagacccgcaacagcacgaaaaaacagagaaggcggaac

SEQ ID NO: 51530 - RNA, 79 nt, Homo sapiens
ccccgagagcggaacaggcaaccgccgcgggccgagcccgcccgccaggaccaggacagagcggcgccgccgccagacg

SEQ ID NO: 51531 - RNA, 97 nt, Homo sapiens
agcaaaccggcggaggacggaaccaggggagagcgacccaaacaaagggagaaaacaggagaagaagacggggagcagaacccaccccccagccagc

SEQ ID NO: 51532 - RNA, 73 nt, Homo sapiens
aaccacacccagaagacgacggcacagcgcacaagaaacccaagcgcgaggcacaggaccggcggaccgaacc

SEQ ID NO: 51533 - RNA, 107 nt, Homo sapiens
ggagggcggagagacccgggggcgagcacaaacggggcggggccggggaacacacagggcgcccgcgccggcagaggaggcgagcacccgccagggagaggaacccc

SEQ ID NO: 51534 - RNA, 58 nt, Homo sapiens
agaccacccgacagaccagaaaccacccagagcaaagaagcaccgccggccaggagga

SEQ ID NO: 51535 - RNA, 91 nt, Homo sapiens
gcgcggagcacaaaagagcccgcggggaggcgcggccgccccgcgggggacgcagaccgaaaagggcggaaaaggaccaaggcccgcaaaa

SEQ ID NO: 51536 - RNA, 41 nt, Homo sapiens
aacagcaagaacccaaaagggaggaggaacgcggggacgag

SEQ ID NO: 51537 - RNA, 72 nt, Homo sapiens
ccccggcgggcccgaggcggcgagagaggcaggcggagccgaccgggccaggggaccgggaggagggcgcca

SEQ ID NO: 51538 - RNA, 75 nt, Homo sapiens
gaggggcagaaaaacaggcagaagcagcacacacaaagaacaagaaacacaagaaacaaaaaacacaaggaaacg

SEQ ID NO: 51539 - RNA, 44 nt, Homo sapiens
gcggcgccgccaacgcgcccccgagacaccgaaaacgagaaacg

SEQ ID NO: 51540 - RNA, 69 nt, Homo sapiens
cacagcaaacccacccagcacaccccgcgaaaggaggaggcacagaaaagacggggaccacgaccacag

SEQ ID NO: 51541 - RNA, 83 nt, Homo sapiens
aacgagacagcccccaaagaagcggcagggcggagagcggaccacgccgccgccagggacaaagaacagcagggcagcaaaag

SEQ ID NO: 51542 - RNA, 35 nt, Homo sapiens
ccacccacccaccacgccccaaaagcacgcacgaa

SEQ ID NO: 51543 - RNA, 74 nt, Homo sapiens
gggaaacgagcacgggcgaccaccgaagcaacaaggggaaggggcaaaagagcaggacaggagagacaacggag

SEQ ID NO: 51544 - RNA, 61 nt, Homo sapiens
gaggccgagcgcgggaaagcagcgcagaagaggcggccacccacgagccgacggcaaacgc

SEQ ID NO: 51545 - RNA, 72 nt, Homo sapiens
acagagagccagaaggaagacaagcgggagagaaagaacaaagacccgacagcaaacgaagaaaaccaaaac

SEQ ID NO: 51546 - RNA, 79 nt, Homo sapiens
agacccccgccaaaaggaaagcacagcagaaacacaaagcagcccaaccaaaggcggaagaaggcgaaacaccagaaaa

SEQ ID NO: 51547 - RNA, 76 nt, Homo sapiens
gcggagcagcgaccccggcccggaggaggccagcgggacaagcgggcgggaaaccaacccgcaaggcagaaccagc

SEQ ID NO: 51548 - RNA, 78 nt, Homo sapiens
cggcgccgccccaccccggaacccgcggggcggaccggagaagccccgagcaccccacagcagcaagagcaccgcgac

SEQ ID NO: 51549 - RNA, 81 nt, Homo sapiens
cacccccggccagccggcgccggagcgaaacacgacggaagggcagccagacaagaaggacacagaagagagcaaagaagc

SEQ ID NO: 51550 - RNA, 84 nt, Homo sapiens
ccgaaaagcgcgccgacgggcacaaggccaagcaagaccgaggccaaaagaaaggaagaaaacccccaaaaagccaaaaggcca

SEQ ID NO: 51551 - RNA, 61 nt, Homo sapiens
gccaagcaacagcccagcaaggaacacagcccggccagcgggccgaagaccgaccaggagg

SEQ ID NO: 51552 - RNA, 84 nt, Homo sapiens
gccaccgccgccccgccgcgcccaggagcggaacaacgcggcgagcggggccggggcccccagcccgccccagacccgagcaga

SEQ ID NO: 51553 - RNA, 77 nt, Homo sapiens
cgagggccccccggacagcgcgaggggccccgggcgagaaaggagacacaggggagcccggcccaggggacagaaga

SEQ ID NO: 51554 - RNA, 86 nt, Homo sapiens
gggcaagccccggagcagcgaccccaacccgagcagccgacccgcgcccccgccggccgccgccgcccagccgcgcccgccgcccc

SEQ ID NO: 51555 - RNA, 76 nt, Homo sapiens
aagacacaaacagcagggagaagagacaacaagacaggccaggcagacagcagagcacccaaggaaaagcagccag

SEQ ID NO: 51556 - RNA, 98 nt, Homo sapiens
aggagagggcagacggacaagagcgcggaacaggacgccccgaacaagcagaccggaagaccgacggaagaccacaccccgagggagcccaggacacc

SEQ ID NO: 51557 - RNA, 75 nt, Homo sapiens
accagaaaaacaggcccgacccgaccccaaaagagacggacgcacaggaaggaaaaagaaaccgaaacaacccag

SEQ ID NO: 51558 - RNA, 40 nt, Homo sapiens
gaggaggcagacgaggcagcagcgcggggaccacgagcca

SEQ ID NO: 51559 - RNA, 73 nt, Homo sapiens
cgacggcccaaccccgcaagacccaggcgaggaagaaacaaggcgggccgcgagaccaccagggcgaagccac

SEQ ID NO: 51560 - RNA, 56 nt, Homo sapiens
ggaaagaaacccacgggcagagcgaaaaaggacagggaggccgcacagaggaggag

SEQ ID NO: 51561 - RNA, 78 nt, Homo sapiens
gaccaccagaagacgcggagaccagggcccggggcgcccgggagacgccacacggccgagcagcccaccagggcgcca

SEQ ID NO: 51562 - RNA, 54 nt, Homo sapiens
ggagaagccagagagcaacaggggagccgcaaggacccccgcggaaacgccaga

SEQ ID NO: 51563 - RNA, 63 nt, Homo sapiens
gcgggggcggacccaagcccggggcccaggcagaagcgcagccgcgagggcaaagaagggcca

SEQ ID NO: 51564 - RNA, 74 nt, Homo sapiens
caaacgaaacccagcaagaccagcaggcgcgggcacagggagggcggaccacccaggaggagggaggggagccc

SEQ ID NO: 51565 - RNA, 74 nt, Homo sapiens
ggaaggcccagcaaagagaagaaggcaagaacaacccaagaaggacagcgcgacagaaggacagcagccgggga

SEQ ID NO: 51566 - RNA, 63 nt, Homo sapiens
gaacacccaccggcacaacacacaaaggaccggcagacagagagggccgagagcacgaagggg

SEQ ID NO: 51567 - RNA, 64 nt, Homo sapiens
ccgcgcagggcgccgacccacaggaccgcgaacaaggaggccacaaaacacccggacccaccag

SEQ ID NO: 51568 - RNA, 67 nt, Homo sapiens
aaaagagaggaaagaccaccaccccgccagaagaggaaaaaggcaacaccggaggaccaacggagcg

SEQ ID NO: 51569 - RNA, 67 nt, Homo sapiens
cggccaccgggaggcaaggaggcgcggagagcgcaaacgaggaggccaacacgccaccacccggggc

SEQ ID NO: 51570 - RNA, 58 nt, Homo sapiens
aagagaggagaggaaccccaaggaaccgcagaccacaagccgcagacacaccccgggg

SEQ ID NO: 51571 - RNA, 71 nt, Homo sapiens
gagcaaagggaagaaacccacacagaaggaaacacggaaacagaccagaacaggaaacgagacaccgcaaa

SEQ ID NO: 51572 - RNA, 72 nt, Homo sapiens
cgcgccggcccacgcgcggccaaggaagacgggacagacagagaagcacgggagcaggcaccagcaaccccc

SEQ ID NO: 51573 - RNA, 81 nt, Homo sapiens
acggcaggccacacaagaaccaagaccagaggaaaaagcaaacaagcaggaaggacccccacacccccccaaggagaccca

SEQ ID NO: 51574 - RNA, 87 nt, Homo sapiens
cggcgggaccgcggccaacggggaacgaggacgcggacgcgaaggcagggggacacgccagcggcgcagccgacggaagaccgggag

SEQ ID NO: 51575 - RNA, 80 nt, Homo sapiens
cccaagaagaccacagagggacccggacaaccagaggcagccagcagggggaggagcgcagcgggagcaggaacgggccc

SEQ ID NO: 51576 - RNA, 84 nt, Homo sapiens
ccaccccgacgaccggaccgaggaggcagcgcggggcagcgcgagccgggaagacaggacccagaccagccaaagagaagaaga

SEQ ID NO: 51577 - RNA, 68 nt, Homo sapiens
ccaccggcacaacacacaaagggcgcgcgggggcacagcccaggcgcagcagcggacccccccggccc

SEQ ID NO: 51578 - RNA, 77 nt, Homo sapiens
cgagcaccccgagcagccggccgccagccgggagaagacagaccgccgcgccgaccggagacaacagacgcaccagc

SEQ ID NO: 51579 - RNA, 52 nt, Homo sapiens
ggagcccggccaccacacccagcggagcaccaaaaaggaacagcacacaacc

SEQ ID NO: 51580 - RNA, 83 nt, Homo sapiens
accacccgaggagagcgcgcgggagcaggacaagacaaccgcaccccaccggggagaccgagacaggggcccggcaccgcgcc

SEQ ID NO: 51581 - RNA, 78 nt, Homo sapiens
caggggcgggaagcagccagggcacgccaaggccagagaagaagcggaggaaggggccggccacgccagcggaaggcg

SEQ ID NO: 51582 - RNA, 89 nt, Homo sapiens
caaagcgggacgaacaaaaggccggagcgacagagaacgagaagagaagcgagaagaacggaggaggagagagagaaaagaaacggcgg

SEQ ID NO: 51583 - RNA, 75 nt, Homo sapiens
acgaaggagaagcccagaagagaggggaccacgaggacagcggaagaaaagaagccaggaaaaagcccaggaggc

SEQ ID NO: 51584 - RNA, 72 nt, Homo sapiens
cgggcccagaggcccagggaggcaggggcagaaacagagaaggaacaggacgggaaaagccagccggcacgg

SEQ ID NO: 51585 - RNA, 69 nt, Homo sapiens
gcgcggcaagggggcagggggaggagcagaaacacagcaggacagacaaggccgacgcgcacgaacacg

SEQ ID NO: 51586 - RNA, 67 nt, Homo sapiens
cggcacccccaggaagcgcggccacgccggagcacccaaagggagagcaggagccccacgccggcag

SEQ ID NO: 51587 - RNA, 53 nt, Homo sapiens
gcgaagaaccacaaacagcagacacacaaaaaagccagagcgccggcccaggc

SEQ ID NO: 51588 - RNA, 88 nt, Homo sapiens
ggcgccgccgccgagccggggagccccggggcgcggggcacacagggaccaagaagccccggggacacgcgagaaaagacgccgaagg

SEQ ID NO: 51589 - RNA, 74 nt, Homo sapiens
cgaaggaacaaacagaaaaggagagagagaagagaacaagcgcggaggcacagaccggaagcagagcgagccac

SEQ ID NO: 51590 - RNA, 67 nt, Homo sapiens
aacagcagagacgcaacggaaaggcgcaggcagacgggacaaccagacaacagaaggaacaacagaa

SEQ ID NO: 51591 - RNA, 68 nt, Homo sapiens
aggagcgagcgggcgccagaagaagcgaaccaagggggaacaggcaaagggcagcaccgaccaccgcc

SEQ ID NO: 51592 - RNA, 81 nt, Homo sapiens
ccgcgccaggcgggggcccagaagagccaggaacgaaagccaggaacaaccacccggcccaagaccaaacacaggacagac

SEQ ID NO: 51593 - RNA, 55 nt, Homo sapiens
cccaagcccgccccccccgccacgggacacaggaacgccacaagaaacaacagca

SEQ ID NO: 51594 - RNA, 68 nt, Homo sapiens
cgccgaggcgcgggacgcgaagcaacaggcccgagccgccgggccgacgcgcgcgcagaccaacgagc

SEQ ID NO: 51595 - RNA, 75 nt, Homo sapiens
ccgagcccggccgccagaccacagcacagccgggaaggggagccaccagccccccgccagcaggacaggcacacc

SEQ ID NO: 51596 - RNA, 85 nt, Homo sapiens
gggcgcgccgggacggagacgacaggcgggaggccccccgcgccgggaaccaggagcgccccacaaaaccaagcgaggccaggcc

SEQ ID NO: 51597 - RNA, 68 nt, Homo sapiens
cgggcagagaaaacaaacggacagcccagcacacagagagaggccaggcccgcagacccacccagacc

SEQ ID NO: 51598 - RNA, 49 nt, Homo sapiens
aacggcggagcaagcaccacaggcggacagagaagaacggcacacaccc

SEQ ID NO: 51599 - RNA, 77 nt, Homo sapiens
agaagaggccgccgcgccaacgcgagcggcgacggcgggcacacccagagcccccagcagccgggggcccccaacgg

SEQ ID NO: 51600 - RNA, 61 nt, Homo sapiens
gcgcgcgaaaaccacccacaaccaaggcgagcaccaggacccgaaagaggacagaacagaa

SEQ ID NO: 51601 - RNA, 81 nt, Homo sapiens
aacgaggacagcggcgccagacagacaaacaacacaaaccagggcagacagacgggaccagggagagaaggcaaacagcag

SEQ ID NO: 51602 - RNA, 85 nt, Homo sapiens
cggaagaggagaaggggggcaaagcaaaaggaccaaccccgaacgcaggagcagcgaagaccgaaagacgcagccaaagaagggc

SEQ ID NO: 51603 - RNA, 80 nt, Homo sapiens
agaggcacccacgcccacaagccaggagggggccacaccgaacccagccgggaggccaaggccagggagcgagcccagga

SEQ ID NO: 51604 - RNA, 81 nt, Homo sapiens
gagggcaccagagagaccccaaggcggaggccagcaaggccagcacagccccgcgacaaccaggcgagcacacagagaggg

SEQ ID NO: 51605 - RNA, 74 nt, Homo sapiens
gcggcgcggggaccgcggcccgccgggacagaccggagcggggaggagcgccggccgaaacgagcgggcgggcg

SEQ ID NO: 51606 - RNA, 73 nt, Homo sapiens
cggaaggcaggggggaccaaaaggccagaaaggacaaagggccggagagagcccgcaggccaccagcccagaa

SEQ ID NO: 51607 - RNA, 83 nt, Homo sapiens
caagaccagaaccagcccgggaaagagagaagaagaaggaggccgcggccagaaacccaagaaaaagcgaaggaacgcagagc

SEQ ID NO: 51608 - RNA, 70 nt, Homo sapiens
cgcgccggggacgggagcccccccccccgcagacaacaggcacaaagagagaaggaacacccacagggca

SEQ ID NO: 51609 - RNA, 59 nt, Homo sapiens
gagaaaaagccaagaacagcaccagggaaaaagggacaagccgacgccggcgcgggcca

SEQ ID NO: 51610 - RNA, 59 nt, Homo sapiens
agcccacagaccagagaaaggccaggaagcggagcaggacgcagccagcagcacaggcc

SEQ ID NO: 51611 - RNA, 77 nt, Homo sapiens
aagaagaaggaacgaccgaagaaggacagggccggacaaggacgacagcaggggagccgcagaaagcgccaaggcag

SEQ ID NO: 51612 - RNA, 101 nt, Homo sapiens
cgcagagaggccggccgcgcggagcacgcggagccgcccaggcaggaaagcaaacaaacggaacaaaaccaaagccacaagcaagcgaaagagccgcgcac

SEQ ID NO: 51613 - RNA, 64 nt, Homo sapiens
ccgccgcgccacagcagcaagagacaggcgaagaaacaaggagaaacgaagaaaacacccaccg

SEQ ID NO: 51614 - RNA, 73 nt, Homo sapiens
aaccgcacggcgcccagcgccggccggggaggagaggacccccagacggcgaaccaccaaaagggaccagagc

SEQ ID NO: 51615 - RNA, 70 nt, Homo sapiens
gccacccagcggggagcacggcgagcagccaggccaggagaggggagaagcagaccgcaccaggcgggac

SEQ ID NO: 51616 - RNA, 72 nt, Homo sapiens
gaaaaccaaagcagaccagaaaaaacagcacaccaggaagcaaggggcccaagggagggaacacagccaggc

SEQ ID NO: 51617 - RNA, 38 nt, Homo sapiens
ccaagcacggaccaaagagacaaaggacaggcagaaac

SEQ ID NO: 51618 - RNA, 79 nt, Homo sapiens
gccaccaagcccgggagacagcaaaacaagacaaaaaaaggcagcggaaagaagaaaagaaacggcccacaagacccag

SEQ ID NO: 51619 - RNA, 79 nt, Homo sapiens
gaaaaagcgggaaggccggaaaggaccagaccgcccaggaaacggcgaacagaagacaagacgaaaacgcaacgcgacg

SEQ ID NO: 51620 - RNA, 55 nt, Homo sapiens
accaggggcgagccgcgcgggagaagccaggcgaggcgaagagggagagaacaag

SEQ ID NO: 51621 - RNA, 60 nt, Homo sapiens
agaagcgccacgcacccgccagcgaccggaccccaccaagggccagcagccccacccacg

SEQ ID NO: 51622 - RNA, 81 nt, Homo sapiens
gcggcaccgcccccagagcaagcaggagcaacaggacagagcagaaggaagggagcagccaagggcagccccccagcccac

SEQ ID NO: 51623 - RNA, 75 nt, Homo sapiens
cgccaccgcccgacgcgccagagagcccgcccgcaggcgacacaagcacacggcaagacacgcacgagaaccccc

SEQ ID NO: 51624 - RNA, 77 nt, Homo sapiens
ccgagggaggcggcagcgaagaagacgaaaaaaacccagaacccaggagaaacgagagggacagcaaggaagacgcc

SEQ ID NO: 51625 - RNA, 85 nt, Homo sapiens
gcgagagagcgaggccgccgccaaggacgacaagaagaagaaggacgcggaaagcggccaagaaagacaaagacccaggaacaaa

SEQ ID NO: 51626 - RNA, 73 nt, Homo sapiens
cagcgcacacagcaagcacgagaagagaagcagagggaacagaggccacaaccacccgcgcgaaccgccaggg

SEQ ID NO: 51627 - RNA, 85 nt, Homo sapiens
gaagccggggaccccccacccaggcagcacggcagaagagcgacgggaccgagagaacgaagcccggcgccggaggaggaaaaca

SEQ ID NO: 51628 - RNA, 59 nt, Homo sapiens
cgccgcggccgccgcaaggaaacacaacgagaagggggagagacaaccagagcggaaag

SEQ ID NO: 51629 - RNA, 57 nt, Homo sapiens
aaggcagcgcccagcagcgcagacagagagagcaaaacgacgaaggagccaagagga

SEQ ID NO: 51630 - RNA, 36 nt, Homo sapiens
cggaagcgagaccgccccgagaccccagcagaaaaa

SEQ ID NO: 51631 - RNA, 81 nt, Homo sapiens
ccgcaccgggcaccagcccccgccgagaggcggacacagccagccagccccacagaaacccagccccggagacgggggcag

SEQ ID NO: 51632 - RNA, 50 nt, Homo sapiens
ggaggcccccaaaacaaccccagacacacagcggacgagaaaacgccaaa

SEQ ID NO: 51633 - RNA, 86 nt, Homo sapiens
gagacaggaagggaaagagagcaaggggaaggacgggagacacagacacaccgggcgaaccgaccaagaacaacacccagagggcc

SEQ ID NO: 51634 - RNA, 74 nt, Homo sapiens
gcagccggagacgagaagaaaaggggcaggcacggagcacggccaagggaacaaaagggggaaagagcaaaagg

SEQ ID NO: 51635 - RNA, 75 nt, Homo sapiens
caaagagggaggccagccccggcacagaggcaccgaccgcaccggaggaggcgcgacccccgcgaagacccccac

SEQ ID NO: 51636 - RNA, 66 nt, Homo sapiens
agagggaacaggcagcaggaagcacggcgggcgaaacagggagggaaaaacagacgagaaagaaac

SEQ ID NO: 51637 - RNA, 71 nt, Homo sapiens
agacgaaacgcggaagaaccagacacgcgcccgccgccaacaacaagaccaggcgagcccagggaaagaca

SEQ ID NO: 51638 - RNA, 40 nt, Homo sapiens
gaagagaagagaggcacgcacaccggcagcaccacaaacc

SEQ ID NO: 51639 - RNA, 60 nt, Homo sapiens
acggcgccacaagaaagagcaggacaagagaaagaacccgaagagcccaagcagccaaga

SEQ ID NO: 51640 - RNA, 87 nt, Homo sapiens
cgaggagcgcggccacgaaggcggcgggcagcgcgaggcccgcgcccacacgaggagcaggagcggccgcggagcaggagcgagagc

SEQ ID NO: 51641 - RNA, 65 nt, Homo sapiens
cccccgcgccgggcgcagcgggggacacccacggccaaccaaaaaccgggaacagagaaacaagc

SEQ ID NO: 51642 - RNA, 84 nt, Homo sapiens
caggacgaggaagaagaacagccgagagagcaacaagccagcccgggaccgagcgcaccgggggggaccccagcagacgcacaa

SEQ ID NO: 51643 - RNA, 60 nt, Homo sapiens
cacacccacagagaacccagacaacaggacgccgccaagagaacagacagccacgcagac

SEQ ID NO: 51644 - RNA, 88 nt, Homo sapiens
gcgggaggagcggcagccgcgaggaggcgcgggagggcgagaacgaccccgagacgggaaggggcccggccaggaccggggaaggggg

SEQ ID NO: 51645 - RNA, 54 nt, Homo sapiens
ggaaagcggagacacagagaaagaaggaacgggcgcaccacgccaccccgccac

SEQ ID NO: 51646 - RNA, 74 nt, Homo sapiens
gaggacccagcacacaccacacaccacggccacaccaccacccaggccacacagacacagaaagaaggaccaag

SEQ ID NO: 51647 - RNA, 52 nt, Homo sapiens
ggaagggcggggggcgggccggaggggagacgggaggcagaaaggcgggcgg

SEQ ID NO: 51648 - RNA, 73 nt, Homo sapiens
ggagaaggccggggagccccgacagaccaaaccgcacaaacaaagccaaggaacaaagaaggcggcagccaag

SEQ ID NO: 51649 - RNA, 78 nt, Homo sapiens
gaaccccggaaacgacagccagacaacgagacacccgcacggacccgggcgcagggggcagaccagaaacgggggcag

SEQ ID NO: 51650 - RNA, 82 nt, Homo sapiens
ccggaggggcgaccgccaaacgggagccccgaaccaaggccacgcaggcgcgggggacgacggcgggggcacacggggaggg

SEQ ID NO: 51651 - RNA, 69 nt, Homo sapiens
gccagaggaggccccccagccacggaaacggggggaccgaaccaacggcgacgaaagcgcaggcaggcc

SEQ ID NO: 51652 - RNA, 82 nt, Homo sapiens
agccacacgccgggcaggagccacggccagggggccaggcccccgcagcccaggacgcgccgaaccgcgcccgaacaagcac

SEQ ID NO: 51653 - RNA, 83 nt, Homo sapiens
gggacgaggaccgagaccgcggccgggaccgagggcgaagccgacgagcccgaacagacgcaccagcgggaggaagagggacg

SEQ ID NO: 51654 - RNA, 33 nt, Homo sapiens
caacagagcgccggcgggcgcagcagaggcacc

SEQ ID NO: 51655 - RNA, 73 nt, Homo sapiens
agacaaaagagagaaaagaaaggagagcaagaaccaaggaagcagccgacacgagcggcaaaaacagcgaaag

SEQ ID NO: 51656 - RNA, 74 nt, Homo sapiens
aaccaagccgaaaccccacaccacagacgcccgggagaaaagaacaagaagaaaaagcagcacgaaggcgagga

SEQ ID NO: 51657 - RNA, 67 nt, Homo sapiens
gcgggcacggccggaggggacgcgagagcccacgaagagcgacggagcgaacccggacgaagaaacg

SEQ ID NO: 51658 - RNA, 89 nt, Homo sapiens
gcaccgaccaacacccaggagaagagcgccaggcgccgcggggggaacacaaaaagggcacagaaaaaacaaagacaacccacaaacag

SEQ ID NO: 51659 - RNA, 81 nt, Homo sapiens
acaagagaagcacaaaacagcagacccaagagcagcggaaaagaccagcacagcgcaggaccagcacacgcaagcccacgc

SEQ ID NO: 51660 - RNA, 73 nt, Homo sapiens
agaggaagaacacgagaacgcgcaggcacggcagagagaagaaagaaaggggggaaaaccggcaaaacgcggc

SEQ ID NO: 51661 - RNA, 75 nt, Homo sapiens
gagcccccagcgcagcggccgcgcgagacgacgggaccgaaggaccccgccagagacaaccgagcgccaggagag

SEQ ID NO: 51662 - RNA, 69 nt, Homo sapiens
cagacccgacggggcgccaaaacaccgaccccgcggaaaggaccaagacagcaggaacgaaccaaaccc

SEQ ID NO: 51663 - RNA, 75 nt, Homo sapiens
gacccgggcgcccgcgcccgccccaacccagccacagggcagggcggaggcgcacggaggccgagagaggaggag

SEQ ID NO: 51664 - RNA, 68 nt, Homo sapiens
ggcccgggccaaaacagcaacccaaacacagaagaccaaggaaagcggcgcggggccacgggccccga

SEQ ID NO: 51665 - RNA, 74 nt, Homo sapiens
gcgccgcccacccacacccggccccaagagaggaggagacacagacggagccgcccagaagccgcccacagcaa

SEQ ID NO: 51666 - RNA, 64 nt, Homo sapiens
aacaagcgggaacccacacccaagagcgcagaacggcggaggaaagccaacccccggaaggggc

SEQ ID NO: 51667 - RNA, 78 nt, Homo sapiens
agaggcgcccgggcaggaggagggcggccgcgagggcagccgagcagacgccaggcagaccccaagaaacggggaccg

SEQ ID NO: 51668 - RNA, 70 nt, Homo sapiens
cacaaaacggagcgaaaaagcggaacgaaggaaagggaaaaggagcccgaaccaaggaaagacgcagcga

SEQ ID NO: 51669 - RNA, 75 nt, Homo sapiens
cgcccccgccaacgaagaccgagaccagagggaacggaaaaagcaacaaaacacaccaagaaaagggaaccgaag

SEQ ID NO: 51670 - RNA, 85 nt, Homo sapiens
aagaggagcgcgcccgagggcaaaacccagagcagacaccgcagccaccgcggagcaaagcacgaaccccagcccgccgggaagc

SEQ ID NO: 51671 - RNA, 74 nt, Homo sapiens
gcagccagacaacaccagaacagggggagaaccaggacaggggacaggaagcgaaaagagacacacaacaaaca

SEQ ID NO: 51672 - RNA, 105 nt, Homo sapiens
cggaaaaggccgccgccgccgccgccgcgccgagcggaggaggaggaggaggcgaggaggagagacgcgacgccggaccgcgaagagacgagaggggcacggaag

SEQ ID NO: 51673 - RNA, 65 nt, Homo sapiens
gccgacccggcggacgcggcgcggggcgggcgcggggcgggggcggggggcaaggcacgcagccg

SEQ ID NO: 51674 - RNA, 55 nt, Homo sapiens
gccccccacccccacacacagagcaggcccgccaccaaaaggccagccaaggacc

SEQ ID NO: 51675 - RNA, 79 nt, Homo sapiens
accccccagagccaacacacagaagccacgagagaagaaagaaaaagaaaccgccagcccagagacacgaaagggacag

SEQ ID NO: 51676 - RNA, 54 nt, Homo sapiens
aaagcggcaaagggaaaaaggcggaaagccagcccgacaccggacaacaacgcc

SEQ ID NO: 51677 - RNA, 69 nt, Homo sapiens
caaccgggaccgccgcccccaaagcccgggaaggcaaacccccaccggccccggaacccaccgggaaag

SEQ ID NO: 51678 - RNA, 77 nt, Homo sapiens
cagacggagccgccacccagagcgcacggcgacgccccaggggaaaacccccgggaccaggacaaaccggcgaccac

SEQ ID NO: 51679 - RNA, 73 nt, Homo sapiens
gcaacccgaaggaacgggcggaccagggcgagcacgagcacccgccccaacgagaggaggagagaaagaaagc

SEQ ID NO: 51680 - RNA, 72 nt, Homo sapiens
aaaaaagcgaaggcaacaggagcgggaaacggaaacgaaaagagacagcagggcaaaacgggccacacacag

SEQ ID NO: 51681 - RNA, 66 nt, Homo sapiens
gaagccagaagagccgaggcagcagggcccgacaagagaggcggagccacccccacaacggaccag

SEQ ID NO: 51682 - RNA, 78 nt, Homo sapiens
ggcgagcggagacaagagaggccgcaggaaaccgggaaggaggaagagacaacaggcacaaagagagaaggaacaccc

SEQ ID NO: 51683 - RNA, 38 nt, Homo sapiens
gaccaggggagcggacgcagagccgcacggcgagccac

SEQ ID NO: 51684 - RNA, 73 nt, Homo sapiens
cccaaccaggagccagccagggggccgaagacaccaggacaacagaaggaaaaggcccacgggggaaagcgag

SEQ ID NO: 51685 - RNA, 80 nt, Homo sapiens
gccacccgggaacggaggaggggccaggacagcgagggggcagaaacaccaaggagcggccgcccccacccccacacccg

SEQ ID NO: 51686 - RNA, 64 nt, Homo sapiens
cagcaaagcaaccaccaggcagagacagccaacaaaaacaggcgaggggaacaggaaaaacgag

SEQ ID NO: 51687 - RNA, 83 nt, Homo sapiens
cgcgcagccccggccccggcccgccggagaaacaggggagcgcggccacagacgcacaggcagagacacaaggggagaagccc

SEQ ID NO: 51688 - RNA, 78 nt, Homo sapiens
gcccggggccgccgccgcgcaccgggcgggaccggggaccaaccagacgccgacacgcagggccaagagaaaaagaaa

SEQ ID NO: 51689 - RNA, 74 nt, Homo sapiens
cagaagccacccaaaagaagaacaaaacccaggagcacccgccccaccccccacaccaccggcacaacacgaac

SEQ ID NO: 51690 - RNA, 77 nt, Homo sapiens
ccgaccaggacccgagaacaagacacagagccgaggaaagagccgaaacgagagccccagcaagcacggggcaggcc

SEQ ID NO: 51691 - RNA, 71 nt, Homo sapiens
ggcagaaaagaagcccagaagcgggggcagcagccaggacgaaggaaaaaggaacacacagaggaaaaaag

SEQ ID NO: 51692 - RNA, 65 nt, Homo sapiens
aagggaggcgcccgcccaagcagcccgagccaaaaagcaccacccccaaccgggaggcacggagg

SEQ ID NO: 51693 - RNA, 83 nt, Homo sapiens
cgcacaggaaccgcagacccggggcacagagagcccgaccaagcccaaagggacaccagcaccgagccgggaccccggaccac

SEQ ID NO: 51694 - RNA, 79 nt, Homo sapiens
agagacaccagcggcaccggagaccaccggagcaccccgacacagaccaaaacacgcgacgagagcaggacacccgcgg

SEQ ID NO: 51695 - RNA, 79 nt, Homo sapiens
ggcgggagcccgggagggcggccgcagggacgcggacgcgcagcggaggggagccggcggccacacacccgaggcaaag

SEQ ID NO: 51696 - RNA, 51 nt, Homo sapiens
gcaggaaagcccgagcagaaagggggcaagccgagcggcaacgaaacagga

SEQ ID NO: 51697 - RNA, 79 nt, Homo sapiens
gcaaaagcggaacaagaaagcagggcccggcaggaaccggaacaacccacagggcagagcggagaagccgcacgaagga

SEQ ID NO: 51698 - RNA, 71 nt, Homo sapiens
ggaaggacgggcggggggagaaccgcccagacacgacggcagagccggcagaacagcgaacaaccaccccc

SEQ ID NO: 51699 - RNA, 62 nt, Homo sapiens
agacagaacagaacccaaaagccgacaaccccagaaacaggggagccgccaccaaaagcaga

SEQ ID NO: 51700 - RNA, 66 nt, Homo sapiens
gcgcgaaagggcgggaaaggcagggagaagaggcagagaagaggcgaggcggcgaggcacccggcg

SEQ ID NO: 51701 - RNA, 92 nt, Homo sapiens
gcaccaggaggaggacgacagcacggccccgagggagggagcgcagccagggaaaaccgagaacaccacaccagacaaccagcaccagccca

SEQ ID NO: 51702 - RNA, 77 nt, Homo sapiens
aaagcgccaaggaaaaggacgagaacgccgcgacagaaagcccggccggcacgagacaggaccgcagaagaccaggc

SEQ ID NO: 51703 - RNA, 59 nt, Homo sapiens
aagaaacggagaagggcaaaggcagccggcacccgcacaacccagggggccgaacccag

SEQ ID NO: 51704 - RNA, 59 nt, Homo sapiens
gagcaccccccgccggaaaggaccgaaaagacgcggccccaaaggaaacacccgaagaa

SEQ ID NO: 51705 - RNA, 77 nt, Homo sapiens
gaggaccggccacgaaaaaccagaggaaaaaccacaggaggagacacgaggcagagaccacaagaaccaggagagac

SEQ ID NO: 51706 - RNA, 72 nt, Homo sapiens
cggggagccagcaggcagaagaaaagaagagccccaggccaagggcgggagcaccccggcgaaagcagaagg

SEQ ID NO: 51707 - RNA, 73 nt, Homo sapiens
cgcacgcggaggcggcgcccgcgcgggcaacacaacaaggcgcggacacccagacaagcgcgccaccggcccc

SEQ ID NO: 51708 - RNA, 76 nt, Homo sapiens
ggggcgcggggccacggcggccgaggagaggcagggcgcgagggcgggggcagcggcagacacagacgcggccaac

SEQ ID NO: 51709 - RNA, 58 nt, Homo sapiens
cgggcacaaagccacggaggagagcagcacacagacggccggaacccagacagcccag

SEQ ID NO: 51710 - RNA, 105 nt, Homo sapiens
acggggccccacgaccccacgcggacgggcgaggagaacacccggaccggacacgccgagcacgcccccgcaaaacggcccaacacgaagcggcaccggcacccg

SEQ ID NO: 51711 - RNA, 78 nt, Homo sapiens
acgaagacagacacacaagaggacagggagaaagggccccaagacaccgacacagaaacaggaaaacccaaaaagcaa

SEQ ID NO: 51712 - RNA, 47 nt, Homo sapiens
cacagcgggcacagaaacgcaccacgcacacaagcacaagcgagggg

SEQ ID NO: 51713 - RNA, 81 nt, Homo sapiens
aggcaaaaaaagagggggaccagaagccagagaggaccgcaggggccaccacagagcccgcagggacacagcagaacaagc

SEQ ID NO: 51714 - RNA, 75 nt, Homo sapiens
gcaagcggagccccccaagagccggaaagaggcagagcaccggcacccgggcggcgcgccacaccagcaccgggg

SEQ ID NO: 51715 - RNA, 103 nt, Homo sapiens
aaacagacccgccaagagaagccgacgcgggcagcgagaacaagcaagagaaggagaggaagacgaggaagcagaagaacaccaagcccaccaacaaggaaca

SEQ ID NO: 51716 - RNA, 54 nt, Homo sapiens
aaccaagaccagcacggcgggggcgccgaaaaaaacagcaagaggacaaacaag

SEQ ID NO: 51717 - RNA, 80 nt, Homo sapiens
gccacacaaaagcggacaagcgaagcaagagcggaacaagaagaaacccagaccaggcccaagagaaaggccccagaagg

SEQ ID NO: 51718 - RNA, 78 nt, Homo sapiens
ggcccaccgacaacaggacaaccggcagagaaaaccacacaggaagcccagacccaggcccaccagaagaaggaagcg

SEQ ID NO: 51719 - RNA, 55 nt, Homo sapiens
agacgggggcgagcggacccgcagccccaaaagggaacaggcacgccccacccgc

SEQ ID NO: 51720 - RNA, 85 nt, Homo sapiens
ccccaaagaggccccccgacggaaacaggaccccaacaaaacacagcaccagacagccacgccacgccagcagccaggggagcgg

SEQ ID NO: 51721 - RNA, 80 nt, Homo sapiens
gagaacagcaacagacggcggggccccccgggcagaaccagcgggcaagcagaaaacaagaggccaagaggggcagcccc

SEQ ID NO: 51722 - RNA, 73 nt, Homo sapiens
cgaaacgcagcgcgagacgaacacaacccaaccacaaggcgcccggcgcaggccaaagggcccccgaaccagc

SEQ ID NO: 51723 - RNA, 69 nt, Homo sapiens
cggaccaggcccccccaacggaaggcaggacgaaagcaccgaacaggaaaaggccaaggacacccagcg

SEQ ID NO: 51724 - RNA, 84 nt, Homo sapiens
ggccggccaggacagcacccacacacggcgcggagagggagaccggaaagaagggagaccgcggggaaaagagaaaggccaacc

SEQ ID NO: 51725 - RNA, 60 nt, Homo sapiens
aacaggcacgccaacagacccagccggcgaccaggcaggagggaccaaggaacagaagac

SEQ ID NO: 51726 - RNA, 69 nt, Homo sapiens
ggaaaaaacaaagcgaaacagcggggccacccagaacaaaaagggccaggaaacccaccggcggagaca

SEQ ID NO: 51727 - RNA, 71 nt, Homo sapiens
cggggcggcggcgacgcgggcgcggggccgggcggggcgcgcggcgaggacgagagcacagcccccaggag

SEQ ID NO: 51728 - RNA, 65 nt, Homo sapiens
gcggaagcggaggagcccaggagacccggggacagcacgcccaggccccgacaagggccgaacac

SEQ ID NO: 51729 - RNA, 73 nt, Homo sapiens
gcgggccccacagagccacccgagcccagcaggccagggccaagggcacaggacaagaagggccagcaaaacc

SEQ ID NO: 51730 - RNA, 82 nt, Homo sapiens
cccccaacccacccaacccaccaagaagagaagaagagggagccggacaagacaaggacagagagaggggcgccagggccag

SEQ ID NO: 51731 - RNA, 78 nt, Homo sapiens
acaaaccaaggggcaaaaaggcagaaaaggcacacgagaagaggcaaaggaaaaagcgccgagccaagggcagcccaa

SEQ ID NO: 51732 - RNA, 84 nt, Homo sapiens
ccaggccgcagaggcgcacaggggcaaacagacacagccagcggcccaccccaccagcaggccaaggcacgggcccagccaccg

SEQ ID NO: 51733 - RNA, 62 nt, Homo sapiens
aggaccaggggagcagaaagaaggagcggagaagacacgccaagccggacaccagggcccaa

SEQ ID NO: 51734 - RNA, 38 nt, Homo sapiens
accagcgccggaggcgccgcagcccacaccagaccaga

SEQ ID NO: 51735 - RNA, 76 nt, Homo sapiens
ggcggcggaccggccacccgcagaggccccgcaacggggacagaacggaagggccagccagaaccaagacacacag

SEQ ID NO: 51736 - RNA, 92 nt, Homo sapiens
gcggaggcggaggcagaggggaggcgcgaaagaacacaccacagccacagcacggaagcaaagaccagaacaaacagaaggaagccagcagc

SEQ ID NO: 51737 - RNA, 49 nt, Homo sapiens
agagacacgggacgggaggacgaagggaacgcggaggagcccgggaaga

SEQ ID NO: 51738 - RNA, 75 nt, Homo sapiens
gggaacagcgagcggagccggcaggaaggggaccgggcggcggagcggcggaagaaggagaaaagaaagccagaa

SEQ ID NO: 51739 - RNA, 75 nt, Homo sapiens
ccaaaccgccaggagaaaaaagggaaagacaaggagccgggccgagaaaccgaaccagagaccagagaagaaacg

SEQ ID NO: 51740 - RNA, 51 nt, Homo sapiens
ccgggccaccgccagcaccgaggaaagccaagacggaccagcagaccagca

SEQ ID NO: 51741 - RNA, 65 nt, Homo sapiens
ccacgaggcaggagcgcggccgccacgaaacgcaccgccgaagcggcaggacaggggcacaaggc

SEQ ID NO: 51742 - RNA, 75 nt, Homo sapiens
gggcgaagggaggccagcacccccccccgcagagaacagcccaccaccacccgagcgcagcccagagaccccaac

SEQ ID NO: 51743 - RNA, 81 nt, Homo sapiens
gaaaagaccaggacggacaagcacagccggaaggacaaaaacgcggaggggaccagagaccaaaaaaaaaacgcgaacacc

SEQ ID NO: 51744 - RNA, 74 nt, Homo sapiens
cggccgcgcggccccgccagcgccccaccgagccgaggaagaagccaagccaagagacagcgcccccacagcga

SEQ ID NO: 51745 - RNA, 82 nt, Homo sapiens
ccagcggacaccggcagcgcgcggcgacgcgggccgagccccccaggaccaccgcggaagagaagaacgacgagaaggcacc

SEQ ID NO: 51746 - RNA, 74 nt, Homo sapiens
aggaaggaggagacgaagaaaggagaaccaacccgcaaagacacacccggacaaaaaggagggacccacaggac

SEQ ID NO: 51747 - RNA, 54 nt, Homo sapiens
aaaagacggacacccaaaacagaggggggagaaaaggccaagggcaggagacac

SEQ ID NO: 51748 - RNA, 54 nt, Homo sapiens
cccgagcagcggggaagcgacagacagaaagcgcccaggacaggaccaggaggg

SEQ ID NO: 51749 - RNA, 54 nt, Homo sapiens
gaagaagagaaaaggagggaacacagacccagccgccaagccgcccagacaccc

SEQ ID NO: 51750 - RNA, 80 nt, Homo sapiens
cagcgcccagagaacgcacagcccccaccagccaccaggcagcagaaagagaaccggccagcaccaggacaaaagaaggg

SEQ ID NO: 51751 - RNA, 35 nt, Homo sapiens
aggaagcgcagacccgcgcgggccgccgcaccaag

SEQ ID NO: 51752 - RNA, 76 nt, Homo sapiens
gacagcccagagaaccggaaggcacgcgagaggcacgccggagcagggcccaccaccgcggccagccaggcgcggg

SEQ ID NO: 51753 - RNA, 82 nt, Homo sapiens
ggaggacaggaaccgaaaagcccaagcgcccccagaccacaaccacaggcggccagcaaacagggaccagcacggcaggggc

SEQ ID NO: 51754 - RNA, 83 nt, Homo sapiens
gggaccccacgccagcccgacgggacggcgagcgcaccgcgccgcaggcacccggacaagcgccagcgaggggggccggggca

SEQ ID NO: 51755 - RNA, 73 nt, Homo sapiens
ccgccaccacagccacgaaggagccacgcgcaggaaagaaacacaaggccggagccggcccaccccagaacac

SEQ ID NO: 51756 - RNA, 37 nt, Homo sapiens
aaagaagaggagcacaacagaccgacagaacaagcgc

SEQ ID NO: 51757 - RNA, 78 nt, Homo sapiens
gggccaacgcacccgcagccaggagcgcgcgcacgaccggcgcccggacacccgaggggggacccgaacacggaagaa

SEQ ID NO: 51758 - RNA, 88 nt, Homo sapiens
gagaaggcaagccggaaagagcgaaagaaagaagggggaggacaaagaggccaggagacacgccaccgccggcggcccccggccaggc

SEQ ID NO: 51759 - RNA, 68 nt, Homo sapiens
gccgacagcaagagcgcaaccaggggcacacgcccgccagcaacccggggggagagagggaggcgacg

SEQ ID NO: 51760 - RNA, 79 nt, Homo sapiens
gaccagcaggaacgggagaacagcagcgacccgaaccgcagacggagaacaaaggcagcggccaggcggagagcgacaa

SEQ ID NO: 51761 - RNA, 57 nt, Homo sapiens
caaagaaggcccgcagaccgaaggccagcacagaggagcccaggaggaggacccccc

SEQ ID NO: 51762 - RNA, 69 nt, Homo sapiens
ggggacgcacggaccaaaaacccgcaacagcccccgcccaaacaacggcaagcggagaagagcaaggcc

SEQ ID NO: 51763 - RNA, 63 nt, Homo sapiens
cgcccgcagccggaggaagcacgaaagcacaccgaaagaccccgccgggcacccagggcccga

SEQ ID NO: 51764 - RNA, 59 nt, Homo sapiens
ggcccggcagcgcgaggcaagaggcccaccaacaacgccaaaagacgcaaccgaagacc

SEQ ID NO: 51765 - RNA, 76 nt, Homo sapiens
gacagggaaagcacgacgcacacgacacacagccagaggcaggccagagggaaagggaaccaagaacgagaagagc

SEQ ID NO: 51766 - RNA, 81 nt, Homo sapiens
gggagcgagcgggcagcgcgccaaaagcggaacaaacgaacggaagaggcagacgcgaccacgaggaggccgcggcgccca

SEQ ID NO: 51767 - RNA, 61 nt, Homo sapiens
ggcggccacgcccgccggaccgcgcccaggccccccaggcgcacccgacccaaaccggagc

SEQ ID NO: 51768 - RNA, 56 nt, Homo sapiens
gaccgggacgccgaccagaaaagcaccgggaggaaagagagccacacgaagaacac

SEQ ID NO: 51769 - RNA, 70 nt, Homo sapiens
caccgggcaccccacggaaggaacgggaagagacgcagcgagaacgcaccgcaaagaacgaaggggacca

SEQ ID NO: 51770 - RNA, 75 nt, Homo sapiens
gacgagccgggaggaacggcccggaaacaggaggaccggagccggagcgaggcgggggaggcagcagaagcccgc

SEQ ID NO: 51771 - RNA, 61 nt, Homo sapiens
ccggggcggaagaggcggcggccccgcgggcgccagcagaaaccaacagaagggccgaaac

SEQ ID NO: 51772 - RNA, 70 nt, Homo sapiens
gggccggcccacagcacccggccccgcggggcgccaacccccggcggccaagacacagcgaaaaacccag

SEQ ID NO: 51773 - RNA, 74 nt, Homo sapiens
cagaaggcggagaggggccacccgaaaggagagcagaggaacccaggcaaggccggaaaggaaaaacaccagaa

SEQ ID NO: 51774 - RNA, 84 nt, Homo sapiens
acagggcggacaccaggaagaggagccgagcacgggccgagaccaccgaggagagccggcggagaccagaggcccacggccaac

SEQ ID NO: 51775 - RNA, 49 nt, Homo sapiens
agacgcagggcgcccccggcggcaaggaagaggcccggaaagggaaaaa

SEQ ID NO: 51776 - RNA, 54 nt, Homo sapiens
aaacaacccgcaaaacggaagaaagaaagaaacgcagcaccaaaaccaagagcc

SEQ ID NO: 51777 - RNA, 82 nt, Homo sapiens
aacgaaggaggacccccccacaacaccaggggggacgccacgcgcacacgcagacaagccacagaagaccggaggagagccc

SEQ ID NO: 51778 - RNA, 55 nt, Homo sapiens
agccaagaccaagcgcgaaagcgccaaaaggacagcagccacaagaaggagagac

SEQ ID NO: 51779 - RNA, 38 nt, Homo sapiens
cggccccccgcgcacagaacgcgagcaggcgacccaaa

SEQ ID NO: 51780 - RNA, 71 nt, Homo sapiens
ggagaagaggggagagggaccacacagaaacggccggggggggcacagagccccggaagacagcccccagc

SEQ ID NO: 51781 - RNA, 78 nt, Homo sapiens
cggcagccgggaaggacacgcccacgaccggaacggccgagcgaccaggagaggagcccccgcccgaagaccggggag

SEQ ID NO: 51782 - RNA, 71 nt, Homo sapiens
gcgacagaacggaccacagaggcaccgccacaggacccaaggccggacccaaagacaggaccacgcaccag

SEQ ID NO: 51783 - RNA, 64 nt, Homo sapiens
cacccaaccggcagcagcagggagccacaccaagccaacagcagaccacaccaggaccgcagag

SEQ ID NO: 51784 - RNA, 79 nt, Homo sapiens
acaaaccgcacgacacaggaaaggacaaaaccagaagcagggaaaggcccgaggcccggaaaccagaccaacccagaag

SEQ ID NO: 51785 - RNA, 57 nt, Homo sapiens
cagagaccccaaaggcacccgcgagcgcaacccaaggggaaaagagacgcaaaccac

SEQ ID NO: 51786 - RNA, 75 nt, Homo sapiens
ggcagagaaaagccaggaaggacaaaaccgccacaccgacagagaacccaggccaacacacagacagaggcagcc

SEQ ID NO: 51787 - RNA, 77 nt, Homo sapiens
ggccaccccgcgcgcaaggagcccgggacggagaggccgcaggagcacggcgggagagagaagaaaaaacaacccag

SEQ ID NO: 51788 - RNA, 86 nt, Homo sapiens
cggagaccaagggcggcgacacgacggcggaacggggaacgacggcccagcaggcggggaagagaaaggcagggaacaggaccagg

SEQ ID NO: 51789 - RNA, 87 nt, Homo sapiens
gggccgagggagggccgagccagccgcggccggaggagcccccaggccgcgggcaacacaacaaggcgcggacacccagacaagcgc

SEQ ID NO: 51790 - RNA, 80 nt, Homo sapiens
aagagccagaaacgcaggaaagaggagcgcacaaagccagcagccagggccaaacgaccaggagcaaagggaagaccacg

SEQ ID NO: 51791 - RNA, 74 nt, Homo sapiens
accccggaccggcggcggaaagcggaacacggaacgaaaaacagcacaagacgcaagaacagaggagccaagag

SEQ ID NO: 51792 - RNA, 81 nt, Homo sapiens
ggccagagcggcacgaccacaccgcgagaagacaaggaccacagggcgcaaggccaagccgacgccagcgggcgccaccca

SEQ ID NO: 51793 - RNA, 68 nt, Homo sapiens
gacgcaccgcaggcagacaaaagggccaaagaagggagaaagaagcaacagcagcaagaaaccgaggc

SEQ ID NO: 51794 - RNA, 81 nt, Homo sapiens
gaaaacaggaacagagcgagggaggagagagggagagccaaagaagggcggagaacggaaaagcaccaggaagcagagagg

SEQ ID NO: 51795 - RNA, 97 nt, Homo sapiens
aacaaaacgaaagggcggcgggaggggcggagcagccacacgacggggcagagacagacaggggaggacaggaacgagaaggaagcaaagacggccg

SEQ ID NO: 51796 - RNA, 67 nt, Homo sapiens
gcaggacgccaaaccaagccgcagggggaaggcaagaacggaagcacgggcggaggaaagcacaagc

SEQ ID NO: 51797 - RNA, 72 nt, Homo sapiens
ggaacgcaaaccggagaagggaggggccacggggccggggagccaccaggagacagcccagacaagcagggg

SEQ ID NO: 51798 - RNA, 82 nt, Homo sapiens
agaagcagaagcgagcaggacgagaacagcaaccagaccccggagacgagaagcccagagacaccaagcccacgaaagcacc

SEQ ID NO: 51799 - RNA, 76 nt, Homo sapiens
gggggcgaaacacggcggccagggccgcggggaccgaaaggacagaacaggaccggaaaggacaggagagacaacg

SEQ ID NO: 51800 - RNA, 78 nt, Homo sapiens
gccaaggagccaagacgcgcgcaggcggcgcgagcgcgggagcggcaccggagccacagaaggacaggaagaggcagc

SEQ ID NO: 51801 - RNA, 61 nt, Homo sapiens
gcggaagaaaaacaaacacacgcaaaggagaaaggaaccgacagccaagcaagaaaagaga

SEQ ID NO: 51802 - RNA, 73 nt, Homo sapiens
cagacgcagggcgcccccgaaggggggcagaaagaagaggaggacaacaagccaacagagagagacgaagaaa

SEQ ID NO: 51803 - RNA, 81 nt, Homo sapiens
aaaccaagcaccagagccccaacagccccgcggccacagcgcaagggcaagaaggaacagacaaaaacggccggaaggaaa

SEQ ID NO: 51804 - RNA, 76 nt, Homo sapiens
aaaaacggcagggaagggaacgcacggcagacaagaaagccaaacgaggagaggaagccgagggcaccgaaacccg

SEQ ID NO: 51805 - RNA, 59 nt, Homo sapiens
gaggcgcagaaggggacagaacaccaaaacggacaagccaaggcacgagccaaagaaac

SEQ ID NO: 51806 - RNA, 80 nt, Homo sapiens
aggaaaccccaacacagagccaagcgccaagacagagcgggagccaccagcgccaaagggaagccaggagcccgggggca

SEQ ID NO: 51807 - RNA, 80 nt, Homo sapiens
ccccgggaccaggggcccgacagcgcaacaggacgagaacccccgcgaaccagaggaacccagcgagcgagagcggacca

SEQ ID NO: 51808 - RNA, 75 nt, Homo sapiens
cccccagcacaccgaggaggcaggaccgcacgaggaaccacacggcggaggcaccgacaaaccagcgaaggagca

SEQ ID NO: 51809 - RNA, 95 nt, Homo sapiens
gaagaggcggacggcgggaccacaagacaacgcggagcggcgaagagcaaccagagcggcacaccacacacaggcagcgccagggggcaagaacg

SEQ ID NO: 51810 - RNA, 77 nt, Homo sapiens
ggacccacacggagacccccagaacaggcccagaaagggaaaaaacaacgagccccaaaagagacacaaacaaggag

SEQ ID NO: 51811 - RNA, 69 nt, Homo sapiens
aaaaccaacaccccggcagccgggaaaaaggagcgaggggacggcgcggccggccccgaggccacccac

SEQ ID NO: 51812 - RNA, 76 nt, Homo sapiens
gcagaaggcccgaacaggcacgaaaaaacccagcgaagaccacagaaaccaaaaggaagacagaaggaagcaaaga

SEQ ID NO: 51813 - RNA, 47 nt, Homo sapiens
ggagaaggaccaagaaccagacgaggagaagacccaggaggacaaca

SEQ ID NO: 51814 - RNA, 80 nt, Homo sapiens
cgggcgcagccgccgccccgccccagaaggcggccgccacccccgcagagccgggcagacccggaccccgggaccacagg

SEQ ID NO: 51815 - RNA, 77 nt, Homo sapiens
cagccaagcaggaccacccaccagccaccagagccccacacagcagcaaggggcccggacccagacaaacccggaaa

SEQ ID NO: 51816 - RNA, 59 nt, Homo sapiens
ggaggcaccgcacagacgggagaacaacaaggaacaaccaccagcaccgagccagccca

SEQ ID NO: 51817 - RNA, 51 nt, Homo sapiens
caagaagaagcaacgccaagacacaagaaccacaccagcggacagccacca

SEQ ID NO: 51818 - RNA, 85 nt, Homo sapiens
agacagagaggggagaacccccagggaaggaagaaggccagcgaagggaaacaaaacacccagaaggaaaccaggcggggagcag

SEQ ID NO: 51819 - RNA, 96 nt, Homo sapiens
gcccccaccccgggaacagcgcacgagcccccccccgaaagaaggagcaccccgaaacaaagagacagggcaccggagccaggaggcgacccgacc

SEQ ID NO: 51820 - RNA, 79 nt, Homo sapiens
aacggagaaaagaccaccgaaggaacagcgcagccccgaacaggggcagggcacagcagccgggaagaagcagagggcc

SEQ ID NO: 51821 - RNA, 64 nt, Homo sapiens
aaaggcaacgaaacagccacgcccaaaccaaacgaacaggggaacagacaagagggacacaggc

SEQ ID NO: 51822 - RNA, 60 nt, Homo sapiens
ggacaccaagaaagaacagagaggagcgagaggaagcggaagaaaaccaacaaaggacag

SEQ ID NO: 51823 - RNA, 62 nt, Homo sapiens
acaccaggcgaaaggaaacacacgccgagaagacggccccacggagacggccagaacaccac

SEQ ID NO: 51824 - RNA, 40 nt, Homo sapiens
acacagcaacggacaaagcaacgaagggggaacagaaaag

SEQ ID NO: 51825 - RNA, 69 nt, Homo sapiens
agggaaggaaggaacgcaaccgaagacgcagaggaaaagacaggcccaaagagagcaacacacacaggc

SEQ ID NO: 51826 - RNA, 70 nt, Homo sapiens
gggcgcgccgcgcggcccgcacgccaaaccggagccaagcaccgggaaaacgcagaggaacgagggggag

SEQ ID NO: 51827 - RNA, 71 nt, Homo sapiens
gaaaccaacccgaaccccgcacagagcagacgaaaccgacaagcgcgcaaaggaacagcaagccaaagagc

SEQ ID NO: 51828 - RNA, 76 nt, Homo sapiens
gcgggggaggcgagcgcgccgcccggagccgcgcacacgaagcaaagccagggagggaaccgaagccacgggcggg

SEQ ID NO: 51829 - RNA, 82 nt, Homo sapiens
cccgccggccgcccgggccacgcccccccagggcccaggcggaccgccccggaagcagaaagaggaagaagcaagccggacc

SEQ ID NO: 51830 - RNA, 77 nt, Homo sapiens
gaggggagcaggggccaaggagcacggacggacccagcacgaggaggcgcgaggagaggaggcggcggggaaagaca

SEQ ID NO: 51831 - RNA, 75 nt, Homo sapiens
ggaaagagcgcccaaaacagcccaagcaaggcgcggaaagacagacaacaaggcagaaaaaggaagaggagaaac

SEQ ID NO: 51832 - RNA, 72 nt, Homo sapiens
ggaccacaacaagggccggaccacccaggcggaccaccacgaacgacgcccaaacggccacggcacacacaa

SEQ ID NO: 51833 - RNA, 61 nt, Homo sapiens
cagacagcggcaagacaagcacggaaccgcccgagaccacccaggccacagaggaggaaag

SEQ ID NO: 51834 - RNA, 76 nt, Homo sapiens
aaaagcaaaaaggaaccaacaaaagaaggcccggacgcacaacagcaagaccagggccagacgaagcaccaaacgc

SEQ ID NO: 51835 - RNA, 76 nt, Homo sapiens
caagccggaggagaagcaagaaggcccggacacagcaaaccgggccacagggggagcgggccggagagaagagagg

SEQ ID NO: 51836 - RNA, 67 nt, Homo sapiens
ggacggcaaaaccacagacccacccgcaccagacgagaagacagaccaccgccagggagaaaaccca

SEQ ID NO: 51837 - RNA, 71 nt, Homo sapiens
caacaccgcccgggaaggagggagaacgacccggcgaagagaaagggaaggggcgggcggaagaagcaaga

SEQ ID NO: 51838 - RNA, 68 nt, Homo sapiens
cagacgcagggcgcccccggacaaagcggcgcacgcacggagacgacgggaggagcgagaccacccgg

SEQ ID NO: 51839 - RNA, 69 nt, Homo sapiens
aaaaagaagacaaccgggagacccagaacgaaccgaagcgccagccagaaaagagaacgggaaaagaac

SEQ ID NO: 51840 - RNA, 73 nt, Homo sapiens
ccaaccccgggcggcccaccaggaagaagaagcgcacaaggagcacaacagggagcggaagacgacagcaagg

SEQ ID NO: 51841 - RNA, 75 nt, Homo sapiens
gacgcaaaggagacccaaggaacaggccaagagagccgaacccaccgagccagggagagagggagaagagaccga

SEQ ID NO: 51842 - RNA, 75 nt, Homo sapiens
cgcagccccggggcccccaacgaccccgggccaggacccgacacaagggagcaggccagcgcggaaacgcgcgcc

SEQ ID NO: 51843 - RNA, 87 nt, Homo sapiens
cgacgggcacgcgacggaggcggcggacaggcgacagcgaccgcggcagggccagaagcccccaggaggagaacgagcaacggaagc

SEQ ID NO: 51844 - RNA, 78 nt, Homo sapiens
gccccagggaagcgcagaaagcaggcgaacccgcggcgcaaaacgccaagccagcagacggggccagcaagcacacca

SEQ ID NO: 51845 - RNA, 107 nt, Homo sapiens
ggacccagggagcacggccagaggaccaggcgaccagcaccagcccgaccagcaaggaaacggaggaaggaagaccaaagagacggggaacgaaagccggccaagca

SEQ ID NO: 51846 - RNA, 62 nt, Homo sapiens
gccaagccaccgagacccggaggaggcgaagcgagaggacagaaagccaacaggcagaccag

SEQ ID NO: 51847 - RNA, 58 nt, Homo sapiens
aggaaccgacaaaaggagagagaagggccaaaggaggagacagcaaggaagaagaaaa

SEQ ID NO: 51848 - RNA, 55 nt, Homo sapiens
gacgcgccgcgccccaaggaggcagcacggcaggagacgaggagaggacagcagg

SEQ ID NO: 51849 - RNA, 79 nt, Homo sapiens
ggccacgccgaggcgcccgcagccacgcggaggcggcggggagccgcgcgcggcagcgcggggaccacgagccaggacc

SEQ ID NO: 51850 - RNA, 84 nt, Homo sapiens
agacgggggcgagcgagcaccgagcaacacacgcagggaaggggccaccagaaggaggacgcagaagaccacaacagggacacc

SEQ ID NO: 51851 - RNA, 74 nt, Homo sapiens
gaccaccagaaggacaaaaaccgagcggagaggagaaagagaggaggaaccaggcgaccccggagcacacacca

SEQ ID NO: 51852 - RNA, 74 nt, Homo sapiens
cgcagacgcccccaccacgagagaacccaagcagaccgcaccagggaagacacaaaggaaaccgggcccaaagg

SEQ ID NO: 51853 - RNA, 82 nt, Homo sapiens
agccagacagcgggccggagcagccgcgggcgcccgaggggccgagcgagaggaagaccagcacaggacgcccgaaaccggg

SEQ ID NO: 51854 - RNA, 35 nt, Homo sapiens
gaacccagaagggcaaggagacgagcgccaaagac

SEQ ID NO: 51855 - RNA, 79 nt, Homo sapiens
cgccccaacaccagggaagagacacacccaggaaagggccgagaaagaagagaggaagaagaggaggaggaggaagagg

SEQ ID NO: 51856 - RNA, 75 nt, Homo sapiens
cgggccgagcgacccccacccagcccgagagcagacacgggagaccacggggggaaggaagcgagacccggcgcg

SEQ ID NO: 51857 - RNA, 87 nt, Homo sapiens
caaggagcaaagcagcggcgcagcccgggacccccgccagaaccagccacccagggccccaccccaccccgccgcggcggcgaagcc

SEQ ID NO: 51858 - RNA, 39 nt, Homo sapiens
cagccacaccacgcagggcccacggcccggacgaacggc

SEQ ID NO: 51859 - RNA, 30 nt, Homo sapiens
acagaacgaaacgccaggacgaggggaaga

SEQ ID NO: 51860 - RNA, 54 nt, Homo sapiens
acgcgaagaacccaaacaggggaccaggaccaaagaagaggcccagggaaagga

SEQ ID NO: 51861 - RNA, 76 nt, Homo sapiens
cccacagaggggcgacggggacgcccgccacggcccgccagaacgggcgggcccgcacagcccagaagaacggcac

SEQ ID NO: 51862 - RNA, 78 nt, Homo sapiens
aggggcagcagaaaccacccacccaaggaagacccacgccacaccaccccccaggccagaccgcaccgcgcggccgcc

SEQ ID NO: 51863 - RNA, 70 nt, Homo sapiens
aagcacagcaaacgcgaggagagaaaggcaggggaagcacgagagaaaggacccaccacaaagaggcagg

SEQ ID NO: 51864 - RNA, 64 nt, Homo sapiens
gggcccggaccaagccccgcccccaaaaaaccccacaaccgagagaggacaagaagcagagcgc

SEQ ID NO: 51865 - RNA, 74 nt, Homo sapiens
gaacccaaaggaggaaacagcggcaagccacagacggcagaccagcaggacagcacggccaaacagcagcagaa

SEQ ID NO: 51866 - RNA, 40 nt, Homo sapiens
gaggacagcggcccaggcggcgagaaacccagaagcaaga

SEQ ID NO: 51867 - RNA, 71 nt, Homo sapiens
cgaggcggccaccgcgacccggccgcgccggcgccgaccccgcgcgccaggggggagggaagaaaagcagg

SEQ ID NO: 51868 - RNA, 65 nt, Homo sapiens
gaggggaaaggagcaaagaggcggagacagagcgggagccaccagcgccaaagggaagccaggag

SEQ ID NO: 51869 - RNA, 78 nt, Homo sapiens
gacgcagggaggagcgggacaccccggaagcgggaaagggcgagagaaacgacgaagagagaagacaaggcgaagacc

SEQ ID NO: 51870 - RNA, 80 nt, Homo sapiens
caaggcgggagggaccgaaccgcgcggccgaacccccgccgaggccgccggagccccagacaccccccacacaccaccga

SEQ ID NO: 51871 - RNA, 84 nt, Homo sapiens
cgcaggaacccaaaggaaggaagaagaaaaccagggacggaagaggcgcaggagagggaggcgcggagaggcacaggccggcag

SEQ ID NO: 51872 - RNA, 87 nt, Homo sapiens
cacacgcccagaccgccccggggacagccagccccgcggaccagaccaggccgcggcccggacaccagcagccgcaacggcacacac

SEQ ID NO: 51873 - RNA, 58 nt, Homo sapiens
ggagaaggagggacgcaggcgcaggccagcccaccagaccagcccgcggacagccccc

SEQ ID NO: 51874 - RNA, 73 nt, Homo sapiens
cggacacggagaggaaggacagcgcgggagccaggaaacgcagaccccccacgagaagcaggcagagcaggca

SEQ ID NO: 51875 - RNA, 76 nt, Homo sapiens
gagccagaacgggcgaacggcaaagacacacaacaggaggggaccgagcagaacacagaagacagccgacacagac

SEQ ID NO: 51876 - RNA, 73 nt, Homo sapiens
ggcggacggaggagcaggcgagaagagaaggccagaaacagcaagaaaaacgcacacaaccaacaacgacgca

SEQ ID NO: 51877 - RNA, 61 nt, Homo sapiens
ccaagagaaacaacccacaggaaagagaggagaggagcgccggggcgcacgcagaagaaga

SEQ ID NO: 51878 - RNA, 80 nt, Homo sapiens
ggccgacacaagagcgcgagaccaacaggccaaagagaaagagaaaggagagcaagagaaccgggcagaagcacacacca

SEQ ID NO: 51879 - RNA, 72 nt, Homo sapiens
gaaagcagcagcagaaaacgaaggaagaggagggggagccccccagacccgaaaggagacaagaggacagcc

SEQ ID NO: 51880 - RNA, 78 nt, Homo sapiens
ggacaaagaccgaaaacggggcccggagcagagacgagcggaagagacaggcgacgggaagaagaggagccagaggcg

SEQ ID NO: 51881 - RNA, 76 nt, Homo sapiens
cagcaagcaggcacgcagcacaccccacaccagaacccagcagcgccagcacggcagggaacagagaacaacaacc

SEQ ID NO: 51882 - RNA, 84 nt, Homo sapiens
gacaacaggcagagaaaaaagaggggggagagccaggggagacaaagcaggaggacacaagaagggaggaaaggcggacccagg

SEQ ID NO: 51883 - RNA, 71 nt, Homo sapiens
ccggccgcccacggggccagagccggacgacccaagcgaaaaagcccacgacacagccaaaggggacccac

SEQ ID NO: 51884 - RNA, 78 nt, Homo sapiens
caccggccaagaaaagacaagaaacaggaaaagaaaccgaaagaacgcaaggccacgaccggaagggcaaaacaagcc

SEQ ID NO: 51885 - RNA, 65 nt, Homo sapiens
gacagcaaggaagcccagcacaaggaccccggcaccagcagcagccgcccgcaacccaggaccga

SEQ ID NO: 51886 - RNA, 69 nt, Homo sapiens
ccccagaacccccccaaccgaaggggccacgaaccagaagcaagcggccagacgcagcgcaccggcgcc

SEQ ID NO: 51887 - RNA, 59 nt, Homo sapiens
aaaaacagaacagcgcccgcgaaaggggccgggccccaacaccagaccaagacagggga

SEQ ID NO: 51888 - RNA, 79 nt, Homo sapiens
ccggaccgcagacgggggacgcagggaggagcgggacaccccggaagcgggaaagcggaaggccaaagacagacgggcc

SEQ ID NO: 51889 - RNA, 76 nt, Homo sapiens
gagaagccgcccgaacaccagagcacaggagagcaggaaagaaaaggccacccgggagcgcgcgccacagaagcca

SEQ ID NO: 51890 - RNA, 37 nt, Homo sapiens
gaagcaaagaccagaaagaccacaggaagaggcacgg

SEQ ID NO: 51891 - RNA, 71 nt, Homo sapiens
ccagacaagcgccagaaaagaacgaaaagacccaagaacgaccgaagaaaagcaacaaaccaacaacccaa

SEQ ID NO: 51892 - RNA, 86 nt, Homo sapiens
accgggccaaggaggcagcgggaccggcggccaaggcaacggacaacaaccacacagcgcagaagaggagccccgagcgcgcgcga

SEQ ID NO: 51893 - RNA, 100 nt, Homo sapiens
ggaggacgccccggaccggggggaggagcacaaccgcggagaggacggaaggagaacaagcagccagggcggcaagaggcagcaagacacacagacagcc

SEQ ID NO: 51894 - RNA, 77 nt, Homo sapiens
accacacgccggagcgcgcggacagcccggacagaccacacacacaaagggaaccggagaaacccagaaccaggcca

SEQ ID NO: 51895 - RNA, 78 nt, Homo sapiens
agacaaagcagcgcccgcgccgggcccggaaagcgccgcccagcagccgcagggacgcaccaaagaagacagacacgc

SEQ ID NO: 51896 - RNA, 78 nt, Homo sapiens
cagaaagacccgccgaaaaagcgagacaggagaacgcgccgccggccggggcgcagggacacggggggccaagggacc

SEQ ID NO: 51897 - RNA, 78 nt, Homo sapiens
cgcacaagcaaagaagcaacgaaaaaccccggaaaagcagcaaccgggcagcggaagaagagaagggagggcagaagg

SEQ ID NO: 51898 - RNA, 77 nt, Homo sapiens
ccgcgcccaaccgcccccccccagaacgcggcacaacaaagagagcagggagagaagggggagaaaaggaacagaaa

SEQ ID NO: 51899 - RNA, 80 nt, Homo sapiens
ggacgcgacacaagcacaaaagcggaggaaaagcgggcaccccagcaccccggccaccaacaccacgagccaaaccagag

SEQ ID NO: 51900 - RNA, 76 nt, Homo sapiens
cgccacccaagggcagacgaagcagagcaggacaaacaccaggaggacgaggagaaaccgcaggccccgcggagaa

SEQ ID NO: 51901 - RNA, 76 nt, Homo sapiens
agaccaaggaggcgggggagacaccgacggcacagccccaggggcgggccacgcgcggggcggcgccagggcacac

SEQ ID NO: 51902 - RNA, 89 nt, Homo sapiens
gcaggcagggccggccaaagcaagacagaggcaccaaaagcgaaggaagcccgccaccaaagccgaagccaaagcgaaggcaaaggcca

SEQ ID NO: 51903 - RNA, 76 nt, Homo sapiens
gcaacggcgccggccggcggggggcccccgcaaaccagggcagcgcagacaagggcgaacgaagagaaaaaaacaa

SEQ ID NO: 51904 - RNA, 79 nt, Homo sapiens
aaaggaacaccaagcggaaaagagcagcgcccagccccagcaggacagagaacacaacagacagaaagcaaagaacaga

SEQ ID NO: 51905 - RNA, 84 nt, Homo sapiens
cgacggggcggcccggagccggcgcgaaccggcccccgcagcgggacccggcaggcggacaccgaccgcaggaaggaggaggag

SEQ ID NO: 51906 - RNA, 43 nt, Homo sapiens
ccagaagcgaagggaagccggaggagcagccccagaccagacc

SEQ ID NO: 51907 - RNA, 84 nt, Homo sapiens
cggccacggccccaggccccaagaaaagcaccaacaccgaggacagcaggacgaaagacacccagcagccagccgcagcaggcc

SEQ ID NO: 51908 - RNA, 58 nt, Homo sapiens
aggccaaagccagagacagagcacaaagaaacaacgaacgagcaaggaagggccaagg

SEQ ID NO: 51909 - RNA, 76 nt, Homo sapiens
gaggggaaacagcggagacggaacgggagaagaggcaaagaaacaccaagcggggccagggcgggccgggaagggc

SEQ ID NO: 51910 - RNA, 69 nt, Homo sapiens
acaaagaccagaccaaggagggacccaacagggacaggcaaaggaacagagcacacagaccacaaggca

SEQ ID NO: 51911 - RNA, 79 nt, Homo sapiens
aggacaccacaaacggccacagaaaggagcacgcccaacgaaagggcagacagacggcagagccggaagaaaacagaag

SEQ ID NO: 51912 - RNA, 66 nt, Homo sapiens
cggggcccgcggaggagccgggacccggaagggacaccacccccggaaagcccaaccacgccagag

SEQ ID NO: 51913 - RNA, 72 nt, Homo sapiens
aaagcacaacacaaaaagaaaagcaaaaaggaaagaaacccccgacggccaaacgaaaaaaagcggaaagga

SEQ ID NO: 51914 - RNA, 69 nt, Homo sapiens
ccccggcgccgcgccggcggcgacgagggggaccaagaaggaacacaaaaccaaaaaccgaagaagaaa

SEQ ID NO: 51915 - RNA, 72 nt, Homo sapiens
ggagccagaaaggggacgcgggaaagcgcagacggggaacgggacagggcagcgcaaaccggggaacagacc

SEQ ID NO: 51916 - RNA, 77 nt, Homo sapiens
ccccggggacacccggcacgcagcggagagcccgccaccaaccccgacaggagggggggcagcagccaggacgaagg

SEQ ID NO: 51917 - RNA, 84 nt, Homo sapiens
gaagaggcaaacgccggaagaagagacccacccagcagcgagacgaggccaaagccaacaaccaggaaacagaacgacagcccg

SEQ ID NO: 51918 - RNA, 136 nt, Homo sapiens
cagcgcccaaggcgggcggggcggagccaggagccccacggagcgcgcggagcgaacccaccccagggcgcaagcccgccccccaaagcgaagccaaagcgaaggcaaaggccaagaaggcagggaaagggccaca

SEQ ID NO: 51919 - RNA, 76 nt, Homo sapiens
aacaacccggagccagggacccacccccgacagggacacagggagccccagacccacagccacagcagacgggggc

SEQ ID NO: 51920 - RNA, 84 nt, Homo sapiens
agcaccgggacgcacagagaccggaagaccaagcaggagaaccgaccgaccaggaagaggggcagaagagacggaccaaagacc

SEQ ID NO: 51921 - RNA, 77 nt, Homo sapiens
aagggccccacccgggcagaagagacgcggaccacgggagaacggcagaaccaagggaccaaagcgggacggcaggc

SEQ ID NO: 51922 - RNA, 59 nt, Homo sapiens
ccgcgggcggccaacaagcaggagggagaccggagagccccagacgccagcgccaagag

SEQ ID NO: 51923 - RNA, 68 nt, Homo sapiens
agcagaaagacaccagccagcccgccaagcccgaagaggccacaggggagacaaccccaggacgggcg

SEQ ID NO: 51924 - RNA, 85 nt, Homo sapiens
ccagccgacggagcaggcagcagcccaggagaaaaaggcagccccggagacgaaaagacaaagcaccaccaacagacgaggaaca

SEQ ID NO: 51925 - RNA, 74 nt, Homo sapiens
ccgcgacagcgaacagcgcggccgcagggcggagaacggaaaagcaccaggaagcagagaggaccgcagaaggg

SEQ ID NO: 51926 - RNA, 73 nt, Homo sapiens
gcaaagaggaggaaggagggaccggcccccagcaagccccagagaaccagaagaacccacaggcacgagaacc

SEQ ID NO: 51927 - RNA, 76 nt, Homo sapiens
ccccccaacccccagggggcagaaggaggcagcaccgagcgccccccggcgaagggcccggaggggccgccccacg

SEQ ID NO: 51928 - RNA, 60 nt, Homo sapiens
agcggagaccgacacaacccccggggaccaagaaaggcccagggaccaaagcccggacaa

SEQ ID NO: 51929 - RNA, 78 nt, Homo sapiens
cagcaacaggaaggggcagccgaagccagggcgaaggaggccacaaaggcagaacggagagacacaggcggggagagc

SEQ ID NO: 51930 - RNA, 53 nt, Homo sapiens
ggcagcaaagaagaggcagccggcacccgcacaacccagggggccgaacccag

SEQ ID NO: 51931 - RNA, 69 nt, Homo sapiens
gaaggaccaagaaccagcagccaagaagagggaaagaagacaggaaacaagggaaggacgacaaaagag

SEQ ID NO: 51932 - RNA, 79 nt, Homo sapiens
cgagcgcgaggaaaaggcggcgggaggaaaagacgagggaagaagaccgacaacaaccaggggaagggaaaaaagaaga

SEQ ID NO: 51933 - RNA, 70 nt, Homo sapiens
cccgccggaggaacggcaacaaacgcgcagccgaagcgagcgaacaaccaagaaacagaagggaacccga

SEQ ID NO: 51934 - RNA, 72 nt, Homo sapiens
gaagaaccaggccgggccagacacgacaccaccaccccaccccgggccaacaacagggcagaagggcagcac

SEQ ID NO: 51935 - RNA, 79 nt, Homo sapiens
gcccaaaccccaggccaagcagccaccagcagcccccagagcgggaccacagggaggaaaagagccagaacaaacacag

SEQ ID NO: 51936 - RNA, 75 nt, Homo sapiens
gcacccccaggggaccaacccaggggacgaagggaacccgccgggcggcccggcacccagccccccggcacccag

SEQ ID NO: 51937 - RNA, 73 nt, Homo sapiens
acgcacaaaaaagggcagaagagaagcaggaaggaggcagaggcacaccgaaagacccagccccgggccggcg

SEQ ID NO: 51938 - RNA, 76 nt, Homo sapiens
aggcgacaaaagaaaacgacggaccagaggcccacgaaagggcgacgacagcgggaacgaagaaccacaaagccaa

SEQ ID NO: 51939 - RNA, 110 nt, Homo sapiens
agccgaggcccaagcccgcggagcacccgccggccagagaagagaacagagccaggacaaaaccaggcagaaccaacacgaacccaagcacaaacaagaaaacgagcagg

SEQ ID NO: 51940 - RNA, 74 nt, Homo sapiens
gaccgccagggcgacaccaacaaaccagccacgccggaaccggaaacacaccagaggcgcagcagcgccacagc

SEQ ID NO: 51941 - RNA, 84 nt, Homo sapiens
acacaccccaggaaaaagacagcccgcagcacgaccagcaggaacgcccgagaaccagcagcccaaaggagagcggaaaaaacc

SEQ ID NO: 51942 - RNA, 80 nt, Homo sapiens
gacccaaggagagcagcggaggcgacgcgcccagaaggcgggagcggaaaggacgaagaaaggagggcaggggaagggga

SEQ ID NO: 51943 - RNA, 72 nt, Homo sapiens
ggagcggagcacgcacagggcgcaggccggcacgagagaggaacggggggccacgacgggccaaagcggaga

SEQ ID NO: 51944 - RNA, 79 nt, Homo sapiens
caagcgggagggcgggcgcaggcggagaaggccccggccccagagggcaccaaacgacaacccccaccagaccaccgcc

SEQ ID NO: 51945 - RNA, 54 nt, Homo sapiens
aagccgacgcgagaggaagacacccgaccgacaaaaggagaagccagcaacagg

SEQ ID NO: 51946 - RNA, 97 nt, Homo sapiens
gggagggcgggcgcaggggaccgcaacaggaacggaggcgggcggccagacaaaacgagcgaaccgcccaagacgggaacagcccagaccagacgac

SEQ ID NO: 51947 - RNA, 81 nt, Homo sapiens
ccagcccccacccgccggggacggggacaagaagaggggagaaggcggaagccaggacaaggcgaagccgacgagcccgaa

SEQ ID NO: 51948 - RNA, 59 nt, Homo sapiens
gacccgcccagcccccaagagcgggaacaggaaaaaccaaggcaaggaaaagaagccag

SEQ ID NO: 51949 - RNA, 71 nt, Homo sapiens
ggcggacaccccgggaaggcgggcaagcgggagacacgagaaagagccacggcaggaagcacagaacccgg

SEQ ID NO: 51950 - RNA, 74 nt, Homo sapiens
ggaaagcggaaagccaagggaagcgggaggcggagagcaaggaaagagacgacaaagcgggaccagagcaagga

SEQ ID NO: 51951 - RNA, 56 nt, Homo sapiens
ccagaccggagcagcggggacagacaaaacagaggagaccagaccagaagccccga

SEQ ID NO: 51952 - RNA, 75 nt, Homo sapiens
cgcgaaaaggaagcggaaggaggaagcacccgcgagaaagaagggcacagcgaaacagcccggccaaaagagccc

SEQ ID NO: 51953 - RNA, 76 nt, Homo sapiens
agaggccacaacgcaaaacaacaccaccccgcccgcagcagcggagaaacacacgaaacaaagagccagggacgag

SEQ ID NO: 51954 - RNA, 66 nt, Homo sapiens
agggccacagcacgcagccccaggcagaaccggaacagaagacagggaaggacccaagagcggaga

SEQ ID NO: 51955 - RNA, 71 nt, Homo sapiens
gaccaaggaagcagacaaaagccagaaaggagacaagaaaaaggaaaaacgaacaaaggacaaagcaacga

SEQ ID NO: 51956 - RNA, 55 nt, Homo sapiens
gcgggaagcccagcacacacccccagcaaggcgccggaagcagacaaaaccaggc

SEQ ID NO: 51957 - RNA, 71 nt, Homo sapiens
gccagagcaggagacagccccaccgaggcaccaccaaccaaagcggcaacccgacagaccgaaagggaagg

SEQ ID NO: 51958 - RNA, 52 nt, Homo sapiens
agggaggcgccagcgcgacgagaggcacgaccaaaacaagaaggcagacagg

SEQ ID NO: 51959 - RNA, 60 nt, Homo sapiens
ggccaccgacacgagacaaccgggagccgggagacggaggcaagcaaaaacaagccgaca

SEQ ID NO: 51960 - RNA, 68 nt, Homo sapiens
ccccaagggcgggaacagcaagaggcacggagcccaggcgccggaacccggaccaaggacccaccggc

SEQ ID NO: 51961 - RNA, 90 nt, Homo sapiens
ggaccgagagcggaccgagagcgcgaaacgcacgagaagaacaaagggcaaaggacacaccgcacaaacggccgcgcaccacacaacacc

SEQ ID NO: 51962 - RNA, 66 nt, Homo sapiens
ggcagggagagaaggcccacgaggccgagaacaccaggcgggggagcaagagacgaggaagaacca

SEQ ID NO: 51963 - RNA, 47 nt, Homo sapiens
gccgccggaacaaccacaaagccagccagcgcggaccggaaacaacg

SEQ ID NO: 51964 - RNA, 78 nt, Homo sapiens
ccaagcccccaaccggacgccgccggcgcgcccgcaaagagagggagaaaccgaaacgaacccagccagaaacacaaa

SEQ ID NO: 51965 - RNA, 75 nt, Homo sapiens
cagcccgggggcggacacaaccgcgggcccgggacagacacagacgccggcccaaacgaggacacagaaaaaagc

SEQ ID NO: 51966 - RNA, 67 nt, Homo sapiens
ccccacaccgcggcagcggcgcccgagcggcagaccgaccaccccccagacgacaaagccgaaaggc

SEQ ID NO: 51967 - RNA, 64 nt, Homo sapiens
acgcagaaggagggggccgacaacccaccagacaccgaaacccccaagcccaaggaaaggccca

SEQ ID NO: 51968 - RNA, 73 nt, Homo sapiens
gcagcagcaaggggggagacccggcaagagccggcccaggggaagcaacgcaggcggaggcaaggcgcaaccg

SEQ ID NO: 51969 - RNA, 77 nt, Homo sapiens
acaagcaggccacgagaaccgaagaaagccaaggacacgcaggacgaagaaggaggagagcccagaagaaaccaaag

SEQ ID NO: 51970 - RNA, 85 nt, Homo sapiens
gggagaggagcgggaaacgggagggaaccagcaacaagccggcagcggaggaggagaaagagaggacccccggaccggcccgagg

SEQ ID NO: 51971 - RNA, 73 nt, Homo sapiens
aaaaggcaacacagaacccgcaaaggggagacaaagcaggggagagaaaacgaacccacagaaccagggaggg

SEQ ID NO: 51972 - RNA, 116 nt, Homo sapiens
ccaagcccagccaagcccagccaagccccgccgacgcgggcaccggagccagccccgcagcggccggcaccaggagaggacggacgcaagaagcgcagcgagcgggaagcaggcaa

SEQ ID NO: 51973 - RNA, 84 nt, Homo sapiens
cgcagccgcccagcacacccgccgcggcgccggaccccaaagagcacagcacacaccgcccggcgcggccccaacagccgcggg

SEQ ID NO: 51974 - RNA, 75 nt, Homo sapiens
gcgagaacagaaggagacagcgaagcggggggaaggagcgaaagagaggccgcaagcacggcgaaggcaggcggg

SEQ ID NO: 51975 - RNA, 58 nt, Homo sapiens
gaaaaacggagagccacaaaaaaggaagcgaaagaacagaggagcggaaacgcaggag

SEQ ID NO: 51976 - RNA, 85 nt, Homo sapiens
ccgccgccgccgccaccacccacccggacacaggacccaaagacaggaccacgcaccagcagagaaggaaagcaaaccgaagcag

SEQ ID NO: 51977 - RNA, 76 nt, Homo sapiens
aaacgacaaggacagagaaagagaaccgaaagaagagaaaagaggaagaaaaggccccagaaaggagaaccaaccc

SEQ ID NO: 51978 - RNA, 54 nt, Homo sapiens
acggccgggacaaggcaacgccgcgcccacacaggaaagaccacagcaagacca

SEQ ID NO: 51979 - RNA, 81 nt, Homo sapiens
caggccggggaggaggcaggacggccgggagaggaagggcggcggcggcaggcggcagaggggaggcccgccggacgccaa

SEQ ID NO: 51980 - RNA, 76 nt, Homo sapiens
accgcagcacgccaagcccgcaacaagaggaggcccagcaagacaagggacccaggccccccggccacaggagggc

SEQ ID NO: 51981 - RNA, 57 nt, Homo sapiens
cagaacggagagccccccagaaaaggcgaccggcccgaggaccgccgcacgaccaaa

SEQ ID NO: 51982 - RNA, 75 nt, Homo sapiens
gcacccccggccggaggcaccagcagagcgccgccgcggcccccgggagacgacccccaaaaaggaaacaaggcc

SEQ ID NO: 51983 - RNA, 71 nt, Homo sapiens
aaggggccggcaacaccagacaccaaggacagcccgcaagggcggagaacggaaaagcaccaggaagcaga

SEQ ID NO: 51984 - RNA, 63 nt, Homo sapiens
aaccccggaagaggcgcggagggacggcgcgccgcaggcaggagcacccccccggcagaccac

SEQ ID NO: 51985 - RNA, 78 nt, Homo sapiens
ggccacgccaccggcgcagcgaacccccgcgggccccagcgaagaagagaccacggacagagccacacaagcgcaggg

SEQ ID NO: 51986 - RNA, 53 nt, Homo sapiens
cgaaagagggaagcggcaaaccaaaagagcaacgagacaagcagacagcaagc

SEQ ID NO: 51987 - RNA, 118 nt, Homo sapiens
ccccagagcggaaggcgaagcacaaacagaagagcgaaagcgaagcaggaagaggacggaggagccaaacggggcgccgcgccaagagccccccaaccccgcccagaagacaagaggg

SEQ ID NO: 51988 - RNA, 71 nt, Homo sapiens
agcggaaagagcgacaaacaaagaaagacggacaaggggggcggcgcaggacgagagcccccgcaggaccc

SEQ ID NO: 51989 - RNA, 79 nt, Homo sapiens
cgcccgcccaacagcagcaacccacacgcccgggcgggacaagcggcaagggaaaacgccgccgagccggagaaggaag

SEQ ID NO: 51990 - RNA, 77 nt, Homo sapiens
aacccggaacgcagagacgaaggagaagccagagagacgagagggacaggagcgagcaagcccagagcggccgccag

SEQ ID NO: 51991 - RNA, 76 nt, Homo sapiens
cacgggacccgcgggccccggcccagcaaccgacaacgcggcccgaaaagaaagggggccagagcagcaagaacag

SEQ ID NO: 51992 - RNA, 73 nt, Homo sapiens
gcccccgcaacgcccccggcccgcagcccccgccggccgcccaacaccgaacaccgccccaaccacggagcca

SEQ ID NO: 51993 - RNA, 71 nt, Homo sapiens
gaaccacacgccagcaccgacgaacccagccccagaacggaacaggagagcaaagcgcggaggggaccagg

SEQ ID NO: 51994 - RNA, 71 nt, Homo sapiens
aggcgcacaggcgcgagaaaggaaagaaacaaggcccagcggcagccaaaccaagagcaaccgcacaagga

SEQ ID NO: 51995 - RNA, 88 nt, Homo sapiens
cagacccgagccagacacagagcaggaacgcagccggggacaccaaacagcacccacggaagcaccacaaacaagcaaaaaaaacccg

SEQ ID NO: 51996 - RNA, 59 nt, Homo sapiens
ggagcccgcagaaccccacagcaagaggacggaggcaccaaggagggacagggccaagc

SEQ ID NO: 51997 - RNA, 76 nt, Homo sapiens
ccacggcccaggaaccgaaaaggcgaggagaagacggcaaaaaacgcggacacagaaaacaagggaagagggaaac

SEQ ID NO: 51998 - RNA, 76 nt, Homo sapiens
gaccacggaaaaagacccgaggccacgagaagccacgagcccagaggggcagagccgccggacccaggggaaaaaa

SEQ ID NO: 51999 - RNA, 50 nt, Homo sapiens
cgcgccgagaagcacccgcgacccagaaggagcacccacgggagaccggg

SEQ ID NO: 52000 - RNA, 103 nt, Homo sapiens
agagcacgacggaccaagacgagcccagcgcaaccccaagcgcccaaagggcaaccgccaccaacgcggggggcggcaccaaccgcccgacgccggacccggc

SEQ ID NO: 52001 - RNA, 80 nt, Homo sapiens
gggaaacaccgcgggccgagccccaagggaccgcggagacaggcacggagccagcacccggcaacaacaacacgccagcg

SEQ ID NO: 52002 - RNA, 79 nt, Homo sapiens
ccggggacacgacgccccaaaccgccaggagaaaaaagacagaccaggaccgccgggcaggacacgccccgacaggcca

SEQ ID NO: 52003 - RNA, 68 nt, Homo sapiens
ggaaacaaagagaaacggggacacgccgagagacccaagaaacagccccagccgagaggcgaaagaga

SEQ ID NO: 52004 - RNA, 45 nt, Homo sapiens
cgaaagccccacccgccgcagcaagcagagggcacgcagccagga

SEQ ID NO: 52005 - RNA, 81 nt, Homo sapiens
gcacacaaagaggaaaggacacaaggcccagaaacacccgagagagggggaaccggggaaggcaccggcaaggggggaggc

SEQ ID NO: 52006 - RNA, 82 nt, Homo sapiens
gagcggaggcacagcggagcggcgagccgcagaacaccaagcgaaaggacagaaaagagacggaagcggaggcccggaccga

SEQ ID NO: 52007 - RNA, 63 nt, Homo sapiens
gggacccgagaaaaggaagggacagaacgagagccagacagcgacaaggcggccggaaaaaag

SEQ ID NO: 52008 - RNA, 71 nt, Homo sapiens
ccccccccaacaccgcgacacgcagggcaaaggaaacaggagaaaggcaggaagcgcgccacagcaaagaa

SEQ ID NO: 52009 - RNA, 63 nt, Homo sapiens
gcaagcagggaccggagggaagaagaacgcacgccaagcgcagcaggaagcagggacagacag

SEQ ID NO: 52010 - RNA, 73 nt, Homo sapiens
gaagagaaccagaaaccaaaggagagcagagaacgcacgaagagagaagggcacagaccaagacaacgaaccc

SEQ ID NO: 52011 - RNA, 56 nt, Homo sapiens
aaaagaccaaaccggccggcaagagccaaggggcgagcgaccagggaagacaagcg

SEQ ID NO: 52012 - RNA, 86 nt, Homo sapiens
caaaggcggacacgaaaccaccgggaagcgccggggaacgcaggaacaaccagccaaagcaaccagaaaccgacacgaacacgggc

SEQ ID NO: 52013 - RNA, 78 nt, Homo sapiens
gagaaaagagagagagccacaagacacacccaaagacggcagaccacaggagaccaaggaacccagaaagggaggagg

SEQ ID NO: 52014 - RNA, 78 nt, Homo sapiens
accaggaggccagggggcgccagcgccggccaccaagggcagaggccaccccggagggccagaaccacaaggaaacga

SEQ ID NO: 52015 - RNA, 51 nt, Homo sapiens
agcaagccccaaaaaggccagggaacgaccggagaaacgcaaagaagaaga

SEQ ID NO: 52016 - RNA, 81 nt, Homo sapiens
cgagccacggagcaaggggccagggagggcagaacgacgaaagacggacaggacgagggagagggcgaccacaggccaagc

SEQ ID NO: 52017 - RNA, 71 nt, Homo sapiens
agcaagcccagaacacagaggaaggggagaagaaaaagcagcaaaagagaagcaggaggggaacacaggca

SEQ ID NO: 52018 - RNA, 79 nt, Homo sapiens
ggacgccacccgggggcacagcaagggagaagcgccggaccgggcaaggggaggaggaacaaaggacgacgggacacca

SEQ ID NO: 52019 - RNA, 78 nt, Homo sapiens
gcaaaaccagaaccgaaacggaaagaagcaccggagagacagcacagcacccacaaagcaacggcccgagagccccca

SEQ ID NO: 52020 - RNA, 73 nt, Homo sapiens
ggccgaaccccgacccaggaggcgcggaacccccacaacccgagaggagcaggaccagagagcacccaaaccc

SEQ ID NO: 52021 - RNA, 79 nt, Homo sapiens
ccacggccccccgaagagaacccccccgacggaaccggaaaggcggaacccggaagaggccaggggaggaggagggacc

SEQ ID NO: 52022 - RNA, 77 nt, Homo sapiens
acaggggaacagacagaaggagcaggaaccaaagggagaggcgcaccagaaggggaggaccaggagaagccaaccag

SEQ ID NO: 52023 - RNA, 72 nt, Homo sapiens
gccccagaccgcggcgaaaggggccagaacgaagcacaacaggcagcgggaaaaccgacacggagaaaacgc

SEQ ID NO: 52024 - RNA, 73 nt, Homo sapiens
gcccccccccagggccaggcgccgccagaacgaaaaacgagcacaacgagaaccgcgaaagaacgccgaaagc

SEQ ID NO: 52025 - RNA, 82 nt, Homo sapiens
aaccgcgccggaccgggccggaaccacgaggagagcaggagaccagaagacgcggcccaggccacccggagaaaggccacgg

SEQ ID NO: 52026 - RNA, 63 nt, Homo sapiens
gaagaaaacccggaacaaagaagagacaacggcaagcggagaagagcaaggccgaaccgagag

SEQ ID NO: 52027 - RNA, 88 nt, Homo sapiens
cggcggagcgggagcggccggaggagccaggacgcagcccggcggacgccggcacagaacgccccccaggccacccaggaccagcggc

SEQ ID NO: 52028 - RNA, 67 nt, Homo sapiens
cccacgcgcgccccaccccccccccggagccaccggaaaacgacagaagcgaaccaagccaacggaa

SEQ ID NO: 52029 - RNA, 81 nt, Homo sapiens
aggcggcccacggcagcgaggcgcgcccaagccccacgacacccaaccccaccagcccggccgaccaagagggcacccaac

SEQ ID NO: 52030 - RNA, 72 nt, Homo sapiens
cgaggcgccgcggcacgcgaggccccgccaggccccacggggcaccggagcaggagcgcgcggcgacagcgg

SEQ ID NO: 52031 - RNA, 72 nt, Homo sapiens
agaaacagaaaagaccaagaccaccaaggcaaagcggaaagcagaaacacaaaagaagcaggggaggggcgc

SEQ ID NO: 52032 - RNA, 64 nt, Homo sapiens
aagggaacagcaaaacaaaggacaagaacgcggcagaacggaggcaggcagcacgagacacacc

SEQ ID NO: 52033 - RNA, 87 nt, Homo sapiens
gcaaaagaggaaccgacccgaagacccgaagaacaggcacacaccaacgggacgacaggaaaaggagcaggaaaagcacccacccac

SEQ ID NO: 52034 - RNA, 75 nt, Homo sapiens
aaacaccaacaccccagcgcaccagccaaacccagccgccaggagcaaggcagcgacccagggcacagcggggca

SEQ ID NO: 52035 - RNA, 81 nt, Homo sapiens
gacggaccgagaccggaccgagagcggaccgagagcgcgaaacgcacgagaaggaaagaagggggcgaaaggaagcccaga

SEQ ID NO: 52036 - RNA, 70 nt, Homo sapiens
agaaagcagaagccccaaaaacagcagaggagcagggacagggaggaaaaccagagagaaggagagcccc

SEQ ID NO: 52037 - RNA, 72 nt, Homo sapiens
ccccggggaagccaccgcacagcgaccagggagaaaccgaaacgaacccagccagaaacacaaaacgaagag

SEQ ID NO: 52038 - RNA, 74 nt, Homo sapiens
aaggcgcaggagcccggccaccacacccagcggacagcacagccagcagaagccagagacgggggacaaaaagc

SEQ ID NO: 52039 - RNA, 40 nt, Homo sapiens
gaccacaagaccgggggagggacaccgccaaacaaggacc

SEQ ID NO: 52040 - RNA, 56 nt, Homo sapiens
accacacagcagcaccgcccggagggaaagcacaaagcgcggaaaggcaacacgga

SEQ ID NO: 52041 - RNA, 89 nt, Homo sapiens
ccgcacagccgagccccagcggaaccagagcgcgcgacaaccacacaaaaaacaagcaccaagccccagaacagcccaaaggcccggag

SEQ ID NO: 52042 - RNA, 78 nt, Homo sapiens
acagagaaagacacggacagaaaaggcaaggaggaggcccccacaggcacaaaggggcagccagccaaagagggccag

SEQ ID NO: 52043 - RNA, 66 nt, Homo sapiens
cggggaaagacacccagaacacagcaagccgaaggaaggggaggagcacagaacgccaggaccaaa

SEQ ID NO: 52044 - RNA, 74 nt, Homo sapiens
cacagcccccacaccaagcccgccaggccgacaggacgggagggagacgggccgcgcaccgcccgaccagccca

SEQ ID NO: 52045 - RNA, 71 nt, Homo sapiens
cagcaaccagagggccacccgaggagccgcccccggcaaagagagggggacaaggacagggacaagcgcac

SEQ ID NO: 52046 - RNA, 74 nt, Homo sapiens
gccaggcgacgccacccaagacacaaacggcgacacagccagaaaaagcgggagcagcggcaacagccagggga

SEQ ID NO: 52047 - RNA, 37 nt, Homo sapiens
gggcagcgccaacaggccaaaacagaagaggcaaagc

SEQ ID NO: 52048 - RNA, 39 nt, Homo sapiens
gaaacaagacagcaaggagaggacagagacgaggcgggc

SEQ ID NO: 52049 - RNA, 97 nt, Homo sapiens
accgcgcaggacgccaaaccaagccgcagggggaaggccccaccgcagcggcggacgagcaggacaggccgcaaagggacgagcccacccagcaacc

SEQ ID NO: 52050 - RNA, 80 nt, Homo sapiens
ccccagcccgcagccccgggggcgggaggcggagacacgagccgaccgcacagaggaggccaccagcaacggaccacggc

SEQ ID NO: 52051 - RNA, 83 nt, Homo sapiens
caggagagccgaggagggcggggccgccaggagcgcaggaagcagagaaaagcaagggcaaacgggggcacagcgcaaaggaa

SEQ ID NO: 52052 - RNA, 75 nt, Homo sapiens
agagaagagaggaaaagaaaaaagcaacgcaccaccacggaggaccaacgccaagaagcaacacgcaacccggcc

SEQ ID NO: 52053 - RNA, 70 nt, Homo sapiens
agccggacgagcagaggagaccgaacgggggcgcagaaaacccacggccccaccacagcgagccaggagc

SEQ ID NO: 52054 - RNA, 77 nt, Homo sapiens
gggggggcaaacccgagagaacggcggcggagaaaccaccacaaacacgaggccagcaacgaccaacaagacagacc

SEQ ID NO: 52055 - RNA, 75 nt, Homo sapiens
ggcgagcgcaggaagccccacgccgagccgggagcgaacccagcaccccccgaacacagaagagaacccgaacac

SEQ ID NO: 52056 - RNA, 74 nt, Homo sapiens
agcagaaagccggaaggggcaagcgaacaaagcagccccaaccacacccagacaaaccaaccaaaggaaacaaa

SEQ ID NO: 52057 - RNA, 80 nt, Homo sapiens
ggcgaggcaggcgccgggggaggccacagcggccgggaccaagcgagggacagcaggaagccagaggagaaaaaagggcc

SEQ ID NO: 52058 - RNA, 58 nt, Homo sapiens
aggaggaggaggggcccggcggcggggaggcagggaaccaaagacaggacaagcgcgg

SEQ ID NO: 52059 - RNA, 80 nt, Homo sapiens
gaggcccgcggagaccagggcccacgccgaagcaccacaagcgacaggaaggagacgccaaggaaaagccaaagaacaag

SEQ ID NO: 52060 - RNA, 73 nt, Homo sapiens
aacacgaggccacggggaaacacagcagaacacagcgagcgaacgcaggaggccgagaggcgagagggccgag

SEQ ID NO: 52061 - RNA, 60 nt, Homo sapiens
ggggacacgacgccccaaaccgccaggagaaaaaaggagccccgacgcggcacaagcgac

SEQ ID NO: 52062 - RNA, 73 nt, Homo sapiens
gaagacaccaaaaagcaaacggaccagaccgaccaccaaaagaagggaaaaggccgaggcacagcgggaagac

SEQ ID NO: 52063 - RNA, 76 nt, Homo sapiens
gagcccggccgccagaccacagcacagccgggaaggggagccaccagccccccggcaccaagccacaaaacaggcc

SEQ ID NO: 52064 - RNA, 78 nt, Homo sapiens
gaaaaccgccagccgagaggagaaccaggaagaccagcccgcccgagccacacacgaggggaccgaaagagcgccgga

SEQ ID NO: 52065 - RNA, 72 nt, Homo sapiens
cccgacagagccccaacgcaacgccacaaagcggcgcggcaccccagaacacagccaaaccaagagcaaccg

SEQ ID NO: 52066 - RNA, 84 nt, Homo sapiens
cacggcaccgaagccccgagccccccagcgcaggagggaagcggacacacaggacgagaaacccgaccacacccaggcagcacc

SEQ ID NO: 52067 - RNA, 73 nt, Homo sapiens
aaagcaaagaagcgggagaagccggaaggagcggacagggggaagaggcagaccaggaggcccagcccacggg

SEQ ID NO: 52068 - RNA, 66 nt, Homo sapiens
ccacgaaaaccccagaccgaaaggaaaacaagaaaacagagaaccacagaccagagacaccacccc

SEQ ID NO: 52069 - RNA, 87 nt, Homo sapiens
ccgcgccacacgcgagggcagcaccgcagaggacccaaagcagaaagcgaaaccggaccaagaaaaaacaaaagcaaaaaagaagca

SEQ ID NO: 52070 - RNA, 79 nt, Homo sapiens
cacaccggaacaggaacccagcaacaaccgccagggccgacgccgggcaagccaagccagccgcccgggaaggccaaga

SEQ ID NO: 52071 - RNA, 78 nt, Homo sapiens
agcgaggacgccggcagggcagcagcccggacccggaaagagcggcggccgggggggccggaccccccgaagccaaag

SEQ ID NO: 52072 - RNA, 82 nt, Homo sapiens
cacggacagcggcaggcgcagggaggccccgacggcacagcaaacgaaaaccagaggaacgcccaagaaaggacacggcaag

SEQ ID NO: 52073 - RNA, 80 nt, Homo sapiens
gaaggccgggacccggccccggcccacaggggggggcaaacccgagagaacggaaaccaaacaggcagaaaacgaggccc

SEQ ID NO: 52074 - RNA, 84 nt, Homo sapiens
agaaggccacacccaggcagcaagggcaccgcgagcaagaccaagacacccaggagaaagacagcggggaaaagaaaaaggagg

SEQ ID NO: 52075 - RNA, 37 nt, Homo sapiens
aaagaacccccaaaaggggcggagaacggaaaagcac

SEQ ID NO: 52076 - RNA, 57 nt, Homo sapiens
gaaggaccaagaaccagaaccagagaaccccaaagacaaaagagcgaaaacaggcaa

SEQ ID NO: 52077 - RNA, 74 nt, Homo sapiens
aggacacgaaacagagaggggaaggagcccagcgacgagacagacccagcacggaccccccccccagccgggcg

SEQ ID NO: 52078 - RNA, 118 nt, Homo sapiens
ccggagcccaggaacaccaccggaccagaagcgggccagccagcaggccagcccaaacacgggcccgcagggccccagaagggcgaagggcacaaacaagacccaggacaggaggccc

SEQ ID NO: 52079 - RNA, 79 nt, Homo sapiens
ggagaacgcccgcggacgacccgagaaggcccgggggaagaggaaaagggagaaggccaaaggcaccccagcaggaagc

SEQ ID NO: 52080 - RNA, 84 nt, Homo sapiens
ccgcggggcccgagggcaaggagcagggaggacaacagcacaccgaaccaaaggaaaaggggaggaaggcgcacaaaaggcgcc

SEQ ID NO: 52081 - RNA, 79 nt, Homo sapiens
cagacgcagcggcggaggcccccggccaagcaaaccgcagagcggcaacgggagagaagaaagcaaagacagggagaac

SEQ ID NO: 52082 - RNA, 76 nt, Homo sapiens
cacagaaacagacgaaaccgaacgaaaggagaaacggaaaagacccccagacgaacaagacccgggagagggccca

SEQ ID NO: 52083 - RNA, 71 nt, Homo sapiens
aaagccccaggcaccaaaagggcaggcccaccgaagacagaaaaaacggggggaccacagaaccccaaaac

SEQ ID NO: 52084 - RNA, 78 nt, Homo sapiens
agcccaagagcacaggggaagaagcacagccacgagccaacacagggccacgggccaacgcaacacgccagggacccc

SEQ ID NO: 52085 - RNA, 102 nt, Homo sapiens
ggcaaaaggcggaggcaaacggcaaagggagagcaggcggggcaagcagaaacaaaggaggagaggcccaagaccagcgaaccccccgcccacaccccccaa

SEQ ID NO: 52086 - RNA, 66 nt, Homo sapiens
agaaagggaggcggaacagacacaagcgggacggaagaggcccggcgaccggacagaaaccaagcg

SEQ ID NO: 52087 - RNA, 57 nt, Homo sapiens
gacggcccgaacgagcggaggccaacaaaacgcaaggcggcggacacaagcaagaga

SEQ ID NO: 52088 - RNA, 70 nt, Homo sapiens
ggcgcggagcacgagccacggcagaaccaaacccaccgcaagacagggaagcgaacagagacagacccgg

SEQ ID NO: 52089 - RNA, 83 nt, Homo sapiens
ccaggaaaggaagcccagcccccgcagcaaacagggcccaccagaaaggcgaaaagcgaagacagccccgcggaaggacaaaa

SEQ ID NO: 52090 - RNA, 82 nt, Homo sapiens
cacaggcaaagagcgagcacaccagcagggaaacgaacccgaggcgcccagaaccaggcacagcggggccacgaggaaaaag

SEQ ID NO: 52091 - RNA, 87 nt, Homo sapiens
cagaacaccaccgcggcgcgggagacgagccggccgcccgggccgggggacccgcccgccaggccaccaagaggccgccaaccgagc

SEQ ID NO: 52092 - RNA, 75 nt, Homo sapiens
cagccgaagaggggcggcacccccgaggaaaccagcacgccagggagaacaggagacggaggaacagggcaaaag

SEQ ID NO: 52093 - RNA, 79 nt, Homo sapiens
accagggaagcagcaccacggggagacaagcaagagacagacccagcacggaccccccccccagccgggcgaggccccg

SEQ ID NO: 52094 - RNA, 80 nt, Homo sapiens
cccacccaccgggcgaggacccgggccagccaggagaggccagcacccagaaaaagcaccccgaggaggaagacgaacga

SEQ ID NO: 52095 - RNA, 112 nt, Homo sapiens
cgccacccgagcaggcaggacgaggggaagacacccgccggaacccaaggcacagagagacggaccagaagaggcagagccacacaaagaaggcggggccgaacacgagaac

SEQ ID NO: 52096 - RNA, 78 nt, Homo sapiens
cccaaaccaagaagcagagaggggccagcacacagaagaagaccgcagcaccagagcgaagaccagaaaagacacccg

SEQ ID NO: 52097 - RNA, 65 nt, Homo sapiens
cgacagcggacgccccagcacccccagcgggcaggaacgaaaacagccagcaggcccaggaggga

SEQ ID NO: 52098 - RNA, 76 nt, Homo sapiens
acacccgggcggggcagagcagcccccagccagccgcgaggaaaagcccggaaaagcagccaagcggaagacagag

SEQ ID NO: 52099 - RNA, 75 nt, Homo sapiens
gcacagcgagcacggaggggaaggcacggacgcaacacggaacagacgcagccggggcagcagaagaggacaagc

SEQ ID NO: 52100 - RNA, 97 nt, Homo sapiens
ggacagaaaccggcccggcccggccccacccaaggacgcgccgacagaagaggaagcacgagcaggccacaacaccgaaaaaagccgcacagcaaag

SEQ ID NO: 52101 - RNA, 78 nt, Homo sapiens
gacaggagaaagcaggggaccggaacgaggaagcagaaaggcgaaggaacacacgacacagaaaccaagaggaagaac

SEQ ID NO: 52102 - RNA, 77 nt, Homo sapiens
aagaaccgccagggcaccagacagccacgcagacacagccaggaaccgaggagcaaggaccgggagaaacgagacca

SEQ ID NO: 52103 - RNA, 77 nt, Homo sapiens
agagcagcggaaaagaccagcacagagagggccgaggcagacaagggaaaggccgcgcaggggaccaccccagacgg

SEQ ID NO: 52104 - RNA, 106 nt, Homo sapiens
agagaagggaccaaagaccaccacgcaaaaagagaggccaaagagccagagcaacaggagccaggcacagcagggaccagaaacgggaaaccgcgggggcaggaga

SEQ ID NO: 52105 - RNA, 76 nt, Homo sapiens
accggacgggcagggagacagaagccaaacaggaggaggaagggaggggcgccacacggaccccccgaaaaccagg

SEQ ID NO: 52106 - RNA, 80 nt, Homo sapiens
caacccggccgcagagcccagaagacgaccccgacgcaggccaggagccgcggacagaagccgagcacggccgagacaaa

SEQ ID NO: 52107 - RNA, 76 nt, Homo sapiens
cgggggaggcaagaccgccccgccgcccagaggacgcccaacaccacccacccaccacgccccaaggcacaaaaga

SEQ ID NO: 52108 - RNA, 77 nt, Homo sapiens
gaacggacgagcaccaaggaaagagagagaacaggaaacagagcaaagcagcgacaacaaagacagaggaagaaaaa

SEQ ID NO: 52109 - RNA, 37 nt, Homo sapiens
accaaagcccggcaaaccagggaagaaccacaaggag

SEQ ID NO: 52110 - RNA, 61 nt, Homo sapiens
gggagccccgacacgacagagcaggcaccaaggccgcaccgcgaggaacccgagcccaccg

SEQ ID NO: 52111 - RNA, 77 nt, Homo sapiens
aagggcaacaggccagcagccaaaggcgacagagaagagagaaggccccagcagcgggcacgcgccgagagcccgcc

SEQ ID NO: 52112 - RNA, 67 nt, Homo sapiens
gcggagagaaaccgaagggccccgaacaacagacgaaaaaccgccagaaagcaagaagaaagagcca

SEQ ID NO: 52113 - RNA, 96 nt, Homo sapiens
aaagaacagagccgcacacaggggaccgcaaaacagagaccggaaaaggagcgaaaacgccacaacagagggggccagggcggggaagacaaacag

SEQ ID NO: 52114 - RNA, 73 nt, Homo sapiens
gaggcgcagggagcccccgccggcccggcggccgaggagaagaggggggcggaagagggacggagagaccgga

SEQ ID NO: 52115 - RNA, 76 nt, Homo sapiens
ccaggggagaaaagaaggacgacaggcaaagcgccaggaacggaggggcagccgcacccaagaaggacagaccccg

SEQ ID NO: 52116 - RNA, 78 nt, Homo sapiens
gaaggagaaccagaaacaacaaacacagggacgacacaagaccaccaccaccgcggacggccggcgcggaagcggagc

SEQ ID NO: 52117 - RNA, 41 nt, Homo sapiens
caccaggcgcaagaacaggcggggacgcccaaccagggaac

SEQ ID NO: 52118 - RNA, 76 nt, Homo sapiens
cgccccgcccacagcgcggcgcggccgagagccgcggcccggcggaaaggacagcaggaagaaagggcaggcgaga

SEQ ID NO: 52119 - RNA, 37 nt, Homo sapiens
aaggaccaagaaccagaaagaacacccaggaagccga

SEQ ID NO: 52120 - RNA, 76 nt, Homo sapiens
cacggggcccggaggggcaacggaaacgacgaagagagaaggaaggaggcagacgcaggaagaccaaaaggagaaa

SEQ ID NO: 52121 - RNA, 85 nt, Homo sapiens
agacccaaccaacggaggggaaaaaggagagcagacgccaagaggaaggggaggacgcgagcggaagagaagcaaaaagacaagg

SEQ ID NO: 52122 - RNA, 72 nt, Homo sapiens
gcaggccgaaccagggggagccaccccgcggacaagcagaccggaagaccgacggaagaccacaccccgagg

SEQ ID NO: 52123 - RNA, 56 nt, Homo sapiens
aagagcccggacaccggaagcgggaaaggcaagccacagccaggaaacaccagccc

SEQ ID NO: 52124 - RNA, 104 nt, Homo sapiens
aggcccacggaacgcagcaacgacccgagcacaaggcaagagaccaaccccagccccgaaaggccagccaggaaagcgggagcgcgggagcaaaggaaagaaga

SEQ ID NO: 52125 - RNA, 74 nt, Homo sapiens
aaacgaggagccggagggaaagggaaaggacgccgcacaccccaccaccacgcgaagaacgcacacaaaccggc

SEQ ID NO: 52126 - RNA, 79 nt, Homo sapiens
cgccgagccagagccagggaacggaggagcgagccacggcgacccaacagaggaagccgcaagaaacgggacgacagga

SEQ ID NO: 52127 - RNA, 58 nt, Homo sapiens
ggaaccgacccaaaccgacaggaccaacagacaccggacacaccacggagcaacgaca

SEQ ID NO: 52128 - RNA, 86 nt, Homo sapiens
cgggacgcgcgcgggcacccacggagccccggggcggacaccagcagccgcaacggcacacacgcccgccaccaccccagccgggc

SEQ ID NO: 52129 - RNA, 59 nt, Homo sapiens
aaaggcgacggcgccgaaacggaacccgcaccaaggggcgccagccggacccggggcgg

SEQ ID NO: 52130 - RNA, 75 nt, Homo sapiens
gaaagaagggaaaaggacccacccaaccaccccacaagaacagagaaaaggagaagcccacaaggaaaaccaaaa

SEQ ID NO: 52131 - RNA, 70 nt, Homo sapiens
cacgaccaacagaagcgccgcagcaacggcaccccaccacgcagccgaagaggacggaaagcacgccggg

SEQ ID NO: 52132 - RNA, 82 nt, Homo sapiens
gccccggggccgcggggagccacggcggagacccccgccccaacgagagacagcagcccccagggacccaaggacgaccaca

SEQ ID NO: 52133 - RNA, 79 nt, Homo sapiens
ccacgcaggaccacagcgcagcaaagaacacagaggacagcggggaaagagagacagggacagaggccaagcgaaccag

SEQ ID NO: 52134 - RNA, 81 nt, Homo sapiens
ccgccagaacaaaacaagaaaaacagccagacagacgcacacaggaagacaggccgaccgggccgaggcgaaccagaagag

SEQ ID NO: 52135 - RNA, 54 nt, Homo sapiens
aaggaccaagaaccagagccaccaaaaccggcaaaggccgcgaggaaccacgaa

SEQ ID NO: 52136 - RNA, 61 nt, Homo sapiens
aggccaagaaggcgccccgacgagcagaagaccggcgcagccgaccgaagcaccggaaacc

SEQ ID NO: 52137 - RNA, 89 nt, Homo sapiens
ccggaacgaaagcaggacggaggagcgaccaccggacccagggcagcacaaaaagaagccagccaacaaacagagacagcacagcagcc

SEQ ID NO: 52138 - RNA, 75 nt, Homo sapiens
gaaaggggcgacaccagggccgcagaggagccaagaggccacgacagaagaacagcaacagaacacaccaagaga

SEQ ID NO: 52139 - RNA, 77 nt, Homo sapiens
ggcgcacaggcggcgccgacagccagccggagagggcccgacggcgggcagacgagggggccccggccgaagacgcg

SEQ ID NO: 52140 - RNA, 74 nt, Homo sapiens
aaaacaaggcgaaagcaggcgaaagggaaaaccagaagcgcagaaaaagggacccagggcccaacgcgcaggcc

SEQ ID NO: 52141 - RNA, 114 nt, Homo sapiens
cgggcgaagcggacgcagccgcgagcccggaggcggcgggaggaggcggcggccgagcaagaacgaggccaaggaggagggacacagagacagcgaagaaagaacgcccgagag

SEQ ID NO: 52142 - RNA, 84 nt, Homo sapiens
ccaagagagcaagaccgggcccacgaggcaaaagcagaccggaaaacccaccggcaagaccacacccgaggggagcccaggaca

SEQ ID NO: 52143 - RNA, 78 nt, Homo sapiens
ccgccgaccccaggcagccccgcacgagcggcaaccgaaagccagcagcgggacaacacagagaaccggaaagaacaa

SEQ ID NO: 52144 - RNA, 86 nt, Homo sapiens
gcgaaggaggcgggagcggagacccgcgcgccaggcgcgcccggagcgcccccgagggaagcaaggggccgagaacaagaagagaa

SEQ ID NO: 52145 - RNA, 86 nt, Homo sapiens
cgccgcccgggcgggagccaggagcgacgcaccgccaggcaggcacaaagggcaccgccgaccgaaaccgcaaacacacgacagag

SEQ ID NO: 52146 - RNA, 67 nt, Homo sapiens
gaacgcagagcccggcagaggccgacggaggggaccgggacgcggaaagaacgccggacaacagcgg

SEQ ID NO: 52147 - RNA, 61 nt, Homo sapiens
gacgaccagcgggaggccagaggaaggagacgaagaaccggagaaaggggcaccgcggcac

SEQ ID NO: 52148 - RNA, 72 nt, Homo sapiens
ccgcaggccgccaccgaggaaaaggaacgacgagccgcaccagaaccccacccgcagcgcgcggaggaccgc

SEQ ID NO: 52149 - RNA, 77 nt, Homo sapiens
caggacagaacggagggaaagcacgaagggagcccagcgacacaccagcagcagccaaagaccaaccagccccgagg

SEQ ID NO: 52150 - RNA, 33 nt, Homo sapiens
caagccaaagaacccagagccccgcgacaagag

SEQ ID NO: 52151 - RNA, 82 nt, Homo sapiens
aaaaacaaagaggcaaaagcacaaacagcaagcacgacaagcagcacaccaagagcacacagaccaagggccacaagggggg

SEQ ID NO: 52152 - RNA, 57 nt, Homo sapiens
gggcagacgaggccacagcccaggcacaggaaagaagcagaaagggccgccaaaaca

SEQ ID NO: 52153 - RNA, 81 nt, Homo sapiens
cgccgccgcgcacaccggcggcgggacgacgcggacagcgggcggagccgacgagcggcggcaaagcagacaaaggagaga

SEQ ID NO: 52154 - RNA, 79 nt, Homo sapiens
cggcgccgcgccggcggcgggcgccagggaaggaccgcacacaagccgcaccggacacgcgcggagcgggaggaccgag

SEQ ID NO: 52155 - RNA, 78 nt, Homo sapiens
agcggcagccgcacacgaggccccccaacacccccgcacaggaacgcgcggacgccaccagaacaagcgagcgcgccc

SEQ ID NO: 52156 - RNA, 78 nt, Homo sapiens
caccccacagcccagggaaggcaccaaaagggggggcaggaaagggcaggagacagaacgagcgaaaggaggaaacaa

SEQ ID NO: 52157 - RNA, 72 nt, Homo sapiens
gcaggccgcgcggcgagcgacccggccaaagcacgcgaacaaggagggcaaagcaaggggcacgccagcaag

SEQ ID NO: 52158 - RNA, 82 nt, Homo sapiens
caaacccagggacccgacagccacagaaaaagacccacaggcgcaaagcagaagaaagggaaagcaaaacgcccgacacaag

SEQ ID NO: 52159 - RNA, 49 nt, Homo sapiens
cgcagggcgcccccgaccacaggcaaagacacggcagggggcacaaacc

SEQ ID NO: 52160 - RNA, 95 nt, Homo sapiens
agagagccccacagccaggggaaaaccagggaaagcagcacaggccagcagaccagggaaccagggcgaagacagagacaaacaagagaccccag

SEQ ID NO: 52161 - RNA, 62 nt, Homo sapiens
aaagaacgccaccgacgaaggaaacaagcggcaggaaccgggaacacaagccagaaaaaggg

SEQ ID NO: 52162 - RNA, 70 nt, Homo sapiens
cgcggagacccgggcagcgcccaccgcggagcgggaaacacaaagaagacaccagaagggccagcaccac

SEQ ID NO: 52163 - RNA, 47 nt, Homo sapiens
gggaagaccccaaggaaggaagaaggaaaagcggaagcgcagacaag

SEQ ID NO: 52164 - RNA, 109 nt, Homo sapiens
caaagagcgccggcgcggcgcggccgggccgcgccccccggcgggccggacgaggcagacacccagcaccacggcagacaacaaccaacacgaacaaggccgcaagaac

SEQ ID NO: 52165 - RNA, 78 nt, Homo sapiens
gaaggaccagagagggagcccgccacacagcccgacggccagcggaaagggagagaggagaaccaggcagcccgggcc

SEQ ID NO: 52166 - RNA, 76 nt, Homo sapiens
ggacggacacgcccagccccgggcacggaaagaaacccgcaaagaagcgagccagcaaagaaacggggggacccac

SEQ ID NO: 52167 - RNA, 106 nt, Homo sapiens
ggacaagccaccagacccgcaccagaaaacccccaccagaaccagccacgcggacccgagccccaaagacagaaaagccccgagacggaagagaagagaagagaac

SEQ ID NO: 52168 - RNA, 82 nt, Homo sapiens
gaaccagggcacgacggcccgccaagaacaagaaccaggagggcaccgggcaccggcgcgaacgcagacgccaaagagaaac

SEQ ID NO: 52169 - RNA, 77 nt, Homo sapiens
ggagaagcaagaaggcccggacacagcaaaccgggccacagcggcgcccaacccgaaaagagcccacaccaggacgg

SEQ ID NO: 52170 - RNA, 58 nt, Homo sapiens
ggaaagaaggagggaccagcacgccgggccgaccgaaaagacgcggccccaaaggaaa

SEQ ID NO: 52171 - RNA, 77 nt, Homo sapiens
aaccgaagcgcgaaaccacagagaaaagcacgcgggcgcggcgcccagacggaacagggccgacaagcacgcagccc

SEQ ID NO: 52172 - RNA, 80 nt, Homo sapiens
caggccgaagaaaggcgcagccgcaagaggggcacacgcccgcacgagcagcggagaaggaaagaccacagcaagaccac

SEQ ID NO: 52173 - RNA, 103 nt, Homo sapiens
cggaaagaaaaacggacgcgaggagccagcagccagggaaaaccaaaagacaagccaggagcccggaagacagccgcagggcagacaccacacacagaccggc

SEQ ID NO: 52174 - RNA, 60 nt, Homo sapiens
gaggacgggacccgcccacagacagcagagcacgccagagcccccagggacaaagcaagc

SEQ ID NO: 52175 - RNA, 115 nt, Homo sapiens
ccagcgaggagagcgaggcagccaccaccgagcccgagccggaaggacacgacacagaccagcgcaggccgacgagcaggcaaagcagaaaggcaaaggccccccagacagagaa

SEQ ID NO: 52176 - RNA, 84 nt, Homo sapiens
ccaaaggccagcccacaaccgccaccacccagagcccccaacaagcccaagaggagagaccccagaggagcgcagaagcgagag

SEQ ID NO: 52177 - RNA, 60 nt, Homo sapiens
cacacccgagcaaaaagaagccacacacagaagacccaaagagaacacaggagaggcaag

SEQ ID NO: 52178 - RNA, 46 nt, Homo sapiens
cggacgcgccgaacaaccggagagaacagaaaaaaagcggcccggg

SEQ ID NO: 52179 - RNA, 85 nt, Homo sapiens
aaggagaaaagggggaaaagcccaggaggaagcaggagcagcccaagcgccccccacgaaacccgaccgccccaggggcacagca

SEQ ID NO: 52180 - RNA, 33 nt, Homo sapiens
gggcggcggccagcgccacgcagacacagcacc

SEQ ID NO: 52181 - RNA, 70 nt, Homo sapiens
aaccagaggcaccgcaagcgggacagaggaacacacggccccggccaagccggacagacgaaaaccacag

SEQ ID NO: 52182 - RNA, 69 nt, Homo sapiens
gggaccggccccaggcaggccgggacgccgggccggcagccggacaccagccccaaaagcacgcacgaa

SEQ ID NO: 52183 - RNA, 75 nt, Homo sapiens
aaccagcccgagcccccaaaccacagggcgccagggaccgggcagagggaggaagggccaaaagccaagaagaca

SEQ ID NO: 52184 - RNA, 81 nt, Homo sapiens
gcgagcagagccaaggagagagagaggaaagccaagacgaacgaccaaacaaccacccgcaaagcacacggaggccacgcc

SEQ ID NO: 52185 - RNA, 74 nt, Homo sapiens
ggaagaaaggcccacgcacagaaacgaaggcaacgcacgcacagccacggaagggggccccgaccaggacccag

SEQ ID NO: 52186 - RNA, 79 nt, Homo sapiens
aacaggggaagaaggccaaggaagacgacaccagcagccgcaacggcacacacgcccgccaccaccccagccgggcccc

SEQ ID NO: 52187 - RNA, 78 nt, Homo sapiens
gcaaaacccacgacaagaaggcaccgaccaaaccacccaggacacggagcagcgggagcccagacgccgcgggagcaa

SEQ ID NO: 52188 - RNA, 65 nt, Homo sapiens
cgagaacccgaccccgcggagacagcgagacccgccaggagcaaagaggaacagaagacaccacc

SEQ ID NO: 52189 - RNA, 57 nt, Homo sapiens
gccaaagaagggagagaggacccaaagacaggaccacgcaccagcagagaaggaaag

SEQ ID NO: 52190 - RNA, 78 nt, Homo sapiens
caggccggacagcgccaaaaacacaccaggaggggcaacaaaccaccccaacacccagggcagcaccgggaccgccac

SEQ ID NO: 52191 - RNA, 83 nt, Homo sapiens
ggcgggcaggagggcggcggcggcggcgcggcgaagaaggggacgccgacaagcaggaggccacgcgcagccccggaagagcc

SEQ ID NO: 52192 - RNA, 97 nt, Homo sapiens
gagccgacaggcgggcagagggagcaggcccgagcgcggaaagcgcaaagccgacgaggagagaccccgcagcggacaagacagaacacacgaacca

SEQ ID NO: 52193 - RNA, 80 nt, Homo sapiens
aacaggccggccgcggaacgaaaggaacaggagccgccaggcgacacaccggaagcaggggagacaaaccacagggaagc

SEQ ID NO: 52194 - RNA, 68 nt, Homo sapiens
caccagcccaagagaacgcaaacgccaaagcaggaggcacggccacagggaaccgcagggaaggcacc

SEQ ID NO: 52195 - RNA, 69 nt, Homo sapiens
gggccgacgaggggggcggggccggcagggcagcaggaggggggaagcaggaggcacggaggggacccc

SEQ ID NO: 52196 - RNA, 87 nt, Homo sapiens
gccgcgccccacacgcaaagacaaggcaaggaccagcccgccagcaaagaggagcaggagcggccgcggagcaggagcgagagcagg

SEQ ID NO: 52197 - RNA, 74 nt, Homo sapiens
cagagaccaagccggccacaggcccgggcgggcacaggaacggcgaagaggaacagaggaaacgcgggagaaca

SEQ ID NO: 52198 - RNA, 118 nt, Homo sapiens
gcagcggaggacgggaccgggaaccacgggggccgcggccggaccgagcgcccgacccggcgaggggcagacaccccacaggcaccagcagcaacgaacaggaggaaaagagaaccag

SEQ ID NO: 52199 - RNA, 63 nt, Homo sapiens
ccgggagcgcggaacagcgccacccgccggccggaccaggacagacaccagggcaacacggcc

SEQ ID NO: 52200 - RNA, 77 nt, Homo sapiens
ccacccggacaggaaagaccagcagggacgagcagcacgccaccccacgggcggaagaaggcgacagaacaccagga

SEQ ID NO: 52201 - RNA, 59 nt, Homo sapiens
gaggacgggaccaggcgaagcggccgagcaggcgagcgaacgacgagaaaaagggaggc

SEQ ID NO: 52202 - RNA, 58 nt, Homo sapiens
cccacaacagcaggaaaccgaacaacaccccaggagggcccacggccccccgagggag

SEQ ID NO: 52203 - RNA, 71 nt, Homo sapiens
aaacaaaccaagcaccccacacaggaaaacccccagaagacgacacggccagggcagaaaagaggaaaaaa

SEQ ID NO: 52204 - RNA, 98 nt, Homo sapiens
gggcggcggcagcgggcggacggccggcgggggcggcggcggccagcgccagaggccaccccgcaagcggccccggggggggccggagccaagccaac

SEQ ID NO: 52205 - RNA, 41 nt, Homo sapiens
ggacggggaacgccccggccacgcgaggggcgggagcagca

SEQ ID NO: 52206 - RNA, 57 nt, Homo sapiens
ccgcggacacggagaggaaggaacagagagcaaccaaagcccagacgagaagaccag

SEQ ID NO: 52207 - RNA, 69 nt, Homo sapiens
ccggaagaccgagcaaagagcgaaaccagagcaagcagggcaaaaggggaagaagagagggcgaaggag

SEQ ID NO: 52208 - RNA, 52 nt, Homo sapiens
cggggcaacgcgagcagaacagcccagccgaacggggacagaacaaacggga

SEQ ID NO: 52209 - RNA, 75 nt, Homo sapiens
ggagcgagagaggaccccggacacgaaagccgggaaagcaccacgcgcgcccgagcggacaagagcagcgggagc

SEQ ID NO: 52210 - RNA, 71 nt, Homo sapiens
agccgggaagagagcacaaggcacaacagacagaagcgcaacagagcagaaagaacagaagagaagaagaa

SEQ ID NO: 52211 - RNA, 64 nt, Homo sapiens
gacgacagaacggcagcggagaaaacaaccaggcgacaaacgggccacaaagcacggaacgaaa

SEQ ID NO: 52212 - RNA, 90 nt, Homo sapiens
accaaggcccagcaacacaggaaggccagaagccacgaacagcccagcgggaagaggagaagagaagaggcaacgggggccacagcccga

SEQ ID NO: 52213 - RNA, 75 nt, Homo sapiens
gaaacaggagcgaagcccagcgggccggacggggcggggggaacggaaaggagcagcagaacgaaggaagaaggg

SEQ ID NO: 52214 - RNA, 43 nt, Homo sapiens
gaacaggcgccgccaccacgcccagggccaccgcacccaggcg

SEQ ID NO: 52215 - RNA, 76 nt, Homo sapiens
gaggaacaccacgacaacaggccagccacgaaaagacaccagagcgaagaacacccagcccccagaaaccaaacac

SEQ ID NO: 52216 - RNA, 82 nt, Homo sapiens
ccccgagaggaacccagccgacacgacgccgccggcaggcccgcgcaccagggaccaagaaaggcccagggaccaaagcccg

SEQ ID NO: 52217 - RNA, 75 nt, Homo sapiens
gacccggcacagacgcggcggggcgcaaaccgagacaagcaccccgaagcgccgaccccggcaagagccgcgacg

SEQ ID NO: 52218 - RNA, 73 nt, Homo sapiens
aacgggaaaaccaaaaaagcaagcacaccaaagaaagcaccgggaggaaagagagccacacgaagaacacggc

SEQ ID NO: 52219 - RNA, 78 nt, Homo sapiens
gaacggcacggccacgggcgggcaggcaaggaaacacgagccccaccaaagcaaaggccggaccaggagagagcaccc

SEQ ID NO: 52220 - RNA, 64 nt, Homo sapiens
cgcagggcgcccccgcccccgagaccgaggcacacgggcccgagagcgcgcgcaccccccacgg

SEQ ID NO: 52221 - RNA, 77 nt, Homo sapiens
gagacagcacagacagacggcacccacggacacggcagcgagaaccagaagccacaggccaaccaagcaaagcaaac

SEQ ID NO: 52222 - RNA, 79 nt, Homo sapiens
cacccagccaccagccaggccggcccacaggggaggaggcagcgcccgccgagcggaagaggagcaaacacggcccggg

SEQ ID NO: 52223 - RNA, 65 nt, Homo sapiens
caacagggaagagagccagggggaaaacaggcgagggaagggcggcgcagaccaggacacaaagg

SEQ ID NO: 52224 - RNA, 93 nt, Homo sapiens
gcgccggggaggcgcggagggcccagcggacggcagcgcgcgaggcaccagcccgacggggagcgggaaacgcccgggccccgccgagcccaa

SEQ ID NO: 52225 - RNA, 53 nt, Homo sapiens
ggaaggccacgagggcggaccccggccaaagccacccccaaaggcagaggaag

SEQ ID NO: 52226 - RNA, 77 nt, Homo sapiens
aaagaacccccaaaagggaagagacccagacgaagagcgcacagaaagagggaaaacaaagaaccaaaacagcgaaa

SEQ ID NO: 52227 - RNA, 111 nt, Homo sapiens
ggggcagcgcggcccggcggggagcgccggagccgggccgacggcaccaagcccccacccaggaaggaacaaccccacaccaccacacagcaccagcccacccccaagcca

SEQ ID NO: 52228 - RNA, 115 nt, Homo sapiens
gggccggcaacaccggaagagagaacgcagggcacagagagcaggccacacacgaggggaccgaaagagcgccggagaagggaggaagaaagcccgccggaaagcaacaggaacc

SEQ ID NO: 52229 - RNA, 108 nt, Homo sapiens
caccgacaggaaagcgccaaaccagggcaccgaaggggaagagcaagagcagcagggagagagagggggaaccggggaaggcaccggcaaggggggaggcggaccagc

SEQ ID NO: 52230 - RNA, 79 nt, Homo sapiens
ccaggcggagcccggacccgagacgggagggcccggccaggccccaccgccacaagcaggggaacaccgccaaccccaa

SEQ ID NO: 52231 - RNA, 61 nt, Homo sapiens
gacagaaaaggacggcgccgcccgacagggagccgaagggaaccccgaggaagcagcgcgc

SEQ ID NO: 52232 - RNA, 82 nt, Homo sapiens
ccaaccaagacagcagaggcaaagagaacaaacaacaccgccaggcaaagaaaccccaaagccagcaagaccacagcagcac

SEQ ID NO: 52233 - RNA, 74 nt, Homo sapiens
ggaaaggcaaaacacaacaagagggagccaggccagaaaacgggcaacccagaccaacaagcagcaaagaggac

SEQ ID NO: 52234 - RNA, 73 nt, Homo sapiens
gcgaccaaagagagaaggcagcaaccaccggagggcgcagagaagagacagagcggaagaaaaaaaaacggca

SEQ ID NO: 52235 - RNA, 91 nt, Homo sapiens
caagaccggcaagagcccagcagggcagggcgagcacaaggagacgggcaccaaggacacaacagacacgaaggagaacaggaaaaggcgg

SEQ ID NO: 52236 - RNA, 86 nt, Homo sapiens
caggggccaggcgaagcacgagcagaccggcccgaccgcccacagacccaaacaaaggagcgccacccgaaaccagcccagaaccc

SEQ ID NO: 52237 - RNA, 51 nt, Homo sapiens
gagaggcagggggacacgcaacacgggagaacagggccagcacagcaaggg

SEQ ID NO: 52238 - RNA, 81 nt, Homo sapiens
gcagcgagggcccaccaagcccagacgacgcgcggccagggccagcacccccccaccgcccccggcgcccgcaccccgggc

SEQ ID NO: 52239 - RNA, 77 nt, Homo sapiens
aggaacggagccccgccagacgccccaaacaaacagaaccacagaacggagcacagaaaccagaggccaaccccagc

SEQ ID NO: 52240 - RNA, 70 nt, Homo sapiens
aaccagaggcaaagcacacaggggcaccagaagagcacaacacaagaaaacaagagagacggggcgccgg

SEQ ID NO: 52241 - RNA, 76 nt, Homo sapiens
ggggaggaggccccaaagggcgaggggaaaaagaaaagggcgaagacccgaagcagcgcaggaacagaagagaaga

SEQ ID NO: 52242 - RNA, 76 nt, Homo sapiens
agagggaccggaacggcggcgacaaggggcccgaacagaggggcaggcacgcggaaagcgaaaaccaaagcggcgg

SEQ ID NO: 52243 - RNA, 80 nt, Homo sapiens
aagcagacagaacaagggagaaagacaacaccacgaagccgcaaacccagccagaaaggagcagaaggacagcccagcac

SEQ ID NO: 52244 - RNA, 70 nt, Homo sapiens
ccaacgaggaacaggggaagacgggagcgccccaggccagaggcagaggcagcaggcagcacaacagacc

SEQ ID NO: 52245 - RNA, 72 nt, Homo sapiens
agggccggacccagagagcgccggccggccccggaggagaacgcgccgccggccggggcgcagggacacggg

SEQ ID NO: 52246 - RNA, 69 nt, Homo sapiens
gaaagggaccaaccgagaaagggcggggaggggacgaaccaggcagcccaaagaggaccccccaaggac

SEQ ID NO: 52247 - RNA, 68 nt, Homo sapiens
agggcgcggagacggagcgccgcgcccccaccagggaaggccagcccccacggaagccaaccgacaag

SEQ ID NO: 52248 - RNA, 76 nt, Homo sapiens
accagcaaagaacgcaggaacagaaaaccaaacaccacaggccagaaggggagcgaacggcggaggcggggcggac

SEQ ID NO: 52249 - RNA, 70 nt, Homo sapiens
gcagcccggaaccacgcaccagacaacacaggggggcccccaaagggaagccaaacacaaaggaagaagc

SEQ ID NO: 52250 - RNA, 79 nt, Homo sapiens
cgaccccaagagggagggccagcgcaagcacacacagcccaaaggggcaggacaagacagaaggccaagggagggacgg

SEQ ID NO: 52251 - RNA, 68 nt, Homo sapiens
acacagcgccgagacgcgaagccgcaaaggacgccgcacggcaggaaacaacggcagaccacacggga

SEQ ID NO: 52252 - RNA, 57 nt, Homo sapiens
agaaccccaaccggggaggaaaaccgacgaaggacgacacagcaagcaaaagacaac

SEQ ID NO: 52253 - RNA, 39 nt, Homo sapiens
ggcaaggaaaccgcaggcgcagcgagagcaaaccggcga

SEQ ID NO: 52254 - RNA, 70 nt, Homo sapiens
gaacagcccaaacagagaagacacggaagccaccgggccccaagaaaagcggaagaagaccgggagcgcc

SEQ ID NO: 52255 - RNA, 74 nt, Homo sapiens
agacccaggccagcacccacccaccgggacaggacagcccaaggcggaaaagcgaaggaagccacaagcacagc

SEQ ID NO: 52256 - RNA, 90 nt, Homo sapiens
ccgcggccgcccggggacgcagacgccaaggccccccggccagggccgggagccgggccggccagccaggccaaaacagaagaggcaaag

SEQ ID NO: 52257 - RNA, 82 nt, Homo sapiens
acagcaggacgcggccgaaccaaagagcccaaaaggacacaggaagcgccagaccaggccacgcagaaaaggaaccaggggg

SEQ ID NO: 52258 - RNA, 78 nt, Homo sapiens
gaacccggaggaggcgaccgcggcgcagcgacccccgccaggcaaaaggaagccgcaaaccgggaaccaggacaaaga

SEQ ID NO: 52259 - RNA, 74 nt, Homo sapiens
caggacaacagcaacccacacagggacaccacggcacggacacaagcgacccaagagcccacgggccgagcaag

SEQ ID NO: 52260 - RNA, 42 nt, Homo sapiens
cggaagcccaggaaacacaggcagcggaggagccaccgcgcc

SEQ ID NO: 52261 - RNA, 64 nt, Homo sapiens
gcagggaggccacaggggccgaaacacagagcaaggccacgagcggcacaggacagaaccgcaa

SEQ ID NO: 52262 - RNA, 73 nt, Homo sapiens
cacagagaaggaccggggacaacacaggacagcacggagacaagagcggaaagcaaagcccaagaaaaacgcc

SEQ ID NO: 52263 - RNA, 77 nt, Homo sapiens
aagaagaacacacacaagcgcaggaaaaagcacaaggacagaccagaagaaacagggaccaagaaaggcccagggac

SEQ ID NO: 52264 - RNA, 79 nt, Homo sapiens
aaccagaagggaagacaccaccaggccgaccacccaacggcaaaacaagccacaggggcgccgaaggagaagaagaagg

SEQ ID NO: 52265 - RNA, 78 nt, Homo sapiens
aaaaagagaaggaaagcggacaaaacgcggaaagaggccggaccgacgagccaacaggaacagccaaaaaacccgcca

SEQ ID NO: 52266 - RNA, 78 nt, Homo sapiens
gggcgagcggccccgccagagccccccgaaccaagcccaaccaccccccgccacggcccagccggcgccaccagccca

SEQ ID NO: 52267 - RNA, 74 nt, Homo sapiens
gaagcagcaaaggaaagaaacccacgggcagagcgaaaaaggaacaacgccacaaccccgaacgacacaaaggc

SEQ ID NO: 52268 - RNA, 65 nt, Homo sapiens
caagcgcggaagccccgaaaccccaggacccagacacagagacggaagcggaagcacacgccaga

SEQ ID NO: 52269 - RNA, 71 nt, Homo sapiens
gagagaagccaaaccccagaagcagaaagggccgccaaaacagggagagagacgcaacagaagccgagaac

SEQ ID NO: 52270 - RNA, 53 nt, Homo sapiens
ccagcggacacagacggaaaacagagaaaaacggacagccccaggaggaaggc

SEQ ID NO: 52271 - RNA, 76 nt, Homo sapiens
aggcgcggaggacgaagggacacaccgcagcagccagagcgcccagcacacaacgcaaggaagaaaggaaccagcc

SEQ ID NO: 52272 - RNA, 101 nt, Homo sapiens
agcggaaccaggcacccagcacgaaggaggaaccaacaacaacacaaggagggccggggcagcacaaacccagacaggacacaccaacgaggacgaggcgg

SEQ ID NO: 52273 - RNA, 84 nt, Homo sapiens
ccgccagacacccgcggcgaaggcggccgggccgggcccgggccccccacacggggccccacacgcgaggaggacccacgaagg

SEQ ID NO: 52274 - RNA, 60 nt, Homo sapiens
cacaggccgccccaacaccagggaagagacacacccaggagacacgggaagccgaggaga

SEQ ID NO: 52275 - RNA, 70 nt, Homo sapiens
ggaccggccacagcgcccagggggccagaaggagggccaggggcaggagcgcgcgcgccccgcgcgcccc

SEQ ID NO: 52276 - RNA, 89 nt, Homo sapiens
cgcggcccgcgaggagccgccgcgcgcccgcgcccccgcgcgacgccagagcggccacggagacggcggccccagaccggcaccaggac

SEQ ID NO: 52277 - RNA, 75 nt, Homo sapiens
ccccagggcccgcccaggacccccaagccgccgcggacgcaggacccaaacagacagggggggcggcacaacgca

SEQ ID NO: 52278 - RNA, 80 nt, Homo sapiens
gaacggggcgcaccgacccggaagaccagacaagcggacaccagaaagacggaaccaggaagagagacgacgggcaacag

SEQ ID NO: 52279 - RNA, 71 nt, Homo sapiens
agagacagagaccagggcccgggcccgcgggggccgcaaggccaggcgcgcagaggcacccaacggcacag

SEQ ID NO: 52280 - RNA, 55 nt, Homo sapiens
gacgccggccccggccgcgcgggaacaggaccacacagccgaacgagccggagag

SEQ ID NO: 52281 - RNA, 88 nt, Homo sapiens
gccccgaccccgcggccggacgacccaagcccgcgagcaggagaggggacaggagacaaggcaaccgcgcccagaccgccaaacaaga

SEQ ID NO: 52282 - RNA, 67 nt, Homo sapiens
aaagaaaaagaaacaaggcccaaccaacagacaggggacagagccgaagcgcccaacagccaaacgg

SEQ ID NO: 52283 - RNA, 73 nt, Homo sapiens
gggcgcacaccaccggacaaccgacaaaagacagggcagaccgccagcagcacagcaagccacagagagggcc

SEQ ID NO: 52284 - RNA, 84 nt, Homo sapiens
aggcaaagcgaagaagaagaggaagagccaaagagcaacaacgagcgacaccaaagaagagagccaaaacccccgccaacagag

SEQ ID NO: 52285 - RNA, 70 nt, Homo sapiens
cagaacacgaagccagaaaggaagaagggacccggggcagcacaaccgccagagccaaccaggaaggcca

SEQ ID NO: 52286 - RNA, 70 nt, Homo sapiens
ggcgaccaggaggaacagaccggcggccgacgggacaggggaaggccagccgaccccacagccgcccaga

SEQ ID NO: 52287 - RNA, 38 nt, Homo sapiens
aaacaaacacccagaaacaagagccggacagggacggc

SEQ ID NO: 52288 - RNA, 70 nt, Homo sapiens
ggacaggggccgcagccaaggaaggaggccgcaaacagacaggaagagaagcccaaaacaacaaccagga

SEQ ID NO: 52289 - RNA, 85 nt, Homo sapiens
cgcggagaaggaacccgagcagcccccggcccgggaggaaggaagaaaacgccagagaagcagagcagcccggagcgaggggaga

SEQ ID NO: 52290 - RNA, 75 nt, Homo sapiens
acagaaagagcaacagcagggcaacaggggaaccaagagcccccaggacaacaagaccaaaagaggcggggcgca

SEQ ID NO: 52291 - RNA, 81 nt, Homo sapiens
aggcaccaaaagggggggcaggaaaggggcaaaggaaaggggcaggcacccccaacaagaaggaagagaaagaaaaaaagg

SEQ ID NO: 52292 - RNA, 75 nt, Homo sapiens
caccgccccaacccacgagaggacagcccaggcgccgagcagacacccagcaaaccgccacgccgaagcacccca

SEQ ID NO: 52293 - RNA, 71 nt, Homo sapiens
agacaagcccaagcgagcgcaccaaacagggaccagaccccacaagaaaacacacaaccacaggcccaagc

SEQ ID NO: 52294 - RNA, 69 nt, Homo sapiens
gcccgcccggcccggagaagaaagcagccgcgaacccccagaaccgaaacgaccaccgagacgcccagc

SEQ ID NO: 52295 - RNA, 94 nt, Homo sapiens
ccgaaggccaggagacccgaccccaaggccgcggagcgggacccagaacgcgaggcagaggcccacagagggacgccgcgacaccggaagagag

SEQ ID NO: 52296 - RNA, 70 nt, Homo sapiens
aaaaaagggaccgaagacaaaacggcaagaggaggccgaaggggcggaagggcggcgaagagcgacgcgg

SEQ ID NO: 52297 - RNA, 78 nt, Homo sapiens
ccagagacccggccgacgcccggaagacaagagaaagcaccgggaggaaagagagccacacgaagaacacggccaaag

SEQ ID NO: 52298 - RNA, 66 nt, Homo sapiens
gaacggcgccagcccagccccaacccccgcccagagacaaaccggaaggcgaaacagcgcgccgaa

SEQ ID NO: 52299 - RNA, 68 nt, Homo sapiens
agaaaccacccagagcaaagaaggagcagccgcaacagcgcaccgacacaagcccagaagccccaccc

SEQ ID NO: 52300 - RNA, 61 nt, Homo sapiens
gaaaaaagggaacaacccagcaacacccaccggacccaaggcccgccaacggaaagggaac

SEQ ID NO: 52301 - RNA, 55 nt, Homo sapiens
aaacagaaaaggaagaaagggacaaagagaggagcagagaggaaaccggcaacag

SEQ ID NO: 52302 - RNA, 109 nt, Homo sapiens
gggcccccaagcaccggaagagccgacaagagccaccggagggggagcgcggcccaagcagccagggggagaggcaccagcaacagaccaaccgcagcaagcacagaga

SEQ ID NO: 52303 - RNA, 75 nt, Homo sapiens
acagagaacacccgccaccagacaagagccacaacccacgcaaaggagcacagcaagcgggagcaggcagaccaa

SEQ ID NO: 52304 - RNA, 55 nt, Homo sapiens
aaaagaggagcccgcaagaggccagcgaaaaccgaaggaggccaggccagaggga

SEQ ID NO: 52305 - RNA, 77 nt, Homo sapiens
ggggaggcgcgcgacgaagagccccagccccggccgggccgaccggcagcaggacgcaggagacggcagcgaggcac

SEQ ID NO: 52306 - RNA, 70 nt, Homo sapiens
cgcaccaggccaccgccacgggccgagacacgcagcggcggccagggaccagcgaaggcaagagagggga

SEQ ID NO: 52307 - RNA, 72 nt, Homo sapiens
aaacccgccccccgagaagcccagaggcgcccggggcaacgggccgacagcacagaacagagagaagggcgg

SEQ ID NO: 52308 - RNA, 66 nt, Homo sapiens
gcagccacaggaggcgcggaggacgccccaccgccgacgcccccagccaccagggacaacccgcca

SEQ ID NO: 52309 - RNA, 72 nt, Homo sapiens
gggggccagccggaccagcaccccaccacgacacgggaggacgggccagagaaacagaaagggaagaacaga

SEQ ID NO: 52310 - RNA, 75 nt, Homo sapiens
gggagggaggagagaagagaagaaaggaggaagggaaagcagcaacacaaccagggaggagaaccaggaccaaag

SEQ ID NO: 52311 - RNA, 69 nt, Homo sapiens
cggcaaacaaaccgccaggaacgaagaaggacagaacggacaaggcagagcaaggaaaagacggccacc

SEQ ID NO: 52312 - RNA, 84 nt, Homo sapiens
agagggcgccccaagcggaaagcgcacggggaaaacaaggggacccgggaagaggaaaaccagagacccagacacgcgaaggaa

SEQ ID NO: 52313 - RNA, 71 nt, Homo sapiens
acgggggagcaacgcacagcaagccaagcggaacagagacagacccgggggcccccaaggagagggaagaa

SEQ ID NO: 52314 - RNA, 79 nt, Homo sapiens
cgcgcaaccacgggggacgggaacgagggggaagcggcccagggaggggcagcggggaagaagaaaaggaaccgaggcc

SEQ ID NO: 52315 - RNA, 73 nt, Homo sapiens
acgcagaaacacaggaccccccccaacgagcacgcacgccagccccaggaaggcggagaccacaggaagacag

SEQ ID NO: 52316 - RNA, 70 nt, Homo sapiens
caacgagaagccgaaagcacagacaagagcgcaggcgagagcgagacaaaacagggcaaggcgcccagaa

SEQ ID NO: 52317 - RNA, 78 nt, Homo sapiens
aaacaaaaaccaacgaagcagcgacagaggacaacaggcccaacccaagccagggggcccaggaacagcaggcaacag

SEQ ID NO: 52318 - RNA, 58 nt, Homo sapiens
aaaggagcagcccgggcaccacagaaaagccaagcaaggcggacaagaccaagcgagc

SEQ ID NO: 52319 - RNA, 70 nt, Homo sapiens
gcacaccgccaccggagcgcgcgcggccagcgccaggggcagcccgggcgcacgaccgcggcccggcagc

SEQ ID NO: 52320 - RNA, 57 nt, Homo sapiens
cggacgcaccccacccccggaacagagggacaacgaagagaggaaagaagcggaaag

SEQ ID NO: 52321 - RNA, 74 nt, Homo sapiens
cccgcagaccaaggacacccaagagggcgagcaggacgaagcgcccgccaccaagccaaggaccaaggacaggg

SEQ ID NO: 52322 - RNA, 83 nt, Homo sapiens
cgccagcagccgccggagccagccaacgagcgaagccaagggcacggccgccggggaagaccgggggagcccagaaggccggg

SEQ ID NO: 52323 - RNA, 63 nt, Homo sapiens
agaaggacgggcgggagagcaccaggaaagacccgaggaaggaccaccaggaagaccggacgc

SEQ ID NO: 52324 - RNA, 72 nt, Homo sapiens
acgagacgaggccggcaacccacagggaccgagggggcaaccgggcgcccccaggccccaggccggcaagac

SEQ ID NO: 52325 - RNA, 79 nt, Homo sapiens
cccaaccaggccacggcgccgaccgggagaacgagaagacaaggccccagggaaagaacacaaggaacgaaaggaaggg

SEQ ID NO: 52326 - RNA, 80 nt, Homo sapiens
cgaacgagcgacggcggaacccggggccgggacgcagcccggcggcagcaggagcagcgcaggcaggaagaaccacaagc

SEQ ID NO: 52327 - RNA, 78 nt, Homo sapiens
ggcggaagaggcggccggcgaaaggagcgggccggcaagggaggccagcaacagaagaaagcaagcaccggggaaagc

SEQ ID NO: 52328 - RNA, 55 nt, Homo sapiens
gagcgcgaaacgcacgagaagggggacgaccaccagccaggccggggacaaacag

SEQ ID NO: 52329 - RNA, 82 nt, Homo sapiens
cgccggcaacacgcggcacaagacgggacgagaacaagcaggcgcgaccgcaacgcccgccagcacccggcccaggacggga

SEQ ID NO: 52330 - RNA, 107 nt, Homo sapiens
gcaccagaggcgacaaaacaggagaaaagaccagggagcccaaaggagccgcgcgccacggaggcaggggaagcacaaaagcgcacccgcgccagcgaggaccggaa

SEQ ID NO: 52331 - RNA, 82 nt, Homo sapiens
cccagccacccaagaagggaggagaagacagccagaccgcagagaaaggcccccccgagccccccagcgccacagcaaggac

SEQ ID NO: 52332 - RNA, 76 nt, Homo sapiens
aaaagacccggccgaggaggacaagaagggcagagaagccagaacggagaaacaacgaagaccaacacgaaggcgc

SEQ ID NO: 52333 - RNA, 66 nt, Homo sapiens
gcggaggggcacgagcgccacaaccccagggaacaagagccaacaaggccccaggcaggggggccg

SEQ ID NO: 52334 - RNA, 80 nt, Homo sapiens
ggagcgcgagggaggcacgagaagcccggcgacggaggaacgcaggcgcgccagagaccgaccggggacacccggagagg

SEQ ID NO: 52335 - RNA, 62 nt, Homo sapiens
ggaagaagacgacacgcagaccaccacaacccgcaacgccacagcgagaacagaccacccaa

SEQ ID NO: 52336 - RNA, 81 nt, Homo sapiens
agaggaagggcacgagccgccgacggagcagcacagcagagcccgagccagaggccacccgcaccccgccccggccccacc

SEQ ID NO: 52337 - RNA, 71 nt, Homo sapiens
gggacccacaacccgacaaagggccccagaggagaaggaaagagacaccacgcagaaagaggcaacagaac

SEQ ID NO: 52338 - RNA, 85 nt, Homo sapiens
ggcccagccagcacccggcaacacgcggaccgaaccgcaagagaacggcaccaggccccgcccagcggcccgccccaggacgggg

SEQ ID NO: 52339 - RNA, 80 nt, Homo sapiens
gaaacggggaaagcaacaaccaaaggccagggcacaaaaaagaaaccagggggagaccgcaccaggaggaaaacagagac

SEQ ID NO: 52340 - RNA, 79 nt, Homo sapiens
aggggaaaaacgaacagagacgaggcggaacagagaaaagaaagaagagaagcagaggcggaagaacggaaaagcagaa

SEQ ID NO: 52341 - RNA, 72 nt, Homo sapiens
gcgagggggagaaagggacaacacaaaccggccccaggccgccccccaccaggggcgccccggagcaaagcc

SEQ ID NO: 52342 - RNA, 94 nt, Homo sapiens
gcgcacccggggagagcgcgcccagcccgcaaggggcggacaggcaaggcccagcagcaggagcagcgaaggggccaaaaacgcccagaagacg

SEQ ID NO: 52343 - RNA, 90 nt, Homo sapiens
gccgccgcgccgcgccgcgccgcaccccgagcgaccggggacggcaaaacagaacagaaaggcggagaaaaaagagggggaaaagaccac

SEQ ID NO: 52344 - RNA, 57 nt, Homo sapiens
ccacccccaacgcgacggaaaggcacgaaagccaggcaccaagccagcaaggagggg

SEQ ID NO: 52345 - RNA, 81 nt, Homo sapiens
ccccacaccgccggggcagggccagacacggaaacagagagggcagagaccagaggcacagggaaggacccagaacagagc

SEQ ID NO: 52346 - RNA, 70 nt, Homo sapiens
cacagcacagcaaaaaggagggggccacccccccaccgcacaggacagcacaggacccagcaacccgacg

SEQ ID NO: 52347 - RNA, 68 nt, Homo sapiens
gaaacagaaccgaagccggaccggggcccagcaaagccaaaggaaggaccagacagagacgccaaagg

SEQ ID NO: 52348 - RNA, 88 nt, Homo sapiens
agggccacgcagaagggcaggagcagggccggaggccaagcccgcagagaagacgcgcaagaccgagcaagacgccgcagccgagcac

SEQ ID NO: 52349 - RNA, 74 nt, Homo sapiens
caacagacagcggcccccagaagcacggaaaagcccccggccaaagaagcagcggggagaccggaaagaagaag

SEQ ID NO: 52350 - RNA, 85 nt, Homo sapiens
ggcggcaccagcaggcacccgaagacccccagcagcagacccaagaagacagaccccgaggagacgggcaagaaagccagagccc

SEQ ID NO: 52351 - RNA, 40 nt, Homo sapiens
agaacacgccaaggcaaggaccgacaccaccaaccaagga

SEQ ID NO: 52352 - RNA, 74 nt, Homo sapiens
agaggagggagaacaagcaacggcggcaaaccagccagcacgggggcccagccagccagcagcgaggggggacg

SEQ ID NO: 52353 - RNA, 57 nt, Homo sapiens
gcggagggccagccgcacgacgaagggagggaaggaaggaagagccaaaggacaggg

SEQ ID NO: 52354 - RNA, 106 nt, Homo sapiens
caccaaggagcgcagcagcacgaaagcaggacagcccagcgagaccgaggaagaggggcgcacccaacgcgcaccgagaagaacgagaggcacaggaccggcgcac

SEQ ID NO: 52355 - RNA, 83 nt, Homo sapiens
gcggccccagcaccccagcgcgcagggccgccaggggcgccgaccaagcaaggaaccagcgagcaaacgcaaacacaacagaa

SEQ ID NO: 52356 - RNA, 80 nt, Homo sapiens
cggccaccaccaccacggaccacgagaagcccagggggggcgagaaagaccgcgccgggccaagcaaacgaacacaagag

SEQ ID NO: 52357 - RNA, 69 nt, Homo sapiens
agaacgaagaagaaccccaacaggacagcagggcccacacacgggcggacaaggaccacagaacgggca

SEQ ID NO: 52358 - RNA, 71 nt, Homo sapiens
gaacaacaaaggaggagaaaagaccgcggaagcggcgccacagcaccgcgcagggaaaacgaaggaaggag

SEQ ID NO: 52359 - RNA, 70 nt, Homo sapiens
agagagaaaagagacggagcaagagaacgcaagagacgacccagaggcaaagaaagcagaaggaggaaga

SEQ ID NO: 52360 - RNA, 74 nt, Homo sapiens
ccacgaaaggagcaagagcaagacaccggacaccgagggcccccaaaaggaaggggaggagcacagaacgccag

SEQ ID NO: 52361 - RNA, 77 nt, Homo sapiens
gaaaccagcagacaacagggaagaaacacgaacgccagaggggagaacaaacacaacgacaaagcgcccgaggcgac

SEQ ID NO: 52362 - RNA, 69 nt, Homo sapiens
ccgccgagcggacccggaccggggagcaagcaagaaaaaggggcagaacagcgacccacaagcaaggag

SEQ ID NO: 52363 - RNA, 56 nt, Homo sapiens
accaagaaccaggagaagggaaaagacagcaaagcccaaagcccagccgaagccag

SEQ ID NO: 52364 - RNA, 38 nt, Homo sapiens
gaccagcagccgccaaagacacggcacaccgaagaaaa

SEQ ID NO: 52365 - RNA, 62 nt, Homo sapiens
cggcccacgccagggagggggagagaggccagagcgaccacagcagaagcgcggagcagaaa

SEQ ID NO: 52366 - RNA, 82 nt, Homo sapiens
gccgggagcaagaagaacacccagaggccccagggaaaggaccgaggcaggaaagaggccagacgcagggaccggcaccgac

SEQ ID NO: 52367 - RNA, 82 nt, Homo sapiens
ccaacagaccgaacaaagaccccagagagagcccaggcagcccgagaacacgaagagcgggaccgaacccagacaggacaaa

SEQ ID NO: 52368 - RNA, 55 nt, Homo sapiens
gaaacggagaagggcaaaggcggagccgggagcggaggaggccagcagccaggca

SEQ ID NO: 52369 - RNA, 82 nt, Homo sapiens
gcagggcacacggaagagccggcacgggcgacagcaggcacagggacgagggggcggaaggaacaaaacaggaagcggaaaa

SEQ ID NO: 52370 - RNA, 70 nt, Homo sapiens
gagacaggggcccaggccaacaaaacagacaaggaaagagcggggacgagagccccggcacaaacggacc

SEQ ID NO: 52371 - RNA, 43 nt, Homo sapiens
ggaggaggggcaggcccggcggaaacgagaggaagcaaagaga

SEQ ID NO: 52372 - RNA, 49 nt, Homo sapiens
accaggagacgccacacgagaggaaccggagaagaaacccagaggaaaa

SEQ ID NO: 52373 - RNA, 75 nt, Homo sapiens
gggagcgggacgggaggcgaacggcgccacgcagggccagggaggcacgaagccaggaggcaccgccgagggcgc

SEQ ID NO: 52374 - RNA, 79 nt, Homo sapiens
ccggggaaaaaggcggcagagcaaaacaaaaggaagccaccgcccagaagcccggaagaaacaccagcaaacagccacg

SEQ ID NO: 52375 - RNA, 80 nt, Homo sapiens
cggggggccgacaaccggcccccgcggacccccagccccgggcccaggagcccgagaaggaggagaggagggcggacagc

SEQ ID NO: 52376 - RNA, 65 nt, Homo sapiens
ggacaagcgcgggaacggcgcggaagggaagcgcaagaaagcacagagagccaaagaaagacgaa

SEQ ID NO: 52377 - RNA, 79 nt, Homo sapiens
cgacggagcggcacagccggagaagcggagaagacaagagcccgcgggcacgacccgccccgaggagggaccggcggga

SEQ ID NO: 52378 - RNA, 75 nt, Homo sapiens
gacccgggccaagagacccccaccacacgaggcaggagacgagaccacggcaagaagagcacgcgccaagggcac

SEQ ID NO: 52379 - RNA, 77 nt, Homo sapiens
ccgacccaagaaaacgagagaagcgagagggggggaaaccccgaaacaccggaaggacggcacaagaaagaaaggcg

SEQ ID NO: 52380 - RNA, 39 nt, Homo sapiens
aggcgaggccccaggaagaggcccagcaaggccacagcc

SEQ ID NO: 52381 - RNA, 77 nt, Homo sapiens
cccggaccggccgagaggaagacgagccgggaggaacggcccggaaacaggaggaccccaaaaggaacagcaaccgc

SEQ ID NO: 52382 - RNA, 83 nt, Homo sapiens
ggaggcgcaggccccaagcggggaggggccggacgccggaaaggacgagaccgaagagaaggaaggacagcgagagagaagag

SEQ ID NO: 52383 - RNA, 84 nt, Homo sapiens
caccaggccgggaagcccacgggacaagacgcagaggaagggggcggcgggaggcccagccgggacagcacggggcgacaccgc

SEQ ID NO: 52384 - RNA, 82 nt, Homo sapiens
cgcagcagcgcggacccggagcgacaagcgccccgacggagcgccaggacgggggcacccgaggaggaagagggcagggccc

SEQ ID NO: 52385 - RNA, 38 nt, Homo sapiens
gcaaagagaacccaacggccagaaacgggaggcgaccg

SEQ ID NO: 52386 - RNA, 71 nt, Homo sapiens
gagccgcacccccagggcggcacgcgcagggggcaccgaaacagggaggccaacagacccaacccagaagg

SEQ ID NO: 52387 - RNA, 71 nt, Homo sapiens
cacagagaaacacacaaccagcgaaaagggaaacccagacgacaaggaaggccaagggacccacgaccaac

SEQ ID NO: 52388 - RNA, 83 nt, Homo sapiens
ggaagccaccgagacggcgaccgggcgccgagacaccagagccacaaggcacaccagaagacaagcgggagaggaggacgagc

SEQ ID NO: 52389 - RNA, 55 nt, Homo sapiens
gagaccgccggggcggcacacggagcacaggccggggacacaagcaacagccaga

SEQ ID NO: 52390 - RNA, 79 nt, Homo sapiens
ggcccgccgccccgcgggggagggcggagcggcgcggccccagcccccgggggggcccgaggcacgacgacggagagag

SEQ ID NO: 52391 - RNA, 57 nt, Homo sapiens
ccccaaagcaaacacccagaagaaccgaccgcccagaaagaccacacagggaaacga

SEQ ID NO: 52392 - RNA, 55 nt, Homo sapiens
cagccacagagaagcaagagcgcaggcacagacaggcgagcggggacggcagagc

SEQ ID NO: 52393 - RNA, 74 nt, Homo sapiens
cgccaaaccaagccgcagggggaaggggaacaaagcgacgagggcgagaagaacaggaccccgaagacaacacg

SEQ ID NO: 52394 - RNA, 60 nt, Homo sapiens
ccgaagggaaggccagcagcgcgcggagaagaacggggagccaggaggggcccagacacc

SEQ ID NO: 52395 - RNA, 79 nt, Homo sapiens
cgagccggcgacggacgcggcgcgcgaccgacacgaaggccccgcccagcggcccgccccaggacggggcgaccgaacc

SEQ ID NO: 52396 - RNA, 43 nt, Homo sapiens
cacaaaacaaggccggacgaaaaagccagaggacaacagagca

SEQ ID NO: 52397 - RNA, 71 nt, Homo sapiens
cgccccgcggagccacggaagcggacaggggacgcgccacagacgggggaacccagaaagagaaccgacgg

SEQ ID NO: 52398 - RNA, 71 nt, Homo sapiens
ggaacgaacgggaccagagggggacagcgaaagggaaaaaaccggccacagacccgaagaccaccacagga

SEQ ID NO: 52399 - RNA, 78 nt, Homo sapiens
accagaggagaccgccacacaagagaagacccaccgaggaggagaggagcgacacgcagaccggcgagccggaacccc

SEQ ID NO: 52400 - RNA, 75 nt, Homo sapiens
ggacgccggcggagacgcgggcgaggccaggaaaaaaaggcacagaacaaggcaccccagagaccaaagggcggg

SEQ ID NO: 52401 - RNA, 65 nt, Homo sapiens
gaacaggccaaagccagacacagcggcgaagcgcgcaccacccggcaagggaaaaggcacagggc

SEQ ID NO: 52402 - RNA, 80 nt, Homo sapiens
gaaaacaaaaaggccagaaagaggagcagagacgccggacagaaagcaggagcccggaaaggagaaggaaaagacggcag

SEQ ID NO: 52403 - RNA, 72 nt, Homo sapiens
cgcggcggagcccgacccacccaaggaccagggaacgggacacacagacggaggaaacgaaaagggacacca

SEQ ID NO: 52404 - RNA, 79 nt, Homo sapiens
ggagcccaccgcaggacaccggagcaccggggcgcacaagaccccacacagagggcccgggccccccagggacggggcc

SEQ ID NO: 52405 - RNA, 75 nt, Homo sapiens
gcccccaaccgcgaagcacccagcggcggcgccggagcgcgcccgcacggcaaagcaaagaagagccgcgcagaa

SEQ ID NO: 52406 - RNA, 88 nt, Homo sapiens
agacccggacagggcaggaaacagaccgacaggcaggagcgaggcagcgcaggagcagaccggagccggaggaagagaaggcagcgga

SEQ ID NO: 52407 - RNA, 79 nt, Homo sapiens
acgaccaagaagaagccgggaccccacgcccagaagaacaggcggcgggcagagcgaggcagaaagaggagaagagccg

SEQ ID NO: 52408 - RNA, 63 nt, Homo sapiens
ccggcacccaagcacagaccagagagcaccagggggccggccccaaagaaaggaagaccagga

SEQ ID NO: 52409 - RNA, 80 nt, Homo sapiens
cagcgcacacgcagcccggggagcacagaggggggcgggagcgaagaaaccgcaaaggggagaaaaacccgaacaccagg

SEQ ID NO: 52410 - RNA, 54 nt, Homo sapiens
agaagaaggaaagagaagacgaagagaccgaagcggggccaggacacacgagca

SEQ ID NO: 52411 - RNA, 84 nt, Homo sapiens
caagccgggagcagacaagagcaaccaggccggacggacagagagagcccacccgaaggaagagggagaccagagaggcagaag

SEQ ID NO: 52412 - RNA, 55 nt, Homo sapiens
aaaaaaggaagaagggaaccgagagggagcagaagccaaaccgcaggagagagaa

SEQ ID NO: 52413 - RNA, 70 nt, Homo sapiens
gaagcgggcgcgcgcacggcaggacggagggcagacacaaggaacagccagccaggagaaaaacgaaccc

SEQ ID NO: 52414 - RNA, 72 nt, Homo sapiens
ggccgcccccggaagccccgcgacgcggaagacagcacgcgacgaggaggcgcacacacggggacacaagaa

SEQ ID NO: 52415 - RNA, 81 nt, Homo sapiens
gaagaggcggacggaggagcaggcgagaagagaagggagaagagcaaccggacacagaaggggaaggaaaccccaagcagc

SEQ ID NO: 52416 - RNA, 59 nt, Homo sapiens
cgcaaagacaagggagaagcggcggacaagagccccccaccaggaaccacgccccgagc

SEQ ID NO: 52417 - RNA, 78 nt, Homo sapiens
cagacgggccagggaagacaacaccagggggaggccaggggggccgacccgggacggaggggaaaaggggcccgggca

SEQ ID NO: 52418 - RNA, 76 nt, Homo sapiens
aaaaaggagaaagaacgaagggacaccgggcccacagaggaagacacgggcgcagccccgagcccacagccccagc

SEQ ID NO: 52419 - RNA, 83 nt, Homo sapiens
cgccggggcccaggcccagggaccaggcggaggcgcgcgggagccggggcaccacagagagcggaaaacagggccagacggga

SEQ ID NO: 52420 - RNA, 73 nt, Homo sapiens
gaaacaggaagaggaaaaacacgacaaaggaaggcagcaacaaccacccagggagaaaaacaagaggacagac

SEQ ID NO: 52421 - RNA, 77 nt, Homo sapiens
gccgccccgccagcgccagacggacgaggcggcggagaacaagcggcaggaaggagaacgaccgccagaagagaaga

SEQ ID NO: 52422 - RNA, 52 nt, Homo sapiens
gagaagcccgcaagcgcagcaagcccccgccacccaacgaagcggcaaagac

SEQ ID NO: 52423 - RNA, 76 nt, Homo sapiens
gcaggcagcggcggacaacccacaccaggccagccgggaaccgaacccaaaacgaggcagacaacacagacgacag

SEQ ID NO: 52424 - RNA, 77 nt, Homo sapiens
agagcagccagcaagggaaggcccgaaaagaaagcgaacacacaaaacaagaaaaggcacgcaaacccacaagaacg

SEQ ID NO: 52425 - RNA, 70 nt, Homo sapiens
cgcagccacaaaacagaacgggcccgagggcaggacagcaggcaccggcgaagcacagagaggcgcgagg

SEQ ID NO: 52426 - RNA, 60 nt, Homo sapiens
cggagcggagccaggggcggcggacggggcgcccacacagcgaaacacaccagcggagag

SEQ ID NO: 52427 - RNA, 73 nt, Homo sapiens
cgccggacccggggggacgagagggcccaaaccagaaacaggccccacacaccccacgaagagaccagaacaa

SEQ ID NO: 52428 - RNA, 78 nt, Homo sapiens
gccgcgagcagcgcacgcgccgggccgcgaggagcgcgccaggaccaagaacgcccagcccgcgggcaccggcagaaa

SEQ ID NO: 52429 - RNA, 73 nt, Homo sapiens
acaaggaaacaaaccacagacgaaggagacaaaaaagcgaaggacccaaacggaagaggaagacgcacgccgg

SEQ ID NO: 52430 - RNA, 71 nt, Homo sapiens
ccgccgcgggagagaggacccccccccccccccaaggacaacgagccagcccgcaccacacgcggggagac

SEQ ID NO: 52431 - RNA, 53 nt, Homo sapiens
ggcaaggcagaagcgggggggggaacagacagaaacccgggacgacagcagag

SEQ ID NO: 52432 - RNA, 65 nt, Homo sapiens
ggcgccggccgagaaggcagaggcgacaccagggggccgaggaagccccccagacagaagcaaaa

SEQ ID NO: 52433 - RNA, 37 nt, Homo sapiens
gaaaaaagagcgggagccaagcgggcaggccacccag

SEQ ID NO: 52434 - RNA, 60 nt, Homo sapiens
aaggccaagaaggcaggaaacacagcgcgggaaggaacaagaggcccagggaggccagaa

SEQ ID NO: 52435 - RNA, 73 nt, Homo sapiens
gaccgaaacgggcacgacacgagacgggcacaacgggcgaagggagagggcccaggacggggaaccagaagag

SEQ ID NO: 52436 - RNA, 82 nt, Homo sapiens
cccgggccaggccgccgccgagccgaggacaaaaggcgcagccccaagcaccggggcggggaccccgaagacgagacccggg

SEQ ID NO: 52437 - RNA, 68 nt, Homo sapiens
gccaaccccaaacaagaacagaaaacgggaagagagggaacacgcaggagggacgaagggagggaagg

SEQ ID NO: 52438 - RNA, 73 nt, Homo sapiens
ccagaacacgggagaaaaaggaaaacgcggaaaaccgacacaacaggagcgaagcaacgggagagcaagagga

SEQ ID NO: 52439 - RNA, 84 nt, Homo sapiens
gcacggcccaggaccgcacaagagccccggggcggaaagaagccaaggccaaggagcgggcggcagcgcagcggaggccgagga

SEQ ID NO: 52440 - RNA, 68 nt, Homo sapiens
agggagccgcagcgagcagggccagaacgcggagacggacaagaagcgagccgcgcacaccgggccgg

SEQ ID NO: 52441 - RNA, 77 nt, Homo sapiens
caaccacaccaccgacaccgagcagaaaacacgagacgaagcgggaacaaagagcagacaggcacgaaccgagaaaa

SEQ ID NO: 52442 - RNA, 72 nt, Homo sapiens
agcagggggaggagagggcagagaggcaacgaaccggccacgccaccagcagccccaagcccagccccccgg

SEQ ID NO: 52443 - RNA, 72 nt, Homo sapiens
gcggggcaggaacacacccaagagggaaacccccccacgagggcccacgagacgcgaacaaacgccgcgccg

SEQ ID NO: 52444 - RNA, 74 nt, Homo sapiens
aggagaggaagcagaacgaaagggcaaaaggccacacgacggcccccggacaccccccagcggggcaaggagga

SEQ ID NO: 52445 - RNA, 81 nt, Homo sapiens
gaggagcagacgacccgggaaggcagccccagcgaagagagcggcaaaggcaaaagagaaaccgcgccgaccagcgcaggg

SEQ ID NO: 52446 - RNA, 77 nt, Homo sapiens
gaaccgccacgccagcacgccaacccggacggacaacaccggggagcgcggcacgccaaccaccggagaaaagaaaa

SEQ ID NO: 52447 - RNA, 66 nt, Homo sapiens
cagaggagaaggcagcgcccgcagggccagcacggaaccgaccaagacgaaccaagagagcagcgc

SEQ ID NO: 52448 - RNA, 78 nt, Homo sapiens
gcgccaagacagcacaaacccacgccgccggaagcagaaggagcgaaaaaggcagaaaggcccccagccaccacccgg

SEQ ID NO: 52449 - RNA, 73 nt, Homo sapiens
gggcgagagcgccaaagacccccgcaggcaggggcagaaggcgacccagcgcagagcaaacagaaccacccag

SEQ ID NO: 52450 - RNA, 72 nt, Homo sapiens
cagacagcaagagcacccgacccacaggccagagagagcgagcccagccccgcggaaccaaggccccccaag

SEQ ID NO: 52451 - RNA, 55 nt, Homo sapiens
caccgggggcagaacagagccaaggccggagcgcccaaaaaggagacagacaacg

SEQ ID NO: 52452 - RNA, 80 nt, Homo sapiens
gcggcgccgggcacaggagggaagagcaagaccacccggagaaaaaccagggagcagcaggagagaagaggggacgacac

SEQ ID NO: 52453 - RNA, 93 nt, Homo sapiens
gaaccaacaaaagccaccacccaggcgaaagaaaagggaggacacaaggccaagacaacacaaagagggaggccagccccggcacagaggcac

SEQ ID NO: 52454 - RNA, 69 nt, Homo sapiens
cgggccccaccaacggccacccaagcacagagcaacggggcggcacacaaggagcgaagggcagggaga

SEQ ID NO: 52455 - RNA, 75 nt, Homo sapiens
cgcccacgcaaacccaaagaccccgccggagacgagaggaccagaggacgcaccagaagacagggcaaccagaag

SEQ ID NO: 52456 - RNA, 60 nt, Homo sapiens
accggccgccggcccccagaacaagggaaagacaaggagccgggccgagaaaccgaacca

SEQ ID NO: 52457 - RNA, 92 nt, Homo sapiens
gacaagagcaagagggcagaagaacaagaaggagaccgagaagggaaacagaagacagcccaacaaggcgggacgacaacaccacagacacc

SEQ ID NO: 52458 - RNA, 66 nt, Homo sapiens
agaaacgcgaaaaggaagcggaagggcagcaagaaaacacggcaggggaaaccccagccagcgccc

SEQ ID NO: 52459 - RNA, 71 nt, Homo sapiens
gagaaaagggacggaaaaaggcgccagacagcagcgggggagccaggacaggagaggaaaaccaagcggaa

SEQ ID NO: 52460 - RNA, 74 nt, Homo sapiens
cgcccacccggcagccaagacacacaggcggccagcccaacggaccgagggccgaacaaaggagaccagcaccc

SEQ ID NO: 52461 - RNA, 83 nt, Homo sapiens
aggggaggccgcggaacgcccggcgccaggaccgcggcaaagcccaggcccgggcggccaggggccccagacacgacgccccc

SEQ ID NO: 52462 - RNA, 47 nt, Homo sapiens
cagacaacaccacagcacaaagaaacgcccgaacaccgggaaagggc

SEQ ID NO: 52463 - RNA, 69 nt, Homo sapiens
ccagcccacgcaccaagaaacagccccacggcagaccaggcaaaagaaaccaccgacgaagcccgagac

SEQ ID NO: 52464 - RNA, 88 nt, Homo sapiens
gcgggccgaccgggcgcaccgaccaggccccaaagccccaaggcgacaagaccggaccggagcaacaagggagcaggggcaacgcgca

SEQ ID NO: 52465 - RNA, 68 nt, Homo sapiens
gcggaagacgggacaggacagcagaccacagcccggcaggcccaaaaacccaaagggacagaagcacc

SEQ ID NO: 52466 - RNA, 85 nt, Homo sapiens
aaagaaggcaaggagagaagagaagaacagcacaggacagaaggaggggaaagccagcgcagcgcgagaagcgacagcgaagaag

SEQ ID NO: 52467 - RNA, 88 nt, Homo sapiens
ccggagcggcggaggaggaggccgcaggagacccccgacgaccccgcccggcggggaaggagcaagggacggccacccacggaccgca

SEQ ID NO: 52468 - RNA, 77 nt, Homo sapiens
gaaaaaagagcgcaggggggcgagaagacggaacaagaaaggaccaggagccccgggcaacagacagagggacacca

SEQ ID NO: 52469 - RNA, 79 nt, Homo sapiens
gcaacagaagcagccagcagaggcgcagggccagcaggccggaccggacaaaggccacgcgccccggccggccacaacg

SEQ ID NO: 52470 - RNA, 82 nt, Homo sapiens
aaacaagacaacgagcgaaagcgaaaaacagcgaccagagaccgcaccccagaacaaccaaggaaccccaggagcggcagcc

SEQ ID NO: 52471 - RNA, 58 nt, Homo sapiens
caggggggggagaaggcaaaggggagccgccagcgaccgaggccggcggagccagccc

SEQ ID NO: 52472 - RNA, 87 nt, Homo sapiens
gaccgcgcggacccggccgggagaagcagcagcgcaagccacacccgcggggcccaccggaagagcacgcccacagccaccaagcag

SEQ ID NO: 52473 - RNA, 76 nt, Homo sapiens
gagaaggcggcgcgggagggaaggcgcgggggcgaaaaaccggaggccggcgccacacagcgaggcccaagacagg

SEQ ID NO: 52474 - RNA, 76 nt, Homo sapiens
ccaggcaccaggccaaacgagcggcgaagagggcgacccggacccggaaggggcggaggaagaaccggccgagaca

SEQ ID NO: 52475 - RNA, 82 nt, Homo sapiens
agcccagagcgagcagggccaacaccagagggcgggaacaggagcagacagcccaacgaccagcgaacgaagcagaaccggc

SEQ ID NO: 52476 - RNA, 68 nt, Homo sapiens
cagacagaacagacaaggggacacgagcgggccgcacgggggaaagggagacaggagagcaaaacaca

SEQ ID NO: 52477 - RNA, 68 nt, Homo sapiens
aggcaccagagacaacgcgcacagagaaagacaggcacacccagaagccacaggagaagcaagaggcg

SEQ ID NO: 52478 - RNA, 72 nt, Homo sapiens
accaacccaagcgaagaagagcggaaaacaaggggaggaagccagcccgagcaggcccaggggaggaggggc

SEQ ID NO: 52479 - RNA, 86 nt, Homo sapiens
gagccgggaagacgcggggaagaggaggcggaaaaggacgcaaagcccggcgaggaccaagaacgcccagcccgcgggcaccggca

SEQ ID NO: 52480 - RNA, 62 nt, Homo sapiens
cccggggacgcagcaaagcgaagggaccagggccaagagaagaagagcaccccccccagcag

SEQ ID NO: 52481 - RNA, 96 nt, Homo sapiens
cccgcaccgcccccgggaccgcaggcccacacggcccgggcaaggaaggaacggccaggagaacaaccagcaccgggacccaaacagcccgaaaaa

SEQ ID NO: 52482 - RNA, 73 nt, Homo sapiens
cggagcccccggaccacacagcgcccaggccagagaaggggaaggaggggcagcgccgccagcaccacccacc

SEQ ID NO: 52483 - RNA, 37 nt, Homo sapiens
ccccaagcagcgggcacagagcaaaagcgcagcacca

SEQ ID NO: 52484 - RNA, 83 nt, Homo sapiens
gaaccgcacggaccacacagcgcgggagccacgcagaggacgccggaacacccggaagccgagaaaggaacacagcacccacc

SEQ ID NO: 52485 - RNA, 78 nt, Homo sapiens
gccgaacccaccgagccagggagacgccgacaccccaggccacgagccccaggccacggcagcaggcccagcccccag

SEQ ID NO: 52486 - RNA, 79 nt, Homo sapiens
acaacacgggaacggcccagaagcccaccgccggaacggcgcggaccgaccccggccgcccccagcggggagcacgcgc

SEQ ID NO: 52487 - RNA, 67 nt, Homo sapiens
agacaggaccacgaggacccaagaaccaaaagcgaaccaccagggggcgaacacagacaaccacaag

SEQ ID NO: 52488 - RNA, 87 nt, Homo sapiens
caagcggcacgccacagcagaggaggggaggaagaagagagggaccggacccaggccccggcaagagagaaggcagcaacagccaga

SEQ ID NO: 52489 - RNA, 54 nt, Homo sapiens
acggaagaagagagaggcacccagcaaaggaaaggaggaagaagacagaagagc

SEQ ID NO: 52490 - RNA, 73 nt, Homo sapiens
caggaccaagggccccaagggccagccggaacgaaagagcccgggagggagacaccagccggccaaaccagcc

SEQ ID NO: 52491 - RNA, 72 nt, Homo sapiens
agacgcgagaagccacacgggcaaacgaagaaaacgacccagccagaggacaaaggaccgaggacagggaag

SEQ ID NO: 52492 - RNA, 71 nt, Homo sapiens
cccgggacgcggaaagaggccaaaaaggcacggcagacacaccgaccagaggaaggcgaacccgccacgca

SEQ ID NO: 52493 - RNA, 115 nt, Homo sapiens
accgagcccaggagaagccacccagcccgggaccaggagaccggcgcaaggcccgaggggcaggaaacacagggagagccgcagaggccgcccaccacgcccgaaggagcccggg

SEQ ID NO: 52494 - RNA, 90 nt, Homo sapiens
gggggggggaagccgcagcggaaagcaggagcacaggacgcggcccagagaccccccacgggaacggaagcaacgagccagcagcaggca

SEQ ID NO: 52495 - RNA, 74 nt, Homo sapiens
caaaagcggacagcaaaaggcagagcaggcggggccggggagcccgggccagaccccccagacccagcccaccc

SEQ ID NO: 52496 - RNA, 75 nt, Homo sapiens
ggaaggaaaaccgacgagggaaggaagaagaagggccgagaaaaaggcccccaccgcacagagacagacagggag

SEQ ID NO: 52497 - RNA, 100 nt, Homo sapiens
cgacaaggagggaagcggccccagcaccccagcgcgcagggccgccaggggcgccgcccgggaagacaagaaacaacggcccacggccacccggcggaag

SEQ ID NO: 52498 - RNA, 78 nt, Homo sapiens
acaccccacaggccgccccaacaccagggaagagacacacccagcaccccaggacaaaagcaaggaaaacagccgccc

SEQ ID NO: 52499 - RNA, 73 nt, Homo sapiens
aaaccaaaaggccggacgaaacggacgaccagcacaccagccgcagacaagagaaaggcagaagaccaccaaa

SEQ ID NO: 52500 - RNA, 75 nt, Homo sapiens
cagagcaaggaggccccagcggaccgaacaggagaaggaggacgccggaagcaacacaagcaggccaaagaggac

SEQ ID NO: 52501 - RNA, 76 nt, Homo sapiens
ggcggcagcccgcggcagcacggaggccggaggcggccaggagaagaacagccagacccacacacaaccacggaga

SEQ ID NO: 52502 - RNA, 86 nt, Homo sapiens
ccagaagacagagggcgagacagagcaccagccccaggaaggccaggaggacgggccggcaggaggagagcgaacgaagcccggga

SEQ ID NO: 52503 - RNA, 79 nt, Homo sapiens
agagccgacaacaggaaggaaggagaaacacggcaacacagagaaagggacaaccaccaccagcgagcaaaagaacaaa

SEQ ID NO: 52504 - RNA, 77 nt, Homo sapiens
gggacgacaccaggaagagagggacaggagacgaggaggagaaccagcagcaaagggccccacggaggaaaggacca

SEQ ID NO: 52505 - RNA, 52 nt, Homo sapiens
gaggacccaccgccagccacccacgccagcagagacagcggaaagacccagg

SEQ ID NO: 52506 - RNA, 77 nt, Homo sapiens
gagagcaaagaagcgaaaccgagcaggcagagagcagaagaacacagacagcggaagagccgagggaagacccaaac

SEQ ID NO: 52507 - RNA, 59 nt, Homo sapiens
acccgaggaggaaggcccgcgggcccaaggaccgcgagggagacacagggggaacgaga

SEQ ID NO: 52508 - RNA, 73 nt, Homo sapiens
gggggcgcgggccagacagagcagaacagccccgcggcccggggagaaggcagaaaggaaccaggagccagcg

SEQ ID NO: 52509 - RNA, 78 nt, Homo sapiens
ccaggaaagaccgaaacgcaccgagcaccaagccagacagaccaggagagcaccaaacgcccaggagcgagcgaaaag

SEQ ID NO: 52510 - RNA, 67 nt, Homo sapiens
agaaggaccaagaaccagcccagccagggaacaaagaaaccagccaggaacgacagcagaacccagg

SEQ ID NO: 52511 - RNA, 69 nt, Homo sapiens
aagccaacacccggcccgccaagcgagagacgccgacaagcaggagccgacccaccagcaaaccacaga

SEQ ID NO: 52512 - RNA, 76 nt, Homo sapiens
gaagagcagcagagagaccgaaagaaagacaacccgaaagaacaccgaaccagggcgcagcaacggcacacagagg

SEQ ID NO: 52513 - RNA, 126 nt, Homo sapiens
caccggcggcgcccgccccagggagagccggcgcaccaggaggagaccacgccacgcgacgagccgcaaaggaccccaccccccagaagaggagaagaggaaacacaagaagaaacgccgggcaga

SEQ ID NO: 52514 - RNA, 66 nt, Homo sapiens
acaagggcgcgagcaagccggaggccagagcacaagacgcaggccagccagggcagcagcaaggag

SEQ ID NO: 52515 - RNA, 40 nt, Homo sapiens
gacgagagcccggcgggggcgcagaccagcggacccaaaa

SEQ ID NO: 52516 - RNA, 70 nt, Homo sapiens
gacggcaaaaggacagagaaagcggcagaaaaacagccggacgggacagaacacgacagaggaagaccac

SEQ ID NO: 52517 - RNA, 114 nt, Homo sapiens
gcgcaggccgggaagccagccaggccgccagccaccacgcaccccccccgcaagccacacccaggcgagcccccaaacggcaacaaacaacccgaagggcggaaaagcagcaag

SEQ ID NO: 52518 - RNA, 79 nt, Homo sapiens
agaccggcaccgaagaccgaaacggaacgccaagcgaagaagaacgaaacggaagcacaaagcagcgcgagaaagccca

SEQ ID NO: 52519 - RNA, 73 nt, Homo sapiens
ggaaccaacaaggggagcgggggcgacagcgcccggcacaagcccagggcaccacagaacagccgaagcaggc

SEQ ID NO: 52520 - RNA, 84 nt, Homo sapiens
gagcgcgaaggccgggacccggccccggcccacaggggggggcaaacccgagagaacggcaggaacagacgccccaccaggcca

SEQ ID NO: 52521 - RNA, 75 nt, Homo sapiens
aaagaacagaaaagaagaggacgggaaccccaggagaggaaaaaccacccacaaacgggaggggaaaaggagcgg

SEQ ID NO: 52522 - RNA, 72 nt, Homo sapiens
cacagagggggaaagccaaggaaaaacggagagccacaaaaaaggaagcgaaagagcggaccccgaggcgca

SEQ ID NO: 52523 - RNA, 63 nt, Homo sapiens
gcccggcggcgcgccccgcggcgcccgcgccagggcccgagggaccgccaacaagcggcccgc

SEQ ID NO: 52524 - RNA, 97 nt, Homo sapiens
cgcaccaacggcgaccggaccggcacggacggccgcccgagagccgggcccagacccggccggccgcgcgccgggagagagcacaggcagcaccccg

SEQ ID NO: 52525 - RNA, 80 nt, Homo sapiens
ggcccgaagcaagaacgcgggccaggcccagcagggccacggccaacccgaaaaaaggagaaaacgggccggaggaaaag

SEQ ID NO: 52526 - RNA, 71 nt, Homo sapiens
gaggacgacgacgacgaggaagaggaggcgaggggggcggggccacgagccccggaacacaacccccacac

SEQ ID NO: 52527 - RNA, 78 nt, Homo sapiens
ggaggaggccccaaagggcgagaggaaggcgggggagaaggagaggaacaggaagaggccgaccacggggccacaagc

SEQ ID NO: 52528 - RNA, 37 nt, Homo sapiens
aggagaagaaacccagccgaaggcagccggaggaaga

SEQ ID NO: 52529 - RNA, 84 nt, Homo sapiens
aggagagaaggcagggacacacagcaggagaaacccgcaagcaccaccacgagaacgagccaacgggacgcaaagccgccccag

SEQ ID NO: 52530 - RNA, 52 nt, Homo sapiens
agaggcccagacaaccgccagccagacgaaggcccagagcggagacgccacc

SEQ ID NO: 52531 - RNA, 73 nt, Homo sapiens
cccgccgcccgggggcgccgcccaccgcgcccgccggacaaggcacgaggcgcggcgaccaccacagcagagc

SEQ ID NO: 52532 - RNA, 69 nt, Homo sapiens
caaccaacgagacaagagggcaccagagagagacacagccgaaagcggacgcaagagcaagaccagccg

SEQ ID NO: 52533 - RNA, 74 nt, Homo sapiens
ggaaaaggagaggcagacccaagggccagagcaaggcaccgcggcaccgccaccacagagcgccacgccgcacc

SEQ ID NO: 52534 - RNA, 63 nt, Homo sapiens
caaccaacaggcacgacaagcggacaccccgagagggaagagcgcgaaacgaccagccccacc

SEQ ID NO: 52535 - RNA, 76 nt, Homo sapiens
agagagagccacggaccgccgagccaccagcaaagaaagagcacgaggcgagcggggagacccgagagaccaaggg

SEQ ID NO: 52536 - RNA, 70 nt, Homo sapiens
ccacacagggaacaccggaaccagcagggacagggacaaggacggcaccaaacaaggacggagcaaacgg

SEQ ID NO: 52537 - RNA, 74 nt, Homo sapiens
gcacaccggaccaggaaacggaggcgggcagaaccacagggagagaaaaaacaaggacacagcggaaaacccaa

SEQ ID NO: 52538 - RNA, 64 nt, Homo sapiens
gcggcgccagccgggagcagcaccaacacacagcgagacggcagggagaccaaggccgccaaag

SEQ ID NO: 52539 - RNA, 77 nt, Homo sapiens
ggacaaggcagaagagcaacaagcaggacgacagcagaaggcccgggggaagaggaaaagggagaaggccaaaggca

SEQ ID NO: 52540 - RNA, 74 nt, Homo sapiens
ggagaccgagagccgcccgaaaagcggggccggacgggcggagaacggaaaagcaccaggaagcagagaggacc

SEQ ID NO: 52541 - RNA, 95 nt, Homo sapiens
agaggcagggggcgacccgaacccaaaggaggaaacagcggcaagccacagacgggagcaaggaccacagaaacgcagaaaaaggggaaagaaaa

SEQ ID NO: 52542 - RNA, 80 nt, Homo sapiens
gcggcggcggaggggagccagggcgccccagcaggcgcccggcgcaggccaaagggcccccgaaccagcgaaaacaaacc

SEQ ID NO: 52543 - RNA, 44 nt, Homo sapiens
ggaacacgccgccccagaccagaacacacaagaaccgggagaac

SEQ ID NO: 52544 - RNA, 70 nt, Homo sapiens
gcgcggaccggcagcagcggaccgaaggagaagaaggagaaggggaggagaaggcaagccggaaagagcg

SEQ ID NO: 52545 - RNA, 83 nt, Homo sapiens
cgcgaggggaagaggaagcaaagccaagaaggagcccgcagggccgccaccagcacagggagggagaggagccagaggacacg

SEQ ID NO: 52546 - RNA, 76 nt, Homo sapiens
acgacagccggcgaagaagaagcagccccaggaaagagcaaggacaggaggagcagcccccgcagacgaagagcaa

SEQ ID NO: 52547 - RNA, 77 nt, Homo sapiens
caccacaacaagaagagaaaaaaggcgccagcaaacagcccgcaggaaggagaggggccaagcagagacacaaaacc

SEQ ID NO: 52548 - RNA, 64 nt, Homo sapiens
accagcgcgaaagagaaacaaagagggaagccaccgcaaaaggggacgcaacggccacagccaa

SEQ ID NO: 52549 - RNA, 60 nt, Homo sapiens
cggcgggccacgaggaggcgaagcgcggcgggcaggcgcggcccgaaagcgaccaagaca

SEQ ID NO: 52550 - RNA, 60 nt, Homo sapiens
gcaggcacaaaaggcgcccacagccacgggaccggcgcaggaaagcgaagccaacaaaga

SEQ ID NO: 52551 - RNA, 70 nt, Homo sapiens
aaaccaacagccccccagagcacagagaccgaagggagagcgcgacccccggccaagaagaggagacaga

SEQ ID NO: 52552 - RNA, 63 nt, Homo sapiens
gaaggaagaccccaagaagcgggcgacagcacggagaggagcacgccagccaaacagaacgaa

SEQ ID NO: 52553 - RNA, 79 nt, Homo sapiens
ggcggcggacgaccggagagccgcaccaaggagaaacagagacgagcaaggcgagaggcaacgaacgagaccggggacc

SEQ ID NO: 52554 - RNA, 70 nt, Homo sapiens
ccagaaccgcgcggcgagaaggggcaggacgccaaaaacagagggaaggcccccacagagagcacacaaa

SEQ ID NO: 52555 - RNA, 85 nt, Homo sapiens
cgggaaaaggaaggaaacggccagcagccacacgccaaggaacggcccaaaaaggaaggaggaaaaagagaagaaaagacgccgc

SEQ ID NO: 52556 - RNA, 77 nt, Homo sapiens
cccacacccggaaaccccccggcccccgcgagccgcgcgcccagccaggggacaccaggcgagcccaagagaaaagg

SEQ ID NO: 52557 - RNA, 81 nt, Homo sapiens
cacccgcacccaagcccgaacgccccagaagccccgggagcaccgagaagcggagaagcgcggaaaccgcggccggcacaa

SEQ ID NO: 52558 - RNA, 106 nt, Homo sapiens
cggacgccaagacacgacaagacgaccgggaaagccagggaggccgcgaagacacacaccacgccaagaaccggaccccaaaggcacagaggccccacgaagaaag

SEQ ID NO: 52559 - RNA, 70 nt, Homo sapiens
gaggcaaagaagggaacaagaaaaaagcgccaaaaggcggagcagaaaacaagcgcgccgagcccgacgg

SEQ ID NO: 52560 - RNA, 79 nt, Homo sapiens
aggaagaagagagagcggggcagggcagaggacagcaagggacaacagaaggacagagcgggagccaccagcgccaaag

SEQ ID NO: 52561 - RNA, 68 nt, Homo sapiens
gacaggacggacccggaagcgacagcccggggcgagacacaagagagcgccgaagaggaaacacggag

SEQ ID NO: 52562 - RNA, 67 nt, Homo sapiens
ggaagaagaaggaagccaaagaaggcagaagacggcagcgaacgagaagagcaaggcgccaacgccc

SEQ ID NO: 52563 - RNA, 76 nt, Homo sapiens
ccagacgccagcgggacgaggaccgagaccgcggccgggaccgaggggcagcggggaagaagaaaaggaaccgagg

SEQ ID NO: 52564 - RNA, 74 nt, Homo sapiens
cccccggagggagaaggccaagaagcagcccgcacggcggaggagaagccgagaccaagaccacgcccaaggcc

SEQ ID NO: 52565 - RNA, 75 nt, Homo sapiens
cagaaaaagggagcagaaggggggacgcggaagagacagcagaacaagagccaggaccggacaggaagggagccc

SEQ ID NO: 52566 - RNA, 65 nt, Homo sapiens
agaaggaccaagaaccagacgagcacgaagcggaacaaagggaaacgacgagagggccacgcaaa

SEQ ID NO: 52567 - RNA, 82 nt, Homo sapiens
agccacgcgaagaaacggcgcgcccagaagaagggaaggcgcgaggaggaaaggaggacgaggccaaaggcgacaaaaaagc

SEQ ID NO: 52568 - RNA, 84 nt, Homo sapiens
ggacccagccccagaacggaccaagaaaggcccagggaccaaagcccggacaaggcccgagcaccaggaccgcagaaggcccca

SEQ ID NO: 52569 - RNA, 91 nt, Homo sapiens
gcagccgacaggcggaggcccccgggcaagaggcgcaaacaagccaacccaggaggaaaaacgggcagacaacaagcgaggggacccagag

SEQ ID NO: 52570 - RNA, 75 nt, Homo sapiens
gggaaaaaagcagagcccaggagaaaccggacgcgacggggagaacgaagagaaaggacacccacccagaaccag

SEQ ID NO: 52571 - RNA, 62 nt, Homo sapiens
caggcaggccaccacacccagccacgggccccgccagcagagcgcacccaacgcacccgcac

SEQ ID NO: 52572 - RNA, 83 nt, Homo sapiens
cggggaacagccggaagggcggggggcgggccggaggggagacgggaggcaggccagaacacaaagcggaaccggaagaaaag

SEQ ID NO: 52573 - RNA, 78 nt, Homo sapiens
ccaaagccaagaaagacgaaccgagagaaagccaaaagaggcccggccaacgcaacagggagcccacgcaagaggggc

SEQ ID NO: 52574 - RNA, 73 nt, Homo sapiens
ccgccgagcgcgccggaccggcgcccggacaacccgagaaagccgggcgaccccccagcgccccagacagcag

SEQ ID NO: 52575 - RNA, 71 nt, Homo sapiens
cacacagcagcaagagcccaaacgcaacccaccggccacgcccaaaggggccacgaggaaacgcgaccgga

SEQ ID NO: 52576 - RNA, 40 nt, Homo sapiens
cgccaggaggaaacaagcagggggacccacagccccgaac

SEQ ID NO: 52577 - RNA, 106 nt, Homo sapiens
gccgagcggaccagagcagacccggcgggccggccaaagccgccccgaagaccaagccagccacaccgagccgcgcgcggcgcggcgaagccccaaaaggaagaag

SEQ ID NO: 52578 - RNA, 75 nt, Homo sapiens
caggacgggcggaggcggggggaccggcgggcgggccccccccacggaaacacgaggcaacaaaacagcagagga

SEQ ID NO: 52579 - RNA, 88 nt, Homo sapiens
cgggacggcggcccagcgagggcggcccggggcacccgcacgggaagcaggcccgccacaggagacaagggcgggcccccggcaggga

SEQ ID NO: 52580 - RNA, 76 nt, Homo sapiens
gcacccaccacagacaaggaaaaggcggagcaccccacaggccaacaggaccgaagacccggccccccgaagaaga

SEQ ID NO: 52581 - RNA, 66 nt, Homo sapiens
agaacgggacccggccagaggaaagaacccgagggcgacgccaggagcacaccgaaaagaaaggaa

SEQ ID NO: 52582 - RNA, 80 nt, Homo sapiens
ccggaagaagggccacgcaggccaacagagcacaggcaaggcaccgagggggggcaacaccaaaacaaaccagccaacaa

SEQ ID NO: 52583 - RNA, 68 nt, Homo sapiens
gaaggaacaaacagaaaaggagagagaggacggcgagagcaggcgggacgagcccacaagagacaaag

SEQ ID NO: 52584 - RNA, 81 nt, Homo sapiens
agaggcacaggccgcggaggaggaggaggggaggcgcccccggagccgccccggaggagaaggacgccaggaagagaaagg

SEQ ID NO: 52585 - RNA, 85 nt, Homo sapiens
aacccaaggccgccccggaagggccgcaccccaggccccaagcgggacaaggagaaccggcacggaagcgcagccacagccgccc

SEQ ID NO: 52586 - RNA, 38 nt, Homo sapiens
gcgccggccggccgggaccagaccacagagaagcaggc

SEQ ID NO: 52587 - RNA, 33 nt, Homo sapiens
cagagacaaaggacccccgggacaccacccccg

SEQ ID NO: 52588 - RNA, 76 nt, Homo sapiens
ggaaaggaccccaccccagagggggcgccagacacgccagggcgaccggcgcccaggagcgcaggccggggcccgg

SEQ ID NO: 52589 - RNA, 41 nt, Homo sapiens
aggcaggaagccaacagggacgaggccaacacaaggacagc

SEQ ID NO: 52590 - RNA, 40 nt, Homo sapiens
gggaccccaccaggaccccaggacgaaagaggggccgaaa

SEQ ID NO: 52591 - RNA, 61 nt, Homo sapiens
gcggcgccgagcgcagggaacggcgcccagcgggagacaaagaagccggggcaccacacca

SEQ ID NO: 52592 - RNA, 62 nt, Homo sapiens
cgcacagccaggacaccggaaccgggaaagggccggggggggcacagagccccggaagacag

SEQ ID NO: 52593 - RNA, 73 nt, Homo sapiens
accagacagacccggaacacacgggaggaaccaagggaaacaagaaaagggaagcgcgcaccacgacaaagaa

SEQ ID NO: 52594 - RNA, 76 nt, Homo sapiens
accagcccacaccagcggcagcagcacgagccccccagccgcgaagagacccgacagaggccaccacagaagcaag

SEQ ID NO: 52595 - RNA, 73 nt, Homo sapiens
ggaagcgaggccagacagcaagagcacccgacccacaggccagagaggacaacgaacgaaggagacacacaag

SEQ ID NO: 52596 - RNA, 83 nt, Homo sapiens
gaggggcgcgccgaagccgagaaagcccgcgggaggccgagcgcgccgagacagaaacaacgaccgggagcagaaggcagccc

SEQ ID NO: 52597 - RNA, 79 nt, Homo sapiens
cgggagacacaggcagaaacaagggagacagccgcccggccaagcacccgcagcagacaagcagaccggaagaccgacg

SEQ ID NO: 52598 - RNA, 58 nt, Homo sapiens
aggacgcgacacaagcacaaaagcggaggaaaaggggaggcaaggcggaccggccacc

SEQ ID NO: 52599 - RNA, 75 nt, Homo sapiens
caaaggacagcagacagggaaagacacagaagaagaaagccaaaagcggaacccagccaagccccggccgggggg

SEQ ID NO: 52600 - RNA, 81 nt, Homo sapiens
cccgggagccgcccggggaagcccgcggcagaggacacgagcccagccaggcgagccagcgccaaagaaaaagaacaagag

SEQ ID NO: 52601 - RNA, 81 nt, Homo sapiens
gagcacgaccgaggcgggcagaagccaaaccgaccacagacacaaggacaaggagacaaaccccagaaccccagaggcagc

SEQ ID NO: 52602 - RNA, 54 nt, Homo sapiens
ccacagcaaagccagcgacagaagccaggaccaggggaccgaagggcccacagc

SEQ ID NO: 52603 - RNA, 72 nt, Homo sapiens
aagaagaaacccacgaaccaaaagggacggacaaaggaacaggaccaggaaccaacgcagagccccagaaca

SEQ ID NO: 52604 - RNA, 77 nt, Homo sapiens
ggaagaaggcgcacaccccagcgcgcaaagcgcgaggggcgaggccccgacacgccacgggcacgcaccccgccagc

SEQ ID NO: 52605 - RNA, 40 nt, Homo sapiens
cacaccccagaaccacggcagggccccgagaaaggcagag

SEQ ID NO: 52606 - RNA, 58 nt, Homo sapiens
aggaccccaggcgagacaacaaagccccaacaaagggacacaaggacaacacggacca

SEQ ID NO: 52607 - RNA, 75 nt, Homo sapiens
cggcccgcggggcgcgggccgccagcccggcaccgcccccccccgcgagaagcgggcccaagacacggaagcagc

SEQ ID NO: 52608 - RNA, 72 nt, Homo sapiens
cgaaaagaccaagagaaggggcaaaaaaaaaaaaagagacgaaagaagagggccaaggacacccagcggcgc

SEQ ID NO: 52609 - RNA, 75 nt, Homo sapiens
aaaaccgaaagagcaagggccgaaaacacagaagcccgacagagaaaggcacaacccagaccagagaagcgacca

SEQ ID NO: 52610 - RNA, 66 nt, Homo sapiens
gcagccagggcaggggaggcaagaaacagcacagagggagaagcgccggaccgaaaacaggaaaaa

SEQ ID NO: 52611 - RNA, 56 nt, Homo sapiens
aaggcgacaaggccaagaccgccagcaaaggaagacgagggccaagggcggagcac

SEQ ID NO: 52612 - RNA, 84 nt, Homo sapiens
ccagccgacggagcaggcagcagcccagaaacgaggagaggcggagcggaggagaaaacgaaaggacacagaaagaaacagaag

SEQ ID NO: 52613 - RNA, 73 nt, Homo sapiens
ggaagaccaagggcgacacgcggcaccacccaagaagcgggccgccccaaagacgggaaacaagcaagagcac

SEQ ID NO: 52614 - RNA, 84 nt, Homo sapiens
cgacacaccgcacccacacgggcgagaagcccacgaggcaacacgcaaggccgccaccagggaagaagcccagcggaggcgaac

SEQ ID NO: 52615 - RNA, 63 nt, Homo sapiens
acggccgcccggccaccgcgcccgacgagccgcaggcgggaagccccaccacaagcagagaaa

SEQ ID NO: 52616 - RNA, 62 nt, Homo sapiens
gcaggagcaccggcccaagaaacagagcagcccgacggccaggaggcgaagagacgaggaag

SEQ ID NO: 52617 - RNA, 33 nt, Homo sapiens
caccagagccagacaggagggcagaacgacgaa

SEQ ID NO: 52618 - RNA, 89 nt, Homo sapiens
ggacccaaaaagacggacagcccacgggaacaagaggggacagaaaggcccaaaggacgccaggcaaaagaaggcacgaaggagcgaag

SEQ ID NO: 52619 - RNA, 41 nt, Homo sapiens
gcggcgaggaggagaacaagaaccgggggcaggaggcgaag

SEQ ID NO: 52620 - RNA, 73 nt, Homo sapiens
gagcacacaggagcacacccaggacagacagccccaggaggagagcacgcgcaagggaccaccaccgcacgac

SEQ ID NO: 52621 - RNA, 70 nt, Homo sapiens
accaacccagcgcaccccaggcaacccaaacgaggacaccccgggcaccaggaggcaacgcggagggaag

SEQ ID NO: 52622 - RNA, 65 nt, Homo sapiens
agcgagggggggcgcgccggaaaccggagcgcgcagcagcaggaaacaccgccgggaaagggcga

SEQ ID NO: 52623 - RNA, 71 nt, Homo sapiens
ccgaaaacacaagaagaaagaagcggagggaaagccaaacgcgagcggcgagcggaacacgaccccacaag

SEQ ID NO: 52624 - RNA, 65 nt, Homo sapiens
agcggaggcgcgcaggagccaagggagacaacagccacacaaagcagcaacaggagcagggaaga

SEQ ID NO: 52625 - RNA, 47 nt, Homo sapiens
gaaaacagaggggccggcccccccagagcgcaagcgaaaaacccaga

SEQ ID NO: 52626 - RNA, 76 nt, Homo sapiens
gagaggaaacaagcaacgcgagagcaaagcaccaggagacaaagccacaaaaacaccagaaaaaccaagcagaaaa

SEQ ID NO: 52627 - RNA, 80 nt, Homo sapiens
ggcccccgggacggcccaaggccagcccgcaggcgccaggcagcgaggggccggcagcgccgaagggcagcggggccagc

SEQ ID NO: 52628 - RNA, 76 nt, Homo sapiens
accaagaaccaggaagacaagagcaagaggagacaaaaaacacagccagcacaggagcgaaaaagaaccaggagcg

SEQ ID NO: 52629 - RNA, 54 nt, Homo sapiens
gcgccccagcccgagccagggcgagaacagcagaccagaggcccaggccccgca

SEQ ID NO: 52630 - RNA, 82 nt, Homo sapiens
cggggacagcaaccccggaggccggaggaacgggcccgcaagcgcgccgacaggaccaggagcgcagagggccggagacagg

SEQ ID NO: 52631 - RNA, 78 nt, Homo sapiens
gccgccgccgaggggcgggaacgaaacgccaacgggacccaggggagcgacagccaaagcaacaagcccgaaaacagc

SEQ ID NO: 52632 - RNA, 81 nt, Homo sapiens
cccggccggagcgccacaccaaggccaagaacgggcaccggcgggagcccggaagacggaggcacgagggcaccaggaccc

SEQ ID NO: 52633 - RNA, 65 nt, Homo sapiens
cggccgccccggcccgccggacccacggccgccccggagcccgacgcgggggagaggcaccagca

SEQ ID NO: 52634 - RNA, 93 nt, Homo sapiens
caagcccgcgaaggaggcagcggcggggcccgggacgaggcggacgggggaaggaaggaacagagaagacccgcccccagcagggcacagcag

SEQ ID NO: 52635 - RNA, 68 nt, Homo sapiens
acccaacacaccgccaccgaagacgggccccaacacccagagacgaaaggggagagaccccgagaagc

SEQ ID NO: 52636 - RNA, 71 nt, Homo sapiens
caacacacgggaacccaagaaacaaacccagacgggcagaagagagagaaagggcgacccaccaacaggca

SEQ ID NO: 52637 - RNA, 83 nt, Homo sapiens
ccggaggcgaggcgacgggggaggccgagaaccgcagggacggccgagaccaagggccacaaggggggacgaaccaaagccca

SEQ ID NO: 52638 - RNA, 77 nt, Homo sapiens
ccccaggaagcgcggcccaaaacgcgagcaccgccgcccggaaaaggagacaagggcgggcccccggcagggacaaa

SEQ ID NO: 52639 - RNA, 117 nt, Homo sapiens
cccgaagccccccgcgccgccacacccacagcgcggcaccgcgacacggaaccccacccaacaaggaagacacagagggaacggccaggggaagggggaggagaacacagaagagcg

SEQ ID NO: 52640 - RNA, 88 nt, Homo sapiens
ccagccccagcaacagcacagccaagcaacgcacacaacagcagcagggaccaagaaaggcccagggaccaaagcccggacaaggccc

SEQ ID NO: 52641 - RNA, 68 nt, Homo sapiens
gccgagcgcaggagaaacaagggcgaacgggccaggcccaggacaggccacacgggacagagagagaa

SEQ ID NO: 52642 - RNA, 79 nt, Homo sapiens
ccccaggaggcgagcccgcggaaccgcagccaggcgaccagagcgaagcggcggcccggggccacacgcagccaaagcc

SEQ ID NO: 52643 - RNA, 81 nt, Homo sapiens
ggaacagaaccaccaaagggaacccaggaccaaagacgaccaccaaagccagcccccagaacacgccgacaggacaccggg

SEQ ID NO: 52644 - RNA, 77 nt, Homo sapiens
gaggagggggaagagagagacgaaaccaaaaggagcaagaagaaacagaagccacaggcgaagaaggccaccccagg

SEQ ID NO: 52645 - RNA, 81 nt, Homo sapiens
cggcgggggcggaagcacgacccggcagcggccgggaaccagcgagcaggcgagaggccggaaaccccccggaaggggagg

SEQ ID NO: 52646 - RNA, 77 nt, Homo sapiens
ggaccggcacaaggacgccaagggggcgagaggccaaagagcacagggacagaaaaacagcgcagacgagccgcaag

SEQ ID NO: 52647 - RNA, 33 nt, Homo sapiens
gaaggagcccagcgaccgacacggagaccacga

SEQ ID NO: 52648 - RNA, 66 nt, Homo sapiens
agacggaaacgacagaagcagaggaaaggcccgagccaaaagacccagagaaaggagcacgaagga

SEQ ID NO: 52649 - RNA, 63 nt, Homo sapiens
ccaggggccgggagggcgccagaacccaagaaggcagaagccagccccgcaggccgccacccg

SEQ ID NO: 52650 - RNA, 51 nt, Homo sapiens
gccggcgcccaaagagaccagcgccaccgacccgacgagaaacaagcgagg

SEQ ID NO: 52651 - RNA, 73 nt, Homo sapiens
aacgcgacaacggaccaaaaacacgagaggcacggccccccagccgaggacgcggcccgggagagcggcggga

SEQ ID NO: 52652 - RNA, 78 nt, Homo sapiens
aagagaaaaagcaaacacaggacaccacagaccacacgcgcacaggggagccccggcacaaaggaagaagaaagaagg

SEQ ID NO: 52653 - RNA, 52 nt, Homo sapiens
cgggagcggcgaagaggcaccggaggaggaacaagccgcaagaccgaaaacc

SEQ ID NO: 52654 - RNA, 81 nt, Homo sapiens
accgaggggacgccgcccgccgcccgccgcaggccacccgggaacggaggaggggaacaagcagaaagcacgaacaacgag

SEQ ID NO: 52655 - RNA, 110 nt, Homo sapiens
aggagcagaagagcccaaaaccaacgaaccaaaagcaaccgcgaagagcaggcgagagaaaccagaagaaagaggagaaagaaaaagagacacagcaagcaaacaaaacg

SEQ ID NO: 52656 - RNA, 62 nt, Homo sapiens
gacccaccacccaacaacgacagccaagcacaaggggccccccccgagcccacacaaagcga

SEQ ID NO: 52657 - RNA, 86 nt, Homo sapiens
cgacaagccgcggcagccgcggaccaccgccgccaggagccaggacaaaaccaggcagaaccaacacgaacccaagcacaaacaag

SEQ ID NO: 52658 - RNA, 71 nt, Homo sapiens
gaggaacaacaacggcaacaggcgaggccgccaaagggagcgaggagacacgaagcagaagcagccagcgg

SEQ ID NO: 52659 - RNA, 75 nt, Homo sapiens
ggagcccaggggcccagccaccgagaccaaaaagacagccaaaagagcgacgaagaaccgggacggcccggacgc

SEQ ID NO: 52660 - RNA, 90 nt, Homo sapiens
gccggcaagagcagcgggagcggcgcggggaagggggcgggccgcagagcagagggacccccaaaggacacaaggaagaacaacccgaac

SEQ ID NO: 52661 - RNA, 75 nt, Homo sapiens
gggaagacagacagggacgaaaaggagcaggcccagaaagaacagacaaagaccgaaaaacacgaggaaagcaga

SEQ ID NO: 52662 - RNA, 77 nt, Homo sapiens
gcgccggcgcccaaggcgcgcaccgccgccccccgacgagagcggccggccccgcagggggagaggcaccagcaaca

SEQ ID NO: 52663 - RNA, 66 nt, Homo sapiens
cacagaagcaaggacaagaggggccagaagggaagaggaacagagcgccagaaaggggccagaaag

SEQ ID NO: 52664 - RNA, 79 nt, Homo sapiens
aaggcaggagcgagaggagagcacgaacccaggagccgggcagccgcgacacagcagcaggggcgcagagcagcgaaga

SEQ ID NO: 52665 - RNA, 83 nt, Homo sapiens
cgaggagcagcccaggaggaaaggaggaggccccagggagcgagccgcacaagggaagagcgaaagcacacgaagaggcagcc

SEQ ID NO: 52666 - RNA, 80 nt, Homo sapiens
ggcggcgaggagggagcagcagccaccggacccgcacagccgcggagcagacagccagacagcaaagccgacaggcagcc

SEQ ID NO: 52667 - RNA, 122 nt, Homo sapiens
ggcggcagcgcacgcgggaggccgaggagaagcggaggagcggcgaagcgcggcgcagggggccgaggagagcacacaggacaagcagccgccgggggcaggcacgccgccgagggcaaggg

SEQ ID NO: 52668 - RNA, 86 nt, Homo sapiens
gaggggcgagagacggcggcggccgaaagcggagagagcgggcgggcggccgggagacccacagcccgaaaccgggccgaagacgc

SEQ ID NO: 52669 - RNA, 77 nt, Homo sapiens
cccagggccggccgggagggcggccgcagcaggcacacagagaaaaaaagggaacaaaacacagcaagcagacaaaa

SEQ ID NO: 52670 - RNA, 78 nt, Homo sapiens
ccaaaagaaaaaagggacccacccagggaacgaaacgagccccgggaagggcaacacaggccaaggagaccccccgac

SEQ ID NO: 52671 - RNA, 36 nt, Homo sapiens
ccggagaagaacaaaccaaaccaacacaacccgaca

SEQ ID NO: 52672 - RNA, 81 nt, Homo sapiens
ccgcacacaaggcgccggcgccgcagcgacaccagggcagaggccaagaccggcccaagaaggagaaaagaagcgaggcgg

SEQ ID NO: 52673 - RNA, 58 nt, Homo sapiens
cggcaccagacagaagacacggcccagcccagccagggaacaaagaaaccagccagga

SEQ ID NO: 52674 - RNA, 83 nt, Homo sapiens
agaaacacaaagcagcccaaccaaagggacacgaggaggggacggcccgccacaggcacagacgaggagggaagcgaagcggg

SEQ ID NO: 52675 - RNA, 79 nt, Homo sapiens
agcgacccaagcgccgcggaaccacgccgccacgacccccaggcccccacagagagcacacaaacaaagcgaaaccacg

SEQ ID NO: 52676 - RNA, 85 nt, Homo sapiens
cgggcgcggacgcgcagcaggcggggaggacgaggggcccgggcccagagcggaagacaagacggccccgagcgaggacacagcc

SEQ ID NO: 52677 - RNA, 75 nt, Homo sapiens
cccccaaagaacacaggcccaacagacagaaggaacaacaaaggagagagagaaaacgaaggaaggacgcaggaa

SEQ ID NO: 52678 - RNA, 103 nt, Homo sapiens
caaaagggcacaccgccccccgcgagcccccagcgcagggggaaccagagaagacgacaacaggcagagcggcgggggaagacaagcaagcccggagaaggcc

SEQ ID NO: 52679 - RNA, 69 nt, Homo sapiens
gaggagaacacccggaccggacacgccgagcgaccacaaccagaacggaaggcgacagcggggaaagag

SEQ ID NO: 52680 - RNA, 74 nt, Homo sapiens
gagcagcaagcagggagcaagaggccgagagacccgcgaacgagcacaagggcaccacgcaaacagggaaacag

SEQ ID NO: 52681 - RNA, 83 nt, Homo sapiens
gaagagggagcaccacggaccccaaggaagccacggcagacacacaacccgacccgacgagaaggacccccacacccccccaa

SEQ ID NO: 52682 - RNA, 65 nt, Homo sapiens
cgaaagaagggaaaaggcgccagaggggacgccagggggaaccgggcaaccaagcaccgaagaag

SEQ ID NO: 52683 - RNA, 71 nt, Homo sapiens
aaagaagaagaaacggaacaggcacgccaacagacccagccggcgaccaggcaagaagcaagcaaccaggc

SEQ ID NO: 52684 - RNA, 68 nt, Homo sapiens
cgaggaccaaccggggcccaaagggaccaaaagaagccaggagagcagggccagcaggggaagacaca

SEQ ID NO: 52685 - RNA, 84 nt, Homo sapiens
ggcggcgaggaaagcaggaggaggggcggcggcgggaagaagaccgaaggagcagacgaggcacgagcgccagcgcgagacaga

SEQ ID NO: 52686 - RNA, 72 nt, Homo sapiens
accacaggggcagcgccggagggagaaggacccaaaaaagaggacagcggaccacccgggcgcgccacacag

SEQ ID NO: 52687 - RNA, 74 nt, Homo sapiens
cagagacagcgccgcgggcaaggaaacggcaaaacaggagaaccacagagagccgaggaaaaccagcggaaccc

SEQ ID NO: 52688 - RNA, 65 nt, Homo sapiens
cgaagccacgcaacaggggcaaacgcccagagcgcgccacaaaaagccgaacaggacaggggaac

SEQ ID NO: 52689 - RNA, 77 nt, Homo sapiens
gcaaaccaagaaggggcgcccgccccagcgacggaagcacccaggggaagacaagaacagcgccagccaccgaggga

SEQ ID NO: 52690 - RNA, 81 nt, Homo sapiens
ccggccagcaagacccgagcccaaaacccgagaagcaagggaaagcgggcgaaaaggaacgagcaggaggcgaaaaggagc

SEQ ID NO: 52691 - RNA, 87 nt, Homo sapiens
ccaaacaagaggaaccaaaaagcagcaggaaaccagagcaggggaaaaaacccacacgagggacagacccacccaaagggaccaaac

SEQ ID NO: 52692 - RNA, 76 nt, Homo sapiens
agcccgggacggaaacggagcacaggacccaccaacaccgcaccgagccaagaaaccacaaagagccacaaaacac

SEQ ID NO: 52693 - RNA, 83 nt, Homo sapiens
ggcgccgggccgcagcggcccggacccgagaggaacagcgaaagcagccagaaaaaaagaaggcaaaacacagaacagcacac

SEQ ID NO: 52694 - RNA, 76 nt, Homo sapiens
gaaagacgaggcaaaacacggcccaccacccagagaaccggggacaaaccgcacagagagaacacaagaagaaaga

SEQ ID NO: 52695 - RNA, 71 nt, Homo sapiens
gcgcaccaccgagccggacgcgaggaggagaaagaggacacggccgacagacagcgggccggggcagggga

SEQ ID NO: 52696 - RNA, 118 nt, Homo sapiens
ggcgccgcgcgcgcagggccgccggcccgcagccgccaccacccaggaccagaagggaggggggaagacagggcccagcaccacaggacgggccgggaagccgccagcagggacagcc

SEQ ID NO: 52697 - RNA, 77 nt, Homo sapiens
cgagcaccaggacacgggcggagccaggccaaggaagcacgggaagaacagaaaagagaagcaccacggaaaccacc

SEQ ID NO: 52698 - RNA, 78 nt, Homo sapiens
ggagggaacccgcccccagggagggaacaaagcccacagcaccggaccacggcccacacccaggagcagcagaaaaga

SEQ ID NO: 52699 - RNA, 86 nt, Homo sapiens
cacccagggaccccaagcgacgcacccgaagagcagaagggaaaaggccgaggcacagcgggaagaccgcaaagacgacccgagac

SEQ ID NO: 52700 - RNA, 82 nt, Homo sapiens
ggccaccacccaccaccacgcccagaggcaccgagagcggaggccaccggagacacgcaccagaagaaggagagcccggcag

SEQ ID NO: 52701 - RNA, 69 nt, Homo sapiens
gccgaaagaaaaaggaagccaagcaggagggggaaagcacgcccagaagcagcggaccacaaacacaga

SEQ ID NO: 52702 - RNA, 79 nt, Homo sapiens
cacgccgcccagcccggccccgcccgcgccggaagagccacgccggggggccccggaggacaaacccccaaggacacca

SEQ ID NO: 52703 - RNA, 73 nt, Homo sapiens
ccagccgggaaccagaggcaccgcaagcgggacagccccggcacaaagcagaccgccccacgggcgcgcccgc

SEQ ID NO: 52704 - RNA, 75 nt, Homo sapiens
ccgaagcgaggcggaaaacgaagacagcagagaagacagacgcgcggaccgggaagaggccgagcaaacacaaca

SEQ ID NO: 52705 - RNA, 78 nt, Homo sapiens
gacaacacaccaaacagcacccggcaagaagaacacagggggaagccaagcagaacaaggaggggccaaagggagagg

SEQ ID NO: 52706 - RNA, 30 nt, Homo sapiens
caccagcacgcgaaagccggacccgacggg

SEQ ID NO: 52707 - RNA, 74 nt, Homo sapiens
aagccaagaaacaaaggacaaagagagcacccaagaagagcagaggcaccgaggaagcacaaggacgcgcccca

SEQ ID NO: 52708 - RNA, 64 nt, Homo sapiens
cgcagcacacagagaccccacagaaccaggagcaaaccaggagaaaacggacccaaaagaagag

SEQ ID NO: 52709 - RNA, 88 nt, Homo sapiens
cagaccaaggagggagagcaaaccggcccacgaggaggagcgagcgaggcaaagggcacacaccagaaaaggaccccaccccacaggg

SEQ ID NO: 52710 - RNA, 52 nt, Homo sapiens
acgagaccgaccggaccaagggagaagacggccgacaaaagcagacaagcca

SEQ ID NO: 52711 - RNA, 82 nt, Homo sapiens
cgcggcgccgggggcaccgcgccgccgagagcccagccaaaggcacgcaccaaacgcgccgccagggcaccccaggcgaacc

SEQ ID NO: 52712 - RNA, 79 nt, Homo sapiens
ggagaagagaggcccaagccggacggggagcagaaccaaaacaccaccccacgccaaaaagggaaaaaagagagccacg

SEQ ID NO: 52713 - RNA, 38 nt, Homo sapiens
agcggccgggaaaaaaaggccccagccaacccgaaaac

SEQ ID NO: 52714 - RNA, 76 nt, Homo sapiens
gaaacagagccacggcggacaccggcacgcagagaaccagaggacaaaaagcccagggaacaacaagcgcaagagg

SEQ ID NO: 52715 - RNA, 56 nt, Homo sapiens
agccgagggcagcagggcggagacgaggacgcgcacaggaaaggacgcggaacaag

SEQ ID NO: 52716 - RNA, 59 nt, Homo sapiens
cgacgcacgggggaccaagggcaaaggcacaaaggaccggcagacagagagggccgaga

SEQ ID NO: 52717 - RNA, 78 nt, Homo sapiens
ggacaacccaggagcagacagagaagcgcgcagcagagcgaaagcacacgaagaggcagcccagaagaagaaagcaag

SEQ ID NO: 52718 - RNA, 78 nt, Homo sapiens
cggcgagcagcgcagcgaccggggaccggagcgacgccacccgccaaggaacccgcggggcagaccacaccagcacac

SEQ ID NO: 52719 - RNA, 76 nt, Homo sapiens
gccagaaggccgcgaccgagacggccgcggacaacagaaccgggagcgacgagagcggcaccaaaagaaccacgcc

SEQ ID NO: 52720 - RNA, 63 nt, Homo sapiens
gaaagcaaacgagcagggcaagaagcacaaggaccgaggaaccacgccagggccccaaaaagg

SEQ ID NO: 52721 - RNA, 67 nt, Homo sapiens
caccgcggcccgcgcaggagaccgaggaaggaagaaggaaaagcggaagcgcagacaagaaaagaga

SEQ ID NO: 52722 - RNA, 54 nt, Homo sapiens
agaggcaaggggccaccaggaggccagggggcgccaggcggagcagggcggacc

SEQ ID NO: 52723 - RNA, 79 nt, Homo sapiens
ggccgcaaagggcacgaagcaggaaagaacgacgccagggagggaggggggaagacagggcccagcaccacaggacggg

SEQ ID NO: 52724 - RNA, 80 nt, Homo sapiens
cacaacccaagaaacgggccaaaacagaagaggcaaagcccagccacagcagcagcccagcagcaaacaaccaaagagaa

SEQ ID NO: 52725 - RNA, 79 nt, Homo sapiens
gggcgcccgggcgcgcgccggccgaggcggcggggccgcgcagggcaccgccgaccgaaaccgcaaacacacgacagag

SEQ ID NO: 52726 - RNA, 70 nt, Homo sapiens
gacccaccaacacacacaggggcaagaaaggaccccgcaaaagaacaagaagccagaggaggggaaccga

SEQ ID NO: 52727 - RNA, 74 nt, Homo sapiens
gagggagagccgggaagagagcacaagggaaagcacaagcgaaagggcgaaagagaacacgaggagaagagcgg

SEQ ID NO: 52728 - RNA, 77 nt, Homo sapiens
ccccgcggggaacgcgccacggaccgcgggacaagaaaacagcggaaggcggaacacggaccggggagacccggagc

SEQ ID NO: 52729 - RNA, 82 nt, Homo sapiens
gggcgccagaaggaagaggcggacggaggagcaggcgagaagagaaggagcacagaccagcgcgcgaccggagccccacagc

SEQ ID NO: 52730 - RNA, 83 nt, Homo sapiens
gacgggaccgggaccgcgcggacccggccgggagaagcagcagcgcaagggcaggaaaaggaggacgagccacgggagaccag

SEQ ID NO: 52731 - RNA, 80 nt, Homo sapiens
agaacccccccagggggaacgacacaacaagccggaagggaagcaggcaggagaaggggaaagcaaagcccaacaaaaaa

SEQ ID NO: 52732 - RNA, 88 nt, Homo sapiens
cacccgcgccgggcaccgaggaccagccaagacagggacgaacagcggggacgccccagcagaccgcccaggagaggaaagcaggagg

SEQ ID NO: 52733 - RNA, 80 nt, Homo sapiens
agaaaacaagaaaggaacccaacagagacccgcccacgcagagacgcagcgaacgcagccaaagaaacccccaacaccag

SEQ ID NO: 52734 - RNA, 77 nt, Homo sapiens
gaggggagcagcccgaggacgaggacacgagagccgcggcccgaggaggagaagccagaggagaacagaagcggaga

SEQ ID NO: 52735 - RNA, 59 nt, Homo sapiens
gggccaccgcccgccacccgcgcgccgccgccgaggagaaagacacgagagccacggcg

SEQ ID NO: 52736 - RNA, 71 nt, Homo sapiens
acagaagaagcaacacgagaaccaccccgacacaacaccaccaggagacagagaaccacgcacagaaagga

SEQ ID NO: 52737 - RNA, 74 nt, Homo sapiens
gcacagagaacggccagagccggccaaggaccaacacaccggagaggcaaagcagagagcagaggccagccacg

SEQ ID NO: 52738 - RNA, 126 nt, Homo sapiens
aagagcaggacagcagacaggccacacgggaaggggaaagcacgaggcagggagccaacaaagaaccggagagagagacaaggggaccagcagacacagaggacgaagggaccgacgacagagaag

SEQ ID NO: 52739 - RNA, 68 nt, Homo sapiens
gaaccgcccggacccgaaggaaagaacggcaaggagaagcacgacagaaacgagacagacgaagcgag

SEQ ID NO: 52740 - RNA, 85 nt, Homo sapiens
acggggcggccgggggccagagaccaaggcgcgcccggcgggccggaccaaggcgacaggggaaccgaggcagcaggacagccgg

SEQ ID NO: 52741 - RNA, 80 nt, Homo sapiens
gggccgccgcggaccagccacccccgagaggggaacgaggaaaaagaacagaggccaacccgacaagaggaccaaggcca

SEQ ID NO: 52742 - RNA, 83 nt, Homo sapiens
cgccccagccagaagggcacgccagcggcgcgagaggaccaccggggcggcccggcggagaaccccaggggcccgcgacgggc

SEQ ID NO: 52743 - RNA, 87 nt, Homo sapiens
cagcaaaagcgggaagaacaaaggaaggggagcccgggacccccgggggcgcaggaaaagacgagggaagaagaccgacaacaacca

SEQ ID NO: 52744 - RNA, 57 nt, Homo sapiens
gagcgccagccgaaagaaaccacccccagcaggccagccaccccaaaagaccggacc

SEQ ID NO: 52745 - RNA, 96 nt, Homo sapiens
ggaaaacagcagagggcacaaagcccccgggccagccggcgacaccccagacacggccagcgaccccagaagaaaggcgagagcacggagcaccag

SEQ ID NO: 52746 - RNA, 82 nt, Homo sapiens
gcacgaaagcccaggccaaaaagagagccaggaccgcacgcccgaggaggaccgggacggccagggagccggggcccaggag

SEQ ID NO: 52747 - RNA, 77 nt, Homo sapiens
cgggaagaggggaccacacgggggcggcacgccaccccgcagacgacgaaaacacaccagacgggagcccaagggag

SEQ ID NO: 52748 - RNA, 73 nt, Homo sapiens
aaggaggaaacagcaagggaacaacaacaggacgccacaggaccggggagaaaagcgcaagacccaagaggac

SEQ ID NO: 52749 - RNA, 74 nt, Homo sapiens
aaagagcagaggagcgcagaaaccaaaaaagcagggcaaaaaggcgaaggccaaccgacaacacaaaccaacaa

SEQ ID NO: 52750 - RNA, 71 nt, Homo sapiens
aaggaagacggcagacaacacagcgcagaaacggaccagacaggagagaggagcgcgccccaagggggcgg

SEQ ID NO: 52751 - RNA, 80 nt, Homo sapiens
ccccccagccacggaaacagccgaggaaggcaccaggagaggaggaggggagacgcccaggcagaaagcccaaccagccc

SEQ ID NO: 52752 - RNA, 35 nt, Homo sapiens
gcggggcgcgcggccaaccgggcagacacaagaaa

SEQ ID NO: 52753 - RNA, 83 nt, Homo sapiens
ccaaagaagcagaaagagcagaaaggagggggcgagaaggcgggaagccgaaggcagccacagagccgagacgcgaagcgggc

SEQ ID NO: 52754 - RNA, 73 nt, Homo sapiens
ggaggcgccggagcgccgcggggcccgggaaagagggacggaaccaaaccagaagagcaaagaaagcaaggga

SEQ ID NO: 52755 - RNA, 99 nt, Homo sapiens
cagaagaagagcagaaaaagcagccaggaaccaagaaaacgggaggaaagagaaaggacgagccacccacgccagacaaaacccgaagccaccgaaagc

SEQ ID NO: 52756 - RNA, 58 nt, Homo sapiens
caccacgcaccgcagccgcgagagaggcaagccgggggggacaaagcaaaaaaccaac

SEQ ID NO: 52757 - RNA, 78 nt, Homo sapiens
cccaccacaagaacccgggccggccggacacggaggaggccagcgccaagaagccggggccaccaggggcgccacaaa

SEQ ID NO: 52758 - RNA, 70 nt, Homo sapiens
aacaccaccgggccgccaccgaggccccgaagcaggagaggaagaagaccgaaaacgagggacagaagag

SEQ ID NO: 52759 - RNA, 85 nt, Homo sapiens
ggcggcggcggcggcggcggcggcggcggcgcgccccgggggcgacggacgggccaggccacgcgcgcagccggacgcaggaaga

SEQ ID NO: 52760 - RNA, 82 nt, Homo sapiens
ggcggagaccaggagaccccacggagcgggcgacgagcgacccgggagacacgacgggagagagacagcggacgggagaccg

SEQ ID NO: 52761 - RNA, 91 nt, Homo sapiens
agagcgggagcgcgcgcggcgcggcggccgggccccgagacggggacggaggcagcacggcaggagacgaggagaggacagcaggacaccc

SEQ ID NO: 52762 - RNA, 75 nt, Homo sapiens
ggaggccagaacgaggaaggcggaccgcaaaggcgagaaggaagaggcaaaacgggggggaagcgggccagccga

SEQ ID NO: 52763 - RNA, 76 nt, Homo sapiens
gggccccgcaagagcggcgcggacggcggcagccaccgccgagccccagcacagaaaggggaggccacacaggaag

SEQ ID NO: 52764 - RNA, 76 nt, Homo sapiens
gcgaacaaccaagaaacagaagggaacccgaggagccagcgaccaggacgggaagacaaccagccagaggccggag

SEQ ID NO: 52765 - RNA, 69 nt, Homo sapiens
cacgagccagcccgcacagcgggaacgccggacagggcacaaggacagcagccagaaagcagcggggga

SEQ ID NO: 52766 - RNA, 78 nt, Homo sapiens
ccgaggggcccgggacccagcgggggcaaggggccacggaccacagccccaggagccccacgaggggacaacgaagga

SEQ ID NO: 52767 - RNA, 59 nt, Homo sapiens
aagggcagggacagcgcaggcagcagggacaaccaaagccaagcaacgaaggacaggac

SEQ ID NO: 52768 - RNA, 77 nt, Homo sapiens
agccgacaaaggcgccgcacaccgcgacggcgcgcggcgcgaggacggaaggcgaccacaccaccccagacacggcc

SEQ ID NO: 52769 - RNA, 86 nt, Homo sapiens
cggcggaggcgacggggcggcccggagccggcgcgaaccggcccccgcagcgggacccggaaaaaaccgggaagaccgacggagcc

SEQ ID NO: 52770 - RNA, 59 nt, Homo sapiens
ggacccgcagggcgccaaagcgagagagggaagcgcccggccacccaacagaggaagcc

SEQ ID NO: 52771 - RNA, 82 nt, Homo sapiens
agagccgcgggcgccggagccgaggcgagcgccgcgcgcaccacgaccggagggggaagaaaacaaccaacagagcccgcag

SEQ ID NO: 52772 - RNA, 62 nt, Homo sapiens
cgggaccgaggcgggcgcgggcgcgggcgccccggcgagccacggacagggacaagcgcaca

SEQ ID NO: 52773 - RNA, 58 nt, Homo sapiens
agcagagcaaaacagagcggaacgaacaagggaacccaggacgagaaaaaacagagcg

SEQ ID NO: 52774 - RNA, 70 nt, Homo sapiens
cccaggcaaaggaccgacggaaggaccacgggaggcagaccccgacgacacaggaacccaaagcgagcag

SEQ ID NO: 52775 - RNA, 73 nt, Homo sapiens
aagcccgggcccagagggagcggccgggggcagccagcagccagccggggcggacaaggacaccgcgaaaggc

SEQ ID NO: 52776 - RNA, 63 nt, Homo sapiens
gcacgggagagcgcacaccgcgccccgagaaccaacagcagccgcgaggggggccaggaggag

SEQ ID NO: 52777 - RNA, 77 nt, Homo sapiens
ccaggccccagacacagacgagcaggggaaggggccgacaaccaagccacgaagggaccagggccaacaggaggcac

SEQ ID NO: 52778 - RNA, 80 nt, Homo sapiens
cccgggagcagcagcagcaccaccccacccccaccagccagacccaggaagcccccagagccaggacaggagagacaacg

SEQ ID NO: 52779 - RNA, 53 nt, Homo sapiens
gcggcccggagcgcggcccgaggcccgcccagaggacccaaagacaggaccac

SEQ ID NO: 52780 - RNA, 40 nt, Homo sapiens
cccagaccaagggaacgggcccgccagccaccgcagaggc

SEQ ID NO: 52781 - RNA, 83 nt, Homo sapiens
aaccccagggccgcacgggggcgaccaggccgccagccggggcaagaagaaaaaagccgccccacaggggagaaaaagacagc

SEQ ID NO: 52782 - RNA, 85 nt, Homo sapiens
caccccagcccgggccgagccaacaggaccagcagggcgggcaggcccacacaggcccacgccagggagcgggaggacgaggagg

SEQ ID NO: 52783 - RNA, 70 nt, Homo sapiens
ggagaaaggaaaaagcacaaaaacaaccaaaccagcacccaaagcaaaaagcaggccacccagaaaaggc

SEQ ID NO: 52784 - RNA, 75 nt, Homo sapiens
aaagacaggcgccaggagcacagaagagcgaggaggcagagaggaaggacccccagcgccagcaaggccgcccgc

SEQ ID NO: 52785 - RNA, 40 nt, Homo sapiens
ccccgagaaccgcaggagccagagcccgccgacacagcca

SEQ ID NO: 52786 - RNA, 36 nt, Homo sapiens
agaaggaccgccgcaacagagagacgcaggaaaacc

SEQ ID NO: 52787 - RNA, 67 nt, Homo sapiens
aaagacagaaccagccaacaaaagggcaaaaggcaggaagaagaaaagcgcgggacagaaccgggaa

SEQ ID NO: 52788 - RNA, 93 nt, Homo sapiens
cgcagacccaggacaagagcgcaggcagggccacaagagcgaggagaagcgagaaaagagaaacggacccagacagcaaaggcagcccccaag

SEQ ID NO: 52789 - RNA, 56 nt, Homo sapiens
agcggggcaacaacccagacgggggacggcgcgaagaagagaagacaggaacggca

SEQ ID NO: 52790 - RNA, 87 nt, Homo sapiens
cccgaggagcaccccggcgcgaccgaggccccccgaaccccaaggccaaccgcgagaagagacccagagagaagagaaagacaccac

SEQ ID NO: 52791 - RNA, 79 nt, Homo sapiens
gacggcggaccgaaggaggccgggaccacccagccagcggaagaaggaaagccaggccagaagaaggaaggccggggag

SEQ ID NO: 52792 - RNA, 81 nt, Homo sapiens
ggacaagagggaaaagcgcggcggcaagaccgccagagaacgaccgaaggaggccgccgagcggcgaaccgggagccggca

SEQ ID NO: 52793 - RNA, 69 nt, Homo sapiens
ccgagaagcggggcaccacgaaggaccgaagaggcagagacgaaacagaagcaacagaagaaccccccg

SEQ ID NO: 52794 - RNA, 74 nt, Homo sapiens
gccagggggagcggacgggaggagagaaacaggaacgagggacgcgagagcccacgaagagcgacggagcgaac

SEQ ID NO: 52795 - RNA, 78 nt, Homo sapiens
gacacgcccaaccaggaaacgcccaggacagacccacgaagcaagcagcggaggcagccaagcccggaacccagccac

SEQ ID NO: 52796 - RNA, 64 nt, Homo sapiens
cgccgcagcacgcggaccagaaacggcgaggaaagagaggagccccggaaagaaaaggacagac

SEQ ID NO: 52797 - RNA, 120 nt, Homo sapiens
aggacgagcgcgccggccgcgagcagaccggccggaagccacgcccggggcggacaccagaccagagccgcgggcgccgagaaggacgcgcgcggggggcgagacgccccagcggaccgc

SEQ ID NO: 52798 - RNA, 76 nt, Homo sapiens
ccgggagacgagggaaggacagccagaaacagggcccagcacaaccgccaagaggaccagccaacaagggggcgca

SEQ ID NO: 52799 - RNA, 85 nt, Homo sapiens
gccgagcaacaaccgccgagcggccaagacaaggggcgcagagcggggggacaggcgcaagaccggagaagcaggagcggaacga

SEQ ID NO: 52800 - RNA, 79 nt, Homo sapiens
gaagcgacccagggaagagaagaggcccgcccccgaggcgcaggcccccggcgccggagacacggccccgggccgccgc

SEQ ID NO: 52801 - RNA, 80 nt, Homo sapiens
ggaccgaggaacaaacggcaagcaagaagggcgggcccgcacacccaagggaggaaggagccacaagaccaagcgccaca

SEQ ID NO: 52802 - RNA, 39 nt, Homo sapiens
gcggagggagccccagacacggcgaacggccacccagca

SEQ ID NO: 52803 - RNA, 79 nt, Homo sapiens
aaagaacgaggccaggagagcgccaacgaacccaccacgaaggccagaggacagaaggcacccggcacccgggacccga

SEQ ID NO: 52804 - RNA, 71 nt, Homo sapiens
caccaccggcagaggaggcgagcgggggggaacacaccaccaccagccccgaaacaacaccacaccaaaga

SEQ ID NO: 52805 - RNA, 67 nt, Homo sapiens
cgaaaaaacccacacgaagcgaagaaacgcaaaagagagaaaaggaacagccgaagccaggggcaag

SEQ ID NO: 52806 - RNA, 80 nt, Homo sapiens
cgcagcaacgggaacgccagccacagggcaccccaacacacccacagagaccgaaggagcagacgaggcacgagcgccag

SEQ ID NO: 52807 - RNA, 75 nt, Homo sapiens
gaaggagagcaagcaacaccacaccccggcaccaaccaggggggaagaaaggaaagaagaaaaaggccgggagaa

SEQ ID NO: 52808 - RNA, 86 nt, Homo sapiens
cggcggcggcggcggcggcgcgcgggggcgacgcgcgggaacaacgcgagcggcgcgcgggacgaaggaacggacagagagggcca

SEQ ID NO: 52809 - RNA, 62 nt, Homo sapiens
cgcccaccggaaggccaccccgcagcacaaacggcggcgagccgaagaagcagcgaccaaga

SEQ ID NO: 52810 - RNA, 76 nt, Homo sapiens
cacagccggcccgggccgggagcgggcagggaagaagaacgaccagcaagggaacgaaggcagggagcccgaggcc

SEQ ID NO: 52811 - RNA, 61 nt, Homo sapiens
gggaggcgagacaaggaggagaagggcagagaggagggagaaggcggcaaacaagggcggc

SEQ ID NO: 52812 - RNA, 56 nt, Homo sapiens
gaggccgcggaagaccgacaaagcacacggcaggaaagagcccggcgcccgaggga

SEQ ID NO: 52813 - RNA, 77 nt, Homo sapiens
cgacagcgggcgccgcccgggaacaccccggaccaacaggcgcgcagacccaggggagcccaccagccagcaacagg

SEQ ID NO: 52814 - RNA, 86 nt, Homo sapiens
ccaagcaaagaccccgagagagagaccaggaaggaaaagcaaaaccagcaggccagagggagcggcggggggaaagagacagcggg

SEQ ID NO: 52815 - RNA, 73 nt, Homo sapiens
cacgacggaggcacaaggaggacgccggcgccgccagggaagcgaagggccgaagacgaaaaaagaaaagccg

SEQ ID NO: 52816 - RNA, 67 nt, Homo sapiens
caacaagcacaaacacagcccacagggggagaagcagacggcgggaaagggcaacagcccagaaagc

SEQ ID NO: 52817 - RNA, 81 nt, Homo sapiens
caaggcggaggacccgaacgggggccacccccgcaggccccacagggccggagggagaggcgaccggagggagaaaggcca

SEQ ID NO: 52818 - RNA, 68 nt, Homo sapiens
acgggaccagccggcaaaaacacccccgcccgaaaagaaagcgaacacacaaaacaagaaaaggcacg

SEQ ID NO: 52819 - RNA, 55 nt, Homo sapiens
gagaaaggacacacgaaaacagacgggggaacaagagccggcgcccccccgcggc

SEQ ID NO: 52820 - RNA, 78 nt, Homo sapiens
cgaggccagggaaaaggagcccaaaaaccggagaaggagaggcgggggaagggaaagagagggggaccggccaggcgg

SEQ ID NO: 52821 - RNA, 78 nt, Homo sapiens
caagacaaggacaccaaaggaaaggaggacaaaaggaaaaaaaaaaagggaagacagagaggcggggaaaggcagaca

SEQ ID NO: 52822 - RNA, 76 nt, Homo sapiens
ggccggggggcccccgccagcccagggcaggccgagcgcaccagccgagagcagcaagacaggaacggacaaagcg

SEQ ID NO: 52823 - RNA, 83 nt, Homo sapiens
gacgaagaccaggcaggcccacagcgccacagaaccgcccaaaaaggcaaagaaaccacgaggaggggacaagcgagcagcca

SEQ ID NO: 52824 - RNA, 78 nt, Homo sapiens
gcgggaacccggaggcccaacggggcgccccacggacgaccaggacgaaggccggcggcaggcgaccggcccgaggac

SEQ ID NO: 52825 - RNA, 52 nt, Homo sapiens
gggagggaaggcaagagccaacccaaaaccaaagccggggccaccagcggca

SEQ ID NO: 52826 - RNA, 77 nt, Homo sapiens
gggaagcgcgggaagggaaagccccgagccccggccccaaagacccaaaacagagacaccccccagcccccgcgccc

SEQ ID NO: 52827 - RNA, 75 nt, Homo sapiens
aggccaccaagccggggaggcaacaggcacaaaccgaagagcccggggcgggacgccacgaaagaaagggagaca

SEQ ID NO: 52828 - RNA, 82 nt, Homo sapiens
gcgggacgcgcccgccgcccggcgcgcggccgcgcgcgcggccgcacgcggggcgcgcccaagcacccaggccacagaggag

SEQ ID NO: 52829 - RNA, 57 nt, Homo sapiens
cagacggcacacgcagcagaagcccggagaaagcggaccaaaccaaacagcgccacc

SEQ ID NO: 52830 - RNA, 79 nt, Homo sapiens
gccgggccccaccgccacccgacccaggcgcgaagaggacagaaagcgggaccccccaagggaggaggagggcaggcgg

SEQ ID NO: 52831 - RNA, 76 nt, Homo sapiens
agaacggccggaggaaccagagggacaacaggcaggagaaagggagcgcaccccaggggggcagcacgccgaagga

SEQ ID NO: 52832 - RNA, 69 nt, Homo sapiens
gcacacggagcgcaccagaccagaagcaggagacaacgagggaggagaacaaggggacagcaaccgaca

SEQ ID NO: 52833 - RNA, 85 nt, Homo sapiens
aacaccggcagcccagagagcaggcgcagaagcagaagcgcccgcgaggcccgcgccaaggggagagaagagaagagccccgagg

SEQ ID NO: 52834 - RNA, 72 nt, Homo sapiens
aaaagcacagaaaccaaaaaccgcaccaacgggaacgggacacaccacaggaagggcccccgcgaagcccca

SEQ ID NO: 52835 - RNA, 75 nt, Homo sapiens
cccggagcagcacccccgaggggacaaaacgcccagccgagcggcgggcagggaacacacacaaaaggagggagg

SEQ ID NO: 52836 - RNA, 89 nt, Homo sapiens
cgaggacagagaagccaagaggaagaaggaggaggaagcccgaagcggaggacccggcccagccgggcaggccgacccccaccagccga

SEQ ID NO: 52837 - RNA, 83 nt, Homo sapiens
ggcggaagagacagccaggcacagaagccgagccgcgccgccaggaggccgcgccgggcgccggcccggggagggagcgccgg

SEQ ID NO: 52838 - RNA, 76 nt, Homo sapiens
agcccgcgagcacaggagcgagagaggaccccggacacgaaagccgggaaagaaagcacaccgagcgccaaacacc

SEQ ID NO: 52839 - RNA, 79 nt, Homo sapiens
agcagccggccagccggggggcacgcccgcccgggccgggagggcaacagagagaaaagcgaacacccaggcgcgcaga

SEQ ID NO: 52840 - RNA, 84 nt, Homo sapiens
ggcgcgacccggcgcgggcacgcccaccggcccgcgccgcccaggccccgcagccacaaaagaagacccaaagcaccaacaaaa

SEQ ID NO: 52841 - RNA, 78 nt, Homo sapiens
cagcgcggacacccagccccaggaggaaaagcgggcgcagcgcgcggacagcgaccgcgaggaaccgcagagggcgca

SEQ ID NO: 52842 - RNA, 59 nt, Homo sapiens
acccgagggcgaagcagccaagagagcccagaggaccggcggcccgaccaaagaagaac

SEQ ID NO: 52843 - RNA, 67 nt, Homo sapiens
cccgagcgcgcagcccaaccacagagaagcaggcgaccaggcgcgcgggcaagaaagcagacgcgac

SEQ ID NO: 52844 - RNA, 50 nt, Homo sapiens
cggagagaacccccggccggacagcacgcacgacggcacgggacaggagg

SEQ ID NO: 52845 - RNA, 73 nt, Homo sapiens
agcagccacacgggaccgaacaagggcagcccagcacaagggaggcgaggacggacaaaaggaaacggacggg

SEQ ID NO: 52846 - RNA, 71 nt, Homo sapiens
acaggccagcccaaggcagcagccacgacacccaagccgcacagaacaagcagaagcacccaaaagagaga

SEQ ID NO: 52847 - RNA, 58 nt, Homo sapiens
aagcaccacccaacggcagggagcacaggaagaagagaaagcgccccccccaacccaa

SEQ ID NO: 52848 - RNA, 79 nt, Homo sapiens
ggccgggccgcaagaagcagggcagaacgccacgagaaggagacccaacaccccggccagacgggccaccaggccggcg

SEQ ID NO: 52849 - RNA, 76 nt, Homo sapiens
gcccagagcgagacaagccgcgacaccgaaggaggaagagagaggacaaagagcacaagagggccagggaccaggg

SEQ ID NO: 52850 - RNA, 74 nt, Homo sapiens
caaaaaccagacaacgagaaagagagaagaaagacagcgggaagaggcacggagggcagaagccgcaggacaga

SEQ ID NO: 52851 - RNA, 81 nt, Homo sapiens
ccgggcccagccgggggagagaggaaggccccaaggacgccccccaaggacacggaagcacgggcccagggacgagcggag

SEQ ID NO: 52852 - RNA, 78 nt, Homo sapiens
gacgaaagacccgcgaaagaagacagcaccgaaagcagcggaacggaaccaaagaggggaaagggagagaggagcaca

SEQ ID NO: 52853 - RNA, 61 nt, Homo sapiens
aggcaggaaaacaaagaggcaccggggaagagggagggcgaggaagaccacagagaaaagg

SEQ ID NO: 52854 - RNA, 46 nt, Homo sapiens
cgccgaggccgcgggcggcgggcccggagcgcacagcgaggagggg

SEQ ID NO: 52855 - RNA, 63 nt, Homo sapiens
aagaaggaaggggggccgagggggaagcgagagcaacgagagagacaaaggaaacgaaaacag

SEQ ID NO: 52856 - RNA, 60 nt, Homo sapiens
cgaacaccggaccgccaggacgagagaggagcgcgggccgagagcggagagcgggacgca

SEQ ID NO: 52857 - RNA, 37 nt, Homo sapiens
cgcagggcgccggagccccccagaacaggagcaaaca

SEQ ID NO: 52858 - RNA, 73 nt, Homo sapiens
agaagaaagacggcggaccgcgggggagaacgcggcaaggaagaggcccggaaagggaaaaaccgaggcagag

SEQ ID NO: 52859 - RNA, 74 nt, Homo sapiens
caaccaggaagccacggcgaacacggccagacaacaggcacaaagagagaaggaacacccacagggcagacaga

SEQ ID NO: 52860 - RNA, 72 nt, Homo sapiens
gcgacccggcccaaccccgagccgcgggcacagaggacaaagagggcacacagcacaagggagccgggaacc

SEQ ID NO: 52861 - RNA, 78 nt, Homo sapiens
cgacgggaaaccacaaggccaagcggcccagccccggccgggggggagcagaaccaaggaaaaacgaggggagaggag

SEQ ID NO: 52862 - RNA, 86 nt, Homo sapiens
ccaggacgcgcccggagccaaggcgggaggcgcgcagggccggcggcgcgcggaggaggcagcacggcaggagacgaggagaggac

SEQ ID NO: 52863 - RNA, 77 nt, Homo sapiens
acagaacaacaggcaccgccgaccggagcagcaaggcaaacgaaacgggagcaacagcgagcaacaggcaacgaaaa

SEQ ID NO: 52864 - RNA, 67 nt, Homo sapiens
cgcgcgccggcgcgcgccgaggacagaggagaggcacaaagaagagagaagagacaacagacagcaa

SEQ ID NO: 52865 - RNA, 84 nt, Homo sapiens
gcgccggcgcgggcccgggccccgagcgcccgaacagggcgccggccgagcccgggaaaacgacagcagcagcagggccggaag

SEQ ID NO: 52866 - RNA, 48 nt, Homo sapiens
accgaaggaaaccgacccagcgaaggacacgcagaaacaaacaacaca

SEQ ID NO: 52867 - RNA, 76 nt, Homo sapiens
aaggaagaacagaaacacgaccaaccgcagggccgaggcagccaggcgcccagccggaaggcaggcgaagccccac

SEQ ID NO: 52868 - RNA, 69 nt, Homo sapiens
gggcccgggaggggaaaaaccagagacccccgaagacggaggggaagcaaggccaagccacagccacca

SEQ ID NO: 52869 - RNA, 71 nt, Homo sapiens
gagcgaggcgcccagacaccccccccgcccagaacaaagaagccacagacaaagagggaggaacaaacaac

SEQ ID NO: 52870 - RNA, 67 nt, Homo sapiens
aacccgcagacgggcgggaaaggccccacaaagaaacagacagagaagggaaagacgggcgaagaga

SEQ ID NO: 52871 - RNA, 74 nt, Homo sapiens
cacggcgcgcccgaacccacaggagggccagaggacaaagcacggcggaagagaagccagccgccggcgacaga

SEQ ID NO: 52872 - RNA, 61 nt, Homo sapiens
cacgacccggagcacccgaccccgagcagaaccagagaccacagaagaaggaagggccacc

SEQ ID NO: 52873 - RNA, 46 nt, Homo sapiens
cccagaacacaacagggcaaaggccccgacagggagcggcgacaga

SEQ ID NO: 52874 - RNA, 47 nt, Homo sapiens
gagggggcgcggcccggcccgggaggaagacaaggaacgcccccacg

SEQ ID NO: 52875 - RNA, 59 nt, Homo sapiens
gccaaaacaggcaggaaaagaggcaccccacagcaacagcccccaggcacaacacagca

SEQ ID NO: 52876 - RNA, 74 nt, Homo sapiens
ggcgcggagggccgagggagggccgagccagccgcggccggaggagcccccaggccgagcagacggccccccca

SEQ ID NO: 52877 - RNA, 73 nt, Homo sapiens
ccaaccgaggaaggcaacagaacagcccacccaaacaagaacacgaaacaaaacagcccaccgcgcagcaaag

SEQ ID NO: 52878 - RNA, 55 nt, Homo sapiens
ggcggccccccgcgcacagaacgcaagcacagcacaccgggagcagaccaccaag

SEQ ID NO: 52879 - RNA, 53 nt, Homo sapiens
gaaaaccaggaacggccaggacgagaaccgggaccgcaacccacagacaacaa

SEQ ID NO: 52880 - RNA, 71 nt, Homo sapiens
gcagacgggagcgcaaggcgccccaaggccagacaaaacaggcgagggcgccggcaccagggcgcaaccgg

SEQ ID NO: 52881 - RNA, 79 nt, Homo sapiens
cccggaacaggccggcccacagacccgcgggaagcggcgccacccgcacgagggacgaacagcggggacgccccagcag

SEQ ID NO: 52882 - RNA, 53 nt, Homo sapiens
agagaagacagcagagaaccacaaagcggacgaaagaagaaagacaagcgcaa

SEQ ID NO: 52883 - RNA, 73 nt, Homo sapiens
cacaccacgcggaggcaaccagcagacccaaaccaacagcagccaaagcaaggaacaggaacgggacaagacg

SEQ ID NO: 52884 - RNA, 65 nt, Homo sapiens
gcggcgcggagccagcgcgcagaccagcggaggccggaagagcgggagcgggagccaggcagaag

SEQ ID NO: 52885 - RNA, 69 nt, Homo sapiens
ccccaccaggaccccagaggccccagggggcagaggggaccagcgaccaaggacggggccaagcacgga

SEQ ID NO: 52886 - RNA, 71 nt, Homo sapiens
ggaaccacaacaggagccaggaaaggacaagacaagcagccaaacaaagaagaagagaaaaggcaccgaga

SEQ ID NO: 52887 - RNA, 74 nt, Homo sapiens
cccacccgccagaggaagccccccaccacaggaacgagccaggacaaaaccaggcagaaccaacacgaacccaa

SEQ ID NO: 52888 - RNA, 67 nt, Homo sapiens
gaaacaacacaaccccacgccacagggggagccggagaacacagcagggagaagcgcagaccacaaa

SEQ ID NO: 52889 - RNA, 79 nt, Homo sapiens
aagagaggagggagaacacagaaaccggccccaggccacgaggcccagggaacccggaccacagaaccaagaaagagga

SEQ ID NO: 52890 - RNA, 54 nt, Homo sapiens
aagaggccacgcagagccacgccggcaggagacgcaaaacacgggaggaaggag

SEQ ID NO: 52891 - RNA, 75 nt, Homo sapiens
cacagcccaacccacccggcgcggccacgcgcgccgcccaaggccagccaagaaccagaggcaggaagaagaaaa

SEQ ID NO: 52892 - RNA, 80 nt, Homo sapiens
caaccccaacccggagagcggcgaggaaacaggaacacgaaagaggaaaaacgcacaagaaaccgaagccaaggaggaga

SEQ ID NO: 52893 - RNA, 78 nt, Homo sapiens
aaaaaagagcgacgaggcaagaccaggcgaccagaagcaagaacaacaaacgcccaccaaaaggacgcgccgccgcca

SEQ ID NO: 52894 - RNA, 66 nt, Homo sapiens
aaaccagaagaaagcgacaggccagacgacaacaaagggagccacgccccaggggagccaacgcca

SEQ ID NO: 52895 - RNA, 68 nt, Homo sapiens
agacaagaaggaaaagaacagagaggggacggaagcggagcgaaggggacaggacgaaggaaccccag

SEQ ID NO: 52896 - RNA, 81 nt, Homo sapiens
acaccggaacacccacagcacccccaggcgccgagccagccgcacggccagacagcgaagacaaggggacggcagcccaaa

SEQ ID NO: 52897 - RNA, 80 nt, Homo sapiens
ccaggccaggcaacagggcgccgggcacggagaccaccagggcagaaaaagagaagaagaagaaagacccggcgccggca

SEQ ID NO: 52898 - RNA, 58 nt, Homo sapiens
ccggacaaccgacaaaaccagggccccccacgcgagaacccgggccggggcccggggg

SEQ ID NO: 52899 - RNA, 80 nt, Homo sapiens
gccacccaccggaccgccccaggagggcgcgggacacccccggcggagcgacagcggcaaaaccccccaccccgaaacca

SEQ ID NO: 52900 - RNA, 74 nt, Homo sapiens
ccagaggcagaaaggaaaggggacacaggggccccaaggaccaccggacccccggaccccggacggcggagccc

SEQ ID NO: 52901 - RNA, 83 nt, Homo sapiens
aaacgggcaacaaaacccaagccccaggagaagaaccagagcaggagcccacccagaccagggagacggccacacaggcccac

SEQ ID NO: 52902 - RNA, 55 nt, Homo sapiens
caaacaagaagcggaaggcagaggaagacagaacaggaaagaaaagaacggaacg

SEQ ID NO: 52903 - RNA, 67 nt, Homo sapiens
gggcgaacagcaaaccacccagcaggaaaccaagagaagcggaaaagccagggcggaaaccggcaag

SEQ ID NO: 52904 - RNA, 72 nt, Homo sapiens
cgggagagaaggccagcgacagccgggagaacccgacgaaccacaggaaaccccgcaaacacaacacccgaa

SEQ ID NO: 52905 - RNA, 80 nt, Homo sapiens
agagagaggggaccaccaccaggggccagcgccaccggaccgcacgcgcacggacagcgccggcaaaaacaggccaggcc

SEQ ID NO: 52906 - RNA, 78 nt, Homo sapiens
ccgacccgcggagacagacaagacaagaccggcggggaagcggaaggaagcccacccccagaagagcgcgcaaaagac

SEQ ID NO: 52907 - RNA, 70 nt, Homo sapiens
accagaagcgaaaaaaaaacaacccccaaggacaaaggccacagcggagagcaaaggacacccccgaacc

SEQ ID NO: 52908 - RNA, 79 nt, Homo sapiens
accacagaaacggggcccgaccggaaaagggccaagagcaggaacccacaggaaagagagacaaaaagcaaacaagcga

SEQ ID NO: 52909 - RNA, 69 nt, Homo sapiens
aagaagcagaaagaggagaaggagagcagacgcaaacaacggaaacaacgaacgagcaaggaagggcca

SEQ ID NO: 52910 - RNA, 76 nt, Homo sapiens
gcagggggggcgacccagaggagagcccaaacagacgacgcaaacagcagcagaggaaaaaagagaccgagagaaa

SEQ ID NO: 52911 - RNA, 74 nt, Homo sapiens
aaggcggacaagagaagccgccagggacagagcgaagaaccccccaagaagacgaaacccccgggccacaagaa

SEQ ID NO: 52912 - RNA, 78 nt, Homo sapiens
gaacccgccagcaggcaaccagacccagaagacacaagagcagcaaaaaggaaacacagagcaaaggcagcagcagaa

SEQ ID NO: 52913 - RNA, 67 nt, Homo sapiens
ggaacgaagacgcaagagacacgaaagagcaccaagcggaaaacgagacgaaggacaagggaccaaa

SEQ ID NO: 52914 - RNA, 81 nt, Homo sapiens
aggccaacggggccaagagaagcggggagacagagaagcagaggagcaagaggggggggcccccccgaagaaaggaaccgg

SEQ ID NO: 52915 - RNA, 48 nt, Homo sapiens
cgccaacagaaccacagaggacccgaagacaaaaccacccacgaaagc

SEQ ID NO: 52916 - RNA, 51 nt, Homo sapiens
aagcagcgggagaggagggacacgagacgagaacagacccgcccgcaagcc

SEQ ID NO: 52917 - RNA, 79 nt, Homo sapiens
caggcaagcagggaccggagggaagaagaacaccaggaagcaaggcggcagcgccaaccggccggagagcaccggcaga

SEQ ID NO: 52918 - RNA, 54 nt, Homo sapiens
aacacagaacgggagaaagcaacgcgacggacgaagggcccagggagaaccccg

SEQ ID NO: 52919 - RNA, 66 nt, Homo sapiens
gccacaggaccgcagcaagagggcaacaacaagcagagacgcgacaaagaggggggggagaccgga

SEQ ID NO: 52920 - RNA, 65 nt, Homo sapiens
cccaagcggccggagcggcgccaggaggagggggcgccgcggcaggaagcccggggcggcgacgg

SEQ ID NO: 52921 - RNA, 81 nt, Homo sapiens
acccacacccacaccacacacgagccagggagccgccgggaccggcccgggagacgacaacccaaaccgaaaaggcaaaag

SEQ ID NO: 52922 - RNA, 90 nt, Homo sapiens
gcagccaccgccgcccgggcgcagccgcacgcggagcccggcggcaccggggccggacggacagcgaccccgcacacacacccaccagcc

SEQ ID NO: 52923 - RNA, 78 nt, Homo sapiens
cacacgaagcaacagacacgcacaaagagagacccgaacagccaggcggcgggggaaagagaaagagagagaaacgcc

SEQ ID NO: 52924 - RNA, 40 nt, Homo sapiens
cgcgcgccaggcggagagccaggagccaggggcgccaggc

SEQ ID NO: 52925 - RNA, 70 nt, Homo sapiens
ccccgggcccggccggcacaagaagcacggccgcacacagcacgaaggggcaggccagccacgaaaagac

SEQ ID NO: 52926 - RNA, 84 nt, Homo sapiens
aggaaccgggccagacccacgcggcgccagcccggcgggaaggaaaaccgcgcagagaggacccaaagacaggaccacgcacca

SEQ ID NO: 52927 - RNA, 57 nt, Homo sapiens
gaaaccgccaccccccgcaggaccacagaaggaagaggggggaaagagaaagacaga

SEQ ID NO: 52928 - RNA, 79 nt, Homo sapiens
agaagggccgggggcgagccggagcgaccccggcaggaccaaagggaggggaaacaagaaccagacaggcacaggcgag

SEQ ID NO: 52929 - RNA, 73 nt, Homo sapiens
caaagcgaacgaagagcaccgggagcggcgaagaggcaccggaggagacagcacgaagaggggcagcgcggga

SEQ ID NO: 52930 - RNA, 67 nt, Homo sapiens
gacggaccaagagggaccacgaaaaagcccggggagcgaagggcagaggaacaaagaccgacacgaa

SEQ ID NO: 52931 - RNA, 57 nt, Homo sapiens
accagaagaaaaccgaaccgagccacgccacccccaacccacccaacagacagcacg

SEQ ID NO: 52932 - RNA, 88 nt, Homo sapiens
ccgagcaagccgccgcccgacccagggcccgcgggccaggagagcgccggcggaagacgaccccgacgcaggccaggagccgcggaca

SEQ ID NO: 52933 - RNA, 72 nt, Homo sapiens
aaagacccaggggcagcccacagaggaaacacccggacacaagagggcaagaaaggcgcgacgggccgaaaa

SEQ ID NO: 52934 - RNA, 85 nt, Homo sapiens
ccacgcagaacccgggagaggagaccagaacgaacccccccccccggacaacgaggaaaaccaaaaacggaacagaacaacagga

SEQ ID NO: 52935 - RNA, 72 nt, Homo sapiens
gcagcacgagccccccagccgcgaagagacccgacagagaaaagaaggaggccagcgggacacacaaagaaa

SEQ ID NO: 52936 - RNA, 56 nt, Homo sapiens
gcacaggcccggccaggcacaagggcaccacaaagagaggagcggaccaagcgcca

SEQ ID NO: 52937 - RNA, 66 nt, Homo sapiens
cacccaaagaagaggagagcggggggacccaaaaagggcagaaaggccaggggggcacaccgaacc

SEQ ID NO: 52938 - RNA, 117 nt, Homo sapiens
gcgagaacagcaaagcccaagagaggcaggcagcgacagccacacaacggacagcccccgggaaccgcccacccaccccaccggacccacagcccaggccagcccgccaggaagaga

SEQ ID NO: 52939 - RNA, 75 nt, Homo sapiens
agcacggagcgaaagccgacaggggaaagacaagggcagggccgagaacgaggcaacgcgaacaccacacgaaag

SEQ ID NO: 52940 - RNA, 80 nt, Homo sapiens
gcacaagaacgaaaccggaaccagacagaaggacaggaaaacaggaggcagaggaacaaaaaaagacaccacgagaaaca

SEQ ID NO: 52941 - RNA, 57 nt, Homo sapiens
ccgcgcggccccgcggagccagggggggccccagcccggccgaacgggcgcacgaca

SEQ ID NO: 52942 - RNA, 82 nt, Homo sapiens
cagccccgacgggacgggggagggggcggccgggcggagagaaccagcgaggacgaggaagggagcggggagcgaaaggaaa

SEQ ID NO: 52943 - RNA, 76 nt, Homo sapiens
cagcgggacaggagggcaggaagagcgcagcggggacaagccgaggaaggccagacggaaaaagcagccaccacgc

SEQ ID NO: 52944 - RNA, 76 nt, Homo sapiens
agcaaaaggaaaaaagacgcccgcagaaaacggccaggaggggaggagggagggccacggcaagggaagcacaaaa

SEQ ID NO: 52945 - RNA, 72 nt, Homo sapiens
ccgccgcgagacagccccgaaaacacggggcaccaggaggagagcgccacggagggcggaggagagggggca

SEQ ID NO: 52946 - RNA, 70 nt, Homo sapiens
agccaaaaagacgaccaacgcagggcggggagaaggcaccaacaggaaccagagaggcggggacaacccc

SEQ ID NO: 52947 - RNA, 76 nt, Homo sapiens
ccaccccaggacaggagcagagggggcagagggaggaggcggagagacaggaggaccaccaaccagggacaagcgg

SEQ ID NO: 52948 - RNA, 74 nt, Homo sapiens
aacagcagcagccaaggacgagccacccgcggaagagagggcgaggcaggaagcgggagagaacacgggagaaa

SEQ ID NO: 52949 - RNA, 92 nt, Homo sapiens
aagcggcggggcggcgggccggcgggcggggcgcagagccaggcagcgcagaggagaaggcagagcccccccaggcagaagcccgagcggga

SEQ ID NO: 52950 - RNA, 80 nt, Homo sapiens
cagacccggagaacggacaaggcaacaggagccgggaaaccgaagaaggcagagaaggcaaacaggaggcgcgggacagg

SEQ ID NO: 52951 - RNA, 91 nt, Homo sapiens
caagccccaaggcaagagcaacagcaacagcagcccagaagaaaggccaagaagcgaaccaccggaacagaaagagaagggagcaaccgga

SEQ ID NO: 52952 - RNA, 66 nt, Homo sapiens
cgcgagcgacaacgggacgggaaacacagcgcacgaaacacacaaagaaccaccaccgggaggaag

SEQ ID NO: 52953 - RNA, 57 nt, Homo sapiens
aggaagaagaggacgacgacgacgaggaagaggaggcgagacaacgaagaaaggagc

SEQ ID NO: 52954 - RNA, 78 nt, Homo sapiens
cccagccccaccagaccccggccgccgaccgcggccccgccggccgccggccgcgcgggggcagcccagaaagccggg

SEQ ID NO: 52955 - RNA, 70 nt, Homo sapiens
gggagagaggacccccccccccccccaagagccaggacaaaaccaggcagaaccaacacgaacccaagca

SEQ ID NO: 52956 - RNA, 77 nt, Homo sapiens
cagggccagcccgggaccacggaccaaaggccgggcgcagaacccccagaccacagccccgggggcgccgagggcac

SEQ ID NO: 52957 - RNA, 63 nt, Homo sapiens
cggccgagaaggcagaggcggaaaagcggacccacccaaggagaagaaccggacacagaaggg

SEQ ID NO: 52958 - RNA, 76 nt, Homo sapiens
aggacaagagacgacacgcaagcaggcaaccgaaacaggagcgacaaggcccagcagcaacaagcccgggaccggg

SEQ ID NO: 52959 - RNA, 57 nt, Homo sapiens
gcgcacccgagccgcaagcgacccggagcagccgcagggggacagagaccgcgagca

SEQ ID NO: 52960 - RNA, 67 nt, Homo sapiens
cggaggaggagacggcaggcgggcggggaaaacacacacgccgcgggagcccaaggcggccgagggg

SEQ ID NO: 52961 - RNA, 57 nt, Homo sapiens
gagcagcggaaaagaccagcacagacgagacagaacaccacccggggaaccgaacca

SEQ ID NO: 52962 - RNA, 82 nt, Homo sapiens
gagccagccagaagaaaagccaaaagaaaccgaaggaggaaaaagggccacaacagcagggaagacccagaaggcgaacgcg

SEQ ID NO: 52963 - RNA, 76 nt, Homo sapiens
caacggagcgcgaggcgggcgcggagaagcgcggagaagacgaccccgacgcaggccaggagccgcggacagaagc

SEQ ID NO: 52964 - RNA, 74 nt, Homo sapiens
caaaggaaaaagaaaaaggggcgccggccggccccagggcagccaggacacacagacaaggcagaaacagaggc

SEQ ID NO: 52965 - RNA, 74 nt, Homo sapiens
ggcagcggcgggggcaggcagagaaaggacgccgcacaacaaaagcaaagcgacacgcggacccgggcaaagcc

SEQ ID NO: 52966 - RNA, 100 nt, Homo sapiens
ccggacaggaggagccagggcccggcccgaaaggagagccgcccggccaacgcaacagggagcccacgcaagaggggccggggaccgcccagcagcgggc

SEQ ID NO: 52967 - RNA, 67 nt, Homo sapiens
aacacacaggcacaccgcacaaggccacgaacgacgcacggaggccacaacaccacaccacacaaga

SEQ ID NO: 52968 - RNA, 77 nt, Homo sapiens
gccacgcagaggaacaaaaaaaggagagccggcagccccgcccgcacgcccgaagagcggaaagagagaagaaaacc

SEQ ID NO: 52969 - RNA, 60 nt, Homo sapiens
gcccacagacagaccgggaccaagaaaggcccagggaccaaagcccggacaaggcccgag

SEQ ID NO: 52970 - RNA, 85 nt, Homo sapiens
ggggagcccccggcccggcaggagaacggcagcagccaccaccaacagccacaagggcaccggcacacccaacggccagcaaggc

SEQ ID NO: 52971 - RNA, 75 nt, Homo sapiens
gccaggaaccaagaaaacgagccggaggagccaccaacagaagcaggagccaggaaaccaaaacccacagagagg

SEQ ID NO: 52972 - RNA, 75 nt, Homo sapiens
ggaagaaaagacgcaggaagaaccacaacaagaaagcagaaacgaaagaaagcaagaggcggagcacccaaaagc

SEQ ID NO: 52973 - RNA, 128 nt, Homo sapiens
ggccgagcggacggcggcacagggaggaggaaaccgaaggccggcgcaggagcccggcgcagacgcccggagacgcgccgcccccgggagagccagaaagaggacaggcgcgggcagcgggaagcgag

SEQ ID NO: 52974 - RNA, 82 nt, Homo sapiens
gaccgagaccgcggccgggaccgaggccaaaccagaaaggggacagcggcgggcagggagcacggaaggaaccacaagggca

SEQ ID NO: 52975 - RNA, 83 nt, Homo sapiens
aagcagaaggagcggaggagccacggaaggacgacgacaaacacgcagaggaaggagcagcgcaagggccacccccaaccagg

SEQ ID NO: 52976 - RNA, 76 nt, Homo sapiens
gccggccccggcagcccagcgggagacccggacaggacggggacgagaaaccggaggagcaggaaagaaaccccag

SEQ ID NO: 52977 - RNA, 37 nt, Homo sapiens
agcacccccagcgggcagaaaaaggagcccaagcccc

SEQ ID NO: 52978 - RNA, 73 nt, Homo sapiens
ccagagccacagaaaggacccgggacacccaccaggcaagggcgcaaagggaaaaacagcagacgaagagaca

SEQ ID NO: 52979 - RNA, 66 nt, Homo sapiens
cccccaggccacagccgcccacaaacaaacaggcccaaagcccagccaaggacccgaaaaacgagc

SEQ ID NO: 52980 - RNA, 53 nt, Homo sapiens
ggggcaacccggcaagacccacaggcaaaaaggggacggaaggcaaggagcga

SEQ ID NO: 52981 - RNA, 80 nt, Homo sapiens
ccgaccgcgcgccacggacagcccagagcaagcacacggaggcccgggagccagaccgggagcccgccccagccaggcca

SEQ ID NO: 52982 - RNA, 74 nt, Homo sapiens
gaacacgccgacagggacgaagaaaagggggaccggagaggcccagaacaacgcaccgggagaacccaaggaag

SEQ ID NO: 52983 - RNA, 77 nt, Homo sapiens
ggggaccgccgcccggggagagggcggggacacagcgggcaggaagaagacgccgaggcccccccacccagaaccga

SEQ ID NO: 52984 - RNA, 78 nt, Homo sapiens
aacccacaacaagaccacgaacaacgaacagcaaagacaaccaggagaaagacagccaagcagagagaagaaaagagg

SEQ ID NO: 52985 - RNA, 79 nt, Homo sapiens
agacgaacaaacagcaagaaagaccacaagaccaggccccacgaagggccacagaacgggaaggcaaagaccggcccgg

SEQ ID NO: 52986 - RNA, 80 nt, Homo sapiens
gcaagaaggcgcccaaagggcagcgccaggccagaaccaaagggaaaagcaaacaaggaagaaacaagcccaggacgaag

SEQ ID NO: 52987 - RNA, 73 nt, Homo sapiens
gaaaccgggaggaaagaagacaagagagaacgcaaacaggaagcgaggagacagcagaccacagcccggcagg

SEQ ID NO: 52988 - RNA, 62 nt, Homo sapiens
ccagccccggaccacgggggaagaacaaaggaagagacgggacacagaagcaggccgacaaa

SEQ ID NO: 52989 - RNA, 84 nt, Homo sapiens
gcaacacaagaaaacccccccgaggcaccacgccaccgagcacaaacccacgaagccaacgcccagggcccaaaaaagggaacc

SEQ ID NO: 52990 - RNA, 81 nt, Homo sapiens
cacaacagagggcaagaacgaaccaaccccacaacaccgccggagacagccaaggggaagagaacaacgcagaacaaagac

SEQ ID NO: 52991 - RNA, 72 nt, Homo sapiens
ccacaacagaagacagccggcaaccaagaagaaaagagggaagccgaacggggagaaaagcccaacgagaac

SEQ ID NO: 52992 - RNA, 81 nt, Homo sapiens
cgacgcgcaagggcgcggagccgcgggccggcgagcgcgcgccaccagcacacagggggccaggggaaggaccgcccacag

SEQ ID NO: 52993 - RNA, 34 nt, Homo sapiens
gccacagggaccccagccgggaccaggggccggc

SEQ ID NO: 52994 - RNA, 79 nt, Homo sapiens
gaaagcgggagagggaccggaacggcggcgacaaggggcccgaacagagggacaagaagaccagagaaggacccaacag

SEQ ID NO: 52995 - RNA, 58 nt, Homo sapiens
ggcgaggggcagcggcaggagagccggccgcgacaggacgaccacccaagaagaccaa

SEQ ID NO: 52996 - RNA, 73 nt, Homo sapiens
aacccaccccgaggggggacacgccaggcacgcccaggccacgcgaacggccagcgccaggcaacacagaaag

SEQ ID NO: 52997 - RNA, 96 nt, Homo sapiens
cagcgaacccacacgggaagcgaaccgcgcagaagggaagaaagagccccagcgagaacaggagaagcaagcaggcgaacgaagaggcggcgccgc

SEQ ID NO: 52998 - RNA, 76 nt, Homo sapiens
gagaaacgccagcacacacgacagggagcccagaaggaaggagggccccggagcagccacaccaccgaggccccac

SEQ ID NO: 52999 - RNA, 65 nt, Homo sapiens
aaggcgcaagaaaaggagccggaaacggacaaacagagcaccaagcggaaaacgagacgaaggac

SEQ ID NO: 53000 - RNA, 80 nt, Homo sapiens
gggcagggcccaccccgcgcccgacaggcccaccacaaccaagcgagaggacccacgcccccagccgaggagcccccccg

SEQ ID NO: 53001 - RNA, 71 nt, Homo sapiens
gacaacggagaaaggcaaccacacaggaaccaacaaccaggacccagaggaacccgaaagcacgaaccagc

SEQ ID NO: 53002 - RNA, 84 nt, Homo sapiens
gggccccagcagcccccgaaggcccacaggacaggagagaaagacggaccagggccacagggcgccaagagcccagggcaccgc

SEQ ID NO: 53003 - RNA, 71 nt, Homo sapiens
gaagggccaggagagagaggcagccagacaagaaggacacagaagagagcaaagaagcgaaaccgagcagg

SEQ ID NO: 53004 - RNA, 76 nt, Homo sapiens
cggcgcggggccccgcggcggagaccagaaaaagaagagaaaccacggggaggaagagaagaccaggccaacccga

SEQ ID NO: 53005 - RNA, 57 nt, Homo sapiens
ggcaccgccagagccaaggccagggggcaaggcggcggaagccgcagaaggaccggc

SEQ ID NO: 53006 - RNA, 72 nt, Homo sapiens
gagacaccccggggcgggccgacggagacaaccgcagccccggcaccaaaggggaaccgcccaaaagcccgc

SEQ ID NO: 53007 - RNA, 35 nt, Homo sapiens
gaacggggcaaagggcgcgaacggcggaggcaaaa

SEQ ID NO: 53008 - RNA, 85 nt, Homo sapiens
caaccccggagcccggccccggggaacagggagcgcccggcgcacagcgccagcagggaacagacacgggaagcccgaggagaca

SEQ ID NO: 53009 - RNA, 84 nt, Homo sapiens
aggcagggccccccgcaagagcccccaagaagggagggaggcggggagaaggacagccaaagccaaaagaacaaggacaaaaac

SEQ ID NO: 53010 - RNA, 99 nt, Homo sapiens
gcagacaccgcgacagcccagagaccaacccaggaaaggccaacaggccgggagaaaacgggccggaggaaaagggcggcaggggaccaccacacaaac

SEQ ID NO: 53011 - RNA, 71 nt, Homo sapiens
cccaggaggaaacagacgaccaggacaaaaaacgccccccacagacaggagcgccgcggccaagcccgcca

SEQ ID NO: 53012 - RNA, 70 nt, Homo sapiens
gcacgccaccgacaagcaagccgaagagaaaggcaagcagcaagaccagcgagacccaacagagggaaca

SEQ ID NO: 53013 - RNA, 86 nt, Homo sapiens
gccacccagaagccaagggcgaggcggagcccgccccaggcgccccagccccagccaaaccccccacacgaaccagcaagggaggg

SEQ ID NO: 53014 - RNA, 56 nt, Homo sapiens
gcgcacgacgagacgcacaggaggaggacagaggcgggaagggaaccggcagcgaa

SEQ ID NO: 53015 - RNA, 90 nt, Homo sapiens
agaggcagagccaagccggcgccgaggcaacacgggggggacacccagcagaccgaaaagggcggaaaaggaccaaggcccgcaaaaggg

SEQ ID NO: 53016 - RNA, 74 nt, Homo sapiens
ggcagggcccaagaccaaccaccacccaaaagccaccagcagaacccaccggcacaaccgcacgcaagcgacag

SEQ ID NO: 53017 - RNA, 61 nt, Homo sapiens
ccgagcagacagagcaaggcagggccccaccccagagaaagcaggagcccggaaaggagaa

SEQ ID NO: 53018 - RNA, 75 nt, Homo sapiens
aaaggcaacaagaaggacaccagaaacccaaggcgggaaccaccaaacaggagacaaagaccaccacaggacacg

SEQ ID NO: 53019 - RNA, 71 nt, Homo sapiens
cccacggggacggagggccgagaagcggggcaccacgaaggaccgaagaggaagaagagagggcgaaggag

SEQ ID NO: 53020 - RNA, 52 nt, Homo sapiens
gggcgcaagcagaaagcgagaaaacacaagacacccaagaagcccagcagac

SEQ ID NO: 53021 - RNA, 72 nt, Homo sapiens
gagcaaagcaggaagaagggccacagcagacaaaggaaaacgaccaggccaggaaaaaagcgcgcccaggag

SEQ ID NO: 53022 - RNA, 79 nt, Homo sapiens
ccccggagggggaccacaagacccacgacagcagacgacagagagagggggaagggccaaaagaggaagaggcgggacc

SEQ ID NO: 53023 - RNA, 81 nt, Homo sapiens
ccccggggccaccaccggcccacggagcaggggagaaaaccgacgcacaccaaacgacagggagccgaggacggagacaca

SEQ ID NO: 53024 - RNA, 70 nt, Homo sapiens
ggagcggagacgggagaagaaaagacagaccacggggccccgagagcccggggcaacggccacaaggcca

SEQ ID NO: 53025 - RNA, 74 nt, Homo sapiens
gggaaaaaccccaagaggaagacaaacaaccagcccaggaacaagggagcagagacgcaacacggcgggccacc

SEQ ID NO: 53026 - RNA, 69 nt, Homo sapiens
cgacgaaaccagggacgaaaacgaaggccaagacccgggaccaagcacagggcggagaacggaaaagca

SEQ ID NO: 53027 - RNA, 59 nt, Homo sapiens
cggagcaaggaggaaaacacacggcacaggcggagaacaaagggggacagagaagaaaa

SEQ ID NO: 53028 - RNA, 51 nt, Homo sapiens
aacaacagaaccggacagaagcgcaaaaaacgcgacaaaggaagaaccaag

SEQ ID NO: 53029 - RNA, 85 nt, Homo sapiens
ccgcgggcgccgggagcgagcgggagggagccgcgcgccggcgcgcgccgaggaggggccacggggccggggagccaccaggaga

SEQ ID NO: 53030 - RNA, 73 nt, Homo sapiens
ggaccgagaccaggaggaagacggcgaaggcccagacgagggcacgcaagaacaggcggaggaaaaggccggc

SEQ ID NO: 53031 - RNA, 59 nt, Homo sapiens
cggagaaagagaccacgagcccgaacagaacaacagcgaccccaaggaagacaaggaga

SEQ ID NO: 53032 - RNA, 83 nt, Homo sapiens
ggagggaccagccgccgcggccagaagggagaagggagagagaccgcggagaaaccccggcacacagcggcggcaggccggcc

SEQ ID NO: 53033 - RNA, 74 nt, Homo sapiens
aacgcccccccagcacacagaggagagcgacgagaagcagggcagaaaagaacagacccagaagaagcgaaagg

SEQ ID NO: 53034 - RNA, 66 nt, Homo sapiens
gcgccgcggcggcgcggagcacgggcagaaaggagccggagccccagcgggaaggcagccaaaggg

SEQ ID NO: 53035 - RNA, 81 nt, Homo sapiens
cccagacaccgacgggccgcgaggggaagaggaagcaaagccaagacgacacccagaggcgcaacccagagagaggaagag

SEQ ID NO: 53036 - RNA, 71 nt, Homo sapiens
acaaagacacaggaccagaaaccgaggggaaaagcaggaaaaagaaggaagccaacgaacggaacgaagaa

SEQ ID NO: 53037 - RNA, 72 nt, Homo sapiens
ggaaagcagaaaacagaaacaccaccgaaaacgacacggagacgccggggagggccgacagcaaccccagca

SEQ ID NO: 53038 - RNA, 73 nt, Homo sapiens
cacacaaagcaagccaaggaaggacaaggggggaaaagaaacagagaaaaccaagggaaacccagcgcgaagc

SEQ ID NO: 53039 - RNA, 60 nt, Homo sapiens
gcagaccgaagaaagcggaaacgagacacaaaagaaccggaacccagcagaagccagccg

SEQ ID NO: 53040 - RNA, 71 nt, Homo sapiens
ccagggaggaccccagacaccggagacgggaaagcaaaaaaaagaggccgcacagcgaaagaaagcggaac

SEQ ID NO: 53041 - RNA, 71 nt, Homo sapiens
ccggggacccgcgcccggagaaggccccccggcggccagaggacgcccaggccgccaggcaccggaacacg

SEQ ID NO: 53042 - RNA, 80 nt, Homo sapiens
cggcggccgaggaggaggagggggaagcggcggcggcaaaggcacaggaacagagccagaaggagaagaaaaggccggaa

SEQ ID NO: 53043 - RNA, 86 nt, Homo sapiens
aaaccggcaggcgcccggacacagaagaggacagccacggggaaaaggaaggccggaggaggcaacagcggacagcaggaagaggg

SEQ ID NO: 53044 - RNA, 76 nt, Homo sapiens
ccccggccccaccgccacaccgcacacaccacgggaccaagaaaggcccagggaccaaagcccggacaaggcccga

SEQ ID NO: 53045 - RNA, 84 nt, Homo sapiens
gggccacgcgggcccgaggcgcaccaagggcgaaggagccggcccaaggacggggaggacgcacgacgcgcggcacgggaacgc

SEQ ID NO: 53046 - RNA, 77 nt, Homo sapiens
gcgccagcggacaaaagcagccgagaacccgccgcggcgcccgcccaggaagaagaaagccagaggagaaagacaga

SEQ ID NO: 53047 - RNA, 74 nt, Homo sapiens
cagaaaagggggaaagagaagagcaacgagcagaccgaggccgaagacgaaaaccacagacaagccacaagcaa

SEQ ID NO: 53048 - RNA, 56 nt, Homo sapiens
ggacgcaggaaagcccgagcagaaagcgacgcccagggaggacgaggcaagccccc

SEQ ID NO: 53049 - RNA, 80 nt, Homo sapiens
gccgggccaggcagccgcacgaaagagcggccccccggaaaacggcagaacgaggggcgagccgggccaggcgggccagc

SEQ ID NO: 53050 - RNA, 68 nt, Homo sapiens
aagacaggagacaaggaacaaagccaagcaccccgggagagcaagaaagacccgcccaaggaaagacc

SEQ ID NO: 53051 - RNA, 51 nt, Homo sapiens
caagaagaacagagacagcagccaaacccccaggacggggaaggaagccac

SEQ ID NO: 53052 - RNA, 72 nt, Homo sapiens
agaaccgcaggagccagagacggaagagaaggaccggaacagacaacaccgaaacgaagaaagcgagaggaa

SEQ ID NO: 53053 - RNA, 133 nt, Homo sapiens
gagccggacacccccaccggcgggcccgccgcagccaccgccccgcggaccaagcggcagcaaaagaacccgaacgagcgcacggcagcgaagcgccggcagaaccgaggccagcggccaggaggggaggcgg

SEQ ID NO: 53054 - RNA, 72 nt, Homo sapiens
ccccaaggccggccggcggcggcacgagcaccccccagcgcgcccccgaggaggcaaggaggccacggggcc

SEQ ID NO: 53055 - RNA, 77 nt, Homo sapiens
cggagggcgcggagacggagcgccgcgcccccaccagcccccagaaacccacaaagccccgaggggcagggagccca

SEQ ID NO: 53056 - RNA, 88 nt, Homo sapiens
ccaccgaccgagcgggaggccacagcagccagccggcccgaggacaccgacaccagcagacacgagaggcgagggacgacagagcaag

SEQ ID NO: 53057 - RNA, 77 nt, Homo sapiens
gagaaccccacggagaaccagaggccgagcggccccgagccgggacacccggcggcggccccggagaaaggggagac

SEQ ID NO: 53058 - RNA, 82 nt, Homo sapiens
cggggaccgagacaaaacgcagaagagcagcccccgcggcgagccgcacagggcaacacacgcaccgcacggcccccgccca

SEQ ID NO: 53059 - RNA, 61 nt, Homo sapiens
ccgacagcacgcagagcggagaagccccagaccaggccagagccaaacccgcacgaccccc

SEQ ID NO: 53060 - RNA, 63 nt, Homo sapiens
acaggggacgcaccaccggggacaggacagaagagcaaggcaagaaaacccagcagaccacga

SEQ ID NO: 53061 - RNA, 78 nt, Homo sapiens
aaagacgaggacagaagagaaacaaagaaggaggaggaggagaagaacgacccaaaaagaacgacaagcagcccaagc

SEQ ID NO: 53062 - RNA, 83 nt, Homo sapiens
ccaccaagagggcccacccagacccccggcagaaggcccgaccgccggcgccacagccacagcccggacaccccacgaccacg

SEQ ID NO: 53063 - RNA, 57 nt, Homo sapiens
ccggcccccacgcgcggacagccggaccgcccaggcaacacgacaggcacggacccc

SEQ ID NO: 53064 - RNA, 61 nt, Homo sapiens
cggaaacggaaccgggaggcgacgcacacgagcggaggcgaaggacccaaagacaggacca

SEQ ID NO: 53065 - RNA, 87 nt, Homo sapiens
aaagccaaggaaaccccaacacagagccaagcgccaagagagagaagaagcaacaacacacagaggaccagacaggggaaggacaag

SEQ ID NO: 53066 - RNA, 82 nt, Homo sapiens
cgcagggcagcgcccgcgccccgccgcgagccgcgcggagccgcgcagccccggagcacggacagggacaagcgcacagcgg

SEQ ID NO: 53067 - RNA, 77 nt, Homo sapiens
ggagaggagcccaccaggacgaccgcgccgcccagcacgccagggaaaccggcacagggaagagaaacagagaaacc

SEQ ID NO: 53068 - RNA, 78 nt, Homo sapiens
gcgcggacgaacaggcgggaaggcacagaggcagcaggaagccagagccagccagagagaggaccgaaacagcacgga

SEQ ID NO: 53069 - RNA, 76 nt, Homo sapiens
ggaccagccagccccccaggaccacagccccgaccgagagaaccagcgccaggacggagaggccgcccacggagcg

SEQ ID NO: 53070 - RNA, 70 nt, Homo sapiens
aagaagcacgaaagccccacccgccgcagcaagcagagcaggcagcaggggaaccgcgcgaaggacacac

SEQ ID NO: 53071 - RNA, 80 nt, Homo sapiens
gacagagcgcgcagacccagagaccggacaccagcgcaagcggcccacaagacagaccagagacaaagcaagagaagaag

SEQ ID NO: 53072 - RNA, 64 nt, Homo sapiens
aaaaacgcaaggagaaggaaaagagaacccccgcggacccagaccaggcacgcccaaaagcagc

SEQ ID NO: 53073 - RNA, 80 nt, Homo sapiens
gccgcaggaggaggcagaacgccagccaagaccgggagggggacccggaggaaagcccagagggaagcgcaagaagcagg

SEQ ID NO: 53074 - RNA, 37 nt, Homo sapiens
ggggagggaagggaccaggaaaacggagcaccagggc

SEQ ID NO: 53075 - RNA, 91 nt, Homo sapiens
cggccccaccagcagacgcagccgagacaccagcccgaaacaccaccaagggaacggcaggagcagcgagggaacggaagagagggccgaa

SEQ ID NO: 53076 - RNA, 52 nt, Homo sapiens
cgccgcagcacacacacacggaacgagagcccagacagagaaagcagacacg

SEQ ID NO: 53077 - RNA, 67 nt, Homo sapiens
cccgcgaaaagagccacggggccaagaagccccgcagacggaagccccagaggccccccccgcccca

SEQ ID NO: 53078 - RNA, 51 nt, Homo sapiens
ccgaacgagccccagccagggaggaggagcgcgaagaagaccacagcccag

SEQ ID NO: 53079 - RNA, 66 nt, Homo sapiens
cacagccacagagagagcggggcagagacaaggaaccagaacgagcgggccgagagggcgaaagaa

SEQ ID NO: 53080 - RNA, 79 nt, Homo sapiens
cggcgaccccgcgcgcacgcggcgcgccggcgacagacacagcaccggccccggcagcgggacgcaggacggcagccgg

SEQ ID NO: 53081 - RNA, 70 nt, Homo sapiens
ggaaaaggcagccacgaagcggccccgcaacggggaggacgccagacgaggccggagcgcaggcacgggg

SEQ ID NO: 53082 - RNA, 105 nt, Homo sapiens
cgagacacggccgaaggggcgcgcggccccgccgccccagcccgccccccgggccgggaagggagacacagcgcgagcgcccaagcccggcgagcccaacaccag

SEQ ID NO: 53083 - RNA, 58 nt, Homo sapiens
accaaaccgaggcgggcccagggaagaaggacacagccaggcgcggggccacgccgaa

SEQ ID NO: 53084 - RNA, 60 nt, Homo sapiens
caaaaacaaaacgaaccaggacggcaaaaaaccagacgagagacagaagacgaaagggca

SEQ ID NO: 53085 - RNA, 86 nt, Homo sapiens
aggggccccaagagcacagaccagcagccgccaaagcgcgaacccacgggacccgagccgaggcaagaggccgaccagggacggcc

SEQ ID NO: 53086 - RNA, 46 nt, Homo sapiens
cccacccagaaccggaggaagaaagggaccgacacaagaagcagcc

SEQ ID NO: 53087 - RNA, 58 nt, Homo sapiens
cgccacccgggccccgggcacggccccccagcagggcaaggaacagcgaacgggaccc

SEQ ID NO: 53088 - RNA, 34 nt, Homo sapiens
ggacccacacccccgcagaggggaaagcggcgac

SEQ ID NO: 53089 - RNA, 79 nt, Homo sapiens
gggagaggagcgggaaacgggagggaaccagcaacaagccgaaagcaccgggaggaaagagagccacacgaagaacacg

SEQ ID NO: 53090 - RNA, 79 nt, Homo sapiens
ccacccaggaacaagagcagaaacaccaagaccggaagaccggaaccagcacacgcccgccccacgacggaggcaggcc

SEQ ID NO: 53091 - RNA, 72 nt, Homo sapiens
gcaaccccagcgcccggcagagacccgccgccacccaggggacagaagggaaagcaaggagaaagagcacaa

SEQ ID NO: 53092 - RNA, 68 nt, Homo sapiens
ccaagacagagcaccaggaaaaggccaagccacacagaaagaaaaagagcccaagacccaccgagacg

SEQ ID NO: 53093 - RNA, 75 nt, Homo sapiens
gaccaaaccgccaaaaagaaggaacaacgagagcgccccaagggagccagcgcagccacacaagcacaccacgac

SEQ ID NO: 53094 - RNA, 79 nt, Homo sapiens
agggcgagccggagagccggccgagcgaggcggcgcggccagaagcccagcccaccagggcaggagcgccagccccccg

SEQ ID NO: 53095 - RNA, 75 nt, Homo sapiens
gcggccgagacaaaggcaccaggccaccacagaaacaaaagcaacaaagaggaagacaaacagaccccagaaaga

SEQ ID NO: 53096 - RNA, 87 nt, Homo sapiens
aaaccaacgccggccggagcagcagcccgagagcgacagaacggaacccgcggggcccagcccaagcggaagacaccaccggaaaca

SEQ ID NO: 53097 - RNA, 76 nt, Homo sapiens
gagggaaggaacgaaaacaaggggggggcacgagccaaccagggaaaaaaggaagagagccaaggaacgaacaggg

SEQ ID NO: 53098 - RNA, 83 nt, Homo sapiens
ccgcgccagcggagcgaacccgagagcgggagcgggcgggccaggaaggagacccaggaagaaagggcgaaggacaccgggag

SEQ ID NO: 53099 - RNA, 70 nt, Homo sapiens
gcggaaccgagcccagcgcggacgcaggaccgaaggagaagaaggagaaggggaggagaaggcaagccgg

SEQ ID NO: 53100 - RNA, 73 nt, Homo sapiens
ggggcaccgagcaacgagggcaggaaggcacggcgcaaacggcgccgggccaggaggaggaggaagcccgcgc

SEQ ID NO: 53101 - RNA, 38 nt, Homo sapiens
ccccgagcagcgggaacagggccggggccccgggaggg

SEQ ID NO: 53102 - RNA, 85 nt, Homo sapiens
cacgccagagggcggagcgacacacgggccaaaacgagagggacgacggcccggcggaaggaacaagggacaaaccaaagaccaa

SEQ ID NO: 53103 - RNA, 56 nt, Homo sapiens
gcaaccacacacacccagacccagacagaaggcgcgggagaaaagccacccccaca

SEQ ID NO: 53104 - RNA, 52 nt, Homo sapiens
cgcagggcgcccccggggggggaaggcgcaaaaaaggaaagacccacgaccc

SEQ ID NO: 53105 - RNA, 82 nt, Homo sapiens
cccacaggggggggcaaacccgagagaacgggaacaagcacacagagacggggacggcaacaacaacaagaaacgggccagg

SEQ ID NO: 53106 - RNA, 81 nt, Homo sapiens
gccggggaagagccacgccccgcccagaccggaagaacgggaacccccgcagaaaaaggagcagcacgccaaacaagagga

SEQ ID NO: 53107 - RNA, 73 nt, Homo sapiens
aggaccggaacgggggaagcagacccgggaagcgcggaaaaagggacaaagcccggacgaggggcaggaccgg

SEQ ID NO: 53108 - RNA, 52 nt, Homo sapiens
acccgcaggcccccacagaagacagaccagccaaggaagcaacacagcagcg

SEQ ID NO: 53109 - RNA, 76 nt, Homo sapiens
cggcggcgcccgacccggcccaccaggggcggaaacgcggggacgccacaagaccgagcagggcagacaaaaagag

SEQ ID NO: 53110 - RNA, 84 nt, Homo sapiens
accccccggcgccgcgccggcggcggggagcccccgagcgcccgcgacgcagcacggacccacaacgaggccagcagccagcgc

SEQ ID NO: 53111 - RNA, 73 nt, Homo sapiens
aagaagcgagcggcgagagacgacagaagcgaagccagcagaacccgaccaggagggagccaaggcccgggga

SEQ ID NO: 53112 - RNA, 80 nt, Homo sapiens
ggccccgccgcccacccggacgccgacgaaagccagcgagccccagcccagaccaggaggaggcgggacaggagccccgc

SEQ ID NO: 53113 - RNA, 59 nt, Homo sapiens
ccagacaaccaggcaagcggaagaaccgaacacacaaagacaaagaaacagccggaaaa

SEQ ID NO: 53114 - RNA, 50 nt, Homo sapiens
gacagaccggacagcgcagcaaagcgcagcgcgcccaagaggaacagaag

SEQ ID NO: 53115 - RNA, 76 nt, Homo sapiens
ggagcaaccccccaggacgggcggaggcggggggaccggcgggcgggaggaggagcgcgaagaagaccacagccca

SEQ ID NO: 53116 - RNA, 76 nt, Homo sapiens
cggcggcaaaccggcccacagcccggccaccccccggcccgaagccccacgccagacacggccaaaagaagaccca

SEQ ID NO: 53117 - RNA, 46 nt, Homo sapiens
cgcagggcgcccccggcagccggcgggccgcagaaagagcccaggg

SEQ ID NO: 53118 - RNA, 80 nt, Homo sapiens
gagcgagggggagagagacaagcccgagagacggccacaccgggcgagcccacaccacaagcccgaaagcaggccggccc

SEQ ID NO: 53119 - RNA, 75 nt, Homo sapiens
ggggccagccccaaccaacaccgcccgggcaaggacaaccgccagaccacgaggcgaggaaccaaaggccacccc

SEQ ID NO: 53120 - RNA, 35 nt, Homo sapiens
gaaagggaagcgggcgagaggaaagcaaggaaaca

SEQ ID NO: 53121 - RNA, 36 nt, Homo sapiens
cacccccagcgggcagcagcgcggaggaaaaggccg

SEQ ID NO: 53122 - RNA, 63 nt, Homo sapiens
aaggcgaacgccgcggccaaggagccgccaaagccagacgagcgcagaaacggagggcagcag

SEQ ID NO: 53123 - RNA, 41 nt, Homo sapiens
ggagaaggaccaagaaccagaacagaagccagagagaccga

SEQ ID NO: 53124 - RNA, 74 nt, Homo sapiens
gagcgcaaaagcgaaggcaccgccaccggaaaccaggaaaagcccgacacgggaagagaagaggaggccacccg

SEQ ID NO: 53125 - RNA, 74 nt, Homo sapiens
cagcaaggacaggcgagacagcagccgcaagaaaaagccggacgagcgggagaggacaccacacaaaaaacagg

SEQ ID NO: 53126 - RNA, 51 nt, Homo sapiens
gaaccaacgggacccaacagaccaccccagaacgccaacgggcacaaagga

SEQ ID NO: 53127 - RNA, 84 nt, Homo sapiens
agcgccgcgacacaccgcacccacacgggcgagaagcccacgaggcaacacgcaaggccgccaccaggcaccggcccgaccagc

SEQ ID NO: 53128 - RNA, 88 nt, Homo sapiens
gcccgccggagcgcccggagcggccgcgagccaccgaggcccagaccggccaaggagcaaggcagcagaagacggcggcagagcagcg

SEQ ID NO: 53129 - RNA, 75 nt, Homo sapiens
accccgacaagccaggagcgcggaacccgggaccagacagccacagggaaaggaacccaaggaccgcaaagaaaa

SEQ ID NO: 53130 - RNA, 72 nt, Homo sapiens
cgaggacgggaccgaaagggggggacgggaaaacgcaccgcagccagcgccgcagaacaagaacggcaggcg

SEQ ID NO: 53131 - RNA, 75 nt, Homo sapiens
caccagagcgacgggcaggaaggagggggcgcacaaacgaggaaggggaaaaccgccgccacccaagacagcggg

SEQ ID NO: 53132 - RNA, 38 nt, Homo sapiens
ccgccgcgacggccacagacgcagccagcaaaggcccg

SEQ ID NO: 53133 - RNA, 88 nt, Homo sapiens
cggaacgcgcccccaggagggccccgccgccggccacccgcgcccgcggcgggcagggcaccgcccgccaccgggggacaccggcagg

SEQ ID NO: 53134 - RNA, 52 nt, Homo sapiens
ccgccgagcggaccccaaggcagagcagaaccccggggcacggaaagggaca

SEQ ID NO: 53135 - RNA, 74 nt, Homo sapiens
agacaggggggagacggacgaccccagcggcagcccccgacccaagacccagccaacaccaccgagagaccgac

SEQ ID NO: 53136 - RNA, 75 nt, Homo sapiens
gacgccgggaacccgccgcgcgccgcgaccccaagcaggcaaaaccaaggaggcaagagggagcaggaaaaacca

SEQ ID NO: 53137 - RNA, 81 nt, Homo sapiens
cggaacccgccagccgggaaccacacagcccgccagggccaccagggaccggccaaccccaccacggggacccccagccgg

SEQ ID NO: 53138 - RNA, 50 nt, Homo sapiens
cgagcacaagggcaccacgcaaacagggaaacaggacagcagaccacagc

SEQ ID NO: 53139 - RNA, 42 nt, Homo sapiens
agaaccccagcaaccgagaagaagcagcggccaggagaaaac

SEQ ID NO: 53140 - RNA, 82 nt, Homo sapiens
ccgaagcccccgcaggaaccacaacccaaccagaccaaggcacaggagggaagaaagcacagacgagagggagaaaggcccg

SEQ ID NO: 53141 - RNA, 121 nt, Homo sapiens
cggaggcggcgggacagagcgccgcgaccccagcgggcccggggaggcaccgacgaggagggcccagagccgggccgagggcaagaggcagcaaaccgagagcccacccggaaaggagagc

SEQ ID NO: 53142 - RNA, 71 nt, Homo sapiens
gccccagacacgaacgccagcaccgacggccagcccagaacgaaagcccggagaagaaaggcagcccagaa

SEQ ID NO: 53143 - RNA, 79 nt, Homo sapiens
ggacccgagccccagcgaccggagcaccgcgccacaccaggcaagaacccagacggacacagggaaaaaccgaccgagc

SEQ ID NO: 53144 - RNA, 56 nt, Homo sapiens
acggaacccacacgggcccccgcgagcaacagaacacgaggccagagaagaacacc

SEQ ID NO: 53145 - RNA, 85 nt, Homo sapiens
cggaggcggcggggcggcagagagcggggcggcggcaggacggacagcgcaggagaagagggccacaagcgaaggcaaaaccaaa

SEQ ID NO: 53146 - RNA, 55 nt, Homo sapiens
accaagagggacccacgaaccaccagaacccaaaggccacacggcgaccgcgggg

SEQ ID NO: 53147 - RNA, 55 nt, Homo sapiens
ggaaagaaagacgaagcagaagggaacacaagaaacgaagggaaaacacagaaca

SEQ ID NO: 53148 - RNA, 68 nt, Homo sapiens
gaggcgggagagggaggagcccagaccgggcgacccgccgagaaccagccaaaaaagggcagaaccga

SEQ ID NO: 53149 - RNA, 84 nt, Homo sapiens
acgaccgcggccggggcaggaagcgccgagcagcagccccgcgggcggggcggagaacggaaaagcaccaggaagcagagagga

SEQ ID NO: 53150 - RNA, 71 nt, Homo sapiens
gaacgagccgacgagcgaagcccccccccgggcagaggccaaccgggagcagcccgacggccaggaggcga

SEQ ID NO: 53151 - RNA, 71 nt, Homo sapiens
gcaggcacaaaaggcgcccacagccacgggaccggcgcaggcaggcgggcggaacaacacgccccggacac

SEQ ID NO: 53152 - RNA, 79 nt, Homo sapiens
ggaccccaaggaagccacggcagacacacaacccgacccgacgagcccgcgcccgggggccgccgcccggccgcccgcc

SEQ ID NO: 53153 - RNA, 77 nt, Homo sapiens
gggacgggcccgcggcgagcgagcccgagaaccagggggaaggccccgggcagccgagcgccagggaaacaacccac

SEQ ID NO: 53154 - RNA, 71 nt, Homo sapiens
cgcaaggagaaacccaagagcagcggcagaacagcgcgagccacaaggcaaggaagcaggcggcaccaccc

SEQ ID NO: 53155 - RNA, 88 nt, Homo sapiens
agaaggccacaagcggcagccaacgaccccgacacagcccaaggacgggaggagcccccaccgagccgagcccacgggccggcgcggg

SEQ ID NO: 53156 - RNA, 68 nt, Homo sapiens
gggcccgaccgcggggacccgaaagcgcaaagccgacgaggagagaccccgcagcggacaagacagaa

SEQ ID NO: 53157 - RNA, 52 nt, Homo sapiens
cagcagagcggggcggccacaagcaaagagggaacaggcacgccccacccgc

SEQ ID NO: 53158 - RNA, 75 nt, Homo sapiens
gagagggcacacgagaggccccaggacaaaggacgaacaacaagacggccgaagggcaccgaaacagaaacagcc

SEQ ID NO: 53159 - RNA, 55 nt, Homo sapiens
ggaaccgccagcaaaccacacagggacggaaaaggcgcacacgacccggagaacc

SEQ ID NO: 53160 - RNA, 72 nt, Homo sapiens
agcacagccggcgacggcgcgggcgacaacccggaaaccacaaaaggaaggaccaaagaaagaccagcggag

SEQ ID NO: 53161 - RNA, 64 nt, Homo sapiens
caccaagaacagcgagcaggcgcgcagccaccggagaaggcgcagccggagccaaccgccaacc

SEQ ID NO: 53162 - RNA, 53 nt, Homo sapiens
caggaaggaaaaggaaacagacagggcccgaaagacgcacgaagagacaacaa

SEQ ID NO: 53163 - RNA, 82 nt, Homo sapiens
cgccgagcggaggaggaggaggaggcgaggaggagagacgcggacccagaccgcggggaagcacggacgaaccaacacccga

SEQ ID NO: 53164 - RNA, 94 nt, Homo sapiens
gaacccaggacgccgccacagagcaaaaggagggagcgaacaaggagcggggaggagaaagagggaaccccccacaacagcagaggccacacag

SEQ ID NO: 53165 - RNA, 49 nt, Homo sapiens
cgaccacgcaaaggagcggagacagggaacgcgcgggcacgggggcagc

SEQ ID NO: 53166 - RNA, 77 nt, Homo sapiens
cgggccgagaaggcgacaggcaacggaaggccaagaggggaagagggaccccgaaacccagacacaagaaggccaag

SEQ ID NO: 53167 - RNA, 70 nt, Homo sapiens
ggcagccgaggccgggaaccagcgaggcaaaaaacgggaagccaccagggaggacagccaagaaacccag

SEQ ID NO: 53168 - RNA, 70 nt, Homo sapiens
cgggccgcaggcggggaccagaggaaccccaggcacacgacggagcgagcgccaaccagggcggaggccg

SEQ ID NO: 53169 - RNA, 63 nt, Homo sapiens
ccacggccacgccccccgcaacaacccacaagcacagagagaccaaaacaaccacgaaaaaaa

SEQ ID NO: 53170 - RNA, 65 nt, Homo sapiens
gcccccgggagcgggcgcccagagaagacgaccccgacgcaggccaggagccgcggacagaagcc

SEQ ID NO: 53171 - RNA, 70 nt, Homo sapiens
caaccaagagcgaaggccgagagcccaggacagagagaggcagaagaaaaagcacccccaagcgagagag

SEQ ID NO: 53172 - RNA, 76 nt, Homo sapiens
acacaaagacgaacaaagacggcaacgcgcacagcgcagagaaccccacagcccgcgaagccagccccaaaccgca

SEQ ID NO: 53173 - RNA, 73 nt, Homo sapiens
gaagaaaaacgaagacccggaagcaccacagcaaacaacaagcagccacccaggagacggaagcggaagcaca

SEQ ID NO: 53174 - RNA, 77 nt, Homo sapiens
aaccgggccaggggaaccagaagacaaaccccaagaaaggacgagagagaggacgaggaccaggggaggaggagcag

SEQ ID NO: 53175 - RNA, 80 nt, Homo sapiens
agcaaaggcagccgagcccgaagaacaacagaagaagaaagcgaaggagcgacgcgggcaggaacgcccaggagaaagag

SEQ ID NO: 53176 - RNA, 83 nt, Homo sapiens
accgccgacccgcccaccacgccagcagcgcgacggcagaccccgccccccgaggcgcagcccgaacccagcagccacacgcc

SEQ ID NO: 53177 - RNA, 64 nt, Homo sapiens
agggcacgaaaagaccgagggaaggaccacgacacagcaccgcccgaccggcagaccgggagaa

SEQ ID NO: 53178 - RNA, 75 nt, Homo sapiens
gggagcaagaagaacacccagaggcagccaccggcaggggagcgcagcggccagggcaggacgagaccccaccca

SEQ ID NO: 53179 - RNA, 59 nt, Homo sapiens
cagagcgagccacacacggggaaggcaacaaaaggaccagggccacagggcgccaagag

SEQ ID NO: 53180 - RNA, 82 nt, Homo sapiens
aaagcaaacacgaggccacggggaaacacagcagaacacagccagacagacacagcacagcagccacgaagagcaaagcaag

SEQ ID NO: 53181 - RNA, 48 nt, Homo sapiens
cgccgagagacccaagaaacagacgacccggagacgcggaggcaggca

SEQ ID NO: 53182 - RNA, 86 nt, Homo sapiens
ggcgcgaggacagcgcggcccgcgaggagccgccgcgcgcccgcgcccccgcgcgacgccagcgcaccccccggaggcggccgagc

SEQ ID NO: 53183 - RNA, 71 nt, Homo sapiens
acaggacgggccaccacgcaaagagcaaagaaacaggccacaggggcacacaaaggaacagaaaacaacac

SEQ ID NO: 53184 - RNA, 96 nt, Homo sapiens
gagcgggcaccaccggaaccgccgggggccggggaaaagggcggaaagaacgcaggcggggaaccagcacccccacccccggccacaggcagagcc

SEQ ID NO: 53185 - RNA, 72 nt, Homo sapiens
gaacgcacagagcagccaaggaggagcaaaaaggacagagcacagagccagcacaggaaggagacgacgagg

SEQ ID NO: 53186 - RNA, 67 nt, Homo sapiens
gagcaagacgaagcgaacaagcagaaggcaaaccgacaccagcgacacaagcgcgagggaaccacag

SEQ ID NO: 53187 - RNA, 78 nt, Homo sapiens
gagaggcaaagacaccggcagagaaccaaagcagaagcggaggaagcccggagacaaggaccgcccaagggacgggcc

SEQ ID NO: 53188 - RNA, 89 nt, Homo sapiens
ggcagggaggcacaaaggggaacacaggggaccaaaagaacccagccaacccgcagagggaggggaggggcgagcggaggagagcgggg

SEQ ID NO: 53189 - RNA, 76 nt, Homo sapiens
gaagaaggggaggggacagacggggccacccccacacgcccccagccaaacagacgaaaaagagccacgcccccac

SEQ ID NO: 53190 - RNA, 73 nt, Homo sapiens
gcgcggcaagcagcggccggagccagccgacaccgcgcccagaacccagcgcgccaacaaccgccagggaaca

SEQ ID NO: 53191 - RNA, 77 nt, Homo sapiens
agcacaacaacaaaagaaaacaccaccggaccacgaccaggcagaaccacagggagagaaaaaacaaggacacagcg

SEQ ID NO: 53192 - RNA, 83 nt, Homo sapiens
gaagagacaacacacaacagaagacaaggagcagggcgccaagcaggaccgaccaacagaggggggagaagggaggaagcccc

SEQ ID NO: 53193 - RNA, 102 nt, Homo sapiens
cagacagaagggaggcaaagaaaaggagaaaagaagccaaagggacacgccaagccagcagacggggccagcaagcacaccaagagcaaggaaagacggcaa

SEQ ID NO: 53194 - RNA, 72 nt, Homo sapiens
cagcaggaccagacacgaggacgggcaggcccaggcgggacgccgaagggggaagaagaccccgagagaccc

SEQ ID NO: 53195 - RNA, 74 nt, Homo sapiens
ggccggcagcgcccggacgaggagcgacagccaaagggaaccaaccaaaccagaacacagcgcaacaagccaca

SEQ ID NO: 53196 - RNA, 40 nt, Homo sapiens
gggaggaggggcaggcccggcgggcaggagaaacccagcg

SEQ ID NO: 53197 - RNA, 38 nt, Homo sapiens
acgaccgccgcccgcgggaccaggaccccagcccacac

SEQ ID NO: 53198 - RNA, 116 nt, Homo sapiens
aacagacagcggccccgcggggcccccaaccccagaaccccaccaggcaaggccccacccagaacaacgcaaacgcccacacagcaagcacgggcagaagaaggaacggaaaaagc

SEQ ID NO: 53199 - RNA, 79 nt, Homo sapiens
ggggacccgacggacacaacggcagaccgcagaacacccagccaggacccaagcaccagccgccgccacaccccccccc

SEQ ID NO: 53200 - RNA, 70 nt, Homo sapiens
ggaagagacgaccggagggagaaagaacagaggaaccaggcgcaggcagaacaagaagggcaaccagggg

SEQ ID NO: 53201 - RNA, 69 nt, Homo sapiens
gccacggcgcgagcccagaggaaccaaggaagagaaaccaggcgcacccgacccaaaccggagcaacaa

SEQ ID NO: 53202 - RNA, 78 nt, Homo sapiens
cgcggcgcagggcgcgggacacaaccgcagaaaggaagagaggggggcggaagcgaggaagaccaagacacccaggag

SEQ ID NO: 53203 - RNA, 75 nt, Homo sapiens
aaaggagacaagacaaaaacaccccagaaacagagaggaagaagccaagccaagagacagcgcccccacagcgaa

SEQ ID NO: 53204 - RNA, 84 nt, Homo sapiens
gcacacccaagacgcggcaacagggccacacggcagccccagccccagcaggagcgggacaccccagggagaaggaggcgcaag

SEQ ID NO: 53205 - RNA, 82 nt, Homo sapiens
accgaacccaagccccgaacgaagggccaagaaggagaagcagcgcggaaaagcagaagggacagcacacccgacagccagg

SEQ ID NO: 53206 - RNA, 80 nt, Homo sapiens
gccaggggcggaaacgaacaaccaagcggagggcagaagaagacagccagaacagcaagcgaggaccaccgcccgacccg

SEQ ID NO: 53207 - RNA, 76 nt, Homo sapiens
gaacaaacccaaggaagaagaggaaggcgggggaagcgggccaggaaccagcccggcagaaggccaccaggcacga

SEQ ID NO: 53208 - RNA, 79 nt, Homo sapiens
aagaggaacagccaggaccaagcgaaaaacagaaaaccagaaggcaccgacaggaaaggaaaaggagaaccaggcaccc

SEQ ID NO: 53209 - RNA, 61 nt, Homo sapiens
caagcgggcaagacaaaggcaggacggagcccgcgcgcggcgccaccagcggcagaaggcg

SEQ ID NO: 53210 - RNA, 86 nt, Homo sapiens
cagccgcggcggcagcagcaggagaggcccaccagcgagcagcccgcgcacaagcaaccagcgacgggggagaagacgcaccagcc

SEQ ID NO: 53211 - RNA, 79 nt, Homo sapiens
cagaccacaagaccagcaagcccaggcgggcacacggacagccagcagcacccaggacagacgagccagcgcagcagcc

SEQ ID NO: 53212 - RNA, 82 nt, Homo sapiens
gacaggcccgaaaaaaacccaggcggcccagggagaccaggcaccggagagagaagcggccagcggaaaggccacaaccgcg

SEQ ID NO: 53213 - RNA, 80 nt, Homo sapiens
ccccaccaccaccacagcagcggcgggccaccgacccccagacgacagaaagagaccgaccaccgggaggccgaggccac

SEQ ID NO: 53214 - RNA, 64 nt, Homo sapiens
ccgacagccgcaaaacgaggaacacccgcccgacagaggcggggagaaggaggaagagacagcc

SEQ ID NO: 53215 - RNA, 72 nt, Homo sapiens
gccccgggggccggagccaaccaaccccagggaggcaaacagaaaagcggcacgggggccagggcgggagca

SEQ ID NO: 53216 - RNA, 76 nt, Homo sapiens
caagggccgaccccacagggaggccagggaggagcggaggacggcagacccgcaaaggccggacaccagaaggcca

SEQ ID NO: 53217 - RNA, 79 nt, Homo sapiens
cacgaacacccaaagccaaaacgggcaaccaaagcgggcaagcagaagacagcaaagaggaggaccgaagccaagaccc

SEQ ID NO: 53218 - RNA, 68 nt, Homo sapiens
ggaaagcacgcgcacagaggaaaacgggccacaacacaacccccacaccagaggaccgccaccaggcc

SEQ ID NO: 53219 - RNA, 35 nt, Homo sapiens
ccgacagccgcagaacaggagccgcgcacccaggc

SEQ ID NO: 53220 - RNA, 88 nt, Homo sapiens
gcagcccaccgagcccccgcgagcagcccagccagcagcacaaaggaggacggggcaaggagacaaaagaaagggaccgggcagggaa

SEQ ID NO: 53221 - RNA, 80 nt, Homo sapiens
gcgggaagcaggacgcgccgcgccccaagacaggaggccccgaccacccccagaaagcccaacggacccagagacaccga

SEQ ID NO: 53222 - RNA, 73 nt, Homo sapiens
gagcgaaagaaggcgcgaaaagaaacagaaaggaaaggggcccagacggaagagcgcccgacgacgagcgaga

SEQ ID NO: 53223 - RNA, 68 nt, Homo sapiens
caacgggcaggaaggaaggaaggcaaagacgagagcggaaaaagacaagggaggcgaggacggacaaa

SEQ ID NO: 53224 - RNA, 92 nt, Homo sapiens
cggaccgcggcagaagaaagcaagacccaggacaccccgaagccgagaaaggccgcagccaagccggaacaggagcggcgagcccaaacgca

SEQ ID NO: 53225 - RNA, 79 nt, Homo sapiens
cacagaggccggaggggaaagcgcacagaagaggagaaaggaaccgggaaaccccgaaaggagagcaccgagcgaagaa

SEQ ID NO: 53226 - RNA, 63 nt, Homo sapiens
cagggaagcggcgcacgcaggaagcaaaaaaggaagaggcagggcaaggcaaaagcccacaga

SEQ ID NO: 53227 - RNA, 78 nt, Homo sapiens
caccaggcggcgcccccgcagcccgcacccacccacgacaggacggacccggccgacgacagaagagggacaccagcc

SEQ ID NO: 53228 - RNA, 50 nt, Homo sapiens
gaaggaccaagaaccaggacaagccacacaagaaggagaaaaaaaagaga

SEQ ID NO: 53229 - RNA, 83 nt, Homo sapiens
agagcaagggcccaaggcccagaagacagaaggaagccggccacagggggaagaagggaagccagcagagccacagcccacac

SEQ ID NO: 53230 - RNA, 77 nt, Homo sapiens
cggcccggaggaggccagcgggacaagcgggcggagaacggaaaagcaccaggaagcagagaggaccgcagaaggga

SEQ ID NO: 53231 - RNA, 68 nt, Homo sapiens
aagaaacgaaaacagggggagaccggaagacagcaaccggcccagcgaggaaggaccaagcggaccac

SEQ ID NO: 53232 - RNA, 65 nt, Homo sapiens
cacacccgagagagcgaaagcacagcaaagcagggcagcggacaacgagccggggaaaaccccag

SEQ ID NO: 53233 - RNA, 69 nt, Homo sapiens
ggagggcgggaagaagcgagagccaaggcacccacagaggcaacgaaagcacaaaagaaagggccaccc

SEQ ID NO: 53234 - RNA, 74 nt, Homo sapiens
cggcagcggagagccgagcccaaggcaagacccaaggcgacgaccgacaggggggaaagcgacacacgagaagg

SEQ ID NO: 53235 - RNA, 71 nt, Homo sapiens
aagaggcgggagagggaggagcccagaccgggcgacccgccgcacccaaaggccccacgggacagcccacc

SEQ ID NO: 53236 - RNA, 83 nt, Homo sapiens
gggcacacccccgcagagacgcaccccgcggagcgcaaagccgaaaaacagcagcagaggaaagaaaagaccagagcaaggga

SEQ ID NO: 53237 - RNA, 74 nt, Homo sapiens
ccccccacagccccgcgccgccgaccccccggcgccgcgccggcggcgccggaaccaaaaagaagccccagagc

SEQ ID NO: 53238 - RNA, 52 nt, Homo sapiens
ggccgcgagcagcggacgccggccgccgcaggaggaagacccgaacccaccc

SEQ ID NO: 53239 - RNA, 61 nt, Homo sapiens
caagacggccccaggccagggacaagagaaaaaaagggcgggcgaacaaaaagagcagagg

SEQ ID NO: 53240 - RNA, 75 nt, Homo sapiens
cgcgccccgcaccagagcggggcaccgagccggaccacaggcaaacgagagaccggaacacaggaaagaaaaagc

SEQ ID NO: 53241 - RNA, 84 nt, Homo sapiens
cggcagaacacagcagggcggaggaaaggcagccccccagggcagggacgaggccggaaggggccagacgcgggaccgccacac

SEQ ID NO: 53242 - RNA, 59 nt, Homo sapiens
aggaccggggaaccgccaaagcccgggcgcggaagaagccaaggacaaaccggcgacca

SEQ ID NO: 53243 - RNA, 74 nt, Homo sapiens
cgccgcggccccaacgcgccccgggacgcacacggcaccaaacgcgggaaaacggcacaaggcgacgagggagg

SEQ ID NO: 53244 - RNA, 74 nt, Homo sapiens
agaagccaagaagcaaaaaagggacgcaagaagaaccaccaggaaaagaacgcacgggccaccccccaccacgg

SEQ ID NO: 53245 - RNA, 63 nt, Homo sapiens
ccggaggagggcggcccgccggcgaggcccgagagagaaagggaaagaaggagcggagcagaa

SEQ ID NO: 53246 - RNA, 71 nt, Homo sapiens
agcccaagccggaacagccaacaaagagagcaagaaggccacggccaacagccgaaaacagcaaggagaaa

SEQ ID NO: 53247 - RNA, 81 nt, Homo sapiens
ccagcccgaggcagaccgcacaaccgacaccagccaggagacgccgcaaggggcccgacagcgcgcaggaaacaggccaag

SEQ ID NO: 53248 - RNA, 50 nt, Homo sapiens
cgacagaagcaccgagacccaagaaagggccggcccagggagaacgcaaa

SEQ ID NO: 53249 - RNA, 83 nt, Homo sapiens
cgaggcccagagagaccccagaagaaacgaaggaggcccaaccacaaaaggagccgacggaacccagacggagaacaaaagga

SEQ ID NO: 53250 - RNA, 60 nt, Homo sapiens
agccgggaaagggacaagaagggcaaagccgaagggagaagcccgagcggacaacaggcg

SEQ ID NO: 53251 - RNA, 83 nt, Homo sapiens
gggcccggacagaagagggcagaagaaaccagccgaaccagggccaccgcgcaaggggccaaaccaggcccgccaccccggcg

SEQ ID NO: 53252 - RNA, 73 nt, Homo sapiens
gaaaaaacccaagaagccagggcaaggagcggagcgcaagaagaaggccgggggcacgccgcacgcaagaaga

SEQ ID NO: 53253 - RNA, 70 nt, Homo sapiens
acagaaggagggacagcccagccccgaacagcagagaagggacacagcgcagaaacagggggcagagcgc

SEQ ID NO: 53254 - RNA, 62 nt, Homo sapiens
cggggaacaggagcacgaagcagaccacagcgggaagcaacagccacggggccaagcgggag

SEQ ID NO: 53255 - RNA, 76 nt, Homo sapiens
ggaaagaagaagaccagcagcgaaaacggaaacacaagagaccagaggggaggcaaaccggagagaagacagaaca

SEQ ID NO: 53256 - RNA, 72 nt, Homo sapiens
cggcggcgcggcggcggggacgagaccggagaccggagaggccgagagacccgcgaacgagcacaagggcac

SEQ ID NO: 53257 - RNA, 58 nt, Homo sapiens
gggaccgccggcaaggggacagcaccgccagggagaaagagcgacgcgccacgccggc

SEQ ID NO: 53258 - RNA, 58 nt, Homo sapiens
cagaggacaacgaaggcggccaccgggagcaggagagggccagaagacaaagggccag

SEQ ID NO: 53259 - RNA, 82 nt, Homo sapiens
ggaaggaacagcccccccagccggaaacggccaagaagcggaaagagaccagagcagcacccgacaggagagacggagggaa

SEQ ID NO: 53260 - RNA, 58 nt, Homo sapiens
gcggccgcccgggccgggccccaccggacggacacaggaaagggaagcgcccaacacc

SEQ ID NO: 53261 - RNA, 75 nt, Homo sapiens
aggacaagcaaggaccgcaggacccaggccagaccggagcagcggggacaggacagaagacggaagaaacggagc

SEQ ID NO: 53262 - RNA, 79 nt, Homo sapiens
cggggcaggagacggccgagaggcaagaagccagccaggaggcgcgcagcagggggcaggccgcgccacacaggggaga

SEQ ID NO: 53263 - RNA, 68 nt, Homo sapiens
ggaggcaagagccccggaccgacccacgggaccggaagggaccaccagaaggacaaaaaccgagcgga

SEQ ID NO: 53264 - RNA, 45 nt, Homo sapiens
caagccgagccgccacccggcgcagggaccaaccagcaggcagcc

SEQ ID NO: 53265 - RNA, 41 nt, Homo sapiens
caaagcggagagaaaggcggcgccgaggaagagcagaagga

SEQ ID NO: 53266 - RNA, 59 nt, Homo sapiens
acggacagagagacacaggggcccaagaaccagcgggaaccgggaaagagaaaagggaa

SEQ ID NO: 53267 - RNA, 64 nt, Homo sapiens
agcccccaagagcgagacacagagcaaggaagcccaacagaagcgcgggaaaccaggagaaaaa

SEQ ID NO: 53268 - RNA, 83 nt, Homo sapiens
agcagcacgcaaagacaaaccaggccgggcaaggaggagagaaagaacccacgcaggacgacagaagaggccggacaagagaa

SEQ ID NO: 53269 - RNA, 72 nt, Homo sapiens
cccgagagagaaggggccgcccagagcgccccggccagcgcgcagaggcaggagccagccgagacagaaaca

SEQ ID NO: 53270 - RNA, 53 nt, Homo sapiens
gcccgggccgcgcccgaggagaaggccacagcagggagcaaagaacgaacgag

SEQ ID NO: 53271 - RNA, 61 nt, Homo sapiens
agggaccaaaagacgaccaaaaacaccacgaccaagaaagccaaaagaccgcagccgggag

SEQ ID NO: 53272 - RNA, 65 nt, Homo sapiens
cccaggcgccagcagggccaaccgcagaggccgacgggaaggacaggacaacaacaccccacaca

SEQ ID NO: 53273 - RNA, 79 nt, Homo sapiens
gacgcagccccaagaaagacgaggcggagaaacaccaacaggaacagaaaggcagccgccgcaaagggacgacgaaggg

SEQ ID NO: 53274 - RNA, 70 nt, Homo sapiens
ggcgcaacaacacaaaaaaagcagcaaggggaccaagaaaggcccagggaccaaagcccggacaaggccc

SEQ ID NO: 53275 - RNA, 71 nt, Homo sapiens
aggaccgacaggagagaacacaacagggaaggagaacagagggaaaaagaccagagaaagggggggaggaa

SEQ ID NO: 53276 - RNA, 76 nt, Homo sapiens
gcagggccacgagcaccgcgccggcccagcaccccgagaaccgcaggagccagaggcgaccaacgacgaagagcag

SEQ ID NO: 53277 - RNA, 61 nt, Homo sapiens
cacgccacgccccaggacagacccgccgccacccacgacacccagcgcagccagcagcaca

SEQ ID NO: 53278 - RNA, 72 nt, Homo sapiens
gggaaaaggccaggcaggcgcacaaacccaaccaggaaagcccggcccaggcccccgacaagccccgcgggc

SEQ ID NO: 53279 - RNA, 85 nt, Homo sapiens
gcagagacgcgaaggagaggcccagaacccaaacacccggaagacagcaaaaggcaggagccaggaaaccgcagcaccaaaacca

SEQ ID NO: 53280 - RNA, 75 nt, Homo sapiens
cccaccgccgacgcccccagccaccagagccgggccacggggggcgggccaggggcccggacagcagagcggggc

SEQ ID NO: 53281 - RNA, 68 nt, Homo sapiens
cgccacgcgcggaaggcagcgcccagcagcgcagggggcggggaagagacacagaagggaggcgagca

SEQ ID NO: 53282 - RNA, 87 nt, Homo sapiens
cgcgggcgcgcagacccagcgaccgggcagcggaaggggaggcgccggaccgaaggcgcgaccacgacgagaagcgggggccgcagc

SEQ ID NO: 53283 - RNA, 78 nt, Homo sapiens
ggccgagcagacccagaagaaccagcgcagccccggcgcccgcccgccgcgccccaccccggccaggaggcaccgcgg

SEQ ID NO: 53284 - RNA, 81 nt, Homo sapiens
cggagcggggacccaggagccggccagcgcgccggagccgccgaggcacacggaacaagagcgaaacaccagacagaaggg

SEQ ID NO: 53285 - RNA, 68 nt, Homo sapiens
cccgagcgcgccccaagcccgggcgccaccgcgccaccccgcgagcccccccccaaccccaaaccccc

SEQ ID NO: 53286 - RNA, 73 nt, Homo sapiens
agagagggaaaaaacaaccccgccgaggacggagaagcaacaccaaaacggaacaagccccaaggggcgacag

SEQ ID NO: 53287 - RNA, 66 nt, Homo sapiens
cggcggcggcggcccagcgccaagagcccgggcaacccagggggcaggacgaccagcgggaggcca

SEQ ID NO: 53288 - RNA, 66 nt, Homo sapiens
ggaaacgaccggcagggagggaaggcaagagccaacccaaaaccaacgggaggcaaccgcggggga

SEQ ID NO: 53289 - RNA, 73 nt, Homo sapiens
aaaagaaacaccgaaccgccacccaggcccaagaagacccaagcagaaaagcagcaacgcgaagagaaagaca

SEQ ID NO: 53290 - RNA, 58 nt, Homo sapiens
gggacaggccggacacgccaacaaggcacccgggaagaaaaggggacaagccacaaga

SEQ ID NO: 53291 - RNA, 91 nt, Homo sapiens
gggagggggggaccacgaaaggagcaagagcaagacaccggacaccgagggccacacagggacgaaaacccgcggcgagcgcgcagaagga

SEQ ID NO: 53292 - RNA, 83 nt, Homo sapiens
gacggcggcagccaccgccgagccccagcggaggagaccggcaacaggaacagccggggacaacgggacgaaggaacgcccac

SEQ ID NO: 53293 - RNA, 79 nt, Homo sapiens
cgggagaaagggggaaccagaccgaagggcgaccaccacaacgccgcggacgaccgcacgggcaggcacgggagcgcgg

SEQ ID NO: 53294 - RNA, 81 nt, Homo sapiens
acgaaaggaggaggaaccggagaccccgaaaacggaagcgcagggagaaggaagaggggaaaagggcacaaaaccgcccca

SEQ ID NO: 53295 - RNA, 60 nt, Homo sapiens
ccaggcgaagcggccgagcaggcgagcgaacgacgcgagggagaccacaaaaggccccag

SEQ ID NO: 53296 - RNA, 76 nt, Homo sapiens
aggaccaagaaccaggccagggcaggacagcagcccgcaacaggccggccagccccccacaaccaccgcaccagcc

SEQ ID NO: 53297 - RNA, 80 nt, Homo sapiens
aaggggcacgcagaaggaccggccacggcgcgcccaagccccacgacacccaaccccaccagcccggccgaccaagaggg

SEQ ID NO: 53298 - RNA, 68 nt, Homo sapiens
aggacgagaaccagggcaagggacacagagaggaacagacgggacaaagcaggcacggcagacacacc

SEQ ID NO: 53299 - RNA, 83 nt, Homo sapiens
caggcgccaccacagaccagagcccgcacggaaagccacgccacaaccggacaggcagcaagggcccaccagccgagcagaca

SEQ ID NO: 53300 - RNA, 76 nt, Homo sapiens
acgcagcggggggacacacgcgaccggcgaggcccaccaagccaggacggaaggccacacaaaagaacacgaaaga

SEQ ID NO: 53301 - RNA, 84 nt, Homo sapiens
cagaacggacaaggccgagcccgggggcgagggaacccaagaacacaccgcgcaagccccaccggcgaccagacgaggggagac

SEQ ID NO: 53302 - RNA, 75 nt, Homo sapiens
ccggcgcggcccgcagccaggcaggggacacaggcgaggcggacacccgggccgcacaggggaggcaagcagggg

SEQ ID NO: 53303 - RNA, 79 nt, Homo sapiens
cgccacccacccgaaggacaagcgcgggacccgcagagggccgcaggccacacccacgcaaccagccagccccgccgaa

SEQ ID NO: 53304 - RNA, 71 nt, Homo sapiens
gccagacccaggaccgcgacacacacgggggaccgcggcgggagcggggcaaacaccgggcaccaacccca

SEQ ID NO: 53305 - RNA, 64 nt, Homo sapiens
ccaacaccaacgagaccacaccagccccacgcggagcacagaccagccaagaaaacgaaaagag

SEQ ID NO: 53306 - RNA, 77 nt, Homo sapiens
gaacgcaggacggccgcggcaccgaaccacaaggaggacgagaagcacccaagccagggagcggcaaaagcaaaagg

SEQ ID NO: 53307 - RNA, 83 nt, Homo sapiens
ccggcggcggcgagccgcgcgcgcagccgacgcgggaagaagcgggcgcgggcagagcgagccacccccggcgcccgcgggcc

SEQ ID NO: 53308 - RNA, 79 nt, Homo sapiens
gggagagccacggagaagaagcgcggcccacacacccagccgggacgcaggagcgcggcgcaagcccccccgggccagg

SEQ ID NO: 53309 - RNA, 84 nt, Homo sapiens
agaccaggcagcgcgccgacagccaggaccagggagaaccagcccagccggacacgggcccaacagcgagcccaccagggccac

SEQ ID NO: 53310 - RNA, 59 nt, Homo sapiens
ccagggcccggccgaagcaagaacaaggcagagccagagcccaagcccccgcagggagc

SEQ ID NO: 53311 - RNA, 80 nt, Homo sapiens
cgacaccaccgcagcgacgagcagggcaagcgccgccgcgcggccgccccagagcgcggccgggagagcgggcgccacgg

SEQ ID NO: 53312 - RNA, 47 nt, Homo sapiens
cgccagcggccagcgcagcggcggaagaggcggccagcggcagcggg

SEQ ID NO: 53313 - RNA, 77 nt, Homo sapiens
cgccccaggccaagagggacccacccggcgaagccaagcaccccacccggagacgccgagaaaaacagagaggacca

SEQ ID NO: 53314 - RNA, 64 nt, Homo sapiens
agcaagggagcaaagacaacagcagccaggaacacaaagagacaagagagacaccccaaccgac

SEQ ID NO: 53315 - RNA, 69 nt, Homo sapiens
cacaccaggaacccccggagaaagggacaaagcaaggaccaaccccaaaggggaaggccaaagcccagg

SEQ ID NO: 53316 - RNA, 81 nt, Homo sapiens
caaaccaagagagcgcacacaccaacaccaggcacacagggcagaccaaccacggagggaaggaagcaagaaacagggagg

SEQ ID NO: 53317 - RNA, 80 nt, Homo sapiens
aaacgaggaaaccgggaaagccaccgaaaagaagaaacaggacgagaagaggccccccaaaggacacaggacagaccgag

SEQ ID NO: 53318 - RNA, 74 nt, Homo sapiens
ccaggaccagaggccgccacaaccgccagacaaccggagccacgccccacgaccgccagaggagcacgcgccag

SEQ ID NO: 53319 - RNA, 57 nt, Homo sapiens
cgaccccagcccggacacccacaaaagcgaaaagccagacaggaacaccagacagaa

SEQ ID NO: 53320 - RNA, 82 nt, Homo sapiens
ggagagcgagggacgagaccgccggccgcagggagggcagaggccaccaggggggagaagggcgcggcccgggcacgcggag

SEQ ID NO: 53321 - RNA, 69 nt, Homo sapiens
cccggccaaggcgcaacagaacagacccgacccagacacgaagcgagaggcgagaagaagcaggaaaaa

SEQ ID NO: 53322 - RNA, 47 nt, Homo sapiens
aaaaccccccagaaagaggccaaagcaagagaaaacccggcaaccaa

SEQ ID NO: 53323 - RNA, 73 nt, Homo sapiens
acaagccccacgacagaccacgacaagagcacaaccccggaccaaagggacggcagcagacagcaccacaacc

SEQ ID NO: 53324 - RNA, 70 nt, Homo sapiens
gagcccccgagcagcacaagcaggccagaacagggacgggggcaacaccacgacgcaaagcaaggaaagg

SEQ ID NO: 53325 - RNA, 73 nt, Homo sapiens
ccggcagacggccagggaaggacgaaccaagccaacggaaaggcaccgagcagaaaagaacacagcggggcag

SEQ ID NO: 53326 - RNA, 54 nt, Homo sapiens
acggaaggagggaaaagggagaaggggcggagaagaggaccagcgaggaaccaa

SEQ ID NO: 53327 - RNA, 84 nt, Homo sapiens
cccgccccagggccccggcccagacagcggcggacccccagggcagccccgagggcagagcgccccagcgccaccgccggaccc

SEQ ID NO: 53328 - RNA, 73 nt, Homo sapiens
caggcggcggaacggaacagaagcaaggccggagcagaaaggaaaaaacaggcgcgcagcgacagcgagacac

SEQ ID NO: 53329 - RNA, 52 nt, Homo sapiens
gcaccgcgccaaagggaaccgaccacagccagaccaagggccaaacagaaga

SEQ ID NO: 53330 - RNA, 78 nt, Homo sapiens
agcagccgccagccccacggacggacgccagccccacaacaaccgggaccgggagaaggcggagccccccgggccggg

SEQ ID NO: 53331 - RNA, 73 nt, Homo sapiens
ggcgggcagaggagccagaagggggaagcccaagaacgaggaaccccagagaggacagaagccaaccaggcag

SEQ ID NO: 53332 - RNA, 110 nt, Homo sapiens
cggaggcaaaggaggcgccgggccccgcccaggacccgacggggaagccaggagcagaacggaacgagacgcgaaagggcggggaccagggaagaggggaccggacacgc

SEQ ID NO: 53333 - RNA, 72 nt, Homo sapiens
aaggcccgggacaggcaagaagcagaaaggccaaacgaaaagccaaagcaagcagcgccagggcaaggcggg

SEQ ID NO: 53334 - RNA, 108 nt, Homo sapiens
gaacagaacccgggaggggaaccagcaccgcagcaaccacccagaaacccccccagacgaagcaaagcgagaggagaaggagcgagcgagcggccagcaacagccacc

SEQ ID NO: 53335 - RNA, 80 nt, Homo sapiens
aagaccgaaggacaagacagcccaccgaggaagaccaaaggaccaaccaacaagaagcacaggccgagccagacacaaga

SEQ ID NO: 53336 - RNA, 82 nt, Homo sapiens
caggccggagcggcccagaccccgcccgcgggagcgggcaggacaccagaggaccagaacccacgagaaacagacgagccaa

SEQ ID NO: 53337 - RNA, 38 nt, Homo sapiens
acaggaacggaaaaaacaggcgaccaacgacgaagagc

SEQ ID NO: 53338 - RNA, 72 nt, Homo sapiens
aagcaaaccaagcgcgggggaagaagagaaagaaaaccagaacagcgaaaaagagagcagcgaggaaggagc

SEQ ID NO: 53339 - RNA, 73 nt, Homo sapiens
aaaacaagacggggcgccccacagaggggcgacgaccgagccagaggacggagagagggagccagggaagccc

SEQ ID NO: 53340 - RNA, 83 nt, Homo sapiens
gggaccagggaaggaagggacggggcagaaacagaagaagcgcagaagagaagcacgaaaacgcaggacagagaacgagagga

SEQ ID NO: 53341 - RNA, 70 nt, Homo sapiens
cccccacggcgaagccagcggacgggcagggcccagaacagaaccgcaagcaaaaaagaggcgaagggcg

SEQ ID NO: 53342 - RNA, 84 nt, Homo sapiens
gcccaagagggcgacagacggcaaacgagcaaccaaaacagcagccgagagccaagggcaaggcccccgggcggggcgagcaag

SEQ ID NO: 53343 - RNA, 74 nt, Homo sapiens
aaacacaggaacaaaagaaggaaaacgaagacgaacaacgaagaaagacaggacacgaggaggggacggcccgc

SEQ ID NO: 53344 - RNA, 52 nt, Homo sapiens
gcagacgcggacgggagggaaaaccagggcaacaggaaaacaagggaaagag

SEQ ID NO: 53345 - RNA, 75 nt, Homo sapiens
ggacaccccacgcacccacagagcccggaaaggcccagccgcagcgacggaggcgcaccgcccagagcagaccca

SEQ ID NO: 53346 - RNA, 109 nt, Homo sapiens
gaaccacacacccagacaaaggaaggagagccccgaaaaagacaacagaccaaagaaacaacgaacgagcaaggaagggccaaggcagaccccacaccggagaacgcaa

SEQ ID NO: 53347 - RNA, 69 nt, Homo sapiens
acaagccgacaaggggcggaggaagggaggagacccgaccccagaaggcacgggggaggggagccagac

SEQ ID NO: 53348 - RNA, 83 nt, Homo sapiens
aagccagaaagaacgaaacaaacgcaagagcaaacgaagagagaaccccacccaagagacaaagaccaacgagccaccacagc

SEQ ID NO: 53349 - RNA, 65 nt, Homo sapiens
aaagagcccggaagacgcggcgccggaggcaaagggagacccagacgagagaacgagagcggggg

SEQ ID NO: 53350 - RNA, 89 nt, Homo sapiens
gaagagacccaccagaggcagcaagggacccccggagaggagacccggaagacaacaagacagcgaacccacccaacacggcaaaacaa

SEQ ID NO: 53351 - RNA, 68 nt, Homo sapiens
acgagcccaggccacagacccacacgccggcggccaagggaaacacaaagaagacaccagaagggcca

SEQ ID NO: 53352 - RNA, 55 nt, Homo sapiens
aaggaccaagaaccaggcacacagacgagaacgcacccccccccccccaagaacg

SEQ ID NO: 53353 - RNA, 70 nt, Homo sapiens
gggggggaagaccccaggcgaccacaccagacacaggaaccccggccgggcgaagcggggaccaagcaag

SEQ ID NO: 53354 - RNA, 64 nt, Homo sapiens
gggcgccaccccaccagacggccaggggggaacgccaagcacaacggcagcagaacacccacag

SEQ ID NO: 53355 - RNA, 71 nt, Homo sapiens
ggccaagagggacccacccggcgcgaaagccgagccggcccaagaacggagcagccaggagggggcagaga

SEQ ID NO: 53356 - RNA, 62 nt, Homo sapiens
gcgacgggcgagcaccgcagaaggcgaggagggccccaaccgcagcacagcagccgcccccg

SEQ ID NO: 53357 - RNA, 73 nt, Homo sapiens
gggaaccggcgcgccggcgcgcggcgcggacaggcccaaacggcaggaacagaaccggagcaggccgagagcg

SEQ ID NO: 53358 - RNA, 77 nt, Homo sapiens
cccaaggcccaggaccgcgcagacccgcccggacggagccagaggccaccagagggaacaaaaaacgccagagaggc

SEQ ID NO: 53359 - RNA, 55 nt, Homo sapiens
aggaagcggaaaacagaaccacagacaccccccacgcagcagagagcaaaagaag

SEQ ID NO: 53360 - RNA, 74 nt, Homo sapiens
acagaaggggaggggagggaaaggcccaggaaaaaggggaaaggagccaagcaggaacgagcgagacaaaaaca

SEQ ID NO: 53361 - RNA, 79 nt, Homo sapiens
gccgggggacggcgcggaagaagcgcgcggagcgcgggaggggacgagaacgcgagcggcaggcccagcaggaacgagc

SEQ ID NO: 53362 - RNA, 77 nt, Homo sapiens
caaagcgggaggcccggccacacgcagcgccacaaacaagaggaccagggaggcagccgccgcaaagggacgacgaa

SEQ ID NO: 53363 - RNA, 78 nt, Homo sapiens
ggacaacgcaccgcacggagggcgggagagaacagaacacaggggccggccgccaagacacccccggcccggcacaga

SEQ ID NO: 53364 - RNA, 72 nt, Homo sapiens
aaaggcacggggcccaacaacgacgcagccagagcagcaagaggccaaggggacgacggccacgggcccggg

SEQ ID NO: 53365 - RNA, 79 nt, Homo sapiens
ccaaaggaacacaaaaaggaagcagggacgaacaaaacagcggaaaagggcacagaccaggacagggcagaccgccagc

SEQ ID NO: 53366 - RNA, 64 nt, Homo sapiens
aaaacaccggcgaggcggcccagcacccccgaggccacagagcaggaagaagagagggcgaagg

SEQ ID NO: 53367 - RNA, 70 nt, Homo sapiens
gagagcacggaaggaaaagggacaagcaagagcaacaacagggcacaacacagaagaaggcggggcaaag

SEQ ID NO: 53368 - RNA, 75 nt, Homo sapiens
cggagacccacagagccgcgagaacggggagcccacagacgagggcaccgccgaccgaaaccgcaaacacacgac

SEQ ID NO: 53369 - RNA, 88 nt, Homo sapiens
gcgggagcggagagaacgcggcgaggagccgggcaggacccagaaaagcgaccccaggcaccccacgcaccaccccgggcccacagcc

SEQ ID NO: 53370 - RNA, 76 nt, Homo sapiens
ccggggagaggggagccgcacgccacagcgaaggcgcgagggacaagagcagaggacgcacaggggcggcagcgag

SEQ ID NO: 53371 - RNA, 69 nt, Homo sapiens
gaaacccagggcgagaaagccaaaagaagaacccggacccgaccgaagcaagaacgcaaaaggcacaag

SEQ ID NO: 53372 - RNA, 74 nt, Homo sapiens
gaagaagcaggaggcaagaaaggggaaccccggagaaaaggccaagaaggcagggcagccgggcggaggagggc

SEQ ID NO: 53373 - RNA, 79 nt, Homo sapiens
gccgcgcgaggaaaggccgaggggccggagccacaggcagcgcaccgcaaaggccccagggagccccgcgccaggcacc

SEQ ID NO: 53374 - RNA, 66 nt, Homo sapiens
ggaagaacagaacaccccagggaaaccgccggagaaggaccacgaacacaggcggcagggcagaag

SEQ ID NO: 53375 - RNA, 70 nt, Homo sapiens
acacgcaccgaggaggacgaaggggggagacacaagcgcaaaacaaagcgcaaagggcgccaaccagagg

SEQ ID NO: 53376 - RNA, 68 nt, Homo sapiens
gggcgccgcccaccgcgcccgccggcacacaagacaaaggcgccgcagcaccccccggacccagcccc

SEQ ID NO: 53377 - RNA, 83 nt, Homo sapiens
gaagggccacgccggcgaggaggcggcggcggcggacggcgggagcaccaggccaagaaccccaaaaacagcagcagaaacca

SEQ ID NO: 53378 - RNA, 80 nt, Homo sapiens
gaagcgcgagcaaggccgccagaggcagacaaccagacccgaccgcacacgaccagcagacgggagccggagaggacacc

SEQ ID NO: 53379 - RNA, 89 nt, Homo sapiens
gacgagccgcggggccgccccccgaagcccagggagagcaaggcgcgcggcgacccgcacccaccaaggcccggaggccccacaacagg

SEQ ID NO: 53380 - RNA, 77 nt, Homo sapiens
gagaccacaaacagccacaagccacgggccccgccagcagagcgcacccaacgcacccgcacccacaacccacaccc

SEQ ID NO: 53381 - RNA, 71 nt, Homo sapiens
acacacaaagcaccggagagcacacaacaggaaaagaccaaaagcgacggggccccacacgccgccgcacc

SEQ ID NO: 53382 - RNA, 75 nt, Homo sapiens
ccgccgcccccggcgggcccggcggcccacaccagggaaagacaaggagccgggccgagaaaccgaaccagagac

SEQ ID NO: 53383 - RNA, 77 nt, Homo sapiens
gagggaaacggcacaccaggcggcaggggcaaccagacgggccaagggggggccgaagaagccagggggaggaaagc

SEQ ID NO: 53384 - RNA, 74 nt, Homo sapiens
gccgaaccccgacccaggcacgggaggcacggcgacagaggaagacgagccagagcagcccggcgggagaacga

SEQ ID NO: 53385 - RNA, 56 nt, Homo sapiens
ccaaagaaccagacaacagaggagacggaagcggaagcacacgccagacgccagca

SEQ ID NO: 53386 - RNA, 74 nt, Homo sapiens
gggaggagcgccacacccacacacaagaaggccagggagaccgccacgacgagcgcaacagcgaccaccggagg

SEQ ID NO: 53387 - RNA, 107 nt, Homo sapiens
gcgcgcacacggacgagaacggagagaacgcggaaggagacggagaagaagagacagacccagcacggaccccccccccagccgggcgaggccccgaaacgcagcgg

SEQ ID NO: 53388 - RNA, 72 nt, Homo sapiens
caaccgcggaacagcacaacacaaccagggcagggccaaacagaagaggagaagcaagaagccccaggaaag

SEQ ID NO: 53389 - RNA, 61 nt, Homo sapiens
aggaaacagccagaccgagagcagccgccggggcggagcgggcccgaggacgagaagagga

SEQ ID NO: 53390 - RNA, 79 nt, Homo sapiens
gggagcaaaaccaacgccggccggagcagcagcccgagcgggaggccaccgccccaccagcaggcaacgccacagaccg

SEQ ID NO: 53391 - RNA, 79 nt, Homo sapiens
caacagaaacagagagagaaagaccacagcaagaccacgcccccagccgggggaccaggccgaacgacccggacacaaa

SEQ ID NO: 53392 - RNA, 77 nt, Homo sapiens
gagcaccaagcagacacgcagacaagcagaccggaagaccgacggaagaccacaccccgagggagcccaggacacca

SEQ ID NO: 53393 - RNA, 57 nt, Homo sapiens
cgaggagaagagagaagagggccggaacagcaggggccgcaaggccaggcgcgcaga

SEQ ID NO: 53394 - RNA, 80 nt, Homo sapiens
gggagcggcgcgagggccgggagaaccgcgcggaggaaaggcgaacagagcagaccacgagcgacagccccagcgcgggg

SEQ ID NO: 53395 - RNA, 77 nt, Homo sapiens
caaagcgaagaccaaaaaggacagaaaaaaaagaaacaaacgaaggagcagccaaaccaaagagacgggggcaccag

SEQ ID NO: 53396 - RNA, 64 nt, Homo sapiens
ggagcgaaggccggaggacaagggggcgaaacacaggacccgcaaaacccccagaggacccaga

SEQ ID NO: 53397 - RNA, 77 nt, Homo sapiens
cacacagagaacaggaaaacaggccaagaggaacggaaggccaggaaaggggcggcgcacagccaaggaacaggccc

SEQ ID NO: 53398 - RNA, 78 nt, Homo sapiens
agggcgggggagcacgaggaggacgaggagagccggcggcgggaggccaagaaggagagagcacgaccaccgccgaga

SEQ ID NO: 53399 - RNA, 90 nt, Homo sapiens
gggagaaaaaaggaccagagccagacacgaaggacgccacagaagaggcgagcccccaaggaggacagaacacagccagccaaaggccca

SEQ ID NO: 53400 - RNA, 83 nt, Homo sapiens
ccagagccggagcgcgaaggccgggacccggccccggcccacaggggggggcaaacccgagagaacgggggggagaaaaggcc

SEQ ID NO: 53401 - RNA, 78 nt, Homo sapiens
ccacacaagaagccagagacgcaaaaagacagcaccaggcccgaagcagaaaacagagggaaagaaacagccccagag

SEQ ID NO: 53402 - RNA, 72 nt, Homo sapiens
aaaagacccagcgacaacgaagaccacaccagacacgggggacagaaagcaaaaagccaggcgaaaccaccc

SEQ ID NO: 53403 - RNA, 71 nt, Homo sapiens
cggccggccgcgacgcaggccccacgaggggagggcgagccgccaggggccacacgcggacccggagggac

SEQ ID NO: 53404 - RNA, 46 nt, Homo sapiens
ggcgaggagcaacccaaggggcgaggaggcgggccaggaaaggagg

SEQ ID NO: 53405 - RNA, 79 nt, Homo sapiens
gcaccgaaggcaacaagaagagaagaaggaccaagggcaggaccgagggagcagcgcggagggagagccagggggagaa

SEQ ID NO: 53406 - RNA, 72 nt, Homo sapiens
gcggaagcaaaccaagcgcgggggaagaagagaaagaaaaccaggaaggagaccaaggaccggggaggaaaa

SEQ ID NO: 53407 - RNA, 63 nt, Homo sapiens
ggcaccccacgggaaacagaagacagccgaaccaagggcgacaaccagagacaagcaggcgca

SEQ ID NO: 53408 - RNA, 74 nt, Homo sapiens
caaggccgcccaccaggcaccggggaaacgaaccaccaacacccgaaggaccccggggacagggccgccacaga

SEQ ID NO: 53409 - RNA, 79 nt, Homo sapiens
gacaagaaacccaggacgacgcagcaacacagcacccggcggcaaaccaaacaaaaccagagcacggggaaaagaaccg

SEQ ID NO: 53410 - RNA, 62 nt, Homo sapiens
gcggaacggggccccgacccaaaaccagacgcagacccagccaagggcacgacccggcagcg

SEQ ID NO: 53411 - RNA, 75 nt, Homo sapiens
cgccgaggaggcccgcggggcaaccgccacgagacaccaagggggccgccccgggggcccagacaacgaccgaag

SEQ ID NO: 53412 - RNA, 95 nt, Homo sapiens
ccccggccccggcggacacgcgggccggggaccgcaggggcgcgcgaaggagcggaagaaggcaggccaaaccaccgaccagagaggggccacgg

SEQ ID NO: 53413 - RNA, 37 nt, Homo sapiens
cgaaagcaaaggaaacggacccaaagacaggaccacg

SEQ ID NO: 53414 - RNA, 81 nt, Homo sapiens
ggacagcggggcggggagccggccccgggcccacggaaacagccacaggcaccacacgaagggccgaccaggcaggaggcc

SEQ ID NO: 53415 - RNA, 55 nt, Homo sapiens
gggagaccccaccaccgcgaaaaaacgggaagcaccaccgaagccaaagccagcc

SEQ ID NO: 53416 - RNA, 80 nt, Homo sapiens
accccccgccggccagaaggaggccaccagcccagccccgaaggcccgcggagacgagaccaagcaccaaccagcggaca

SEQ ID NO: 53417 - RNA, 50 nt, Homo sapiens
agaaagcaccccacagacggaacagccccaagccggaaacccaggaacgg

SEQ ID NO: 53418 - RNA, 64 nt, Homo sapiens
gcccaagccacaggaagccagcaccacgccacccgaaaaacacggagagcaccacccagaggag

SEQ ID NO: 53419 - RNA, 74 nt, Homo sapiens
ggacagaaaagacaggcgccaggagcacagaagagcgaggagaccaaaagaaggggagcccagaagcgagagga

SEQ ID NO: 53420 - RNA, 68 nt, Homo sapiens
cgaaccccagggcaaccagaggcagagcaaaaaacggagcaccagacagcaaacgaggacaacccaga

SEQ ID NO: 53421 - RNA, 61 nt, Homo sapiens
acccgccggggacagacgcggacagaagccggacgagcgggagaggacaccacacaaaaaa

SEQ ID NO: 53422 - RNA, 82 nt, Homo sapiens
gccggggacgggagcgagcgggaggcccaggacaccagaggaccagaacccacgagaaacagacgagccaaccagaccccag

SEQ ID NO: 53423 - RNA, 90 nt, Homo sapiens
cgcggcccaacaggccgcccgcagcggggccggggcaccgagcccccgcgccgccgcgccgccccgccccagaggagccgccggcccagg

SEQ ID NO: 53424 - RNA, 80 nt, Homo sapiens
cgccaacaagagagagggagaaccggggcaagagacggcagacaaacacagccgagagaaggcaggcgacgggcaaagag

SEQ ID NO: 53425 - RNA, 70 nt, Homo sapiens
gaaaaacacagcaagcacaagggagcaaaggggccagggagaaagaaggccagaaaaaggaaaacccgag

SEQ ID NO: 53426 - RNA, 77 nt, Homo sapiens
gccgcgccgcggcagcaagcagcgcaaaccagcagggcaggggagacaggccgacggaccgggggggccgaagaagc

SEQ ID NO: 53427 - RNA, 71 nt, Homo sapiens
ccgcgcaagccaacacgggcacacagggggccaggggaaggaccgcccacagccccccagcgccccgcccc

SEQ ID NO: 53428 - RNA, 81 nt, Homo sapiens
accagcacggcagcccaggggcgccggcgggagaagacccggccccccacacgaggacacaaagagggaagcaccgaggag

SEQ ID NO: 53429 - RNA, 82 nt, Homo sapiens
gcgagcggagccggcaggaaggggaccgggcggcggagcggcggaagaagacaggaggggcaaaaaagagcgccccgcgcaa

SEQ ID NO: 53430 - RNA, 80 nt, Homo sapiens
aagggaaggccagcagcgcgcggagaagaacggggagccaggggcaccaccacgaggcgaggggccaaccaaggaggcga

SEQ ID NO: 53431 - RNA, 76 nt, Homo sapiens
agcaagacccggagcgccggagaggagagcgcgagaaacagagccgagagacaccagaagaggaacccgccgcgcc

SEQ ID NO: 53432 - RNA, 53 nt, Homo sapiens
caggaaggggaaaaccgggacaaaggggccacggggaagaaaagacaagggcg

SEQ ID NO: 53433 - RNA, 78 nt, Homo sapiens
gagcagcaccggggagagccaagaaaaacaacgccccagaacacagagagcagagaaggccgccagaagacagccaaa

SEQ ID NO: 53434 - RNA, 87 nt, Homo sapiens
gcgggaggcagggggacgacaaggagggcagacaacccgcagccacgcgacagacacggagacgagcgggggaagaaggcaaggcac

SEQ ID NO: 53435 - RNA, 80 nt, Homo sapiens
ccgccccccccgggcgcggcggcggggaggcgagggcaggaccgagggagcagcgcggagggagagccagggggagaagg

SEQ ID NO: 53436 - RNA, 81 nt, Homo sapiens
gaggcaccgacaaaccagcgaaggagcacccacccaggaacccgccaccagaagcacgggcgagagcgggaagagcacgca

SEQ ID NO: 53437 - RNA, 76 nt, Homo sapiens
gaacagaacagcgaaacaagagacaacagaccggcacgcgccggcccgagccgccggcgagagaagggcacacccg

SEQ ID NO: 53438 - RNA, 56 nt, Homo sapiens
aggagggggcaccgagcaacgagggcagggccaggccgagggcccgcccggcccca

SEQ ID NO: 53439 - RNA, 58 nt, Homo sapiens
ccaggccaggcagcccacgacacagccagagaacaacagagagggaacagacacccca

SEQ ID NO: 53440 - RNA, 70 nt, Homo sapiens
aagggcagccgcacggccgaaacaaagaccagaagagaacaaacaggaacacccgggggggcacaggggc

SEQ ID NO: 53441 - RNA, 80 nt, Homo sapiens
ccaggggaacgagcaacacaccgcacgcaacagaagaaggagcaggggaaggagacgggcaggagcgagccacccggaac

SEQ ID NO: 53442 - RNA, 100 nt, Homo sapiens
gcagaacccagaacaaggaggagggggacaggagacagaggcgaaagccgagaaaggaggcccaggggacaggaggcaaggaaggcccgaagggaaccag

SEQ ID NO: 53443 - RNA, 58 nt, Homo sapiens
cggcggaggaggcagcgggggccgcgcggaagcgagaaccaggaacgaagaacaaagg

SEQ ID NO: 53444 - RNA, 79 nt, Homo sapiens
ccaggaggaagacggagcggcgcccagcccaaaggcccagaggggagcagagggccgcgccgggcaaggggaacaaccg

SEQ ID NO: 53445 - RNA, 105 nt, Homo sapiens
cagggggcacccgcggccggcccggggccccgggaccggcgcccccccgcacgccaaccaccggagaaaagaaaaagccaggaagagacaaacaggagaagcacg

SEQ ID NO: 53446 - RNA, 69 nt, Homo sapiens
gccagaaggacggcgcccacccgccggagcagcccgaggccccagccagcgaacaacggccaaccaggg

SEQ ID NO: 53447 - RNA, 79 nt, Homo sapiens
ccaagagggacccacccggcgaaaaaaccgggaagaccgacggagccccagcagaagaccagaggcgggccccaacagc

SEQ ID NO: 53448 - RNA, 75 nt, Homo sapiens
aggagggggggccgcgccgccagcacacggaccggcggcaagggaagaggcaccaccggaaaacagccgcaggaa

SEQ ID NO: 53449 - RNA, 74 nt, Homo sapiens
acacaacccgacccgacgaagagaggcgcccaaagagcaacggggagccaagacagaccccagaacgcaaaaaa

SEQ ID NO: 53450 - RNA, 91 nt, Homo sapiens
gcgcgcggagcggcgccccgcagccgcggaccgaggcagcggcggcaccgccggccgaggcagcgacacaaaccaggcacccaccggggag

SEQ ID NO: 53451 - RNA, 63 nt, Homo sapiens
agagggcggcgcggcgggcagggcggcagcggacaaacaaaagcagagaccgacgcgacaggc

SEQ ID NO: 53452 - RNA, 87 nt, Homo sapiens
ccaggaagcggaggagccccggaggcagagcggcgccagggaccgcacggggccggaccagaggccaagagacggagagccgcgccc

SEQ ID NO: 53453 - RNA, 78 nt, Homo sapiens
accgccaaacgcaaggcccgacgggaggccaaggcaaggaagagagaaacaggagagcaacggggaagagggacacga

SEQ ID NO: 53454 - RNA, 60 nt, Homo sapiens
cgaggggagcaccaggaccgggccggaacgagacgcacggcaccaaagcccgggaggcga

SEQ ID NO: 53455 - RNA, 76 nt, Homo sapiens
gggggagaccgaagagcgcaaaaaccgaaaccgcccacggacggaacacgcgaacacgcaaaaggaagcggcaggc

SEQ ID NO: 53456 - RNA, 77 nt, Homo sapiens
gaggagccgaacgagccccagccaggagaagacagcggaggaggggagcaggaacccaacgggacagacaggagagg

SEQ ID NO: 53457 - RNA, 87 nt, Homo sapiens
ggagccggggccgggcgcgccgccgcccgcgagcgccagacgccggccgcggaccaggaaccggagaggacacagcagaagagaaca

SEQ ID NO: 53458 - RNA, 75 nt, Homo sapiens
gcccaacagaaaaagagaggagggagaacacagaaacccgccccggaagaaagaagccaaagagaaggcaaagca

SEQ ID NO: 53459 - RNA, 59 nt, Homo sapiens
gaaggagcaaaaggcggacaggcagggagagccggcagcagaagacagagaagggcgcc

SEQ ID NO: 53460 - RNA, 61 nt, Homo sapiens
ccaggccgagccgagaggcaagacaacacacccagaagacaccaaaagagccccgcccaga

SEQ ID NO: 53461 - RNA, 70 nt, Homo sapiens
acgaggcaaaaagcacagaagagagggaggaggacagaagaccacacacccgcaccaagacagggcacgc

SEQ ID NO: 53462 - RNA, 83 nt, Homo sapiens
gacagaaccacagacaaggggagcccaggacaccacgaaaaggaaggccaagaccaagaaaagaaggcacccccccgaccagc

SEQ ID NO: 53463 - RNA, 58 nt, Homo sapiens
ccggcacccggcaaccagaaacacaggccaagggggagcgggccggagagaagagagg

SEQ ID NO: 53464 - RNA, 50 nt, Homo sapiens
cgcacccccaaggccaaccaagaggccgaaaggcgccagccaagaacaca

SEQ ID NO: 53465 - RNA, 87 nt, Homo sapiens
ccagggcggacacggccaccgcccagcgggagaggagcccaccaggacgaccgcgccgcccagcacgccaggggagagcccagggac

SEQ ID NO: 53466 - RNA, 72 nt, Homo sapiens
cggcagccgggaacaggccagaggcacaacggaccgccccaaagaggaacaaaccaaggcaacaggaaccaa

SEQ ID NO: 53467 - RNA, 80 nt, Homo sapiens
ccccccccccaacaggcggaaccaagcgcaagccgggggccacgcaaacacggccaggaaggacccacacagcaccaaga

SEQ ID NO: 53468 - RNA, 61 nt, Homo sapiens
gccgcaggccaccaagaccgggaacaagcaacagcgcggagagcgaggggccaaaagccgg

SEQ ID NO: 53469 - RNA, 82 nt, Homo sapiens
agagagaccgaaacgcaggaagccccaagcagaagaagaagcgagagacaacaacaccgcccgccagaccacggccgagaaa

SEQ ID NO: 53470 - RNA, 79 nt, Homo sapiens
gaaccagcaggcaacaggacaacgagggaaacaaaggaacgaggcacgaaggaggcacaccagaagggaagagaagaga

SEQ ID NO: 53471 - RNA, 63 nt, Homo sapiens
gaaacaacacaaccagaagcggaaacaagcggaaaggacacagaggaagcagccacgaagaag

SEQ ID NO: 53472 - RNA, 66 nt, Homo sapiens
agacggaccaggcgcgggggggggagagcaccaaccgcgccgccaagggcgaagggggaccggggg

SEQ ID NO: 53473 - RNA, 74 nt, Homo sapiens
gccaaagggaaagcaccacgagggagcgagggcccgggggcaacaggccgaaggcgccggcggcgccggagcag

SEQ ID NO: 53474 - RNA, 56 nt, Homo sapiens
gagagaagcgacagccgcaggaaacggcccaagaacaaggggaaggccccccccca

SEQ ID NO: 53475 - RNA, 79 nt, Homo sapiens
gagcagaagggaggcccaagacccacaacaaaagcaagaaggagaacaagaagcaaaccaagaaagagcaggaaaacca

SEQ ID NO: 53476 - RNA, 68 nt, Homo sapiens
ggcccacggaggggcccagcagaagacagcacaaaccccaacggaaagcccgaagcaaagaacaagca

SEQ ID NO: 53477 - RNA, 67 nt, Homo sapiens
gcggaggacacggggaaccaacagaagaagaaagagggaagaaagaggggcaagacaccgggaaaga

SEQ ID NO: 53478 - RNA, 68 nt, Homo sapiens
ccgcgggcaccgcaacacagggggaaaagacaggcagggaggcagcggcaagcggaccgggaggcacc

SEQ ID NO: 53479 - RNA, 61 nt, Homo sapiens
ggaccgagagcggaccgagagcgcgaaacgcacgagaagccagaacgggaagaagagaaga

SEQ ID NO: 53480 - RNA, 61 nt, Homo sapiens
cagaagacaacggcgaccagcccaccgaaaggagagaagcaggcagcaaaaccccagaaga

SEQ ID NO: 53481 - RNA, 79 nt, Homo sapiens
ggcggcgcaggaaccacgagagcaagccgccccccagccagcgcagggcagaaggcccccccgagagaggacaccagag

SEQ ID NO: 53482 - RNA, 32 nt, Homo sapiens
aagagccgcacccaaggaagcaccacacccac

SEQ ID NO: 53483 - RNA, 72 nt, Homo sapiens
cacagaaacaagaaagccaggaacgacaggggaaaggggcggaaaaacagggcgccaaaaacagagcacacc

SEQ ID NO: 53484 - RNA, 86 nt, Homo sapiens
cgagcaaagagaccccggaacggaccccagagcaagcacagcgagcggaaggagggagaacaaggaaggagcgggaggaaccaacc

SEQ ID NO: 53485 - RNA, 86 nt, Homo sapiens
ggagccggagcgggcgcggacgccgaggcaccgaggcaccagaggagcaaaagagccaacacccaggccaggccgcccggaaggag

SEQ ID NO: 53486 - RNA, 80 nt, Homo sapiens
gagcggaccgagagcgcgaaacgcacgagaagggcacacagggaccaagaagccccggggacacgcgagaaaagacgccg

SEQ ID NO: 53487 - RNA, 82 nt, Homo sapiens
ccgggccagggaagggcagcggcaaggagaagaagggggcagcgcacccgagggcaccgggaagaaggaggggacgcagcgc

SEQ ID NO: 53488 - RNA, 87 nt, Homo sapiens
gccagagagcgcagcgggagcccccggccacgaggcgcccaggcccgcgggcccaggacacagccacaagaaccgaaaaaagaaggc

SEQ ID NO: 53489 - RNA, 78 nt, Homo sapiens
ccgccagcaaggcggcgcgcccaggaggacaacccccaagaaagggagcccagaacgaaacaacccagcagagaccca

SEQ ID NO: 53490 - RNA, 34 nt, Homo sapiens
aggggacgagcaaccgaggcgacgccacaggcac

SEQ ID NO: 53491 - RNA, 99 nt, Homo sapiens
cccgggggacacgcgccggaaggggcccgaagcccccgcaggaaccacaacccaaccaggcacaggagggcagaccaaaagcacaaaaagaacggcccg

SEQ ID NO: 53492 - RNA, 64 nt, Homo sapiens
acgacacaaaaagcaagcgggccaccacagaaaagaccacagcaccgggaagccagcagcggca

SEQ ID NO: 53493 - RNA, 54 nt, Homo sapiens
gagccccagcacaagagacggaacagggggcagcacgccgaaggagagaccaga

SEQ ID NO: 53494 - RNA, 74 nt, Homo sapiens
acggggaggagcaggggaacgccagcccaacggggccccaaacgaggcaagaacagaggccaggacaagacacc

SEQ ID NO: 53495 - RNA, 76 nt, Homo sapiens
aggcaacaaggacaacaagagacgggacaagacagggcaaaggacagaccagcaacggggcggcacacaaggagcg

SEQ ID NO: 53496 - RNA, 75 nt, Homo sapiens
gaaccacacagacggaacggaggccggcccagcagaccgggacccagccgaggccagcgaaggaacccagcccac

SEQ ID NO: 53497 - RNA, 68 nt, Homo sapiens
caggaggaagcgaggccagacagcaagagcacccgacccacaggccagagagacaagccagcgccagg

SEQ ID NO: 53498 - RNA, 75 nt, Homo sapiens
gcaagcaagaaggaaggccaccaccgggcagaaacgggcgaagcgccgcccagcgcgccacccggcgaggccacc

SEQ ID NO: 53499 - RNA, 77 nt, Homo sapiens
ccccggccaaggacaccacagccccgacgaacacggggacaccaacaggacccggggggaaggagacgcacacccac

SEQ ID NO: 53500 - RNA, 80 nt, Homo sapiens
caccaggccgaagagaaccacaagcacgccaaccaccggagaaaagaaaaagccaggaagagacaaacaggagaagcacg

SEQ ID NO: 53501 - RNA, 72 nt, Homo sapiens
ggaaagggggagcggaaaacacacagcaggccaaagaggacgggacacgggccaagggagcgaaaagaaccc

SEQ ID NO: 53502 - RNA, 82 nt, Homo sapiens
ccgaagcccccgcaggaaccacaacccaaccagggcaacgccaaagaaaggaaaaccaaagagaagaaacaaagacgaacaa

SEQ ID NO: 53503 - RNA, 77 nt, Homo sapiens
cacaccagaaccccaaccgggacgcaaggggggccaccacagcaacaggcacagaaaggcggccgaagggaacggcg

SEQ ID NO: 53504 - RNA, 117 nt, Homo sapiens
cccaacaaaaccgacaccggaggagaaaaccccacccccaccggcaccaccccagccagggagagaccgcacgcagggccacagcagcacgaggacagcccgaggcggagaacaccg

SEQ ID NO: 53505 - RNA, 74 nt, Homo sapiens
cccaggaagaaagacacaggacaacgaacgaaacgggccccagccgccgcccaagggcccacaagcgcaccaag

SEQ ID NO: 53506 - RNA, 58 nt, Homo sapiens
gggcaccagaggggaaggggcccgaggagaggggcggagcgggggggcacacagaccg

SEQ ID NO: 53507 - RNA, 107 nt, Homo sapiens
gcaaagggcacaccacacgcaagaggaaaaagaaaggggaagaacaggcaaggaagacgaggaggggaaaaggaccagaacggaagcaacagggggcgggggagagg

SEQ ID NO: 53508 - RNA, 52 nt, Homo sapiens
gcgcgcgcacggcaggacggagccaacacaacccgaaaagacagaaaccgcc

SEQ ID NO: 53509 - RNA, 79 nt, Homo sapiens
agaagaagggaaggcgcgaggaggaaaggaggacgaggagaaggaacaggggcacagcagggaagaagggacagcccac

SEQ ID NO: 53510 - RNA, 74 nt, Homo sapiens
gcgacgggcccgggacgcccgcgcccgcgggagcagcgccgcgcagccaagcagcagcccaagggcaagaaagc

SEQ ID NO: 53511 - RNA, 76 nt, Homo sapiens
aagaaacagagcaaaaaccggaaaagccaccaagcccgaaacaaccaccgagccccggaagcgcgcacaaccacaa

SEQ ID NO: 53512 - RNA, 75 nt, Homo sapiens
gcggaaaaaagccaccgaagggcccgaggcgcggggcacgccgcccggcccccacccgcccgcgccaccgcccac

SEQ ID NO: 53513 - RNA, 75 nt, Homo sapiens
cagcgcaagagcgagaaccggcgccagaaggggcgggaaccgacgaggaccccagagacacgcccagaaccaacc

SEQ ID NO: 53514 - RNA, 80 nt, Homo sapiens
ggagaacgaggcacagggacccaccgagacaccaagggcggggcgaggaagagggaagaacacaccaaacagacaagaaa

SEQ ID NO: 53515 - RNA, 72 nt, Homo sapiens
cccgggagagcaaggcagaaacgcagcgagacggcacgacgcggcgcggagacaggaggagccccaccacaa

SEQ ID NO: 53516 - RNA, 75 nt, Homo sapiens
ccaacgagcaaacagaaccagcagcaaaaggcaaaccggcggaagcggagaagacccagcgaggagcaagaaccg

SEQ ID NO: 53517 - RNA, 76 nt, Homo sapiens
ccaggaggacgaagggccgcgccaagaagaggacaagagggcagaagaagaacgcgcaaaacaaacggagagagga

SEQ ID NO: 53518 - RNA, 74 nt, Homo sapiens
gaccgggcgggcgccaaaccggggccgacagaaggcagggaaggagaccccggcaacagggaacaggcagcaaa

SEQ ID NO: 53519 - RNA, 75 nt, Homo sapiens
gcgaggaaaagaagccccacccaacgcggagcgagagaggagccacccgaaggcgaacggagccccccgagaaag

SEQ ID NO: 53520 - RNA, 67 nt, Homo sapiens
aaaagggaagaggagacaccccgggggccccgagcaaaccaggcaccacggggaccagcgccaggag

SEQ ID NO: 53521 - RNA, 67 nt, Homo sapiens
caccgggaccacagggaagcgagacaacagagggagacgccaaagcacccaaagacgccagaagcag

SEQ ID NO: 53522 - RNA, 78 nt, Homo sapiens
ggccacccggagccagcggagggacagcacagagggccggagcggagagggccgggagcaccgacacgcggcgaggag

SEQ ID NO: 53523 - RNA, 77 nt, Homo sapiens
caacccagaacaccaagagcgacacaccaccggagcaaccacacgggagagcgcggccacagggacaagggcggccg

SEQ ID NO: 53524 - RNA, 78 nt, Homo sapiens
ccccaagaaccaacccccaaaggcgggacaggccccgcgagcggccaccgcccaccaacagcgggaagaagccgcccc

SEQ ID NO: 53525 - RNA, 80 nt, Homo sapiens
ggagggaacagcagggcaaagcaacagccaaaaaacagcagccaagcccagggcggccgaagcccccggacggcaggccc

SEQ ID NO: 53526 - RNA, 61 nt, Homo sapiens
ggaagggccgaaccggccagagggcaagcaaagaccaagagaagagcacaacacgaaagga

SEQ ID NO: 53527 - RNA, 89 nt, Homo sapiens
cggagagacgaaccgaagcgggcgggcccccccacccagagcacgcagcaacgcagagagcaaaacccagacgcagccccaagaaagac

SEQ ID NO: 53528 - RNA, 59 nt, Homo sapiens
ggccaagcgaccacccaaagaagaggacggcaaggacgacagcgaaggcagggaaggcg

SEQ ID NO: 53529 - RNA, 38 nt, Homo sapiens
cccaggagcgggaacaggaaccgagcgggccggggcca

SEQ ID NO: 53530 - RNA, 73 nt, Homo sapiens
gcaaagggcaccgggaggaagccacacaaagaacaaagcagggagggcacgagcaaaaaaaagccccgagcaa

SEQ ID NO: 53531 - RNA, 76 nt, Homo sapiens
agcagaggcgccccaccacaggacccgcccgcccaaggccaaagacacaggcgcagccaaacggagcagggagacg

SEQ ID NO: 53532 - RNA, 78 nt, Homo sapiens
gcacaacgccagcgagcagcgaaaaaacacaccgacagcagaacacacgcgaaaggaaaccaagcggaagggaagcaa

SEQ ID NO: 53533 - RNA, 73 nt, Homo sapiens
aaaacccgacccaccaggaaacagagaaacacgacagcacaaaaaggaacgcgacgagaaggcaccggaaccc

SEQ ID NO: 53534 - RNA, 89 nt, Homo sapiens
accagacaacgccagcaagaacgaggaggacgcggggcaaaacaacgagggagagaaacccagccgggagccggaagcgcaggaggccc

SEQ ID NO: 53535 - RNA, 69 nt, Homo sapiens
aaagaagggcggagcacacaggagcacacccaggacagacagccccaggagcagacggcccaaccagag

SEQ ID NO: 53536 - RNA, 86 nt, Homo sapiens
gccgagccgggaccaggcccgggggcggcggccacgccaaggacggaacacgaccaacggccccaaaaaccaccggcaagaagaag

SEQ ID NO: 53537 - RNA, 62 nt, Homo sapiens
cccaggagaaggaccgaaggcaaacccagagaacccaaggagaagagaacaaacgcgggccc

SEQ ID NO: 53538 - RNA, 78 nt, Homo sapiens
ggcgagcagcaggaacagcagcgggagcagcccccagaaggagggggcaaccgcaggaccggggcggagcgccgagag

SEQ ID NO: 53539 - RNA, 61 nt, Homo sapiens
agcaggcaagcaggagggaccgaggcgggaagaagggggcccagagaaagcaccaaaaaag

SEQ ID NO: 53540 - RNA, 82 nt, Homo sapiens
gagacgcgggagcgagcgcagcaaagcgcccagccgccgcccgcgcccgcggccggggcagggcagaaaagaacagacccag

SEQ ID NO: 53541 - RNA, 74 nt, Homo sapiens
ccaaaaccacaaacgccacgcagaacagccaccaagaacagaagccggagccgccgccagaagaccgagagaaa

SEQ ID NO: 53542 - RNA, 75 nt, Homo sapiens
agcagcgaggaagcccggaagcccccaggccggagcggccaagccacgacggggacagaagacccacgccgagcc

SEQ ID NO: 53543 - RNA, 75 nt, Homo sapiens
gacaagagaccacacccaggaagccaggcacgcacagccgggaaaacaaagaaccgaacaacggaacacccaaga

SEQ ID NO: 53544 - RNA, 57 nt, Homo sapiens
cccacccacacaggaccaaagggagacacacacggggcgagaacgcggacaagcaaa

SEQ ID NO: 53545 - RNA, 69 nt, Homo sapiens
gcccaggagacgagcagggcaaaaaaaagggcaaagaccaccccgccacaaaaccaaaacagaaagcca

SEQ ID NO: 53546 - RNA, 78 nt, Homo sapiens
ccgagagcgcgaaacgcacgagaagaaagccaaggacacgcaggacgaagaaggaggagagcccagaagaaaccaaag

SEQ ID NO: 53547 - RNA, 76 nt, Homo sapiens
gacaacacagaaacagggaaaaccagcaagaccgcaagaagaagagacaggaaaagaagaaggggacacaaagccc

SEQ ID NO: 53548 - RNA, 78 nt, Homo sapiens
ggcgggccgcggcgaaaggagcggcaggcgcaggcagccgacgaagagggcgggaagcaaggagacaagccgagagcc

SEQ ID NO: 53549 - RNA, 76 nt, Homo sapiens
cccaccggcggccacgcaccgcgcgaagacggaagacgcgcccgcgccggaggcggagcccgagaacaacccaggc

SEQ ID NO: 53550 - RNA, 72 nt, Homo sapiens
ccagaagccagcccccaggcggaacgcccgccccgcagagagggcacacaaaggaacagaaaacaacacgag

SEQ ID NO: 53551 - RNA, 81 nt, Homo sapiens
caccagagccagcaaggccaaaccgcccagcacccgaccccacagccagcagaaagcaccgggaggaaagagagccacacg

SEQ ID NO: 53552 - RNA, 59 nt, Homo sapiens
agccagacagcagccaagacggcaaccgacccgggggggcacgccgagaagccagggga

SEQ ID NO: 53553 - RNA, 89 nt, Homo sapiens
ggaacagggaagggcgcgagcggggacaaagcagaggacagaccccaggaccaagacccgcaaccaggacacagcagaagcagaagagg

SEQ ID NO: 53554 - RNA, 75 nt, Homo sapiens
acggccaccggcgggaggaacaaaagaaggagagaacggggacaaggcaagacagacacccagccccgacacggc

SEQ ID NO: 53555 - RNA, 60 nt, Homo sapiens
acccgaaaacacagaccacagacagagacagaagaaagaaagcaaggaaacaccgaaaaa

SEQ ID NO: 53556 - RNA, 62 nt, Homo sapiens
gagacgcgagggcacagacggacaacaggaaaaacccagccaggggacacgcgcccaccagg

SEQ ID NO: 53557 - RNA, 88 nt, Homo sapiens
cacccgagaagcgggagaaggagcaccgagacgacgcaagcacaaagcaaggaggagaggcagcacaagcagaagccgggccggcagc

SEQ ID NO: 53558 - RNA, 52 nt, Homo sapiens
ggcaagcgaaaacgcgagagaagcgacgaggaaaccccgaagcaacggccaa

SEQ ID NO: 53559 - RNA, 92 nt, Homo sapiens
gcgggcaaaaccggagcggccgggggcggccacgggagagccgggccggcggacgcggcgccacgcagcagaacagaaaggccccggagcag

SEQ ID NO: 53560 - RNA, 57 nt, Homo sapiens
ggcggccgccagcacaagcgcacccgcacagcaccacaccgaggggacacccgaaag

SEQ ID NO: 53561 - RNA, 79 nt, Homo sapiens
aacagaaggaacgacgcggaccagaagccagagcgaggacgccggcagagccgaaaggcagagccccggcagaagagcg

SEQ ID NO: 53562 - RNA, 53 nt, Homo sapiens
cagacgaccaccacacacggagcggaaccagggcgggaacggaaaagacaagg

SEQ ID NO: 53563 - RNA, 71 nt, Homo sapiens
cccggcaaagaaggaccaaaaagcacacacagacgaagaacggaagcgccccagaggagagggcggagaga

SEQ ID NO: 53564 - RNA, 76 nt, Homo sapiens
gggagggaaccagcaacaagccagcacaaaagaccccacagcgagagagagcaaacgaaacaggcaaacgagacaa

SEQ ID NO: 53565 - RNA, 75 nt, Homo sapiens
caggagagaccaaaaaagggccagacagaaggcaaggcggaggcaggaccacccaaaaccagagcacccaggccg

SEQ ID NO: 53566 - RNA, 81 nt, Homo sapiens
agaggggcgacgcagagccgagcgaagcggcaaacagaagacgggcaaaagagcggaagaaccaacgacagaagacggagc

SEQ ID NO: 53567 - RNA, 71 nt, Homo sapiens
aacaccagaacccagaccagcagcggaaagacaccaagagcagaaacacagccaaagaaagaacgagcacg

SEQ ID NO: 53568 - RNA, 72 nt, Homo sapiens
gggagggcgcgccgaaagcggcggggccggggagccccgggccagacccagacccagcccacccagagcagc

SEQ ID NO: 53569 - RNA, 73 nt, Homo sapiens
gaagaacacagaagccaagaaacaccaaccacagcaggggccccacgaaaccaggaggggagacgagcagcag

SEQ ID NO: 53570 - RNA, 79 nt, Homo sapiens
aggaggcaagaaaggggaaccccggagaaaaggccaagaaggcaggaccaggacaaaaccccagaggaacggacaaaga

SEQ ID NO: 53571 - RNA, 77 nt, Homo sapiens
gagcaggaggcgaaaaggagcagaaaaacacgacagccagacagggaaaagccaacaaggaccgggaaggcgcgacg

SEQ ID NO: 53572 - RNA, 67 nt, Homo sapiens
aagcacaccgccaaccacccgggcaacacaggggaccagagggggacccaacaacagggagcgggag

SEQ ID NO: 53573 - RNA, 53 nt, Homo sapiens
agaccgacacccaagacaagacagcgcaaggcaggccggagcgcgaagacgca

SEQ ID NO: 53574 - RNA, 74 nt, Homo sapiens
caagaagcaccccaggcaaagagcaagccaggggacgggggccccccacccagggaacggaaagagagaagaag

SEQ ID NO: 53575 - RNA, 69 nt, Homo sapiens
ggaccaagaaccagagccaggccgaggacgacccccaaccgggaacagcaccgcgccccacccccgccc

SEQ ID NO: 53576 - RNA, 54 nt, Homo sapiens
caagcaggacaggacgggcccggggacacgagaccggccagcagacgaccacga

SEQ ID NO: 53577 - RNA, 67 nt, Homo sapiens
aacgggcagcgaaggcagaaagaggaagaagcaagccggacccacgacggcaggaaaggaggccagg

SEQ ID NO: 53578 - RNA, 75 nt, Homo sapiens
ccaggccagaaaacaggaaggaacgcggccacgaaaaacgaaaaaagccgccccaaaaacaacccagagagacac

SEQ ID NO: 53579 - RNA, 80 nt, Homo sapiens
caagcgccccgccgggcccacaacaagggggaaacaggaagagaacagaacggaagaaagcagaagaggacgaagcgcaa

SEQ ID NO: 53580 - RNA, 111 nt, Homo sapiens
ccggcgccgcccagcccggcggcggcggcggccgaacaagaagcccgaagccgaccgggcaaccacaagcaccaggacaaaagaagggcagcacaaaggaaagccccaaac

SEQ ID NO: 53581 - RNA, 77 nt, Homo sapiens
accgcgcagaaccagggcggcggccagcgccacgcgacgagacaagggcaacgagacacccagcggcccggccccgc

SEQ ID NO: 53582 - RNA, 80 nt, Homo sapiens
accccgagccacagcagcaacagcagccagaaaccggagaagcacaagggggccagcccaggagagggcccagcaagcac

SEQ ID NO: 53583 - RNA, 74 nt, Homo sapiens
gggacagccgcaaccggaccggcggcgggggaagcaccgcaaacaacaaagcggaaaacaaaaaacggaaggaa

SEQ ID NO: 53584 - RNA, 77 nt, Homo sapiens
ccggcgggccgaggccgcaggaggagggagaggagcggcagacaggagcgcacaggcggcacgcagcaaccacggca

SEQ ID NO: 53585 - RNA, 90 nt, Homo sapiens
agccgaaggcgcccaagcagcagcgccggagcccgagggacggggacggagagaacacgagcccacagcacaaacggcagaacgaagccc

SEQ ID NO: 53586 - RNA, 54 nt, Homo sapiens
gcgggaagacgcgcgcgaggccgccgaggggccccccgaggcgggcgcggacgg

SEQ ID NO: 53587 - RNA, 75 nt, Homo sapiens
gcggacagcagcgcaggcaaaaaacagagaagacagccggcaaagggagacaaaacaccagaccaacaagaccag

SEQ ID NO: 53588 - RNA, 76 nt, Homo sapiens
aagaagacagagacggcacgacggcagacacggcgcagccggcaaaaacccgaaaagcaaaggcccacccaggcac

SEQ ID NO: 53589 - RNA, 72 nt, Homo sapiens
cccccaccgaagccagcccgcaccgccgggccaccacaaggcacagcgcgcgagcggggaacgaccggcgcg

SEQ ID NO: 53590 - RNA, 76 nt, Homo sapiens
cgcgaaaccgcaccgcaaaccaacgcgggccgggcaacacgcagccgagcggccagcgggagcccccgaccccagg

SEQ ID NO: 53591 - RNA, 44 nt, Homo sapiens
gcagggcgcccccggaaaaaccaaacagcgaaacgggcggcagc

SEQ ID NO: 53592 - RNA, 55 nt, Homo sapiens
ggacagcgcacacagcaagcacgagggaccaaagaacccaccgccccgaggaaac

SEQ ID NO: 53593 - RNA, 76 nt, Homo sapiens
aaacccaaagaccccgccggagacgagagaagacgaccccgacgcaggccaggagccgcggacagaagccgagcac

SEQ ID NO: 53594 - RNA, 80 nt, Homo sapiens
ccccggcggcgcgcggaccagggggcggcgccaggacaggacaggagacgaaaggacagagcaaaaaggcaccacaggac

SEQ ID NO: 53595 - RNA, 74 nt, Homo sapiens
gcaggaccacacgcacaccagcaaacccacagcggggacagcccaaagagaaaacgcgaccccaaccgcaagca

SEQ ID NO: 53596 - RNA, 82 nt, Homo sapiens
cccaaacccggaaacccagcggcccagccgggagccgcaagccagccaccaccacagacacggcagggaaaggaaaagaaag

SEQ ID NO: 53597 - RNA, 74 nt, Homo sapiens
acgcagggcgcccccggccccaggaaagcagagagcgaagaaagcccgcaggaagccaaaggaaggccagacgc

SEQ ID NO: 53598 - RNA, 76 nt, Homo sapiens
cgcaggccgcggcgcggcgggcggcggcagggacgaaaggagcccgcagggccgccaccagcacagggagggagag

SEQ ID NO: 53599 - RNA, 87 nt, Homo sapiens
cgagagggagccgcagcgagcaggcaggcagcggaagagaaagaccgaggcaaagaagcaggagcacacaaagaacagcggcagacg

SEQ ID NO: 53600 - RNA, 60 nt, Homo sapiens
agaaacaaacgccaaggaagcaacaacgggaacgaggagagacagagagaggagaaagcg

SEQ ID NO: 53601 - RNA, 51 nt, Homo sapiens
cagagcgagcgccccgcccaggcagggcagcccaggcccggccccagcagg

SEQ ID NO: 53602 - RNA, 78 nt, Homo sapiens
aaaaacgcggaggggaccagagaccaaaaaaaaaacgcgaacaccgacggagccaggaggacgggcagagggagaggg

SEQ ID NO: 53603 - RNA, 72 nt, Homo sapiens
ccagcaacacccacccgaagagacaacaacaaacaaacgggccaagacggcagaggcccgcacggacaacac

SEQ ID NO: 53604 - RNA, 76 nt, Homo sapiens
cggccagcacccaccgagaaggccagcagagagaacaaggccccccaacagccccgccgaggcccccgccgcccag

SEQ ID NO: 53605 - RNA, 79 nt, Homo sapiens
gccccagcaccaggagccacgcccagacgcgggcgcggaaaccgccgcggaggccccagacagcccggggcacaccccg

SEQ ID NO: 53606 - RNA, 47 nt, Homo sapiens
caacgcccgcacaaggagaaggccaccggaacgcccggccgcagcgc

SEQ ID NO: 53607 - RNA, 67 nt, Homo sapiens
gaaacacgagaaaaccgggaggcggagccgaggcacaaaacgagaacagacccagacggcaccaaac

SEQ ID NO: 53608 - RNA, 75 nt, Homo sapiens
gcgggcggaagacaggccacccagcggggagcacggcgagcagccaggccaggagagccagacaacacagggaca

SEQ ID NO: 53609 - RNA, 78 nt, Homo sapiens
cggggaccccggcagccacccaccgccgccgcccccaggcacacagagaaaaaaagggaacaaaacacagcaagcaga

SEQ ID NO: 53610 - RNA, 64 nt, Homo sapiens
cgcaaccggaggcaagcaccaagcgggcgacgcacgaggcacacaggaaggaggggagcaggga

SEQ ID NO: 53611 - RNA, 89 nt, Homo sapiens
aaccaggagcgcgccgacaggagggcaagagccgaaggaccgcgaccaaagagagaagcgacagcgagaggaaaagaaagcgagaagag

SEQ ID NO: 53612 - RNA, 77 nt, Homo sapiens
caaaaaggcaaccacagagagagagagggagggacaacaagcacagcaacaaccaacggacagaagcgcggaagaac

SEQ ID NO: 53613 - RNA, 94 nt, Homo sapiens
cgcagagcgaggcgcgggaccccaggagggggacaggaggcgcggggcccaggagaccgaggggagacagcagcaccagcggggcagagacccc

SEQ ID NO: 53614 - RNA, 76 nt, Homo sapiens
ggaaaaggacgcaaagcccggcgagggcaccaggagggacacgagaggggaaagccgaaagcaacaaaaaaaaaca

SEQ ID NO: 53615 - RNA, 65 nt, Homo sapiens
cagccgcgcggccacgggcagacccacgagcaggagcagacaggaaacaaacagaagcgcacgag

SEQ ID NO: 53616 - RNA, 74 nt, Homo sapiens
gggaccagcaagccgagaaagggaggcggaacaggacccaaccgcggcacacagaaaacccggacccaccccgc

SEQ ID NO: 53617 - RNA, 79 nt, Homo sapiens
caccaacgccaggaagcagaacggagggggacgacaaggaggaacaaagaaacgagacaaaggaagggcaagccacaga

SEQ ID NO: 53618 - RNA, 66 nt, Homo sapiens
acgagggaagaggagaaaccaaaaagcaggcgcccgagccccaaggaggaggaagccaagaacggg

SEQ ID NO: 53619 - RNA, 76 nt, Homo sapiens
gaaaagcgcagcgagcggagccgccggagggaaggggaagcaggccaacccagaacacaccccagcggggaagacc

SEQ ID NO: 53620 - RNA, 71 nt, Homo sapiens
ggaaagacccgcacgggaccgaaaaacacggaacaaggggagaagaagcccagcccacgcgacgaaaaggc

SEQ ID NO: 53621 - RNA, 75 nt, Homo sapiens
ccggagggcagggggcagggcggcagaggaaaagaagacagaccccggagcagcggcagacaggggggagggaaa

SEQ ID NO: 53622 - RNA, 84 nt, Homo sapiens
cggcggcagcgacgcgagcgcggcgaggggagcggcggcggacaagaagaacgaaggccccacggggcaccccaccagccacaa

SEQ ID NO: 53623 - RNA, 84 nt, Homo sapiens
cggaagagagcacacaaggcgggagcagccaagagaagcagggaggagccgaggcaacgacacacgccaggcgcagagcaaggg

SEQ ID NO: 53624 - RNA, 103 nt, Homo sapiens
gacaagaggcgacgccgggggcaccgagcgggaacgcacggggcgcgccgggcggagcaggggaacagagaaaagacgacccaaacgcacgccaagcgcacgg

SEQ ID NO: 53625 - RNA, 115 nt, Homo sapiens
gcgcccccaccccagaagaggaggcaaaggggcaaggacccaacccaggagaaaaagacgaggccccaggcaccgccagccgcgccaccgccagaagcccggaggcacggacggg

SEQ ID NO: 53626 - RNA, 71 nt, Homo sapiens
acacccggaccaccggaaaaagaagcacagacaaggacccaagccaccaggggagggccagggcaggagcc

SEQ ID NO: 53627 - RNA, 73 nt, Homo sapiens
gcggcagcagcccagagcgcaaagaagacgagccacggccaggcggcccaacccgagcccgagacgacgccgg

SEQ ID NO: 53628 - RNA, 76 nt, Homo sapiens
aggagcagggcagagagaccccagaaagacaccacagaacaacgcaagaacaagagccacacgaagcagcaagaca

SEQ ID NO: 53629 - RNA, 67 nt, Homo sapiens
ggcgaggagcaacccagaccgcgacgagaagagcaaaacggagcccaaaaaaggaccaacgagcggg

SEQ ID NO: 53630 - RNA, 31 nt, Homo sapiens
gaacggacaaggggaggccaaccagaagacg

SEQ ID NO: 53631 - RNA, 82 nt, Homo sapiens
gaagaccgccagagacagagaagacaacggcagaagagacaacacagaaaccagggcggaggcaggaacagcagcaaaacac

SEQ ID NO: 53632 - RNA, 100 nt, Homo sapiens
aagcacggcagccggggagccacccaggggcaacccacaccaaggaccgggcgaggccaccccgaggcaaggccccagaggaggaccaagagcgggagcc

SEQ ID NO: 53633 - RNA, 68 nt, Homo sapiens
agcgaaaaagaggagaggcagacgccaaagagaaacacagagaggccggcacggagcagaccacagag

SEQ ID NO: 53634 - RNA, 76 nt, Homo sapiens
ccccaggcagagaaaacacccgagagcaccgccgagcggaccccaaggagcgagaacccgagcagcgccagagcaa

SEQ ID NO: 53635 - RNA, 56 nt, Homo sapiens
caggggcgcacaccacaagggggggagccgcacgacccgaacgccagagacaaaac

SEQ ID NO: 53636 - RNA, 77 nt, Homo sapiens
acgcgcggaaggcagcgcccagcagcgcagcggaccgacccccagccgaggcagacaccacccggggaacggggagg

SEQ ID NO: 53637 - RNA, 84 nt, Homo sapiens
agaagcagagggcaaagggaagaaggaggaaaagcaggaagcggaaaggaaggcccgcacccagaaaacaagggaggaaaggac

SEQ ID NO: 53638 - RNA, 55 nt, Homo sapiens
aggggagacaacaggaggaggagagcgccgagaggcagaccggcggagaggaacg

SEQ ID NO: 53639 - RNA, 69 nt, Homo sapiens
agcaagaagaacagccccaagacgcaggaggcggaaaggggacggggagccagacaaccgaaagggacc

SEQ ID NO: 53640 - RNA, 80 nt, Homo sapiens
gccaccaccaccagcagcgccccacggccaccaacaggcccagacccaggaggaggaggccgcccagagaggaggacagg

SEQ ID NO: 53641 - RNA, 83 nt, Homo sapiens
cgaccgcaccacggcaagggcaaccgcggggcaagcgggccacgcacccgcaccaaggccaaggccagaggcgggaggccaag

SEQ ID NO: 53642 - RNA, 92 nt, Homo sapiens
gcagcagcacgcagaagggaggagcagcccaacagaaggcacaggcggagaacaaagggggacagagaagaaaagacaccacggaacacgaa

SEQ ID NO: 53643 - RNA, 70 nt, Homo sapiens
agaaacaccagagagcggccaacaaaagcaccaccaaggaaacagagcaaagcagcgacaacaaagacag

SEQ ID NO: 53644 - RNA, 79 nt, Homo sapiens
aacagcgggaaagaaggcaaaacacggggcaaaggcaaaccaaacgcaagaccagggcggagaaaagcaaggaccagcc

SEQ ID NO: 53645 - RNA, 40 nt, Homo sapiens
gagaggagggagccgggggaaagccggccccgacgcgggc

SEQ ID NO: 53646 - RNA, 62 nt, Homo sapiens
gcccagacacgagagccgccacaaggcaaaagaggaaagagaaaaacagaagccaaaagcaa

SEQ ID NO: 53647 - RNA, 72 nt, Homo sapiens
ggggcgcaaggcgccaggaggaccggggcgggagagcgacccgggccggcagcaccagcagcgcgcacccag

SEQ ID NO: 53648 - RNA, 73 nt, Homo sapiens
aggcgggaagaggcgaaggccagagcacgagcacgggaaggaagagacccagacgaagagcgcacagaaagag

SEQ ID NO: 53649 - RNA, 49 nt, Homo sapiens
acggcgggagaagccggggcaaggaagcgaggaggagagaaagaaccca

SEQ ID NO: 53650 - RNA, 76 nt, Homo sapiens
ccggcgggcaaccagcgggcccggccgccacccgggaaagacaggccgacagcggacacagcaggggccagacaac

SEQ ID NO: 53651 - RNA, 76 nt, Homo sapiens
acccggaggccagacccgcggcgaccggacccccgccagcccaacagccgccaggagcaaggcagcgacccagggc

SEQ ID NO: 53652 - RNA, 94 nt, Homo sapiens
acaacggaacgccacacagaggaaagcacaaaggaagacgaaccggagaagaggggccaccacagagcccgcagggacacagcagaacaagcaa

SEQ ID NO: 53653 - RNA, 77 nt, Homo sapiens
cagggaaccacggagcacgagaaaacggcggggaaggaggggcccggggggaggaaaacagggcgaggacgggagaa

SEQ ID NO: 53654 - RNA, 56 nt, Homo sapiens
cgccgagcgcgccggaccggcgcccggacaacccgaccaggccagagagcacgcag

SEQ ID NO: 53655 - RNA, 87 nt, Homo sapiens
gacagccagaaaccggggaccaacaaccaccaagaaacagaggggagccgccaccaaaagcagacggaaaacccacggggaagacca

SEQ ID NO: 53656 - RNA, 88 nt, Homo sapiens
cgcaaacaaggagagccacgagcagccgaggggaaagccaggccagaagaaggaaggccggggaggggacaggaaagacacaccaccc

SEQ ID NO: 53657 - RNA, 71 nt, Homo sapiens
ccaacacgcgagcacacacaacgcgagcacacccccagaaggaagccggagccagaggacggggcgaggcc

SEQ ID NO: 53658 - RNA, 87 nt, Homo sapiens
aggagcccggagcgcagccaccggggagccagggcgccagcccccaggaggaccgacgaacccccaaggcacggggcggagcgcagg

SEQ ID NO: 53659 - RNA, 80 nt, Homo sapiens
gcgacacgcgacgcgccaaaacccgcccggaaaggggacaccgggaggcaccgccccaacccccccccgcccggagaacc

SEQ ID NO: 53660 - RNA, 76 nt, Homo sapiens
ggagacagccaacaacccacacgcaccccagaacagcaggacagccaaacagaagcaacaaggaaacagaaaaaga

SEQ ID NO: 53661 - RNA, 79 nt, Homo sapiens
caagagggcggaggccacgaacacgccggagccgccaggcccaggaagacacgagaagcccgaggaggcgaagccaacg

SEQ ID NO: 53662 - RNA, 76 nt, Homo sapiens
cagaaaccagaacaaggcaaaaaagaacgcaagagaagcacccagaagaacgcccagcagagggggcccaccacaa

SEQ ID NO: 53663 - RNA, 78 nt, Homo sapiens
gaggccaacaacagcccacgagcacgccaacgaacccgaggcaggaaaagagcgcgggaccacaggccaagccacgga

SEQ ID NO: 53664 - RNA, 58 nt, Homo sapiens
aaccggaccaggaggacgaaacacgaggagcagagcaaaggaagagaaagaagaagca

SEQ ID NO: 53665 - RNA, 77 nt, Homo sapiens
cggccggccggagcgcggcaggacggcggagggaccacagagaagcgccccaaagacaggacaagaaggaaccaaga

SEQ ID NO: 53666 - RNA, 70 nt, Homo sapiens
gcccggccggaggcaggggaaaggaagacacccgaagacaagaggaccaagaagaagcaaggcgaagaaa

SEQ ID NO: 53667 - RNA, 75 nt, Homo sapiens
caccaaaagccaagaaacgaccaagagaacaaacccagagaagcaaagagggaagaaagcaaacgcgcaagcaga

SEQ ID NO: 53668 - RNA, 62 nt, Homo sapiens
cccggccgcagccgccacccaggggagcacgacacccgccaccggcccgggagggaacaaag

SEQ ID NO: 53669 - RNA, 51 nt, Homo sapiens
acaagcagaaacagacaggaccacgcaaaaaaccagacgagagacagaaga

SEQ ID NO: 53670 - RNA, 100 nt, Homo sapiens
aaaacagacggccagagccgagggaaggggcaagccaccccgcccccaagagcaagccggacaccccagccaccgggcagacccccccggcacacccggg

SEQ ID NO: 53671 - RNA, 77 nt, Homo sapiens
cgcaagccaagcggaccaggccagcgcggcccgagcaggagcgagaaggaagagagaaggccacgcccgaccccaag

SEQ ID NO: 53672 - RNA, 73 nt, Homo sapiens
ccaaaagagcaaaccacagcagaacaagccagacaaaccggacacggacgacaccgagcccaaccgaccaacc

SEQ ID NO: 53673 - RNA, 80 nt, Homo sapiens
ggaacaagcacccacagagggaaaaaaaaaccccggacaaagaaaagagaagcaaccggggaaggggagacagaacaccg

SEQ ID NO: 53674 - RNA, 38 nt, Homo sapiens
ccagcaggccaggaccaaccaggccagaggaagagaaa

SEQ ID NO: 53675 - RNA, 75 nt, Homo sapiens
ccgcaagacccgccacaagcaacgcgggaagagaaggcccaccggcagaaagggagaaacacaaagggaaggaag

SEQ ID NO: 53676 - RNA, 81 nt, Homo sapiens
aaccaccaaaggggaaacagaaacaagcccggaccgacaggaaagaaggagcccacaaagaaaagaacaccgccagcagcc

SEQ ID NO: 53677 - RNA, 80 nt, Homo sapiens
accagcacagagaccaacgggaagcccacagacaggacccccaaggagcaggcacccaacaggcgagccccggggccccg

SEQ ID NO: 53678 - RNA, 63 nt, Homo sapiens
cgcaccggaaaggccacagcccggagcgacgccacccagcgccggcgaccaccaggggccgag

SEQ ID NO: 53679 - RNA, 77 nt, Homo sapiens
aggaggcgcgagagcgggaagaggcggcagacagcggggggacaccagcagcgccgccggaccaccgggcagcagaa

SEQ ID NO: 53680 - RNA, 64 nt, Homo sapiens
cgaccggcagggagggaaggcaagagccaacccaaaaccaagaggacccacagcccaggaccca

SEQ ID NO: 53681 - RNA, 70 nt, Homo sapiens
aaccgcaccacagaaaccagagacacaagcaagagaccggaaaaccagccacagcaggagcacaaggcaa

SEQ ID NO: 53682 - RNA, 83 nt, Homo sapiens
ccaggagcagcgacacacgggggcccggagacgagggccgccaccgcgggccgccggggggaaacaggaagagaacagaacgg

SEQ ID NO: 53683 - RNA, 76 nt, Homo sapiens
acgagaaagacccaacaccacccgggaaggagacaagcaaaccaaagacgcaaaacccagagcgcacaccccagga

SEQ ID NO: 53684 - RNA, 68 nt, Homo sapiens
agaccccagagaagaaggcaggaaaaccaagcaccgacggaaacaggcgaaaaacaacgacgaaggaa

SEQ ID NO: 53685 - RNA, 80 nt, Homo sapiens
ccgaggcccaagcccgcggagcacccgccggccagagaagagaacagccccgacaagggaccgggcgggccccgcaggaa

SEQ ID NO: 53686 - RNA, 74 nt, Homo sapiens
gaagagaccgggcagaacccacagaagcagagacaggacagaaagaagagagcgaggcagcgagaggaagaaag

SEQ ID NO: 53687 - RNA, 78 nt, Homo sapiens
gaggcgcagaagaagcacaccgaaacagaagagcagacacaggcaaaaaaagaagcgagaagcacgcccgaaggccag

SEQ ID NO: 53688 - RNA, 67 nt, Homo sapiens
agaagacgacgcaccgcaggcagacaaaagggccaaagaagggagagaggacacgcaggggagaacc

SEQ ID NO: 53689 - RNA, 61 nt, Homo sapiens
ccccaaggcgcagcgggggaacagcagcggcaagcacagagggccggagcggagagggccg

SEQ ID NO: 53690 - RNA, 84 nt, Homo sapiens
gcagagccgggagaaccggaggaggaggccacacagaaggacggcccgacggaaggcaaaagcagaccggaaaacccaccggca

SEQ ID NO: 53691 - RNA, 68 nt, Homo sapiens
aaaccaaaagaaaaagggcgaagaggaacagggcccagaacaaaggggcccccccagcgaaggggcga

SEQ ID NO: 53692 - RNA, 75 nt, Homo sapiens
gacgcccgggggaaacagagaaagaaggcggccaggccaaccgaagcaacagcgcgaagcggacaagcacaaaac

SEQ ID NO: 53693 - RNA, 81 nt, Homo sapiens
cacagacagaacccgcaccaagaaagacgaccgccaaccagggagaacacagagaaaaaccgcaagaaaccaggcgggaaa

SEQ ID NO: 53694 - RNA, 74 nt, Homo sapiens
gaggcaggcggagccgaccgggccaggaacggaggcaaaggaaaggggagaggacgaagccagaaaggagaaac

SEQ ID NO: 53695 - RNA, 76 nt, Homo sapiens
cgcaggacggcgcgacgagacccgaccagcgggggcgcggcggccgcgcagccacccaagacacaagcgggacgga

SEQ ID NO: 53696 - RNA, 74 nt, Homo sapiens
gcaggacgcgggcagagagcggacccgcgacgcggcccaccacaaaccaaacgagcaagaaggagcgaggcaga

SEQ ID NO: 53697 - RNA, 70 nt, Homo sapiens
caagggcgccccagcagaacaggaggcagggaccagaccccacaagaaaacacacaaccacaggcccaag

SEQ ID NO: 53698 - RNA, 39 nt, Homo sapiens
gacaccggaagccgagaaagggagcgacaagcagaggca

SEQ ID NO: 53699 - RNA, 81 nt, Homo sapiens
aagggcgcaggagccggagccagcgcagccgcgcccgcagcaggcacgcacagaggcgggcgcggccagagcggcccagaa

SEQ ID NO: 53700 - RNA, 72 nt, Homo sapiens
ccgccccagccgcagaggccaggggaccggaaggcagaagcggaggcaaggccagcacgaccagaagggcca

SEQ ID NO: 53701 - RNA, 78 nt, Homo sapiens
gacaggggaagagggcggaggaacagcggggggccaaaagagaaacaggcacgacaaccaaagcggacccaggaaaca

SEQ ID NO: 53702 - RNA, 79 nt, Homo sapiens
ccgccgccggagcgagaacacggcaccgcaccaacgaccgaagcaccaggcacacccacaagccgagcgcccagggaca

SEQ ID NO: 53703 - RNA, 69 nt, Homo sapiens
ggacccgcgaaaacaagacccagcaagaggaggaacacacacaagcccggaggcagaggacgcaccagc

SEQ ID NO: 53704 - RNA, 53 nt, Homo sapiens
cccagaccgccaccagggaagcccagaggcacggggcagaacaccaacagagg

SEQ ID NO: 53705 - RNA, 83 nt, Homo sapiens
agccagcccgagcaagaaagagaaggacagaaaacgggccccagacacaagccccaccaagaggacaccccaggaacgcggag

SEQ ID NO: 53706 - RNA, 73 nt, Homo sapiens
cggaagggcacgcagacaggaagaagaaagagggcgccaggaccacaagaaccaaagcaacgagagacaaaac

SEQ ID NO: 53707 - RNA, 69 nt, Homo sapiens
ccagcgccaggacaaacaaggcaggacagcacacaaaagagggacaacacaagccacagcgcccaggcc

SEQ ID NO: 53708 - RNA, 58 nt, Homo sapiens
ccagggcaccggaagaccaggcccaacggaagcgaaggaagcgcaggcgcagcaacgc

SEQ ID NO: 53709 - RNA, 53 nt, Homo sapiens
acagagagcacaaaagacaacaaaagccgaacggaaagaaagacaggacaaac

SEQ ID NO: 53710 - RNA, 55 nt, Homo sapiens
ccagcgcagcagagcgccaagacgggcggagaacggaaaagcaccaggaagcaga

SEQ ID NO: 53711 - RNA, 79 nt, Homo sapiens
cgaccagacaggcggcgccaccgaacagacccggaaggacggcgagggacagggcagaccgccagcagcacagcaagcc

SEQ ID NO: 53712 - RNA, 76 nt, Homo sapiens
gggaagggcgacagcgcaaggagacgaagagaccaccgggaacgcccagcagcccgggaccagccagcccggccca

SEQ ID NO: 53713 - RNA, 66 nt, Homo sapiens
cgcgaaccgagaaggaaccagcaaacagccggaggaacaccgagaggggaacaagaacaagaaagg

SEQ ID NO: 53714 - RNA, 80 nt, Homo sapiens
gggcggggaagacggccacacacggggacacgcgggggcggcacccggcaaaggaagggacccccagcaacccagaagcc

SEQ ID NO: 53715 - RNA, 91 nt, Homo sapiens
aaaacacacagaaggccggaagagaaggggaaaagacgcacgcaagaggcaggcagggaaaggcccccacaccgccgacgagaggacaaga

SEQ ID NO: 53716 - RNA, 52 nt, Homo sapiens
gaagaccgggacagaaggcagccgggacaggaggcaacacggaccagcgccc

SEQ ID NO: 53717 - RNA, 82 nt, Homo sapiens
cacgggcagaagacggaagcccaagccggaaccaagacggaagcccaagccgcaaacagccggcaccaggagcagcaccaga

SEQ ID NO: 53718 - RNA, 83 nt, Homo sapiens
ccgaggaccccaccgccaggaccccccaggagagcgccccagggcaagccccgcccggccaacaaagaacacagaggaacgcc

SEQ ID NO: 53719 - RNA, 73 nt, Homo sapiens
agaagcaggggggccaggaggggagaggaggcaggcccgcggcacccaagaacgaggccgcagaggacccaca

SEQ ID NO: 53720 - RNA, 58 nt, Homo sapiens
caccacaggccaggggcagcggccccgcggccgcaggacacgcccggagaccccacaa

SEQ ID NO: 53721 - RNA, 77 nt, Homo sapiens
gggagcacgagagccaacggcacgggccagacaacacagggacacaacaaacacaaccgccacagaagcacaggcaa

SEQ ID NO: 53722 - RNA, 76 nt, Homo sapiens
ccgccccaccagacgaagcgagaccccccagccagccgagagccgggagggacacggccaacacgggaaggaaaag

SEQ ID NO: 53723 - RNA, 70 nt, Homo sapiens
ggcagaccaggacccgcgcagccgcacacccagggaaacaccaaccccacagagggggcagaccccaaac

SEQ ID NO: 53724 - RNA, 82 nt, Homo sapiens
aagaagaaaaagaaggcccgagcaaagaagagcccgaacaaacaaacacccagaaacaagagggaccagccagggcaacagg

SEQ ID NO: 53725 - RNA, 71 nt, Homo sapiens
cgggcggagaggagaagcggcccggcagacccagaagaggggccggaggccccgcgaaacgaggggggggg

SEQ ID NO: 53726 - RNA, 50 nt, Homo sapiens
gaccgagagcccggaccagcagagggccgacggccaagcccaacagggga

SEQ ID NO: 53727 - RNA, 60 nt, Homo sapiens
ccgcaagcccggccggcccggcccgccgcgcccggaggagccgcccccggcgagaacgcc

SEQ ID NO: 53728 - RNA, 72 nt, Homo sapiens
cacgaggggaagccccgacaccaggggacacccagaagcggcgccgccggcagacaaaagagaacgaacgca

SEQ ID NO: 53729 - RNA, 81 nt, Homo sapiens
gccacagaccagcggagccgaagccacgcacacgacccggcaccgccggccaggaggagagcgcaccaccaaaaaggcaaa

SEQ ID NO: 53730 - RNA, 64 nt, Homo sapiens
aaagccgacaaccccagaaacagccacgaggacaagcagaaaccaagcggaccgagacacagcc

SEQ ID NO: 53731 - RNA, 71 nt, Homo sapiens
cccggagagcgagcgggagcgggccggccccgcggggagcagcccgagggcgggaaaacggcacaaggcga

SEQ ID NO: 53732 - RNA, 80 nt, Homo sapiens
gaggaacccgaagaagaaaggacgacagccagagagaacccaggccacaacacccggcccaaagaggcgaggagaaggga

SEQ ID NO: 53733 - RNA, 54 nt, Homo sapiens
agcaccggagccgccgcgcacgagcgacgcgcccacggaggaggcgggggcccc

SEQ ID NO: 53734 - RNA, 74 nt, Homo sapiens
aaaaccagcaacaccccaacagggaaaacaaaggcagagaagccagacggcaaaagcagcgggaacagacggcc

SEQ ID NO: 53735 - RNA, 72 nt, Homo sapiens
caggcagaaaaccccccaggggaaaaagcagcaagggcaacaaaggaagccaggaaaggcagcccagccacg

SEQ ID NO: 53736 - RNA, 79 nt, Homo sapiens
gagggcggcgcgggagcagcacccacagccaaggcgggagccacgggaaacccagacgacaaggaaggccaagggaccc

SEQ ID NO: 53737 - RNA, 48 nt, Homo sapiens
caggaggagcgcagcgaagcacccacgcaccacccgggaaccacccgc

SEQ ID NO: 53738 - RNA, 74 nt, Homo sapiens
cccggaagagcgccccaggagaaacaagggccgcaaggccaggcgcgcagaggcacccaacggcacagacccca

SEQ ID NO: 53739 - RNA, 72 nt, Homo sapiens
caaaaagaaggcgcccaacccaacgaagaaacaaaacccaaagggggccaggacgggacagggaagagcggg

SEQ ID NO: 53740 - RNA, 75 nt, Homo sapiens
cgaccagagagcaccaaacagagcgcggccaggaacaacagaagagaaaaagaaaagacccagaccccacccagc

SEQ ID NO: 53741 - RNA, 78 nt, Homo sapiens
ggcagcagcaagagaccagagaacacccgcgagggcccaggccgaaacaaccagagagcacgggaaaggaagggcggc

SEQ ID NO: 53742 - RNA, 92 nt, Homo sapiens
cccagggaagcgcagaaagcaggcgaacccgcggcgcaaaacggagacccgcccggcaccaaaggccagcgccacccccacagaacgacggc

SEQ ID NO: 53743 - RNA, 73 nt, Homo sapiens
agggcggacgggaaagcagacacagaagcggaagaaaggaaaaaacagcaaaagaaggcccacgaggaacgcc

SEQ ID NO: 53744 - RNA, 66 nt, Homo sapiens
ggcagccggagcacaaaagaagcagaaagggccgccaaaacagggagagagacgcaacagaagccg

SEQ ID NO: 53745 - RNA, 87 nt, Homo sapiens
gcgggcccgaggcgcaccaagggcgaaggagccggcccaagagagcgacaagcagcaggcgaacaccaccggagcccccaaggacag

SEQ ID NO: 53746 - RNA, 76 nt, Homo sapiens
cagacgccccccccggccagccccgggcgcggggcaccgcacagaaggcagcgcaaaagagggaaccggaggaagc

SEQ ID NO: 53747 - RNA, 36 nt, Homo sapiens
cacgcacgcaaaaaaccaggaaggcacagcgagcac

SEQ ID NO: 53748 - RNA, 77 nt, Homo sapiens
gcaacaccccgagcacggcacacacagccggccgaggaccagggacaacagagccagacgagcccacagcccgggcc

SEQ ID NO: 53749 - RNA, 77 nt, Homo sapiens
acagggccccggacaggaaagagggcgggagcagccacagagaagacccagacgccacaacccagacacacaaagcc

SEQ ID NO: 53750 - RNA, 35 nt, Homo sapiens
aaggaaaagggaacgaaaagcaagcgccggacacc

SEQ ID NO: 53751 - RNA, 76 nt, Homo sapiens
acgccaaccaccgcacggcaggggccggccaaccaggccccccaaggggagaaaacaagaggagggaaggaacaca

SEQ ID NO: 53752 - RNA, 73 nt, Homo sapiens
gcagaaaaaccaggaagaaagcacaagcaaaacccaagagaacgcccaaagaaaaaaagagagaaaaacgggg

SEQ ID NO: 53753 - RNA, 85 nt, Homo sapiens
gccgcgcgaccgggggcgccgggcaagggcggggcgagagggcagaacgccgcccggacagaccagacaaagggagcaccagcca

SEQ ID NO: 53754 - RNA, 81 nt, Homo sapiens
ggccgcgggaggacaccacccacagaccaaagagaggcacaacacagaaaagggcccaaggaagaaagacaagaaagacca

SEQ ID NO: 53755 - RNA, 55 nt, Homo sapiens
aagcagcaaccagcccaaagggccacagacccccgccccggagaaggaggagcag

SEQ ID NO: 53756 - RNA, 81 nt, Homo sapiens
aagacagcaagaggcaaaaccggacaagaggccaaccaaccggaggaaaacacaccagacccaacacaggagggcacccca

SEQ ID NO: 53757 - RNA, 76 nt, Homo sapiens
gggaggaggagacacccacgacccgagagccaggacgcaggaaagccaaccagacggccgagccggagaagacgac

SEQ ID NO: 53758 - RNA, 70 nt, Homo sapiens
cccgacgggaccagcccccggaagcggaagaaagcaagaaaggaagccaaaggcagcaacggaggcggag

SEQ ID NO: 53759 - RNA, 78 nt, Homo sapiens
gaggggaggcaggcgcggcagacggcgacagggcggcggcgccaggcagggcgcagacgagaagaggcgaacggaagc

SEQ ID NO: 53760 - RNA, 79 nt, Homo sapiens
ccaaggagggcaccaacgccgccaggagaaagacagcaaagaaaaggagaagaaaggaaaaaaacaaccccgggcaccc

SEQ ID NO: 53761 - RNA, 72 nt, Homo sapiens
ccgaaaaaagagagggggggaccgaccgcaacagaacggacccgcgaaaaccgcaaggaacagaacgcaaca

SEQ ID NO: 53762 - RNA, 84 nt, Homo sapiens
gaaggacagcggcaccgccagacggccagaaagccgccagagcggggcacggagcgggagccagcccccaggcgcgaacggacg

SEQ ID NO: 53763 - RNA, 72 nt, Homo sapiens
gggaaaggacgagcagggagcaggacaagccacccccaggccgaaagaagaaaacccgagcagagaaaacaa

SEQ ID NO: 53764 - RNA, 54 nt, Homo sapiens
agcaggacgcgccgcgccccaagaacggccgagcgaccaggagaggagcccccg

SEQ ID NO: 53765 - RNA, 77 nt, Homo sapiens
aggcgggaggggccgggaggcagaggggcagggacagaagcgaaggggacagggggagaaccgccagggaaacccgg

SEQ ID NO: 53766 - RNA, 69 nt, Homo sapiens
cccgcaaggccaggacacagaaccgagggcgggagacaggaaaggaaaacagggcgggaggcgagccaa

SEQ ID NO: 53767 - RNA, 81 nt, Homo sapiens
ggccccaccggcaccgagaaagacaagcgcgccccagaccccagagcacgccggcaccaccagacgggcggaagaggaaag

SEQ ID NO: 53768 - RNA, 80 nt, Homo sapiens
caagagcggaggcgcccggcggagcagaggaaccacacgcgacagggcggagaacggaaaagcaccaggaagcagagagg

SEQ ID NO: 53769 - RNA, 84 nt, Homo sapiens
gcccggccccgggcacgcagcgagccagggaggagcggcgccccgcggcaggcagcccaggcggagggaaggccggagaggccg

SEQ ID NO: 53770 - RNA, 76 nt, Homo sapiens
cggcccaccccccacgcaccgcacaacaagaggccggcggggcgacagcacccgggccgggcgagcggcacgccgg

SEQ ID NO: 53771 - RNA, 49 nt, Homo sapiens
agccagaaagggcgcacaagcccccagacgaggaacgagcagacgacaa

SEQ ID NO: 53772 - RNA, 49 nt, Homo sapiens
acgaagaccagaacggaggccaggccagagggaccaacgaaggcaaaca

SEQ ID NO: 53773 - RNA, 82 nt, Homo sapiens
gggaacggaaacacgaacaagaccaacgggagccgcaaggacaacagccgcggccagacagcggccggaggagaacacagaa

SEQ ID NO: 53774 - RNA, 59 nt, Homo sapiens
gcgaaccggcaggccgcgccaggagccaccaagcgagaggaggcagagagccccgcgac

SEQ ID NO: 53775 - RNA, 104 nt, Homo sapiens
agcgcggcgcgcgcccagcgccgccccgcgcgcgcccgccacggcgccgagccgcggccgacacgcaccccgcgccgccgccccccaccaaggaagcccaagcc

SEQ ID NO: 53776 - RNA, 74 nt, Homo sapiens
ccccaaggggcccaagagagcggaacaaaagggggccggcccagagacccacagaaccgggccccgggccccca

SEQ ID NO: 53777 - RNA, 82 nt, Homo sapiens
ccacgcgagccaccaggcgagcgaggagccaggacccggaaagagcacagcggagaggagaaaaagaaacccaaaggggcac

SEQ ID NO: 53778 - RNA, 52 nt, Homo sapiens
aagaggaggaaaaagaggagagcagaagacagcaagagaaaggaagagaagc

SEQ ID NO: 53779 - RNA, 85 nt, Homo sapiens
aagacaccaaggagaggccaaccagcccgaagagccaaccacaggagggaaaccacgcaggcaaacgagaaaaagccgagaaggc

SEQ ID NO: 53780 - RNA, 85 nt, Homo sapiens
aggagggagggcgccgagggggggcgacgacgaagacagcggagaggagagcgggcggaggacgaggaccaagaacgcccagccc

SEQ ID NO: 53781 - RNA, 77 nt, Homo sapiens
ccaacgccccgcaaggcccccagcacacagcgcggccaaacagacggcaggcgcgagccaacccaagcggcccccac

SEQ ID NO: 53782 - RNA, 74 nt, Homo sapiens
gcgagccagacagacgcgagcgacaagagaaggaggaaagcaggcccaggggaagaaaaggccaccagcgagga

SEQ ID NO: 53783 - RNA, 79 nt, Homo sapiens
ccgcggcaggagcgaagggggcccaccggcaaccacaagccaggaagaagagacaaagcaggaggacacaagaagggag

SEQ ID NO: 53784 - RNA, 79 nt, Homo sapiens
gacgcgccgcgccgcgcccgggcagggccaggagccgagcgagaccacccacccaccccacaccgaccggcggacaaca

SEQ ID NO: 53785 - RNA, 76 nt, Homo sapiens
aggcagcacgaagaaaaagggaaacacagaaccaaaggaaaaccaacccggacacaggggaagcggggaaagccag

SEQ ID NO: 53786 - RNA, 62 nt, Homo sapiens
cacgcacagggcgcaggccggcacgagagaggagaaagacagcaaagaaaaggagaagaaag

SEQ ID NO: 53787 - RNA, 93 nt, Homo sapiens
cggcccgacaccgcgggccgccagacgggaagggccagagggcaggaccgggggacggccagacgagccgcacacgggcccacgagccaggca

SEQ ID NO: 53788 - RNA, 87 nt, Homo sapiens
cggagggacacacaagcaagacagcaggaaggaggaagaggagcgaaggcggcggaagaggaagaaagagaacgcgcaaaaggagga

SEQ ID NO: 53789 - RNA, 75 nt, Homo sapiens
gaagaacagcgggaaagaaggcaaaacacgggggaagcacacccgccggagagggaagagcaaagcggaggccac

SEQ ID NO: 53790 - RNA, 36 nt, Homo sapiens
agaaaagaaacgaacagaaggcaagcccaggcagcg

SEQ ID NO: 53791 - RNA, 110 nt, Homo sapiens
gccgcaagacccaagaagaagaaggcgaaggaccccaacggggaggccaacggaagaaggaagaagcccagcggaggcgaacggcccccgccaacacgaggaccccacgg

SEQ ID NO: 53792 - RNA, 107 nt, Homo sapiens
aacgccgggccgcgggcgcggacgccggcccgcgcgcgcaccccgcggacgccacagcgcccacacccaccgcccgggcaggccacggcggagagggccgggcgcgc

SEQ ID NO: 53793 - RNA, 53 nt, Homo sapiens
cagggcaaccgaacaaaggggccaaggaaaggacgcagacccgaaagcaaacg

SEQ ID NO: 53794 - RNA, 81 nt, Homo sapiens
gcgccgcgcggagcccgccagcgcgaggaagaacggagcaaggccggagcagccagggcgggcacagcgcagagaaccccc

SEQ ID NO: 53795 - RNA, 70 nt, Homo sapiens
caaccccacccccaggaagcagcccgccgagccccggaacagggacaaaagcgggaagacgaccgaaaga

SEQ ID NO: 53796 - RNA, 79 nt, Homo sapiens
caaacaaaccgaaagaagaagaggagaagaaaagaccagaccacccgagggagagcgcaccaccccacgcgccaggcga

SEQ ID NO: 53797 - RNA, 63 nt, Homo sapiens
aaaaacgaccaagccagagaacagcccccacgcagcccagaaggcagagagggcagcgcccga

SEQ ID NO: 53798 - RNA, 77 nt, Homo sapiens
gcgcgacaggggggccggccgcgcagccggcgaagggaggaggcagcgaaaacacaccaacgcaggacgagaaaaca

SEQ ID NO: 53799 - RNA, 74 nt, Homo sapiens
accgcaagggaacaaggagaagagcaggacacagagaaccaagacagcaccaggggaggcaaggcgcgaccggc

SEQ ID NO: 53800 - RNA, 39 nt, Homo sapiens
agccacaagcagacgacaacgcagaacggaaagccaggc

SEQ ID NO: 53801 - RNA, 70 nt, Homo sapiens
ggaacaccggcacaggccgcgagacacccccgcacgagagaggggaaaacgggggacaaacaaacccgcg

SEQ ID NO: 53802 - RNA, 80 nt, Homo sapiens
accaggaaagccacccaagaagcggaccaccccaaggggaagcggggagaacggcgcacgaccccagagccgcccaacag

SEQ ID NO: 53803 - RNA, 59 nt, Homo sapiens
cggagggggagcagacgaaccggaacccgcggaaaagggaacaaccccaaaaaaccgac

SEQ ID NO: 53804 - RNA, 76 nt, Homo sapiens
gggagaagcagcagaaccagaccagcaggagaaacaaaacccgcagagaagggcagaaacaggacgaaaaaagggc

SEQ ID NO: 53805 - RNA, 72 nt, Homo sapiens
ccagcccccgagggcgggaacagaggggcagagaaaaagcagaccccgaagccaaaaggcaaaagaaaaagg

SEQ ID NO: 53806 - RNA, 79 nt, Homo sapiens
caaaccaccaagcaagcgaaacgccgaaaagacaccgaaacagaagagaagagagaaggaggaccagcccaaaaccagg

SEQ ID NO: 53807 - RNA, 79 nt, Homo sapiens
aggcagccacgcgaccccgcagccggcagcgccagggaaaggggggacagggaccccgcaggcagccgcaccacacggg

SEQ ID NO: 53808 - RNA, 77 nt, Homo sapiens
gcaacggccaaccggcaagaccagacgggaacgggagacaagcgcagcgaggagggagaggcgcacacaggaaagac

SEQ ID NO: 53809 - RNA, 85 nt, Homo sapiens
cacccagcaccaccggcccgcacgccggcacagcggcggccagcagacccagaacagagccaccgaagaagcagggcgggacggg

SEQ ID NO: 53810 - RNA, 90 nt, Homo sapiens
caggacccccgcacagcgaccgacgcgaacaccagggggacaagggccgccgacacgcccacgacagcagcgccagcacgagaaggagaa

SEQ ID NO: 53811 - RNA, 59 nt, Homo sapiens
caggcagcgcggaggggcgagccagcggccaggggcgccgaggggaaagacgcgcaaaa

SEQ ID NO: 53812 - RNA, 75 nt, Homo sapiens
gacggcccaaccccgcaagacccagaaaaggagcgccccacagcaaggcgggcaggagggcgcacgcccacagac

SEQ ID NO: 53813 - RNA, 49 nt, Homo sapiens
accagcaacaagccagagccaccagacacagcaggcagaagagagccca

SEQ ID NO: 53814 - RNA, 47 nt, Homo sapiens
gcaggccggggaccacgagcacaacacgaaaggagaagaggacggga

SEQ ID NO: 53815 - RNA, 80 nt, Homo sapiens
acgaagagcccgggcggcgccgaccggccacgggcgagcgcggcaggaaagcgaacgcgaaaagaaaagccgagagcagc

SEQ ID NO: 53816 - RNA, 75 nt, Homo sapiens
cgaggcgaaggccgaaccccggcccaagagggaagaaaacaaagaaccgaacagagaccgagacgacgaaacgac

SEQ ID NO: 53817 - RNA, 73 nt, Homo sapiens
gcggagcggagacgggagaagaaaagacggcaaggaaaggaggaaaacaagcgaagcggcaacaaaacggaaa

SEQ ID NO: 53818 - RNA, 75 nt, Homo sapiens
agagcgacaggaggagacaggcgagagaggaggacacgaccgaaccagaggggcaaagggggcaccaagaagcag

SEQ ID NO: 53819 - RNA, 89 nt, Homo sapiens
gacaccggcggccccaccagcagacgcagccgagacaccagcccgaaacaccaccaagcacgcaccccgcgccgccgccccccaccaag

SEQ ID NO: 53820 - RNA, 83 nt, Homo sapiens
ggcaacgccgaacccagcgcgcagcgcgcaggaaccccccaaacgcaaaagccgccccaaggcaaaagaaggaccccagcagg

SEQ ID NO: 53821 - RNA, 71 nt, Homo sapiens
ccggccagagggcgggggaagaagcgggagaaagcacgccaaggacaacgccacagcagcggaaagggaaa

SEQ ID NO: 53822 - RNA, 59 nt, Homo sapiens
aagacacaaggggaagaacacgagccagcagaggccaaggcagcagcgaagaagaaagg

SEQ ID NO: 53823 - RNA, 73 nt, Homo sapiens
ccgcgcacgacccagccccagaggacaccagcgggaaggcaaaacagggccgaaaaggaccaccccccacacg

SEQ ID NO: 53824 - RNA, 68 nt, Homo sapiens
gcggaggagcggccaggaacgcaaaccagccagcacgggggcccagccagccagcagcgaggggggac

SEQ ID NO: 53825 - RNA, 70 nt, Homo sapiens
caccaaagaaaggcgaacaaaaaccccaggcacaaaaacggacagccaaaacaggaacccacgggccacc

SEQ ID NO: 53826 - RNA, 86 nt, Homo sapiens
cagggcccagcaggccgaccgcccgccacgggacgcacaccgagacgaacacagaacagcacgaccagaggggaagccaagcaaac

SEQ ID NO: 53827 - RNA, 74 nt, Homo sapiens
cgcgggcgagccggcgacggacgcggcgcgcgaccgacacgaaggcccgagccggcaaacgagagcaaaaggga

SEQ ID NO: 53828 - RNA, 85 nt, Homo sapiens
gcggcgcggggccaccagggggcccagccagcacggacgagacaagggcaacgagacacccagcggcccggccccgccgggagac

SEQ ID NO: 53829 - RNA, 74 nt, Homo sapiens
agagcaggccagaggaccacccccaaccccacgccaccgaagagccaagcccaggaagaagaccaaaggacaaa

SEQ ID NO: 53830 - RNA, 79 nt, Homo sapiens
aggcgccgcccccaacggcacccgccagcccgcaggccgggcccaagcaggaagaaagaaggcaaagacggagggagaa

SEQ ID NO: 53831 - RNA, 57 nt, Homo sapiens
agaaacaacaaagcccacgggaggagaacacacaggagagcagaaacaccagaggcc

SEQ ID NO: 53832 - RNA, 87 nt, Homo sapiens
ggacacagcccccacacaaaaaagggacagagaccagagagggcaagcccaaacccaagccacggacacagaggcggccggacacca

SEQ ID NO: 53833 - RNA, 79 nt, Homo sapiens
agccccaaagcccacgggccccaccacacggaacgcccgacccgggccagaagaggaccacagcaaaaaaaaagacgag

SEQ ID NO: 53834 - RNA, 83 nt, Homo sapiens
cgacaggcgcagcgcggccccggagcccgcgcccgggcggccgccggcagagccgaggccggcacggacccagcccgacccca

SEQ ID NO: 53835 - RNA, 81 nt, Homo sapiens
caggccgaaggacacggccaaccgccacgacagcccaccaggccaccacgcggcgggccggacaaggcacagggagaagaa

SEQ ID NO: 53836 - RNA, 84 nt, Homo sapiens
caggaccggaggcgccagccaaccgcagggagcacgcgggcaggcagcccagcaaacccaggcaagaacggagcaaaaaacgga

SEQ ID NO: 53837 - RNA, 61 nt, Homo sapiens
ggcggagcgagaaaagaggaagagcacaggaagcccggcccagcagaaaaggcgagcgcgc

SEQ ID NO: 53838 - RNA, 58 nt, Homo sapiens
ggagaacacagagcagacaaaagcagacaaggaaagaaaggcaaagcgagcaagaggg

SEQ ID NO: 53839 - RNA, 73 nt, Homo sapiens
cagcccccaggcggaacgcccgccccgcagagagaggaacagggagggcccccgccagcccggcaggcgcggc

SEQ ID NO: 53840 - RNA, 76 nt, Homo sapiens
gacgggcgggcacggacgcgaggccgcgggcgcgcgggcgcgaccggcggcggcgcggcccagggagggaggggaa

SEQ ID NO: 53841 - RNA, 56 nt, Homo sapiens
gaagcaaaacgggggacagccaggcagacgccaccagcgagacgacgggaccgaag

SEQ ID NO: 53842 - RNA, 39 nt, Homo sapiens
acagagccaacgaaagcaaagaaggaaagaggcagaagg

SEQ ID NO: 53843 - RNA, 79 nt, Homo sapiens
gccccccgccacaacggccgcagggccgaggagacaggagaaggggcaacccaacaacagccaccgggacacccgcagg

SEQ ID NO: 53844 - RNA, 78 nt, Homo sapiens
agaggacaagagacgacacgcaagcaggcaaccgaaacagaaaagagccacccacgaagagcaagggggcagacaggc

SEQ ID NO: 53845 - RNA, 84 nt, Homo sapiens
cccggacccccaacacacccaaaaagagacagacacgccaagaaggggaggcagccccccccggcacgaccacaccggccggcc

SEQ ID NO: 53846 - RNA, 68 nt, Homo sapiens
ggggagcacacacgacgccaccgcgaccgggggggcccaccagcccccaacgggcgcaccagcaaccc

SEQ ID NO: 53847 - RNA, 72 nt, Homo sapiens
agcaaacgaagggcaagaacaaaaacgagcgccccccggaccgagaagcgacgaaggcgccccgccgagcca

SEQ ID NO: 53848 - RNA, 80 nt, Homo sapiens
cggaccgagagcgcgaaacgcacgagaaggccacacagacgcggcaacccggaggacacccccaacggccaccgcagagc

SEQ ID NO: 53849 - RNA, 79 nt, Homo sapiens
cgagcagcccggggaccagcacgcaggcgcaaggaagaagagacgccgcgcggcagacaaggcccggcaggcaaagcgg

SEQ ID NO: 53850 - RNA, 35 nt, Homo sapiens
aaaggaagaaacggaaaggcgagcagggcacaaga

SEQ ID NO: 53851 - RNA, 53 nt, Homo sapiens
aacgcaccaggccaaagaaagagaagaggagcacggcgaaccgcaaacagaag

SEQ ID NO: 53852 - RNA, 91 nt, Homo sapiens
aaaacgaggacccaagaagcagaaggagaacaagccaggaaaaccccgaaaacgcaagaagcgaaagccaacaggcagaccagagacagcg

SEQ ID NO: 53853 - RNA, 74 nt, Homo sapiens
aggagcccagggcaccccggaagaggagcccagccaaacaacggcaagcggagaagagcaaggccgaaccgaga

SEQ ID NO: 53854 - RNA, 74 nt, Homo sapiens
acgggaagagccaggacaacccaacccagacaccagggcagacccacccgaaaaccccaccaagaccacaacag

SEQ ID NO: 53855 - RNA, 76 nt, Homo sapiens
ggcgagaacgccacgcgggccggcgaaagcgacagcaaagcaagccaagagggcccagccaagaagcacggcaaga

SEQ ID NO: 53856 - RNA, 83 nt, Homo sapiens
gaggcgagaggaccggagccgagcgggaggcagaagccaagaccggcccgaggcggccgccacacacgggacaccaggacggg

SEQ ID NO: 53857 - RNA, 77 nt, Homo sapiens
aagcaagcaggaaaacgcagagaaaaaacagaccaggggaacccaggaggacgcacccagacccagccaacgagcac

SEQ ID NO: 53858 - RNA, 80 nt, Homo sapiens
cggggagccccagagcaccgcccagaacccggaggcgggccccaggccaaggaggagcccaccaggggagcaggccggga

SEQ ID NO: 53859 - RNA, 68 nt, Homo sapiens
gcagccgcgaaaccaagcgagcaggcgacccaaaagagcgaaggaaaaccagcaacaaaaccgaaaca

SEQ ID NO: 53860 - RNA, 85 nt, Homo sapiens
gccagacagcgggccggagcagccgcgggcgcccgaggggccgagcgagacgggccaccagagaacccaggagccgcagacgaca

SEQ ID NO: 53861 - RNA, 73 nt, Homo sapiens
cagaaacgaagagaagggaaccaacggcagacagaggcccgggcccgagcccccacagccaggaaaacagccc

SEQ ID NO: 53862 - RNA, 59 nt, Homo sapiens
ccgccccggccaccgccccgggaagcccggaaagcggagccccgggcccagcaggaggc

SEQ ID NO: 53863 - RNA, 74 nt, Homo sapiens
acgggaaggaagggacaagacccacagcaaagccagcgacagaagccagaaacaagacggcaggacagccccag

SEQ ID NO: 53864 - RNA, 88 nt, Homo sapiens
ggaaaagagccccgaacaccacgacagcgaggcagccagcagcagccaccagagcccaagagcacagccaaagggcggcacccggaga

SEQ ID NO: 53865 - RNA, 70 nt, Homo sapiens
aggaacggggggagagaacccaaccagggggaaacacagaacgcagggaagcgcgccgaacgggagcccg

SEQ ID NO: 53866 - RNA, 83 nt, Homo sapiens
ccaccgggaaggacagaaggggacccaagggagagagggaacggcgaaagggcagcccggaaggagcaccaccaccggaacgg

SEQ ID NO: 53867 - RNA, 62 nt, Homo sapiens
ggcagaccggaagagacacgcggggccaggacccagcagccagcgaagccccaaggaagccg

SEQ ID NO: 53868 - RNA, 88 nt, Homo sapiens
cgggccaaggccgcgccgggcgggacgggggggcggcccggccccgcagccggaaccaaaaagaagccccagagccggggccaggagc

SEQ ID NO: 53869 - RNA, 74 nt, Homo sapiens
cgccccggccacccggccagcgagaacaagccaggaagaagcagcaacgccggaaaaacgaagacaaccaccaa

SEQ ID NO: 53870 - RNA, 72 nt, Homo sapiens
acagcaggcaccaggaaaggggggagcaagacaagccaaggggccacagggggggaaggagacgcgcccccg

SEQ ID NO: 53871 - RNA, 82 nt, Homo sapiens
cgggcgcgaggcccggccgcgcggggccgacgggagcgggcccgcccggagcggcaggcccggaggccggggacgcccagaa

SEQ ID NO: 53872 - RNA, 59 nt, Homo sapiens
aaggcgaggccacagaaccagccacagcggggcggagaggggacacagcggcacacggg

SEQ ID NO: 53873 - RNA, 80 nt, Homo sapiens
cccgccaaccgcaaccagacgccagcgggacgaggaccgagaccgcggccgggaccgagggaccagggcgaggagggcgg

SEQ ID NO: 53874 - RNA, 84 nt, Homo sapiens
gcgagagcagcccccggaaaaagcaagcgaagacacaagaagaccgagcaaagagaccccggaacggaggcaccgccccaaccc

SEQ ID NO: 53875 - RNA, 70 nt, Homo sapiens
ccaagaaaacaagcaaagccaccaaaacaacacagaagagaacccgaacacagcaggagcaagcgggggc

SEQ ID NO: 53876 - RNA, 79 nt, Homo sapiens
gcgcccagggagcccgcgaccgcgcccccccgccggcccaacggggcagcggcaaaaaaaggaaaagcaagaaaccaga

SEQ ID NO: 53877 - RNA, 80 nt, Homo sapiens
acagcacgagacacagccgacccgaacgacaaaacgaacgaggcgacggccaccgccccccagccacgcccacgagagac

SEQ ID NO: 53878 - RNA, 81 nt, Homo sapiens
agagaccagagacaagacaggaaaacccagagagacagagaacccccccaccaccggaaggcccgggcagagacaacccca

SEQ ID NO: 53879 - RNA, 81 nt, Homo sapiens
ccgccgcgcacgggcaaggcgacaggaggaaaaaggaacaagagcaagaaaaaaacaaaacgcagaagcacggagacgcgg

SEQ ID NO: 53880 - RNA, 79 nt, Homo sapiens
agaaggaaaagaaccagaagcgagagaaaagcccccaaaagcagcacaggaaacacgcacaggagaccccgacgcgggg

SEQ ID NO: 53881 - RNA, 71 nt, Homo sapiens
aggcgcagaagaaggcgcaaacagcggcacccgcagagaaagaggcgaaagcaagaagcgaagcaaacggg

SEQ ID NO: 53882 - RNA, 92 nt, Homo sapiens
agaaagcaggcgaacccgcggcgcaaaacgggggcaccaccgcaccaccccggaaaggcagccggccggcccagagaagacacaccaaacca

SEQ ID NO: 53883 - RNA, 75 nt, Homo sapiens
ccagaacgagacagcccccaaaggacccaaagacaggaccacgcaccagcagagaaggaaagcaaaccgaagcag

SEQ ID NO: 53884 - RNA, 65 nt, Homo sapiens
gggggcgccagagaccagggggccaaagaaggaagaccaaggcgaaggcgcagaacaaagacaga

SEQ ID NO: 53885 - RNA, 62 nt, Homo sapiens
ggcccggcggcggcggcaccagacacgagaggcgagggacgacagagcaagcggcagagggc

SEQ ID NO: 53886 - RNA, 76 nt, Homo sapiens
agggggagaccgaaagcgcgggaagcagcagaaagaagcaaggaggcagcagaacagcggacgccgccagagagcg

SEQ ID NO: 53887 - RNA, 79 nt, Homo sapiens
gcaccagagcgacgggcaggaaggagggggcgcacaaacgagggaaggagcgcggacggcccgcacagggggcccagcg

SEQ ID NO: 53888 - RNA, 75 nt, Homo sapiens
gaagaagagcgggggcgggcgagacaggaacacaagggcgacggcacccccccaaaaacaggaagaacaagccca

SEQ ID NO: 53889 - RNA, 77 nt, Homo sapiens
acccagccaagggccggacacgcggaaccccccgcccaccccccaaaaagccgcagcagaggccagcgccaagaagc

SEQ ID NO: 53890 - RNA, 82 nt, Homo sapiens
ccaacgaaagacccgaacagagcccaggcaaccgaggagacaccagccgcaaggacacaggacgaagcaggagcgcagaacg

SEQ ID NO: 53891 - RNA, 67 nt, Homo sapiens
ccacaggagagcgcccagcgagacgacgggaccgaaggaccccgccagagacaaccgagcgccagga

SEQ ID NO: 53892 - RNA, 56 nt, Homo sapiens
cgcagaagagacgggagcacccaaaaaccaaaaggacaagagcggggaggaccggg

SEQ ID NO: 53893 - RNA, 75 nt, Homo sapiens
gccccggcccacaggggggggcaaacccgagagaacggagagccgggccagcgaaccaccggccagcacaggaag

SEQ ID NO: 53894 - RNA, 72 nt, Homo sapiens
agggacggggaaggccggggcgcccggcgccggccgagaaggcagaggcggaaagcgagagcccacggccca

SEQ ID NO: 53895 - RNA, 75 nt, Homo sapiens
agagaaaagagagaaccccaaccggggaggaaaaccgacgaaggaggcggaagggaagcaagcagcgccaccagc

SEQ ID NO: 53896 - RNA, 79 nt, Homo sapiens
gccgccgccgccgcccggccgaccagggaccgcccgccgcggcgcccgggacccgacaaacggacagcaggaccagaac

SEQ ID NO: 53897 - RNA, 54 nt, Homo sapiens
accccggaaaggagagccagacaacaccgaagaccgaccacgaggcgggggcgg

SEQ ID NO: 53898 - RNA, 77 nt, Homo sapiens
cgggggcgaggaggcaaggggacacccacaccgcaaggagacccagaccggacccgagcagcagcgggggagagccc

SEQ ID NO: 53899 - RNA, 76 nt, Homo sapiens
ccccgagcagcgggacacaggaagaaggagaaagacaaagccccgagaaagaccagcaccgccgaaaagcaaaaaa

SEQ ID NO: 53900 - RNA, 59 nt, Homo sapiens
caggacaggcaacaccaaggaggcaccagacaaggagaagcaggaaaaaccaaagaaag

SEQ ID NO: 53901 - RNA, 71 nt, Homo sapiens
aagccagcgaagaaaagcggggcacaaaaagacacaacagaaagagaccagcccgccgcacccagggaaaa

SEQ ID NO: 53902 - RNA, 81 nt, Homo sapiens
ccagaaaccaacccagcacaaccaaaaggcccccccaccacaaagaagagagaagcacagaggaccaaaggagcacagggg

SEQ ID NO: 53903 - RNA, 72 nt, Homo sapiens
gggccgccgccagccgcgcgccggggaggcgccggagcgccgcggggcccgggagaaccggggcaagagacg

SEQ ID NO: 53904 - RNA, 77 nt, Homo sapiens
cacagacccaccagcagagggggccgaggccaggcagcagacgacggagaccggaaggaacaagccgggccaagaac

SEQ ID NO: 53905 - RNA, 78 nt, Homo sapiens
gagcacaagagaccacagacacaaaacaagggaaaagaaaggcggcgaagaagagccgagagggaggaaagggaggca

SEQ ID NO: 53906 - RNA, 72 nt, Homo sapiens
gccagaagcaagcagcagggggcggcaaggcggcagagccaccaaaaaaacagacggccagaagaagagaaa

SEQ ID NO: 53907 - RNA, 72 nt, Homo sapiens
aagaccaaacacgcaaaaagacagcagaccacagcccggcaggcccaaaaacccaaagggacagaagcaccc

SEQ ID NO: 53908 - RNA, 60 nt, Homo sapiens
acgcgcggcggaggggccgcccgcggagccaggccagcacccaggccacagaggaggaaa

SEQ ID NO: 53909 - RNA, 61 nt, Homo sapiens
gaggacacccaacccggacagccgccaggaagcaacgcagcgcggaaaggcacaaccaagg

SEQ ID NO: 53910 - RNA, 83 nt, Homo sapiens
gacgaggccccgccgccgagacccgcgcccgcccgagcgggccggaaggaggagacagacgcacccgcagacggggccgaagg

SEQ ID NO: 53911 - RNA, 72 nt, Homo sapiens
gcggcgcggagagggggcgcgagcgggggaacgagaggaggcccgaaggcaggagaaaggaagacaggggaa

SEQ ID NO: 53912 - RNA, 87 nt, Homo sapiens
cccggcgccgcccgcgggagccgccgccggccacccggggcggagggggcagggcagaaggaccaggggcgacgaggcccagagcaa

SEQ ID NO: 53913 - RNA, 58 nt, Homo sapiens
cggcggcaacccgaagcgggccgccaagagggaagggcccacgagcagcgagcgcccc

SEQ ID NO: 53914 - RNA, 70 nt, Homo sapiens
acccagggaaaggagacaaggaccgaaacagaaacggaacaccaagacaagcagaccggaagaccgacgg

SEQ ID NO: 53915 - RNA, 51 nt, Homo sapiens
gcgacacgagacacgacgaccaacagcaagaagaaccgaaggcagaagcag

SEQ ID NO: 53916 - RNA, 79 nt, Homo sapiens
caggccggcgccggaggaagagcagagggggaccagagagcccaacgccgggccaagaccccgagaaggcagaacgcca

SEQ ID NO: 53917 - RNA, 63 nt, Homo sapiens
gggcggcccagaaagaaggagccgaaagggacccagaggacgggaaacaacggagcccgaacg

SEQ ID NO: 53918 - RNA, 73 nt, Homo sapiens
gcaccgccgcccaccacccgacccagagcccccgcccggaagcagcggccaggagaaaacagggaaaagcaaa

SEQ ID NO: 53919 - RNA, 58 nt, Homo sapiens
cacgggacggaacaaaagcccggcggggggagcgcccgcggggaacaaaggacaggag

SEQ ID NO: 53920 - RNA, 74 nt, Homo sapiens
accgaccaccaaaaggcgccggaagcccggaaggcagggaagagcgagggaacacgagagcgaaaggacaaaag

SEQ ID NO: 53921 - RNA, 81 nt, Homo sapiens
cggcggccaggggcgcgaccccccggagagcaagcccacccgcgagaagcggaagagaagaacagccgagacccagcgggc

SEQ ID NO: 53922 - RNA, 41 nt, Homo sapiens
cggacagcggggacacgcggaaaggaaaccacccgggaacg

SEQ ID NO: 53923 - RNA, 79 nt, Homo sapiens
ccacccaccaggccacaagggcagcgaccagagagccgggccagcgaaccaccggccagcacaggaagacaggagacag

SEQ ID NO: 53924 - RNA, 81 nt, Homo sapiens
cgacccccacaagcacaaacgaccaagcacagagcaccagccaagaagcaaggcgaagaaacaggggagaaaccccgcggg

SEQ ID NO: 53925 - RNA, 68 nt, Homo sapiens
acaaccggcccaacagaccgcagccccgccagccaggccgcgagcagaagcgcacagaaagaggagaa

SEQ ID NO: 53926 - RNA, 81 nt, Homo sapiens
ccgcgggagacacgcgccgacgcgcccgacccgaagacgcgcccagcggcgggcgagggcggaggcaacacggaaaccgag

SEQ ID NO: 53927 - RNA, 79 nt, Homo sapiens
gaacaggaagcacaaggcaaaaaaaacggggacagagagaaagacccaagccccggcggggaacaggaggaaaagaaaa

SEQ ID NO: 53928 - RNA, 81 nt, Homo sapiens
ggagacccgcacaaccgaagagccggaggaagcacccgcgagaaagaagggcacagcgaaacagcccggccaaaagagccc

SEQ ID NO: 53929 - RNA, 78 nt, Homo sapiens
acaaggagaagaaaacgaaacggggaaagcaacaaccaaaggccagggcacaaaaaagggcgacaggacaacggacag

SEQ ID NO: 53930 - RNA, 81 nt, Homo sapiens
gccgcagcggcgcagcccacgccagacgaccccacccgcgccgcgacccgaggagcaggagcggccgcggagcaggagcga

SEQ ID NO: 53931 - RNA, 75 nt, Homo sapiens
acccaagaagagagcagcgggagccgagccaaggcggagagccaggaggagggaggcgagcgaaaagaaggagac

SEQ ID NO: 53932 - RNA, 81 nt, Homo sapiens
ggggggagccagcacgaggggcgaaccacggaaaggaggaagaagacaccggggacagacagggggccggacaagggaggg

SEQ ID NO: 53933 - RNA, 74 nt, Homo sapiens
aaagcgcccaagaagaaccgaagagacagcccgcacggaccgggaagagaaaagaggagcggggagacagcccc

SEQ ID NO: 53934 - RNA, 72 nt, Homo sapiens
cccagcaaagacccagaggagcagaggagaccaggccgaaacaggacaccaaaggaaccccgacagcagaga

SEQ ID NO: 53935 - RNA, 54 nt, Homo sapiens
agaagacaacaagaaggcagcacccggacaagaggcgccagcggaaaccacgcc

SEQ ID NO: 53936 - RNA, 62 nt, Homo sapiens
ccacacccgagagcccccccgggcacgccaagcccaggccgcaggcgcagcaccccgcccca

SEQ ID NO: 53937 - RNA, 73 nt, Homo sapiens
gaaccgagggaagaggcgagccggccaaaaggaggaccccagggcagggaccaacaaaagaaggaccaaaaac

SEQ ID NO: 53938 - RNA, 39 nt, Homo sapiens
ccgcccccagcccggccagcgcgggccgccagcggcggc

SEQ ID NO: 53939 - RNA, 70 nt, Homo sapiens
gaacagaaaacgggaagagagggaacacgcaggagggagaaggaacagaacagacaccaccgaaacgcgc

SEQ ID NO: 53940 - RNA, 59 nt, Homo sapiens
ccacagccgcagggagaacccgaggcgggagagagggccaccaaaaggagaccccccga

SEQ ID NO: 53941 - RNA, 60 nt, Homo sapiens
cccaggaccgaggaccgagacagagggagaccacagccacggggggaggccgacacacga

SEQ ID NO: 53942 - RNA, 76 nt, Homo sapiens
ccccacagaccggcacaggcacaaaacaacaagagcccgagcgccacggaacgaggacaagccagggagacacgac

SEQ ID NO: 53943 - RNA, 73 nt, Homo sapiens
cagccaacccagagagcgaaggagaacgggaggcgggaacacaagaggggacgcccccccaggcggccgagcg

SEQ ID NO: 53944 - RNA, 71 nt, Homo sapiens
ggaccaggcacgccgcaccgacaagagccccaggagggcacaaaaccgccccagccaggaggcagcagcca

SEQ ID NO: 53945 - RNA, 84 nt, Homo sapiens
gccgccgaccgaagcggagcagccggaggacggagaagcggggggcggacacgcgaccaaggggcggaccgcagacaagccagc

SEQ ID NO: 53946 - RNA, 82 nt, Homo sapiens
gaaaaccaagcaccgacggaaacaggcgaaaaacaacgacgaaggaagaaaagggcagagaaagagcgagagggaaaggaag

SEQ ID NO: 53947 - RNA, 57 nt, Homo sapiens
cggcagaacgcacagagggagagcagggggagaaagacccaccaaaaggggagcggg

SEQ ID NO: 53948 - RNA, 82 nt, Homo sapiens
accccccgggccccacggacaccccacccagacccccacccaaggagagaggagacgagcgaaccaagaagcagaagaccga

SEQ ID NO: 53949 - RNA, 80 nt, Homo sapiens
agagaagggcaagggccaaaagaggaggacaaacccacgcaagcagagggccagcgccgagcagcgcagaaacaggaaac

SEQ ID NO: 53950 - RNA, 98 nt, Homo sapiens
cccggcaaccccgggaccgagcagcgcaccggaggcagcgaaggagacccaacaccccggccagacgggccaccaggccggcgccccacgcccgggcg

SEQ ID NO: 53951 - RNA, 57 nt, Homo sapiens
cgagaagcgaagggagcaaagcaacgcaggggacggaacggcccccgcaagaaaagg

SEQ ID NO: 53952 - RNA, 91 nt, Homo sapiens
cggcgccagcagcgacgcggagccgagccgccgccggccgcacggagagcccagccaccgccgcaggaggaacaagcagcagaaaaaagag

SEQ ID NO: 53953 - RNA, 69 nt, Homo sapiens
gacagaagaccaggcgcgggcgcgcaaaggaggcacagagccaggagaaaaaacccaacccccggcaag

SEQ ID NO: 53954 - RNA, 81 nt, Homo sapiens
gacaggggccgcagccaaggaaggaggccgcaaacagacaggaagaggggcaaagcgccccggcccaaagcaagaggacgc

SEQ ID NO: 53955 - RNA, 80 nt, Homo sapiens
caccacgcacgggcgcacggaggacgggaaaaccagcagcagagggaaaaacagaggagacaacacccggagacaggccc

SEQ ID NO: 53956 - RNA, 76 nt, Homo sapiens
ccaacaccacccgagagccccaagggaggcgggacaccaggacacaggaagggcacaagacacaagaaacccggga

SEQ ID NO: 53957 - RNA, 65 nt, Homo sapiens
ccacacgcagcgcgcaacaccccacaggagagcacagacccagaagcccggaggaaaacaagaga

SEQ ID NO: 53958 - RNA, 75 nt, Homo sapiens
aaggcccaaacaggagaaaacccagacagaacaccacggaaccaacagaggcaaaacccgacgcaaacgacccag

SEQ ID NO: 53959 - RNA, 61 nt, Homo sapiens
ggccaagcgacccccacgcagcccccaagagcgggaccacagccacaagggcgcagaagcc

SEQ ID NO: 53960 - RNA, 77 nt, Homo sapiens
aggacacagagacaggagagacccagccgacccagggcaaggacgagcaggaccgggaagggagaccagcacgagcc

SEQ ID NO: 53961 - RNA, 61 nt, Homo sapiens
gagaccagaagaacaaagacacaggcaccaaaaggcaggggcacccacagaaagcgacggc

SEQ ID NO: 53962 - RNA, 84 nt, Homo sapiens
cgaggaggcccgggagcgccgagcgcgccgccgccgccgccagaacaaccgggcgccgacgagacgggaaaacacagcggagca

SEQ ID NO: 53963 - RNA, 63 nt, Homo sapiens
ccgggcggaccagccccgagcgggacagcgcggcggggagcgacgagggagggaaaacaagga

SEQ ID NO: 53964 - RNA, 77 nt, Homo sapiens
ccgagagagaaggccacccacacagaaagccagggccggagggagaacagagcggccccccccaccccacgcccaca

SEQ ID NO: 53965 - RNA, 75 nt, Homo sapiens
aaaaggaagcaacccagaagagcgaaggacccagcgaggagggccccagggaaaggaccgaggcaggaaagaggc

SEQ ID NO: 53966 - RNA, 51 nt, Homo sapiens
aaaaccaaaaccgcaacaacaccaggacccgaaaagccagcaagcgagacc

SEQ ID NO: 53967 - RNA, 77 nt, Homo sapiens
ccagcccaccagcacggcagcaaaggaggaaacacaaaccaacggcgaggacgcgaggggcaaagggccaacagaag

SEQ ID NO: 53968 - RNA, 62 nt, Homo sapiens
cacccacaagagccaaggaaagaagccgcagaccacagcaccgggaagccagcagcggcaga

SEQ ID NO: 53969 - RNA, 59 nt, Homo sapiens
caacaagaaaagccgaaaccaaacggagccaggagacaaaacgggacaaagcgcaaagc

SEQ ID NO: 53970 - RNA, 81 nt, Homo sapiens
cccccgcggacagcgccgacgccggggcacggccacgcacggacccaaggccagccagccccaggcaccagcggacaggac

SEQ ID NO: 53971 - RNA, 85 nt, Homo sapiens
cgcccccgggcaggacccggacccggaagagaagagggggcaagaaaggcagagggaaccaaaaaaaacagacaagaaggaacac

SEQ ID NO: 53972 - RNA, 77 nt, Homo sapiens
cgacaagccagaccacccagaacaagaggaaagaggggaaggagccaagcaggagacgcaccgccaacggccacaag

SEQ ID NO: 53973 - RNA, 73 nt, Homo sapiens
aggcggggagggaaggggccagcccccggggggagagcgaggccgagggcaggcccgcaggcccgcaggagga

SEQ ID NO: 53974 - RNA, 74 nt, Homo sapiens
agacagacccaccgcagacaaaagaggagggggagccgcgggccaggacccgagacaacaccaagaagaaaccc

SEQ ID NO: 53975 - RNA, 72 nt, Homo sapiens
gaccagggcccgccagaacagaagggacacaggcaaggggagaccgagcgcacacagcacaacccacaacca

SEQ ID NO: 53976 - RNA, 75 nt, Homo sapiens
cccccagccagagaggggcagaggcaacgcagcaccgaagaaccaggggaaaggcaaaacacaaagcgggacggg

SEQ ID NO: 53977 - RNA, 85 nt, Homo sapiens
cgacgacgcggaccccgacagaagcggacaaacccaccaaggccagcacaaggagagagagcccacagcacaacaaaggaagcag

SEQ ID NO: 53978 - RNA, 79 nt, Homo sapiens
acggggcacgaccgagggcagaaaacaccccgaggggcccacaggaagagagaaaacacagcagccacaagagaaagag

SEQ ID NO: 53979 - RNA, 78 nt, Homo sapiens
gggggcgaagcacaaggccagggggaccgaaagaagacagggcgcgcccgcaagcgaacggaggaaccacgcacagag

SEQ ID NO: 53980 - RNA, 84 nt, Homo sapiens
cgaggccagcacagagcggggggagacggcgaggcaggggcgccaggagagaggcccgaaaaagcccaagacagcagaagcaga

SEQ ID NO: 53981 - RNA, 68 nt, Homo sapiens
gcagggggagaagaagaaccacaggaaaaggagagccggcgagaacgccgggagggaagaaagcaaag

SEQ ID NO: 53982 - RNA, 54 nt, Homo sapiens
ggaaaacccaaaggcagaaaccgaaacggagacaaggccacccagagacagaac

SEQ ID NO: 53983 - RNA, 80 nt, Homo sapiens
cccagccagaggaacaaccagcaaagacagacccagggaaagggacaggaggcagacaaccagaggcaacagcaccagac

SEQ ID NO: 53984 - RNA, 76 nt, Homo sapiens
cgggcgacccaaccaagggaccaggggaaagccaaaacccagaacccgaagcaacgcgacaccacggacaaaagcc

SEQ ID NO: 53985 - RNA, 73 nt, Homo sapiens
agcaagcacagagcacaccaacgcgccgcgacaccagccggccccgcggagagcgagccgccccgacaccagc

SEQ ID NO: 53986 - RNA, 71 nt, Homo sapiens
aacccgaaaaaggccccccgagaaggaccaccacaaaacaaacggaaggaaggcaagaccagccaccagcc

SEQ ID NO: 53987 - RNA, 70 nt, Homo sapiens
aggagaaggaccaagaaccaggcgggagaccgacgacgacgacggacagccgacggggaagagaagaaga

SEQ ID NO: 53988 - RNA, 113 nt, Homo sapiens
aaaagagagaaacagaggaaaacccagagaaaaggaaacaacaggacacgggaaaaggaacaaccgaaggagaaggacaccaagccgaacagcgagcagaaccagccaaagcg

SEQ ID NO: 53989 - RNA, 78 nt, Homo sapiens
ccagggaggcggcggcgggaacgagggcgagcagaggacgacaggccgggagcgcggcccccccgggccgcagacccc

SEQ ID NO: 53990 - RNA, 86 nt, Homo sapiens
cgccgcgggagagaggacccccccccccccccaagcggcggagaaaccaccacaaacacgaggccagcaacgaccaacaagacaga

SEQ ID NO: 53991 - RNA, 82 nt, Homo sapiens
agcgacgccggcgccgagggacaccgcagagaggcagaggacccaaagacaggaccacgcaccagcagagaaggaaagcaaa

SEQ ID NO: 53992 - RNA, 81 nt, Homo sapiens
gaggcaccgcgcgccaggagcgggggcccgacgggggcaggcacccggaccgcgaaagggaagaaggagaaagggccaacc

SEQ ID NO: 53993 - RNA, 66 nt, Homo sapiens
ggcgcagcgcaccgaaagagcaccgcacaaaacaacaagggggggcaccggaaagaaaaaacccgg

SEQ ID NO: 53994 - RNA, 80 nt, Homo sapiens
ccggggccacgcacggggacacgggcccaggcccgagggggccggaccgggagggcaggccgccaggcacagagaaggca

SEQ ID NO: 53995 - RNA, 78 nt, Homo sapiens
ggcgcggggcccccagaaggacgccagcggagaacgcggcaaagcgagaacgcagggaggccccaggaccagaaacca

SEQ ID NO: 53996 - RNA, 70 nt, Homo sapiens
cgagacaggaagcggaacccagacaggggcacgcccacggaagccccccaaagcgagggacacaagaccc

SEQ ID NO: 53997 - RNA, 71 nt, Homo sapiens
accgccgggcaccgggaccgaaggcggccacacggaccacccggacacgggaacccggccggcgcccacca

SEQ ID NO: 53998 - RNA, 88 nt, Homo sapiens
cgcagaccagcgcccgaaggccgacacgcggcccgaggcaacggccacagccccgacaagggaccgggcgggccccgcaggaaacccc

SEQ ID NO: 53999 - RNA, 73 nt, Homo sapiens
ccgacccggcgccagccacggacgccacagagggaagaccccaaggagcccaggaagccccgccaagaagcca

SEQ ID NO: 54000 - RNA, 87 nt, Homo sapiens
cgccgcccccccacccgagcagagccgccgaggagaaaacacccaggacaggcggaggacccacaggagaggcacaggaccagacca

SEQ ID NO: 54001 - RNA, 77 nt, Homo sapiens
gagaagaaaaaagccaagggggaaggcacagcagaggggagcccagggccgcaacagccgggcacagagaagacagg

SEQ ID NO: 54002 - RNA, 82 nt, Homo sapiens
gcccacccagaggcccagggacgaccaggccagagaaccgagcaccagcacccaaaaggaggacgcacccagacccagccaa

SEQ ID NO: 54003 - RNA, 71 nt, Homo sapiens
gaagaggcccaccccaggagaacaaaaagccagacagagccgcgcacccagccggggcagggcaagccacc

SEQ ID NO: 54004 - RNA, 79 nt, Homo sapiens
cggcccccccacccgcgggccgcggcgcccggggaaagccgggccccgagggcggaccgaggacaaccacaccgaaggc

SEQ ID NO: 54005 - RNA, 67 nt, Homo sapiens
aaaagccaaccgagcaggccaaaccaagagggacccagaggaagagacaaagaacaggaaccagaca

SEQ ID NO: 54006 - RNA, 56 nt, Homo sapiens
gccggcagaggaccaggcaccaccggccccggaaggaaggcgccggcgccaaaccc

SEQ ID NO: 54007 - RNA, 76 nt, Homo sapiens
ggacccgagcgcggggaggcagaccggagaagacagaggagccagaccaagagacagcacaggcgagcgagcagag

SEQ ID NO: 54008 - RNA, 73 nt, Homo sapiens
gcaaaccaacgcgggccgggcaacacgcagccgagcggacaaagacccggggccaggcgggccccacgcgggc

SEQ ID NO: 54009 - RNA, 77 nt, Homo sapiens
aagagcccccagagagaaaggaagaaaaaagcgggcacgggcagcacaaagccggagggcgccgggcacggggcagg

SEQ ID NO: 54010 - RNA, 79 nt, Homo sapiens
cgggccccgcgaccggggcccggggaaggcccgccgcccgccccagaagaaaggaccaggcgggcccgagacaagcggc

SEQ ID NO: 54011 - RNA, 79 nt, Homo sapiens
gaacggggcagcccacgccagagcacaaggcaggcacggggagaggaccgcaggcccgaaaacagaccacccccaaacg

SEQ ID NO: 54012 - RNA, 109 nt, Homo sapiens
cgccgggcagcgggagcggcggccgcgccagggcgcggggccgcggccgcgcgagcagcgccgcgggcccagagggaggcacaacagcgaggacaccaccgagccccca

SEQ ID NO: 54013 - RNA, 66 nt, Homo sapiens
gcagaggccacacccacagagaacccagacaacaggacgccgccaagagggagaaccgaagaacag

SEQ ID NO: 54014 - RNA, 79 nt, Homo sapiens
gagcccgggcgcgcgcaaagagccgagcacgcgggcgcacagcgcgacgggcggacggaggaggaacaagcagaaagca

SEQ ID NO: 54015 - RNA, 81 nt, Homo sapiens
cagcaccccgagccaccccaggcgcccagaccaagggaacggagacacccccaaccaggggaagagcagcgacacacgcgg

SEQ ID NO: 54016 - RNA, 77 nt, Homo sapiens
caacccagacccgcgcccccgccaaaagagggaaggcaacacccgaaaaccggaagaaagccagagcagaggagagc

SEQ ID NO: 54017 - RNA, 81 nt, Homo sapiens
gcggacagccgaagcaaggaccgggacacccagaggacagccaggaaggcaggaacagaccaacccccggcccccggaaaa

SEQ ID NO: 54018 - RNA, 78 nt, Homo sapiens
acacgccgccacccgcccccaggaccaaagggaggggaaacaagaaccagacaggcacaggcgaggggcggaaagaga

SEQ ID NO: 54019 - RNA, 71 nt, Homo sapiens
agacagaaagagaccggaccagaaaccaggagccacggacaagaccaaaaggaggccggggcccccaccag

SEQ ID NO: 54020 - RNA, 42 nt, Homo sapiens
acagcagcgggaccacggagccgaggaaacccagacccaaga

SEQ ID NO: 54021 - RNA, 71 nt, Homo sapiens
cggggcgggagcgcccaagcgggcacccccgagccaccgagacgagggccaccaccacaagaggcgcaccc

SEQ ID NO: 54022 - RNA, 74 nt, Homo sapiens
ccagcccgcccccagaaaccagggggcacagggaccgccagggcccccacccggcaacggacagaggaggacga

SEQ ID NO: 54023 - RNA, 74 nt, Homo sapiens
aaagggaaaggccaaaaaaagcagaaacggccaccacccgcgcgaaccaagccaacagaggagcaccggcccag

SEQ ID NO: 54024 - RNA, 79 nt, Homo sapiens
ggaggaagcccggcccgccagacccgcacggcaaagcaaagaagagccgcgcagaacagaaggacagacagcacaccca

SEQ ID NO: 54025 - RNA, 59 nt, Homo sapiens
caaacagccccgggccagcagaccacaggagagcaggaacggacgaggaaaggcggcaa

SEQ ID NO: 54026 - RNA, 46 nt, Homo sapiens
aggagaagccgcccaaagaacgaacggagaccgcaaagaaaaaaga

SEQ ID NO: 54027 - RNA, 81 nt, Homo sapiens
accccacgcccggccgacaagcacgcaacgccgggggaagacagcgcgacagcacacgaccaacgccccccggagagacac

SEQ ID NO: 54028 - RNA, 78 nt, Homo sapiens
cggacccaggccaggcagcgcggaggggcgagccagcggccaggccaagggccgcgaagaacacgagacccgagcagc

SEQ ID NO: 54029 - RNA, 82 nt, Homo sapiens
cggccgggcgggaagcggaggccggcacgcccgcccgaggcgacggccgcggcgcacagaaccgggagaagaccgcgccccc

SEQ ID NO: 54030 - RNA, 76 nt, Homo sapiens
gacggcgcggaagaagcgcgcggagcgcgggaggcaacaacaccgagagaacaggaaaagagaaacggagaacggc

SEQ ID NO: 54031 - RNA, 81 nt, Homo sapiens
ccggggcacgcaccccgacggcaaggacgccgaggcacccaaccgacccggcaggagccagaagagaaggaacgggacaag

SEQ ID NO: 54032 - RNA, 69 nt, Homo sapiens
ccgaggacgagaaaacccaccggacgaacaaaacgaagggaacgggaacagccagggccccaaagcaaa

SEQ ID NO: 54033 - RNA, 79 nt, Homo sapiens
gccgccgccgccacggcgcccacccaacgcgaagacggaacccgggacgacggaaggacagaaaacgggccccagacac

SEQ ID NO: 54034 - RNA, 55 nt, Homo sapiens
ggcgccaacgcccggccgcggcccaggcgggaaagaggaaagaagacacgcaaga

SEQ ID NO: 54035 - RNA, 68 nt, Homo sapiens
gcaggaagccagccagagcaggaaggcgcaaggcgaggaagacgaacgaccgaccgcccccgcacaaa

SEQ ID NO: 54036 - RNA, 81 nt, Homo sapiens
ggcgccgcccaggggccaggcgaagcacgagcagaccggcccgaccgcccacagacccaaacaaaggggggagacacagcc

SEQ ID NO: 54037 - RNA, 66 nt, Homo sapiens
gaagagcgccagacccacaggcgaagaaaagccacacggggagcaaaccaagagaacgaaagccac

SEQ ID NO: 54038 - RNA, 76 nt, Homo sapiens
cgagcagccgccgggacggccaggaacggggcgggccaagcagagcgccaccccaaagccgacaaggagccacgcg

SEQ ID NO: 54039 - RNA, 72 nt, Homo sapiens
cccagagcacaagaccgaagcgagaaccagccaaacggaaacggcacgaagggcaccagaaaaaaccgagaa

SEQ ID NO: 54040 - RNA, 109 nt, Homo sapiens
gaacaaaccggagcgggagacgggacagacagccgcacgaaccggaccaggaggacgagacagccggagcggcccaaagaaggaagcaagccaacgcacacacgaacag

SEQ ID NO: 54041 - RNA, 54 nt, Homo sapiens
ggcagaaagaacgagaaagcaaaagagggccgaggcagacaagggaaaggccgc

SEQ ID NO: 54042 - RNA, 78 nt, Homo sapiens
acaacgcaggacagcaaagcgggagagacccagagcaaaacgagcaccaagggcaaacacaagcccaggcggcccgaa

SEQ ID NO: 54043 - RNA, 100 nt, Homo sapiens
caggaagacggccaggccggccggccggacaagcccaggagccgaccagagagcagacagagcgcggcacgagcaccagagaggggcccaggcaaggcgc

SEQ ID NO: 54044 - RNA, 76 nt, Homo sapiens
aacagagggcgggagcaggggaaccacaacgccccaaaagagggccgaaccaccagaagaggccccccaccacacc

SEQ ID NO: 54045 - RNA, 69 nt, Homo sapiens
ggagcccaaaaaagggcccagaagaaaagggacaccaagaagcgaagaaagaagacagaagggaagcag

SEQ ID NO: 54046 - RNA, 62 nt, Homo sapiens
acacgaagccgagaggacaaaccggcgaccacacacggggacgacggggaagccggacagca

SEQ ID NO: 54047 - RNA, 81 nt, Homo sapiens
ccgggaccgacaccgcccggagggcgccccccccccgaggcgcccgcagggccaggacgaaaacagacgacgaggagaccc

SEQ ID NO: 54048 - RNA, 80 nt, Homo sapiens
aagagaagaggaagaaaggcggaagcaggaagaagacgcaaacaggacggggcgaggacgcaaccaccaccgacccgagc

SEQ ID NO: 54049 - RNA, 64 nt, Homo sapiens
agaagaccagagcaaaccagaacacggagccgagagacacgcccagcgacagccacacaaaagc

SEQ ID NO: 54050 - RNA, 73 nt, Homo sapiens
caaagaggagagagaaaaggagacgaagagcaccagggaaacacaaagaagacaccagaagggccagcaccac

SEQ ID NO: 54051 - RNA, 72 nt, Homo sapiens
cacccgaggagagcaaggccaaaaagaagaccaaagacagagacaagcggggaagaacggcggagcacaccg

SEQ ID NO: 54052 - RNA, 87 nt, Homo sapiens
ccacgcaacgggcccgcgcgcaggccaaagaagacgaagagaagcccagcccagcacgagcagccggccacccccaggaggggccag

SEQ ID NO: 54053 - RNA, 77 nt, Homo sapiens
caaaacccacgacaagaaggcaccgaggaggagagaaagaaacaaccaaagggcacacgggaccccaaagggaaaca

SEQ ID NO: 54054 - RNA, 49 nt, Homo sapiens
ggaccccgaccaggaggggggaaccgaagagcaaggaaaagaaaagggg

SEQ ID NO: 54055 - RNA, 81 nt, Homo sapiens
cgccgcagccgcccagaacccgaccaacaccagaacccagcgcccccagaacggcggccaaagcgccagacaagggccgag

SEQ ID NO: 54056 - RNA, 38 nt, Homo sapiens
ccaacagacagccagaaggccaaaacagaagaggcaaa

SEQ ID NO: 54057 - RNA, 76 nt, Homo sapiens
caagcaaaagccggagaggaggagaagacaaggcaagaacggaagcacgggcggaggaaagcacaagcagagcccc

SEQ ID NO: 54058 - RNA, 76 nt, Homo sapiens
gagcgagcgagggggggcgcgccggaaaccggagcgcgcagcaggacaaacggaagccagcacaaaggaaggacaa

SEQ ID NO: 54059 - RNA, 70 nt, Homo sapiens
gaaaacacccgagagcaccgccgagcggaccccaagggagccaggccaggaggccgcagaaggccagacc

SEQ ID NO: 54060 - RNA, 50 nt, Homo sapiens
agagagcccaagaacaaagcgccccaaaagaccccggaggaaaagcggaa

SEQ ID NO: 54061 - RNA, 74 nt, Homo sapiens
cgagaaagaaggaaacggaaccaagaacaagcacgcaggaacaccggcagcacacgaacagggaaagcacaggc

SEQ ID NO: 54062 - RNA, 75 nt, Homo sapiens
agacagacagccagaagccaagaacgggaaacaacagagcaaccccaggcaaagggccaacagggcaaacaggaa

SEQ ID NO: 54063 - RNA, 70 nt, Homo sapiens
gaccccaccaaggagggcaccaacgccgccagcaggacccggggcgggagaagcgacagagacaaacgga

SEQ ID NO: 54064 - RNA, 76 nt, Homo sapiens
aaggagggcagacaaaggaggcaaaagggaaaaaacaggagcacaggaacaggaggcccggacccccagcacaagc

SEQ ID NO: 54065 - RNA, 78 nt, Homo sapiens
ccgggcagcgagcgcaaaagggaccagccacgggagagaaaccgagggcaggagcgaggacccaaggagacacacccc

SEQ ID NO: 54066 - RNA, 72 nt, Homo sapiens
ccacagcccgcccaacaccaaaaacgcgcagaagaagcccacccagaacgccccccagggaacccagcaccc

SEQ ID NO: 54067 - RNA, 81 nt, Homo sapiens
agggaccaacggaaccccaagaggaccgagccacagaccggcccacaaaaagccgccaggagaaagaaaggagccggaacc

SEQ ID NO: 54068 - RNA, 101 nt, Homo sapiens
caagaggccaaggcgacagccacaggagacacgcgcgcacgaagcccaggcgaggaggaggccgagaccagccaggggagacccaggggggaggcgcacaa

SEQ ID NO: 54069 - RNA, 77 nt, Homo sapiens
cagacgcagggcgcccccggcagcccgaagcagcccaggaacaaggccccaacaggcgggagacaagcccgaccgga

SEQ ID NO: 54070 - RNA, 72 nt, Homo sapiens
gaggcagccagcagggggagcacaggaaggcaaggaaggaggccacggaaaaagcacagcccagcggggaac

SEQ ID NO: 54071 - RNA, 113 nt, Homo sapiens
ccgcaccagccgcccaagccgcacagccgcggcggcagcagcaggagagcaaacggggacagcgccgaccggaacagggaccacggaagcccaggaccagccccgacaagccc

SEQ ID NO: 54072 - RNA, 37 nt, Homo sapiens
ccgagccacaaagcaggcggaggcaagggcgaccggc

SEQ ID NO: 54073 - RNA, 68 nt, Homo sapiens
gcaccgcaggcgcaggggaacggccacaaaagaagacccaaagcaccaacaaaaagcaacgagaacaa

SEQ ID NO: 54074 - RNA, 115 nt, Homo sapiens
ccggcggccccaccagcagacgcagccgagacaccagcccgaaacaccaccaagaagacgaccccgacgcaggccaggagccgcggacagaagccgagcacggccgagacaaaag

SEQ ID NO: 54075 - RNA, 75 nt, Homo sapiens
cagacaccaagggcgcgcgacacgaacaccgaggaggccaagggcgccaagagaaagccccccacacggaaagca

SEQ ID NO: 54076 - RNA, 74 nt, Homo sapiens
ccggacccaggagaagaggggagagggaccacacagaaacggacagccagacaagaccccaacgaagggccaga

SEQ ID NO: 54077 - RNA, 79 nt, Homo sapiens
cccaccggaccgaggaaagcgagggccccaggaccccccgggccccggaccaccggaccgagagagacggggcaccgga

SEQ ID NO: 54078 - RNA, 82 nt, Homo sapiens
aggcccaccaggcccccagcaaccgccccacccgcgcccagggcaccaggacgcccagcaggccccccggaggccagccccc

SEQ ID NO: 54079 - RNA, 109 nt, Homo sapiens
cgccggacagcacagcacacgacacccccgggaccgcggagagaagcagcggacagcagagaccgccagagcggaacgaccccagagcgagcccgcagcagcccagaaa

SEQ ID NO: 54080 - RNA, 70 nt, Homo sapiens
ggcgacaagcaaggggaggagcagcagcgcggcagagcaggggcggagcccaaacacgcgccgcaccaga

SEQ ID NO: 54081 - RNA, 73 nt, Homo sapiens
acaaagaaacgcacagagcacagccggaaagcaccgcggagccagggcggagaacggaaaagcaccaggaagc

SEQ ID NO: 54082 - RNA, 71 nt, Homo sapiens
gacaccaacagccccagaaacaaggaggacccgaaggagggacagaagggccacgcgcacaggggcggcag

SEQ ID NO: 54083 - RNA, 56 nt, Homo sapiens
cgcagccccccgcagcacccagccggccacgacccacaggaccgcgaacaaggagg

SEQ ID NO: 54084 - RNA, 114 nt, Homo sapiens
cgggaggggcgaaaccaaacagagccccaaggaggaccccccacagccaggccacagaaccaggaaaagcgaaggcaaacaagggggaaggagaggaaaaacgggaagggccgg

SEQ ID NO: 54085 - RNA, 73 nt, Homo sapiens
agcccggcagacgcagaaccagcaaaagacagggcaggaccaggcaagaagcgcacagagcaaggaagaggga

SEQ ID NO: 54086 - RNA, 77 nt, Homo sapiens
aaaaccagaccccaagaccggaagaaggagacggggccagggagaaaggaaggccaggagcaaacagaaggcccgca

SEQ ID NO: 54087 - RNA, 73 nt, Homo sapiens
cgggggagcgggcgccagccccagaggaccagaagaagaagaagggacagagaagcaaaggcagcgcacacac

SEQ ID NO: 54088 - RNA, 112 nt, Homo sapiens
aaacaagcaccccaaggagcgggccaccagaagggacagggccagccccagagagaaaaggaagggccgacgaaggagaagcgggaagcacaggaggccacgggggaccggg

SEQ ID NO: 54089 - RNA, 69 nt, Homo sapiens
gacggccgcgaccaagaagaagccacggacgcgcgggaaggcacaaacagccggaaaacagaaccacgc

SEQ ID NO: 54090 - RNA, 75 nt, Homo sapiens
ggaagacaggcgacaagcaaggggaggagcagcagcgcggcagagcagggggagaaggcgagcggccagacaaag

SEQ ID NO: 54091 - RNA, 81 nt, Homo sapiens
gaggcacgaccccacccccgaggcccgaccgaaccgcagcacgagcccagcccgacccacgaacaacaagccacgaacccc

SEQ ID NO: 54092 - RNA, 81 nt, Homo sapiens
agcccagggcaggacaccgacaggaacagggaccacggggaagaagagaaggcacaaagacggaacgaacaaagcaaagaa

SEQ ID NO: 54093 - RNA, 72 nt, Homo sapiens
agacgcgcacggagcagaaaacaaggaggaggcgaggcagagaggcggaccccgcgggcgcgcggcccgaac

SEQ ID NO: 54094 - RNA, 62 nt, Homo sapiens
gagagccggacgcccacaaagccacaccacgaggcgagccaagagcgaggcagccgccggac

SEQ ID NO: 54095 - RNA, 82 nt, Homo sapiens
cacaaggcaggaggccgaacacgaccagccaggaaaccccaaacacgccaggggaggccgcagagggcccagggcaagcaga

SEQ ID NO: 54096 - RNA, 82 nt, Homo sapiens
gggggccgaggggccaaccagcgaagagcgacaagccgcggcagccgcggaccaccgccgccagggacgccacacgcggaga

SEQ ID NO: 54097 - RNA, 83 nt, Homo sapiens
ggggaccacgaaaggagcaagagcaagacaccggacaccgagggcccccaaaaggaaacagaaccgaagccggaccggggccc

SEQ ID NO: 54098 - RNA, 103 nt, Homo sapiens
gcagccgcaggcccaacccccacagggccgagaggcgaacacccaacaaacgcaagaacggcagaaggggaaaagacggacaggagaaaaggaacccccgcga

SEQ ID NO: 54099 - RNA, 42 nt, Homo sapiens
agacgacgggcagccccggaccgccagcccccagaccaagaa

SEQ ID NO: 54100 - RNA, 58 nt, Homo sapiens
ccagaagaacgaggcgaagcgccgcccagcgcgccacccggcgaggccaccacaaggg

SEQ ID NO: 54101 - RNA, 122 nt, Homo sapiens
acagcccaccagcgcgcaacacaaggaaacaagcaacgcccagcacgacggcaaaggcgaccccgcacacacacccaccagccacggcagcccagcggggacccagccgccccgcccgcgcg

SEQ ID NO: 54102 - RNA, 53 nt, Homo sapiens
cagagacagagaagacaacgaaaacgaaggaaggaggacccgaggagagagaa

SEQ ID NO: 54103 - RNA, 75 nt, Homo sapiens
acggcgacaaaagggagggcggacacaacacacggggaagaacaggcagcacaggcaccccacgagagaagccag

SEQ ID NO: 54104 - RNA, 78 nt, Homo sapiens
acggggggggccggaggagcagcgggccagaacggccaggagacgcaacggggcaaagaaaaaggagagaaaaagagg

SEQ ID NO: 54105 - RNA, 66 nt, Homo sapiens
agccacgacgggcacagggaacggagggaaagcgacaaacaaccaacccacagagacccagagacc

SEQ ID NO: 54106 - RNA, 79 nt, Homo sapiens
gaggccacccccggcgggcccgaggcggcgagagaggcaggcggagccgaccgggccaggacgaagaagcagaagccaa

SEQ ID NO: 54107 - RNA, 78 nt, Homo sapiens
ccaggaaaggggaagcgcgcgcaaagggagggcgaaggcaagccaaggccagggacgggcccaacacgcgcccaggcc

SEQ ID NO: 54108 - RNA, 78 nt, Homo sapiens
gagaccagggaagcagcaccacggggagacaagcaagaacaagcagaaagcacgaacaacgagaacaagacacgagca

SEQ ID NO: 54109 - RNA, 86 nt, Homo sapiens
aaggaccgagccgacgcgggccgcgcgggcggacgaaagaaagaaggagcaccaacgcaaagaaaaagaccaagaagaccagggac

SEQ ID NO: 54110 - RNA, 37 nt, Homo sapiens
caaaagcagacagcaacaggagagacccaaaagacac

SEQ ID NO: 54111 - RNA, 79 nt, Homo sapiens
aaaaagcgagagacgcaagccccgagggccagagaggaaaaaaccaacaccaaggacccaccccggcacccccccggag

SEQ ID NO: 54112 - RNA, 72 nt, Homo sapiens
cgacaagaacgggggcaccagagccgcgaaaacagaagccagagaggacacccacaggaccgaaaaagaacc

SEQ ID NO: 54113 - RNA, 83 nt, Homo sapiens
ccaagcaagcgccgcagacgcaggaccgggagaagacggaagccaggacaaagggagcgagagaccaacgggcaagcaaccga

SEQ ID NO: 54114 - RNA, 70 nt, Homo sapiens
gacacaacccccggggacgaggggcacaacaggcaccgcagccagagagccggggaggcggaacaagaga

SEQ ID NO: 54115 - RNA, 79 nt, Homo sapiens
aaccggacccagacccagaggcagagccgccccagcagcaggggcgccagcaacccacaggcgcaccgaggagaccaca

SEQ ID NO: 54116 - RNA, 39 nt, Homo sapiens
gcaggacccgaagacgagggagcccacccagaggcaggg

SEQ ID NO: 54117 - RNA, 74 nt, Homo sapiens
accgccgggacagcgccccggcccggcgacagacacccaaggcccaaaggacgccaggcaaaagaaggcacgaa

SEQ ID NO: 54118 - RNA, 78 nt, Homo sapiens
agaaaccagccacgcagaagagacaaggaccacagccgagcgagagcaggaagacggaacgaaggcacagcgacccag

SEQ ID NO: 54119 - RNA, 82 nt, Homo sapiens
gggccgcccgcaagaaaacaagcagccgcacgacgcacggcccaggaccgcacaaggcgaaaaaaccggaaaccaaaaaaag

SEQ ID NO: 54120 - RNA, 82 nt, Homo sapiens
cgggggcgcgcgggggcgggcccgggacgcgggcgaagaagagcagagcagccgaagcggggacgacacgaggccacgagcc

SEQ ID NO: 54121 - RNA, 70 nt, Homo sapiens
accccggccaaagcgaaaggcagcccagcaagcgccaccccaagcaccggcacagcaaaagaagggaaag

SEQ ID NO: 54122 - RNA, 85 nt, Homo sapiens
ccgcgggcgccagcggccccgccgagagccggaggcaaggagaacagagcgggagggaacgaagaaggacagaacggacaaggca

SEQ ID NO: 54123 - RNA, 67 nt, Homo sapiens
agcagccacagaaacaccccacagaaaagaacgcaaaaggcgaaaggagaaagaagagcaaaaagcc

SEQ ID NO: 54124 - RNA, 88 nt, Homo sapiens
gccagaagcgggcggcgcgggggagaggaaggacgcccagagaccggcagcgcaaacacccggggaggaagcccacacacccccagca

SEQ ID NO: 54125 - RNA, 91 nt, Homo sapiens
cgcagcagcccccagggcccacgggccagccccgccgccccgcaaccggcagccgccgccgggaaggacaagagaccaacgaagaaccccc

SEQ ID NO: 54126 - RNA, 66 nt, Homo sapiens
ccgaggaggccgcgggagcccgccggcggggcgcggcggagacccggcgggaagcgccacgcagag

SEQ ID NO: 54127 - RNA, 45 nt, Homo sapiens
ggcaacgcgccgcaaaacagaacgcggaccgacaagacggaaacc

SEQ ID NO: 54128 - RNA, 87 nt, Homo sapiens
ccaagaagcgcccacgcagcagccggggagcaaaacgcccaccacggaggcaccgaggacgacgggggcggcaaggcagaggagcag

SEQ ID NO: 54129 - RNA, 74 nt, Homo sapiens
aaaacagcgcccagccagcgcacacaagcggagggcgacgccgagacaaggaaccaggcacggcaagggggccg

SEQ ID NO: 54130 - RNA, 63 nt, Homo sapiens
acacccggagaaggggccaacccagacacacccacaacgcccagaaagaccagaagccagaga

SEQ ID NO: 54131 - RNA, 52 nt, Homo sapiens
gacagcgcaggcagcaggaaaagacaggcagggaggcagcggcaagcggacc

SEQ ID NO: 54132 - RNA, 66 nt, Homo sapiens
gagaggagcagcacacgcaaggaggaagaagaccaaaaagcacgagaaacaacaggcacaaagaga

SEQ ID NO: 54133 - RNA, 82 nt, Homo sapiens
caccgacgagcaggcacggaagaccaccagcagcggaccaccgagggccagcgacgacagagacccaggaaaccaaagcaag

SEQ ID NO: 54134 - RNA, 82 nt, Homo sapiens
ggacagcccacacccggcgcggaggggagcccacccagaggcagggggcgacccgaacccaaaggaggaaacagcggcaagc

SEQ ID NO: 54135 - RNA, 76 nt, Homo sapiens
caaagggaaaggaggcagcgcaaggagggcggcgggacgcaccgaggccagaccgccgagcgcccgaagacaacaa

SEQ ID NO: 54136 - RNA, 76 nt, Homo sapiens
ggacgaggagccgcgaacgccaccaccccgcagccccaaacaacgaacgagcaaggaagggccaaggcagacccca

SEQ ID NO: 54137 - RNA, 81 nt, Homo sapiens
aaaacaagaaaaggggcggacagaaaaggggaccagagacagaggaaaggaccccaccaccacccgccccgcaccaaaaga

SEQ ID NO: 54138 - RNA, 63 nt, Homo sapiens
gacccccccccccccccaagggacccaccaggccacacccagcggaaaagaccgccagcaaca

SEQ ID NO: 54139 - RNA, 80 nt, Homo sapiens
aacacgcgggcagcgaacaagcgggagcaaggagggcgaagagcgaggagaacagggcagaagcaacagggaaaaccaag

SEQ ID NO: 54140 - RNA, 65 nt, Homo sapiens
cgccggcaccacccagccaagaacaagaagcacacacaaagaaagaagacccggccagccaccgg

SEQ ID NO: 54141 - RNA, 59 nt, Homo sapiens
cgggaccgcagcacggggaaacgaccgccccaaaacgcacaggagggagcaggaaaaag

SEQ ID NO: 54142 - RNA, 80 nt, Homo sapiens
ggagcacaggggcccgaaggccgcaggcagcccggggaggagcggagagaagccggaggagccaccagcccaccaaaggc

SEQ ID NO: 54143 - RNA, 76 nt, Homo sapiens
aggaggaaaacacacagacgaaggcaaaagagacaagcaacggaccgaaacacacacgagggacaaccccaccaag

SEQ ID NO: 54144 - RNA, 39 nt, Homo sapiens
ggaggaagaaagcacccaggagagaagcgcagaggccaa

SEQ ID NO: 54145 - RNA, 76 nt, Homo sapiens
aaccagaggaaggaccccagagaagacaggacccaccggcccaggggaacaagagaaggcaccccggaccacacca

SEQ ID NO: 54146 - RNA, 72 nt, Homo sapiens
ccccgacggaccagcccaacaaggggaggcaagcaggggggcaaaggaaagaaggcagaaagggaggccagg

SEQ ID NO: 54147 - RNA, 40 nt, Homo sapiens
gacaccgagggcaacggcagccccaccaaagccaccaagc

SEQ ID NO: 54148 - RNA, 73 nt, Homo sapiens
aaacagagagcaggccccagcaccacagcccaaaccagggagaaaacaggcaagacagagagcgccaccacgc

SEQ ID NO: 54149 - RNA, 48 nt, Homo sapiens
gcaaagagcaagagcagggaacaggggaggagacgccggaaacacgag

SEQ ID NO: 54150 - RNA, 76 nt, Homo sapiens
caaggcgcaagaaaaggagccggaaacggacaaacaggaagacccagaaggggaaacggacagaggggaacccgga

SEQ ID NO: 54151 - RNA, 81 nt, Homo sapiens
gcccgcggcgcacggcggcgaaggggcgagcagggagcagcgcagcgcgcgcagagcgcgccagagggaaggggaacagga

SEQ ID NO: 54152 - RNA, 74 nt, Homo sapiens
ccggaagacccgcaccggagcaaagggcccaaaaaaacaggaacacagaaagccaaacaccaaagaacaacggg

SEQ ID NO: 54153 - RNA, 81 nt, Homo sapiens
ggaggggagaccgaacggcgcccagccgcgggagcccccggccgcagagaagaccagaaaggggacagcgacagaggcaca

SEQ ID NO: 54154 - RNA, 86 nt, Homo sapiens
ccccgaaaacgaggaagaaggaccaaaacagcaggcgcagcaggggagaaacgggagggaccccacaaccagagcacagagaagaa

SEQ ID NO: 54155 - RNA, 73 nt, Homo sapiens
caagccaagcccaagacaaaaaccccggcacccaggacgcccaccaggagccccagcacgcacagagaagaag

SEQ ID NO: 54156 - RNA, 41 nt, Homo sapiens
gacgggacggggacggcgggacaaacagcgcagagaagaga

SEQ ID NO: 54157 - RNA, 72 nt, Homo sapiens
aggaacccaagcagggcgaagggaacgcaaggcccccgaccacacgcccgcgcgaggggggagcacagaggc

SEQ ID NO: 54158 - RNA, 75 nt, Homo sapiens
cggggcggacgcggcacgggcacaaagccacggaggagagcagcacacagacgacagacaacccgcagagcccaa

SEQ ID NO: 54159 - RNA, 72 nt, Homo sapiens
cgagcacaacgcaacggccccacaagacacggacacaccaagcccgggccaaggagacccacaaacaagcaa

SEQ ID NO: 54160 - RNA, 77 nt, Homo sapiens
ggcagcccccggagccccccgggacccacagcaccccgaggcccgacccagagaggaccaggaggcaacaaagaaga

SEQ ID NO: 54161 - RNA, 74 nt, Homo sapiens
ccggcacagccccagcggagcgacgcagaagacggggacgcaccacgagaaagaaagacggggaagaaagaggg

SEQ ID NO: 54162 - RNA, 50 nt, Homo sapiens
acggaccagaccgaccaccaaaagccggaaggggggcgacgcggaaggca

SEQ ID NO: 54163 - RNA, 77 nt, Homo sapiens
cggcacagcaagccaagaggaaccgaaggggaaaacgagacaacgaaggggaaagacacggaccaagaggggacggg

SEQ ID NO: 54164 - RNA, 62 nt, Homo sapiens
aagagacccccaggaaaacaggaagaaaaaagcgggcacgggcagcacaaagccggagggcg

SEQ ID NO: 54165 - RNA, 89 nt, Homo sapiens
cgggcggcgagccacgggggccgccgcagcaccaggcgaccaccgcagcaccagcgcgggccggcgcggggaggcccagcccgccgcag

SEQ ID NO: 54166 - RNA, 84 nt, Homo sapiens
acagcggcaagaggaccggccacgaaaaaccagaggaaaaaccacaggaggagacacgagcagaggcgggaagccaagacaagg

SEQ ID NO: 54167 - RNA, 33 nt, Homo sapiens
gacaggcaggaaaagacagcggagaaccccgcc

SEQ ID NO: 54168 - RNA, 34 nt, Homo sapiens
aggcccgcagaccgaagagaaaggacagggacag

SEQ ID NO: 54169 - RNA, 72 nt, Homo sapiens
ggaggagggagaacggccaaggaagcagagacccggcgcaccacgaggagccacaaaagaaaagcacccggg

SEQ ID NO: 54170 - RNA, 68 nt, Homo sapiens
gacaccagagagaaagaaggcaacaagaagaagaacccgaggaaaggaggccaacagaaagaacccag

SEQ ID NO: 54171 - RNA, 69 nt, Homo sapiens
gcgcgcgccgcgagcgcagggcacaccaaagggaaccaagaagggacccaaaaagacggacagcccacg

SEQ ID NO: 54172 - RNA, 80 nt, Homo sapiens
acggagcagcagggcaggaaggaacggaagggcacagcagcgcgcaggggggcaggccggaccgaaggacaggagaaggg

SEQ ID NO: 54173 - RNA, 78 nt, Homo sapiens
gacaggaggccacaccaagaaggggaagggccagccaccggaccggggccaagcagggcccagaaggcagaccaacaa

SEQ ID NO: 54174 - RNA, 83 nt, Homo sapiens
cgcccaaggcccgcccgggagggccggggccgcgccagcgaccgccggcgggccggaacagacagaggagcgaacgaaagagc

SEQ ID NO: 54175 - RNA, 77 nt, Homo sapiens
gcgggcggggcgggagcggcgcgcagccgggccaggggcgccccaggcccccgcaaccagcgacaaacccgaaggcg

SEQ ID NO: 54176 - RNA, 67 nt, Homo sapiens
cccagcgaccagcaccgccgcccaccacccgacccagagcccccgcccggacggggaaggaagccac

SEQ ID NO: 54177 - RNA, 77 nt, Homo sapiens
caggccgacagccgcggccgggcccgagggagaagcggagaaccagacccggagcagaccagaaaaccgaggagacg

SEQ ID NO: 54178 - RNA, 79 nt, Homo sapiens
aggccccggaaccaaggagcccgccgaggagcgaaggcccagagccgggggagacaagacgagaaaaggaaccacagaa

SEQ ID NO: 54179 - RNA, 57 nt, Homo sapiens
acgccgcccagccgccgccgccgccgcgccgcagcgccaccgaaccccgcaagaagc

SEQ ID NO: 54180 - RNA, 105 nt, Homo sapiens
gccacgcagaggacgccggaacacccggaagccgagaaagggggggcccgacacaggcacggaaaaagcacgacaccacccagacagaacacaaaggcggacccg

SEQ ID NO: 54181 - RNA, 77 nt, Homo sapiens
agaagaggcagaggaggaaaaagaggaaccaccccaccagaaaaaaccagagaacgcaagaaaaccaaggagaggac

SEQ ID NO: 54182 - RNA, 80 nt, Homo sapiens
ccaagcgcgagccagggaaaaaaagaaacaagagaggagaaaagcaggagccgggaaaccgaagaaggcagagaaggcaa

SEQ ID NO: 54183 - RNA, 70 nt, Homo sapiens
aaaaaaccaagagaaacaaaaaaagagcagcgggcaacagagacaggcagcaggggagcacgccagacac

SEQ ID NO: 54184 - RNA, 58 nt, Homo sapiens
cccggaggaggcgaagggagggacagagcacgccgaggacgccccacgccccccgcag

SEQ ID NO: 54185 - RNA, 80 nt, Homo sapiens
ggccggaccgcaggagggagaccacagcaagacccaggaccccggaagccagaaagacgcgaccggaaaggagagagaga

SEQ ID NO: 54186 - RNA, 38 nt, Homo sapiens
gggacagcgcacccacacaggaagcccggggcggcgac

SEQ ID NO: 54187 - RNA, 87 nt, Homo sapiens
ggcgcccgcccccaggcgcgcccagccccgcagccagggcgaacccccgcagccgcaaggagcggccaaagcacggaccacggaccc

SEQ ID NO: 54188 - RNA, 82 nt, Homo sapiens
gaaccgcccgcaggcccgcgcagcccaaagcaacaccaacacaagaggaaaacaggaagagccggaaaacaaaacgcaaaga

SEQ ID NO: 54189 - RNA, 81 nt, Homo sapiens
ccagcggccgcggcaaacgccaaaaaccggacagagaaacgacaaaagagcagcaaaaccagggcccgccggccgaaccac

SEQ ID NO: 54190 - RNA, 79 nt, Homo sapiens
acgaagaagcaccagaagaaaagagaggaaagaccaccaccccgccagaagaggaaaaaggggagaagcagaccgcacc

SEQ ID NO: 54191 - RNA, 84 nt, Homo sapiens
ggcaaccaccccgcgagaaggaggagccccccgcccggcagcgccccgcgagaaaccagaaggaaaacacaccaggcacagaaa

SEQ ID NO: 54192 - RNA, 76 nt, Homo sapiens
ccagggaacaagaggcacaccagcccgggacagccccggaaaccagacgaaacaacagccaaagacaaacagcaca

SEQ ID NO: 54193 - RNA, 80 nt, Homo sapiens
gcgcgcgggaggcggcggcggaggaagccggagacagcaggggacagggaggcgagacgcgaaggaagaagaccccggac

SEQ ID NO: 54194 - RNA, 56 nt, Homo sapiens
gcgggcaaggaacaggcgagaaacagacgggccaccgcggccggagaaggaagggg

SEQ ID NO: 54195 - RNA, 76 nt, Homo sapiens
agggaggcccaagacccacaacaaaaggcagaacaagaagggcaaccaggggggaaggagggagcggagaacgcga

SEQ ID NO: 54196 - RNA, 88 nt, Homo sapiens
gaggagacccccagcgcgcgccccgcccccccccagagcaaggggaccaaaacaaaacgagagcaagaggaaagaaaaagaacagacg

SEQ ID NO: 54197 - RNA, 72 nt, Homo sapiens
gaggcaagagccggcaccaagggaaaacaggaaaacgggccacaacacaacccccacaccagaggaccgcca

SEQ ID NO: 54198 - RNA, 83 nt, Homo sapiens
cgcggagcaaaaaaagagcccgcaagaagaacagagacagcagccaaacccccaggcgcgggaagggacgccagggcaccgga

SEQ ID NO: 54199 - RNA, 74 nt, Homo sapiens
cgcgacgagcaggggcggcggcgcaggaggcaggggaagcacaaaagcgcacccgcgccagcgaggaccggaac

SEQ ID NO: 54200 - RNA, 73 nt, Homo sapiens
aaacaaagcaaaaaaaacaggagaaaaagacgaggcccccaagcggggcggacgacagcagacgacccgaagg

SEQ ID NO: 54201 - RNA, 76 nt, Homo sapiens
agcggcagagcagcccagcaacaaaaaacccccgccccaacaagaggccaacggccaagaccgcccggcagcgggg

SEQ ID NO: 54202 - RNA, 69 nt, Homo sapiens
agagaacgggacaacaaaagagccacccaagaacagccggcagacaagccacacccacacggcggcgag

SEQ ID NO: 54203 - RNA, 93 nt, Homo sapiens
cggaagcgaagaagaaacgaaacccccccccccacccaccaaaccggagggggaaaaaacccaaggcgcaaaggacaagagaaggcacagaaa

SEQ ID NO: 54204 - RNA, 75 nt, Homo sapiens
aagccccccaggagggaaccccaccagggcccccacaccccaggaccccacacccccaaagagcacagaacacac

SEQ ID NO: 54205 - RNA, 74 nt, Homo sapiens
gagggaaaaggcagaaggagaaaaggcagccaaacacaacaggcacaaagagagaaggaacacccacagggcag

SEQ ID NO: 54206 - RNA, 56 nt, Homo sapiens
gcaaccaccagcagcccccagagcggaacacagggaaagaagccaaaggcaagaag

SEQ ID NO: 54207 - RNA, 60 nt, Homo sapiens
gccgggaccccggaaaccagaaaggcagaaaaaaccagcaggccaggaacacaacccacc

SEQ ID NO: 54208 - RNA, 74 nt, Homo sapiens
gaacggaggacggaggaagaagcaaggggacaccagaagaagaaagggaacggagcccggcagaaaacagagcc

SEQ ID NO: 54209 - RNA, 76 nt, Homo sapiens
cggacggggacgaagacgaagaaacggaagccaccaccagcccgaaggggaagcacagcaacccccacaccccccc

SEQ ID NO: 54210 - RNA, 84 nt, Homo sapiens
cagcgacagcacagcaaaggcccgagggccagaggcaaaccgaccaagagaagcagcagggcagagacagccgccgccggagac

SEQ ID NO: 54211 - RNA, 79 nt, Homo sapiens
ggcggggaagcagcacagcggacaacgcacgcgggagagcagcagaaggccaaggaagcacgggaagaacagaaaagag

SEQ ID NO: 54212 - RNA, 48 nt, Homo sapiens
gaacccagacagcgcggcaaaacgggcgggggcaaagaaccacaagaa

SEQ ID NO: 54213 - RNA, 75 nt, Homo sapiens
aacggcagagcaggccgcggcgacccagcgaggcccagcacgacagagacccggaaagcgagcagcaaagaccca

SEQ ID NO: 54214 - RNA, 80 nt, Homo sapiens
acaagaagagccagacacaaagagccccacagcaaccccacccaggggccagacgggagccagaccagggccccgggaca

SEQ ID NO: 54215 - RNA, 71 nt, Homo sapiens
gcgccgaggccggagacaccaaaggcaccccccagagcccagcaccccggagacggaccccaaggaacccc

SEQ ID NO: 54216 - RNA, 70 nt, Homo sapiens
ggacaccagccaccaaagaccaaccaagagcagcaacggggcggcacacaaggagcgaagggcagggaga

SEQ ID NO: 54217 - RNA, 65 nt, Homo sapiens
cggagaggagcagaaggagcaaaaggcggacaggcaggagcgccccaccccgggaaaggggccac

SEQ ID NO: 54218 - RNA, 116 nt, Homo sapiens
ccgcagcagggggcagaacccagaggcgggaggggccgggaggcagaggggcaggggggaaaaagaaaagggcgaagacccgaagcagcgcaggaacagaagagaagaccagaaga

SEQ ID NO: 54219 - RNA, 75 nt, Homo sapiens
gagcaagcgggggaccgaacaaggcaaaaggggacgagacaagggcaacgagacacccagcggcccggccccgcc

SEQ ID NO: 54220 - RNA, 74 nt, Homo sapiens
accgaaaccagaaggggccggggggggcacagagccccggaagacagcccccagcgaccagacccagggccaga

SEQ ID NO: 54221 - RNA, 77 nt, Homo sapiens
aacccagaggggccaaaagcgccaaagcgacaggagcccaggaaaagaaggcgagcaggagaagcaacaggacagag

SEQ ID NO: 54222 - RNA, 90 nt, Homo sapiens
ggggcaaggaggagaccccagggcagaggccagcaaccccaagacacaggaagggggggcaaaaagacagaagcccacagagcagaggcc

SEQ ID NO: 54223 - RNA, 55 nt, Homo sapiens
cggacaaaagacgcgccgcaaaggcgaaaaagcccgcacccccaaagccaaacag

SEQ ID NO: 54224 - RNA, 75 nt, Homo sapiens
aaaagggcaagaagccagaaggggaaaaccggacagacaagccccgagggacacggaaagcagcagacgaacccc

SEQ ID NO: 54225 - RNA, 76 nt, Homo sapiens
gccagcgaaaacgcccagaaccaaggagacagggaaaaccgaccagagaaaagaagccgggaagcagacccacgca

SEQ ID NO: 54226 - RNA, 72 nt, Homo sapiens
aagacaggagaaacaaagcaccggcacggaccaccccaacaccgggggagaaccgggcccaccagggacacg

SEQ ID NO: 54227 - RNA, 72 nt, Homo sapiens
acaaaaccagcgcagcagccagagagcccagagaaaagagagaggcccgggacgagcggcccagcgacgagc

SEQ ID NO: 54228 - RNA, 90 nt, Homo sapiens
ccacccaagcccggcagcggagaggcccaacaagcccaaaaggccgcagaggggaccaccagagacacgggccagaaaaacaacaacaac

SEQ ID NO: 54229 - RNA, 75 nt, Homo sapiens
agagcgccgcccagcgcacaggggacgcacaagcccggaacaacaccagacagacgcgaagcaaagcgccaccca

SEQ ID NO: 54230 - RNA, 79 nt, Homo sapiens
gaagggaggcagaaacacagcgaccgagagagacaggggccaggccaggggcaggggaagcacccaaccaacgagcggg

SEQ ID NO: 54231 - RNA, 62 nt, Homo sapiens
acccacgcagacaccagccgcgccaggcagaccaagccggaccaaggacaccgcaggcgggg

SEQ ID NO: 54232 - RNA, 78 nt, Homo sapiens
cgcggcacgacgcaggacggcaccagccgcccggaacgagacccacagcacgcacagggaccagaaaaagggacaaaa

SEQ ID NO: 54233 - RNA, 34 nt, Homo sapiens
gggaaagcagacgacgaccgagggcagaggcaac

SEQ ID NO: 54234 - RNA, 72 nt, Homo sapiens
caagcaagcagcagcacgcgaaaggacacggaaaaagagcggacaggaaggaaaccgaggcggcagccaaac

SEQ ID NO: 54235 - RNA, 85 nt, Homo sapiens
gacaacgagcagccacacccagacgagcgggagaaggcgcgcgcaagcacgcgaggagacaagcagaccggaagaccgacggaag

SEQ ID NO: 54236 - RNA, 84 nt, Homo sapiens
agcgaggggaggcaggcgcggcagacggcgacagggcggcggcgccaggcagggcgcaggaagaaggaccggggagacaggaac

SEQ ID NO: 54237 - RNA, 73 nt, Homo sapiens
gcaccaacagccccaacccagaaagcagaggccagagcggagacagacgcgccacgcagagccccgccaggaa

SEQ ID NO: 54238 - RNA, 86 nt, Homo sapiens
gcaggcggagccgaccgggccaggggcaaagaaaaaggagagaaaaagaggcaaaacaacaagaagaaaagagaaaaaagagagcg

SEQ ID NO: 54239 - RNA, 49 nt, Homo sapiens
acaaggagacccgggaggaccaagccgaggggggccgaagaagccaggg

SEQ ID NO: 54240 - RNA, 72 nt, Homo sapiens
cgcagcaacagcagcagcaacagccgaaggcgaccccgccagaacacccaggcgacaggaaagccacagagc

SEQ ID NO: 54241 - RNA, 80 nt, Homo sapiens
acgggaggcccaacagcggaacacgagcaggggcccaaaagacgaaacggcgaggaaagagaggagccccggaaagaaaa

SEQ ID NO: 54242 - RNA, 78 nt, Homo sapiens
ggcaacgaagacaacaaaagagcccgaaaacccagacagaacaagaaagacccaggcgaagccagaaaaacaccgaac

SEQ ID NO: 54243 - RNA, 75 nt, Homo sapiens
gaaaagaagcgaaagagcaaggcaccaagcagccgaagagaaacaagggacagcagacaagccccgcgcggaagg

SEQ ID NO: 54244 - RNA, 60 nt, Homo sapiens
gcccgggacaccaagaaagaacggagagagcccaccaaggaaccacgaaaccaccgcgca

SEQ ID NO: 54245 - RNA, 78 nt, Homo sapiens
aaagggcgggcggaacgacccagaaccggcgagaccacgcagagagaaagagacgaaccgggggccaaaggaaggaac

SEQ ID NO: 54246 - RNA, 51 nt, Homo sapiens
caagccaaacagcaaccgagggagcgaagcaacaaggggacaagacccccc

SEQ ID NO: 54247 - RNA, 63 nt, Homo sapiens
ccgacgccaggcagcgcccccaaacgggggcagcacgccgaaggagagaccagacaacaggcc

SEQ ID NO: 54248 - RNA, 74 nt, Homo sapiens
ccaacgaagagacgacacaaggagacgaggggaagagacacgggaagacagaagaggacccgcgagcgcaaagg

SEQ ID NO: 54249 - RNA, 61 nt, Homo sapiens
cccccgacggaaccggaaaggcggaacccggaagagcacacaggccacccacggccgggca

SEQ ID NO: 54250 - RNA, 66 nt, Homo sapiens
cggacaccagagaggcgggaaaacggcacaaggcgacgagggagggcagaccgccaggccagcaca

SEQ ID NO: 54251 - RNA, 93 nt, Homo sapiens
ggacaccggaacgccaacccaccacgcgccaagacaagaggcaacgcacccgcccccaaagagagaagcggaccacaaggggcgggcccagca

SEQ ID NO: 54252 - RNA, 78 nt, Homo sapiens
gaggaacccagcagccggcggacggggagccgccaccaaaagcagacggaaaacccacggggaagaccacaccccgag

SEQ ID NO: 54253 - RNA, 79 nt, Homo sapiens
ggcaaggcccaagcccagccaaggccacgcccggaacccgcagaaacacgacagcaccaccacccaccacgacagacag

SEQ ID NO: 54254 - RNA, 66 nt, Homo sapiens
aggcccggaacaaagcacaacaggcggaggaacagcgagagcaccaagaaccaagccacccaaggg

SEQ ID NO: 54255 - RNA, 48 nt, Homo sapiens
ggagaaccggagcggccaacggcaggaggaccacaggcaaacaaagaa

SEQ ID NO: 54256 - RNA, 75 nt, Homo sapiens
ggcccagagcgagcacagcaggaggagggggagagagggagcaggccaccggaagagggcacaacgggaagagag

SEQ ID NO: 54257 - RNA, 72 nt, Homo sapiens
gggacaccaacaggacccgcaccgaacaagaggagaaaggagccggaacaaacccgggagaaccgaccagca

SEQ ID NO: 54258 - RNA, 75 nt, Homo sapiens
cggaggcgaccgccaggcgcccaaacccggaccaggaccacaagaacaggaggagccggccgaggcggaacacac

SEQ ID NO: 54259 - RNA, 84 nt, Homo sapiens
cggcaccggggcggccggccaaagccagccaagaaggacaagaaggggagaagaaaagaaacggcaaaagaaaaaagaaaagag

SEQ ID NO: 54260 - RNA, 79 nt, Homo sapiens
agaaaccggcaagcgcgcaggcgacccccggcagccaggcgcaccagggggcagcacgccgaaggagagaccagacaac

SEQ ID NO: 54261 - RNA, 84 nt, Homo sapiens
ccggcgagagagggcagcgggggcgaggaaggcaggggggcggagagggcacccagccggcaaagcaccaggcacagcaagcgc

SEQ ID NO: 54262 - RNA, 81 nt, Homo sapiens
caaggcaccacagcagggacacagacaaaaaaaagagaaccgacaagccaagcaaagaccagcaaggcaccaacagaaaaa

SEQ ID NO: 54263 - RNA, 75 nt, Homo sapiens
aagaggggaaacgagagcccaaaaaagaagcaggccagagcccggagcccaacgacgaggacccccaggcggcga

SEQ ID NO: 54264 - RNA, 38 nt, Homo sapiens
ccagccaggagacaagcagagacaggaaaaagccgaga

SEQ ID NO: 54265 - RNA, 55 nt, Homo sapiens
ggagcccgcacagacagacccaaagggcaggggaacagcgggggcagaagagacg

SEQ ID NO: 54266 - RNA, 86 nt, Homo sapiens
acgccagccgcaccagccgcccaagccgcacagccgcggcggcagcagcaggagagagaggggagaagagcgagacgagaaagaag

SEQ ID NO: 54267 - RNA, 48 nt, Homo sapiens
cccggccaccccccggcccgaagccccacgccaggagccaccaacaga

SEQ ID NO: 54268 - RNA, 71 nt, Homo sapiens
acaacgaaaacaggggccaaagggagagggaagccacaacaagccaaagaagaaggggagcggaggcaaag

SEQ ID NO: 54269 - RNA, 75 nt, Homo sapiens
gaaaagggagacaggcagaggagcagaggaacgcgacagcagaggaagaacaagcagggagagagagggagaaca

SEQ ID NO: 54270 - RNA, 80 nt, Homo sapiens
gcgccgcacagagcaacgcgccccagcacagacaggaagcaccaaccccgcgaaacccaggacacacagggccacagcag

SEQ ID NO: 54271 - RNA, 67 nt, Homo sapiens
ccaagagaaagaaacacagaagcgagcaccacaaacgagaacaaaaaggaacaggaccgaaaaggga

SEQ ID NO: 54272 - RNA, 81 nt, Homo sapiens
agcaagcagagaacaccagggcagcacaagcacgaaaggaagaaaaccgaagcccccacaagcaaaaaggaagaacaacag

SEQ ID NO: 54273 - RNA, 79 nt, Homo sapiens
ccgcggcggcgcgcccagggcagggcccaaggaaggacccgccagcccgagaagggaccgcggaaccccggccggcaca

SEQ ID NO: 54274 - RNA, 58 nt, Homo sapiens
caaggaggccccagcggaccgaacagacccgggccagccgccggaacccgaacgggcg

SEQ ID NO: 54275 - RNA, 75 nt, Homo sapiens
cggcacgcgggcccgagcgcagccgcgcagggagaagaggcacccagagacagaggcgagcggccgggccgacag

SEQ ID NO: 54276 - RNA, 103 nt, Homo sapiens
ccgcggggagggggcccgggcgccccgcagccccccaacaccgcccgccaggacgacggggaaaagcaagcgaaacgccgcggacaagcaggcaggccacaaa

SEQ ID NO: 54277 - RNA, 68 nt, Homo sapiens
cgaggagaaacagcagaaacgcaccaggccaaagaaagagaagacagccagacaagaccccaacgaag

SEQ ID NO: 54278 - RNA, 96 nt, Homo sapiens
gccgcgcgcgacgcccagagccgcgaaccccgcccgagcccgccggaccccccgacccagagcgggcgcgcgcggaacgaaagcgccgcggcaaag

SEQ ID NO: 54279 - RNA, 39 nt, Homo sapiens
gcgcacagcgcagagaagagacacacagaagacgaaaga

SEQ ID NO: 54280 - RNA, 62 nt, Homo sapiens
gaaacccgaggacagcaccaaacaacaccaaaggagacaggcgccccgcgggaagcggcaga

SEQ ID NO: 54281 - RNA, 55 nt, Homo sapiens
cagcggagaccgcaggacaccgggaccgggggcgcagcaccgaagcgccaaaacg

SEQ ID NO: 54282 - RNA, 87 nt, Homo sapiens
cgagggaggaaaaaccgcagagaaacagaacccaagccaggcacccaaaaaaacgaggagagaaggggaaagccaccggacgagaag

SEQ ID NO: 54283 - RNA, 81 nt, Homo sapiens
caaagcccggcgccaccaagccgcagggagaacacccaacgggagaggccacaacagagaaggaaccagggacccaaagca

SEQ ID NO: 54284 - RNA, 78 nt, Homo sapiens
agacgggaaaagagagcggcgacagcaagaagggagacagagcaaaagccggacacaagagggcaagaaaggcgcgac

SEQ ID NO: 54285 - RNA, 38 nt, Homo sapiens
acaggaccacggaaaacagcaacgaaggggaacgaaag

SEQ ID NO: 54286 - RNA, 105 nt, Homo sapiens
ccacccagcggggagcacggcgagcagccaggccaggagagggacgaacagcggggacgccccagcagaccgcccaggagaggaaagcaggaggaaagaccaccc

SEQ ID NO: 54287 - RNA, 72 nt, Homo sapiens
cccgaacgccgagcagagccaacaaaaaggagaagaaagagcgcggaaccaaagcccagaaccccaggaagg

SEQ ID NO: 54288 - RNA, 70 nt, Homo sapiens
cagaagcacagaaaacaggagaggagccaagcccaacgggacgggaaaacggccacagccaacgacgcag

SEQ ID NO: 54289 - RNA, 85 nt, Homo sapiens
aaccagacgccagcgggacgaggaccgagaccgcggccgggaccgaggacaggcccaaaaacgcgacggcaacacaaggagccca

SEQ ID NO: 54290 - RNA, 72 nt, Homo sapiens
ccaagggaagaggacacacacccagcagcggccgaagaaaccaaaagagagaaaaggaggaggacggcacaa

SEQ ID NO: 54291 - RNA, 69 nt, Homo sapiens
ccggcggaggaggcagagcgggggaccgaggaccgcggcggcaagccagaagcggacccagaagagggg

SEQ ID NO: 54292 - RNA, 77 nt, Homo sapiens
ccggggccgcccagaggcgccaaaaccgacaaacacacgggggcgggacagaagcggagcccagcgaacgagaccgc

SEQ ID NO: 54293 - RNA, 73 nt, Homo sapiens
cccgcccgggaaccgccgggaacccgccagcaccaccgcccaaccccagacacggggacccggcaaaccgaag

SEQ ID NO: 54294 - RNA, 80 nt, Homo sapiens
ggcgggggcccggccacccgcaggggaggacgcgagcggaagagaagcaaaaagacaaggaggaaagcgacaccacgacc

SEQ ID NO: 54295 - RNA, 74 nt, Homo sapiens
gggcaggggcaaccagcagccagcccaagggacagaaggccacaggcaccacaagcacggaaggggacagcgag

SEQ ID NO: 54296 - RNA, 76 nt, Homo sapiens
cgcccggacagggaggcacaaggaaagcgaacgcgaaaagaaaagccgagagcagccagaccggcgaagaaagaac

SEQ ID NO: 54297 - RNA, 84 nt, Homo sapiens
caaagaaacgggacacgggaagagcggcgcccaaggccacacagcgaccaaaaagagccaagcgagaagagagaaccacaaagg

SEQ ID NO: 54298 - RNA, 73 nt, Homo sapiens
ccagaagggacacagcccacgcggaggccaccagaagaagacgggaagagacccaggaaggggaagacacaga

SEQ ID NO: 54299 - RNA, 81 nt, Homo sapiens
gcccggggaagcaccaaacgcgccacaacgccgacgcaccacacgacggcgcagggcagggcggagaacggaaaagcacca

SEQ ID NO: 54300 - RNA, 68 nt, Homo sapiens
gaagaccggcaggagcagggaaaacagaaccagaggcagggccaggacaccggaggaggggaccccaa

SEQ ID NO: 54301 - RNA, 86 nt, Homo sapiens
cccgggccgagcgcagcccccaaagccgcgcgagaggagccgggacacgccagcgcgggcccagggcggagaacggaaaagcacca

SEQ ID NO: 54302 - RNA, 71 nt, Homo sapiens
ggccagcagggggaagggcacggggaccgacacagcgggccagacagagggacacccaccggaggaagcac

SEQ ID NO: 54303 - RNA, 74 nt, Homo sapiens
gcggagggggcagccgcacacggagacccagcggagccccggcgcacgcaccccagggggcccagagagggccg

SEQ ID NO: 54304 - RNA, 81 nt, Homo sapiens
gacgacagagacgaaaaaccgaggcgagacccaaaggggaaaagagacgcaaaccacgaggacagagaagagagaagccac

SEQ ID NO: 54305 - RNA, 40 nt, Homo sapiens
gacgaagccacgcaagccacagagaagaggcgaaagaaga

SEQ ID NO: 54306 - RNA, 42 nt, Homo sapiens
ccggcgcggagcggcacgacaggaaaagggagaagaggaaaa

SEQ ID NO: 54307 - RNA, 58 nt, Homo sapiens
accgcacaaggaaaagaagcccaacccagaaacaggaagcggaggaggaagaagcaaa

SEQ ID NO: 54308 - RNA, 65 nt, Homo sapiens
cggagacagggagaccaagagacagacaccgccccgagacgagaaaaaagaagccacccaccaga

SEQ ID NO: 54309 - RNA, 61 nt, Homo sapiens
cggcgaagagaagcacaaaaagccgaggaagcacacggaaggaccaagaaaggcccaggga

SEQ ID NO: 54310 - RNA, 76 nt, Homo sapiens
gcaagaggggccagggagcagacacgaaaaggaagggaggggagaacgaagggacacggggccagcaaggaagcac

SEQ ID NO: 54311 - RNA, 108 nt, Homo sapiens
aacaccagacaccaggcccacccacagccccgccccccccacgggaaccacagggcagaaaaccccagccaacgcaaaaagcaaaaagaagcaggaagaggaaccaaa

SEQ ID NO: 54312 - RNA, 131 nt, Homo sapiens
ggcagcgcccggaccggccgagaggaagacgagccgggaggaacggcccggaaacaggaggacgccaagacaaggggcgcagagcggggggacaggcgcaagaccggagaagcaggagcggaacgacgagc

SEQ ID NO: 54313 - RNA, 73 nt, Homo sapiens
ggcacggaagaggacagcaccgggggaccgagcagggggagaagggccacagcaacacagccgagcagcggag

SEQ ID NO: 54314 - RNA, 75 nt, Homo sapiens
aacccgggcggccagcacagggaaagggagcagcaccggccacacccacagcacgaccggaacccagcgaccgac

SEQ ID NO: 54315 - RNA, 71 nt, Homo sapiens
caccccaccaaaaaacacagaccaggaggagaaaaggaaccaaagaagggacaccaggccgccggccgccg

SEQ ID NO: 54316 - RNA, 75 nt, Homo sapiens
caaagacaaaaaagaaaagccaacgacaaaaaggcaccgcaggcgggaggaacaaaaaccacgaaaaacagcaga

SEQ ID NO: 54317 - RNA, 81 nt, Homo sapiens
cgccaggacgagcagagccccccccaccagaggacgggaggagcagcaacagaagagacaacagccacaagggacaaaagg

SEQ ID NO: 54318 - RNA, 82 nt, Homo sapiens
gcgggaagcccgccagaaccgaggggcccccaggaccaacccgagcgaaccggccgagaacaaaggcaggacaacagaggaa

SEQ ID NO: 54319 - RNA, 80 nt, Homo sapiens
gaaacccagggcacagcggggaggggcgcaaacgcagaacagaaaggccccggagcagcgcgacccccaggaaacacgag

SEQ ID NO: 54320 - RNA, 76 nt, Homo sapiens
cgcgcgcgccggcccagccgcgcgacgggaggacgaagccggccgcagagcgggccgcacgggggaaagggagaca

SEQ ID NO: 54321 - RNA, 77 nt, Homo sapiens
cagcccggcagacgcagaaccagccaagaccaaagaaaaaagagaaggaaagcggacaaaacgcggaaagaggccgg

SEQ ID NO: 54322 - RNA, 69 nt, Homo sapiens
gccgccggacagcgcagagccaagacggagaaacaaaagcacggaccccaccgaacagggccggcagac

SEQ ID NO: 54323 - RNA, 69 nt, Homo sapiens
accccccggcgccgcgccggcggcggggagcaccccccagacggcgccagccgacccccgccgccacac

SEQ ID NO: 54324 - RNA, 75 nt, Homo sapiens
agacaccggagacgggaaaggacccaggaagccacccgcagaggggcaaggagaaagggcaaacgcagcacacaa

SEQ ID NO: 54325 - RNA, 75 nt, Homo sapiens
cccgccgcggagcccgcagcccgccggcgcgccccacgggccaggaggacaacaggcacaaagagagaaggaaca

SEQ ID NO: 54326 - RNA, 59 nt, Homo sapiens
acacaggggccaggaaccagcagccccaggccgggaacgccacacaacagggccccggg

SEQ ID NO: 54327 - RNA, 60 nt, Homo sapiens
ccagacacagcagacacaaaacaagcgaaacaccaggcaccagaagaaacccaggccaca

SEQ ID NO: 54328 - RNA, 78 nt, Homo sapiens
cgacacagcacgaggaaagcgaggacggagagcgcacaccaggacacagacagaggccggagcagagggaagcaaggc

SEQ ID NO: 54329 - RNA, 75 nt, Homo sapiens
cagccagcccaccacagggggggcgggacagacaaaacggaaaaggccaaggagggggcagggaggagggcagca

SEQ ID NO: 54330 - RNA, 84 nt, Homo sapiens
gaggggcagccagcccggccgccgccgcgcgaggaaaggccgaggagccggagccgcaggccagcagggagaacaagacccggc

SEQ ID NO: 54331 - RNA, 78 nt, Homo sapiens
cgaacccgcgggcggaccaagcaggccaagagcccaaggcaccagacccgcgaccgacagcccccagcccccccagcc

SEQ ID NO: 54332 - RNA, 74 nt, Homo sapiens
aacgcaggaacaccgcacgcgcggaggaggaaggaagaaggaaaagcggaagcgcagacaagaaaagagagaag

SEQ ID NO: 54333 - RNA, 74 nt, Homo sapiens
gcagccgcgaaaccaaggacgggacaagggagggccaagaacccaggaggagggaaagccggacccgccagagg

SEQ ID NO: 54334 - RNA, 89 nt, Homo sapiens
acgaagccaggcccggaggcggcgggagggccgccggaggaaacgcgcacgggaaacggagcggaacagcagccagaggagaaaagaaa

SEQ ID NO: 54335 - RNA, 72 nt, Homo sapiens
cgcaccaccgagacaagcaggcacaaccggagcaggaaaacccacacacaggaggacagacaaagccacagc

SEQ ID NO: 54336 - RNA, 108 nt, Homo sapiens
aggccggcccccacccgccagaggaagccgaggccccccacccaggagaacagggaaggggaacaggaccggccacagacagccccccaggggccggagaacacgggc

SEQ ID NO: 54337 - RNA, 79 nt, Homo sapiens
cgcgcccacccgcgcgaggagggcgggagccgagggcaagaccggcgccagcgccccccccgcacggccgccacacagc

SEQ ID NO: 54338 - RNA, 78 nt, Homo sapiens
cgagagcgccccgaaccaagccgcaggagggaagcgcacggaaaccgccccgggaggcacagagcaggagacgccacc

SEQ ID NO: 54339 - RNA, 124 nt, Homo sapiens
gacaggaaggagggcagaaagaagaacaggagcagacccggagacacacggccgagcaggcccagcggagaacagaagcaagagcagaggccaggccgcccccgcgccgggcagcacacaacgc

SEQ ID NO: 54340 - RNA, 65 nt, Homo sapiens
cgccagagcgccaagcagcaaaggagagggacaagagaaaaaaagggcgggcgaacaaaaagagc

SEQ ID NO: 54341 - RNA, 73 nt, Homo sapiens
gcagcagcccagccccccccacagccgaccagaagcaaaaacccccagagaaaccagaaggccacaggaggag

SEQ ID NO: 54342 - RNA, 74 nt, Homo sapiens
cccacccgccgcagcaagcagaggacccgccccgccagggaacaccccacgggggacagagagaggacagcaac

SEQ ID NO: 54343 - RNA, 77 nt, Homo sapiens
ccagacacccccggccaaaacggagaaaacaacaaaaccgcccaggaagaccggaagggaaggcagaaaggagagag

SEQ ID NO: 54344 - RNA, 61 nt, Homo sapiens
cgcccgcagcccgagcccacaagggacggacaggcgccgcccgcggccgcccccgcaccgg

SEQ ID NO: 54345 - RNA, 60 nt, Homo sapiens
aaaagccaggaaggacaaaaccgccccagagaggaccaggaaaaaccccagaccaccaac

SEQ ID NO: 54346 - RNA, 75 nt, Homo sapiens
gaccacaaaccggcggagccacagggagacaggaaccaaaaagcaacagaagaaagacgggaacgaagcaaaaac

SEQ ID NO: 54347 - RNA, 73 nt, Homo sapiens
gcgggcgggccggcagagcagcaccccacaggacaacccgaggagccaccagcccggcggcgcggccgcccac

SEQ ID NO: 54348 - RNA, 72 nt, Homo sapiens
caagaaagagacagaaggccgagcagcagccaacggaacaggacaggaggccagggcacgggaaggcagcac

SEQ ID NO: 54349 - RNA, 79 nt, Homo sapiens
acggacacaccaaagaggccgcgaaccagggcgcgggagcagcaacccaagagaggaccggagcgggggggaagagccc

SEQ ID NO: 54350 - RNA, 86 nt, Homo sapiens
aaaaccccgaggagcccgccaaagccccggaccgccaagaagcacgagaagagaagcccagagcaaaacaccccaaaccagaccac

SEQ ID NO: 54351 - RNA, 78 nt, Homo sapiens
gaaaagaaaaggccaaaaggcggcacaaggggccgggagaggaaggccccaagcagccagcagaaaagcaaccagacc

SEQ ID NO: 54352 - RNA, 47 nt, Homo sapiens
gacaaagcgaaagcacaccaagggccaggcgcagcgccacgggagcc

SEQ ID NO: 54353 - RNA, 62 nt, Homo sapiens
gcaaggggccaccaggaggccagggggcgccaggaacaagcacacagagacggggacggcaa

SEQ ID NO: 54354 - RNA, 73 nt, Homo sapiens
cggcaagagaggcaccccgaagaggcgaggagcaacccaacgcgaccggaaaggagagagagacagaaccaca

SEQ ID NO: 54355 - RNA, 53 nt, Homo sapiens
ggcgcacaagagccaagaggagacccacaggggacgaggacgccggcagacac

SEQ ID NO: 54356 - RNA, 77 nt, Homo sapiens
cggcccccacggagcccccgcagggcgagagcgccccagggacacgagaggcgagggacgacagagcaagcggcaga

SEQ ID NO: 54357 - RNA, 71 nt, Homo sapiens
gaagggcaccacggagagaagggggcaccaccgcaccaccccggaaaggcagccggccggcccagagaaga

SEQ ID NO: 54358 - RNA, 55 nt, Homo sapiens
cgggaccaacagggagccagcacagaagagcaacaagcggaagaccacaacgacg

SEQ ID NO: 54359 - RNA, 75 nt, Homo sapiens
agccccagcggagaaagagggcaagccgggagaggaagacacagagaaaccaaagccacaaagacagacaaccca

SEQ ID NO: 54360 - RNA, 63 nt, Homo sapiens
cgaaaccggggagagcagacacggaaccggggcgcaagaccggggaccacgggaaagcccccg

SEQ ID NO: 54361 - RNA, 57 nt, Homo sapiens
cagaaaggacccgggacacccaccaggcaaggggcggaggcagcaaagacaggccgg

SEQ ID NO: 54362 - RNA, 87 nt, Homo sapiens
ccagggcagcagcagcagacagcagacagacagccaggcgcccagaggggccccggagccagggacgaccgaaggccagaacccgaa

SEQ ID NO: 54363 - RNA, 74 nt, Homo sapiens
ccgccagccgcgcgccggggaggcgccggagcgccgcggggcccggggacgcggagggccaacaacacaccccc

SEQ ID NO: 54364 - RNA, 71 nt, Homo sapiens
agccaacacaaggaaggagcaggaaggagagaagggaaggacccagggaaaccggagacacagagaaaacg

SEQ ID NO: 54365 - RNA, 83 nt, Homo sapiens
gaaccgagccacaacagccaaggaaaaaaagcagagaggagcggggagcaagcaggaccaggagaacacagcgaaaaagggcg

SEQ ID NO: 54366 - RNA, 78 nt, Homo sapiens
ccagaggaaagcgaaagggaggacagaagcgcgcccaacaccccaacggggcagagagagacaagcagaccggaagac

SEQ ID NO: 54367 - RNA, 63 nt, Homo sapiens
gacagagggagccaggcagagcaggcaggagaagggcaccggggaggaccgcgcgacgcgccg

SEQ ID NO: 54368 - RNA, 76 nt, Homo sapiens
gcgccggcgaggggaagccgcgcggccggccggccgacaggggcggacaggaccaccaggaacaaagagaaagcag

SEQ ID NO: 54369 - RNA, 62 nt, Homo sapiens
agacgacaagcacacacaggcgcgaaacggaaaaaggccaagagcccagggcaaaaacagac

SEQ ID NO: 54370 - RNA, 79 nt, Homo sapiens
caacggagaaggaaaagaaccagaagcgagagaaaagcccccaaaagcagcacagggcggagcggccgggcccggaacg

SEQ ID NO: 54371 - RNA, 78 nt, Homo sapiens
agacacggccgaaggcgaacgccgcggccaaggagccgccaaagccagacgaagaaacaggacgagaagaggcccccc

SEQ ID NO: 54372 - RNA, 69 nt, Homo sapiens
gaccagaggaggaagagcaagcgggggaccgaacaaggcaaaagggcagcagcagaggaaaaaagagac

SEQ ID NO: 54373 - RNA, 80 nt, Homo sapiens
cacccacccaaggaagacccacgccacaccaccccccagaaggagaagaagcaccagccgacgcgaacggaacacccggg

SEQ ID NO: 54374 - RNA, 65 nt, Homo sapiens
cccggcacagagagcaaggggaaacacaccagcacacaaaggagaagacagaggagccagaccaa

SEQ ID NO: 54375 - RNA, 72 nt, Homo sapiens
aacacacacacaaaaaacccacacaggacgcggacaagggcggcagccgggcccagaacggcgccggcacga

SEQ ID NO: 54376 - RNA, 72 nt, Homo sapiens
cacccccaagacagagccaagccagaaacagaacagcgcccacaaagaaccagagcgagaaaccacaacaac

SEQ ID NO: 54377 - RNA, 60 nt, Homo sapiens
accgaaagggccacaccagcagaagagcccaacaacaaacgggcaggccggggagcccgc

SEQ ID NO: 54378 - RNA, 74 nt, Homo sapiens
ggaagcaacacgaaggaggccacgcagcaaaccacaggagaggaggggaaaaagaaaagggcgaagacccgaag

SEQ ID NO: 54379 - RNA, 72 nt, Homo sapiens
acaggaaccggagcgggagaggacagagacgaggcgggcccaagggcaccaccggcacccacaaagaggcag

SEQ ID NO: 54380 - RNA, 53 nt, Homo sapiens
aaaagacccggaagaaagcaggacacagcacccaaagcaccaccccaggagca

SEQ ID NO: 54381 - RNA, 64 nt, Homo sapiens
aaaaaagcgcaagaaaggcagcaccaaacaccgagaaggagagcaccacgagaaggacccaaag

SEQ ID NO: 54382 - RNA, 88 nt, Homo sapiens
agaaaacagagcagcacagagcagcaggagggaaaagaagaaggaacgaccgaagaaggacaccagaggagaccgaagaagacggaga

SEQ ID NO: 54383 - RNA, 67 nt, Homo sapiens
acggcaaaaccccgcgacaggagcacggcagcagcaagcccaagccacagaccaaaaagagaaaggg

SEQ ID NO: 54384 - RNA, 55 nt, Homo sapiens
ggagggacccccccgccagacggacggaaaaggcgcacacgacccggagaacccc

SEQ ID NO: 54385 - RNA, 75 nt, Homo sapiens
ccgagccgagaggcaagacaacacacccagaaggccagccaggaaagcgggagcgcgggagcaaaggaaagaaga

SEQ ID NO: 54386 - RNA, 69 nt, Homo sapiens
aaccgccgcaaggaaaaaagcacggaaaggcgcgagccggcacgaaacaaaggagcgagacagaagaga

SEQ ID NO: 54387 - RNA, 85 nt, Homo sapiens
ggaacagcaggcccgagcccaccgcgccgggccccggacgccgcgcggaaaagcggagcagggagagcaggaccacacacggagg

SEQ ID NO: 54388 - RNA, 75 nt, Homo sapiens
agcgcgaacagaagagaggaagaaaggacagggagagaagccaagaaagacagaaccggaacaccaggaacgaca

SEQ ID NO: 54389 - RNA, 61 nt, Homo sapiens
aagcccgcagacagcagcggggaaaaacaagagaaggaaagaggcagaaggccagaagggc

SEQ ID NO: 54390 - RNA, 73 nt, Homo sapiens
cgggacggaccgagaccggaccgagagcggaccgagagcgcgaaacgcacgagaaggcgccaagccccagaac

SEQ ID NO: 54391 - RNA, 74 nt, Homo sapiens
gagggaaaggcccaggaaaaagagagaacgagcgagaggggaaagagagggaggaggagacaacagagagagcg

SEQ ID NO: 54392 - RNA, 86 nt, Homo sapiens
gcgaccgcagggacggcagacccgagcaagacgccaggaccggaagcagagaaaggaggaagagcgcgcaaaggggagaccccaaa

SEQ ID NO: 54393 - RNA, 57 nt, Homo sapiens
agcggagggggggcgccagggaccagaagcagcagccccagaagccccgaagccggg

SEQ ID NO: 54394 - RNA, 126 nt, Homo sapiens
ccccagcacggcggacaagcagggcaaccaacgccggggcggggagcacggaacgacagggcgcaggcccggggccccagccggcccgggcacccggcagaggagagggccggcccggcccggccc

SEQ ID NO: 54395 - RNA, 74 nt, Homo sapiens
cccgagagcggggcacagcaaagggaccccagcaacaaccggaagaggggaccacacgaccgcgagcccaacac

SEQ ID NO: 54396 - RNA, 81 nt, Homo sapiens
aagcaaccaggaggcagaaaccagcgccggacagagaagcccccaaggagcgcaggaccaaagggaggggaaacaagaacc

SEQ ID NO: 54397 - RNA, 78 nt, Homo sapiens
cgcacggagaagcccgggacgagaaggggaaaaaacaggccagggcgagcgacagaacgcaacccaggagccccgggc

SEQ ID NO: 54398 - RNA, 67 nt, Homo sapiens
aggaagccggggcggaacagggcgcacacccgcacgaaacgagaaaaccacacagaccagcacacca

SEQ ID NO: 54399 - RNA, 68 nt, Homo sapiens
cgaagcccaaacagaagaagaaggcgcaacacagcagggcaagaaacaaccacagggaggaaccaggc

SEQ ID NO: 54400 - RNA, 54 nt, Homo sapiens
gggcagcaggcccagaaacgcacacaagaagggggacgcggaagagacagcaga

SEQ ID NO: 54401 - RNA, 76 nt, Homo sapiens
gcgggcgagggaggggaccgccgcgcacagaaaacgcgcggccggagggaaaggagcaggcgggagccggggcggg

SEQ ID NO: 54402 - RNA, 73 nt, Homo sapiens
aaagcgaaagcacaccaaggaagagaccagaagagcaggaggaaacaaaggaagaccaccaagaagagcggga

SEQ ID NO: 54403 - RNA, 73 nt, Homo sapiens
cgaaccaggaacaacaagaaccaagccacaggacaagcagaagaacagcagagggccaggacaccacaagggc

SEQ ID NO: 54404 - RNA, 84 nt, Homo sapiens
aaagagcgccagcagccaggaacccgggacagcaggagggggccacggccaagcccaaagagaagagaagcaaggaaagaagac

SEQ ID NO: 54405 - RNA, 71 nt, Homo sapiens
agaaaagaaaccggagggacaaaaacgacccacaaagcgaaagggaagcaaaggaagaggacccaaccgag

SEQ ID NO: 54406 - RNA, 75 nt, Homo sapiens
cccccaccaggcaccacgaccaggaccaacaagcggccaaccaaaagccaaggaaaagaaaaaggagaagagaaa

SEQ ID NO: 54407 - RNA, 74 nt, Homo sapiens
aacaagacacggagcaaggaggaaaacacacgagaaaccaggcggggaacaagccagcagcccaaggagaagcc

SEQ ID NO: 54408 - RNA, 67 nt, Homo sapiens
ccacaagacgaccaaaggaggaagcccagaggcagacacagaggagcagagcaggagaggagagaag

SEQ ID NO: 54409 - RNA, 75 nt, Homo sapiens
gccagcaccgaagaagagggcagccccagccccagcggcaggcaggaacccaggcccagcgacagaagcccccag

SEQ ID NO: 54410 - RNA, 84 nt, Homo sapiens
ccagaccccggccgccgaccgcggccccgccggccgccggccgcgcggggggcccgggcccgccggccacaccacacgcccccg

SEQ ID NO: 54411 - RNA, 80 nt, Homo sapiens
gcgggcgggcccagacccgcagcgccgagccaaccaagggacgaacccaaagacccagccccgcagcaccacaaccccgg

SEQ ID NO: 54412 - RNA, 54 nt, Homo sapiens
gcggcgcggcggcgcccggcccccgccgcagacgagagcgacaaacccagccag

SEQ ID NO: 54413 - RNA, 70 nt, Homo sapiens
aagggaaggcgcgaggaggaaaggaggacgaggcgggaaaacggcacaaggcgacgagggagggcagacc

SEQ ID NO: 54414 - RNA, 54 nt, Homo sapiens
caaaagcaagcggccgggaaaaaaagaagaccggagacccgaaagaggaagagc

SEQ ID NO: 54415 - RNA, 67 nt, Homo sapiens
ggccacgggcgggcaggcaagacacggccgaagggacaaaggagcaggcggaggaaaaacaccaaaa

SEQ ID NO: 54416 - RNA, 74 nt, Homo sapiens
ccaacgccggaccagcaaggcgcgccccacaggaagcccgcagaaggcaagccgaaagaaggacgaagcccaag

SEQ ID NO: 54417 - RNA, 74 nt, Homo sapiens
ccgcggggcaggcagacccacgacagagcagccggcacgcggccgaccccccgagcggaaggccggccaccggg

SEQ ID NO: 54418 - RNA, 82 nt, Homo sapiens
ccggcccgccagcgccagcggcacggcccgccgcccaaggaaagcacggcacagcgaggcccggaggcggggggaccaccag

SEQ ID NO: 54419 - RNA, 77 nt, Homo sapiens
cacagcaaccgaccaggaacggccgagcgaccaggagaggagcccccgcccgaagaccggggagggccccccagcgg

SEQ ID NO: 54420 - RNA, 70 nt, Homo sapiens
gggaacagggaccagaacgcaacgaaacaaggaagagaaacaggggaaggggaagcaggccaacccagaa

SEQ ID NO: 54421 - RNA, 79 nt, Homo sapiens
ccaacaggcaaggaagccggcagcaggggcccaaggggaggaccggaacggaaagagggccacggaagaagcagacgca

SEQ ID NO: 54422 - RNA, 85 nt, Homo sapiens
caaccgcaaccagacgccagcgggacgaggaccgagaccgcggccgggaccgaggagacgccccacaaccgcccgggcgcggacg

SEQ ID NO: 54423 - RNA, 77 nt, Homo sapiens
ggaccaagcaagagcgaccggaggcccgagaagaagacaagagacacagcaagacaaggggaggagacaacaggagc

SEQ ID NO: 54424 - RNA, 80 nt, Homo sapiens
gacaccgaagaaaccacacgacacgaaaaccagacgagagacagaagacgaaagggcaagaaagagagcacggacaagag

SEQ ID NO: 54425 - RNA, 39 nt, Homo sapiens
acccaagcccacccgggagccagacagaagaaacccgaa

SEQ ID NO: 54426 - RNA, 81 nt, Homo sapiens
gagaccagcgagaggagcgcgccgaggccagacccggccggggccgaaccgaccagaccaggcagcggaaaagagaagaag

SEQ ID NO: 54427 - RNA, 54 nt, Homo sapiens
aggcggcggcggggggagcgggaagaggagaacgaaaacccaccaggaaggagc

SEQ ID NO: 54428 - RNA, 78 nt, Homo sapiens
aagacccggaaagaagggacacagacggagcaaacccccaggcgacacgaagcagcagacaggggagagggagacgca

SEQ ID NO: 54429 - RNA, 78 nt, Homo sapiens
caaggcaggccacagagggacagaacgccccaagacgcagagaagccaccagggggaaacaagaagaaaagaagcggg

SEQ ID NO: 54430 - RNA, 77 nt, Homo sapiens
aagaagaaaacgagacccaaaagggagaaagaagagaagacaggaagaacgcgcaaaaaaaaagagaggaaaaggac

SEQ ID NO: 54431 - RNA, 73 nt, Homo sapiens
agcagagcgggggggcggggccggcaccgcacaggagagcgggaaagcaccaggcagccccacccgggaagac

SEQ ID NO: 54432 - RNA, 80 nt, Homo sapiens
cgggaggaaggaacgaggcaaggagcaaagcagcggcgcagcccggggaagcggggagaccaggccagggcagcccgccc

SEQ ID NO: 54433 - RNA, 74 nt, Homo sapiens
cagaaagcaggcgaacccgcggcgcaaaacggcgaacaagaggcgccagcgggcgcgccggaagaacagcgcca

SEQ ID NO: 54434 - RNA, 71 nt, Homo sapiens
gaaaaagcggaaaaccaggcgcgagaaacccaggccgcgcacaagaaccggcagcgaacaaggagaaagcc

SEQ ID NO: 54435 - RNA, 105 nt, Homo sapiens
cacggaccgacgccaacaggcggcgcccagggcgccaccgccgccgcagagagagggcaaaaaacacagacaccggcgaacaacaagaaccggggagacacaggg

SEQ ID NO: 54436 - RNA, 78 nt, Homo sapiens
caagcgccccgccgggcccacaacaaggggagcagcggaggaagccacaggacgccggggaccgacaggccacaggac

SEQ ID NO: 54437 - RNA, 75 nt, Homo sapiens
aggccaaagggacaaagagaccagcggagcccacaagggagaggccaaccaagccccgagcagacccagccgaaa

SEQ ID NO: 54438 - RNA, 86 nt, Homo sapiens
cgagaggccggcgggacgcgggcgccaggaccggccgaacgcagagaacccccggggccagccccccgaggcagccgcggccggcc

SEQ ID NO: 54439 - RNA, 74 nt, Homo sapiens
caggagggaaaacccacggggggggccccagaagaaaaaagagcaagaccggccagggccgcaaaaggaaagac

SEQ ID NO: 54440 - RNA, 78 nt, Homo sapiens
cgcagcgcaccacggcaggaggcggcagagacgggaggaagcggggaagacccaccagccccggggaggcgcagcagc

SEQ ID NO: 54441 - RNA, 83 nt, Homo sapiens
gccgcgccgcgccgccacggccagcccccgggcaccgggcgaccaggggcacccagccccaggacgcagaacaagccaaaaac

SEQ ID NO: 54442 - RNA, 72 nt, Homo sapiens
acaaggcaaacagacggcaggaggggcggggaggagagagaccccacgggacgccgggcaccaaggccacgg

SEQ ID NO: 54443 - RNA, 69 nt, Homo sapiens
agcacacaaacaagcagcgaagcccaagagaacgaaagcacagaaaacaacgccccaggaccgcagagg

SEQ ID NO: 54444 - RNA, 55 nt, Homo sapiens
agcggggaggaccccagaccacgagcccccgaggaaagcacgcacaacgaggaaa

SEQ ID NO: 54445 - RNA, 44 nt, Homo sapiens
ggggacccgacgcccgcacgagaaacagaagcggagagacaggg

SEQ ID NO: 54446 - RNA, 80 nt, Homo sapiens
aggagaaacaaacagaccggaagcacggagagggagccggccgaggaggcacagggccgggcaaaacccccgagccacca

SEQ ID NO: 54447 - RNA, 73 nt, Homo sapiens
ccccggcgggaagcggcaggagagccacacgccgccgcagaggaagcaccaaccgcccccaggggcagcgggg

SEQ ID NO: 54448 - RNA, 82 nt, Homo sapiens
caacacccacaggcaaaaggcggaggcaaacggcaaagggagagcaggcggggcaagcagaaaggggagcaagaagaaagag

SEQ ID NO: 54449 - RNA, 72 nt, Homo sapiens
gggaaccgcagaggccaaccacaaccacaacgcgagaaagacggggaggacagcggaggggcgcaaaacgag

SEQ ID NO: 54450 - RNA, 47 nt, Homo sapiens
ccgggcgccacgcgggggcaagacgaagcaaagagcccgggaagggc

SEQ ID NO: 54451 - RNA, 114 nt, Homo sapiens
agcacgggccgagagccgcccgggccagcggccgcgcacccccggccggaggcaccagcgggaagacccagacacacaccggagaaagccccccagcgagcgggcccacggccg

SEQ ID NO: 54452 - RNA, 72 nt, Homo sapiens
gacagcgcaacagaagaccgccagagacagagaagacaacgagccaaagcagacccccaagcgagcggagcg

SEQ ID NO: 54453 - RNA, 59 nt, Homo sapiens
gcgcgaagaggcggaccggacggccgaggaaacaagcccacccagaaaaaggcccggga

SEQ ID NO: 54454 - RNA, 68 nt, Homo sapiens
cagggaagcagcacgagagcgggacggcaacaccaagacacggccacggcaagaggcacaacgaggcc

SEQ ID NO: 54455 - RNA, 66 nt, Homo sapiens
gaaccgccgaaccggccaccccccagaaaacgacaaacagaacacagcgccgaggccaccacagaa

SEQ ID NO: 54456 - RNA, 76 nt, Homo sapiens
ccagccgaggaccgcgaagaggaacaagaaggagcggagaacggaccacccagcagcccccacacaccaaccaccg

SEQ ID NO: 54457 - RNA, 67 nt, Homo sapiens
ggcacgggaaaaccgaaaggaagcgacaaagccgagcacaacacggaaggcgggacgaggccggagc

SEQ ID NO: 54458 - RNA, 70 nt, Homo sapiens
aggcagacaaaagggccaaagaagggagagagggccggcaaccgccagacaggaggaacgaagccgcgga

SEQ ID NO: 54459 - RNA, 100 nt, Homo sapiens
gggaaggcgggagacgagaagccgaaaagcgcagcgagcggagccgccggagaccccgagcggcggcgacggcggcaagggaggggacgcgcgaggaagc

SEQ ID NO: 54460 - RNA, 73 nt, Homo sapiens
aaacacacggcccacggaagaggccgcgaagagccccaaggggggaggcggcccggcagcgggagcaggggca

SEQ ID NO: 54461 - RNA, 72 nt, Homo sapiens
ccgcacccggggccagcagcaaaagggagaccacaacagccaccaaacagaagaaccgcccaacggaaggag

SEQ ID NO: 54462 - RNA, 67 nt, Homo sapiens
caccaccacaaaccggccaaggcacaaaagccacaaaggagacaggacagcgcccggggcaaggggg

SEQ ID NO: 54463 - RNA, 67 nt, Homo sapiens
gagcgaaggacccagcgaggagggaccgggcaaaccagaacaagaccgaaccgggccagcaggagcc

SEQ ID NO: 54464 - RNA, 87 nt, Homo sapiens
ccacccaggccccgggccgcgaagcgcagcgccagacccaaggcccccgaggagcgcgggcgccgagagagggccgaggcagacaag

SEQ ID NO: 54465 - RNA, 56 nt, Homo sapiens
cagcccgccaccgcgcggagccgcagagcgggcaccagggacccgcgaccgcagag

SEQ ID NO: 54466 - RNA, 80 nt, Homo sapiens
caccgccaggcaggcacaaagagagccacaggccgcacaccccagagcccgaagggggccccgaccccgacccagcggag

SEQ ID NO: 54467 - RNA, 73 nt, Homo sapiens
ccacgcgggagaccggggggcggacgcgcgcggggcaggccgcggacgagaggacaccagcgaggaggcccac

SEQ ID NO: 54468 - RNA, 82 nt, Homo sapiens
ggagcccagggaagcagccgaccagccgcggagccgggggcagcacggcccggaaagaaaagacagggcaaagcccgggaac

SEQ ID NO: 54469 - RNA, 77 nt, Homo sapiens
agggagccggcagcagagcaaaacagagcggaacgaacaaggggagagaagggcgcaggcaccgcaaccaccacaaa

SEQ ID NO: 54470 - RNA, 68 nt, Homo sapiens
ggagccagaccggcaccgaagacccaaacccagcagagaaaaccaacaaaaggaccacacgaggaacc

SEQ ID NO: 54471 - RNA, 70 nt, Homo sapiens
agcgggcagaggagcagggaggccacaggggccgacaacacagagcaagacagacccggcgcccgacaac

SEQ ID NO: 54472 - RNA, 39 nt, Homo sapiens
gaagcacaaccccgagcacggaaaaacaaaggggagagc

SEQ ID NO: 54473 - RNA, 70 nt, Homo sapiens
ggcaaggggggcaaaggcaggagagccgaagggggaagcagaccaagaagacagaaggggcccgccaccg

SEQ ID NO: 54474 - RNA, 75 nt, Homo sapiens
aggcaagcacggggggacgggcaggcaaaggcggaaaaaggcaccaggccagcgcaacggaaacagaaaagagcg

SEQ ID NO: 54475 - RNA, 82 nt, Homo sapiens
gcggccggggaccccgggcccggaggccagccggcgggcgcgcgacggcggccagcgccgcgccgcccccaggcccaggaag

SEQ ID NO: 54476 - RNA, 75 nt, Homo sapiens
aacgcccgaggcccgaaccgcgggagaggggaagagacaagaccagggagaccaaagaggaaggggaccaacaca

SEQ ID NO: 54477 - RNA, 77 nt, Homo sapiens
aaggagcaaccaaccacaggaggacaagacaaaggaggaaacaccacacgaaacacagaaacaccaagagaaacaag

SEQ ID NO: 54478 - RNA, 90 nt, Homo sapiens
cgggacgcggcggcgccggccccggggagaaacgcagcagaaagcagagagcccagaagaaaccaaagccacaccacccaaccagcaagg

SEQ ID NO: 54479 - RNA, 76 nt, Homo sapiens
accaacagagaaaaaaaccagaaacaacccaaacccccaagccagggcgacaacaccagaccagcgcggggcacgg

SEQ ID NO: 54480 - RNA, 115 nt, Homo sapiens
aaaaaccagaagggccgaccagaaaggaaccccaagcgacgcaggcagaagcgagacggcaaggagaacgggaaagcgcacaagccaccgcggcccgggcgcaggcgggcccaga

SEQ ID NO: 54481 - RNA, 59 nt, Homo sapiens
cggagcaaaaagcgcacgcaaggaaaccgacaggacacagaacagagaagaagcagacg

SEQ ID NO: 54482 - RNA, 81 nt, Homo sapiens
agccaccaggccgggaagcccacggagccaggacaaaaccaggcagaaccaacacgaacccaagcacaaacaagaaaacga

SEQ ID NO: 54483 - RNA, 87 nt, Homo sapiens
acaccgcggggggggcaggggcgagcagggccacaggcacagaacggggagccaaagaggagagagcgccaagggccaaaaagcagc

SEQ ID NO: 54484 - RNA, 72 nt, Homo sapiens
agcccaccggccccaacgcacagccagggagccaagcgccgcccggcccaaaccggcacgagccaggcacca

SEQ ID NO: 54485 - RNA, 87 nt, Homo sapiens
cagcagcagccgccacgaccgggagccccgcacccgcccggccccacgggccgagacgaaaacgaaaaacgggcagggacaaggcgc

SEQ ID NO: 54486 - RNA, 58 nt, Homo sapiens
agacaaaggaccaaagcccaaggaaaggcccaggcacagcagacgcacggaggcgggg

SEQ ID NO: 54487 - RNA, 53 nt, Homo sapiens
cgccccggggcgaaggcgggggggggaaaggaggcgcacgacggacgccacga

SEQ ID NO: 54488 - RNA, 39 nt, Homo sapiens
ccaagaaggacccaagaacggcgagaggccagcgaacga

SEQ ID NO: 54489 - RNA, 108 nt, Homo sapiens
gcgacggcacgccgaagcaccgccggggggaagccccgcgccggccgcccgggggacgaagggaacccgccgggcggcccggcacccagccccccggcacccagccag

SEQ ID NO: 54490 - RNA, 54 nt, Homo sapiens
aggggcaaaggcgagaaggcaccgcagggcgagaaccgccgcgaggcgccgccg

SEQ ID NO: 54491 - RNA, 60 nt, Homo sapiens
cagggaacggcgcccagcgggacccgaccgcagcgcaggacccgccaaacgcccagccag

SEQ ID NO: 54492 - RNA, 70 nt, Homo sapiens
gccccaggcaggccgggacgccgggccggcagccggacaccaggagggaggaagaggcgcggcaagggcg

SEQ ID NO: 54493 - RNA, 80 nt, Homo sapiens
acaggacggggaagacggacagcaggagaaggacggggaggacgcacgacgcgcggcacgggaacgcagccggcacaacc

SEQ ID NO: 54494 - RNA, 75 nt, Homo sapiens
accggaccagcagccgccagaccgcccgcccgaaggcgaccagaccgggccacgcgccccggcccaagggcgcac

SEQ ID NO: 54495 - RNA, 78 nt, Homo sapiens
gggacaaaggggaaaaagggagcccgcgcaaggaagaagagacgccgcgcggcagacaaggcccggcaggcaaagcgg

SEQ ID NO: 54496 - RNA, 54 nt, Homo sapiens
agcagagaggaaaaacacaacccaagaaacggaaaaccgacggaaagaggagga

SEQ ID NO: 54497 - RNA, 87 nt, Homo sapiens
aggaagcaggcagccagccaggaagggaggcagaagcagcaagaacaacagcaggccaagcccgccggaggaccgcacgcgccacgc

SEQ ID NO: 54498 - RNA, 75 nt, Homo sapiens
ggaccacgccgaggcccacgcaccccgggagaacccggaagccccgccccccagcccagccgaccagagccaccc

SEQ ID NO: 54499 - RNA, 80 nt, Homo sapiens
gggaaaaaaccgaaagccagggcagaagaaaaaccggccagggacaacacacgggagagcacaaaccgaacacacgagcc

SEQ ID NO: 54500 - RNA, 79 nt, Homo sapiens
gacacgcggccgcggagaccaccgcggcgcggcagcgcgcccgagggcggagaacggaaaagcaccaggaagcagagag

SEQ ID NO: 54501 - RNA, 84 nt, Homo sapiens
gccccggagagcgggaacagggcccaccgcaccggacgacgggggacacagaacgcaagaccaccgcgacacaaaacaggaacc

SEQ ID NO: 54502 - RNA, 82 nt, Homo sapiens
aggcagaagcagacaggaggacgggagcggcggagcgagccaccccgaggacgaccgcagcccccagcggccagccccaccc

SEQ ID NO: 54503 - RNA, 83 nt, Homo sapiens
gaaaaagcacaggaggaagggggcggaaggagaacaaagggagaagaggaagcccgacaacgaaggaggaaggcaaccagggc

SEQ ID NO: 54504 - RNA, 66 nt, Homo sapiens
gcagggcaagcggcgacacacgacgggcagacggcagaaaacagacgaagcaacagcgaacaaaaa

SEQ ID NO: 54505 - RNA, 83 nt, Homo sapiens
gcgccggccggcgcgaagacgcgggggccgccccccgggacagagcagaagggcgaaagaccgggccgcagaagaggccccaa

SEQ ID NO: 54506 - RNA, 78 nt, Homo sapiens
cgggccgcagcaccccaccaggggcgaagcccaagccccgccccacgccacagagcacaagagggccagggaccaggg

SEQ ID NO: 54507 - RNA, 89 nt, Homo sapiens
cagaaaggaggcaccaaagagcagagacaagacgagagagccaggccagaaggaaagcggggcaaggaggaccgaacggcagacccccg

SEQ ID NO: 54508 - RNA, 71 nt, Homo sapiens
ggaaacaagaagacagcgaccccaagaccacaaaggcccgacaagagaggcggagccacccccacaacgga

SEQ ID NO: 54509 - RNA, 76 nt, Homo sapiens
cagcggaccagggcgcccgcggcggacaagcgaggaagcaagacgggaagacccagggcacaagaaaacaacggcg

SEQ ID NO: 54510 - RNA, 77 nt, Homo sapiens
gcaacaacaggcaaaggcaggaacaaggacaaaggccagaggggcaaggagcggacagccaaacaggaccgagagaa

SEQ ID NO: 54511 - RNA, 64 nt, Homo sapiens
gacagcgccgccaccgagccgggcccaccccccaccaaggaagagcgagccaaggcagcaagga

SEQ ID NO: 54512 - RNA, 72 nt, Homo sapiens
aagcagcagccaggaagcagcagcggagaaacagccacagcgcagccccaggcgggcaccgagcagggccgc

SEQ ID NO: 54513 - RNA, 71 nt, Homo sapiens
ggaggccgaaaagacagagaggggaaaccccgaaaggggggcagggagagaagaaggccggcccacagccc

SEQ ID NO: 54514 - RNA, 83 nt, Homo sapiens
cagcgggggcgccagaacacccagggcggcagggcaggccacacgcgggacacagacgacaccaccgggcacgccacgaggag

SEQ ID NO: 54515 - RNA, 58 nt, Homo sapiens
gggaaagccaccaggggcgcacaccacaaggggaaaaagagccagaacacgagaaaag

SEQ ID NO: 54516 - RNA, 96 nt, Homo sapiens
ggggggaagacgagcgcgccgaggcccaagcacccaagaagaagagacacgaagagcacggagcggaagaggagacgacaaagaccaagaaaagcc

SEQ ID NO: 54517 - RNA, 42 nt, Homo sapiens
gagaagacacgagcacaaacgggccgacaagaccggggggac

SEQ ID NO: 54518 - RNA, 79 nt, Homo sapiens
gcccaccggcggggcaacacgcgagccggcgacaagccagggaagcacagacggaccacagccagggcacaagacccca

SEQ ID NO: 54519 - RNA, 100 nt, Homo sapiens
gcggcgcagcagcccccagagcaggaagcgggagcacaaagaagcggccggaccagaggacaacacaaggaccgaggcccaagcgccagggggagcgacg

SEQ ID NO: 54520 - RNA, 86 nt, Homo sapiens
gacgaggacgacgacacaccaacccagcaagccaccggaagaagggcagacaagcaccacgcaggaaagaagaaggagagagaaga

SEQ ID NO: 54521 - RNA, 58 nt, Homo sapiens
gaagggcccacgcaacgcaggaaggcgacccccccgcagccaggacgaccaccaaccc

SEQ ID NO: 54522 - RNA, 39 nt, Homo sapiens
gacaccccgaagccgagaaaggacccaggagcaggaggc

SEQ ID NO: 54523 - RNA, 70 nt, Homo sapiens
gcaggcgagaccagcagcagcacgggaacagaccgaacacccagcaccaggagccccacacgcaaacaaa

SEQ ID NO: 54524 - RNA, 56 nt, Homo sapiens
caccgaagaaaccacacgacacggccgggagagagcgcgaaccggaaaaagaacga

SEQ ID NO: 54525 - RNA, 77 nt, Homo sapiens
cgaaggcccggcccacacgggaagcgcgggaagggaaacgcaggagaagaggaggacaaacagaggcgaagaaacaa

SEQ ID NO: 54526 - RNA, 80 nt, Homo sapiens
gaccggccgagaggaagacgagccgggaggaacggcccggaaacaggaggaccggcccagcaggagggcggggccgcggc

SEQ ID NO: 54527 - RNA, 66 nt, Homo sapiens
cgaaacaacaccagggcgaaagaggcagaaaaaagcaacaggagccacacaaaagaccaaagagca

SEQ ID NO: 54528 - RNA, 77 nt, Homo sapiens
cgcgccggacggggagaggggagcgccggggcggcccaggcgagcgggcaacggacagccaagacgagaccaccaag

SEQ ID NO: 54529 - RNA, 69 nt, Homo sapiens
gagagaacaagcgacccgacgagcgcaaggagaggaaccagcaagacgcaacccagcgacacaggaccg

SEQ ID NO: 54530 - RNA, 55 nt, Homo sapiens
cgcacaaggacggcgaaacgaagcagcagccaggaagagacgacagagacgaaaa

SEQ ID NO: 54531 - RNA, 60 nt, Homo sapiens
cggaggcagaggggaggcgcgaaaggagaagagacaacgggaaacacacaaagcccagaa

SEQ ID NO: 54532 - RNA, 73 nt, Homo sapiens
gacaaaaagggaaaccaaccagcggagcccggcacgggcaaacagagcaggcagggaaccgccaaggcagagg

SEQ ID NO: 54533 - RNA, 83 nt, Homo sapiens
gcaggacgggcacagcagagaccaaaggcagggcaaggaaacggccacaaacaacccccaccccacaccgcacagaaaagccg

SEQ ID NO: 54534 - RNA, 79 nt, Homo sapiens
cacccaaagcaggagccagaacggaaagcacgaagggagcccagcgacacaccagcagcagccaaagaccaaccagccc

SEQ ID NO: 54535 - RNA, 65 nt, Homo sapiens
cgaccggacaggagcaggcagagagggcaagccaccacgccacccacgcacccagcggcaccagg

SEQ ID NO: 54536 - RNA, 59 nt, Homo sapiens
ggagaaggaccaagaaccagagacccacgagggaccccgcccggcaggcccacgagccg

SEQ ID NO: 54537 - RNA, 70 nt, Homo sapiens
cgaggaggaaaggaggacgagggaaaccaagccccaggaggcaaccagccgcgccccccggcagccggga

SEQ ID NO: 54538 - RNA, 85 nt, Homo sapiens
ggccagacagggcaagaaaaccccgaggagcccgccaaagccccggaccgccaagaagaaacccgggacgacagcagaggcgaca

SEQ ID NO: 54539 - RNA, 75 nt, Homo sapiens
ggaagaaacacggaaccagagaagaaggagcgggcaggaccggggcaggggacaccaggaagcggaggcaagcaa

SEQ ID NO: 54540 - RNA, 78 nt, Homo sapiens
ccaccaccccacgagccgcgcccaggacaaggagacggccacagaggggggggcagccagaagaaggaccggaagcac

SEQ ID NO: 54541 - RNA, 78 nt, Homo sapiens
aacgccgggagaggcggcggcaggaccccgggaggcggagcaccccccagcgaggacccacggacgcgggcagcgcgc

SEQ ID NO: 54542 - RNA, 70 nt, Homo sapiens
agggaagagaacccacgccaaagaggaagcccaccacaaaaacgaaggcggcgggacaggagagacaacg

SEQ ID NO: 54543 - RNA, 68 nt, Homo sapiens
acccaccccaaagaacacagaccaccaaggagagccagaacaagccgggagaggaacagcgcgccggg

SEQ ID NO: 54544 - RNA, 77 nt, Homo sapiens
gagggaggccgcggcccgggccgcaccagagcgcccggcccacgacacaggaagaagacaggcagagggggcggcca

SEQ ID NO: 54545 - RNA, 70 nt, Homo sapiens
gacagcgagggacgaaggagaccgcgcagagaaggacggagaagcgaaagccagaccggcaagagcggaa

SEQ ID NO: 54546 - RNA, 69 nt, Homo sapiens
caacccaaccccacaagacgaggaaccccaaacccaccagaaaagccccagcgagcggcacccccacgg

SEQ ID NO: 54547 - RNA, 75 nt, Homo sapiens
agagaccgaggcagcacccgccgccagccagaaaaagcggggaaggggggcaaaaaaaagaagcaagcgaagcac

SEQ ID NO: 54548 - RNA, 65 nt, Homo sapiens
cggaggccaacgaccccagccaccgaaaggagagcccgagaggcccagagaacgacaaggacaag

SEQ ID NO: 54549 - RNA, 70 nt, Homo sapiens
cggaagagaggcaagaagggcgcagaccaaaacccagccccagcacggaggagagagcgccgcgcccagg

SEQ ID NO: 54550 - RNA, 72 nt, Homo sapiens
ccgcccccagcagcgagcgaaggacacgcagccccaggcaccgcgcggcgccgcggcacaggaaagcagccc

SEQ ID NO: 54551 - RNA, 87 nt, Homo sapiens
caccggcggcaccggcggcggcgcgcagcggcaggcggagagacccgccgccagacaagggaggcgaggacggacaaaaggaaacgg

SEQ ID NO: 54552 - RNA, 113 nt, Homo sapiens
gcagggacacacgaacaaagacaggagggggacaaaaaagaccagaagaggaggaaaacagaggccacaggaacaacgaaacgacaaaggaaagacgcacaggaggaggggag

SEQ ID NO: 54553 - RNA, 76 nt, Homo sapiens
gcgaggacgacgcgcaacgcgcaccaacccagacaagggccgaacaccaacagaggaagaaaggagagccgcagaa

SEQ ID NO: 54554 - RNA, 76 nt, Homo sapiens
ggacgagagggggacggaagacaacaaggccaacaccgaggagagcaaacggaagaacagaaggccccaacaagac

SEQ ID NO: 54555 - RNA, 58 nt, Homo sapiens
ggagccagaggcaacaaggcggacaagagaagccgccagcagggccggaaagagggcg

SEQ ID NO: 54556 - RNA, 78 nt, Homo sapiens
ggacggcgggcgagggaggggaccgccgcgggcaacacgcaggacacacggcacaaggggagcgcgcgagccacacac

SEQ ID NO: 54557 - RNA, 84 nt, Homo sapiens
cacagaggcagacgacgacagaacccgacaagaagcacgaacagcaggccaaagaccagagaaggagaagaagcaccagccgac

SEQ ID NO: 54558 - RNA, 73 nt, Homo sapiens
agcaaagaccgcaaaaaaagaacaaccgccagggaacagcaaaaaacgagagcagcaaagagcaagcccaaac

SEQ ID NO: 54559 - RNA, 70 nt, Homo sapiens
agcaagcagagagggcaccagaaaggcccggcaccccggggaccgcccccacggccacacgcccgcccca

SEQ ID NO: 54560 - RNA, 89 nt, Homo sapiens
gcggcccgcgcggagcggacgcgcgggcgcgcccgaaaaacaaccaccagcgagcaaaaaggcaaagaccaagaccaccaagaagcgcc

SEQ ID NO: 54561 - RNA, 64 nt, Homo sapiens
ggaccgcagaggaaacgaaagggcagaaggggaaaaagagccagaacacgagaaaagaagaaga

SEQ ID NO: 54562 - RNA, 81 nt, Homo sapiens
gagccgagagcgagacgggccaccaggagagcccccaccagcacagaaggccggccccagcgcccgagcgagacaagccgg

SEQ ID NO: 54563 - RNA, 73 nt, Homo sapiens
aagccacccgcgaagagaaagcaccgagaacaggcacagagcaggggaggagccaaacagcagaaacaaggaa

SEQ ID NO: 54564 - RNA, 76 nt, Homo sapiens
ggagacggccaggcacgcgacccaagacgcacggcccccaaggcagagagccgacgcccacgagaccaggcccaac

SEQ ID NO: 54565 - RNA, 76 nt, Homo sapiens
ggacaagacacgggacagagcgacagagaggaccgccaagaagaagagagaaggaagaaaggagaaaccagaaaaa

SEQ ID NO: 54566 - RNA, 73 nt, Homo sapiens
ggcccgcggcggcgcgaaggcggcggcccgcccccgccccccgcgccggcgcagcgagacgacgggaccgaag

SEQ ID NO: 54567 - RNA, 78 nt, Homo sapiens
gcaggcgcggcacgggagcggcgaagggcagcccgcgcagggcgagagcgacgaccaacacggaacagaaagaaggag

SEQ ID NO: 54568 - RNA, 69 nt, Homo sapiens
acgaggcgagaacgcgcagaccggggagggaaagaaagcaacccaaggaagaaggaggcaaagagcaaa

SEQ ID NO: 54569 - RNA, 69 nt, Homo sapiens
ggcgcgccggcccgcggaaaggccaaagcccagccccaggcacagaccccagcgagagagaaccccacc

SEQ ID NO: 54570 - RNA, 78 nt, Homo sapiens
cgacgggggcaccggcggcgaggaaacgcccccgagaagaaggaggcgcaacggccaaaaccacacgccaaaaaacaa

SEQ ID NO: 54571 - RNA, 88 nt, Homo sapiens
ggccacccgcgagccagcgcgccgcagccccccaagcggccgcgagaagcagcgggggggcaggcgacgaagccagaaaaaccaggag

SEQ ID NO: 54572 - RNA, 65 nt, Homo sapiens
ggcacgcagcagaggagacgcgagaccagaagcagaacaaaagagcaagccggggcagagcgacg

SEQ ID NO: 54573 - RNA, 101 nt, Homo sapiens
ccccaccccgcagcagggggagcagggcgagagggcaccgcggacggggccgcccagggacagaccgagaaagggaggaaggcagcaggagaagaacggac

SEQ ID NO: 54574 - RNA, 80 nt, Homo sapiens
gcaacgcagcgccgcgccgggcggacaacacggagaacgacccaaccagggaggccgccaagaacgagcaggacaaaaac

SEQ ID NO: 54575 - RNA, 74 nt, Homo sapiens
acacacccccaggaggcccggcagagcaggaacgaccagcggccaagcaggccccaagaccagggcagacagca

SEQ ID NO: 54576 - RNA, 76 nt, Homo sapiens
cccacccggaaggaaggcccagcgccaaacgacaaagcccggcgcaggaaagcccggcaacgcccggaacccagag

SEQ ID NO: 54577 - RNA, 75 nt, Homo sapiens
ggcggcggggcacgcggccaggcggcgacacgccaaccccggagaacacccacacgaggcaccccacagccggca

SEQ ID NO: 54578 - RNA, 76 nt, Homo sapiens
cgaaggcaaagggcaaagccgggcacaaaaggggccgcgccggcggcacgcaggcccggacgcacacacccacggg

SEQ ID NO: 54579 - RNA, 89 nt, Homo sapiens
gcccggaggccgagccccggcggcgcccgggcccacgcggaacgacggggcgaggcgacccggaggagcacccaggaggcacggccccc

SEQ ID NO: 54580 - RNA, 56 nt, Homo sapiens
acagcaagagccaacacagcacaagggcagcaccagaaagcgggcaaggagagggg

SEQ ID NO: 54581 - RNA, 77 nt, Homo sapiens
ccgaagaagaaagagaagaaacgccaggacaccagaggaccagaacccacgagaaacagacgagccaaccagacccc

SEQ ID NO: 54582 - RNA, 80 nt, Homo sapiens
gcggacgggccaacccaaaaccagggcggcaaaacgagcgggccagcacggccaggcgcccggccccaggccccccacca

SEQ ID NO: 54583 - RNA, 58 nt, Homo sapiens
ccccgaagaccgcacgaagaaccacaggcacccaaaaggaccggccaagggaagcagc

SEQ ID NO: 54584 - RNA, 82 nt, Homo sapiens
gggaagagaagacacgagcacaaacggaggacggggaagagacgaagaagccaaagagaaaaaaagaggcaccagaaggaac

SEQ ID NO: 54585 - RNA, 69 nt, Homo sapiens
ccacacccccaagaaggcaagaagcacgcaacgacccgggcccaagaaagaccacagcaagaccacgcc

SEQ ID NO: 54586 - RNA, 80 nt, Homo sapiens
caccaaacaggcgcagcaacaaaggggaccaagaaaggcccagggaccaaagcccggacaaggcccgagcaccaggaccg

SEQ ID NO: 54587 - RNA, 36 nt, Homo sapiens
gccagcgggccgggccagaggggagaccccaggccg

SEQ ID NO: 54588 - RNA, 87 nt, Homo sapiens
agcgcgcagggccgccaggcacccggaaggcagccccccagccgacacagagcgacaggggcagcgagggccccacacagaacccgg

SEQ ID NO: 54589 - RNA, 81 nt, Homo sapiens
gcccgcgagggcgaggccgggagagggcacaaaagaccccacagcgagagagagcaaacgaaacaggcaaacgagacaaag

SEQ ID NO: 54590 - RNA, 71 nt, Homo sapiens
ccggacaaaacggaagcacgaaccaaccgaaaacagaaacaaacacaccaggagagacgggggccagggcc

SEQ ID NO: 54591 - RNA, 86 nt, Homo sapiens
gcagcgagcggagccgccggagagaaccaggagcggcagaccgccgccaggaggaggcacgcagcccgagaaggagccacgccaga

SEQ ID NO: 54592 - RNA, 74 nt, Homo sapiens
accgaccagacggaacagcccagcaccaccccaaagaaggagagccagggagggaagaaaccgacaagaacaaa

SEQ ID NO: 54593 - RNA, 72 nt, Homo sapiens
gaaccccaaccggggaggaaaaccgacgaagggaaccaagaccaggacaaagaagacccggagagacaagcc

SEQ ID NO: 54594 - RNA, 118 nt, Homo sapiens
caggcgggcacagcgaaggaggagcccggagacacacaggcagacccaacgagcaagggccagagaaggaggagaaggagacaggcggcaagcagggcgaagggaggaccagagccag

SEQ ID NO: 54595 - RNA, 74 nt, Homo sapiens
aaaagaagaaaccccacccgccaacagagacacgcgccagaagacagcgccagacgaccacaccaacccagagg

SEQ ID NO: 54596 - RNA, 81 nt, Homo sapiens
caaggacccgggacagggaccagcgggaaggcagacagcgagggcgacgagcgcccggccaggagagggaccagagggagc

SEQ ID NO: 54597 - RNA, 78 nt, Homo sapiens
aggaaaagggagacaagaggagagaaggcaaggcagccccggcagaaccagagggacaggcccagcccccacagccag

SEQ ID NO: 54598 - RNA, 70 nt, Homo sapiens
agaaagacaaggccacacgcggcccaccaaaccccgcccccacccaaggcaagaaagacacaaagacgag

SEQ ID NO: 54599 - RNA, 81 nt, Homo sapiens
gaacgaaacaggagagggcggacagagcaaccggaaaaggccggaacccgcgaaacccacagcaggcgacccacaacgggg

SEQ ID NO: 54600 - RNA, 83 nt, Homo sapiens
cgcaggacccaggccagaccggagcagcggggacagcacaacacgaaaggagaagaggacgggaggagaaaagccgaagaaga

SEQ ID NO: 54601 - RNA, 82 nt, Homo sapiens
cgacaccaaccaggaggccgagacaacaacggcaccgcgacccgaagaccgggcaggagaagcgcgggagcaaacaggcggg

SEQ ID NO: 54602 - RNA, 49 nt, Homo sapiens
gggaggagccgggccgaggggacgcagaaggagaagacaagagggaacg

SEQ ID NO: 54603 - RNA, 72 nt, Homo sapiens
cggggaaacgggaggcaacaccaaaagcagagagagacacagccgaaagcggacgcaagagcaagaccagcc

SEQ ID NO: 54604 - RNA, 63 nt, Homo sapiens
cccgcccaggacccgacggggaagccaggagcagaacggcggagaagacaacacaggaggccc

SEQ ID NO: 54605 - RNA, 75 nt, Homo sapiens
ccaaggcgcccggggccaaaaaacagggccccccaccgcccgcagccacaggccggagcgcgaagacgcagggaa

SEQ ID NO: 54606 - RNA, 72 nt, Homo sapiens
ccacccccagaccggagcccacagagacaaggcaaggcccaagcagagaaaacacaaaaagggcccagagcc

SEQ ID NO: 54607 - RNA, 76 nt, Homo sapiens
ccgggcgggacaagcggcaagggaaagggagcagcaccggccacacccacagcacgaccggaacccagcgaccgac

SEQ ID NO: 54608 - RNA, 89 nt, Homo sapiens
ggaaagagagcgaggagacggcgaccgacaacgaaaagccacacgcccaggagaagagaagcgcaggaagaaacaacggaggaagagca

SEQ ID NO: 54609 - RNA, 92 nt, Homo sapiens
acgaggagacagaaggccagacccggaaaccccgaaacagaagccaacagaggccaccaggcaccggacagggaggaaccggccagcgggag

SEQ ID NO: 54610 - RNA, 87 nt, Homo sapiens
ggcgagccaccggggagccaccgcccagcccaaaccaggagagcgagggagcgagcgggcagcgcggagcacagaccagcgcgcgac

SEQ ID NO: 54611 - RNA, 66 nt, Homo sapiens
cggaggggccgcggaggggcacgagcgccacaaccccaggcgcagaaaacccacggccccaccaca

SEQ ID NO: 54612 - RNA, 84 nt, Homo sapiens
aagagaacaaaagaaaacgagaaagaaggaaaagaggagagagccccagcccccagcagccgacaggaggcccgcaagagcagg

SEQ ID NO: 54613 - RNA, 38 nt, Homo sapiens
ggcggggcgcagccaagggagagaggaacaaacaggca

SEQ ID NO: 54614 - RNA, 79 nt, Homo sapiens
gacgacaccagaagcaggcaagagaccagcaaaggcagaaaaaaagacccgccggacgcgacggggccaccgcgcccag

SEQ ID NO: 54615 - RNA, 94 nt, Homo sapiens
cggggaccaagaggggagacgcccgcaggcgaaaggagaaaccagagagcaagacaaagaaacagaagcgcgagaacagaaccccgaggagccg

SEQ ID NO: 54616 - RNA, 38 nt, Homo sapiens
ggagccaccagcccccgaccacgcccaaagacggagga

SEQ ID NO: 54617 - RNA, 83 nt, Homo sapiens
cgcaccccaccgaccagcggacacgggagacgagagggccccaaagggaccagggacgcgcccgcgcgggagacgggagccag

SEQ ID NO: 54618 - RNA, 82 nt, Homo sapiens
gggaggggccaaaggaggcaaccacaggaggaaccaaacgagagacaaagaggcgagaacagagaacaggcgagacaaagca

SEQ ID NO: 54619 - RNA, 75 nt, Homo sapiens
aagcaaacacaggacaccacagaccacacgcgcacagggaggcacccggagaagagggagccaagagcaaagacc

SEQ ID NO: 54620 - RNA, 85 nt, Homo sapiens
gggcgacaagaggccgggcgccccgcaggacacaagaggagccagcccccacagagcgggagcgaccggaccaccggacagcccg

SEQ ID NO: 54621 - RNA, 98 nt, Homo sapiens
caacgaggccgagcgcgcggcgccgcaacaaagcagacaccaggcagccccggcgggaccgggacgccagcccagaagcacccagacaaccagacaga

SEQ ID NO: 54622 - RNA, 82 nt, Homo sapiens
agccgcggggagaaggccacacccaggcagcaagggcaccgcgagcaagacagcgaacccacccaacacggcaaaacaaaga

SEQ ID NO: 54623 - RNA, 70 nt, Homo sapiens
gcgacagcgccgaacaggaccgggaaccccggacaaaacgcgcaaaaggagccagagaccgccaaacgca

SEQ ID NO: 54624 - RNA, 62 nt, Homo sapiens
ccaaggcgcgcccggcgggccggaccaaggaagacgggacagacagagaagcacgggagcag

SEQ ID NO: 54625 - RNA, 93 nt, Homo sapiens
gcagcccgggcccaggccccggcagcgccgggacaagaccccagcagcgaccgccacggccccgccaccggccacaagggccggaaggagggc

SEQ ID NO: 54626 - RNA, 85 nt, Homo sapiens
ccggacgcgagcccgcccccgagaagaaaacaccggagcccaagacaccaaaacagacgcaggcaagaggcagaaggacaaagga

SEQ ID NO: 54627 - RNA, 72 nt, Homo sapiens
ggggccccgcccaacggagcaccggaggcagaagaaggaaaggccgacagcaaacagccggcaccggaccga

SEQ ID NO: 54628 - RNA, 80 nt, Homo sapiens
agaacgaaaagagcggaaaagcaccaccagccgggagaacccaacccaaagccagcaaacagccaggcgccagcgaccag

SEQ ID NO: 54629 - RNA, 76 nt, Homo sapiens
caaccgcaaggcggcaggcaaaccccgccagggccaccagaaacgagaccgacccccaccaccggcagggagcagc

SEQ ID NO: 54630 - RNA, 74 nt, Homo sapiens
ggagccaacacccgaagcggaaagggcaccccgcaaaacagaagaaggcgaacccaagaacagaccaagccagc

SEQ ID NO: 54631 - RNA, 53 nt, Homo sapiens
agcacggggcaaagacgcaagcaacgaaagcaaaccgagagcaggcgaaggcc

SEQ ID NO: 54632 - RNA, 79 nt, Homo sapiens
acccgcccgccgccggcgaccagacaagcagaccggaagaccgacggaagaccacaccccgagggagcccaggacacca

SEQ ID NO: 54633 - RNA, 96 nt, Homo sapiens
aaaaaccaaacggaagagccagggcgggcaggcagggcaggagggaagggagggccgaacaggggggaacgacaaacaaggccccagaagcagggg

SEQ ID NO: 54634 - RNA, 68 nt, Homo sapiens
gagaaggccgaagaccagaaaaacaggacccgaaacacgaacaggcgacaaggccagaaacagggaaa

SEQ ID NO: 54635 - RNA, 60 nt, Homo sapiens
gcaagaggacgccacaaacacccaccacagcagagcccccaagaaaaaggcaaacccaaa

SEQ ID NO: 54636 - RNA, 87 nt, Homo sapiens
gcggaggcgagccggccgcgggcgcgaccggaggcaggcgaaccacgggaacaaaggcgaggacaaggagggcaggggacgggaccc

SEQ ID NO: 54637 - RNA, 73 nt, Homo sapiens
gcgaacacaggaaagaccagagcccaccgacccagagggcacgaccagaggggagcgagccgccgcacccagg

SEQ ID NO: 54638 - RNA, 54 nt, Homo sapiens
gaacccaacacagggaaaggaaccgcggacaggcggcagacgcagacaaacaaa

SEQ ID NO: 54639 - RNA, 80 nt, Homo sapiens
caagagcgcggggcaagggccggaacacagggggccgaagcacgaccgagaagcggagaagagggcacgcagcaaccgcg

SEQ ID NO: 54640 - RNA, 87 nt, Homo sapiens
acgccggggaggcagcgcgggacccagcccaggcggcgcggacggggcggggaggcaccacagaggacgcggacaagcagggacccc

SEQ ID NO: 54641 - RNA, 77 nt, Homo sapiens
cgcggcgccgacgggccccgaggccgcgggcggaaagaccagggacacagagagccacggcccaccaacgggacagc

SEQ ID NO: 54642 - RNA, 52 nt, Homo sapiens
aaaagagacagggcaaacggcccagcaaccacacaaggcccaaccggccgac

SEQ ID NO: 54643 - RNA, 52 nt, Homo sapiens
acaagagcaagcccgcacgggaaggcaccacgggcaaggaaaggaggaaaac

SEQ ID NO: 54644 - RNA, 57 nt, Homo sapiens
ggcggcggaggagccgcgggccacaaagcccaggggagccgcccgcagcgaggagcc

SEQ ID NO: 54645 - RNA, 75 nt, Homo sapiens
cgagcagcggacgccggccgccgcaggagggcgcacacgcaggcacaacaagaagcaagggcaaccagaaaaggc

SEQ ID NO: 54646 - RNA, 70 nt, Homo sapiens
aaaagacaaggacggcagggaagccaggaggcccagcagcggggagagccagccccgacacccaggggcg

SEQ ID NO: 54647 - RNA, 72 nt, Homo sapiens
gccagcgccaaggcggaaaagcccaagaaacaaacaacaacaggcacaaagagagaaggaacacccacaggg

SEQ ID NO: 54648 - RNA, 74 nt, Homo sapiens
gggcggggccaaagggggagaacagccggaaggcacaaggacaaacccacccacaaagggaggaagaacccgcg

SEQ ID NO: 54649 - RNA, 38 nt, Homo sapiens
gcgcacacggcgagcaagaagccgagccacggagcacc

SEQ ID NO: 54650 - RNA, 66 nt, Homo sapiens
acaacacaggagcaggagagccagggcaaggggccgagcaaagaagagcggaggagaagaagggaa

SEQ ID NO: 54651 - RNA, 83 nt, Homo sapiens
gcagaggaagaaagcggaaagagcgacaaacaaagaaagacggacgaaccgagaggagggaggacaggcaggacgccggcagc

SEQ ID NO: 54652 - RNA, 68 nt, Homo sapiens
cagccagacaccgggaaaacagggaccgagcaagcaggccacaacagagggcaggcgagaaacgggac

SEQ ID NO: 54653 - RNA, 73 nt, Homo sapiens
caaccaacgacaacaaggcagaaggcccaagggaagcaagaaaaaagacgggcccggggagagaaggagcgac

SEQ ID NO: 54654 - RNA, 52 nt, Homo sapiens
ccgacacccaagacaagacagcgcaaggcagaagccaaaggccgaagagggg

SEQ ID NO: 54655 - RNA, 75 nt, Homo sapiens
ccgcggaaaggcacccaccagcacagagagcccccggggcaggcaagaacgcgcaacacagcgaccgacgggacc

SEQ ID NO: 54656 - RNA, 85 nt, Homo sapiens
cccagagaggaggcacagaagaaagggacgcggcacagaacgaagaagaaagcagaagcaagagaaaaaagaaacaccgagacgg

SEQ ID NO: 54657 - RNA, 77 nt, Homo sapiens
ccgggggcgcccccgcgacccggaccaccgggcgcggcgccccagccggacaggagagacaacggaggcaagaaaga

SEQ ID NO: 54658 - RNA, 74 nt, Homo sapiens
gagagacgcagaggggcggcgggggcggaagaccaccaaaagcaggaaaacgagacggcggaagcgcaagagcc

SEQ ID NO: 54659 - RNA, 96 nt, Homo sapiens
gggaaaaacagaccgaacccacacagcagagaggacaggcgaggagaagaggaccagaagccaggcgccgcccgaaagcccaagagcacagccgcg

SEQ ID NO: 54660 - RNA, 84 nt, Homo sapiens
cccaagaacccacagcccaaagaacaagaggaaaaaagagacggggccaaaacagaaagaccggaacacgaaagaggcagagcg

SEQ ID NO: 54661 - RNA, 73 nt, Homo sapiens
gggaaggcagacagcgagggcgacgaggggaaacccgcccagggcgggagaccgccaagaaacaccacaagga

SEQ ID NO: 54662 - RNA, 80 nt, Homo sapiens
gccagggacacggccaccggcaggccagcgcgggccgccagcggcggccaccacagcgccgcagcccagcgaggcccagg

SEQ ID NO: 54663 - RNA, 71 nt, Homo sapiens
gccggaagccaggcacaccgcaaggacccaaaggggaggaccgccaccgagcaggaaagcggggaacgccc

SEQ ID NO: 54664 - RNA, 73 nt, Homo sapiens
agcagcgcaggcaaaaaacagaaccagcaggcgaagacgcaggagagcacagacggacccgcacgacccggag

SEQ ID NO: 54665 - RNA, 70 nt, Homo sapiens
cgggaggccacgggagccgcaagcccaagccacagaccaaaaagagaaagggaggcaaaaacaggaaagg

SEQ ID NO: 54666 - RNA, 80 nt, Homo sapiens
ggccgaagcaaacccaagaggggggccacacacggaccaggggggcagagaccaccagccggagacagaaccagccgaca

SEQ ID NO: 54667 - RNA, 66 nt, Homo sapiens
cagcccacccccccacggggaccgcccacacaggacacacggacccgaacaaagacaaagacaaac

SEQ ID NO: 54668 - RNA, 50 nt, Homo sapiens
accccgccagaccaacaagcggagcccaggggcacgggcacagcccagaa

SEQ ID NO: 54669 - RNA, 53 nt, Homo sapiens
acaacagaagccccgcaggacaacgagggaagaacagacacagcaccgacacg

SEQ ID NO: 54670 - RNA, 56 nt, Homo sapiens
gcacccagaccgcaggccggggacccgagcgccgcagcgacccgagaaccagagca

SEQ ID NO: 54671 - RNA, 84 nt, Homo sapiens
cccccaagagcgggacacaggccaaaacagaagaggcaaagcccagccacagcagcagcccagcagcaaacaaccaaagagaag

SEQ ID NO: 54672 - RNA, 80 nt, Homo sapiens
gccgccgccaccagcccaagagaaagacgaagaagacacgaacaggggacgaaaaacgagccgggggcaaaaggaagaga

SEQ ID NO: 54673 - RNA, 61 nt, Homo sapiens
cacgcagccagagcagaggcgacaacgcacggacaccgcacgggaaacccgaagaggggag

SEQ ID NO: 54674 - RNA, 75 nt, Homo sapiens
caaggcgacgaccgacaggggggaaagagcacaaagccggccgcccagagaagcacacagaacgcagaaagacaa

SEQ ID NO: 54675 - RNA, 80 nt, Homo sapiens
ggggcgcacgcggggagaccaagaagaacaagcggccccgggacagacagggaagacagggggcagcggcaagcagggga

SEQ ID NO: 54676 - RNA, 71 nt, Homo sapiens
cgcgccagccagcccgcgaccgcccgcgccggcaccggggcggccggccaaagccagcccaccgaacagag

SEQ ID NO: 54677 - RNA, 81 nt, Homo sapiens
caaagaccccagcagaagccgcggaagggccaccagcggcacccaggaaaccaccgccaggaccccgagacaaggaagccg

SEQ ID NO: 54678 - RNA, 74 nt, Homo sapiens
gagcggacgacagaacccggccgacccggaccaacaaccccaagaccgacccccaccaccggcagggagcagcc

SEQ ID NO: 54679 - RNA, 58 nt, Homo sapiens
ccaacaacgccccacgccggcgccgggcggcaaagaaggggcgaccacagaggccccc

SEQ ID NO: 54680 - RNA, 78 nt, Homo sapiens
aaaaacaaggaaggagggaagaccgcccggcggaagaacagcaaacaaccgaggggggaacggagggaaagcgacaaa

SEQ ID NO: 54681 - RNA, 57 nt, Homo sapiens
accaagcaggagaaccgaccgcgagacacagccagcgcgccagaaaccggggaacga

SEQ ID NO: 54682 - RNA, 104 nt, Homo sapiens
ccggcccggacgcaggccggagagacgcacagcaagagcaggacaccggaagcgggaaaggcccacagaagcaggccggggacccaaaaacccgccacgggcac

SEQ ID NO: 54683 - RNA, 71 nt, Homo sapiens
aaggggaagacccaaggaaccaggcgaaggaaaaggaagggaaaacaagaggaaaaaaccagcaacccaac

SEQ ID NO: 54684 - RNA, 87 nt, Homo sapiens
ccgcggagcccaggccccccccggacccgccgcagagccagggcggaaaacaccccaaaagccaaaagggaaaggaaaagaccaaca

SEQ ID NO: 54685 - RNA, 83 nt, Homo sapiens
cgccgcgcggggccccgggagcggcccagcgaccccgcccgggccccccaggacccgacaagagcgggaacgcgacgggaagc

SEQ ID NO: 54686 - RNA, 73 nt, Homo sapiens
ggggaagaagagaagacccaaaagccaagccagaaggaacgggaaagcgaacaggaaccgcaggccgaagcgg

SEQ ID NO: 54687 - RNA, 73 nt, Homo sapiens
agaaaggaacaaacacaagaacaccaaggacgaacaaccaccaaggaggcaggcaccaccagcaccaccccag

SEQ ID NO: 54688 - RNA, 78 nt, Homo sapiens
cagggcaccggaggcagccgagggcagcagccccagcccgagggcacgcggcgacgaggaccgacaccgcgaggccaa

SEQ ID NO: 54689 - RNA, 54 nt, Homo sapiens
ggcggccagcgccacgcggcaccacagaacagccgaagcaggccaccagccgag

SEQ ID NO: 54690 - RNA, 93 nt, Homo sapiens
gcggagcaggagcggcggcgacggccacaggggcggcgacggcgcaggcgaagcgaaacaggcacaagaagacgggcgaacagaccgagcggg

SEQ ID NO: 54691 - RNA, 65 nt, Homo sapiens
aaaagacagcccgcagcacgaccagcaggaacggaccacaggcaaacaaagaaccacggcaagca

SEQ ID NO: 54692 - RNA, 79 nt, Homo sapiens
cccaggcaacccaaaccaacaaccccaggacaagcaggaaggccgcagccgcaggagaaaagagggaacccccacacgg

SEQ ID NO: 54693 - RNA, 75 nt, Homo sapiens
aagcggaaaagagcagcgcccagccccagcaggcccaaaggcaagcagagaaggaacgaagccacccaggcacca

SEQ ID NO: 54694 - RNA, 77 nt, Homo sapiens
cggcggagaaagcgggacggcccagagggaagagacagcaggaaaacggagaaggagcggaagagcaagaacgcagg

SEQ ID NO: 54695 - RNA, 59 nt, Homo sapiens
agggacaggaaacagaagagggacaacggggcgccggacccgccccagagggaggcccg

SEQ ID NO: 54696 - RNA, 78 nt, Homo sapiens
gcaggaggcacaaggccacacaacggaccacacaagcagggcccagcgagcagaggccacgggcgggcaccaaccgac

SEQ ID NO: 54697 - RNA, 85 nt, Homo sapiens
accagacaacgccagcaagaacgaggaggacgcgggagaaccggggcggccaaacgggaggcgccccgggccggccacgggcacc

SEQ ID NO: 54698 - RNA, 81 nt, Homo sapiens
gcaccgcccgcgcagccgagagccgggggagcggggccccacacccccccggggggggcagagcagaacccaggagccagg

SEQ ID NO: 54699 - RNA, 82 nt, Homo sapiens
gaggaaagagagccgggcgacccaaccaagggaccaggaaaggcaggagagcgaaagagagcggaaaaacgaccaaagaagc

SEQ ID NO: 54700 - RNA, 73 nt, Homo sapiens
aaaagaaaaccggcaaagaaaaagcaaggaccagaaggacccaaggacgaaggcaggggaaaggaccccagcc

SEQ ID NO: 54701 - RNA, 74 nt, Homo sapiens
ccggggcgcgccccgagagaacgaggaggagccccacccgcgcagagccccaaaaccgcccaacacaacacccc

SEQ ID NO: 54702 - RNA, 75 nt, Homo sapiens
agaggcgggaggggccgggaggcagaggggcagggggaaaaaaccaggaggcgacagcgaggcccaggaccaggg

SEQ ID NO: 54703 - RNA, 78 nt, Homo sapiens
ccaagaagccaccccccacaccgaggccccagccgcgaagacgcccagcccaaggcgggaaaaccgccacaaagcccc

SEQ ID NO: 54704 - RNA, 80 nt, Homo sapiens
cgaagccgaaaaagcgcccgagacgggcccgccgaaaggacaggaaggggccaaaagcacgaggcgaagggaacagacac

SEQ ID NO: 54705 - RNA, 73 nt, Homo sapiens
acaacaaaaagaggccgacagaaaccccacagcggagaaaaaggagaaacccccaagacaaaccacggacgga

SEQ ID NO: 54706 - RNA, 80 nt, Homo sapiens
gcgggggcgcaggcgagagagacgcaagcaaaggcaggaaaaaacagaacaaggccggaccaaagacaccgacgacacgc

SEQ ID NO: 54707 - RNA, 88 nt, Homo sapiens
ggagaagaaggagcggcacaggcgccagggcagggaagcgccaccgaccgacaaaaagccaacccacacaggacaggaagcggggcag

SEQ ID NO: 54708 - RNA, 73 nt, Homo sapiens
aaagcaagcacaccaaagaacacgaagcaaaggggaacaaaagagaagaaggaaaaggaaaacacaaggacac

SEQ ID NO: 54709 - RNA, 103 nt, Homo sapiens
ggggagcgcccgcgacagaggagggaggaaaacaaccgagggcagagaagaccgaggagcagggagcaaccacaaggaaaggaaaccaccgaaccgagccaga

SEQ ID NO: 54710 - RNA, 74 nt, Homo sapiens
acccccacagcacgcgcaacaacagaaggcccggccgcggcacgcccagggagccgaggcccaaaccacacaga

SEQ ID NO: 54711 - RNA, 64 nt, Homo sapiens
gccacgggcagaagcgacaccgaggcagaaccgcaagaccaacgggagccgcaaggacaacagc

SEQ ID NO: 54712 - RNA, 70 nt, Homo sapiens
cccaccaccagcaggcagaagagaaggcgagaacccaagggagaaggaaaccggacacaaggcaccgcac

SEQ ID NO: 54713 - RNA, 74 nt, Homo sapiens
aagcgacggggcaaaaggcggaaagcaaagaccagccggacaaaacgaacacgaaggggcaacagaccggccgg

SEQ ID NO: 54714 - RNA, 82 nt, Homo sapiens
ggagcgcggaacagcaggcccgagcccaccgcgccgggccccggacgccgcgcggaaaagaagcggaagcaggaggccagcg

SEQ ID NO: 54715 - RNA, 61 nt, Homo sapiens
cggcgccgggcccgcggggaaacgggaggccaccgccccaccagcaggcaacgccacagac

SEQ ID NO: 54716 - RNA, 75 nt, Homo sapiens
ccaagcaggagaaccgaccggagcaggcccagaaagaacagacaaagaccgaaaaacacgaggaaagcagaccca

SEQ ID NO: 54717 - RNA, 83 nt, Homo sapiens
gaacgaccaagaggggcgacgcagagccgagcgaagcagcaaacgaggccccgagagcccaccagcacaggaaaaacccacag

SEQ ID NO: 54718 - RNA, 80 nt, Homo sapiens
accaacgccccgccaccgcacaacgggcaggcgaacgagggaccaagcacgccagaaagcccgccgacacagccaccaag

SEQ ID NO: 54719 - RNA, 58 nt, Homo sapiens
gcggaggaccacgccggccggagagaggcagcagggccagcggccagacccgacccaa

SEQ ID NO: 54720 - RNA, 53 nt, Homo sapiens
gcgccggagcgcaggccccgaaggcccgcaggagcaaaacaaaaccagcgaca

SEQ ID NO: 54721 - RNA, 74 nt, Homo sapiens
gacacgacccgcggccccaaagacggcagaggagggaaacggaccgccgggaaggacacgggaccacaaacaaa

SEQ ID NO: 54722 - RNA, 61 nt, Homo sapiens
cgacgcgcgggccgcgagcggggcgacccgagcgcagaaccggccgaaaagcacaaacagc

SEQ ID NO: 54723 - RNA, 68 nt, Homo sapiens
acgccacccacggaccagcagcgccgagggaaacccggagaccaaaccggggagcccagcacgcccca

SEQ ID NO: 54724 - RNA, 59 nt, Homo sapiens
agaagagacagagaggggagaacccccagcaaggacggggaaccaccaaccggcaagaa

SEQ ID NO: 54725 - RNA, 84 nt, Homo sapiens
ccgagccgaagggaagccggagagggccgggacgggagagaaaagccgagcacggggagacgaaggaggacaaaggacgcgcag

SEQ ID NO: 54726 - RNA, 80 nt, Homo sapiens
ggcacccggcgcgccgccggaggagacggcaacaggagcacagcaagcgggagcaggcagaccaaaggaacagaagccag

SEQ ID NO: 54727 - RNA, 34 nt, Homo sapiens
gccgcacccgcccaggggaagcacccagacgagg

SEQ ID NO: 54728 - RNA, 95 nt, Homo sapiens
ccagaacaaaaggcgaagggcgggaccccacgagagcaccaccagaaggcccgaggaaggcgggagcgaccccggcaggaaggcgacccaggaga

SEQ ID NO: 54729 - RNA, 73 nt, Homo sapiens
ccaggacggcccgaagggggcccgcgccggagggaggccccagggcggagaagcggcgcagcaccagcacagg

SEQ ID NO: 54730 - RNA, 89 nt, Homo sapiens
cgaaggacacccgcaggaaccggcagaggagaaacagacggccccgaggcgaaggcagccggaggaagaagagcggaccgcgcccaggc

SEQ ID NO: 54731 - RNA, 75 nt, Homo sapiens
caccgccaggaccccagaaaggaaaaagcgcggcaaagcgcggcccacacaggagccaaggaaagcccaacaagg

SEQ ID NO: 54732 - RNA, 58 nt, Homo sapiens
gccaaagcaacgacacaggcgcgaagaaggccggcccagggagaacgcaaaaccacca

SEQ ID NO: 54733 - RNA, 60 nt, Homo sapiens
cgggagccacggcgccaccaccaggagaaggcggggcccagaacggacaggcggcgccgg

SEQ ID NO: 54734 - RNA, 83 nt, Homo sapiens
gcgggaacccagacgcacaccccgcagcccggacagacccccgccccgaggccggcgcggaagaggccggcggcgggacggcc

SEQ ID NO: 54735 - RNA, 59 nt, Homo sapiens
agagagaccaaagacgagagacacacaccagagggagcaccgacggcaacacggagggg

SEQ ID NO: 54736 - RNA, 79 nt, Homo sapiens
cagcacccccacggaggaaggaacgggcacagcagggggcgaggaagagacaggcgggggagaagaagcagggccaaac

SEQ ID NO: 54737 - RNA, 92 nt, Homo sapiens
gagcccaccggagacagcacgcgggcgcgggaaagcccccgcccaaaccacgagggaaggaagcacggacaagccacaacgggaggggggcg

SEQ ID NO: 54738 - RNA, 68 nt, Homo sapiens
caggcaccaggacagcggcggcgggccgggcagcccggccgacaaccacgccaagggaaaaaagagaa

SEQ ID NO: 54739 - RNA, 86 nt, Homo sapiens
gagccccagccaggacgagaggagcggagcccgcagaaccccacagcaagaggacggccaccaacggcggggggcgaggagcgagc

SEQ ID NO: 54740 - RNA, 64 nt, Homo sapiens
gaagagagggccgaagcccaaaccgcaggggcagggacgcaggaaacccggaaaggaagggagg

SEQ ID NO: 54741 - RNA, 74 nt, Homo sapiens
gcggcccacgggacccccaggagggacccgcagagaggaaaacccaagacaaggaagggcaaagcccacagcac

SEQ ID NO: 54742 - RNA, 90 nt, Homo sapiens
cagcggggcggcggcggcggcggcgcggcccaaaagaggaggccaccagaaacggccagcgagacccggaggagcggacgggcggaccag

SEQ ID NO: 54743 - RNA, 61 nt, Homo sapiens
caaagaacagaagcaaggaagcgggcaagcgggccagggcagcagcgacccagaccggacc

SEQ ID NO: 54744 - RNA, 90 nt, Homo sapiens
ggcagccggcgacaggaggcccagccagaacgagcggcccaaaagacggcggcaagcccagaaggggaagacccccagcgaacagagacc

SEQ ID NO: 54745 - RNA, 71 nt, Homo sapiens
aaagaaaacaagcgcacgaaacacgaaaggcagaggccgcggaacaaaagcaaacaaagaaaaaggcacaa

SEQ ID NO: 54746 - RNA, 69 nt, Homo sapiens
cccaaggcaagggaagacggaaggaccaagaggagagaacaacaggggggagaggagagaaccagaaga

SEQ ID NO: 54747 - RNA, 78 nt, Homo sapiens
gggacaccccggaagcgggaaagggagaacaagcggacaaagaggccacaaaaaaacagaggacgcaaagaagggaca

SEQ ID NO: 54748 - RNA, 91 nt, Homo sapiens
ccggggccgaggagcgggcacagggcaaggcggcggacggcgcgcgcccgaggcgaggaggagcgcggcgaaaacacggaacggagaaggg

SEQ ID NO: 54749 - RNA, 77 nt, Homo sapiens
caaagccccacaggaagagaaggcggcgacaccgggagagcgaccagggacaaaagggagaagaagaggaagcccag

SEQ ID NO: 54750 - RNA, 69 nt, Homo sapiens
cggagcccggggaaagaggcgggagagggaggagcccagaccgggcgacccgccggcgaagagagaaca

SEQ ID NO: 54751 - RNA, 77 nt, Homo sapiens
caggcccacccggccaccccccagggagccgaagccaagggacggccaccccagaggaaccgccaccaagcgccaca

SEQ ID NO: 54752 - RNA, 79 nt, Homo sapiens
aaacccccgagaagggacagggcccggggcgcccgaagcacgagcaccgagacggggaccccggcgagcccagcagacc

SEQ ID NO: 54753 - RNA, 53 nt, Homo sapiens
gaccagcgcacgggacggaggcacgaacgagcaggagcagcaaccgaagcgaa

SEQ ID NO: 54754 - RNA, 80 nt, Homo sapiens
gggagggccgggcaacccgaccgaaccaaacgggcgggagagaaagagagggacccaaggggcccgcaggaccgaaacag

SEQ ID NO: 54755 - RNA, 80 nt, Homo sapiens
aaggaacaacgggcaagaaaggggagcgacgccccaccacaggcggggcaacccagccagggagaggaggaaaccccccg

SEQ ID NO: 54756 - RNA, 62 nt, Homo sapiens
cggccccagccacaccaagcagcagggcagaaaagaacagacccagaagaagcgaaagggga

SEQ ID NO: 54757 - RNA, 38 nt, Homo sapiens
agccagcaacaccaaagcacccggagaacagccggagg

SEQ ID NO: 54758 - RNA, 74 nt, Homo sapiens
aagggcggcaagcccgccgggccagagggaacggcgggcagcaacacgaaaaacacccgagaaacacagcaagg

SEQ ID NO: 54759 - RNA, 70 nt, Homo sapiens
cggcggccggaggagcggcgcgcgcgcgcgcgcggggccccgcagaaaccgaaaccagcccccaagggga

SEQ ID NO: 54760 - RNA, 54 nt, Homo sapiens
aaagcggaccccaccggaaaggaagagaaaggaaggagaaaggagcaccggcag

SEQ ID NO: 54761 - RNA, 74 nt, Homo sapiens
ccggcggaggggacacgggccgcacccggggcaccaacagggacacaggaaaaagagccgggaccagcaaacca

SEQ ID NO: 54762 - RNA, 76 nt, Homo sapiens
ccggaagacccgcaccggagcaaagggaaagggagcagcaccggccacacccacagcacgaccggaacccagcgac

SEQ ID NO: 54763 - RNA, 65 nt, Homo sapiens
cgccgaggcggccacccgagacgcggcgcgcacgcccggccgcggggaccaaaagaacccagcca

SEQ ID NO: 54764 - RNA, 67 nt, Homo sapiens
acgggagaaaaaggaaaacgcggaaaaccgacacaacaggcgcaaaaaccagacaccccacaccacc

SEQ ID NO: 54765 - RNA, 85 nt, Homo sapiens
gagaaaggagaaagaggagaggggacgaggggacccgaggcggacccgacgaagaccaggcaggcccacagcgccacagaaccgc

SEQ ID NO: 54766 - RNA, 78 nt, Homo sapiens
cggagaagccgaggaggagcggaggaggacgacgagaggaggggcgagaagagcagagacccacaagacgccacaagc

SEQ ID NO: 54767 - RNA, 72 nt, Homo sapiens
agaaccgagaaacgggaccacaaaggagacacgaggaaggaaaccccgaaccaaacagagcccaaggagcgg

SEQ ID NO: 54768 - RNA, 40 nt, Homo sapiens
accagcgagcgggaggcaaggacacagggaacacacggcg

SEQ ID NO: 54769 - RNA, 73 nt, Homo sapiens
gcgacaaacaggaaagcggcgcgagggcggcccgcagaagagcacagaaggagaaggccagcaaagcggaaga

SEQ ID NO: 54770 - RNA, 71 nt, Homo sapiens
gcgccgagcgcccacgccgccacccagcggaagcccagaggagaaggcccgagccagacgggacagaacgg

SEQ ID NO: 54771 - RNA, 77 nt, Homo sapiens
agcacaacccgaagcggccggaccggaacagggcgggagggcggaagggccgcacgaagacaggcaggaacacacga

SEQ ID NO: 54772 - RNA, 89 nt, Homo sapiens
caaggcggcagagcaaggggcacgcagaaggaccggccacgagcagaggccaggaggggcccagcccggccaggaggcggcggaaaaag

SEQ ID NO: 54773 - RNA, 63 nt, Homo sapiens
cgccagaccgaggcacggggaggcacgcagaaggggccagcaagaagggagaagacacgcaac

SEQ ID NO: 54774 - RNA, 83 nt, Homo sapiens
cgggccaaccgggcaggaggcagaggcagaccagcagcacggaaaagcgaagacgcagccaaggggaccgcagggcaccccga

SEQ ID NO: 54775 - RNA, 72 nt, Homo sapiens
cgggagggaacaaagaaaaccgcgagccaaaaaagaaaccagcccgccacagacaaccaaaccacaaaccaa

SEQ ID NO: 54776 - RNA, 80 nt, Homo sapiens
gcgaccccagccggcgccgagggcggaaccgagcgggaaaagcaagccccagccaagacccaccaggcaggggaagaaga

SEQ ID NO: 54777 - RNA, 60 nt, Homo sapiens
acaaacaaacgcaaacgggaacgaaaaccggcgcagagccaaaaggaaccgaggaaaagc

SEQ ID NO: 54778 - RNA, 80 nt, Homo sapiens
aacccggagcaaccccccaggacgggcggaggcggggggaccggcgggcgggagcagcgaacagaggccagccggggcac

SEQ ID NO: 54779 - RNA, 67 nt, Homo sapiens
ggccgaagacggccggaagcaggaacgaacaggcccaaggcgccagggacgaagaggacccgcaaca

SEQ ID NO: 54780 - RNA, 85 nt, Homo sapiens
gacacaggcccaggaggacgacgggaccgggaccgcgcggacccggccgggagaagcagcagcgcaagaaacgagcaagcagaac

SEQ ID NO: 54781 - RNA, 43 nt, Homo sapiens
ccaaccagccaaggacccacgggaaaaaagcagcaagcccggc

SEQ ID NO: 54782 - RNA, 70 nt, Homo sapiens
cgaccagcacaacagaacaaaaacccaccaagaacacaggaacacgaagcagaaaggccccgggacagag

SEQ ID NO: 54783 - RNA, 52 nt, Homo sapiens
gaccccccggcgccgcgccggcggcggacggacgaaggacggcggagagcac

SEQ ID NO: 54784 - RNA, 75 nt, Homo sapiens
aagagaccgggcagaacccacagaagcagagacaggacagaaagaagagagcgaggcgcgaggaacagaaggcga

SEQ ID NO: 54785 - RNA, 73 nt, Homo sapiens
acagggaagggcgcagcagaaagcaaaccagcaggcaccaaggaaagcagaagacaagcccagagaacagcgg

SEQ ID NO: 54786 - RNA, 68 nt, Homo sapiens
agaggagcggcacgacaaaagaagcagccaggaggcgaaacggccgagcaaaaaccaaaaccagaagc

SEQ ID NO: 54787 - RNA, 54 nt, Homo sapiens
ccaggcccagcagccgccaccgggggaggcacccaaaacggccaaagaccacag

SEQ ID NO: 54788 - RNA, 85 nt, Homo sapiens
aagaaacgaagcaaaagacagcgaggagcagcagcagcccagcaggcgcggcccgccaggcagccgagggacaacgcacggacca

SEQ ID NO: 54789 - RNA, 77 nt, Homo sapiens
ggccccgccgcacccagcccagggagcagaaagcgagaaaagaccggagagaccagggcaggggaaacaagggagcc

SEQ ID NO: 54790 - RNA, 35 nt, Homo sapiens
ggcgccgcgcacgaagcaaagcacacaaggaggac

SEQ ID NO: 54791 - RNA, 37 nt, Homo sapiens
accccggggaaagcagaaggaagcccggggcggcgac

SEQ ID NO: 54792 - RNA, 74 nt, Homo sapiens
ggggccaacccgcgggaccagaagccgcacgcacgcaacccccagggccacaggaagaacaggcagcagaaccc

SEQ ID NO: 54793 - RNA, 78 nt, Homo sapiens
acgcggccggggggcaccgaaacccaaacgcaggaagcgacacagaacggggaggggccacccagagcacaacaggac

SEQ ID NO: 54794 - RNA, 74 nt, Homo sapiens
gcaagcagccgcggcggaagagcggcgccaggagcgcaggagcggacccacagagcaacccggaaagaggacag

SEQ ID NO: 54795 - RNA, 97 nt, Homo sapiens
cacgggaagagagaaaagggcagaacgaaaaagaagaaccgcaaaagccagaggcaagccaggcggcagacaaacggaaccaaccaaagcaaaacag

SEQ ID NO: 54796 - RNA, 78 nt, Homo sapiens
cccccgcccgcccggcgggccgaggacccgaggaagagaggaacgcgcaccgggggccccggcccccggccccccggc

SEQ ID NO: 54797 - RNA, 84 nt, Homo sapiens
ggcagcagagcaaaacagagcggaacgaacaagggggagagaacggagcagaccgcaggcccgaggagcagcccaacagagcaa

SEQ ID NO: 54798 - RNA, 66 nt, Homo sapiens
gaaagaccccagaggagggaggacaagaaaaccccaggacacagagcggggagcccgaagcaaagg

SEQ ID NO: 54799 - RNA, 60 nt, Homo sapiens
cacgcagcaagaacgacccaggaagaagacggcacgggacccccagcacaggcagcaggc

SEQ ID NO: 54800 - RNA, 74 nt, Homo sapiens
gaaggaccaagaaccaggaaagaaacgcggcaagaaagcgacccgagggccaggaacagaagaggacacaacca

SEQ ID NO: 54801 - RNA, 81 nt, Homo sapiens
ccgcccacagcgcggcgcggccgagagccgcggcccggcggaaaggacagcagcaggacagcggccgaagccagagccggg

SEQ ID NO: 54802 - RNA, 43 nt, Homo sapiens
cgggaggcagaggggcagggaaacgggggagcccagagaagag

SEQ ID NO: 54803 - RNA, 84 nt, Homo sapiens
caggaagaagaaaacccgcaacccccacagccagggaccccagaaagagcaacagaaggagacagagcacggaaggacaaaaag

SEQ ID NO: 54804 - RNA, 76 nt, Homo sapiens
aaggaccaagaaccagcaaaagaggcggcaaggcagcccaggcaaagaagaaaggcgagggccagcagaggaaaaa

SEQ ID NO: 54805 - RNA, 69 nt, Homo sapiens
cggccgcaggaggaccaaacccaaagcaggcaagaggcagagaaaggcaacgcccagaaagcagcaaca

SEQ ID NO: 54806 - RNA, 83 nt, Homo sapiens
agcgcacacgaagagaagcaaggcccaagacccaggcgggcgccagaacaaagaagagaaacgcagcgcaaccaaaaccacgc

SEQ ID NO: 54807 - RNA, 70 nt, Homo sapiens
agcagaacggaccaaaggaaggaccaaaaaaggcagaacgacggcggcagaagcaaagagacagcgggag

SEQ ID NO: 54808 - RNA, 80 nt, Homo sapiens
ggaaagccggcaagacgagaaagcagggaaacaacacgaggaggacggcacaaaaagcaccagcggggaggaacaacgaa

SEQ ID NO: 54809 - RNA, 81 nt, Homo sapiens
accggccagcagcccgccaggcccagcgagcgacggcaaaagcaggggccgcaaggccaggcgcgcagaggcacccaacgg

SEQ ID NO: 54810 - RNA, 52 nt, Homo sapiens
cggggaccccggagcccagaagacagagggcgagcacccacaaaagcgaaaa

SEQ ID NO: 54811 - RNA, 74 nt, Homo sapiens
ccgcaagacagggaagcgagacaaggagagagacgagagagcagagagaaaagcagcacagggacccgaagggg

SEQ ID NO: 54812 - RNA, 61 nt, Homo sapiens
caaaaccagggcacccagggccgcacagagcaagggccagagaaggaggagaaggagacag

SEQ ID NO: 54813 - RNA, 74 nt, Homo sapiens
cggggccggcgccagccgcgcgccggagcaacagaaaccagccgccgccccgggagaggaaagcggcacgaaca

SEQ ID NO: 54814 - RNA, 63 nt, Homo sapiens
cgggccccaacacccagagacgaaagggaccaagaaaggcccagggaccaaagcccggacaag

SEQ ID NO: 54815 - RNA, 78 nt, Homo sapiens
agcagaagccgaacggccgaagaaagaagcaggcccaaccaggaaggagacgccaggaggccagggcagcaccgggca

SEQ ID NO: 54816 - RNA, 59 nt, Homo sapiens
cagagacgcaacggaaaggcgcaggcagacgacaggacccacacccagcccccggcacc

SEQ ID NO: 54817 - RNA, 74 nt, Homo sapiens
caacagcagcagcaggaaaccaacagccacaccagaagagagacacagcagaaagacagaggaacggacaggaa

SEQ ID NO: 54818 - RNA, 74 nt, Homo sapiens
aaagcacagagaagcaaaaaccggaaaagacggcaggacggcagcacacggccgggcaggccggacaacgagag

SEQ ID NO: 54819 - RNA, 43 nt, Homo sapiens
acaacaccaggccaaggaccagggcaaaacccaagagaacgcc

SEQ ID NO: 54820 - RNA, 80 nt, Homo sapiens
agaaacaagagcagaagccagcccaacaagacggcagcaagacaagaaacgccccgaaaagaggcagccgccagaaccac

SEQ ID NO: 54821 - RNA, 63 nt, Homo sapiens
aacgaaggccgggaagaggcacaccacaagccaggcccgaagcgggaaggcgagagccaacca

SEQ ID NO: 54822 - RNA, 71 nt, Homo sapiens
gaaacgaaagagagaaaaccggaacacagcacagcacaggacaagcggcagaaaaaacaacacgggaaagc

SEQ ID NO: 54823 - RNA, 75 nt, Homo sapiens
ggaaagacccaggagaagccgcccaaagaacggcaaaagggaccgaaggaagagccaccagcgacaaacaggaaa

SEQ ID NO: 54824 - RNA, 81 nt, Homo sapiens
ggcaagaggcgcaaacaagccaacccaggaggaaaaacggccacgaacgacgcacggaggccacaacaccacaccacacaa

SEQ ID NO: 54825 - RNA, 69 nt, Homo sapiens
cgaccgagacgggcggagaggagaagagaacaagcagaggaaagacacgccagagaagaacaggacaca

SEQ ID NO: 54826 - RNA, 66 nt, Homo sapiens
acgcccaccgaacggccagagaaggcaaaaacagcaaaagaaaagaaaaaacaagaaggagcgaca

SEQ ID NO: 54827 - RNA, 72 nt, Homo sapiens
agagagcagccagaggagggccggaccggcggggcccgggcaagaaccggaagcagcggcgacgcagggagg

SEQ ID NO: 54828 - RNA, 75 nt, Homo sapiens
gcaagggaaaaagcccaggacgacagggaggcgaagcacaccgacagagaacccaggccaacacacagacagagg

SEQ ID NO: 54829 - RNA, 79 nt, Homo sapiens
gggcccccacgccacgcgccacgccacagcaccggagcgcgccagaccagaaggcgaggggacggcggggagcgcagga

SEQ ID NO: 54830 - RNA, 117 nt, Homo sapiens
cgggccgagcccggccgccagaccacagcacagccgggaaggggagccaccagccccccgggaacagcaggccaggagcgacacaccacacaaccccacacagaggcgcaagggaca

SEQ ID NO: 54831 - RNA, 81 nt, Homo sapiens
ggacgccaaccagccgcggacgacaacgaacggacgggagacacaggaagagcgggccaaccggggacgagccagacgggg

SEQ ID NO: 54832 - RNA, 70 nt, Homo sapiens
gacgcaaacaacgggcaaagaagaggacccagccaggaaggacacccagcaagagacaggaccaggagcc

SEQ ID NO: 54833 - RNA, 70 nt, Homo sapiens
caaaccgcaggcacaacacaagggaaccaagaccaggacaaagaagacccggagagacaagccggaggac

SEQ ID NO: 54834 - RNA, 79 nt, Homo sapiens
cgggagaggaagagcgaggaggaacgcgcaaggcaaagcaccggcagcgcggaggagggaagggcacgagcacgaaaag

SEQ ID NO: 54835 - RNA, 73 nt, Homo sapiens
cggcacgaaagaagcgaaaaaagagcacggaggaagcggcaggcccgacagagacaaacagaggccacaaaca

SEQ ID NO: 54836 - RNA, 76 nt, Homo sapiens
ggaggggcagccacccccggagggaagcggacacacaggacgagaaacccgaccacacccaggcagcaccacaaca

SEQ ID NO: 54837 - RNA, 71 nt, Homo sapiens
acggcccgggcagagggacgagaagccggacagggcccgcggacacggaccagggagcagaaaaaaaagag

SEQ ID NO: 54838 - RNA, 77 nt, Homo sapiens
aaagaagaaaaggaacccggccgaggaacagcagagaacaaaggaccgcaaacgaagacggcagcacagcaggcaca

SEQ ID NO: 54839 - RNA, 72 nt, Homo sapiens
gagacacgcaaaaaaacgacccgaagagaagggggacaaagggagcaaaggaagagacgaaaaccacggcac

SEQ ID NO: 54840 - RNA, 63 nt, Homo sapiens
gcaagccgacgccacaacacgcgacaccgaacagcgagcacacggcagacacaagaggcaaag

SEQ ID NO: 54841 - RNA, 89 nt, Homo sapiens
cggcggccggggaggcggcggcggcggcagccccaagccggagcaagagcgcaggccaccccgcgcgagcaggcgcgcccagggagccc

SEQ ID NO: 54842 - RNA, 82 nt, Homo sapiens
ggcgccagaagaaaacggcgagaggggcgagaacgccacgcgggccggcgaaagcggaagcccggggcggcgacggagcacg

SEQ ID NO: 54843 - RNA, 74 nt, Homo sapiens
cgcaagcacagaaagcgagcgaacccacacagcggaaggaccagaggcgacacggcaagggaaccaaaagacga

SEQ ID NO: 54844 - RNA, 85 nt, Homo sapiens
gggcggaaaggcgcggccccgcgccagagggccggggcccccgggccgaggacccgcagggagcggaggaggcgccgggcccagg

SEQ ID NO: 54845 - RNA, 74 nt, Homo sapiens
cccgggcccagaaggcgagaccagagacgagaagaaaacggccgagcacggagagaaaggaggaaagggccgcc

SEQ ID NO: 54846 - RNA, 81 nt, Homo sapiens
ccgccgcaggcgcgcgagcggccgccccacgcgcgccgacagaaggccaagacaaggccgagaccgcgggaagaagaagga

SEQ ID NO: 54847 - RNA, 122 nt, Homo sapiens
acagcaaggaccacccaaagacagggaagggcagaaggaggccccccgggcggagagcccccccagcccaccgggacaccgacccaagcccagcagaagccaacagacggggccgcaaccag

SEQ ID NO: 54848 - RNA, 73 nt, Homo sapiens
agccccagcaccaaaggcaaggaggacggccagacaggacccaaagaacaagccacacgcccacaaggaagaa

SEQ ID NO: 54849 - RNA, 77 nt, Homo sapiens
cgcgcccggcggcgcgggccaagcaggcagcacccacagggcacaccaaagcggggaaaagggaagggccccgagag

SEQ ID NO: 54850 - RNA, 75 nt, Homo sapiens
gcaaggaaacaggaaaagcaaccacgccaaccagccgaaggcccgaagacccaaggaacacacggaccgaaggac

SEQ ID NO: 54851 - RNA, 77 nt, Homo sapiens
ccgcaccggagggccgcacccacgaggagcgagcgaggaagaaagacccaccagcacggggaggcgacagggaagcc

SEQ ID NO: 54852 - RNA, 47 nt, Homo sapiens
ccaagagcaacagaccacggaaccccggagcccgagggagccggagc

SEQ ID NO: 54853 - RNA, 78 nt, Homo sapiens
agggaagagccaagcgacccacacaaaaggcaggaagcggagcacagaacggaaagagaaccagggacaaaggaggcg

SEQ ID NO: 54854 - RNA, 73 nt, Homo sapiens
gagccagcccaggaaaaggagagcggaggagcggacaacccagagagaaacgccagaccacagcggagagagg

SEQ ID NO: 54855 - RNA, 108 nt, Homo sapiens
gagagcaagcagcgcccacaaccgcggcgcagaccaggcccgggccaccacccaccaaggcccaagggggcccaggccggaccaccggggaaaaccacagcccacgcc

SEQ ID NO: 54856 - RNA, 70 nt, Homo sapiens
cggcccgggcaccaccaaccgaggggcacgccggcgcccgacccggcagggcccagacccgggaccagcc

SEQ ID NO: 54857 - RNA, 84 nt, Homo sapiens
cgggagaagcagggaaggaggccgagccgggaccaggcccgggggcggcggccacgccaaggacgggcggcgagccagggagcg

SEQ ID NO: 54858 - RNA, 74 nt, Homo sapiens
cgggccgaggacacaccgcccccgcccaagagcccacggagcccaggaaacacgccgcaccagggaggagagaa

SEQ ID NO: 54859 - RNA, 80 nt, Homo sapiens
agggggaacacagagagcagcgaaagcaggaaacgcaggaaggagccacaagaccaagcgccacaagggaggaaagccag

SEQ ID NO: 54860 - RNA, 80 nt, Homo sapiens
aaaaaagcagccggggccccgagaagaaagacccaggcaaagacacaccagaacacagcagcacccggaaacaagccacg

SEQ ID NO: 54861 - RNA, 86 nt, Homo sapiens
gccgggagccaccgcgaagggcaggaggacgcggcggcggcgaggagaccccggccccggaggccccgcacccccccagccgcgcc

SEQ ID NO: 54862 - RNA, 72 nt, Homo sapiens
gcccaagccccagaggccaggcagggagcagggaccagcgacgcacccgcgagcccccgccccgggaaagcg

SEQ ID NO: 54863 - RNA, 81 nt, Homo sapiens
ccgcggggcaagaagaggccagccggacccccaaaaccggaaagacacgcggcggggaaaaggagaagaaagacacaggga

SEQ ID NO: 54864 - RNA, 71 nt, Homo sapiens
accgcgcagagacacgagggacaaccacccccaaggaggacaccccaccagcagcggaccacccccccgcc

SEQ ID NO: 54865 - RNA, 95 nt, Homo sapiens
ccgagccgccgcacaccggccccacgcacgacgagagggacagcacggcagacgaacacgcaaaggccggaaagccccggaaccgagagacacgc

SEQ ID NO: 54866 - RNA, 66 nt, Homo sapiens
caaacaaggacccgaaagggacagaacaccggacacgaaaaagaaagcaaagaaccagcccgacac

SEQ ID NO: 54867 - RNA, 76 nt, Homo sapiens
acccgggaagcaccacaaaagcaggacaaaaaggccaagagccagcacaggaagaggaagaagagaagagaaggag

SEQ ID NO: 54868 - RNA, 70 nt, Homo sapiens
agccacccgggagagcccggaaaggcccgcggcgaggagcgagcagagacggaaggacagaacggaaaag

SEQ ID NO: 54869 - RNA, 82 nt, Homo sapiens
accacagacacccccaaaccaccaaggaagggaaaaggccgaggcacagcgggaagaccgcaaagacgacccgagacaggga

SEQ ID NO: 54870 - RNA, 72 nt, Homo sapiens
cgaaggaaacacccaaagggaagcgaagcccgggggaagacacagaaccgaccgccaagcagagggaagagg

SEQ ID NO: 54871 - RNA, 58 nt, Homo sapiens
gggaagccccgccgagaaaagccaccacgcggcagccaccccccccacgcgcaccacc

SEQ ID NO: 54872 - RNA, 57 nt, Homo sapiens
cgaggcggggagccggccaggcgcggaccgcgccgcccggcgggcaccggcccaggc

SEQ ID NO: 54873 - RNA, 78 nt, Homo sapiens
gggaaacacccagacccaaacacgaagaccccaacaggaaccccccggcggcagagagcagaagggccagcgcgaaca

SEQ ID NO: 54874 - RNA, 69 nt, Homo sapiens
gagaggacccccccccccccccaaggaaccacaagcagcaaggcgccaagacgagagcccaaacacagg

SEQ ID NO: 54875 - RNA, 80 nt, Homo sapiens
gagaagggaacccccccggaccagaaggcgccagacaaagaccagcgaaaccagacacgacggggggaaagggcaagcga

SEQ ID NO: 54876 - RNA, 71 nt, Homo sapiens
ccgcagggaccacagcaccgaaaacaccaggaaagacaggagaccaaaaaggagggcccccccccagcgcg

SEQ ID NO: 54877 - RNA, 81 nt, Homo sapiens
ggaccagcaccccaccacgacacgggaggacgcccgggagggagggcgcgggaggggagggacgccgccgggggaaggacg

SEQ ID NO: 54878 - RNA, 88 nt, Homo sapiens
accacaccaaggggcggaagcaaccggcgccagcccaccgccgaaggggacgcagagagcaagggccagagaaggaggagaaggagac

SEQ ID NO: 54879 - RNA, 76 nt, Homo sapiens
gcgccaggccggcccaaagaagaacaagccaggagcacagaacaaagcaaacaagagaacacacaaacggaacaaa

SEQ ID NO: 54880 - RNA, 107 nt, Homo sapiens
gcaggagggacaagaccggaccagccagaggacgcgggccgaggagagcggaggaggggggccaggccgccgacaccgccaccggccacagcggcacccccacccgg

SEQ ID NO: 54881 - RNA, 82 nt, Homo sapiens
aggccgacggaccggcacgccagacccccacgcgcaggagaaagccagcagcgagcgccaagacggaagcccaaggcgagaa

SEQ ID NO: 54882 - RNA, 72 nt, Homo sapiens
gcaggaccagcgggggaaaagccacccgacagggccacgcacccagcggaggagggaggaacagccacgcag

SEQ ID NO: 54883 - RNA, 73 nt, Homo sapiens
aggggaacccgagccaggcaacagacagagaagcagacggaaggagggaaaagcccccggcccgagaagcggc

SEQ ID NO: 54884 - RNA, 103 nt, Homo sapiens
gcgggacgaggaagggcagacgggaaacgcaaacgggcgcgccggcgccggaccccagcaaagaggaagagaaacaccaaggaaccacacaagaaaagaaagc

SEQ ID NO: 54885 - RNA, 55 nt, Homo sapiens
gcggggcgaacgccccggcgcggccagccggggcagagccgcaaggaaacccagg

SEQ ID NO: 54886 - RNA, 60 nt, Homo sapiens
gcgagcagccaacgaggacgaggggagaggagccaagcccaacgggacgggaaaacggcc

SEQ ID NO: 54887 - RNA, 86 nt, Homo sapiens
gcccaccgcggagagcagcacgaccccagcacagagggagaaccgaagaacaggaggccagcagaggggaacaagagaagagaccg

SEQ ID NO: 54888 - RNA, 44 nt, Homo sapiens
agcgcggcagggggccgggggcccagcacaagagggccagggac

SEQ ID NO: 54889 - RNA, 76 nt, Homo sapiens
caccgcggggagagacacaaggccagcaaagccaaccgccaacgcgacgcgggagcggaccggagcagaagacaaa

SEQ ID NO: 54890 - RNA, 56 nt, Homo sapiens
cgacacccggaagagcaggccgcagcggagaggcgagggcgccggcaccagggcgc

SEQ ID NO: 54891 - RNA, 74 nt, Homo sapiens
ggccgccgagcggacccggaccggggcgggccgccgcccggcgaaaagggggcccacgcaacaagggaaaggca

SEQ ID NO: 54892 - RNA, 79 nt, Homo sapiens
ccccccagccggaagggcagagaaggccgggacagcagaaaacagccagcagaaaaagccaaaaagcaagcggacaaaa

SEQ ID NO: 54893 - RNA, 59 nt, Homo sapiens
cgcagacgggagccgggagccggcaggacacgagcgcgagagaaaccccgagcccaacc

SEQ ID NO: 54894 - RNA, 88 nt, Homo sapiens
cccgcgccagcaccacgcccgcgccgcgccgccgccaccagcccaagagaaagggcggaaaacaccccaaaagccaaaagggaaagga

SEQ ID NO: 54895 - RNA, 85 nt, Homo sapiens
gcgaaacgcacgagaagacgaagcaagaagccaaaagagggcaggacgccagcacagagcccggagaaggaaagcaaggaagaga

SEQ ID NO: 54896 - RNA, 81 nt, Homo sapiens
cgagaagcccagaccgcagggcgggaaaaaaccaagcagcgagcaccagggagagagaacggggagaagcaacaccagagc

SEQ ID NO: 54897 - RNA, 83 nt, Homo sapiens
acgcacacgggccaaggaccacgcaccaccagagaacgggccgaggaacccaagacagaccaggagaggagcagccggaaagc

SEQ ID NO: 54898 - RNA, 46 nt, Homo sapiens
gcacaggcaaaggaagcaccgcacacagggcacgagcaaaaaaaag

SEQ ID NO: 54899 - RNA, 84 nt, Homo sapiens
ccgggccccccagcagaagaccccggcggacacagccagggccccccacgcgagaacccgggccggggcccgggggcccgagcc

SEQ ID NO: 54900 - RNA, 79 nt, Homo sapiens
gagaaacaagagaagacacaagcagacccccaaagggcagggagagagcgaagaaagggggcaggcgggccacgagggg

SEQ ID NO: 54901 - RNA, 70 nt, Homo sapiens
ccggaccgaagacccggacggaaggagagacagagcaacggccaccaacaggaccacacgcccgccaacg

SEQ ID NO: 54902 - RNA, 31 nt, Homo sapiens
ccggccgacaaccacgggaccggagggccaa

SEQ ID NO: 54903 - RNA, 77 nt, Homo sapiens
gagggccacggaggagggcgccagcaccacgagggaggagaacgccgggaggagaaggcaaacgaaggggagacaag

SEQ ID NO: 54904 - RNA, 66 nt, Homo sapiens
caaagccaacgcccagagaccgccaccaccggcccgaccacgcgaacaccacaccccagcccagcc

SEQ ID NO: 54905 - RNA, 75 nt, Homo sapiens
gcgccgcgcccacggccagacccaggaggaaggcagagaaaaaaggagggccaaagacaagcagcaacagaaaac

SEQ ID NO: 54906 - RNA, 70 nt, Homo sapiens
cgcccgggccagcggccgcgcacccccggccggaggcaccagcccgggagaagaggcacaaggacaggca

SEQ ID NO: 54907 - RNA, 76 nt, Homo sapiens
cggggcccggcaccaggaccaccgcggcagcacgcggcgagccccaggagggacagcgggaaccaccagcgcggag

SEQ ID NO: 54908 - RNA, 84 nt, Homo sapiens
ggcgaccacgccccgggccggcccccaagagccgaggcagcggcggccgaggcgcccaaccagaaggggcagaccaacaccacc

SEQ ID NO: 54909 - RNA, 129 nt, Homo sapiens
gaggagcgaagaaagggcggcgaggagggcgccgcggacagccagccaccagcagaaggccccggagccacgacgagacaagccccaggagcaccaccaacccgcccgaccggccgcagcacagagccc

SEQ ID NO: 54910 - RNA, 76 nt, Homo sapiens
gcgaacagaccgcccaagcggacccccggacagaggcgagggccgccgccgccgacagaaagggagcccaggcggc

SEQ ID NO: 54911 - RNA, 86 nt, Homo sapiens
cagagagaggaggcggcaacccaaagccgcacagcggaaagggaaaagaggggaaagaaaaagcggggaaggggggcaaaaaaaag

SEQ ID NO: 54912 - RNA, 90 nt, Homo sapiens
ggacacagaacaagaaaaacgaggcgccccagggccaccaagcgcgcccacccgggcagaaaacgcagaagcccacaggccacagagaca

SEQ ID NO: 54913 - RNA, 67 nt, Homo sapiens
aaacacaagagaaacaggccaccaagccaaaacaacgcggcagaacggaggcaggcagcacgagaca

SEQ ID NO: 54914 - RNA, 69 nt, Homo sapiens
aaggcagaccaacaagaggacccaggagaaacgccccaaagaggcagccaccagcaggaggaaaaccaa

SEQ ID NO: 54915 - RNA, 58 nt, Homo sapiens
gcaccacagcaaggcggaagaagaacgcacacacagcagcccaccaaggcaccccggg

SEQ ID NO: 54916 - RNA, 59 nt, Homo sapiens
gcggacacgagacgaggacaggacgcgggcacgcagaaaagaagagcgaaacgggacca

SEQ ID NO: 54917 - RNA, 74 nt, Homo sapiens
gacacccagaacgaccaagagacagcacaggaggagaagagcacaaccgcccccaaaaggagaaacagaagaaa

SEQ ID NO: 54918 - RNA, 80 nt, Homo sapiens
acagagcgaaacagcaacaaaaggacgaagggggaagagccaccagcccccgggccaagagcagcacggagacagagcca

SEQ ID NO: 54919 - RNA, 72 nt, Homo sapiens
agagcacgaaaggcaacgcgcccgggagaggcaaaccaccccggggcgggaacccaggggccggcacagcac

SEQ ID NO: 54920 - RNA, 69 nt, Homo sapiens
aagcaccacaaaggaacgccacacgcgaaaaacgggaaacacaaagaagacaccagaagggccagcacc

SEQ ID NO: 54921 - RNA, 78 nt, Homo sapiens
acgcgcggcggcaccgggaggccgggccgagcggacgaagccaaagaaacagcccggagggcgaagagaacccacagg

SEQ ID NO: 54922 - RNA, 76 nt, Homo sapiens
gccagacaacacccaggcagaagcggaaagggaggaggaaacaggaaccaaaaggacacaaagaagaacagagaag

SEQ ID NO: 54923 - RNA, 72 nt, Homo sapiens
gaccccgcacgggcacgagaaagccaaagagggaagaggggaaacagaagcaaaggccgaagcacgaaaaag

SEQ ID NO: 54924 - RNA, 69 nt, Homo sapiens
gagggacgggaccccgcaacccgaagccacagcccaacccccggcacccggaaagggagcagcaccggc

SEQ ID NO: 54925 - RNA, 86 nt, Homo sapiens
acggcccgcgggcgaagcggacgcagccgcgagcccggaggcggcgggaggaggcggcggccgagacgccccacaaccgcccgggc

SEQ ID NO: 54926 - RNA, 76 nt, Homo sapiens
cggggcccaaccacaagacgaccaaaggaggaagggcaagaaggagagacacagcgccggaaccggagagaccgca

SEQ ID NO: 54927 - RNA, 69 nt, Homo sapiens
acaccacaggccagaaggggagcgaacgccacgaaaacgaagcaaggaaggaagcaaccaggaaaaaaa

SEQ ID NO: 54928 - RNA, 85 nt, Homo sapiens
gcggacggcgagcgcgagcggcgcgagaaaagaggggagaagagcgagacgagaaagaagaggaagaagagagagaagagaagag

SEQ ID NO: 54929 - RNA, 65 nt, Homo sapiens
ccggccggaagccacgcccggggcggacaccgcgaccccgcacacacacccaccagccacggcag

SEQ ID NO: 54930 - RNA, 66 nt, Homo sapiens
gcgccgcaggagccagcggaagagcaaagccgaggcggcccgcagacggccccaagaccggagcgg

SEQ ID NO: 54931 - RNA, 76 nt, Homo sapiens
cgcgcccagcagggccagcaagccccacgagccgcgcgaaaggaggaagcaaacaccagcaagaggagcgcccggc

SEQ ID NO: 54932 - RNA, 75 nt, Homo sapiens
aaacacaccaacagggaagaaaacccagaaagcaacacagagaccggagagcacacggccacacaacacgcaagg

SEQ ID NO: 54933 - RNA, 73 nt, Homo sapiens
aacgagagcgaacgccagcgccagaagggacaaccagagcccgaccagaggcacagcaaaggcccagaagaac

SEQ ID NO: 54934 - RNA, 83 nt, Homo sapiens
gccgcgcgcgcagggccgccggcccgcagccgccaccacccaggaccagaagaggcagcgcagcccggaaagaaacaaagaaa

SEQ ID NO: 54935 - RNA, 83 nt, Homo sapiens
ccccggaggggggcggcgcccacgggggagcgagccggagacagagaaagccaacccagcgaaggaacaagcaaaccccaagc

SEQ ID NO: 54936 - RNA, 38 nt, Homo sapiens
ggaggaggacgacagcacggaagcccggggcggcgacg

SEQ ID NO: 54937 - RNA, 74 nt, Homo sapiens
gaagaagggagccaacaccacagcccgaacccaaacgagcacacgaggcccccgcccaaggaggaaaagcgaaa

SEQ ID NO: 54938 - RNA, 67 nt, Homo sapiens
ccagcgaaggaaaccagcacgagccagcagaaaagggcacagaaagccaggagcgaacacacagaac

SEQ ID NO: 54939 - RNA, 72 nt, Homo sapiens
caccgcggagagcagcacgaccccagcacaggagaaacaaagacgaacaggcgaacaaagccagcagacgag

SEQ ID NO: 54940 - RNA, 55 nt, Homo sapiens
ggaagggcgagaccgaccccggcccaagggcgcaccgacggacacgccgacccac

SEQ ID NO: 54941 - RNA, 67 nt, Homo sapiens
agcgcgcggaggaagaaacaaagacgcaagcggggcagaaaaacaagacagccaaccagcagggcca

SEQ ID NO: 54942 - RNA, 79 nt, Homo sapiens
aaaaacagaagcagaggaacggaaaaagagaaggaccagacgcagaaacggagaagcgaacagccaggaagacggcggc

SEQ ID NO: 54943 - RNA, 80 nt, Homo sapiens
agcgcagcaagcgggagaccaggagcccccaccaggccaaagaccggcacccagggagagggaacacaggaaacagcaga

SEQ ID NO: 54944 - RNA, 82 nt, Homo sapiens
caaggcggacgcggcgagaaggggacaaaccgagacaagggcaacacgagacgaaccagaaaccaacgcaaaggcacagcag

SEQ ID NO: 54945 - RNA, 80 nt, Homo sapiens
gcgcagccagccaaccggcccaacaagaggaagccagaacaaggccggagacccacggcagggcaaccccaccgcggaag

SEQ ID NO: 54946 - RNA, 74 nt, Homo sapiens
agccaagagcagcaaccccaaagggccagagcaccagccacaagcgggccagaaacacaaccccaaacaaccac

SEQ ID NO: 54947 - RNA, 84 nt, Homo sapiens
ggccacgggcccgcgacgcgcagccacgcaggagaccagagaaggccccgagccccggccccaaagacccaaaacagagacacc

SEQ ID NO: 54948 - RNA, 55 nt, Homo sapiens
gagccggcaaagacgaagaggaaaacccaccgcggcccaggcagcgcagagccaa

SEQ ID NO: 54949 - RNA, 70 nt, Homo sapiens
cggacagagccggcggggagccaggggggccagagaagggcaccagacccgagcggcccacagcaggccg

SEQ ID NO: 54950 - RNA, 73 nt, Homo sapiens
cggaggcgcgcaggagccaaggaggcgaaccgcgagcccagaaggcgagggacgaggaagcccaaggcgcgcc

SEQ ID NO: 54951 - RNA, 80 nt, Homo sapiens
cggggaagcggggcggcaccggacaccaagacggagaacccaggagaaacgagagggacagcaaggaagacgccagagag

SEQ ID NO: 54952 - RNA, 88 nt, Homo sapiens
cgccccgcccgcccgcggcccccagccccaggccgggagagacaagaggagcagcagcggcaccgcccccacccggagggccgacaac

SEQ ID NO: 54953 - RNA, 74 nt, Homo sapiens
agcccgcggaggccgcggagcgccagccaagaaaacccagggggagagcagcccaccggcgcaaacgcgggaac

SEQ ID NO: 54954 - RNA, 76 nt, Homo sapiens
agagccaccagacaccaggaggaccagcagcaaaagaaggagggccccaggaaaggaagcagcaaaagaccaaacc

SEQ ID NO: 54955 - RNA, 70 nt, Homo sapiens
gcgcggaccgcacgagcgcgacgacgcaccaaacccccacggacagccccagaacaacacccccagcacc

SEQ ID NO: 54956 - RNA, 115 nt, Homo sapiens
cgcccaaagcaacacaaaccacaagcgaagaggagaccaagaaaagacgaagcggacaaggaagaccaacacgcacgaagggaacacacggaagcaaccagcccgcgagaaaggc

SEQ ID NO: 54957 - RNA, 69 nt, Homo sapiens
cccgccccccgagcagcccccgcgggcgcacacaggaaggcggagggaagaagggaaaacggagacacc

SEQ ID NO: 54958 - RNA, 81 nt, Homo sapiens
gaggagcccgcccccagagaggggagccggcgaggacaaaaccgaaggagggcgggccaaaggagaaacaagaaggagaca

SEQ ID NO: 54959 - RNA, 75 nt, Homo sapiens
caaaaggcgaggagagagcgcgacggcccaagaaccagccaaccagaacccccagagcgggaacaagcaacgaag

SEQ ID NO: 54960 - RNA, 87 nt, Homo sapiens
gcgacggggcggcccggagccggcgcgaaccggcccccgcagcgggacccgggacccaaggccagccagccccaggcaccagcggac

SEQ ID NO: 54961 - RNA, 110 nt, Homo sapiens
gcaaggcgaggacccaaaggggacaaacccgggagaacacccccccaggaggcgagccccggcgcaggaacacaggacggccgaacacgacgcacacagaaacaaaagag

SEQ ID NO: 54962 - RNA, 56 nt, Homo sapiens
ggcgccggcgcgcgcgccccgccccaagcaccgcagaacgaaaccagaacagaaag

SEQ ID NO: 54963 - RNA, 72 nt, Homo sapiens
accgccagccacggacacaaggagcacccgaacgccaaagaacgcagagcacacgagggccggaggccccgg

SEQ ID NO: 54964 - RNA, 61 nt, Homo sapiens
aaaagaacaccagaaacgggagagagagacagcaaagccccacccagacggcaggggaaga

SEQ ID NO: 54965 - RNA, 78 nt, Homo sapiens
ccagccggaagcccgagggcagcgcccacggccgcgaccggccgcaggaggcaaagggaccccaagaaaccaaagggc

SEQ ID NO: 54966 - RNA, 73 nt, Homo sapiens
aaacgggggcggcaccgcgacacaggggcagcgaggagcgcagacaaagaagccaacagaccgggcgagggag

SEQ ID NO: 54967 - RNA, 89 nt, Homo sapiens
gggagcggcgccgagaggccggcgggacgcgggcgccaggaccggccgaacgcagaggaaggcacggcgcaaacggcgccgggccagga

SEQ ID NO: 54968 - RNA, 56 nt, Homo sapiens
acccggggagaccccgacgggaggccgagaggcaggggcaccagccagcgaccagg

SEQ ID NO: 54969 - RNA, 78 nt, Homo sapiens
ccaagaacaacccacccagcccggcaggaacgaagagaaagggccagaaggaagacccagaaagagagcgaaacccca

SEQ ID NO: 54970 - RNA, 72 nt, Homo sapiens
aacgccgaaaggacgaggaacgggccggaaaagaccgcaacaaagggaggcgagcccggaacagcacagaca

SEQ ID NO: 54971 - RNA, 88 nt, Homo sapiens
gcacccacagaagagcccccacaacggggagaacagcccaaaaaagcaaagcgggggagccccccgcccaaagcgcaccaggcaacag

SEQ ID NO: 54972 - RNA, 81 nt, Homo sapiens
gggagcagccccccccggaggccagccagaccaaggacagccaaggaagccaagaccaggaggggacgggacggggcgaac

SEQ ID NO: 54973 - RNA, 80 nt, Homo sapiens
gggggccagcgacccggggccgagaagacacgccgcagcgccagcgaggggcccggagaccagccaaccggaccgagccc

SEQ ID NO: 54974 - RNA, 74 nt, Homo sapiens
cggaccccgaccccgaggcgagacggaaagagaggggagaagagcgagacgagaaagaagaggaagaagagaga

SEQ ID NO: 54975 - RNA, 77 nt, Homo sapiens
gccgagcggggcagccgagggccaagggagccgcgcaaaggccccggcaagaaggcaaccaagagccaccgaaaggc

SEQ ID NO: 54976 - RNA, 62 nt, Homo sapiens
cggcgggcggagacaggaccgcggcgagcaagaaccggaaacacagaagcaccccagaccgg

SEQ ID NO: 54977 - RNA, 74 nt, Homo sapiens
gcggagggcacaccagagggagcccaacagagaggaaacgaggcggcgcggccagaggggcgaaggcccacagc

SEQ ID NO: 54978 - RNA, 83 nt, Homo sapiens
gaaccagggccgggggccaggccaaggcagaggccccaggagaccacccacgacacagagagaaggaggagcagaagagcaac

SEQ ID NO: 54979 - RNA, 70 nt, Homo sapiens
aaaccacggccagagcaagccaggggagggccaaaagggacaccgagcacaagaaaacaaagcaccgaac

SEQ ID NO: 54980 - RNA, 75 nt, Homo sapiens
gcacgccggcgcccaaagagaccagcgccaccgacccggcggaacaacagaggcagggaagacgaggacaacggc

SEQ ID NO: 54981 - RNA, 81 nt, Homo sapiens
cgcggcgcgcgccaagacgccgccaaccgcagggacgcgccaaggccacggccgaggaccgccgcgccgaccggagacaac

SEQ ID NO: 54982 - RNA, 70 nt, Homo sapiens
acccggagcgacaagcgccccgacggagcgccaggacgaaccccccacggaaaggacgaaagaaagaagc

SEQ ID NO: 54983 - RNA, 69 nt, Homo sapiens
aggaaaaggaaaacacagcaaaggcagaaacaagagagggcgagcagcaaccgaaggcccccagggcac

SEQ ID NO: 54984 - RNA, 72 nt, Homo sapiens
aggcaagacccaaggcgacgaccgacaggggggaaagggacgggagaaagaacagacaagccgcaagaaccg

SEQ ID NO: 54985 - RNA, 81 nt, Homo sapiens
agcaccaggacccgacaaccaggaaggagggacaggcggggaagaaagccggagaaaagcaccggccccagagccgccaaa

SEQ ID NO: 54986 - RNA, 75 nt, Homo sapiens
cgggcgagcagcaggagcaccggcccaagaaacagggacgggggcaacaccacgacgcaaagcaaggaaagggag

SEQ ID NO: 54987 - RNA, 71 nt, Homo sapiens
ggagaagcaaggcgacgccagaggaggaaaggaagacaagcaccacaagccaacaaaccgaaaaaagagac

SEQ ID NO: 54988 - RNA, 68 nt, Homo sapiens
ggagcgcaggcgagacccggagccggcccaacggccagacagccagaaagcgagcgacggaacacaaa

SEQ ID NO: 54989 - RNA, 70 nt, Homo sapiens
caaagagcgaagagagaaacaggcaaaagcggaacaagaaagcaggcgcgagccggcacgaaacaaagga

SEQ ID NO: 54990 - RNA, 53 nt, Homo sapiens
gacgccggcaggaagagaggaggccccggaccaggagggcgcgaggcggcagg

SEQ ID NO: 54991 - RNA, 69 nt, Homo sapiens
gacagggggagccgcagagcaagacaagcacccccaggcagaggcgggcccgggagaagcggagaccaa

SEQ ID NO: 54992 - RNA, 75 nt, Homo sapiens
cagccgggccagggccagagcaaaggccgaaaggccagcgaaacagacggacagaccgcgcggcccggaggcagg

SEQ ID NO: 54993 - RNA, 70 nt, Homo sapiens
aacaggcagaacagcggggcccacaccacgggcagcaacagagcacaaggaaccccagaaggagaggcaa

SEQ ID NO: 54994 - RNA, 67 nt, Homo sapiens
agaggagacgcaaggagccaccagcacggaccaggaggcgagcaacagacacagacgcggccaacca

SEQ ID NO: 54995 - RNA, 82 nt, Homo sapiens
ggaggacgaggaccggggcagaccaccaccgcagggccccccacggacccagcccgaaaccgggccgaagacgcacacggag

SEQ ID NO: 54996 - RNA, 63 nt, Homo sapiens
caggcaacaggaagaagaacccacaggggccaacagaggaaggggagccgccaccaaaagcag

SEQ ID NO: 54997 - RNA, 73 nt, Homo sapiens
cccagcagcccaggccgagacgaaaggcagcaagacaacacagaggagacgagaaagaccagaagaaaagaag

SEQ ID NO: 54998 - RNA, 83 nt, Homo sapiens
cgccccagcgccccgccccccccgccgcccccggcgggcccggcggcccacaccagggcgaaccgaccaagaacaacacccag

SEQ ID NO: 54999 - RNA, 53 nt, Homo sapiens
cagggcgcccccgcccgagaacacgaaacaaggaagaaagaagcaagaaaaac

SEQ ID NO: 55000 - RNA, 74 nt, Homo sapiens
gcagcgaaccgccaaacccgcagcaccaacaggcacaagacacgaagagcaccccagagcgggacacagacaga

SEQ ID NO: 55001 - RNA, 77 nt, Homo sapiens
caggccagaggagcggagggagcagcagagccagaggaagaggggcagaagaccgacacgacaagagacaaagaaga

SEQ ID NO: 55002 - RNA, 100 nt, Homo sapiens
cgcccgcgcgcgcaggcgggcgcaggcccggcgcagcgcggaccccgagagaaacggcgagaaaaccaaacaggagccgacagccggagaagggcaggga

SEQ ID NO: 55003 - RNA, 54 nt, Homo sapiens
gaggcccaggcgaaagggaagaaagcaaacagaaagaccacagcaagaccacgc

SEQ ID NO: 55004 - RNA, 76 nt, Homo sapiens
ggagaaacagcagaaacgcaccaggccaaagaaagagaagaccgaaaagacgcggccccaaaggaaacacccgaag

SEQ ID NO: 55005 - RNA, 78 nt, Homo sapiens
caccgccggcgcgggaaacgggcgaagcgacgagccgcgaggagcagcagacaaggcagacacaagcaggaagaacac

SEQ ID NO: 55006 - RNA, 71 nt, Homo sapiens
ggacagacgagagaacgaggacgaggaggggcagcaagccgccagggccaccaggacggacaaagccgagc

SEQ ID NO: 55007 - RNA, 70 nt, Homo sapiens
gaggccccgcagcgacgacggacagcaaggaaccccgagcccccagagccagaacgccaagcccaccccg

SEQ ID NO: 55008 - RNA, 52 nt, Homo sapiens
caaaagcacagagcagaagaagaaggggagcggcaaagccaaagaggccaga

SEQ ID NO: 55009 - RNA, 73 nt, Homo sapiens
ccgcgccgaagcagaagaaggggaaggcggagcccccaagacacggcaaccaagggcagaccgcacaagcagc

SEQ ID NO: 55010 - RNA, 61 nt, Homo sapiens
aggcggcggcgcccggagggcagcgagaccgaaaaccacaacagcggcgcggagggacggg

SEQ ID NO: 55011 - RNA, 77 nt, Homo sapiens
gacgggcggccccggaagcccccacgggccaccgacccgcaggagaacacaaagaacccaaacgaaaggaaaagggg

SEQ ID NO: 55012 - RNA, 71 nt, Homo sapiens
accgggcaaccacggggcggcgccggccccaaggccgagaaacagacaacccacagaacaaagcggaccaa

SEQ ID NO: 55013 - RNA, 76 nt, Homo sapiens
cgagcggaccaaggagcagaggaaggcccagcccaggggggccgaaagaaacgagggccgcgagggcccggaacag

SEQ ID NO: 55014 - RNA, 65 nt, Homo sapiens
cgcccgaccccaagcaacaacggggcagggacaggcgcgaccaggcccccgcaaacgcggacacg

SEQ ID NO: 55015 - RNA, 53 nt, Homo sapiens
ggagccgacccacccggggcagccggcacccgcacaacccagggggccgaacc

SEQ ID NO: 55016 - RNA, 85 nt, Homo sapiens
gcgagggcccggcgaggagaaccaacggcccgaaagagcacacgacagacaacaacaggcaggaccccaggaaggccagcgccca

SEQ ID NO: 55017 - RNA, 65 nt, Homo sapiens
gcgccagcgcgaccgcgagcccccaagcaagaggcgagacaggaccgcggacaaaccgccccagg

SEQ ID NO: 55018 - RNA, 73 nt, Homo sapiens
cgggagaaaaaggaaaacgcggaaaaccgacacaacaggagccacaacgaccgagcggacaggagacagccag

SEQ ID NO: 55019 - RNA, 77 nt, Homo sapiens
ggagagagcgggcgggcggccgggagacccacaggggaacagaggagcagcggcagaaaaagggccagacgaggcga

SEQ ID NO: 55020 - RNA, 78 nt, Homo sapiens
cggcgaacgcggagagcacgccagaaggcccgggcacggagagagcgaagcaccgcgcagaccgaaaggcacacggag

SEQ ID NO: 55021 - RNA, 91 nt, Homo sapiens
ccaagagaggcggggcgcccccgccacgcagccggccaccgccgagacccagcacacgccgaccagggagccagggcgcggggccccggaa

SEQ ID NO: 55022 - RNA, 68 nt, Homo sapiens
agagccgaaagacgggacgggaaaagaaacccgaacccggaggacaagaccgccaagaagagcgagag

SEQ ID NO: 55023 - RNA, 77 nt, Homo sapiens
cggaagaaaccacaaggacccagggaacgcaagcacaggaccagaaacgaaaggcagcagaagaggaaagccagaaa

SEQ ID NO: 55024 - RNA, 73 nt, Homo sapiens
gaccaggggggaaagcgccccagggcaccccagaggacgacacaaaggggggagagagagaagcaccagaagc

SEQ ID NO: 55025 - RNA, 81 nt, Homo sapiens
cggggcccgggaccacaggccccggcccagaggaacgaagcccaaaaggcagagacggaccgagacaggagagcaggggcc

SEQ ID NO: 55026 - RNA, 61 nt, Homo sapiens
cagcgcccagcagcgcagggccccgcaccaccccagcaaccaaacaccacccggacccgcg

SEQ ID NO: 55027 - RNA, 71 nt, Homo sapiens
gcaaagcagaggaagaacagagagagccgggccagcgaaccaccggccagcacaggaagacaggagacagg

SEQ ID NO: 55028 - RNA, 91 nt, Homo sapiens
ggcgagaacgccgcccagacaggaccgacagcagaccaaaccggagaaagaaagagcagaggagcggccggccgcgaaacagaaggacgaa

SEQ ID NO: 55029 - RNA, 77 nt, Homo sapiens
gacaggcccagggccgaggcccacagcgaaaagccgagacagcgccgggcgacgagagcacagcgccgggcgacgag

SEQ ID NO: 55030 - RNA, 83 nt, Homo sapiens
ggagacaaccccgcgcagcacgggaggagcggggagacgcggggcagacccaaaggaaacgcacgaaagaaacaggagagcgc

SEQ ID NO: 55031 - RNA, 84 nt, Homo sapiens
gagagaggaggaaacagcggaggagaccggagagaagaagcgggagaacagccccaggaagacagaggcagccgaccaccccca

SEQ ID NO: 55032 - RNA, 39 nt, Homo sapiens
cggggacagcgaaacaaggaaagggagcagcaccggcca

SEQ ID NO: 55033 - RNA, 60 nt, Homo sapiens
gccaccgcccgccacccgcgcgccgccgccgaggagaaaggagagacgaaaggaaaaccc

SEQ ID NO: 55034 - RNA, 77 nt, Homo sapiens
cgaaggaggagcccggagacacacaggcagacccaacggcacggggcaaagaaccagcgaaagaagccggggcagaa

SEQ ID NO: 55035 - RNA, 81 nt, Homo sapiens
gaccaaccagcaccgcggccagaagccagacccgcggcccggccggacccgcagcaggcacaagaacagaccacccagcaa

SEQ ID NO: 55036 - RNA, 75 nt, Homo sapiens
cccggcacacgggcagaacgccaagcggcccaggacgcacagagcaggaccgacgagagaacacgagacaccgca

SEQ ID NO: 55037 - RNA, 80 nt, Homo sapiens
gcacgggcgaccccccggcgcagcagcacacaaggggcggagaccaccccaacacgcaacgggacccacagcgccagcag

SEQ ID NO: 55038 - RNA, 79 nt, Homo sapiens
cgacaacccccagaaagccaagccgggagccccagaaaaagaccagggaaaagcccagcgaagaggacccagcaggaac

SEQ ID NO: 55039 - RNA, 75 nt, Homo sapiens
gcacagaagcgggacacgcgccacgcaggccgagccgagagcccgacccggccagggcagcaacaacaacagcgg

SEQ ID NO: 55040 - RNA, 93 nt, Homo sapiens
gccggggaaacaacaccgacaccggggccgacccgcagcgcgcgggggggccgacggccgaggcgccgcacagcgggagcgcacgaccccccc

SEQ ID NO: 55041 - RNA, 82 nt, Homo sapiens
cggagaagccgcggcggcagcacgacagcgccggcaacacgcggcacaagacaaaagccccaacacccccaaccaccgggca

SEQ ID NO: 55042 - RNA, 80 nt, Homo sapiens
cccgagccggcgaacaagccccccgggaagacacaaacgcaccaccagaaagccaagcggaaaaggaaacccaaccaaag

SEQ ID NO: 55043 - RNA, 73 nt, Homo sapiens
gccccagagaaagcccgccgcaccagcaagcgcgggaggcggccccaggggggaccaacaagggagaaccaac

SEQ ID NO: 55044 - RNA, 82 nt, Homo sapiens
gacccggggaggcgcacacacaccaaagcgccccgagccggaccgcccagcccccggccccgcgcccgggcagccccgaacc

SEQ ID NO: 55045 - RNA, 41 nt, Homo sapiens
gcggaaacagcccgcaaaggaaagccaggccagaagaagga

SEQ ID NO: 55046 - RNA, 68 nt, Homo sapiens
gcaaagaccaagagaagagggacacgccggaaaaaagcgagcacccgcaagaagagaacccagggaag

SEQ ID NO: 55047 - RNA, 59 nt, Homo sapiens
ccagccccagcggcagacggaaacgacagaagcagagagcgagggcagcagaaaaccag

SEQ ID NO: 55048 - RNA, 71 nt, Homo sapiens
gggcccccggaagaaccgaaggacacacagaacaaggccgcgcaccaggcgcagaacccaagcaagcaccc

SEQ ID NO: 55049 - RNA, 67 nt, Homo sapiens
gaaacgggggggcaggcccccacagagagcacacaaacaaagcgaaaccacggaagaaaagggcaaa

SEQ ID NO: 55050 - RNA, 67 nt, Homo sapiens
ccagacagcaggccgacggccccgggcgcagccaaaccgagaggggaaacacaaagaagacaccaga

SEQ ID NO: 55051 - RNA, 61 nt, Homo sapiens
gccggggaccccagacccgggcgccgcagagcagggcagaaggccccgagcgcgccgcccc

SEQ ID NO: 55052 - RNA, 77 nt, Homo sapiens
agcagaagaaggagcggaacacacagcaagccgccgggacagccacgacgccacagcagaaccacaaccacggggca

SEQ ID NO: 55053 - RNA, 67 nt, Homo sapiens
gcggcgcccgcgccacagccaccagagccggcagcaaagagggaacaggaacccgcgcccagaaggg

SEQ ID NO: 55054 - RNA, 73 nt, Homo sapiens
gcacaggggcgaagccaaggcaagcaagagccggcaggagaaggaccaaaaggaacgagacggaagagggagc

SEQ ID NO: 55055 - RNA, 81 nt, Homo sapiens
ggcccccagaccaggcgccccaacacgacagggcagcccgcagaggaccgcacgaacgcaagaaccacagcagagccgcgc

SEQ ID NO: 55056 - RNA, 70 nt, Homo sapiens
gaaaaggacgagaacgccgcgacagaaaaccagcaccagacagcgaaaaagaggacccaaaaaagagaga

SEQ ID NO: 55057 - RNA, 74 nt, Homo sapiens
acaagcgaagaccgaagcccaaagcagggcgggaacgcggaagaagaggaacacaagcaccaaaccaccaaacc

SEQ ID NO: 55058 - RNA, 87 nt, Homo sapiens
gcgagcgagccgcgaaccgagcgggcggcgggcgcgcgcaccagggggagaaacccgggaccaggacccgcgccgaagcgacccccg

SEQ ID NO: 55059 - RNA, 73 nt, Homo sapiens
accgaaacgccgaaaacgagccggagcaaagacacagcaacgagggaagaaccaggcaggaggcacaaggggc

SEQ ID NO: 55060 - RNA, 58 nt, Homo sapiens
acgcagggcgcccccggacaaaaaggccgggaagcacgcggaaaacgcagcgggagcc

SEQ ID NO: 55061 - RNA, 99 nt, Homo sapiens
aggaagggaggaggcggcaaaaaagcaaacacgaggccacggggaaacacagcagaacacagggcccggcgaacgacgaccaagcgggagacaaggcga

SEQ ID NO: 55062 - RNA, 56 nt, Homo sapiens
caggaaggagagaaacccaggaaaccgaaccagagaggggccggaaagggcgcccc

SEQ ID NO: 55063 - RNA, 75 nt, Homo sapiens
cgcaacccgaaccacggacaggacccgcccagcccaacggggagaaaagggaacaaccccaaaaaaccgacaccc

SEQ ID NO: 55064 - RNA, 76 nt, Homo sapiens
ggcaaaacggacggcaccaggccaacggagcagcaagaaagaggccaggccgaccaagcagaacccgagaagagcc

SEQ ID NO: 55065 - RNA, 77 nt, Homo sapiens
cacccccgccagcagccgccggagccagccaacgagcggacaaaagcggcaagagaagacaaccccccaagaaaaac

SEQ ID NO: 55066 - RNA, 75 nt, Homo sapiens
agaggaagcgcacgccagagcaccaggcagcaagagacagggacagaaaccccacacgcaaagcaagaaagagaa

SEQ ID NO: 55067 - RNA, 56 nt, Homo sapiens
ggaaggagcccggggccccacccccccacgggaacgaggcaccacaggaggcaggg

SEQ ID NO: 55068 - RNA, 54 nt, Homo sapiens
agcccacccccaacgcgacggaaaggcacgaaagccagacaccacgccacccaa

SEQ ID NO: 55069 - RNA, 75 nt, Homo sapiens
acagcgccccaacggggccacccggaggaaccagaaaaggccagacggccagcagccacgccaggcaccgcccag

SEQ ID NO: 55070 - RNA, 33 nt, Homo sapiens
cgagaaagcgaggaggggaacggccgcccccac

SEQ ID NO: 55071 - RNA, 79 nt, Homo sapiens
gaaggaagggaacaagaggggcagcaagggccaaacagcgaacgggcacgacggccagcgaaacagagaacaaacagaa

SEQ ID NO: 55072 - RNA, 75 nt, Homo sapiens
agaaaaccagagaccaagcccagagaagagaagcacgggccagcccaaggcaggcacagaacgaaccaaaaagga

SEQ ID NO: 55073 - RNA, 82 nt, Homo sapiens
gagagacgcaggggagcccgggggaggggaacagcagcggagaacacggcagagacaaaacggaccaccgcgacagaaacag

SEQ ID NO: 55074 - RNA, 53 nt, Homo sapiens
cagaacacacccggaagggacggaaaaggcgcacacgacccggagaaccccac

SEQ ID NO: 55075 - RNA, 86 nt, Homo sapiens
gaggggagagggaacgcagcgaaagcggaacggaagaagagccgggcaagggcacccaaaaaccgaagacggggacgggagggagg

SEQ ID NO: 55076 - RNA, 80 nt, Homo sapiens
aacagagagcggaagaaagagggaccagggacgaaggacgcagcagcacaaaagggaacaccaaccaaggcaccaggaaa

SEQ ID NO: 55077 - RNA, 78 nt, Homo sapiens
gagcgggagagccggacgcgaaccagccagcaccaagggcacaggacagcaggaagccagaggagaaaaaagggcccc

SEQ ID NO: 55078 - RNA, 89 nt, Homo sapiens
agagaagcaggaaggaggcagaggcacaccgaaagacacgagaggcgagggacgacagagcaagcggcagagggcaagcgggaaaaaga

SEQ ID NO: 55079 - RNA, 39 nt, Homo sapiens
gcgacaccgcccccgccaggcacagccagagaacaacac

SEQ ID NO: 55080 - RNA, 66 nt, Homo sapiens
gcaacagacggcggggccccccgggcagggggccgagaggagagagcgaaaaaaggacaaacgcga

SEQ ID NO: 55081 - RNA, 68 nt, Homo sapiens
acagagggcaagaggacgccacaaacacccaccacagcagagcccggacgggcacgacagagagaccc

SEQ ID NO: 55082 - RNA, 50 nt, Homo sapiens
gggacacgggcccacagcacagggaccgccccagggggggggggacccag

SEQ ID NO: 55083 - RNA, 77 nt, Homo sapiens
caggccggacaaggcaaccgggaaaggcggaggacgggccaggagacacaccaagaacgacacgaggccgacacccc

SEQ ID NO: 55084 - RNA, 75 nt, Homo sapiens
acgaaccaggaggagaccccacgccggacccaaggcggaggccggaaacacaccagaacgggacaaaaacaaaca

SEQ ID NO: 55085 - RNA, 82 nt, Homo sapiens
ccccggcgggaccgggcggcacgcacgcgggcagggaacaggcggagcggaaggggaacaccgcagcaggagacgcgccgaa

SEQ ID NO: 55086 - RNA, 93 nt, Homo sapiens
ggacaacgcgagccaggggcggcggagcgcggggaggaagagcaagcaggcccgagggacaaagaaggcagaccagcggagaacggagagcag

SEQ ID NO: 55087 - RNA, 92 nt, Homo sapiens
gcggggcagagcagcccccagccagccgcgaggcccaccaccaccaaccaggagacaggccagcgcgcggacaggaaccggacagcacacca

SEQ ID NO: 55088 - RNA, 72 nt, Homo sapiens
ccaccaaccccagcggggaaaacaaagggcggagaacggaaaagcaccaggaagcagagaggaccgcagaag

SEQ ID NO: 55089 - RNA, 41 nt, Homo sapiens
acccgggcaggaggcgggggcaccggggcccaggacagaag

SEQ ID NO: 55090 - RNA, 36 nt, Homo sapiens
caagacagggaagcaggccgaagaaggagcacgccc

SEQ ID NO: 55091 - RNA, 73 nt, Homo sapiens
aggaagagaggaggccacagaggagagcaaacaggagacgaaggagaccggcgaggaccaaagggagaggagg

SEQ ID NO: 55092 - RNA, 85 nt, Homo sapiens
ccagaaaacagaaacgaaacagaacagagagaagcccagagcccacgaaagggccagcagcccccagaagaagccagaaagccag

SEQ ID NO: 55093 - RNA, 59 nt, Homo sapiens
agaggagagaccacacccccgagagagacagcgaggaaaacgccacgacagacacaacc

SEQ ID NO: 55094 - RNA, 75 nt, Homo sapiens
agagggacggaaccaccagaagccagcccccaggcggaacgcccgccccgcagagagacgacaaagccgaaaggc

SEQ ID NO: 55095 - RNA, 72 nt, Homo sapiens
agaagaaggggaaggcggagcccccaagacacggagaagacagaggagccagaccaagagacagcacaggcg

SEQ ID NO: 55096 - RNA, 82 nt, Homo sapiens
gggcggcgcgccgccgcgcggggcagaaaagaccacagcgccaaagagaagagaaggagccaagacacgcacaccaggagag

SEQ ID NO: 55097 - RNA, 89 nt, Homo sapiens
ggagagccgcaggacggcgcggcagagccccgacgccacagaacgaccccgaggcccgccgcccgcgggcccacgaggccggggaggcc

SEQ ID NO: 55098 - RNA, 73 nt, Homo sapiens
caacccgacccgacgaaaagcaaaccccacgagaacaaagcacggcagaaacggaaaaaaaccaagaaagccg

SEQ ID NO: 55099 - RNA, 46 nt, Homo sapiens
ggcacccaacagcggagcaacggcccgacagagaacgacacccaga

SEQ ID NO: 55100 - RNA, 70 nt, Homo sapiens
gcccgcccgggggaccgcaggacaacaaccgacagcccccccacaaaggcaagacagagcaacggagacg

SEQ ID NO: 55101 - RNA, 88 nt, Homo sapiens
cccaccgccggcgcgggaaacgggcgaagcgacgagccgcgaggaggaccgaaggagaagaaggagaaggggaggagaaggcaagccg

SEQ ID NO: 55102 - RNA, 79 nt, Homo sapiens
ggcgggggggcacgccagcccggagaaaagcagcacgaagcaaaaacccacacaaaaaaagagggagcgaagcaagaaa

SEQ ID NO: 55103 - RNA, 66 nt, Homo sapiens
gcaaagggaccacaccgacagcggacgccccagcacccccagcgggcagagggcggcgaaggcgcg

SEQ ID NO: 55104 - RNA, 47 nt, Homo sapiens
gacccgagacccccaaaggccagaaagaggcagacgccagcagacac

SEQ ID NO: 55105 - RNA, 73 nt, Homo sapiens
gcgccccggcgcagcgcgaccgcgggcccgcccgggcggaacgacccggcggagcaggagcaaaggagcaaga

SEQ ID NO: 55106 - RNA, 89 nt, Homo sapiens
accacgagaagcccccaacagccacgcccacgacgcccggacgaggccgaccacagacggaggcaggggagaaaccagaagaagacccg

SEQ ID NO: 55107 - RNA, 77 nt, Homo sapiens
cacaccacccacaagaaaagaacaacggcccaacagccgggggaccccacaccacaaaccgaggaaagaagggacag

SEQ ID NO: 55108 - RNA, 72 nt, Homo sapiens
gcgacaggcgcgacggcagccacaggggcagcgggggggcgaaggaacaagccgcaagaccgaaaacccggc

SEQ ID NO: 55109 - RNA, 59 nt, Homo sapiens
cagacgaccaccacacacggagcggaaccaggaccgcacaggacgagcgaagacaggga

SEQ ID NO: 55110 - RNA, 82 nt, Homo sapiens
aggagcgcacggacaagcgcacgggaccgagaaccaggggcccacgagacgcgaacaaacgccgcgccgccagaagaacaga

SEQ ID NO: 55111 - RNA, 72 nt, Homo sapiens
acggggggaacgacgaacagggcaaaccgcaggcacaacacaaggggggaaaaaaccagccgaacaaaagcc

SEQ ID NO: 55112 - RNA, 76 nt, Homo sapiens
gccgcccgcccaacagcagcaacccacacgcccgggcgggacaagcggcaagaaggacaagcaggagacgccaggg

SEQ ID NO: 55113 - RNA, 77 nt, Homo sapiens
aaggaagcaggagcagccccgcgaggccgccagcggcccgcagacggagcagggcagacagggacagaaacaccggc

SEQ ID NO: 55114 - RNA, 74 nt, Homo sapiens
cacaacgcgagaaacaacaaagccgaacgagcacggaaagaggaaaggaccggaaacgaggcgcaaggacaaaa

SEQ ID NO: 55115 - RNA, 73 nt, Homo sapiens
gccccagcgaaaggacgcccaccacgagacaaccccaaaagcacgcacgaaaccggcaagccagcggagggga

SEQ ID NO: 55116 - RNA, 39 nt, Homo sapiens
gaccacccgcaacggacgcgccagaggagcagccaagaa

SEQ ID NO: 55117 - RNA, 39 nt, Homo sapiens
aacaccgcacgcgcggaggaggaccgacagcacgaggag

SEQ ID NO: 55118 - RNA, 42 nt, Homo sapiens
acagaaacaacagccaccagggaacccacccaccacccaggg

SEQ ID NO: 55119 - RNA, 78 nt, Homo sapiens
ggcagcccagagagacggaaacaggaacaccaaggaagcaaaagccccagaaccgcccagaggggggagccaggaccg

SEQ ID NO: 55120 - RNA, 78 nt, Homo sapiens
ccgaagccaagggacggccaccccagaaagcacgaaacccggagccacaggggggcaaagcagcggaccggacaaacc

SEQ ID NO: 55121 - RNA, 79 nt, Homo sapiens
ggcagaaaagcgaccaggcgaggcagggacagcagggacagccgggagagcaggagagacccgcgagggaagccgggga

SEQ ID NO: 55122 - RNA, 72 nt, Homo sapiens
caaccacagagggagggccagcaaaacacccaggaaaaagagcgagacaggaacaaagcaagcaggacgcgc

SEQ ID NO: 55123 - RNA, 73 nt, Homo sapiens
gggccaaggcaaagaaccggccaagccgaccaccccccaagcaccaccacggaccggacacccagcggccagg

SEQ ID NO: 55124 - RNA, 71 nt, Homo sapiens
gcacccaccacggagggaaagaccaggcagacgggaacggagccccccgcacaggacaaccaccagccacg

SEQ ID NO: 55125 - RNA, 51 nt, Homo sapiens
ggaaggcacaggggcagagagcagccggacacaagagggcaagaaaggcgc

SEQ ID NO: 55126 - RNA, 81 nt, Homo sapiens
agagcaaaaaaccaaaccgagcagacccggaagggaagcgaagggaagcacgaaccccagggacaccgaaggagccaagag

SEQ ID NO: 55127 - RNA, 73 nt, Homo sapiens
ccccagccgcagccacaacaccggcaggaaccaccaggacagagaagaagcagcagcaacagccagagacgga

SEQ ID NO: 55128 - RNA, 86 nt, Homo sapiens
ccagggcaggacaccgacaggaacagggaccacgggggaccaaccaagaagcgaagaaaagagaaagaaacagacaagcgagagag

SEQ ID NO: 55129 - RNA, 53 nt, Homo sapiens
aaaaccgaggaaacaggagcaaagacacagcaacgagggaagaaccaggcagg

SEQ ID NO: 55130 - RNA, 80 nt, Homo sapiens
ggacaagaccggaccagccagaggacgcgggccgaggagagcggaggaggggaaaacagcacaggaaacacagaagaaga

SEQ ID NO: 55131 - RNA, 79 nt, Homo sapiens
caagacaacgagcaccaaccacgagcaaagaaagagcacggagaaccacggggaccaagaagcgagcagcccaaacgga

SEQ ID NO: 55132 - RNA, 70 nt, Homo sapiens
caaaggccccaacaagaagagacaggggaaacaaggccggccaacaaaagcccgggcggacgcaaggcca

SEQ ID NO: 55133 - RNA, 92 nt, Homo sapiens
aacgccccgccaggcccagcgcggcagagaagaggggacccaagggagagagggaacggcgaaagggcagcccggaaggagcaccaccaccg

SEQ ID NO: 55134 - RNA, 57 nt, Homo sapiens
acgcaacgacccgggcccaaggcaagaaggaacagacaaaaacggccggaaggaaac

SEQ ID NO: 55135 - RNA, 79 nt, Homo sapiens
cccaaccagggggaaacacagaacgcaggggaggaacacggccaaccacaaagaacaacacagaagcgaaggaacagaa

SEQ ID NO: 55136 - RNA, 60 nt, Homo sapiens
cgaggcgcagcagcaggaggaggaccgcagcaaggacgggccaacgcacggcccggcaga

SEQ ID NO: 55137 - RNA, 70 nt, Homo sapiens
aacgagacagaacaggaaaaaggggcggagaacggaaaagcaccaggaagcagagaggaccgcagaaggg

SEQ ID NO: 55138 - RNA, 60 nt, Homo sapiens
gcaccggcagacccggggaccgggaagggcacgacccagccgaaaaaggaagagccaccc

SEQ ID NO: 55139 - RNA, 74 nt, Homo sapiens
agcaccacagccaccacaccaagacaccaggggagaccggggagaagagggagacccgaacgaagacgcagccc

SEQ ID NO: 55140 - RNA, 71 nt, Homo sapiens
cgaaggcgacggaaagggaaggaaaccggagcccaagaaagagccaccgggccaggcgaagacagggcaga

SEQ ID NO: 55141 - RNA, 80 nt, Homo sapiens
aaccacaaggccggaaccagccggggcccccagccagagcaacccacgcagcgacgcgggcagccaccccaggccacggc

SEQ ID NO: 55142 - RNA, 122 nt, Homo sapiens
ccacggcacgcacagccgggagcgaggaagaggcagaggcaccacagccacgggacgggagggacgcgggaaacagcggaagaggacgcacccgcgacacaacaccagaaagagccacccgc

SEQ ID NO: 55143 - RNA, 64 nt, Homo sapiens
ccggagaacggccaggcggccccgagcggaacggagaaagcgagggagcacccacgggaacagc

SEQ ID NO: 55144 - RNA, 73 nt, Homo sapiens
agaaaacccgcccaaaggggagaggacaagagaaagaaaaccgcaacagggcgaggcagagaaaaaaacaaca

SEQ ID NO: 55145 - RNA, 71 nt, Homo sapiens
gggacacaccccaggaaaaagacagcccgcagcacgaccagcaggaacgagcccaaaaggcagagcgagga

SEQ ID NO: 55146 - RNA, 80 nt, Homo sapiens
cggagcgacaaaggccacaaagcgcgacaccccggacccagccccaacggcaagcaacgggccagagcaaaaaaaggcag

SEQ ID NO: 55147 - RNA, 88 nt, Homo sapiens
accgcaccgaggcgccgcgcacagcaagaagagcgcagaaacggagggcagcagggaccggcggacgccccacagcccacggccaggg

SEQ ID NO: 55148 - RNA, 92 nt, Homo sapiens
ccagccgagccccagccaggacgagaggagcggagcccgcagaaccccacagcaagaggacgaagcagaccccacgagcgaaagggaaaaaa

SEQ ID NO: 55149 - RNA, 77 nt, Homo sapiens
ccgcgcggccacagcagaccgccgcggccggcccggccccccgcgcacggccagcgcaggaagaaaacaggcagagg

SEQ ID NO: 55150 - RNA, 87 nt, Homo sapiens
aaggccgagcaagaccagccagcgccagcgcagcccggccgcgcaccgcccagcgagccgggacacaaccagagggaagcacgcccg

SEQ ID NO: 55151 - RNA, 70 nt, Homo sapiens
gaagacgacgcaccgcaggcagacaaaagggccaaagaagggagagaggagccgggggggcgagcccgcc

SEQ ID NO: 55152 - RNA, 73 nt, Homo sapiens
gggcgggaacagccaaggggcaccagcccaagcacggcccccgcggagcccgcccccacccgcgcagcagcac

SEQ ID NO: 55153 - RNA, 83 nt, Homo sapiens
cggaggaaacccgagcaacccaggccagccaagacaaagcaggaggacacaagaagggaggaaaggcggacccaggaaccacc

SEQ ID NO: 55154 - RNA, 42 nt, Homo sapiens
cccggaccccccgccagcagcgaaggaggagccaccgcaccc

SEQ ID NO: 55155 - RNA, 78 nt, Homo sapiens
gagagccgccgccaacgcgcagggcagcggcccccgcccgcagaaaaacgccacaaccaaacgcgcaaagcgccaaac

SEQ ID NO: 55156 - RNA, 65 nt, Homo sapiens
cagggaaaaccgacgaccggaagaggccaggggaaaagagggggaaccaaaaccgaagaaaaggg

SEQ ID NO: 55157 - RNA, 71 nt, Homo sapiens
ccagaaaggacccgcaagagaaggcccagagacggggaacaaaaagaaagggggcccgagcagcaagaaga

SEQ ID NO: 55158 - RNA, 81 nt, Homo sapiens
caccaagccccgcaggagccaccagacggagcagagcagcagaaagcgaagcagaagccgagaacagcggcgagccggaaa

SEQ ID NO: 55159 - RNA, 55 nt, Homo sapiens
agaagacgccagcccaccagcacaagcagggggagaggcaccagcaacagaccaa

SEQ ID NO: 55160 - RNA, 73 nt, Homo sapiens
gacgcagggcgcccccgccaagacggcgccaaaaaaaaggaaggaaaaagaggaaaagaagaagaagaaaaaa

SEQ ID NO: 55161 - RNA, 72 nt, Homo sapiens
gaggagggacgcgaaagcgacaagagggcagccgcggccgccgccgacaccacggccggggaagggaaacag

SEQ ID NO: 55162 - RNA, 54 nt, Homo sapiens
ccgccgccgaggggcgggaacgaaacggcacagccagagaacaacacacacaca

SEQ ID NO: 55163 - RNA, 57 nt, Homo sapiens
gcgcaacgcgcaccaacccaggccgcggggggagaacacaacaccacgcagagggac

SEQ ID NO: 55164 - RNA, 72 nt, Homo sapiens
aaagaaaacacaagagagccgggaagaggcagacggaggcgggacgccgaagggggaagaagaccccgagag

SEQ ID NO: 55165 - RNA, 91 nt, Homo sapiens
ccaaaacagcaacccaaacacagaagcgcacggggcaacagccacacccggagcacccaccaaacacagcaaacgcaggcagcagcaggcc

SEQ ID NO: 55166 - RNA, 78 nt, Homo sapiens
ccccaccgaacccaggaaccgaagaacagacccagacccaccagccacaaaccagccagcacaaaggagagaaagggc

SEQ ID NO: 55167 - RNA, 53 nt, Homo sapiens
gcccagcccccgagggcgggaacaggcccgccgcggacagccgacgccccagg

SEQ ID NO: 55168 - RNA, 81 nt, Homo sapiens
caccagaaagacggaaccaggaagagagacgacgggcaacagacagaccagcagaagagacacgggagcaccagggcggca

SEQ ID NO: 55169 - RNA, 74 nt, Homo sapiens
cgaggccagagaaagagaagcggcacccccaggaagcgcggaagagccagaagggaaacggacaaagggaaaag

SEQ ID NO: 55170 - RNA, 81 nt, Homo sapiens
ccgccacccgcccccaccaggccgaagagaaccacaaggaccagccaaggaagcaacacagcagcgagagaagcagaaaaa

SEQ ID NO: 55171 - RNA, 77 nt, Homo sapiens
aaagacgaaaaaaggagaagcggcgaccacaaaaagacaagggaggcgaggacggacaaaaggaaacggacgggagg

SEQ ID NO: 55172 - RNA, 59 nt, Homo sapiens
acgggggaggaggcaacgccgcggcagcagagcgggagcgacagggagaagaagcgaag

SEQ ID NO: 55173 - RNA, 72 nt, Homo sapiens
cccgagcgccggcaggggccccacgggaagccccaggggcacgggcacagcccagaagaccagcgagaggcg

SEQ ID NO: 55174 - RNA, 66 nt, Homo sapiens
cgggaccacagagagcacgagaacaaaccgaaaaaagcggcaccaagccaaggagggacgaacgac

SEQ ID NO: 55175 - RNA, 57 nt, Homo sapiens
agaggcaccggaggagaaagcaacgaggcgagcgaagaaagccggacgcccagagaa

SEQ ID NO: 55176 - RNA, 41 nt, Homo sapiens
aaccgaccgggcacgaggagaaggaggccccgcgccaccgc

SEQ ID NO: 55177 - RNA, 80 nt, Homo sapiens
accccgggcggccgcaccgccaggaagaaacgcgcacaagcgaccagcagcagcagcggccccccccgaagagccagccg

SEQ ID NO: 55178 - RNA, 75 nt, Homo sapiens
gaaaaccaaaaagaagggagaaaaaaggaccagagccagacacgaagcagcagcaaagaacacaccaagagacag

SEQ ID NO: 55179 - RNA, 76 nt, Homo sapiens
gccccgaaccagcaccacagaaggacgaagagcgacaggaaaccaggaggcccagcacgaacagagaagagcgaac

SEQ ID NO: 55180 - RNA, 69 nt, Homo sapiens
cggcccgggagacacacagcaggggaggacccggccaggaccgcaggggaaccgcacgcccgggcaccg

SEQ ID NO: 55181 - RNA, 65 nt, Homo sapiens
cgagacgggcggagaggagaaggcccgagggcccggaaaggggagcacagaggcggaacaagaaa

SEQ ID NO: 55182 - RNA, 68 nt, Homo sapiens
acaggaaccccagggaagggggagcaacagacaagcccgaaaggaacagcagcaggaacgaaacccca

SEQ ID NO: 55183 - RNA, 90 nt, Homo sapiens
acgcagccgagacaccagcccgaaacaccaccaagaacaccccaccagaccacccagcaagcccacaaaaaaggcacaagcagggacagc

SEQ ID NO: 55184 - RNA, 96 nt, Homo sapiens
ggccgcccaacgccagaacaacggcccaacagcggaggaaacccgggccagcgggggggcggccccacgggaaacaaaaagaacaccagacaaacc

SEQ ID NO: 55185 - RNA, 80 nt, Homo sapiens
ggagccgcagccaaaagggacaggagaagaggggaagaagaaagccagaagagcagagaaggccggaggaagaaccccac

SEQ ID NO: 55186 - RNA, 90 nt, Homo sapiens
acaacgagcgcgagaaccgccgccacggggcgcgggaaaagccccgagagaaacagccaacccgcaacaacggcagaagaaaagcccgga

SEQ ID NO: 55187 - RNA, 63 nt, Homo sapiens
agggaccaccccagaacccggacaacggcgcgcagggacacacagacacgcaagaccaccaag

SEQ ID NO: 55188 - RNA, 74 nt, Homo sapiens
ggaaggaccaaacggagaaccagaaaacaggaagaggcagagaagagagaccaacccgagaggccgacagcagg

SEQ ID NO: 55189 - RNA, 79 nt, Homo sapiens
gcgccgcggagaccccaccgccggcgcgggaaacgggcgaagcgacgagccgcgaggaggcggcgcccagcggccacac

SEQ ID NO: 55190 - RNA, 64 nt, Homo sapiens
aggcagacaaaagggccaaagaagggagagagggcacaagaaaccaagaagaaggagaagagga

SEQ ID NO: 55191 - RNA, 76 nt, Homo sapiens
gaagaagagcagaacccaggaagaggccaacccaagcgcgaccacaagaaaaagaacgacgcaagaacaaaccagc

SEQ ID NO: 55192 - RNA, 75 nt, Homo sapiens
cgcccgcccaaggggaagacaccggaaggggggcagaaagaagaggaggacaacaagccaacagagagagacgaa

SEQ ID NO: 55193 - RNA, 85 nt, Homo sapiens
gggaccccaggagggggacaggaggcgcggggcccagggcaccaagaggcccagcccggccagcaggcagcacaccacaaaccaa

SEQ ID NO: 55194 - RNA, 54 nt, Homo sapiens
ccaacacagagccaagcgccaaacgaacaggacaaggaacggagccccagcggc

SEQ ID NO: 55195 - RNA, 74 nt, Homo sapiens
ggaggcagccggcacagcgaaaggagcagacagaaggcaggagaggaccggaaaagacccaagcgcaagcgaca

SEQ ID NO: 55196 - RNA, 78 nt, Homo sapiens
ccgccaggggaaaggaagggccaaggcgacagagccgagagaccagggcgaccgcgggaacgggaccagaccccggag

SEQ ID NO: 55197 - RNA, 52 nt, Homo sapiens
cgcggcggaccccacaaaagcgggagcgcacacgacaaaagccgaagacaac

SEQ ID NO: 55198 - RNA, 78 nt, Homo sapiens
gacaagacgaccacacggaaaagccagagccggaggcccacgaaaccaaaaggggcaaccaagagagcagaccagcga

SEQ ID NO: 55199 - RNA, 81 nt, Homo sapiens
ccccgcacggagccgaagggaaggcgcgcaggcgcccggcgcggagacagccagagcgggacggagcgggccaccggggcc

SEQ ID NO: 55200 - RNA, 100 nt, Homo sapiens
caggcagacggcagaaaacagacgaagcaacagcgaacaaaaaagggacaggagacagacgcagccgaggaaggggcacccacagccaacccaacaagag

SEQ ID NO: 55201 - RNA, 71 nt, Homo sapiens
cgggaacggcccgaggcgcgccacgggacagccaacaccagaccgagcccacgcgcgccacagggagggga

SEQ ID NO: 55202 - RNA, 54 nt, Homo sapiens
cagaccaaacaaggaaaaagaagggagcgaggagccggggcaggagaaacaaca

SEQ ID NO: 55203 - RNA, 85 nt, Homo sapiens
acaccccgggcacaggagaggaagacagagccagccaggaaaggcaggagaggagcagcaaacaaaagagggccaccaaaccaag

SEQ ID NO: 55204 - RNA, 88 nt, Homo sapiens
agccggggcccgagccccgcccggcccgggccagcgggggcgagccacagccagcagccgggccgcccaccacagcccaccgggagcc

SEQ ID NO: 55205 - RNA, 64 nt, Homo sapiens
cagacgcagggcgcccccgaagggcacggagaaaaggacgaacagcaaagaccgcgcccagcga

SEQ ID NO: 55206 - RNA, 78 nt, Homo sapiens
cgcaggccgcgacgagggcgcgaggaaggagagcgcgagagaaggcaaggggaaagaaagcacaagaggaggagagga

SEQ ID NO: 55207 - RNA, 85 nt, Homo sapiens
gggagacaccccgcgcgacagaaggccccgacaagcccaccaggcccccgcgagaggcggacccgggcgacccgcccagggcaca

SEQ ID NO: 55208 - RNA, 128 nt, Homo sapiens
caggacggcagggcccccggagggaacccgcccccagggagggaacaaagcccacagcaccggcgccggaggggagaggagcaaacaacaccccgagccaccaccacgggacagcacgggcagaccga

SEQ ID NO: 55209 - RNA, 53 nt, Homo sapiens
gaagggagggagacaaggagagaagaggggcaaggccaggcccgagagacaga

SEQ ID NO: 55210 - RNA, 77 nt, Homo sapiens
ccgaagacccggacggaaggagagacagagcaacggggggaaagcagcaggggccagaagacaaaaccgaaccacag

SEQ ID NO: 55211 - RNA, 80 nt, Homo sapiens
agaagcacaaggacagagcacccaccacaggaggcaagagcgaaggagaaaggcaacaaggcccgagcggggaacacgag

SEQ ID NO: 55212 - RNA, 80 nt, Homo sapiens
acagcacaagcacagccgcgccagccaaacccaggagaacacaggaagcggaggaggaagaagcaaagggggccgcgccc

SEQ ID NO: 55213 - RNA, 61 nt, Homo sapiens
accacaagacccaggccacgccgagccgccaggcagcaggacggaggacgcgagagcccac

SEQ ID NO: 55214 - RNA, 78 nt, Homo sapiens
acggaagccaagcagacgccagcagcgcgggacggcgcaccgggacagcgccgggccgcaagacagcccgggacaaca

SEQ ID NO: 55215 - RNA, 72 nt, Homo sapiens
caaacaaccgccgaggaccgcccgccgaggacgaaagaaagaaacacggcccgcggcaaagcgcgcccaccg

SEQ ID NO: 55216 - RNA, 79 nt, Homo sapiens
gcggacccgaagaaggacggcgacccgccgaagcaccgcgggcgcgcgggcagccggcgggggcagcgccagagagagg

SEQ ID NO: 55217 - RNA, 80 nt, Homo sapiens
ggacacgacaagaaaaaaaagcgcggagacaaggaagcagccaacaggaacgcaagcacaggaccagaaacgaaaggcag

SEQ ID NO: 55218 - RNA, 63 nt, Homo sapiens
gaggaacacaaccagggagcggggccggcagcggggaccccaggcagaggcagggcgccaccg

SEQ ID NO: 55219 - RNA, 65 nt, Homo sapiens
ccagacaaagggagaggggaccgacacccaacaggcacgcgagaaggggagggggagaaagaaga

SEQ ID NO: 55220 - RNA, 84 nt, Homo sapiens
gacaggccccgcaccgggccagcaccaccaacgccaccaggaccccgaccgagggggaaagcagcaggggccagaagacaaaac

SEQ ID NO: 55221 - RNA, 74 nt, Homo sapiens
ggcaccgcccggagggggccccaccgggcccgaaggcgcgcccacgccaaaaagggaaaaaagagagccacgac

SEQ ID NO: 55222 - RNA, 80 nt, Homo sapiens
cgcaggaccggaccgggggagcggcggagaaaccaccacaaacacgaggccagcaacgaccaacaagacagacccgccca

SEQ ID NO: 55223 - RNA, 83 nt, Homo sapiens
acgggcgaggggccaccagcaaacagcacggccacaggccccagccacagggggcggccccgggcaggggcgcggagaaacaa

SEQ ID NO: 55224 - RNA, 71 nt, Homo sapiens
aaagcacagaggaacacacgagcagaagacaaaaaggcaaggcaaaaccaaaaggggcacgaaacccaaaa

SEQ ID NO: 55225 - RNA, 82 nt, Homo sapiens
gcaccgcgaagagccccggcaagagggaaagcaacggcgcaagcggcggcggcgggcagaggacacacagagcaaagaagga

SEQ ID NO: 55226 - RNA, 59 nt, Homo sapiens
gcaagaaacgggaagacacacccgacccagccagccacagaccagccggggggcagcag

SEQ ID NO: 55227 - RNA, 72 nt, Homo sapiens
agcgggcccccagcgaaaagagggcaacgcggcccacaggcgcggaggggagccacccagacccggccggga

SEQ ID NO: 55228 - RNA, 101 nt, Homo sapiens
ggccgcccccagaaccgcccaaccgcacggcaccccccacggcagacacagcaggccaacccagaaccaccgaagaagaaaagacaaacgaaaaagacagc

SEQ ID NO: 55229 - RNA, 58 nt, Homo sapiens
cgcggcacggcaccggcgcccaggaacagcagggggaggcagggacggaaggacgccg

SEQ ID NO: 55230 - RNA, 77 nt, Homo sapiens
accacaagcaagcacgagggcaagaggagagggcgaagcaacaagagagaccagcgaaaaaaaagagcggcagacaa

SEQ ID NO: 55231 - RNA, 78 nt, Homo sapiens
gaaaagaagcgaaccaggaagaagagacccagccccaccaggcgcaaccgaaagaagcgggacgggggagggccgggg

SEQ ID NO: 55232 - RNA, 79 nt, Homo sapiens
agggccacaaccagaagaagacaagccgggggacccggggccggaggagcaggaggagcaagcacaacaggccgaagag

SEQ ID NO: 55233 - RNA, 75 nt, Homo sapiens
agggcgggaccaacagggagccagcccaccacaaaccaaacgagcaagaaggagcgaggcagagccacaggagaa

SEQ ID NO: 55234 - RNA, 79 nt, Homo sapiens
ggcggagccgaccaggccgacgagagggaccagaagccaggagaggcgccgggacgggcgcacgccacgcaagaccaac

SEQ ID NO: 55235 - RNA, 76 nt, Homo sapiens
cgggggcagggggcccgggacagaaaaaggcacaaacccagcacagagaagacggcgacaagcaaaagacgacgca

SEQ ID NO: 55236 - RNA, 75 nt, Homo sapiens
agagggggcgcccagcgccaacaccaaggcgcccggcgcaggccaaagggcccccgaaccagcgaaaacaaaccc

SEQ ID NO: 55237 - RNA, 82 nt, Homo sapiens
accgacgcagaggcgcggccccaggcgcagagcccaagccacccagggaaggcaacaggcaaccagcaccagcagagagaag

SEQ ID NO: 55238 - RNA, 88 nt, Homo sapiens
gaaccgggaggcccgccagaccagcaagaggaggggcccggagagggggaagggcccaaagccagaagacccccaccgggaaccgaac

SEQ ID NO: 55239 - RNA, 87 nt, Homo sapiens
gaagcccgcggccggaggagccgcaggggcccggacaaggaggcccagcccccggacacgggcggccggaaggcgaggccccgccag

SEQ ID NO: 55240 - RNA, 41 nt, Homo sapiens
aggccggagcgggaaggagaaaacccgcagcccaaagggca

SEQ ID NO: 55241 - RNA, 81 nt, Homo sapiens
cggaaacggaaccgggaggcgacgcacacgagcggaggcgaagaggcggagaagaacccaaccaaaaccaggcggcaaccc

SEQ ID NO: 55242 - RNA, 39 nt, Homo sapiens
agcaaaccacacccacaagaaccgggcggggcggcccaa

SEQ ID NO: 55243 - RNA, 97 nt, Homo sapiens
cacaccaccgaagaacccgaagaaaagcaacgggcagacagaggacccacgaggaggaaccaggcacccccagacgaggggggacacgccgccaccc

SEQ ID NO: 55244 - RNA, 63 nt, Homo sapiens
gcccgcgaacacacgccgccaccgggaggcccagggaaggccggggggggcacagagccccgg

SEQ ID NO: 55245 - RNA, 80 nt, Homo sapiens
cacggacaggccgcagccgccggggcaggcgcccaggcgcgaggcgcagacccagcaccgcaaggggagcggggagaccg

SEQ ID NO: 55246 - RNA, 56 nt, Homo sapiens
cgcaaccgcgcgcaaaaaccaccgggccaggagcaaccacagcggagcgagagcgg

SEQ ID NO: 55247 - RNA, 74 nt, Homo sapiens
ggagaaggaccaagaaccagaccacaggcaaagacacggcagggggcacaaaccacggaccaaaaaacggacag

SEQ ID NO: 55248 - RNA, 65 nt, Homo sapiens
cgccgacggacagccccgccaagagcaacggacccaaagagggagcaagaagggaagcaggccag

SEQ ID NO: 55249 - RNA, 76 nt, Homo sapiens
aaaagccccgaggcagcacaacaagaaaaagaagcgaggacacagaccgaacacagaccggggaaccagcacccca

SEQ ID NO: 55250 - RNA, 72 nt, Homo sapiens
ggcggccgggccggcggcacagccaaggccccgaagcaagagccaccgcgagaaggcccaggacagagcgcg

SEQ ID NO: 55251 - RNA, 99 nt, Homo sapiens
ggaaaccagcccagccggcagcacaccgaccaccgcaagagccacagacaaggaggagaaggggaggagggccccagcgaggagacaccaggagcccgc

SEQ ID NO: 55252 - RNA, 57 nt, Homo sapiens
cacaacccaggcaaccaacagggcggagaacggaaaagcaccaggaagcagagagga

SEQ ID NO: 55253 - RNA, 58 nt, Homo sapiens
gcagaacccagaaacagggagaaacgccacaccgggaaaggagggcccagaagccaag

SEQ ID NO: 55254 - RNA, 77 nt, Homo sapiens
cggccggccgggcggcgagccgagcgaggcagccgagccgcgcgacaggaagggaaggggcggagacgggcggaacg

SEQ ID NO: 55255 - RNA, 70 nt, Homo sapiens
ccgaacagcccgggggaaccacgcggggccccagcggcacaggagcaccaggccaagaaccccaaaaaca

SEQ ID NO: 55256 - RNA, 81 nt, Homo sapiens
aaccagggacagagccaccccacccggagacgcgcccaggagaaaaacagaagggcagccaggggagcagaagccgcccgg

SEQ ID NO: 55257 - RNA, 89 nt, Homo sapiens
gaggaggcccgggagcgccgagcgcgccgccgccgccgccagaacaaccgggcgccgacgagacgggccgggcgaggaaaacgcaaggg

SEQ ID NO: 55258 - RNA, 72 nt, Homo sapiens
gcagaggaaccaacaaagaaggagcggaaaaccaggaacggccaggcccaagaggcagccgacaacgccaac

SEQ ID NO: 55259 - RNA, 65 nt, Homo sapiens
gcaggagcggcgcggagcggcgagggacccgcagggagccaccgaacgacagacccacccaccac

SEQ ID NO: 55260 - RNA, 69 nt, Homo sapiens
aaaaaaccacaaagcggccgaaacagaaaacaagagaccacagaaggaaaagggggccaggaagcaaaa

SEQ ID NO: 55261 - RNA, 54 nt, Homo sapiens
ggccaccgcgcccgacgagccgcaggcgaggagcaccccgggcggagaggcgga

SEQ ID NO: 55262 - RNA, 68 nt, Homo sapiens
gaccaagacaggaaaacccaggacaacaaacagcaagccggacacaagagggcaagaaaggcgcgacg

SEQ ID NO: 55263 - RNA, 85 nt, Homo sapiens
caacagccacccgaaaacacagaccacaggcaaccacgagaaaacggaaccgaaagcaagaggacaagaagaggggaaaacaaga

SEQ ID NO: 55264 - RNA, 40 nt, Homo sapiens
cgcgacagacggcaagaaaggaagagaaacgccagagaaa

SEQ ID NO: 55265 - RNA, 80 nt, Homo sapiens
ccaaaccccaggccaagcagccaccagcagcccccagagcgggaccacagacagaaccgcaaggccacaaaccagacgga

SEQ ID NO: 55266 - RNA, 73 nt, Homo sapiens
cgacaccccaggcagcacagaagacggaccagaaggagacgccgagagcagaaacccggacgacggagaaccc

SEQ ID NO: 55267 - RNA, 103 nt, Homo sapiens
agggaggcagggagcggacaacgccaagcaaaagaccacaaaacagcagcaagggggcagcggcaagcaggggagccagccacacagagacagaccaccgaag

SEQ ID NO: 55268 - RNA, 56 nt, Homo sapiens
acccaaccaagaaggcccaggagcagccggagccagccggcacaccccccgcggga

SEQ ID NO: 55269 - RNA, 80 nt, Homo sapiens
gaagacggccaggccggccggccggacaagcccaggagccgaccagagagcagagccaggacaaaaccaggcagaaccaa

SEQ ID NO: 55270 - RNA, 68 nt, Homo sapiens
agaaggaccaagaaccaggacaccccccaggcacagccacaccccagcggccaaggacgaacggggaa

SEQ ID NO: 55271 - RNA, 86 nt, Homo sapiens
gccgccgggcagcgccgcgcgacgcccccgaggaccggccgaacggcgcaggggccgcgcggcaagggccagaacccgggagcaca

SEQ ID NO: 55272 - RNA, 59 nt, Homo sapiens
caaaggcacaccaccacaaacgaagagggaaaaaaaggaggaggaggccggacaagccg

SEQ ID NO: 55273 - RNA, 52 nt, Homo sapiens
gaacacgagcaggggcccaaaagacggaaagggggcgaacagcgaccagagg

SEQ ID NO: 55274 - RNA, 57 nt, Homo sapiens
agcagaagaagaagggaccccaaaagagccaagcccagagaggcacggagggaagca

SEQ ID NO: 55275 - RNA, 75 nt, Homo sapiens
gaaaggaagaggagacagagggccgagaaggacaggacagcccagcaacgggagcagaaggaaaaaaaagcagaa

SEQ ID NO: 55276 - RNA, 80 nt, Homo sapiens
cggagaggaggaaaaaaaggaccaccccaacaggaaacaagggaaaggagagacaagaggaagaacaagaaaggaaaagg

SEQ ID NO: 55277 - RNA, 72 nt, Homo sapiens
cgccccggcagcgcaaacgggcgcgacccaaccagcagaccaagaggggggagaccggaggacccccaaaca

SEQ ID NO: 55278 - RNA, 58 nt, Homo sapiens
cagggacaaaacagggcgcaggggacccccgcccacgaccgccccagcagggagaggc

SEQ ID NO: 55279 - RNA, 79 nt, Homo sapiens
ggaagaagaagacaagcgggcagaaggcgggacaaggcaccagcaagggaccagaggagacaagccgggcccaaaagag

SEQ ID NO: 55280 - RNA, 77 nt, Homo sapiens
accgcgggccgcagccgccggcaagccgcgaaggaaggcacggggccaaaaaggcacgagggaacgggaaagaacag

SEQ ID NO: 55281 - RNA, 61 nt, Homo sapiens
gaaagcccgggccaagcgggaggcgcccgagccagcagcaccggaacaccaagagaagaca

SEQ ID NO: 55282 - RNA, 59 nt, Homo sapiens
aggagacggaagaagcccaagaaaaacggacccggcgagaagcaaagaagggaacgcgc

SEQ ID NO: 55283 - RNA, 59 nt, Homo sapiens
ggggagcccagcggcgcgccggcagcagccaccagcgacggaaccagcaaccgcaggga

SEQ ID NO: 55284 - RNA, 71 nt, Homo sapiens
cacccagacggagaaccgcaggaaagagacaagaccagccagcggccccgagaaacccaagaacagaccgc

SEQ ID NO: 55285 - RNA, 72 nt, Homo sapiens
agcgcgaaagcgccaaaaggacagcagggaaagacaaggagccgggccgagaaaccgaaccagagaccagag

SEQ ID NO: 55286 - RNA, 68 nt, Homo sapiens
gaaggaccaagaaccaggcccaaagggggaaaagcagcaacaaagcaaaacaagaacagaggaagggg

SEQ ID NO: 55287 - RNA, 71 nt, Homo sapiens
acgcagagagaacagggcaacaggccgcagcaagaaggaacgacaaggcgcccagacaagccgagaaagaa

SEQ ID NO: 55288 - RNA, 76 nt, Homo sapiens
gacagagggcaagaacgccacaccgaaagaccacgccgcacgacccccggaaggacacagcaggggccagacaacc

SEQ ID NO: 55289 - RNA, 73 nt, Homo sapiens
ccacgagcgggagcgaagagggaaccagcgcgcggcagccgcgacggacccggcccaagccccacaccggaag

SEQ ID NO: 55290 - RNA, 77 nt, Homo sapiens
ggaccaacaaccggaccgacaaggcaacagcggggaaagcacccaaaggagcccccccagagcgcaagcgaaaaacc

SEQ ID NO: 55291 - RNA, 87 nt, Homo sapiens
ggcgacaggacaggaaacggcacacgcaaccgcgggcagggagcgccgccgccagccgccagggcaaacagaacagcaagcgcggcc

SEQ ID NO: 55292 - RNA, 79 nt, Homo sapiens
acgggaccgggaccgcgcggacccggccgggagaagcagcagcgcaaggggggaaggacaccccgaggccaagcagaaa

SEQ ID NO: 55293 - RNA, 80 nt, Homo sapiens
gaggcaggaccggggccaaaagccaagggcgggagagggcgccccccaccagacagcaggccaccaggccagagaaaagg

SEQ ID NO: 55294 - RNA, 72 nt, Homo sapiens
ggcacgccgcaggaagagaagaggaggggcgccgggcggggcagcgcaccgcacggcgcggaacgcgcccag

SEQ ID NO: 55295 - RNA, 82 nt, Homo sapiens
ccgaccgcaccgaggccacgaaggggggaccgagaacgagcggggagagaggggagcgcacaagggcagcccccccggaaga

SEQ ID NO: 55296 - RNA, 72 nt, Homo sapiens
acgaaagaaaggagaccaaccaccagggaaagaaaggcaaagcgagcaagagggagaccaaccaggcgggaa

SEQ ID NO: 55297 - RNA, 36 nt, Homo sapiens
acacagggaaagcggaggacggagcgccggcccagg

SEQ ID NO: 55298 - RNA, 76 nt, Homo sapiens
ccgccacccagagcgcacggcgacgccccaggggaaaacccccgggaccaggcagcgccccaaccccagaaccgcg

SEQ ID NO: 55299 - RNA, 80 nt, Homo sapiens
aagacccgcggcaacggcgccggcaggcacaacaaccaagaaaaacgggggccgccgccaaggccggaacgaacccgcag

SEQ ID NO: 55300 - RNA, 75 nt, Homo sapiens
ggggaaagcacccaaaggagccggcggggcccggaaacacaacccagaaaggggaaagaccaacgggaggagagg

SEQ ID NO: 55301 - RNA, 84 nt, Homo sapiens
gagaccaaacgcgccgacggcgaagaaaggggagcgaggaaaggggcggccgaggccaggaagcgcagcccccgagcacccgac

SEQ ID NO: 55302 - RNA, 81 nt, Homo sapiens
gagagcaagagggcaccagcagcgacggagccacccgcgaaaacggccagggccgccggacccggacaggaccacccaaag

SEQ ID NO: 55303 - RNA, 56 nt, Homo sapiens
cacaaaaacaacagcaacaaacgaaagccacacagcagcgagaggaagaaaggaca

SEQ ID NO: 55304 - RNA, 65 nt, Homo sapiens
caaggacaaccgccagaccggccagccgagccggccaggaccagggggaacccgcagcagcacag

SEQ ID NO: 55305 - RNA, 81 nt, Homo sapiens
cagcgagcgaaccagaccaaaaacgcaacaacagacggggaaggaacaaagcagagaaaccaaaaggccagacgaacacga

SEQ ID NO: 55306 - RNA, 82 nt, Homo sapiens
gacgcgcccggcccggacgcgcccgcgcccccgcggcggaggggggccgagacacagcccaccgcaggcggggaagacgccc

SEQ ID NO: 55307 - RNA, 70 nt, Homo sapiens
gcggcgcggcgcgccccggaccggcgcggggacgacgagcccacggcacaacggaccgacagagcagcaa

SEQ ID NO: 55308 - RNA, 72 nt, Homo sapiens
gagggccgcaagagggaggagggcagggagggccagcgccggggggcggacacggcacgcaggacacaccaa

SEQ ID NO: 55309 - RNA, 57 nt, Homo sapiens
gaagaacagcaagggccaacggaagccagagaaagacagcgcgggagccaggaaacg

SEQ ID NO: 55310 - RNA, 81 nt, Homo sapiens
cgccccggcccccgccccagcccgccggcggcggcgggcagaaccaggcccaggccagagcccgggcagcacagccaggcc

SEQ ID NO: 55311 - RNA, 36 nt, Homo sapiens
gccgcaaccccaagccgcaccgagacaaccaagcaa

SEQ ID NO: 55312 - RNA, 80 nt, Homo sapiens
cagacacagggaaagcggaggaccaagcccacgaagaccggagaagaggacggcgccacccgccacccacgagcccggcc

SEQ ID NO: 55313 - RNA, 79 nt, Homo sapiens
cccacagaaaagccacaacccaggaagcgcggacgcccccgaaaagcagggaccagcgggcgccccccagcagggaaag

SEQ ID NO: 55314 - RNA, 79 nt, Homo sapiens
caaacgccggggaccccggcagccacccaccgccgccgcccccagggcggagaacggaaaagcaccaggaagcagagag

SEQ ID NO: 55315 - RNA, 112 nt, Homo sapiens
acagcaggacagcacaaggcaacaagaagaggggagcccaggcccgagccaccaacgagcagagcacggcagacgaggcccacgagcggacccgccccagaccacacgaccg

SEQ ID NO: 55316 - RNA, 89 nt, Homo sapiens
ggccaccgagccagggccagcggcccagaaggagcaggagcagccagagccaaagaagccgcaggcggagaccagaaggccaaaacaaa

SEQ ID NO: 55317 - RNA, 72 nt, Homo sapiens
cgcgcggagccgacacgggaggaacgacggaacaagggagaagcggagcaaggaagccaagagaccagaaga

SEQ ID NO: 55318 - RNA, 73 nt, Homo sapiens
accacgccccagcagcaggaagggaagcgcagagaagagaaaaacccagaaaacgaaggcgaacaaaccccag

SEQ ID NO: 55319 - RNA, 79 nt, Homo sapiens
gcggccagaagaaaacgaggggcggaacacccgccaaagcagagaaaaggcacagaccaaaacggccgggaaagaacca

SEQ ID NO: 55320 - RNA, 78 nt, Homo sapiens
acaggggaggagacaaaaaggccaaggccacagggaagagcacgagaagaagaggaggcgaaaacaggccaaaagaaa

SEQ ID NO: 55321 - RNA, 86 nt, Homo sapiens
aagaagcagcggacccgcgggagaggcgcagcggaggcggaagcaggaccggggcacgggaaaaccgagccaaagcagagcaaacc

SEQ ID NO: 55322 - RNA, 65 nt, Homo sapiens
gcgggcgcccccagagaagacagagcggaacaggcgaaagggcgggggcgccgaggaagaaccgg

SEQ ID NO: 55323 - RNA, 74 nt, Homo sapiens
ccggcccgcggccaccaccgggaccgccgccggccagcgagcggcacaccacggcgaaccccccggccgccggg

SEQ ID NO: 55324 - RNA, 63 nt, Homo sapiens
cgaacacaaagcaggagggagagggccaagaagcagcggacacgacaaggcacgaggcgcggc

SEQ ID NO: 55325 - RNA, 50 nt, Homo sapiens
ccaggaaagacaggaggccacccccaaagaaaagggggccaccgggcaca

SEQ ID NO: 55326 - RNA, 74 nt, Homo sapiens
aaaccaaacagagggagcagcaaggacagcagccagaaagcagcgggggacgaagaagaccccaacccaaacca

SEQ ID NO: 55327 - RNA, 60 nt, Homo sapiens
gcagggaagccaccagcgccgcgacagaggagcagcaagcaccgcacccacaaagccaag

SEQ ID NO: 55328 - RNA, 82 nt, Homo sapiens
cagcccccggccgggcagagagaaagaaaaaagcccagcgagcaccaggaccacaggcacaaggcaacccgagacccaaggc

SEQ ID NO: 55329 - RNA, 84 nt, Homo sapiens
ccgcccaggggccaggcgaagcacgagcagaccggcccgaccgcccacagacccaaacaaagcgcaccacccggagcgagacgc

SEQ ID NO: 55330 - RNA, 74 nt, Homo sapiens
accagccagccagacaccgccacagcccccagggaccaaaagacacagcagggacgaaggagaaacagaggcgc

SEQ ID NO: 55331 - RNA, 35 nt, Homo sapiens
gcacccaaggaagcaccgaggagccgccggcccag

SEQ ID NO: 55332 - RNA, 74 nt, Homo sapiens
acgcgcgggaccccgggcacggcgcgcgggaggagaccgaggacaggccggacaccgcagcccaaaggagagag

SEQ ID NO: 55333 - RNA, 78 nt, Homo sapiens
ccgacagcacggggcagacaccgcccgaacacacaccgacagaggaagacccaggccccagcacaagacaacaaacac

SEQ ID NO: 55334 - RNA, 57 nt, Homo sapiens
cgacaagggaggcgccgccagcggccgggaccgaacaggcgaggaacggccacaaac

SEQ ID NO: 55335 - RNA, 75 nt, Homo sapiens
agaacaccaacacccggaggcggaaagcgaaggccaagcaaggcaaggggagagcaacggccggccagcacacca

SEQ ID NO: 55336 - RNA, 82 nt, Homo sapiens
gcgagaagcagccgcgagggcgcgggggagagggggaggccggcgcggcagcgcccccaggagggaagccacacgggacagc

SEQ ID NO: 55337 - RNA, 82 nt, Homo sapiens
cgacccaggaccagcaccccccagcccagggccgccggccaaggccaaacgaccaagaaagcgggacgcggaaaacgggacc

SEQ ID NO: 55338 - RNA, 70 nt, Homo sapiens
gcacacaaggacccaaagacaagcaaaagagcaaagccgggcggacaggcacggggaacaaccaaccaag

SEQ ID NO: 55339 - RNA, 66 nt, Homo sapiens
caaaagcccagaaagaggagccacacaggccggaagccacccagggccaggagaaacgagaagaag

SEQ ID NO: 55340 - RNA, 78 nt, Homo sapiens
ggaaaggcgggggccgccagccccgacgcccccaaccggcaggaaggaaacgcgcgccccgagacacccagaggggaa

SEQ ID NO: 55341 - RNA, 49 nt, Homo sapiens
aagcccacagacgaaaccaggcgcagggagcaggagaagcggagcgaag

SEQ ID NO: 55342 - RNA, 72 nt, Homo sapiens
gggcacgcaacccccccccgaacagcccgagagagacgcagcgcaaggccgggggaggccacaaaacaaagc

SEQ ID NO: 55343 - RNA, 51 nt, Homo sapiens
agccgcccggcagcagagaaccccccgcaggccggaaaagcggacccaccc

SEQ ID NO: 55344 - RNA, 81 nt, Homo sapiens
cccggggggaagaggaacagccaggggcccacggagcagcgcaaagcggagcccagcggccgaacaccgaaacaagaagcg

SEQ ID NO: 55345 - RNA, 64 nt, Homo sapiens
ggcggagccagccgaggggagaagagcccagagaccggagcgggcagggcacacaaccgggcag

SEQ ID NO: 55346 - RNA, 71 nt, Homo sapiens
gccaccgaagccaacgccaaaagcacagggcgcggagccaaggaagagcacggagcgcccagagcccacca

SEQ ID NO: 55347 - RNA, 81 nt, Homo sapiens
gccgcacccaccacgaaggaccggggagggcagcgccacccggcccgcccagagcagcaggggcccggccgacaagcccgg

SEQ ID NO: 55348 - RNA, 90 nt, Homo sapiens
gcaggaccaccccgcacaccacccaaggaaggaggaagaggagcgaaggcggcggaagaggaagaaagagaacgcgcaaaaggaggaaga

SEQ ID NO: 55349 - RNA, 77 nt, Homo sapiens
agcccagagcgggaccagcaagagcacacggaaggaccggaaacaaagaacacaccggagacggagccggagcgcca

SEQ ID NO: 55350 - RNA, 69 nt, Homo sapiens
ggaaccaccaccacagacccagacagaaaggccacccacaacaaagaacagaaaccaaaaagagcagaa

SEQ ID NO: 55351 - RNA, 58 nt, Homo sapiens
cggaacggcgccccgggcaccgggccgccaggagcgagacaccgggaagcccacggga

SEQ ID NO: 55352 - RNA, 76 nt, Homo sapiens
cagcagagcaggcagggcagaagaaaagagcccgacaaggagcggcagaccgagacagagaggccgagaaggacca

SEQ ID NO: 55353 - RNA, 64 nt, Homo sapiens
gccggggccggggcgccgccgggcggccgggcgcggcgagcccaggaccaaagggaggggaaac

SEQ ID NO: 55354 - RNA, 85 nt, Homo sapiens
agcggacggcgccgacagcgggccacccacgcaagaggagccaggagcacggggggaacaagaccgccgggacggaagacgggag

SEQ ID NO: 55355 - RNA, 58 nt, Homo sapiens
gcgacgcaaggcgacgggcgggcggagaacggaaaagcaccaggaagcagagaggacc

SEQ ID NO: 55356 - RNA, 70 nt, Homo sapiens
ggaccccggagcccagaagacagagggcgagcggcccagcccagcgcccgacgccacccacccccggcca

SEQ ID NO: 55357 - RNA, 35 nt, Homo sapiens
ggagacccgaagcagaagcggacaggggggcagcc

SEQ ID NO: 55358 - RNA, 81 nt, Homo sapiens
cagcggcagccaggaagaaccccccacccagagcccaaacgagaaggaagccgcggaggaccgagcgcacagacaaccagg

SEQ ID NO: 55359 - RNA, 42 nt, Homo sapiens
ggcgcagaacccccagaccacacccccgggaccgggccgccg

SEQ ID NO: 55360 - RNA, 76 nt, Homo sapiens
cagcaccccacgcgagaacgaccacgcagggacagagagggaaagccggcccacgagaccccaagaccgagcagga

SEQ ID NO: 55361 - RNA, 77 nt, Homo sapiens
ggccagcgaaaacgcccagacccaagaaaccgagagacacaccacaaccacaggccgacggagcccgaacaccagcc

SEQ ID NO: 55362 - RNA, 54 nt, Homo sapiens
cgcaggaagagaccagaggacagaccgaagcaaaggggacaccagcagcgccgc

SEQ ID NO: 55363 - RNA, 72 nt, Homo sapiens
aaacccaccgagcccgccaaagcgccagaacacgccgaacgggaagggcgacaagaggcgaagaagaagaag

SEQ ID NO: 55364 - RNA, 114 nt, Homo sapiens
ggaagaggagaggggccgagcggggaagcgagcgcaccggggaacagaccgcagccgcccagacaggcagaaacgccaaccgcgccaacccgaggaccagaccgacaaacgagc

SEQ ID NO: 55365 - RNA, 81 nt, Homo sapiens
gcagacggcccaacgaggcgagggcgccccaggagacgcagggcggagaacggaaaagcaccaggaagcagagaggaccgc

SEQ ID NO: 55366 - RNA, 51 nt, Homo sapiens
ccaacgggcccgggcaagcacaacggggcgggacaggccagggacagccca

SEQ ID NO: 55367 - RNA, 81 nt, Homo sapiens
ccgcgacggaaagaggagagcccccaggcccagcagagcgcgcgaccgcaccacgacagcgaccacaccgacaaccagcgc

SEQ ID NO: 55368 - RNA, 82 nt, Homo sapiens
gggcgaccgcgaccaagacaggagccccacaccaagagccggggggggcacagagccccggaagacagcccccagcgaccag

SEQ ID NO: 55369 - RNA, 86 nt, Homo sapiens
ggcaaagccaccgacccaccgcgcccgggccgccggcaggcggccgcagcaacccgccgggacaggacacccagcaacagaccgag

SEQ ID NO: 55370 - RNA, 72 nt, Homo sapiens
gggacagggaaagaagagcacccacagaaaacagggggcaaagcagcaggcgagaggcagaacccggaaaga

SEQ ID NO: 55371 - RNA, 73 nt, Homo sapiens
aacgagccgcgcccaccagaacgcggcacacgaaggaaaaagacccgagaagcgcagacccaccagggaaagc

SEQ ID NO: 55372 - RNA, 74 nt, Homo sapiens
cggcaagagagcccaaggccgcaacaccgacggccaggagaaagccaccaagaagaagccgggacccggcagaa

SEQ ID NO: 55373 - RNA, 38 nt, Homo sapiens
ccgggagaagcagcagcgcaagaccccggccgccccca

SEQ ID NO: 55374 - RNA, 57 nt, Homo sapiens
aaaaaagcggacacagcccagcacaagaccgcagagacaggcacaacaaaaccaaga

SEQ ID NO: 55375 - RNA, 116 nt, Homo sapiens
ggacggacgaggagacgaaccgagaaagacggcgacaagaacaacgacggccgcagaccgacgccgacacagcccccgaggagcagccacaccagccccaggcgcccccccacgcc

SEQ ID NO: 55376 - RNA, 77 nt, Homo sapiens
ggcaccgcggagcaaagaaaagagcccacaaggaagaacaaagacgagccagacccccaggaacccaacacagggag

SEQ ID NO: 55377 - RNA, 41 nt, Homo sapiens
gacccaggacaaggcacaagggcacgccagggccgacgacc

SEQ ID NO: 55378 - RNA, 90 nt, Homo sapiens
caggaaacaaagaaggcacgcagagacccacaacgagaaaacggcgaggcagggacagcgcgccagaccgagagaggcgaccaggccaag

SEQ ID NO: 55379 - RNA, 43 nt, Homo sapiens
aaccgggcgccgacgagacggcagaagaggcggccacccacga

SEQ ID NO: 55380 - RNA, 88 nt, Homo sapiens
gcaacccagaggccaaacaagaggcaaggggggaggagcgccgccccccgcacaaggcaggcagaggcaccaaggcggcagaaacaag

SEQ ID NO: 55381 - RNA, 68 nt, Homo sapiens
gcaaacccagccacccagcccaggaaacaacgaggagagccaccaagaagggggcccccaaagggaag

SEQ ID NO: 55382 - RNA, 59 nt, Homo sapiens
gggcagagcgcggcggcgcggccaaaccagaaaggggacagcggcgggcagggagcacg

SEQ ID NO: 55383 - RNA, 36 nt, Homo sapiens
cagggaaagacagcgggaggccagaggaagagaaac

SEQ ID NO: 55384 - RNA, 81 nt, Homo sapiens
cccacggacggacgccagccccacaacagacgaaaccccgacccccgagacacgcgcaagacgaggcgcccgggagaaggg

SEQ ID NO: 55385 - RNA, 72 nt, Homo sapiens
aggaagagccagaaggggacaggaagcgaaaagagacacacaacaaacaaggagcacgccagagaaaaaaag

SEQ ID NO: 55386 - RNA, 88 nt, Homo sapiens
ccgccggaagaggcacaggaggaagcaggcggagcacccaagaccaacccaccggcgccgaagcccccccaagccaggccacagagca

SEQ ID NO: 55387 - RNA, 72 nt, Homo sapiens
gaagagcgcagcaggcgggccaaccgacgcaagggcaggaacgcacagaaggcccaaggccagaaaaacgga

SEQ ID NO: 55388 - RNA, 68 nt, Homo sapiens
agccgcccaaaccagcagaaaaacaccaaggcagaaggaagaaaccaaacgaaacacaacgaccaacg

SEQ ID NO: 55389 - RNA, 83 nt, Homo sapiens
agagcgcccgcgcgcacgacgcgacccggggcccaggagcccccgccacgcccggggaagggaggagagaagggcggcagggg

SEQ ID NO: 55390 - RNA, 84 nt, Homo sapiens
cgcgacccggaccaccgggcgcggcgccccagccggaaaccccccaggcaagaggcgcaggaccgggaagaccaacaaacgcac

SEQ ID NO: 55391 - RNA, 77 nt, Homo sapiens
cagacccaaacaacggcagaagcagagaagaacaggcgagccagaaaaaagaagccaacgacacgggccggggcccc

SEQ ID NO: 55392 - RNA, 78 nt, Homo sapiens
ggcacagcacgcccggcaccccgaccaggggaggcaagcaggggggcaaaggaaagaaggcagaaagggaggccagga

SEQ ID NO: 55393 - RNA, 75 nt, Homo sapiens
acccgagcacagagacgaagaggaccaggagcaaacagaaggggaagcagaccaagaagacagaaggggcccgcc

SEQ ID NO: 55394 - RNA, 56 nt, Homo sapiens
aaaacagggcagccaggcaacagaaagccaaaaaggaaaggacgaggggcccacaa

SEQ ID NO: 55395 - RNA, 63 nt, Homo sapiens
cgcgccagaaaagccggcagagaagcgaaggagcgggaggacccaggggggggcagccgcccc

SEQ ID NO: 55396 - RNA, 80 nt, Homo sapiens
gagcgagggaggagagagggagagccaaagaagacaagggaggcgaggacggacaaaaggaaacggacgggaggccagcc

SEQ ID NO: 55397 - RNA, 78 nt, Homo sapiens
cccggggcgcgcggcaggccgaccccagcacgcacgagaccgcggcccggcacggcgaacgagcgccacagaggccac

SEQ ID NO: 55398 - RNA, 76 nt, Homo sapiens
cgggaacaaggaacccaggggacacccaagaccgggacagacgagggggggggccgggccccaggggacaggcaag

SEQ ID NO: 55399 - RNA, 60 nt, Homo sapiens
caggcagaccgaccaaacaggaagaagacggcacgggacccccagcacaggcagcaggcc

SEQ ID NO: 55400 - RNA, 80 nt, Homo sapiens
gcccgcgcagccgagagccgggggagcggggccccacacccccccgggggggaggcacggccggagaagagggcagggac

SEQ ID NO: 55401 - RNA, 83 nt, Homo sapiens
cgagccgggcccgagacagaggggcaggagcagagagcgagccaaggcggcacccaagaccagaagacgaggcgcagcgagag

SEQ ID NO: 55402 - RNA, 70 nt, Homo sapiens
cagaaagccgcagggggagccaaagggagcagaagaggggaagaaagagacccgcgggccccagacacac

SEQ ID NO: 55403 - RNA, 81 nt, Homo sapiens
ccccaaaggcgggagcaggcgcaagggagacgaaggcgaggccaggggaagaaagggaaagacaccgaagacagagaggga

SEQ ID NO: 55404 - RNA, 77 nt, Homo sapiens
ccaagcagaaacaggaggaaaggaaacaggaggcacgaaaagacagcagggggagcagcaaagaaaggagcgaagca

SEQ ID NO: 55405 - RNA, 82 nt, Homo sapiens
cccagacccagaaagcgacccacgaacacgcgcaaacaacacaagagaaaggacagggacaggaaagaaagaaaaagaaaag

SEQ ID NO: 55406 - RNA, 71 nt, Homo sapiens
ggagcagagccggaagcggcaggccacaaagccacagagcaacaccgccggaaccggacgggaggaacacg

SEQ ID NO: 55407 - RNA, 71 nt, Homo sapiens
ggacaacaggacgagaagagaggggcgaaaacgcggaagcggagacacaggcggcgcgggacgcagcgaag

SEQ ID NO: 55408 - RNA, 74 nt, Homo sapiens
ccgaggacgggaccaccagcccagggcccccgggaccaggccgaaagcgcgcgggccacggagaaggaccaaga

SEQ ID NO: 55409 - RNA, 77 nt, Homo sapiens
aggcccacacggcccgggcaagagagaggaccagaaccagaccggaaagcaccaggcaaagaaaaaaacaggagcca

SEQ ID NO: 55410 - RNA, 64 nt, Homo sapiens
gggcggcccaagggaaaagcagcggccgcaaggacagacccgagaaaccggacagcagaggaaa

SEQ ID NO: 55411 - RNA, 107 nt, Homo sapiens
cgaggagccgccgcgccccgcgcgcgggaagcagcaccaagcacggccaacgccggcacaggggccccgacgagaaggcaccccgaagagccagggcgaaagggcgg

SEQ ID NO: 55412 - RNA, 75 nt, Homo sapiens
gggaacacgaggacagacggcgacaccccaagagggccgccaccacgaggagcaacccccaaaagagcccagaaa

SEQ ID NO: 55413 - RNA, 78 nt, Homo sapiens
acgcacgcgaacggaaacgcagcaagacgagccgaggaaggcaccaggagaggaggaggggagacgcccaggcagaaa

SEQ ID NO: 55414 - RNA, 66 nt, Homo sapiens
ccgacgccaggcagcgcccccaaacggagagcgaccagggggaaccgaaggagccaggcagacagc

SEQ ID NO: 55415 - RNA, 104 nt, Homo sapiens
aggggggggcgcagacagagcgcaccacagaaagaggcggagcaagaagagaacaaggccccccaacagccccgccgaggcccccgccgcccagcaccgggccc

SEQ ID NO: 55416 - RNA, 80 nt, Homo sapiens
gacccaggagacgagagagcgaacgccagggacccggcaggccgcccccggcaaggcaccaacgagcaaggcgccaagga

SEQ ID NO: 55417 - RNA, 80 nt, Homo sapiens
aagagcggaggcggcccgcgggccccagggaaaggaccgaggcaggaaagaggccagacgcagggaccggcaccgacggc

SEQ ID NO: 55418 - RNA, 89 nt, Homo sapiens
ggccgcggcggccgcgcagggagcccgaggcaacgccggggcgcccgaggcggaaggcgcaggagggcagaagccaacagaaccaaccc

SEQ ID NO: 55419 - RNA, 81 nt, Homo sapiens
agaagacgggcaaccacgaagcaggccagcgggccggcggacggagcacgcagacccgcaaaggaacaggagacagcggag

SEQ ID NO: 55420 - RNA, 82 nt, Homo sapiens
agggagacggagggaacacaccaccaggacagcacccaacagagcagccccacagccgcccacgcacagcggaaggaagggc

SEQ ID NO: 55421 - RNA, 72 nt, Homo sapiens
ggagacggcacccgagagcagaggcgagcgggacgagaggaccgccgaagagcaccagagcgcaccccccga

SEQ ID NO: 55422 - RNA, 75 nt, Homo sapiens
ggagagccacggaagccgacagacaaccagggaccgagcccagaacccggacgggcagacaccaggagaagacgc

SEQ ID NO: 55423 - RNA, 79 nt, Homo sapiens
cacaccacgcagaacgcaacaccaaggcacaccaccccagggagcagaaagcgagaaaagaccggagagaccagggcag

SEQ ID NO: 55424 - RNA, 70 nt, Homo sapiens
cagcagaacagaaacaagcaggagagagccaaaacgacaggccagggaagaaaacaagaaggccaaagaa

SEQ ID NO: 55425 - RNA, 69 nt, Homo sapiens
gaaaacagcgaaagagagaaaccgcaggagccccggcaagcagcagcaaaccggacccaggagccccaa

SEQ ID NO: 55426 - RNA, 71 nt, Homo sapiens
aaaaggcagcgcacaagagagagccccccacgcaacacagggagggcagaccaccgccacaccagcaggga

SEQ ID NO: 55427 - RNA, 78 nt, Homo sapiens
gagaaagggcaaacgcagcacacaaggcagccccaagcaagaagaacgagacggcggaggcgcagccgccgcaccaga

SEQ ID NO: 55428 - RNA, 84 nt, Homo sapiens
cccagacggccaccggcgggaggaacaaaagggagacaacccaccccaagagccgcgcaaacacaacgcgagaaaggcccaaga

SEQ ID NO: 55429 - RNA, 57 nt, Homo sapiens
agaagagagcaccaaaaccaggagaaaccaaggacaaacggacaccaggccggcgag

SEQ ID NO: 55430 - RNA, 49 nt, Homo sapiens
cgcagggcgcccccgaacgggaaaagaacggcaaacccaaccccagcga

SEQ ID NO: 55431 - RNA, 74 nt, Homo sapiens
cagcccaccgcagggaaaacaaccgagccaaccaagccgagaagagaccacggaaagaggagcgccgcgcccag

SEQ ID NO: 55432 - RNA, 73 nt, Homo sapiens
cccggccgaaaaagaggccgaaaaacggcacacccaccaagcacccaacagaagaagagaacagagagaaggg

SEQ ID NO: 55433 - RNA, 59 nt, Homo sapiens
acgagaggcggcagcggcgggggcaggggcacaggacagccgcacggcgcacccccaag

SEQ ID NO: 55434 - RNA, 61 nt, Homo sapiens
gaagacgagggacccacgcccgcacgcgggacgagccggagggaaggaggagaagcgaacc

SEQ ID NO: 55435 - RNA, 69 nt, Homo sapiens
cggcccaaggccagcccgcaggcagaagacagccacacaggcacccacccaggccaacgaggaggacag

SEQ ID NO: 55436 - RNA, 53 nt, Homo sapiens
acagccacaacgagaaggccgaaagagggcccggaccaccccgccaccgccaa

SEQ ID NO: 55437 - RNA, 58 nt, Homo sapiens
cagagcaggagcaaacagccagcagaagaggaccagacgcccgggggggcggcggccc

SEQ ID NO: 55438 - RNA, 66 nt, Homo sapiens
aacccccggaaccggcaaacaagacaccgaaaacgagaaacgaaagagacacgggggcacaaccga

SEQ ID NO: 55439 - RNA, 77 nt, Homo sapiens
accaacaagaaggcaccaggggcgggaggaagaacggcacaagcccggcggcggcccccagacagccggaaggaggc

SEQ ID NO: 55440 - RNA, 76 nt, Homo sapiens
gaacccccaaaaaacaaggggcacggcgagaagaacagccaccggcccaggggaaaagcacagaaagagacacaga

SEQ ID NO: 55441 - RNA, 49 nt, Homo sapiens
accagacaggacaaaaacagcacggacaggacagacggaaggaaagaga

SEQ ID NO: 55442 - RNA, 76 nt, Homo sapiens
agagcggagcgggacgcccggccaagcgaaccagaagaaagacacgagcaacgggccaggggacgccaggacaccg

SEQ ID NO: 55443 - RNA, 66 nt, Homo sapiens
gggagggaaggcgcgggggaagaggagaagaggaagaagaaagaggaggcggcccggaggaaacag

SEQ ID NO: 55444 - RNA, 72 nt, Homo sapiens
cccaggccacagggaagcagcccgaagacgccggagaacaaacaggaccgaaaggaaaacagaaccacagaa

SEQ ID NO: 55445 - RNA, 83 nt, Homo sapiens
cagccgaggggagcgcggggcccggcagaaagagaggcgacaaagacgcggggaggggacgccggaggagcgcgcagggggac

SEQ ID NO: 55446 - RNA, 79 nt, Homo sapiens
ccgaaaacggaaagacgaaccccgcaaagcagggaaagagaagggcgagaccacgacaaagcaagcgggggacagccac

SEQ ID NO: 55447 - RNA, 79 nt, Homo sapiens
cccaggaagagaaacaaaggcaaaacagccccacggcagacccggaggagaagacagaggagccagaccaagagacagc

SEQ ID NO: 55448 - RNA, 85 nt, Homo sapiens
cccccccgagaaccggcgccagccagcgccggaccccccacccacgcgaacgagagggacacggagcagagagacgggacaccgg

SEQ ID NO: 55449 - RNA, 80 nt, Homo sapiens
ggagaccccgccccaaccacgaccaggcagcgccacaggccacacacagcccggccgggccagacggggcagcacaagac

SEQ ID NO: 55450 - RNA, 37 nt, Homo sapiens
agcagacgcaaacaacggacaggacccagaccagcca

SEQ ID NO: 55451 - RNA, 80 nt, Homo sapiens
cagcagcccgacgcaaaccaaggacggggaccgcacacccaaggacacgaggaggggacggcccgccacaggcacagacg

SEQ ID NO: 55452 - RNA, 76 nt, Homo sapiens
gaaaacggaagcgcagggagaaggaagaggggaaaaggcacagaaacaccaacacacacccagaaggccacaaggg

SEQ ID NO: 55453 - RNA, 59 nt, Homo sapiens
aagaaacagcccaaacaaaagaacagcgaacccagacagcaacccccagccacaacgcg

SEQ ID NO: 55454 - RNA, 71 nt, Homo sapiens
gggggaccacagcccaagccagaaggacaggacgcaacgaaaccggcacggccgcccgccaaggacagacg

SEQ ID NO: 55455 - RNA, 77 nt, Homo sapiens
gagaaagcgccagaaccggaacagcgcacaaccggacagggccacaggcccgggagcggcgcggaaccccaggaccc

SEQ ID NO: 55456 - RNA, 71 nt, Homo sapiens
ccaccacgggggcgcagagcaacggggggcaaaggcggcaccaggacgccgaaaagcgaccggacgcaggc

SEQ ID NO: 55457 - RNA, 109 nt, Homo sapiens
cgcgccccccggcgaggacgacgcgcaacgcgcaccaacccaggggaggggcgaccccggggcccggccagcacgaccgaggaggggcggacagcggaggagaacggag

SEQ ID NO: 55458 - RNA, 65 nt, Homo sapiens
ccccaaccggggaggaaaaccgacgaagcacccccggcgaggaaaagcgcaacaccggcagaaca

SEQ ID NO: 55459 - RNA, 74 nt, Homo sapiens
cgaccccgagagaggacgcacccagcccagcgggaacagcaagcacaggagccccacaaagacagagggcgcgg

SEQ ID NO: 55460 - RNA, 59 nt, Homo sapiens
cagagaaggaggagggaccacgcgcgaggcacacagaaaaggggcacaagagacaacac

SEQ ID NO: 55461 - RNA, 74 nt, Homo sapiens
gaaggaggcaggaaggaccgagaccaggaggaagacggcgaaggcccagggcccgacccgaaaagcgcagccaa

SEQ ID NO: 55462 - RNA, 72 nt, Homo sapiens
gcccgacagggcaacacccgacaaagggcccgaagaagacaagacgcacacaaaggcgccacgaggaagcag

SEQ ID NO: 55463 - RNA, 66 nt, Homo sapiens
cggccggcgccagaggcccggacgacagcccccaggcagacagagacggagaccgccggccaggcc

SEQ ID NO: 55464 - RNA, 70 nt, Homo sapiens
gaaggaccaagaaccagagaggcccgaagagaggaagggcaaggggaaggaccgagacccaaagggcccg

SEQ ID NO: 55465 - RNA, 87 nt, Homo sapiens
ccgaccccacggaagaggcggacggagacgcggcaggcaagaacgcaccgcaggggccgcacaccaccacgagaagaagaaggacac

SEQ ID NO: 55466 - RNA, 61 nt, Homo sapiens
ggcgcaggggcggggcagccggagaaagcaccgaaaacaaacacccgccgggcagcagagg

SEQ ID NO: 55467 - RNA, 85 nt, Homo sapiens
agaccgcccgagcgaggcggagaaggaccccggacccccccacgcacgcccgcgccgggaaccaagaggagccgccgacccaggc

SEQ ID NO: 55468 - RNA, 82 nt, Homo sapiens
gccgcggggccgcggcgcgcccggcccgggcaaaagcagaccggaaaacccaccggcaagaccacacccgaggggagcccag

SEQ ID NO: 55469 - RNA, 86 nt, Homo sapiens
gggacggcggcccagcgagggcggcccggggcacccgcacgggaagcaggcccgccacagacaaacaggccgagcgacagcgagga

SEQ ID NO: 55470 - RNA, 82 nt, Homo sapiens
gggaccacaggccacacagccccgccgaggcaggaggagcaagccgacagacagcaacacgggcagaacccccgagcggccc

SEQ ID NO: 55471 - RNA, 77 nt, Homo sapiens
gcacccgcgccagcaccacgcccgcgccgcgccgccgccaccagcccaagagaaagcgagaaccgccggcgagagag

SEQ ID NO: 55472 - RNA, 78 nt, Homo sapiens
aaaggaagaagccaaaagcaagaaaagagcaacagggagacacgagggaaggaagagagaagggcacagaccaagaca

SEQ ID NO: 55473 - RNA, 61 nt, Homo sapiens
agcggaccgagcgcggcgcggggccagggagaccagggggcaggggaggagcgcccaggcg

SEQ ID NO: 55474 - RNA, 42 nt, Homo sapiens
acgggcaacaggagccccacgccacgggccgcgcaaaggccc

SEQ ID NO: 55475 - RNA, 77 nt, Homo sapiens
agagaccgaaaggagaaggccgcaagaacaagaagcaaccaagggagagcagccagcgggacagaaggaggaagagg

SEQ ID NO: 55476 - RNA, 70 nt, Homo sapiens
aaaggaaaccacaccaaccaagaagagccagaacggggcgcgaggacgcggacccgcacggggagcgaac

SEQ ID NO: 55477 - RNA, 57 nt, Homo sapiens
agagaagaaaaaaacgcaccggagaaaaaaacggaggaagcagaagcagaaacccag

SEQ ID NO: 55478 - RNA, 79 nt, Homo sapiens
acggcccggcgaaccaccacgggccacacagcccgcagccgcagcaaggcgcgagcccgcggagcaccgcagcgggccc

SEQ ID NO: 55479 - RNA, 76 nt, Homo sapiens
acagggccaagcccgaggcaccaaaaaacacccgagggagagcgcaccaccccacgcgccaggcgagaccccaggg

SEQ ID NO: 55480 - RNA, 62 nt, Homo sapiens
gcggaagggaggaacaggccaggaaccggagccggagaaagcgggaacagcacaaggaggga

SEQ ID NO: 55481 - RNA, 71 nt, Homo sapiens
gcagcccgaaaagaagaggccgcgacagccaccaaagcagcgcggacaagaaaagacagaaaggaaaagca

SEQ ID NO: 55482 - RNA, 78 nt, Homo sapiens
gacccacacgaggccacccagcccaccaaacacgccggaaaccccgcccacagcacgaggggccaggcacaaagaggg

SEQ ID NO: 55483 - RNA, 71 nt, Homo sapiens
aggaaaaagaaagagccaggaaacgccacagagaaggcagaacagagaccgcaagagaaaaggcaaacaga

SEQ ID NO: 55484 - RNA, 85 nt, Homo sapiens
agaagaagacggaagaacaggagccagccagaacaggaaagccaacaagaacggcaggggacgaggacccgggagacagccagcc

SEQ ID NO: 55485 - RNA, 76 nt, Homo sapiens
ggcaccagaccgcgcagcccagggcaggagggccaaagccaacagcaggaccagggagcggcgcccccagagccag

SEQ ID NO: 55486 - RNA, 67 nt, Homo sapiens
gaacacggggacaccaacaggacccgggcgggggcggagggcaagacgacgacaggagaacaacaag

SEQ ID NO: 55487 - RNA, 76 nt, Homo sapiens
aagagaagaagcagccacaagagccaaaccagaggaaaggaagggaaaaggccgaggcacagcgggaagaccgcaa

SEQ ID NO: 55488 - RNA, 81 nt, Homo sapiens
ccaaggacacggcacaccgaccgacggggagcccccgagcgcccgcgacgcagcacggacccacaacgaggccagcagcca

SEQ ID NO: 55489 - RNA, 82 nt, Homo sapiens
gaagaagccacccagaagggcagacaccaagaaggacgcacgaccgcccaagcaccgcgcacgcacgaggccaacggcggga

SEQ ID NO: 55490 - RNA, 78 nt, Homo sapiens
ccggcggcggcacgcccagggcccaaggcaagaaccccaaaccccaagggcaggggcagaaacaggacgggaagacac

SEQ ID NO: 55491 - RNA, 78 nt, Homo sapiens
ccaagacaggagacaacaggaggcacggacaaaacgcagggccagcaaacccgggcccaagacgcagcaggagaagcg

SEQ ID NO: 55492 - RNA, 62 nt, Homo sapiens
ggcaaacgggccgcaacaaacacaggccgagaaacagacaacccacagaacaaagcggacca

SEQ ID NO: 55493 - RNA, 78 nt, Homo sapiens
accgcggcgcagcgacccccgccaggcaaaaggaaggagaaagcagggggcaggaaaccgaaaagagagaagcccccc

SEQ ID NO: 55494 - RNA, 79 nt, Homo sapiens
gccaggaggcggcggaaaaagcaacacaccgagcggcggacaggcaaccggagacagcgcgccgcccccggggcccagg

SEQ ID NO: 55495 - RNA, 42 nt, Homo sapiens
cacagcccaccgaggcaccacagaaccgcaaggccacaaacc

SEQ ID NO: 55496 - RNA, 35 nt, Homo sapiens
aaagaaacggggaccagaagccccgcccccggaga

SEQ ID NO: 55497 - RNA, 61 nt, Homo sapiens
aaaccccgaccgcagccaggccgacccgaccggaccagacaaggcccggccaacgcaacag

SEQ ID NO: 55498 - RNA, 86 nt, Homo sapiens
cccccggcgcaggggagcgaaggcgaggggcagcggcaggagagccggccgcgacaggacggacagcccaaggcggaaaagcgaag

SEQ ID NO: 55499 - RNA, 52 nt, Homo sapiens
gaccagaagccagagcgaggacgccggcaggggaaccagaagaggccaacca

SEQ ID NO: 55500 - RNA, 67 nt, Homo sapiens
gagggaggaacagcaccagcccaaaaggcagagcgaggagagaagaaggagggaaagccaaacaacg

SEQ ID NO: 55501 - RNA, 40 nt, Homo sapiens
aacgccaaggaacggcccacccaggccacccaggaccagc

SEQ ID NO: 55502 - RNA, 72 nt, Homo sapiens
acgcagggcgcccccgggccggcaaccgccagacaggaggaacgaagccgcggaggaccccagagggcagcg

SEQ ID NO: 55503 - RNA, 75 nt, Homo sapiens
cgagcggagccggcaggaaggggaccgggcggcggagcggcggaagaagggagcccacaggacaggcagaaggcg

SEQ ID NO: 55504 - RNA, 109 nt, Homo sapiens
acgcacgggaaccggaccaggaggaggcaggaccaaaagggaaaagcaccggcggggccccgggccgcaccccccaccgcaacccgccgggaagcagccgccaaaaacc

SEQ ID NO: 55505 - RNA, 113 nt, Homo sapiens
ccgggaccgcaggcccggaaggccagggaggaccccagacaccggagacgggaaagagccggaggagccaccaacagaagcaggagccaggaaaccaaaacccacagagaggg

SEQ ID NO: 55506 - RNA, 65 nt, Homo sapiens
cccacgcagggcccaccggcccggccggagggcagcgccagagacaagggcaaaaaaagacccag

SEQ ID NO: 55507 - RNA, 65 nt, Homo sapiens
aaaaaaaacgccaggccagaccagacacgcgccgaaaacggacgaacaacaacacacggacagca

SEQ ID NO: 55508 - RNA, 42 nt, Homo sapiens
gcgcacacacgacaggagaaaggagaaagaggccacggggcc

SEQ ID NO: 55509 - RNA, 75 nt, Homo sapiens
cccccagcgacacccgcgcccggaggagaggagcaggaagaagaccacgcccccagaaggcaaaaccaggaacaa

SEQ ID NO: 55510 - RNA, 81 nt, Homo sapiens
ccccgcgggaccgggacgacgaccaagaggaggagccgcggagcgggaccagcaccaagcggaaaacgagacgaaggacaa

SEQ ID NO: 55511 - RNA, 52 nt, Homo sapiens
gaaaagcggagcaggaaagaggcgaacacaaagaaaggagcaccggcgacgg

SEQ ID NO: 55512 - RNA, 69 nt, Homo sapiens
gccagaggagcacacacaaagaggacccgacaggccccagaagaagggacacgagaaacgaagcaggag

SEQ ID NO: 55513 - RNA, 85 nt, Homo sapiens
gacggcgcccagcaacacagaagccgacaaggcgcaagcgaaaacagaccgcgagcccagaggggaaccacagagaacacaaccc

SEQ ID NO: 55514 - RNA, 79 nt, Homo sapiens
ccaacgaggggggagacggggcgagcgggcgacggcgcccggcaaggacaaggggccgggcgacacaaagacgagccac

SEQ ID NO: 55515 - RNA, 82 nt, Homo sapiens
ccgcaggcagcaccggaggcccaggcccggcagcccaacccagcaggacaagcgcacacgggaagcgcgccgcgggcgcagc

SEQ ID NO: 55516 - RNA, 84 nt, Homo sapiens
ccgccgacccgcccaccacgccagcagcgcgacggcagcacccgacagcacaaaggcaagaaagaaaaagccccagccgcccgc

SEQ ID NO: 55517 - RNA, 80 nt, Homo sapiens
aacagcggagcaaggcgacgaaccggagagaggagaacgaacaccggaccgccaggaagggcgcgcaggaacaagaagaa

SEQ ID NO: 55518 - RNA, 60 nt, Homo sapiens
gaccgcgcccgcggagagcccaaacaccaccaccaaggccagaaaccggaagaaagagca

SEQ ID NO: 55519 - RNA, 75 nt, Homo sapiens
cccgagagagaagggagcaaaggaagagacgaaaaccacggcacgcccaccaccgaggccgccacggcggggccc

SEQ ID NO: 55520 - RNA, 89 nt, Homo sapiens
ggaacagggcagagaccgaaagacaaccgccaacggaagcaagacggaaaagcaaaggcagcagggaggagcgaggaggccaaaaaggc

SEQ ID NO: 55521 - RNA, 78 nt, Homo sapiens
ggcggaggaggagaacacagaaccaccaggagagcaagggagacggggcacgcccagagcaggccgccagcccgcgga

SEQ ID NO: 55522 - RNA, 61 nt, Homo sapiens
gccacaaagaggacacaaagaagacgcaagcaggccggaggagaacgagcggcaagagaaa

SEQ ID NO: 55523 - RNA, 75 nt, Homo sapiens
gcgaaaggcaccgcaacaacgcccagcgagcggagcggcggacaccagaagagaaaagggcaagccagacgcaca

SEQ ID NO: 55524 - RNA, 94 nt, Homo sapiens
acggccacccacggaccgcacgcgggacacacacggcacggaggcagagggcagcagcgccacccgacagagaaaaacaaaagggacagcgcac

SEQ ID NO: 55525 - RNA, 78 nt, Homo sapiens
cgccgaccaacacgcaaagaacaaaccaaaccacgaaggccaagagagagacgcacaaaaaccgagaagccccaaaca

SEQ ID NO: 55526 - RNA, 81 nt, Homo sapiens
cggcggcccccccgcgcggagccgagccggaacgcggcagcccccgccaggcccaccaagcccagaagcgaggcgaagcag

SEQ ID NO: 55527 - RNA, 50 nt, Homo sapiens
agggagaggcgagcagaaggggggcccgcaggagaaaaggacgacggaac

SEQ ID NO: 55528 - RNA, 36 nt, Homo sapiens
gggcaaggggaaaagacagaggacgagcggccaaga

SEQ ID NO: 55529 - RNA, 72 nt, Homo sapiens
aaccgcggaagacgagcagcggaggaaaaccaggcccaaaccaacgacaaacgcagaacaaagccaaaggcc

SEQ ID NO: 55530 - RNA, 70 nt, Homo sapiens
acccgcgagaaacgccgccaagcccaggacccagacccagacgggagaggggcaccccccaccccgggac

SEQ ID NO: 55531 - RNA, 69 nt, Homo sapiens
aggcccccaccaggccgcggcaggcagggaaaaagcacaaaggcgcgaccaccagcacacacaccccgc

SEQ ID NO: 55532 - RNA, 78 nt, Homo sapiens
agaaaggagcacgcccaacgaaagggcagacagacggcagacgccgcggcccgacaggagccagacggagaaaagaaa

SEQ ID NO: 55533 - RNA, 72 nt, Homo sapiens
cgaggccccccaaccaggcaagggacgaagggaacccgccgggcggcccggcacccagccccccggcaccca

SEQ ID NO: 55534 - RNA, 73 nt, Homo sapiens
gcagcaaaaccccgcacgaaaggccggaaagaggggaggggcacgcaacaacgaagagaaaggcaggaacaca

SEQ ID NO: 55535 - RNA, 84 nt, Homo sapiens
aagcagggaaggaggccgagccgggaccaggcccgggggcggcggccacgccaaggacggccccgggcaaggggagcagacaac

SEQ ID NO: 55536 - RNA, 63 nt, Homo sapiens
ggagcgccgggagcggaaacgcgagaaccaggagacggcaagaaccagggaccccaccacgcc

SEQ ID NO: 55537 - RNA, 79 nt, Homo sapiens
gaggaacccgaagaagaaaggacgacagccagagagaaaaagcggggaaggggggcaaaaaaaagaagcaagcgaagca

SEQ ID NO: 55538 - RNA, 64 nt, Homo sapiens
aagcaagacccaggacaccccgaagccgagaaagcagaaagcgaagcagaagccgagaacagcg

SEQ ID NO: 55539 - RNA, 59 nt, Homo sapiens
gccaccaaaaacaaagaggagagaaggcaaaagcagaccggaaaacccaccggcaagac

SEQ ID NO: 55540 - RNA, 55 nt, Homo sapiens
gagcagcggacgccggccgccgcaggagaaagacaccacgagcgcgggcagagga

SEQ ID NO: 55541 - RNA, 75 nt, Homo sapiens
caacaccagaacagggggagaaccaggacagccacagaaagcccgccccagacagggccccggcccgcccggaag

SEQ ID NO: 55542 - RNA, 62 nt, Homo sapiens
ccccacacaaaacgcagcagcgcacagcccagcggaggacacgccggggcagggcagccgag

SEQ ID NO: 55543 - RNA, 81 nt, Homo sapiens
agcgcgccgcccggcgccggcccgcccccgcagcagcgccaggacggaagcacgggaaaccagcaaccccgaccaccaagg

SEQ ID NO: 55544 - RNA, 84 nt, Homo sapiens
ccccgccggccgcccaacaccgaacaccccaagaaggacaagaaggggagaagaaaagaaacggcaaaagaaaaaagaaaagag

SEQ ID NO: 55545 - RNA, 58 nt, Homo sapiens
gaaagcagaagcgcgcagcaacggcgggcccggggcgcccgggagacgccacacggcc

SEQ ID NO: 55546 - RNA, 82 nt, Homo sapiens
cagacccaggacagagaccagaaacacaggcagacggaagcacagaagcgcaggagaagcaaaacacagaggaaaagggaaa

SEQ ID NO: 55547 - RNA, 75 nt, Homo sapiens
gcgaccgagggaagaccacaaccacgaccacaaaccggcggagccacaggcaacaccaagacacggccacggcaa

SEQ ID NO: 55548 - RNA, 80 nt, Homo sapiens
gggaaaaaggaccacaagccacgaagaagagccggaacaagcaacggcagaaaagacaaggcgagggaaaccaacacaag

SEQ ID NO: 55549 - RNA, 74 nt, Homo sapiens
gcgaccggggaaaccagagcagacccggaacacgcacgagccgaaagacgagaagaagaaaaaagaacaggaca

SEQ ID NO: 55550 - RNA, 71 nt, Homo sapiens
gacaggggaacacccccagagagaggcaagacagccgccacccaacgcaagggaggcagaaaggccccgca

SEQ ID NO: 55551 - RNA, 78 nt, Homo sapiens
cagcccccgagggcgggacacagagacaccaccagaaaaaaacacaagagcagaagagaaaccaacccacccacagca

SEQ ID NO: 55552 - RNA, 60 nt, Homo sapiens
cgaggaacggcaggcggccccgagcggaaccagagaagcgaggaggcacagaaccaggac

SEQ ID NO: 55553 - RNA, 94 nt, Homo sapiens
caccacgcggggcccagccagcaaggagaagcaacaggcaggaggaggggagacacaaggagcccccgcaccagagacgcgcacgaaacgacga

SEQ ID NO: 55554 - RNA, 81 nt, Homo sapiens
accccccggcgcagcagcacacaaggaagaagagccgggcaagggcacccaaaaaccgaagacggggacgggagggaggac

SEQ ID NO: 55555 - RNA, 74 nt, Homo sapiens
ccaccccagaggcgcggagcgccccagggaacagacgaggggacggcccaacccgcgccgaaccggccccgagg

SEQ ID NO: 55556 - RNA, 52 nt, Homo sapiens
agggggacgcaaaggccaaggggcggcaaaaagagcaagggagaacaagcag

SEQ ID NO: 55557 - RNA, 88 nt, Homo sapiens
agcgcagagcggcagcagccccagcccaaggccaggcgagaaccacgccgacaacggcggaagaggaacgggaacggggaagaagagc

SEQ ID NO: 55558 - RNA, 71 nt, Homo sapiens
cccagggaggcagccaaaaccagcacgagagagccgagcagaggccccagcaggagagaacaggaacaacc

SEQ ID NO: 55559 - RNA, 69 nt, Homo sapiens
ccaaaagccgacaaccccagaaacagacaggcagccagcgaccccagaccgaaggcaggcacacggagc

SEQ ID NO: 55560 - RNA, 69 nt, Homo sapiens
acggacccaacagagcacgcaaagggaaagaaaggcacccccagcaacacgcaacgcaaagaaacagaa

SEQ ID NO: 55561 - RNA, 54 nt, Homo sapiens
cgacccaaacacccaacgagacgggcaaggggaccgccaaccaaaggacggcac

SEQ ID NO: 55562 - RNA, 76 nt, Homo sapiens
agcaggagcacacaaagaacagcggcagacggaggagaggaggcgcgaacagggcccacccgccacgacacagggg

SEQ ID NO: 55563 - RNA, 63 nt, Homo sapiens
cggcgaagccacggcgggacaggaagccacaccaaggagaccgggagagagacgaaggacgcg

SEQ ID NO: 55564 - RNA, 71 nt, Homo sapiens
aaccaaggagcgcgcgcacagagaccaccgggcgcaccccacccgggccgcccgaagcgcgaccaaacagg

SEQ ID NO: 55565 - RNA, 86 nt, Homo sapiens
cgggagaaacggcaaggagaagccccgcggacacaagaacacggcgggccaagacacccaaggagagaggaggcaaaccaagggac

SEQ ID NO: 55566 - RNA, 72 nt, Homo sapiens
acaacgaagcgaaggagaaaggcaagaccgcggacggccccaagacagcacaaacaagggacagagacaaga

SEQ ID NO: 55567 - RNA, 61 nt, Homo sapiens
ccggggccaggagagcgcgccggcgagaagcggccgagccagcagcagaggccaacaccac

SEQ ID NO: 55568 - RNA, 66 nt, Homo sapiens
cggacccgcgcagcgagcccgagcggcagcgccggaggcccccgccggcccccccccgcgcccgga

SEQ ID NO: 55569 - RNA, 58 nt, Homo sapiens
ggcagcggccccggagacacaccgagacacaggacacccacccgccggggacagacgc

SEQ ID NO: 55570 - RNA, 74 nt, Homo sapiens
gaagaacagaaaacgcaaggagaaacccaagagcagcggcagaccagccgcagagcacacccagaaacacaaac

SEQ ID NO: 55571 - RNA, 78 nt, Homo sapiens
gaccgcggagcagaggagggcccaccgcgaagggggcagagacagcgcgagcgagagcgagaagcggccccgggagga

SEQ ID NO: 55572 - RNA, 59 nt, Homo sapiens
gcggcccccggaaccggcccggcggcaccgaaggaccagaggggggcgggccgagcacc

SEQ ID NO: 55573 - RNA, 112 nt, Homo sapiens
aggaggcccgggagcgccgagcgcgccgccgccgccgccagaacaaccgggcgccgacgagacggaacaagccagggaggaccaaccaggacacggcggggcccccacaccg

SEQ ID NO: 55574 - RNA, 77 nt, Homo sapiens
cgggaagcgccacaagcacaaaaggcccgagagcacccagccccagcgagcgaccaccagcaggggaaaaacgcgaa

SEQ ID NO: 55575 - RNA, 85 nt, Homo sapiens
ccacgcgggccggcgaaagcggagcgggggccccccccgggcacggggccagacaacgggacgggcgccgacgccccggggcagc

SEQ ID NO: 55576 - RNA, 79 nt, Homo sapiens
gcgcgggggcagagcccgccgggcggaggcgcggggccacgcccagcccacagcagcccggcacacaaagggagaaagg

SEQ ID NO: 55577 - RNA, 68 nt, Homo sapiens
ccagggacccggcaggccgcccccggcaaggacaaggcacgaggcgcggcgaccaccacagcagagcc

SEQ ID NO: 55578 - RNA, 80 nt, Homo sapiens
gaaaggagaaaagcaacagaccgagacgcagcaaggcaagggaaaaccccacaaaaccagagggcccgaagaagagaagg

SEQ ID NO: 55579 - RNA, 81 nt, Homo sapiens
cccggacccccggcgcgcaccgccgggcaggagaaccgccggggagcagcccaggagacgcgcgcgggcccgggccgggcg

SEQ ID NO: 55580 - RNA, 71 nt, Homo sapiens
agccccggggacgcagcaaagcggccgggcaccccagcagccccagcagccacggacggcacagcccgacc

SEQ ID NO: 55581 - RNA, 57 nt, Homo sapiens
aaagaacgcaagagcagacagccccagcacagaggaaagagaaagagccagcaagag

SEQ ID NO: 55582 - RNA, 39 nt, Homo sapiens
cacccgaaccaagaccagagccagccgccgcgccaagaa

SEQ ID NO: 55583 - RNA, 86 nt, Homo sapiens
ggcccagaaacaggcaagcgacaacaagagagacagagagcaccggccagaacaagccaaggagccaagacgagagggacacacgg

SEQ ID NO: 55584 - RNA, 99 nt, Homo sapiens
ccagaaggcagaaaaacaggaaacagagccaggccgaaaaaaaggcagcagaccggaagccacaaagagggcgacaccgcaagccggacggccacccgg

SEQ ID NO: 55585 - RNA, 66 nt, Homo sapiens
gaaagccacacaagacggaaacaaaaccggggaaagcgagggggagaaaaggccaagggcaggaga

SEQ ID NO: 55586 - RNA, 74 nt, Homo sapiens
gaacaagagagacggcccagggaagccagaaaggcggaggacccacaggagaggcacaggaccagaccaagaca

SEQ ID NO: 55587 - RNA, 88 nt, Homo sapiens
cagcaggggagccccacccggagcagcgcggaccccccagcccaggacagagaagcggggcagagcgccaggccggagccagcccgca

SEQ ID NO: 55588 - RNA, 74 nt, Homo sapiens
cgggagcagaggggagagcggccgccgccgcgccgcccaccacagggacacagagccacaaaagaggaaacaaa

SEQ ID NO: 55589 - RNA, 61 nt, Homo sapiens
ccccacaccagagagggagccacggcaccaagcgccacaggccgcacagcaaggaagcgca

SEQ ID NO: 55590 - RNA, 51 nt, Homo sapiens
gcgacaagcgccccgacggagcgccaggacggcggggccacgcaggggccg

SEQ ID NO: 55591 - RNA, 74 nt, Homo sapiens
accagcaccgccgcccaccacccgacccagagcccccgcccggggggacacagcgagccacgcgccaggaagcc

SEQ ID NO: 55592 - RNA, 78 nt, Homo sapiens
gcagcccaagaacacagcaccacacgcccccaagacaacgaagcgagagaggaacgaggggcacagaaaccagaaaaa

SEQ ID NO: 55593 - RNA, 73 nt, Homo sapiens
agagccgagggcacgaacgcacgagaaaagggcgccgcagagaaagggagaagagcaaccggacacagaaggg

SEQ ID NO: 55594 - RNA, 56 nt, Homo sapiens
ccccagccagggaacgacgcgggccagacacaaacaggaagaacgagacaagggaa

SEQ ID NO: 55595 - RNA, 60 nt, Homo sapiens
ggccggagggcagcgccagagcagaccaccgagagcggaagccccggaggaacccagcca

SEQ ID NO: 55596 - RNA, 72 nt, Homo sapiens
accacaacaacacagcagagcacaaaggagcccgcgccaagccgaacacccccacacccagacggggacaag

SEQ ID NO: 55597 - RNA, 77 nt, Homo sapiens
cggcgcaacaccagcggcgcgacggcaaccccgagccggacacgcgccagggaagcaccaccccgacagccgccaga

SEQ ID NO: 55598 - RNA, 94 nt, Homo sapiens
gaaggaggacgccggccagcagaagggggcgacccggaccaggggggaaaagcccgggcgcgccaggcacagccaagagcggaccggcagcggc

SEQ ID NO: 55599 - RNA, 74 nt, Homo sapiens
cggagagagaaggaagaacacccccaccggccaggcgagaaaggcaggcgagaggaagagagcgaaacaccaga

SEQ ID NO: 55600 - RNA, 64 nt, Homo sapiens
ggagacaccaaagaaccccaggacaggagccagggggagaaaaacagcgcgagaaggaggaaca

SEQ ID NO: 55601 - RNA, 74 nt, Homo sapiens
aaggaggcaccaaagagcagagacaagggagcggacggccagacgccgccggagaagaggacggcgacccccag

SEQ ID NO: 55602 - RNA, 89 nt, Homo sapiens
ccaagcggagagagcagcccggcagacgcagaaccagacagcagaccacagcccggcaggcccaaaaacccaaagggacagaagcaccc

SEQ ID NO: 55603 - RNA, 84 nt, Homo sapiens
gcccggcccggcccggccgcagccccgcgggcgccgcagggagcgcacccgaacacccacaaagggacaggacaagcccggggg

SEQ ID NO: 55604 - RNA, 63 nt, Homo sapiens
gagccacaaagaagaaaacacaaaaacgggaaaggaacaagagagagaaccaaaaaccgcccc

SEQ ID NO: 55605 - RNA, 76 nt, Homo sapiens
ccaagaggcggccaaggggacgagcaaaggaagcgcgaacagcagcgcagaacaccccaccagaccacccagcaag

SEQ ID NO: 55606 - RNA, 79 nt, Homo sapiens
cccgagccgacaagaaggacaaagagacaagccgagagaaagcaagcaaaggggagagcccagggacgcggagggagcc

SEQ ID NO: 55607 - RNA, 81 nt, Homo sapiens
acgaacggccacagcaccccgagaccgcagccccgccccacgccggcagccccacgagaagacgaccccgacgcaggccag

SEQ ID NO: 55608 - RNA, 76 nt, Homo sapiens
ccggagaaaaggccaagaaggcaggaacagagacaaaggacccagaaggaaagaaacccacacagagagcaccaaa

SEQ ID NO: 55609 - RNA, 68 nt, Homo sapiens
gaggggaacaagaacggcgacagacaagaggcgaagcagaccgaaaagggcggaaaaggaccaaggcc

SEQ ID NO: 55610 - RNA, 87 nt, Homo sapiens
cgcagccacgggcaccgcggccgccgcccagccaccgccgccggcagcgaagacgcggagaaaaaagccgacaagcagaccggaaga

SEQ ID NO: 55611 - RNA, 73 nt, Homo sapiens
caagccacccccacggaggagcaaaaaggacagagcacagagccagcacaggaaggagacgacgagggcagga

SEQ ID NO: 55612 - RNA, 79 nt, Homo sapiens
agcaacccggaagaaaccgccacagaggacacacggcgccagccaaacacaaccccaggaggcagagccaaggagacac

SEQ ID NO: 55613 - RNA, 67 nt, Homo sapiens
ccaaacagacagagcgccacaaggcaaacgagggaaacaaccaaggcccagcaccggacgcccagcc

SEQ ID NO: 55614 - RNA, 55 nt, Homo sapiens
ccgaacacacgagccacgaaaacagcgcaagccccggggcagagacacaggacac

SEQ ID NO: 55615 - RNA, 74 nt, Homo sapiens
accagaaccgggagccaaccagaggcccacaacaccaacaggagaagaaggcggggagggaacccgaaaacaag

SEQ ID NO: 55616 - RNA, 30 nt, Homo sapiens
gagaggagcaaacaagcaagccaagagggg

SEQ ID NO: 55617 - RNA, 65 nt, Homo sapiens
caggaaggagccaaagcacaagaagaagacgaggacagaaagcgggacacaagcaggagcacaga

SEQ ID NO: 55618 - RNA, 56 nt, Homo sapiens
aagcaggggccgcgggaaggccgaccgggccgaggcgaaccagaagagagaagagg

SEQ ID NO: 55619 - RNA, 67 nt, Homo sapiens
gccccccgccagaagaaaaaccgccgcgcagggaccacgggagaaaaaggcgcacagcacccggacg

SEQ ID NO: 55620 - RNA, 75 nt, Homo sapiens
gaacaccagaaacgggagagaagaagccacacacagaagacccaaagagaacacaggagaggcaagaggggaaag

SEQ ID NO: 55621 - RNA, 67 nt, Homo sapiens
ccaacacgcagaggggacccggaaaccgaccgaaacgaaagagcaaggcacagcgacaacacgaacg

SEQ ID NO: 55622 - RNA, 68 nt, Homo sapiens
gacccgaccagcacggcgaccgaggcagccccccaaagcccggccccacagggaaagaaccccgggag

SEQ ID NO: 55623 - RNA, 76 nt, Homo sapiens
acggggcccacaggacggggagacagcagcaggaacacagggggggccccagcccggccgaacgggcgcacgacac

SEQ ID NO: 55624 - RNA, 84 nt, Homo sapiens
aaagagaccgccacagaacacagcaaggaacacagaaaccagggaacagcggccgagccccgccagcccaaagggaagcagaag

SEQ ID NO: 55625 - RNA, 79 nt, Homo sapiens
cgcacaggaaaggcacagcaaccggagaagaggggggcccacgcggaggacgcagaacacggcgggcggcccgccaacg

SEQ ID NO: 55626 - RNA, 75 nt, Homo sapiens
gcgaagacgcgggggccgccccccggggaaagcagcgcccagacaaccaaaaaggggagacaccaagaagcaacc

SEQ ID NO: 55627 - RNA, 81 nt, Homo sapiens
accggagaaagcacaagaagaagcagaggaggcccacaggcccgcccggacaccgaggacgcgaggccgagcacagcagcg

SEQ ID NO: 55628 - RNA, 82 nt, Homo sapiens
gaagggcaagaacaaaaagcagagagacgaagagagaagcagggcagaaagagcggaaacgagaagagcaaacacaacagaa

SEQ ID NO: 55629 - RNA, 79 nt, Homo sapiens
cccccggagggaaaacaccaagaccaagcgacacccgccgcaagccacgccacgcgggagagagcggcagccacacagc

SEQ ID NO: 55630 - RNA, 83 nt, Homo sapiens
gaggacaaaaccgccaaagccggccccggcaaggaggaaggggcgccgagacagcggcaacaggaagaaggcgcggaacaaga

SEQ ID NO: 55631 - RNA, 54 nt, Homo sapiens
gacgccacaggccggcaacgccagacgagaagacggaagcccagacagaaagac

SEQ ID NO: 55632 - RNA, 80 nt, Homo sapiens
gaccgagcccgggaaggcgcgccccccccccgacgagcaccgcagcaacgcaggcgccggaccgaaggcgcgaccacgac

SEQ ID NO: 55633 - RNA, 72 nt, Homo sapiens
caaaaagacccaacagcacagcaagccaaggaagcacgggaagaacagaaaagagaagcaccacggaaacca

SEQ ID NO: 55634 - RNA, 97 nt, Homo sapiens
aaaaggcgaccggcaacacggacacccacagcggggcggcggcggcggcggcgcggcccaaaagcggaccagcagacaacaggacaggcaacaagga

SEQ ID NO: 55635 - RNA, 78 nt, Homo sapiens
accaccacgagcacacgcagaagggggaaagagaccgggacagaacagaccccgcgagcaaaggaggaggaccacacc

SEQ ID NO: 55636 - RNA, 51 nt, Homo sapiens
acggaggagccgaccgcagcgagggaccagcacagacaagagaagagagga

SEQ ID NO: 55637 - RNA, 81 nt, Homo sapiens
caccgggcggagaccaaggagacgcagggaccgcgaccgcacaagcagccgccagcggaaccaagcggcgcggcacacgag

SEQ ID NO: 55638 - RNA, 75 nt, Homo sapiens
gacagcccgcagcacgaccagcaggaacgcagaagcggccagcccgaagccaacggggggcaaggcgcgaagacg

SEQ ID NO: 55639 - RNA, 59 nt, Homo sapiens
gggcgcggggacgcaacccaacaggagcagaaaagcgaggcaagggcggcagggggggg

SEQ ID NO: 55640 - RNA, 81 nt, Homo sapiens
ccaccgggggccaagaaagaggagggggaagagagagacgaaaccaaaaggagcaagaaggggaaagagaagaaacaacag

SEQ ID NO: 55641 - RNA, 108 nt, Homo sapiens
ggcgcaggcccgcccacgggggcaggcacagccggggccagggcaggcgccagcggccagggacccaagggcggaccgccccaccaaaaaacacagaaacagggaaag

SEQ ID NO: 55642 - RNA, 78 nt, Homo sapiens
gcgcggaagaagcaggaggcaagaaaggggaaccccggagaaaaggccaagaaggcaggaacaaggaggccaccgccg

SEQ ID NO: 55643 - RNA, 77 nt, Homo sapiens
cacccgggcggggcagagcagcccccagccagccgcgagccaaacaacccaaggcagcggagccccccagcccccgc

SEQ ID NO: 55644 - RNA, 56 nt, Homo sapiens
agaagagcccgcgaaggagaaagaaaagcccaaggacaaggcagagaaagcaagag

SEQ ID NO: 55645 - RNA, 80 nt, Homo sapiens
caggagacgagaggacgggaccaggcgaagcggccgagcaggcgagcgaacgacgcgccagaggaagaaaaaagcccacc

SEQ ID NO: 55646 - RNA, 81 nt, Homo sapiens
cgaaacgcacgagaaggagcagagcagaggacaacgagaagacagaccaaagagacacaaccgcaacaaaaaagacaagga

SEQ ID NO: 55647 - RNA, 65 nt, Homo sapiens
gacaaggacagaacaccagcacggcgaaggaccggaaagaggcagaggaggaaggcagcaagaag

SEQ ID NO: 55648 - RNA, 68 nt, Homo sapiens
gacccggagaacggcggaaccacggccggaccggccaggagacaagcccaagcacagccgagaagacc

SEQ ID NO: 55649 - RNA, 65 nt, Homo sapiens
ggaagacacacgcaccgcaacaaaacacgaaagacacggaagcacaccaagccccagccaagacc

SEQ ID NO: 55650 - RNA, 59 nt, Homo sapiens
gcacgcccgcggccgccggacggccgggcgcggagcacaagagggccagggaccagggg

SEQ ID NO: 55651 - RNA, 79 nt, Homo sapiens
gccaggcccgcggggggggggcggcccaccgggaccgccggacccccaccccaggagcaacccagccccaaggccaacc

SEQ ID NO: 55652 - RNA, 40 nt, Homo sapiens
gcaaccaccaagaggagcaccaggagacaaagccacaaaa

SEQ ID NO: 55653 - RNA, 74 nt, Homo sapiens
gcgcgccgcgcgcgcgcgcgcgccgggccagagagaggaaaacgagacagcccacccaccgccccgcagagaag

SEQ ID NO: 55654 - RNA, 87 nt, Homo sapiens
cgaaagggaaggaggaacagggcgggccgggcaccgagaagggcggcacacagcccagaacagcagggccaaccggaccccggcaca

SEQ ID NO: 55655 - RNA, 86 nt, Homo sapiens
gccacgaggacgggcgggggagccagaccgggggcagcgcccgaagaggaggagaagcgcgcaccggcgggagaggaacaagcggc

SEQ ID NO: 55656 - RNA, 82 nt, Homo sapiens
cccgccggcccgcgcgccccgcccagccggcgcggcggcacgacgagagagcccacacaaaccgccagccagacaaagccgc

SEQ ID NO: 55657 - RNA, 55 nt, Homo sapiens
caagcgcgggggaagaagagaaagaaaaccaggcccgaagaggaaaggaggagac

SEQ ID NO: 55658 - RNA, 70 nt, Homo sapiens
aaaccaccgcaccagaagaagaaggccagaaaaaagcccggagagggaaagaagcagaagcggcacgagc

SEQ ID NO: 55659 - RNA, 72 nt, Homo sapiens
ccgagcaagccaagagaagagccagagagcaaagaagcagccaccaaggaacagcaggacaacaaccaaaaa

SEQ ID NO: 55660 - RNA, 76 nt, Homo sapiens
agacgacggaccacacgaggggacacaagccggaaaggccccgagagcaaccgaccggaaaaggagaaagaaacaa

SEQ ID NO: 55661 - RNA, 75 nt, Homo sapiens
aaaacaaccgaggcaggagaggagacaacagacacgagaggcgagggacgacagagcaagcggcagagggcaagc

SEQ ID NO: 55662 - RNA, 62 nt, Homo sapiens
caacaaggcagcagagcacggcccaggcgcggggcggcagcgcaggcgagagcggcggaggg

SEQ ID NO: 55663 - RNA, 78 nt, Homo sapiens
gcaggccgggcccagcacccgccgccaggcgccgggggccgaacggcccggacacccgcaggaacaggacacccaacc

SEQ ID NO: 55664 - RNA, 78 nt, Homo sapiens
cccggcccgggagcccccgcccggaaagcaaggccgcggacccggcggaggcagggcacacaggcagacaagcaacgc

SEQ ID NO: 55665 - RNA, 80 nt, Homo sapiens
ccaccgccgccgcacccagggggccacacgccccccccccacgccacacacacggcaagccaaaggcgcccaacgcagca

SEQ ID NO: 55666 - RNA, 84 nt, Homo sapiens
ggaaacccggagaccaaaccgaacggcacagccaacaagagaacggagcggacaccagaccaaccagacccagagccaaagagg

SEQ ID NO: 55667 - RNA, 81 nt, Homo sapiens
cccgggcccgcagaagaggcagagacgaagaggggccagagcaccacaagcaaggaacaaaagaaagcaaggaaccaaaaa

SEQ ID NO: 55668 - RNA, 83 nt, Homo sapiens
ggcggcgcgggcgagcggcgagccgaaaagcgagcgcgaggaaaaggcggcgggagaaggaacccagccagccggcggaagca

SEQ ID NO: 55669 - RNA, 74 nt, Homo sapiens
gccaggaccggaaaacagcggcgaccagcagaggcaacaggcagccaccacacgcgcaagagagcacaagccga

SEQ ID NO: 55670 - RNA, 82 nt, Homo sapiens
acaacagcacagacccaacccagcaggaccccaggagcaagcacaagcaaaaccacacacggaagccccacccgcgacacgg

SEQ ID NO: 55671 - RNA, 76 nt, Homo sapiens
aaacacaggacacgcggcagagagaagagccaagggggaagagccaccggaccaggaaaccacccgagccggaagc

SEQ ID NO: 55672 - RNA, 75 nt, Homo sapiens
cgccagccagccgggcaggagggcccgccgagaagccagccacgaaagagcagacgaagaaagagaagcagaacg

SEQ ID NO: 55673 - RNA, 86 nt, Homo sapiens
aaggacgaagaacccacagagaggcccacgcggaccggcagcgccaccggaccaccagacaaggacacggcccaagcgacccaccg

SEQ ID NO: 55674 - RNA, 81 nt, Homo sapiens
cggcagacccagcgccggggacaggaacccccgaaaggcgagagaaggccaccgcggccaagcagcgaaggcggagaggac

SEQ ID NO: 55675 - RNA, 75 nt, Homo sapiens
aaaagacgcgagaagccacacgaccagaacaaaaaccagaaaaaaggaacaacaagaaaaagggaaagaacacag

SEQ ID NO: 55676 - RNA, 54 nt, Homo sapiens
accacccggggcccccccagccgcaccaccaaggcggggcagggcggccgaacc

SEQ ID NO: 55677 - RNA, 75 nt, Homo sapiens
cacgcgggcagcgaacaagcgggagcaaggagggcgaagagcgaggagggaaggcgccaacaacacgaacagcga

SEQ ID NO: 55678 - RNA, 74 nt, Homo sapiens
gccacccaaacaacacgggcggcagagaagagaagagcacagcgggaggaaagggagagacaagagaggagacc

SEQ ID NO: 55679 - RNA, 65 nt, Homo sapiens
cgaaaacacacaggcacaccgcacaaggaggagcacggcgaaccgcaaacagaagagggagccag

SEQ ID NO: 55680 - RNA, 82 nt, Homo sapiens
cggacgaggccgggacggccgagcggaccaaaaggggaaaaggacccgagccccaaagacagaaaagccccgagacggaaga

SEQ ID NO: 55681 - RNA, 80 nt, Homo sapiens
aaccacagacagacgagccccagaagagccggacacacagcagcggacgacgggagcagacggacgggccacggggagga

SEQ ID NO: 55682 - RNA, 89 nt, Homo sapiens
cgggcgcagccgggagcaggaggacggaaccagggccaggcgaggaccaacccaccccgagcgagcgagcccgcggaaacgcccgggac

SEQ ID NO: 55683 - RNA, 65 nt, Homo sapiens
gccggcgcacagccaccgccgcgcacacccaggagaccgagaagcaaagcgccgggcaccagcaa

SEQ ID NO: 55684 - RNA, 113 nt, Homo sapiens
gcggcggcgacgcgacacccccaccaggacagccgacagcccgcccaggaagggacccgagcacggaagcaagaaaggacagcaaagcgaagaagcaaagaaagacgcaaaaa

SEQ ID NO: 55685 - RNA, 63 nt, Homo sapiens
gcggccggccacgcggcccggagaggaagccgccagccaccaaggagaccaggcaaaacagca

SEQ ID NO: 55686 - RNA, 83 nt, Homo sapiens
ggaagagaggaggcgcgagagcgggaagaggcggcagacagcgggggacgaaaacccgaggcaccggacagaagggaggaaga

SEQ ID NO: 55687 - RNA, 38 nt, Homo sapiens
cccccgaggcccgaccggaaagcaaggaaacagggcag

SEQ ID NO: 55688 - RNA, 53 nt, Homo sapiens
cgcagggcgcccccgagacggggcaggcccaggcggcgaacccggcccaagga

SEQ ID NO: 55689 - RNA, 57 nt, Homo sapiens
gcccgcaaaaccagccaaaccaggaaaggacaggcgcgagaccgcacagcaaggaaa

SEQ ID NO: 55690 - RNA, 69 nt, Homo sapiens
gccaccgcgcacccacgaacgcccaccccccgaacccagccgcaccggcgagagagaggcggggagacc

SEQ ID NO: 55691 - RNA, 87 nt, Homo sapiens
ccgccacacccgccgccaggacggccggagcagcagaacaagagcggagaccaagggagccccgcagcagcagaagacggccgaagc

SEQ ID NO: 55692 - RNA, 76 nt, Homo sapiens
gagaccacaaaagagcagaggaggaacaccaggcacaagcgggaacagcccgggccgccgcacccaccgcggagaa

SEQ ID NO: 55693 - RNA, 74 nt, Homo sapiens
gaaacgcacccgaggagggaagggaggcggaccgaacgacccaggaccccgagggcaggacggcccgaccaacc

SEQ ID NO: 55694 - RNA, 76 nt, Homo sapiens
gccagcccgaggagccacccccgaagccacaacccaagaaggcagaagccagccccgcaggccgccacccgccccc

SEQ ID NO: 55695 - RNA, 81 nt, Homo sapiens
cgaggagcagggaccggcggccgcggggagcaaacggggacagcgccgaccggaacagggaccacggaagcccaggaccag

SEQ ID NO: 55696 - RNA, 63 nt, Homo sapiens
caaggaagaggcgaacaaggacagcagaccacagcccggcaggcccaaaaacccaaagggaca

SEQ ID NO: 55697 - RNA, 78 nt, Homo sapiens
gcaccagcgaacgagcaaaggcacgggcagccggaaggacaccaagagcggaccgggccccgagcccaaaaggcagag

SEQ ID NO: 55698 - RNA, 82 nt, Homo sapiens
accccccgcgcccgggcccggagcgcagcgcggccgcacagacggcccgccacgggccccgcagccgcgcccgagcgcccga

SEQ ID NO: 55699 - RNA, 77 nt, Homo sapiens
cggccccgccgaagcaccggaccgagaacgaaggcgccgcgcccggggagacagaaacgaggcgcccccagcagcag

SEQ ID NO: 55700 - RNA, 74 nt, Homo sapiens
ccgcgccccgccagcaccggccccaccacagggcgcacccccgagagagccacggaagggcgccaaggagccac

SEQ ID NO: 55701 - RNA, 65 nt, Homo sapiens
cgcgccccaccacacgcacacagaaggaggagcgaaacggggaggcggaagaccgcacacccggg

SEQ ID NO: 55702 - RNA, 78 nt, Homo sapiens
gaaggagccaccaaccgcccggacccgcggcaccgcgccccacgccggcgcgccgcaccccagaccccgggcgcgagg

SEQ ID NO: 55703 - RNA, 74 nt, Homo sapiens
ccaggaggcaccgggcaggggaccacagcagcccggaaaaaaggaacagaggcagaccagagcccggacgaagc

SEQ ID NO: 55704 - RNA, 81 nt, Homo sapiens
acgaacccagcacggggaggcgaggccgaagggcaagagggcacagaagacggcgccccacacacggcccacacggacccc

SEQ ID NO: 55705 - RNA, 89 nt, Homo sapiens
aaccgaacgaaaggagaaacggaaaagacccccagacgaacaagagcaacaccgccggaaccggacgggaggaacacgcacggaagacg

SEQ ID NO: 55706 - RNA, 67 nt, Homo sapiens
ccccagcccccacggaccgagcacgacaccgccggaacccagggggggagaagggagggaaaacaac

SEQ ID NO: 55707 - RNA, 56 nt, Homo sapiens
agagcggcaggcaagggcggggccccacccacacccgggaaaccgagcacagccaa

SEQ ID NO: 55708 - RNA, 69 nt, Homo sapiens
ggaaaaacaccgggaggacaaggcacgaggcgcggcgaccaccacagcagagcccggcgaaggaggagc

SEQ ID NO: 55709 - RNA, 72 nt, Homo sapiens
acaaagagccgccacaaaagaggcaacaccgcaggaaaagagggccggacagaggcagcagcccggcgaaca

SEQ ID NO: 55710 - RNA, 60 nt, Homo sapiens
ccaccaggagcccgagagagaagggcaccagcaagggaccagaggagacaagccgggccc

SEQ ID NO: 55711 - RNA, 64 nt, Homo sapiens
gcgaacgcggagagcacgccagaaggcccgggcacggcgccgcgcccggggagacagaaacgag

SEQ ID NO: 55712 - RNA, 77 nt, Homo sapiens
cgcgagcggcagcggcggaggagcggagcagaagggcaggagggcgaaggccagggacacgaaaaaagaaacacaga

SEQ ID NO: 55713 - RNA, 81 nt, Homo sapiens
acaagaacccagagcaagagccccagcgccagcggcacggccggacccgcagggcaaggccagagaaggcgggagaaagac

SEQ ID NO: 55714 - RNA, 35 nt, Homo sapiens
gaaggagggccccaggaaaggacagaagacaggag

SEQ ID NO: 55715 - RNA, 65 nt, Homo sapiens
cgccccaggcgcaaaacccgagaaagggcaaccgacggcgagggaagaacacccgcccgcagcgc

SEQ ID NO: 55716 - RNA, 53 nt, Homo sapiens
caagcggaggccaggaacaaaggaccgcaacaagggaaaacaggcaacgggaa

SEQ ID NO: 55717 - RNA, 83 nt, Homo sapiens
gaggcaacgcacccggaccgggccaggaaaaaccaggggcagaacaaggagagggcggccgccgcagagccggggaagacgga

SEQ ID NO: 55718 - RNA, 71 nt, Homo sapiens
accacccagaaccagcaaccccccacgagaacccacagccaccaagaggaagagagaaaaaccaccagagg

SEQ ID NO: 55719 - RNA, 63 nt, Homo sapiens
acagggaacggaaacgccggccaaaccgaacacaccaagcaaagggcgagagaagcagcgcag

SEQ ID NO: 55720 - RNA, 68 nt, Homo sapiens
ccacagaaacagccaaccccaggcagggcagccagggggcgaggaagagacaggcgggggagaagaag

SEQ ID NO: 55721 - RNA, 41 nt, Homo sapiens
ccagaccgccaagaggcacaggcccaggacgagcaccaccg

SEQ ID NO: 55722 - RNA, 86 nt, Homo sapiens
ccgcgcgcagggccgcagcgggagcggacggcgagcgcgagcggcgcgagaaaggggggccccagcccggccgaacgggcgcacga

SEQ ID NO: 55723 - RNA, 90 nt, Homo sapiens
cgaacgaacagggaggggcccgcaggagcagcagcgggcgagaaaggaacccggaaaagaccagccaaccacgcgagaaaacagaccagg

SEQ ID NO: 55724 - RNA, 68 nt, Homo sapiens
gcgaacaaaaagcagcaaaccggaccaccccgaagaaagcacaggccgcaaaggaacgccacaaagag

SEQ ID NO: 55725 - RNA, 51 nt, Homo sapiens
cgagacgccagccgcacgaggagagaaaagccaagggacaccagccaggac

SEQ ID NO: 55726 - RNA, 89 nt, Homo sapiens
gcaccgcaggcagacgaggggagaggccgagggcggcgacaagaaccggccacagcacagcaaagccacaacacccaggaggcccccgg

SEQ ID NO: 55727 - RNA, 69 nt, Homo sapiens
gggccaaaaacagaggagaaaaggcggacagcagcgcaggcaaaaaacagcggagaccagaaggccaaa

SEQ ID NO: 55728 - RNA, 51 nt, Homo sapiens
aagaccacaacaagcaagcagcagcacgcgaaagcgcggggaccacgagcc

SEQ ID NO: 55729 - RNA, 79 nt, Homo sapiens
gggcgccgcgcccacggccagacccagcacagcaacagccgaaaaaggaaaaacagacaccgaaagccccaaaaaacaa

SEQ ID NO: 55730 - RNA, 85 nt, Homo sapiens
cagccccgaagacgccgacccccacccgaggaaacaaggcccccacagaacaccgaaccaaagagagccggaggacagcagcacc

SEQ ID NO: 55731 - RNA, 83 nt, Homo sapiens
cgcggagcagagccgccggggagggagccagaagcaacgagggcagagcggcgggaaaccaccaacaacacccccaaaccaaa

SEQ ID NO: 55732 - RNA, 92 nt, Homo sapiens
ggcgaaggagccgacgagaaaaacaaggagcggacacgagccgagggaggggaaaggcgcaggggcagcggggaagaagaaaaggaaccgag

SEQ ID NO: 55733 - RNA, 79 nt, Homo sapiens
ggcgaagaggaaaaaaaacagaacaggaggggagagggcaggaaccaccgcccaaagggcggagaacggaaaagcacca

SEQ ID NO: 55734 - RNA, 45 nt, Homo sapiens
cccaagcaccaagcgccagagcaccaacaagaagaaaagaaacca

SEQ ID NO: 55735 - RNA, 76 nt, Homo sapiens
ggaggagcggggggaaggcggggcccaaggcgccacaagaaacgaaggaggcccaaccacaaaaggagccgacgga

SEQ ID NO: 55736 - RNA, 72 nt, Homo sapiens
cagccccaagaagagcaaaggaggaaacagaagacgaagcacggcaaaccaccagccaaaacaccgacagac

SEQ ID NO: 55737 - RNA, 49 nt, Homo sapiens
agacggaccgggggagacgccaaagccgacagaaaaggaagagacccag

SEQ ID NO: 55738 - RNA, 74 nt, Homo sapiens
aaacacaaaaaaaaacaagagacaagaggcacaagaaaaggaagcaaggaaaaggacagcaaaaagaaacgaca

SEQ ID NO: 55739 - RNA, 79 nt, Homo sapiens
cggggggcgggccggagcggcccgcgccgggcgccggcaccgcggcagaccggaaacaggcacagaacagaaggaaagg

SEQ ID NO: 55740 - RNA, 78 nt, Homo sapiens
cgaacccgaaaggagagcccagaaccgccccagacaaggcccggcccgcggcagagacaagagaagaaagggacgacg

SEQ ID NO: 55741 - RNA, 82 nt, Homo sapiens
aggcgccggacacaaaaggggacggacccgaggagagcaggccacgagcagccagacacagcccaacgccaccaaagccccg

SEQ ID NO: 55742 - RNA, 48 nt, Homo sapiens
aaccaaagagcagcaggagacaggagccaaggcgagcgcaacagcagg

SEQ ID NO: 55743 - RNA, 74 nt, Homo sapiens
agccggcccgagacacgcagccaagaagaccaccggaccagaagacagccacgggaggaacagccagcaaagac

SEQ ID NO: 55744 - RNA, 69 nt, Homo sapiens
cggaagccccccgcaccgcgcaggcagaggaggaaaacgagagggcaacggcaacaaacagaagaagaa

SEQ ID NO: 55745 - RNA, 91 nt, Homo sapiens
cgcgcgccgcgcacccgcgccagcaccacgcccgcgccgcgccgccgccaccagcccaagagaaaggcccgggaggagcggggacacgagg

SEQ ID NO: 55746 - RNA, 60 nt, Homo sapiens
ccgcgggaagcaggacgcgccgcgccccaaggacagcccaaggcggaaaagcgaaggaag

SEQ ID NO: 55747 - RNA, 81 nt, Homo sapiens
cggcgacacgacggcggaacggggaacgacggcccagcaggcggggaagagaaagggacccacgaggaagcggccgcggcg

SEQ ID NO: 55748 - RNA, 76 nt, Homo sapiens
agagaagacgagaccaaagaggaacacaaacggcgcacaggagagggaagagaaaaagcgcgacccagcaacaccc

SEQ ID NO: 55749 - RNA, 46 nt, Homo sapiens
gggaaacccgagaggaaaaggggaaccacaaaaccaagaaacaaaa

SEQ ID NO: 55750 - RNA, 72 nt, Homo sapiens
caagcccgggagccccacaacagggcagaaggaaagagcggaggacccggaccggacaacgcaacacaggac

SEQ ID NO: 55751 - RNA, 78 nt, Homo sapiens
aaaaaagcaacacaaagaagaggaaaacgcaaaagcaccacgaccagagcaggaaagaaggggagccagagagcggcc

SEQ ID NO: 55752 - RNA, 86 nt, Homo sapiens
ccagacgacaccgcggagcaaggaaaagacccggaaagaagagacacagaggagccacacccccagaggcccaaagagggcagcgg

SEQ ID NO: 55753 - RNA, 83 nt, Homo sapiens
ggccggagcggcggcggggcggcgcgaggcggcagagggagccgccggagaaccaggacccagaaaaggaccagaggacaggc

SEQ ID NO: 55754 - RNA, 85 nt, Homo sapiens
agaaaagaaagagcagaggaagaggaaagcgaacgcgaaccagccggccgacgaggagcagggcccccggacgcacaccacaagc

SEQ ID NO: 55755 - RNA, 66 nt, Homo sapiens
cagcccgccgaacccgaaaggaggagaggagccaagcccaacgggacgggaaaacggccacagcca

SEQ ID NO: 55756 - RNA, 73 nt, Homo sapiens
gaccaagggacagggaaaaaggcgccaaagcacagagcaagcggacaaaagaaggcaggaaacaacggcagac

SEQ ID NO: 55757 - RNA, 77 nt, Homo sapiens
gcccggaggaggccagcgggacaagcggcccgacaggcccccagagccgcccacaggaggccccgggcagcgcgggc

SEQ ID NO: 55758 - RNA, 74 nt, Homo sapiens
cggaagggcggacaccccacacgccgccacccccaccggagacaagaccaggaagaggaaggacaacgggggac

SEQ ID NO: 55759 - RNA, 80 nt, Homo sapiens
gcagacaaccggccccaagggcaacaggggacagccaggcaccagggccacccccagaagcggccccgagccccggcccc

SEQ ID NO: 55760 - RNA, 74 nt, Homo sapiens
aaacagcgacgaagcccaccgcccagggcggaaggaaaaggagcaacacgcccgagacggccagggaacaggcc

SEQ ID NO: 55761 - RNA, 51 nt, Homo sapiens
cagcggaacacccccagaagaacccccggcccagacagcaagaggcacaga

SEQ ID NO: 55762 - RNA, 53 nt, Homo sapiens
gagaccccaaaccccggcccgacaggagcacaggcgaccggcccgaggaccgc

SEQ ID NO: 55763 - RNA, 86 nt, Homo sapiens
ccagcgccggcccccaggcgaagaagcgcagccgcaccggccaaggagccccccccagcgccgaaggcccgacccagcagcccggc

SEQ ID NO: 55764 - RNA, 75 nt, Homo sapiens
ggaccgcgagagcacaaacgggccacggccaggggaggaccgcaaaagggccagccgccccagcaacccagcggc

SEQ ID NO: 55765 - RNA, 77 nt, Homo sapiens
ccgccgacgccgcgcagaaagggggaaagcaggggagaaaagaaaagaaagacgggaaagaagcgcaaagcagagaa

SEQ ID NO: 55766 - RNA, 72 nt, Homo sapiens
cggaacagggccagcaccgcaagcgaggagggaagacaaagaggaaccagacaaaaccgcaccggcagaaaa

SEQ ID NO: 55767 - RNA, 81 nt, Homo sapiens
caacggggcgcccccaccggcacaagaacggcggaggccagaagggggcgcagcggggaggccgcgggcgcacgaggagcc

SEQ ID NO: 55768 - RNA, 67 nt, Homo sapiens
ggaacgaacaaacccggcaaacgccggggcggcaaaaaacagcacaagaaccagaaccaagagaggc

SEQ ID NO: 55769 - RNA, 81 nt, Homo sapiens
agagacccacgccccaccaaaagacaaaaagaagaaggaaaggagagagggggaggagagaagaaggaagagaacgaaagc

SEQ ID NO: 55770 - RNA, 64 nt, Homo sapiens
gggacgccggcggagacgcgggcgagacagagcagaacccaggaaggaaaagaggccaagcgag

SEQ ID NO: 55771 - RNA, 95 nt, Homo sapiens
gcccaaaagcggaacaggcaggccagcaagcacaccaggccacgacaggggccaaaaccacaccaaaaccaagggacagaaacagccaagcccga

SEQ ID NO: 55772 - RNA, 72 nt, Homo sapiens
ccaggccagcacgacaaaggaaccaagaagagacaccagcggcaccaccaacccaacaaaagcacgggaccg

SEQ ID NO: 55773 - RNA, 74 nt, Homo sapiens
gacgccccaggggaaaacccccgggaccagggcagagaacacaccgccggaagaggaaaagaaaaaacaaaaaa

SEQ ID NO: 55774 - RNA, 95 nt, Homo sapiens
cccccccccacccgaacacagggcccccagaccaggcgccccaacacccgaaaagcaaaggcccacccaggcacagggagaaacaggaagacgaa

SEQ ID NO: 55775 - RNA, 83 nt, Homo sapiens
cgaagaacagcgggaaagaaggcaaaacacggccacaccaccgaagcggcagaagcagcgcggaggaagaagacgcgaccagg

SEQ ID NO: 55776 - RNA, 85 nt, Homo sapiens
gggaaaagagccgccaggcacgcaccacagaaacagggaagggaaaaggccgaggcacagcgggaagaccgcaaagacgacccga

SEQ ID NO: 55777 - RNA, 65 nt, Homo sapiens
gccccaaaggcgcccggcgcccacaccccccgaagcacaagaccaccaaaggagcaccccccgca

SEQ ID NO: 55778 - RNA, 54 nt, Homo sapiens
acgcacaccacgccgccacaggccaagaaacaggggggaagcgacgacccagcc

SEQ ID NO: 55779 - RNA, 91 nt, Homo sapiens
accacacagaccgccgggaagaaaacacacgcccaagggccggcaagaaggcgcgacgccacgggaaagcgaaggaggcgcccccacaaca

SEQ ID NO: 55780 - RNA, 79 nt, Homo sapiens
agaagaaacgaaagaaacaggcaaggagcgcccagcaaggaacagaccagggcggcgaggaggaggaggacagaaagga

SEQ ID NO: 55781 - RNA, 74 nt, Homo sapiens
cacgaaacgaccgggaaacagaagagagaaaagaaaaaacgcagacagcccaggccagaacacagcagaaaggg

SEQ ID NO: 55782 - RNA, 57 nt, Homo sapiens
ggccgaccgcgcgacggcaagaagaagcgaaaaccgcccacaacaccagcacgaaac

SEQ ID NO: 55783 - RNA, 57 nt, Homo sapiens
cgcggcacagagagggccgggagcgcgcagccagggaagaggccagaaccggcggag

SEQ ID NO: 55784 - RNA, 74 nt, Homo sapiens
gcccgcggggagcgcagcccggcggaggagcaacgcacgaaaacgcacgaggagcacagaaacgcacagaccca

SEQ ID NO: 55785 - RNA, 82 nt, Homo sapiens
cggcccgcacgccaagcacggggggcaggccaccggaaaccccccaggcaagaggcgcaggaccgggaagaccaacaaacgc

SEQ ID NO: 55786 - RNA, 69 nt, Homo sapiens
gggcgcccggcgccggccgagaaggcagaggcgagagaaaaggaacagccgaagccaggggcaagcgaa

SEQ ID NO: 55787 - RNA, 89 nt, Homo sapiens
gaaaggcccaggcacaggaggcagaagcccaggagcaggcgggcgcgaagcccagggaaccaccaaccccagggagggaaaaggcaacg

SEQ ID NO: 55788 - RNA, 72 nt, Homo sapiens
gccccaaggcggcgcgggagcccggcgcggaagcacgaccacggcacacagaaagggccacagaaccaccgg

SEQ ID NO: 55789 - RNA, 73 nt, Homo sapiens
gcaaccagagggccagagggaaggacagggacccagaaagcgggaaacaggaaaaaaccaacaaaagcagccg

SEQ ID NO: 55790 - RNA, 46 nt, Homo sapiens
ccaaagaagggagagagcccagagaggaccaggaaaaaccccagac

SEQ ID NO: 55791 - RNA, 68 nt, Homo sapiens
gccggagggaccccccaccgccgggaacaaagcagaacaagcacaccgacccccaacgggccccaggg

SEQ ID NO: 55792 - RNA, 57 nt, Homo sapiens
cggccagcgaaaacgcccagaaaacagggccagacgggaagaaacgagaagggacca

SEQ ID NO: 55793 - RNA, 82 nt, Homo sapiens
ggcgagagcagcaaccaccgcaggcgcccagggggagccaccacgcccagcgaccccggcccaaagcgcagggaagaacaaa

SEQ ID NO: 55794 - RNA, 71 nt, Homo sapiens
gcccgggccagcggccgcgcacccccggccggaggcaccagcacgggggcggccagccaggaagaaaccgg

SEQ ID NO: 55795 - RNA, 78 nt, Homo sapiens
ccgagccggacccagggagagcagggcagggaaaagcgccgggcggaccagcagcaaccagccaagggaccgcaggga

SEQ ID NO: 55796 - RNA, 59 nt, Homo sapiens
agaagggaaggcgcgaggaggaaaggaggacgaggagaagaagcaggcacagaccccaa

SEQ ID NO: 55797 - RNA, 83 nt, Homo sapiens
aggaacccaccagaaggaaccaaccggacacaaacaagcagcaggaggacaccaaagaaaaaggaaccaaccggagaaggcgg

SEQ ID NO: 55798 - RNA, 69 nt, Homo sapiens
gaaaagagaagaaaagcacggaggacccggccaggaccgcaggggaaccgcacgcccgggcaccgcagg

SEQ ID NO: 55799 - RNA, 81 nt, Homo sapiens
ggacacgccaaaccgagcacagaaagagaccgcccgcccaacggcaccagcccaaagaggggcaaaaggaggaaagacgcg

SEQ ID NO: 55800 - RNA, 73 nt, Homo sapiens
aaagccagaagaggcccggaacccaagaagggaagcacagaaaacgaacgagaaacgagggagaagaagcaga

SEQ ID NO: 55801 - RNA, 36 nt, Homo sapiens
cccgcggaggagcgcccggggaccaagcgccagaac

SEQ ID NO: 55802 - RNA, 80 nt, Homo sapiens
ccgcgagcccagcgcgcggccccgcccggcggccgggcccagaagccagaggacaacagagcaaccagccgggcaccagg

SEQ ID NO: 55803 - RNA, 72 nt, Homo sapiens
gagccgaagaaggaagaaccacgaagaaacaccacaaaccggacgaggaacgagcagacgacaacggaacaa

SEQ ID NO: 55804 - RNA, 75 nt, Homo sapiens
agaagaagagaaacagaaagaacacaccaaggggagagaagcagagacaagagagccggccaagaaaggcggaca

SEQ ID NO: 55805 - RNA, 70 nt, Homo sapiens
aaagaaagaccagagacacgaagaagaggagcgcagcgcccgaacaacaccagacaaacgaaagccaaaa

SEQ ID NO: 55806 - RNA, 83 nt, Homo sapiens
aaaaacaacacaccaggcgaagacaagagcgccccaaaagaaacaaagccaaccaggcaacagaagaaagagcaaaaggcacc

SEQ ID NO: 55807 - RNA, 75 nt, Homo sapiens
gaaaccccccacaggaaaggagggaagccagaggccaaaggcaggagaagaagggagaccgggagagaaaagaga

SEQ ID NO: 55808 - RNA, 75 nt, Homo sapiens
caaggacagcgaaaaaaaaagaagaacggcaagacaacagggcagaggagaacgccaagccaaccgaaaaagccg

SEQ ID NO: 55809 - RNA, 94 nt, Homo sapiens
ggaacggggggagagaacccaaccagggggaaacacagaacgcaggggcgacccagcaacgcggccggccaggggcaagcgagcacggagggag

SEQ ID NO: 55810 - RNA, 67 nt, Homo sapiens
ggacggggaaggccggggcgcccggcgccggccgagaaggcagaggcggcagagggcccaccccgga

SEQ ID NO: 55811 - RNA, 82 nt, Homo sapiens
cacacagcaggacggaaacgacacaggaccagacagcaggggacgaacgccaggagccagaaccccgaggaaaggggaaaag

SEQ ID NO: 55812 - RNA, 77 nt, Homo sapiens
agaaaaggacagaccagacggaggaggagccggacgggccaggcggcaggagggaaagcaaggaaacgcccccccag

SEQ ID NO: 55813 - RNA, 76 nt, Homo sapiens
ccaacacccagagacgaaaggacagggcagaccgccagcagcacagcaagccacagagagggccggcagggcgggc

SEQ ID NO: 55814 - RNA, 75 nt, Homo sapiens
gaagaagagcaacgccaacggaaacagagagcaaggagaagcgagaggcgcagaaagaggaccggccagagcgac

SEQ ID NO: 55815 - RNA, 78 nt, Homo sapiens
gcagccaggggagagaaaaacccaagggggagacacccgccacaaaaggggaaaaaagaacccggaaagcggaaacaa

SEQ ID NO: 55816 - RNA, 77 nt, Homo sapiens
aagacggggagccagcaggcagggaaagggagcagcaccggccacacccacagcacgaccggaacccagcgaccgac

SEQ ID NO: 55817 - RNA, 79 nt, Homo sapiens
gacgagcgagccccgcggcgccgcgggcccaggagcagaaaagcaggccggcgacagcgggaccgcaggacgagaccgg

SEQ ID NO: 55818 - RNA, 79 nt, Homo sapiens
gcagaaccgacagaccaggaagaagcacacaaaaagcccccccgcagagaggaagcgggagaggagcccacgcgccgca

SEQ ID NO: 55819 - RNA, 67 nt, Homo sapiens
gaagaggagaaaggacacacgaaaacagacgggggaacaagaggaaagaaccccaagaacgaaaagg

SEQ ID NO: 55820 - RNA, 85 nt, Homo sapiens
cggaggcggaggcagaggggaggcgcgaaaggcccggggacacgagaccggccagcagacgaccacgaccggacacacggagagc

SEQ ID NO: 55821 - RNA, 72 nt, Homo sapiens
aagaccgggaggggaccagacgcggcaggccgagaaaggagagcagcaggcccacgaaaccaccgcgccagg

SEQ ID NO: 55822 - RNA, 63 nt, Homo sapiens
cacccggaggagagggccaccaaacagcggagagagcaggagacggagggcagaggcagggag

SEQ ID NO: 55823 - RNA, 78 nt, Homo sapiens
cgggcggcggccagcgggcccacagcccagggggggggaccaacaacacaaaccgaacaacaagaagagaagcgcagg

SEQ ID NO: 55824 - RNA, 62 nt, Homo sapiens
gcgaagaagcgcagccgcaccggccaagggcgcacgcgggacagagcacccgaagcgcccag

SEQ ID NO: 55825 - RNA, 69 nt, Homo sapiens
caaaaaacaggaaaaacagaagaggcagggcaaaacgagggaaccagagacgcgaacaccgacagagag

SEQ ID NO: 55826 - RNA, 36 nt, Homo sapiens
ccagaagccacgggacggagagaaaagccgagaagg

SEQ ID NO: 55827 - RNA, 86 nt, Homo sapiens
aggcagcagcccagacgcggcacagagagggccgggagcgcgcagccaggaaaccccccaggcaagaggcgcaggaccgggaagac

SEQ ID NO: 55828 - RNA, 59 nt, Homo sapiens
gggcggcacgcacgcgggcagggaacaggcggagcggaagacagaacacaagccagcag

SEQ ID NO: 55829 - RNA, 80 nt, Homo sapiens
ggggcggacaccacaagaagggcgccagaacagcaacccgccaggaccacgcagacccaccgggagggccggacaacagc

SEQ ID NO: 55830 - RNA, 61 nt, Homo sapiens
ccacagaagcagggcagccacagaaccaggaagacaacaggcccagacccagagcccggag

SEQ ID NO: 55831 - RNA, 79 nt, Homo sapiens
ggggacacgggcccaggcccgagggggccggaccgggagggcaggagagaagagacgaggaggaggggagaccgcggca

SEQ ID NO: 55832 - RNA, 81 nt, Homo sapiens
caagaaggagaaaccaagaagacaccgacacgaaaacagggcaggcccaccgaagacagaaaaaacggggggaccacagaa

SEQ ID NO: 55833 - RNA, 87 nt, Homo sapiens
ggggacgggacacagcccggcacacagcgcggccagagcggaccaggacggagacccgaggaaagccgggaccaaaagcaagacaaa

SEQ ID NO: 55834 - RNA, 72 nt, Homo sapiens
cacgggccggacgaggacaaaggaacagcacagggcgcaacaagagcgacaaacgcagagaagaccacagaa

SEQ ID NO: 55835 - RNA, 74 nt, Homo sapiens
agaggcaacaggccccagaggagggaaagcgccaagaagccagaaaaaggagagaaaaagaaggacaaaagaga

SEQ ID NO: 55836 - RNA, 68 nt, Homo sapiens
cagccgacagcccgcccaggaagggacccgagcacggacccgcagggaagcagaacaaaaacacaaac

SEQ ID NO: 55837 - RNA, 72 nt, Homo sapiens
ccgcaagacggacccgaccagacaagagagggcggcagaaggaacaccgagaaaccgcacaccggagacggc

SEQ ID NO: 55838 - RNA, 71 nt, Homo sapiens
ggacccccgcgggcgacgcgagcccaggcgccggcgaaagcaacgaagggacgccagaacaagagaaggag

SEQ ID NO: 55839 - RNA, 78 nt, Homo sapiens
gcaccgaagaccccagccgacagaccccccccgaccccgagagggcgaagacaggacggcccaggcagacacggagga

SEQ ID NO: 55840 - RNA, 73 nt, Homo sapiens
ccggcccgcgcgcgcaccccgcggacgccacagcgcgcaagccacagccaggaaacaccagccccccggcacg

SEQ ID NO: 55841 - RNA, 49 nt, Homo sapiens
gaacccgccgaaaacaccaacgaaagccggaaacaagccaccgcgggag

SEQ ID NO: 55842 - RNA, 66 nt, Homo sapiens
ccgggccaacagaacacagggaggaacgccacaaagcaggcgaacaagaacacaggaaagaaaaaa

SEQ ID NO: 55843 - RNA, 66 nt, Homo sapiens
agcgccggggccgccgaccaacacccgaggcggacgcagagacagaaggccccaagagcaacggaa

SEQ ID NO: 55844 - RNA, 58 nt, Homo sapiens
acaacacacaacagaagacaaggggccccagacacgacgcccccggccggcccgggcc

SEQ ID NO: 55845 - RNA, 89 nt, Homo sapiens
agggggggggcgcagggagcgggagccgccgccgccgccgccgccgccggagcaacccggggaccgagagcagacggcagccggcccgg

SEQ ID NO: 55846 - RNA, 78 nt, Homo sapiens
aagggccgagcacagcaagcaaggccagcgagacagaccgaaacccaaagaaaaggagcgcgcccaacgagagaaaga

SEQ ID NO: 55847 - RNA, 71 nt, Homo sapiens
aggaccaggcgggggcccagacaccggccccgcagcacccggaaacaagccacgaaggagagaaaaccagc

SEQ ID NO: 55848 - RNA, 78 nt, Homo sapiens
agcgccgggacagggggaggaaagcaccgaggcacaacagcagccaagaagagggaaagaagacaggaaacaagggaa

SEQ ID NO: 55849 - RNA, 78 nt, Homo sapiens
cacaacaggaaaacaaaagaggagaaagacgcaaacagcagacggaagaccccacggcaaaaccacacccgaggcgag

SEQ ID NO: 55850 - RNA, 77 nt, Homo sapiens
cgaggcgcaagcagggacgccggggacccagccgggaagccggagaaccgaagcgaaaagagggcaacaagggaagg

SEQ ID NO: 55851 - RNA, 79 nt, Homo sapiens
gaggacacgggagagccgaaccagaagagaaaggaaacccaccagagaaggcgcggccacccaggacccgggggaggca

SEQ ID NO: 55852 - RNA, 77 nt, Homo sapiens
ggcaccggacggcggaaagcacgagacgacggagagggacaaacaaccaagggagggaacccagcgccccaagcgca

SEQ ID NO: 55853 - RNA, 59 nt, Homo sapiens
gaaggagcggaaaccgagccagggcgagccggcgacaacagagaaggacaagagacagc

SEQ ID NO: 55854 - RNA, 71 nt, Homo sapiens
cgaacaagcgacaagcgccaccgagcagaggagagccaggaaagcacaggaccggcagacagagagggccg

SEQ ID NO: 55855 - RNA, 78 nt, Homo sapiens
gagagaacacgccggagagcagaagaggagccaggaaggaacgcaagcacaggaccagaaacgaaaggcagcagaaga

SEQ ID NO: 55856 - RNA, 57 nt, Homo sapiens
aacaggaggaagaacccacgaaacacaggggaaccgcccaaaagcccgccagaagaa

SEQ ID NO: 55857 - RNA, 73 nt, Homo sapiens
cgccgaagaagcacgaaagccccacccgccgcagcaagcagagcaggaacaagcacacaggaagaacagaagc

SEQ ID NO: 55858 - RNA, 87 nt, Homo sapiens
ggggaccgcacacccggccgacgcccaccccaaggcggaccccaagaagaagcggaagaggagccgcggaaccaagacacaaggaac

SEQ ID NO: 55859 - RNA, 75 nt, Homo sapiens
gcggcgcacagggagaagagaccgaaggaaaagaagccccaggcaggcggggaccaacgcgagagcagaacacgg

SEQ ID NO: 55860 - RNA, 55 nt, Homo sapiens
cccggggacacaagcccccaaggaaccaggaaaaaggcgcaaagcgcagagaaaa

SEQ ID NO: 55861 - RNA, 71 nt, Homo sapiens
gagaacgccccaagaagaaagcaagcaacccaaaaaccagaagccggaaaggcaacacaagagcgcagacc

SEQ ID NO: 55862 - RNA, 79 nt, Homo sapiens
aaagaacagcaacagagagagaaagaaagaaagaaggccgggagaagcaagaaccgccacgacgagacaagccccagga

SEQ ID NO: 55863 - RNA, 92 nt, Homo sapiens
cgcccgcgcggggacgcggacggggagcaccgaaagccaggaaagaggcaggaagagagaccgaaaggaaggcacagcaggagaaagaccca

SEQ ID NO: 55864 - RNA, 84 nt, Homo sapiens
gcaagagacagggaacaccgcacacccgaagagggggaaaacgcagggaagagaggacagcaggagggcggagacaacagaaac

SEQ ID NO: 55865 - RNA, 69 nt, Homo sapiens
gcgccgccgcccacaagcggcgccgcgccccggccgcacggggccgggccggccccagaacagggagaa

SEQ ID NO: 55866 - RNA, 73 nt, Homo sapiens
agcccagcagccgagggcgggccgaggcggaaaggggaagaagacaccagcaacagacgcgacaccagaaaag

SEQ ID NO: 55867 - RNA, 109 nt, Homo sapiens
aaacaacaaaaggaagaaaaaacaaaacaagaagcagcccaaaacagagcaagggcaaaagaaccaaagagcggccgcgaacaccgagccaaccccaccaccgaccccg

SEQ ID NO: 55868 - RNA, 63 nt, Homo sapiens
gaaggcgagcaggggcgggagagccccgcagaagacgccgacgaggagaaaagaaagccagaa

SEQ ID NO: 55869 - RNA, 72 nt, Homo sapiens
gaagaggaagcgagacgaggagcacaggaaccgaaggaggagaggcagaggggcgggcaaaggagaggcaca

SEQ ID NO: 55870 - RNA, 75 nt, Homo sapiens
gagccgggacacgaagaagggacggggacccccaacgggcccgcagacaccaaacccaaaggccagaccagaaca

SEQ ID NO: 55871 - RNA, 75 nt, Homo sapiens
gcgacggaaagaacccaaccaagggcggccagacacaaagacccaggcagcagcaaggacaagaggagaaaagcc

SEQ ID NO: 55872 - RNA, 65 nt, Homo sapiens
aaaaacaagagcacgaagccacaacaggagggcgaaaggaaccagagcagacaagacgcacgcgc

SEQ ID NO: 55873 - RNA, 79 nt, Homo sapiens
ccaggggcaggccaggggaagaacaggcagcacaggcaccccacgagagaagccaggcacaagaggagggaaacccagc

SEQ ID NO: 55874 - RNA, 76 nt, Homo sapiens
cgcacaggaagaagagggggacacccaaagggcgcccaagcgcaaggaaaaggcaccagaccaggagggagaaacc

SEQ ID NO: 55875 - RNA, 74 nt, Homo sapiens
aacccacccagagcccacccccgcagcacagggggagagacccagcagcaagggacaaacgggacggaaaacgc

SEQ ID NO: 55876 - RNA, 62 nt, Homo sapiens
gcagcgcacgcagggggcgacggggcgcagggggcgcaggcagcgccccaaccccagaaccg

SEQ ID NO: 55877 - RNA, 66 nt, Homo sapiens
aagcagccgggaaaggagccggccggcggcaaaggcaaagagaagaaaccaagagggaagaggaaa

SEQ ID NO: 55878 - RNA, 75 nt, Homo sapiens
gaggaagaggcagaggacccaccgccagccacccacgccagcagaggaaggagaacgaccgccagaagagaagag

SEQ ID NO: 55879 - RNA, 80 nt, Homo sapiens
agagcgccacgcacagcgaggggccaaggcagaagaaacggagaagggcaaaggaccgaaagcacagaacacgggcgaag

SEQ ID NO: 55880 - RNA, 76 nt, Homo sapiens
gaaaaaagaaagagacagcaggcgcaggccggagcgcacgaaccaggcacacagagacacaagaggacaaacgggg

SEQ ID NO: 55881 - RNA, 73 nt, Homo sapiens
gggccccacacccccccggggggggaaaccagggaggcaacgccgcacaaccggcaaacgcaccaacaggcaa

SEQ ID NO: 55882 - RNA, 71 nt, Homo sapiens
agagccaagcccagccgacaaagaagggcacaccaccacagggaaccagcccccaaagaaggcagggagcc

SEQ ID NO: 55883 - RNA, 79 nt, Homo sapiens
ggcgacggccccagcccacagcagcagcagcggcgccgcccgcagcccacagcccggccagggccagcagcagagagac

SEQ ID NO: 55884 - RNA, 73 nt, Homo sapiens
caaggggcacaagccaacaaaccccacgcggccagaagacgagggccacacagggacgaaaacccgcggcgag

SEQ ID NO: 55885 - RNA, 76 nt, Homo sapiens
ggagaaggagggaaaaccgccaagggagcggaaggaggaagcaacccacaggagaggcaaaaaccaagggaaagag

SEQ ID NO: 55886 - RNA, 81 nt, Homo sapiens
ccccggggaaagaccgccagcgaggcagacacacggggcgacagcaagaaggagccagcacagaggcaaaagaaccaacaa

SEQ ID NO: 55887 - RNA, 74 nt, Homo sapiens
gcccagcagaagaagagaggagggagaacacagaaaccggccccagaacgccaggagccagaaccccgaggaaa

SEQ ID NO: 55888 - RNA, 54 nt, Homo sapiens
gagccgaacgagccccagccagggcagcgcagacagaccccgcccagaacacac

SEQ ID NO: 55889 - RNA, 72 nt, Homo sapiens
gccccccagccgcgaagagacccgacagacgggaaccggggaggacggcgcacccagccacagacccaacca

SEQ ID NO: 55890 - RNA, 80 nt, Homo sapiens
ccgaccgggggcggcccacggaacggggaaggagcgagagcgcagacccgcagaagggcgccggccgagcccgggaaaac

SEQ ID NO: 55891 - RNA, 66 nt, Homo sapiens
ggacgggaggggaggcaaagggaggaggaggaccggaggccaccaggaccacgcggcgaaaggcgg

SEQ ID NO: 55892 - RNA, 70 nt, Homo sapiens
gcggaccgaagagcgagaaggggcaaaggcgcccaaagccagaccgccagcgaaggagaggaaaagagga

SEQ ID NO: 55893 - RNA, 83 nt, Homo sapiens
ggaggcggcaggacggccaagaccagcgcgagggcccgggcaaggcccgacagggccgagaggacgaaaaaagggccggcccg

SEQ ID NO: 55894 - RNA, 77 nt, Homo sapiens
gaaaaacggagagccacaaaaaaggaagcgaaagggagaagcagaccgcaccaggcgggaccccgaaaaagcccaaa

SEQ ID NO: 55895 - RNA, 79 nt, Homo sapiens
aggccaccagcccagccccgaaggcccgcggagacgagaccaacaaaagcagccaacacaacgaagaggcacagcagag

SEQ ID NO: 55896 - RNA, 74 nt, Homo sapiens
agacggagacccccggaaccaaaggaaaacagacacgacccaagaaccaacgccagagagaacaggacagggga

SEQ ID NO: 55897 - RNA, 73 nt, Homo sapiens
agaccacacaccaaacccgcccgagccaggccgcccagaggcagcagggcgcagcaaagcccgacaaggagcg

SEQ ID NO: 55898 - RNA, 74 nt, Homo sapiens
ggccgggccgagaacgaacagggccacgaaagaacgaacagcaaacacagcgacaaacagcgagccccgccgcc

SEQ ID NO: 55899 - RNA, 74 nt, Homo sapiens
gagagacccaggcacccagggaaacgagaggggagaagaggaggagagaaagaaagccagcgcaacgagagaac

SEQ ID NO: 55900 - RNA, 58 nt, Homo sapiens
caaagcggccacggggcacaccgccgacggcccgcccaagacgaggacgcgcacagga

SEQ ID NO: 55901 - RNA, 53 nt, Homo sapiens
cgcgcagggcaagggggccaaagccccacacgagggggcacccgaggaggaag

SEQ ID NO: 55902 - RNA, 76 nt, Homo sapiens
caccccccaagcggaacggcccgcggagcccagcacggcagaaacagccaaggacccagaccacaagacaggagga

SEQ ID NO: 55903 - RNA, 73 nt, Homo sapiens
aagacagggacgcaccgacgaggcgaggaccgcgggaagcacaaaggccagcgaacaacggggaaaagaggaa

SEQ ID NO: 55904 - RNA, 75 nt, Homo sapiens
gagcccgcagaaccccacagcaagaggacggagcggcagcccacaagcaggaagaccagccccaggagggaaaca

SEQ ID NO: 55905 - RNA, 58 nt, Homo sapiens
caagcagagcccgcaggagcccacgggacacaggaggccccacccggcaaccccgacc

SEQ ID NO: 55906 - RNA, 65 nt, Homo sapiens
cgaggcaaaacagcaggaccgagacgcaacagcagcacgggcaaagagacccccaggacgccgcg

SEQ ID NO: 55907 - RNA, 68 nt, Homo sapiens
gaaagacccggcaaagccaaccgggaacacgccgccccacccgcaggagacagcaaggaccaggggaa

SEQ ID NO: 55908 - RNA, 80 nt, Homo sapiens
aagaggagaccaagagcacacaagagaacaggcagaaaccacacaccagaaagaacgagagaaccagagcccggcacggg

SEQ ID NO: 55909 - RNA, 75 nt, Homo sapiens
cgggccccaacacccagagacgaaagggcccgaagccagcagagagcggaggcgcaaaccgagccacagagaaaa

SEQ ID NO: 55910 - RNA, 80 nt, Homo sapiens
gccccggaaaagcccggaaacacacacaaggggagaggcaccagcaacagaccaaccgcagcaagcacagagacaggaag

SEQ ID NO: 55911 - RNA, 100 nt, Homo sapiens
gaccagacgcggcagcaacagcgagacccggggcgaggacccccgagccaggccagacagccacccgcaaacgaacgaggaaaaaacggccaggaaagaa

SEQ ID NO: 55912 - RNA, 74 nt, Homo sapiens
aacgaaggcaaaccaacccagcacaaacccgaaaaacgaccccggcacaaagcagaccgccccacgggcgcgcc

SEQ ID NO: 55913 - RNA, 73 nt, Homo sapiens
caccagcagcccccagcggccacagcagcccaccggcacagccacccgacggaccacggaacaggaaccagga

SEQ ID NO: 55914 - RNA, 39 nt, Homo sapiens
cggaagacggccgccaccacggcggaggcagggcgggac

SEQ ID NO: 55915 - RNA, 67 nt, Homo sapiens
ggcagagaaaacacccgagagcaccgccgagcggaccccaagacgaaagcgaaaagaaacagaaaga

SEQ ID NO: 55916 - RNA, 72 nt, Homo sapiens
agcccacgggaacaagaggggacagaaaggggcgggaaccagaccacccgagaggccccgggccccgccaca

SEQ ID NO: 55917 - RNA, 73 nt, Homo sapiens
ccccccagccacgggaacgcagaagccaaaacccagcgaaaggagaaggaaagacaggcaagagaggaggcgg

SEQ ID NO: 55918 - RNA, 74 nt, Homo sapiens
gagaggccgggcgagcagcaggagcaccggcccaagaaacagagaaggcacaaagcggagcagagaggcgaaac

SEQ ID NO: 55919 - RNA, 74 nt, Homo sapiens
cggcacgggccgcgcacggcaagaccaaccagcaaagcggagccgggagccaccaaccgcagcagaaggccggg

SEQ ID NO: 55920 - RNA, 54 nt, Homo sapiens
agcaagagaacgcaagagacgacacgcaagcgaggagcgacgaggccggagggg

SEQ ID NO: 55921 - RNA, 70 nt, Homo sapiens
cgagagagggaagcgcccggccggaggcaggggaaagacaacggcaagcggagaagagcaaggccgaacc

SEQ ID NO: 55922 - RNA, 79 nt, Homo sapiens
agcccacgaagaggacgaccggagaacgcgaggcagagcgggagcgcgcagccaggacgggccaacgcacggcccggca

SEQ ID NO: 55923 - RNA, 69 nt, Homo sapiens
gaagacgaagagaccgaagcaacccccaggaccgggcagacggcggggcaaggaagacccaaaaggcag

SEQ ID NO: 55924 - RNA, 72 nt, Homo sapiens
cacggaaagacaccggccagcggccagagcgagcaggccaaagccacccccaaaggcagaggaagaacgagc

SEQ ID NO: 55925 - RNA, 36 nt, Homo sapiens
gcaaagcgcagaaagggagaaaaggggccgcccgaa

SEQ ID NO: 55926 - RNA, 83 nt, Homo sapiens
cgaagcgagggcgaagcacgacacagaaggggaggggagggaaaggcccaggaaaaagacgagaggagaagagacgaaaaaag

SEQ ID NO: 55927 - RNA, 68 nt, Homo sapiens
aacaccaggcgccaggcagacggagcaccgcagacaccggggggaagcccgggccaggaagcagcgcc

SEQ ID NO: 55928 - RNA, 78 nt, Homo sapiens
aagaccccagcagaagccgagggcgggaccccgcggaacggccgcggggagcggcgcgcgcacaggcacacgacaccg

SEQ ID NO: 55929 - RNA, 76 nt, Homo sapiens
cgcgggcggacgacagaggagccgaaccacccagcgccacggcccaggcaagcccagagaagcccggcccaaacac

SEQ ID NO: 55930 - RNA, 85 nt, Homo sapiens
ggaacgggaacggccagagcacgcagcgagcgagaagaggaggacaacagcacaaccggggggaccgcacgggcgggcaaggcag

SEQ ID NO: 55931 - RNA, 77 nt, Homo sapiens
agagacaggaccaaaacaccagagcaacggagagagagaagccaccagggagcccgaccccgcgcccacccaacaag

SEQ ID NO: 55932 - RNA, 81 nt, Homo sapiens
cggcccggccgagcggaccagagcccccccagaaaccccgcgccgccacggcccaggcaggaacaaggcacccaccccagc

SEQ ID NO: 55933 - RNA, 55 nt, Homo sapiens
caccgaggcacccgaagaagagaccaccaaccagaacggccagcagaaggaccaa

SEQ ID NO: 55934 - RNA, 80 nt, Homo sapiens
caacaggccccccgccccccccccgcgggcaccgaggacccgcccgcccaggcacaagcaagcacacggggcacgccacc

SEQ ID NO: 55935 - RNA, 72 nt, Homo sapiens
ccgggaccggcgcagagacaggcgcgaggagacaccgcagaggagggcccacagacaaaccagaagacccac

SEQ ID NO: 55936 - RNA, 78 nt, Homo sapiens
aaccccgggacacgcaggaacggcccagcacaagaccgcgacagggcacaagcccaggaaaaacagaacgagggcagc

SEQ ID NO: 55937 - RNA, 85 nt, Homo sapiens
accgacgagcgcacgaggaggcgcgcagaaccagaccgggagcacgcacccacgaggggccggccaaggagcgaaaaggaccaac

SEQ ID NO: 55938 - RNA, 81 nt, Homo sapiens
ccccaccacagacccagccagccaccagccggagcaaggacacaggaacgccacaagaaacaacagcaaggcgagggccac

SEQ ID NO: 55939 - RNA, 82 nt, Homo sapiens
ggaaggagaaaaaccagacagaccaggccgaagcccaaggccacaaggccgcgacagccaccaaagcagcgcggacaagaaa

SEQ ID NO: 55940 - RNA, 88 nt, Homo sapiens
cgcggagaagcgcacccagaggagcgcgccaggagcggacccggaggaccgcaggaagaaggcaagaagccacaaccaccgagccccc

SEQ ID NO: 55941 - RNA, 80 nt, Homo sapiens
agaaggagagaggccagagaggaggccacccaggaaaggggaagcgcggggacgggcagagggacccccaggcggccgga

SEQ ID NO: 55942 - RNA, 82 nt, Homo sapiens
cccggaccggccgagaggaagacgagccgggaggaacggcccggaaacaggaggaccccgaagaggaaggagaaggaaagag

SEQ ID NO: 55943 - RNA, 74 nt, Homo sapiens
cgaaccccagcccaagccgcgcccgggcggagaacggaaaagcaccaggaagcagagaggaccgcagaagggaa

SEQ ID NO: 55944 - RNA, 40 nt, Homo sapiens
ccccaaacaagggggacggacagagagcagagagcaaaaa

SEQ ID NO: 55945 - RNA, 79 nt, Homo sapiens
ggggagccaaacccggcgcacgagaacggcggcgccaacaagccacaagagggaacagaaggccaggggagagggagaa

SEQ ID NO: 55946 - RNA, 80 nt, Homo sapiens
ccggccacccagagcgcggggcggcgcgccccccccaggcccgccgcccccgccaagaggcgagggcgccggcaccaggg

SEQ ID NO: 55947 - RNA, 67 nt, Homo sapiens
gcacagagcgagaccaggaaagaagggggcagaagagggggggcgaaggaacacgagccgggccagc

SEQ ID NO: 55948 - RNA, 75 nt, Homo sapiens
agaaagcacgaggcacccccggaccagaacggcacggccacgggcgggcaggcaagggaggagaggcaggccgcg

SEQ ID NO: 55949 - RNA, 55 nt, Homo sapiens
cgacacggggccagggaacccggcaccgccccagagcagagggcacaaaagggag

SEQ ID NO: 55950 - RNA, 53 nt, Homo sapiens
gcagcccgaaacagccgagacaggggcgaacaccgggggcaggccgcgccaca

SEQ ID NO: 55951 - RNA, 54 nt, Homo sapiens
cccgccccgggcccggggagaagacgcggcggcgcgagacaaaaaacacaaagc

SEQ ID NO: 55952 - RNA, 39 nt, Homo sapiens
ggagagggccaaaagcagaagcaaaaggccagggacaag

SEQ ID NO: 55953 - RNA, 79 nt, Homo sapiens
aaaagcagacgcgcccccgcccgcacaacaggcagggaacacagggaaaagcccagcgcagagcaccacaggagccccg

SEQ ID NO: 55954 - RNA, 70 nt, Homo sapiens
cccccggacagacgccgacgcccaggaacacagaaacgccccgggccagccgccaaggccgcccagagcc

SEQ ID NO: 55955 - RNA, 61 nt, Homo sapiens
agaaggaccaagaaccagggccaggcagcgaagaagacaaagaagaaaacaaagccagcca

SEQ ID NO: 55956 - RNA, 80 nt, Homo sapiens
gcgcacagaacaggcggggcaccccgcccggccgagcccggaccagacagggaaggggcgagagaaaaagaagaacagga

SEQ ID NO: 55957 - RNA, 57 nt, Homo sapiens
cgccgcgcacgggcaaggcgacaccacgaggaccagacaacagaggagaaaaggaaa

SEQ ID NO: 55958 - RNA, 37 nt, Homo sapiens
gaggacccgggaacccagaaaccccgcaaaacccgcg

SEQ ID NO: 55959 - RNA, 52 nt, Homo sapiens
accggcaggaacggaaggcggcggagccagggggaggaggaggcggcccgga

SEQ ID NO: 55960 - RNA, 80 nt, Homo sapiens
gaaaaggaagaaaagccaaaccaggagagagacacggaaaaccgccgccccaccgaagggcaagccagacgaagcggaca

SEQ ID NO: 55961 - RNA, 69 nt, Homo sapiens
gcggaggaggagggcggaagcacggaacccaaaggcagcggagaacacagggcgccggaagagggaacg

SEQ ID NO: 55962 - RNA, 75 nt, Homo sapiens
ggcgcagaaccagaccgggagcacgcacgccacgaagcccccccaaagccccgaaacagagcagacaaagggcga

SEQ ID NO: 55963 - RNA, 45 nt, Homo sapiens
agaaagcaccacggaggacggacaagccgacgcacagcaaacaga

SEQ ID NO: 55964 - RNA, 72 nt, Homo sapiens
gaaaaaaaagaccccaaggagccacgcccgagagcccgagccacgcaggaaggcacggcgcaaacggcgccg

SEQ ID NO: 55965 - RNA, 79 nt, Homo sapiens
aacaggggcggccaggaaaacccagagcgaggagaacaagaagaaagaacgagaaaggagaacccagacacggagaacc

SEQ ID NO: 55966 - RNA, 97 nt, Homo sapiens
aaaggagcaacccacgaaaaacaacagacccaggccaagaggccaaccagcccaaggaaaggcccaggcacagcagacgcacggaggcggggacaga

SEQ ID NO: 55967 - RNA, 75 nt, Homo sapiens
agcccgccccccgggccggcacaaggggacgaagaagaggaaaaagcgcgggacagaccaggggacagaccaagg

SEQ ID NO: 55968 - RNA, 72 nt, Homo sapiens
aaggagcaaaaggaacacaggaaccgggaaggagacgccaacaaacacagacagacagcacggagaggaggg

SEQ ID NO: 55969 - RNA, 80 nt, Homo sapiens
ggacgaggaccagcagaggccagcacgagaacccagacggcccgccacgggccccgcagccgcgcccgagcgcccgagca

SEQ ID NO: 55970 - RNA, 72 nt, Homo sapiens
aggccgaagaaaccaaggaggacagacggcccagaaagggaaaccagaagaaaggaaagcccggacagaacc

SEQ ID NO: 55971 - RNA, 61 nt, Homo sapiens
ggccgcaggagcggaaacgcgggacgcaacacccagcagcgcgccagaaccagagaacagc

SEQ ID NO: 55972 - RNA, 83 nt, Homo sapiens
cagacacaaggagggagaacagcacaaagccccccaagagaacccagggggagccacgccggagcgggcaccggcgcggaccc

SEQ ID NO: 55973 - RNA, 75 nt, Homo sapiens
cgcggccagccccgcccggcccgcccccaagacgcgaccaaacggaccagacgcaggaaacagaagcgcccagag

SEQ ID NO: 55974 - RNA, 77 nt, Homo sapiens
cagggagggaaagcgccaggaggagacagacccagcacggaccccccccccagccgggcgaggccccgaaacgcagc

SEQ ID NO: 55975 - RNA, 72 nt, Homo sapiens
agacacagaagccgacagggagacacggcaggaacccgcgaagcgggaaggacccagacagacggcacgccc

SEQ ID NO: 55976 - RNA, 77 nt, Homo sapiens
ccagaggagggaaaaggcgagaagcaaggacagagaacccaagcaagcgacaggaagacggccagaggaccccgcac

SEQ ID NO: 55977 - RNA, 80 nt, Homo sapiens
gaaaaccaaccagaagacgaacaaacagcaagaaagaccacaagaccagcggcgcccagcggccacacgccccaagcgcc

SEQ ID NO: 55978 - RNA, 73 nt, Homo sapiens
ggcaagaggaaaaaaagccagccaacgacaacaccagcagaaaggcggaaaaaggaaaccacacaaaggaaaa

SEQ ID NO: 55979 - RNA, 42 nt, Homo sapiens
ccagcacccagggcagaaagcagggccagcccaaggcaagaa

SEQ ID NO: 55980 - RNA, 87 nt, Homo sapiens
ccaacaagaggaaagacacaccaccaagaagccagcaagcggccagaccgaggaggagaaggggcggcccggaggccgagaggagcg

SEQ ID NO: 55981 - RNA, 78 nt, Homo sapiens
cggccgcagaccgcgcggggccgcgccgcgccgccacggccagcccccggagcaaacaggaccagaagccaaagaggc

SEQ ID NO: 55982 - RNA, 79 nt, Homo sapiens
aacacgccgggaggaagagaagccaaaacaaagacaggaccgaggaggaagaaaagagcggaagcaaacaggaagcaaa

SEQ ID NO: 55983 - RNA, 74 nt, Homo sapiens
ggcaacaggaaagcaagggaaggcgccccaacaaagggacagagcgggagccaccagcgccaaagggaagccag

SEQ ID NO: 55984 - RNA, 85 nt, Homo sapiens
ggaaacaaaaacgcacacaacgacccagcaaaccaggaacggagggaaagcgacaaacaaccaacccacagagacccagagacca

SEQ ID NO: 55985 - RNA, 77 nt, Homo sapiens
cgaccagaaggcgcgcggagccgcgacaccaccgacaacacccaagaacccaaaaagagccagaaaccgggaaaagg

SEQ ID NO: 55986 - RNA, 74 nt, Homo sapiens
aacgggaggagcggggggaagacacagaccagcgcgagagaacaccaaggagccccaaaccaaagagagccaag

SEQ ID NO: 55987 - RNA, 67 nt, Homo sapiens
acaacgcacccaccagcaaagaaagggaagcagcgggagaggaggccgaggaaggcgggggaggaga

SEQ ID NO: 55988 - RNA, 82 nt, Homo sapiens
cagaggggccacgcgggcccgaggcgcaccaagggcgaaggagccggcccaagcacacggcggcggcgaagccaagacacgg

SEQ ID NO: 55989 - RNA, 90 nt, Homo sapiens
gaggaagcccacgagagaagagcaaaggagacgcaccaccggcacagcaagcagaagcacggcagccagggaaggcccccaaccaggcaa

SEQ ID NO: 55990 - RNA, 77 nt, Homo sapiens
gcagaaaccgcggagcgacagaaacccgcacagaagaggacgggcagagggagaggggcaggaaggccaacccaagg

SEQ ID NO: 55991 - RNA, 71 nt, Homo sapiens
ggaccacaagcagaggcgaagggcacgcgccagaaaagccggcagagaagcgggacccccgacaggccagc

SEQ ID NO: 55992 - RNA, 78 nt, Homo sapiens
gccgacccgcccaccacgccagcagcgcgacggcagcgacggaaaaccggcagcaggagaggccacgccagggaaggg

SEQ ID NO: 55993 - RNA, 54 nt, Homo sapiens
ggccgggcccccggccgcaagcagacaacggcaagcggagaagagcaaggccga

SEQ ID NO: 55994 - RNA, 58 nt, Homo sapiens
cggacggaggagcaggcgagaagagaagggggggccgcccgcccaaggcaggaagagg

SEQ ID NO: 55995 - RNA, 79 nt, Homo sapiens
cacgagggcaccaccgcggcgcgggccgacgggcggcccacgaagaccccgccgaagagaaggccagagaaggggagac

SEQ ID NO: 55996 - RNA, 68 nt, Homo sapiens
aggcgcacaacggccccaaccgcaggcacccaagcgcaagccccggggcagagacacaggacacccac

SEQ ID NO: 55997 - RNA, 61 nt, Homo sapiens
cgggaccccggcccagcagcagcaggaccgcccccagacagaacggcccccgcacccccgc

SEQ ID NO: 55998 - RNA, 77 nt, Homo sapiens
aagcaggaaaacgggcagagagcagcagccggcccggcgccagcaggaaaacagaaggagccgggggaggcagaccc

SEQ ID NO: 55999 - RNA, 63 nt, Homo sapiens
ggcaggggacacgggacaccaggaacccggccacagcaacggaggcgacagcgaacccaccca

SEQ ID NO: 56000 - RNA, 70 nt, Homo sapiens
aagaggaacaccaagcagggcccggcaggaacaaccacggaacccggggggagaagggcgcaagagcaga

SEQ ID NO: 56001 - RNA, 78 nt, Homo sapiens
aaaggagcagcccgggcaccacagaaaagcaagcacaaccaagcagaagagagaggagggcacaaaggaggggcaacc

SEQ ID NO: 56002 - RNA, 66 nt, Homo sapiens
cagacgcagggcgcccccggccgacaaccccgaaaccaaagagaagcagcgaagacagaagagcaa

SEQ ID NO: 56003 - RNA, 65 nt, Homo sapiens
gcggcggcgcggaggcggcgagggcgagccggaaaggcaggagagcgaaagagagcggaaaaacg

SEQ ID NO: 56004 - RNA, 79 nt, Homo sapiens
gcaggagccccggcgcacgcggcgcgcacagacccaggaagaaaaacgcccaaagacaggacacggagagcgccgcgac

SEQ ID NO: 56005 - RNA, 76 nt, Homo sapiens
gaagcccccaagaagacaaagcagcagaggagagagaccgagaaaggcgggggagcgggaggagccagagcacacc

SEQ ID NO: 56006 - RNA, 66 nt, Homo sapiens
accgaccagggcaacaccaaaaacaaaacgaaccaggacggcaagcacccccaacccacgcgcaga

SEQ ID NO: 56007 - RNA, 38 nt, Homo sapiens
cccccgagggcgggaacagcaggagccagaggcgcaca

SEQ ID NO: 56008 - RNA, 50 nt, Homo sapiens
agagggccggcagaaaacggccagaggcagaggcagcaggcagcacaaca

SEQ ID NO: 56009 - RNA, 77 nt, Homo sapiens
cggcggggacacccgacagcgggaaagcgagggacggggacccgaccccggacccgacgcggagagcgcagggcgag

SEQ ID NO: 56010 - RNA, 63 nt, Homo sapiens
gcgccaaggaaccaggacagcgacagcggcaacgagaaacggcccaggaagaccgacaagcag

SEQ ID NO: 56011 - RNA, 79 nt, Homo sapiens
gccagccggcaccgccaccccacaggcccccaccaggccgcggcagagacacccggagcgcggacaggaaaagagagga

SEQ ID NO: 56012 - RNA, 104 nt, Homo sapiens
gggcacccagaaagacaagcccccaaagccagcgcccaccaggaccacagcggaaggacgggccacacacagcggaggaagcagggcagaaaccaccacaggca

SEQ ID NO: 56013 - RNA, 76 nt, Homo sapiens
agacgaacccgcaagaggacgcagggggagaggcaccagcaacagaccaaccgcagcaagcacagagacaggaagc

SEQ ID NO: 56014 - RNA, 55 nt, Homo sapiens
gcaaaaacagagagaccagccaggcgaggagacgaagaaacaaaaaaccacgagc

SEQ ID NO: 56015 - RNA, 78 nt, Homo sapiens
ggaacccacgaccaaagcggaaggcccaacccgcagagaccccagccagcggacacagccaagacgcccggcccaccc

SEQ ID NO: 56016 - RNA, 77 nt, Homo sapiens
gacagcgagcggcgagccgagcagcggaggagggggcccacgagaagagcaggcgacgggggagagggagacagcgg

SEQ ID NO: 56017 - RNA, 40 nt, Homo sapiens
gagaaacaaggcgccggagcagggagagagacagcggacg

SEQ ID NO: 56018 - RNA, 80 nt, Homo sapiens
ggacggaaggggaagaggcccacccggagaaccccacggagaaccagaggaagaagacggcacgggacccccagcacagg

SEQ ID NO: 56019 - RNA, 61 nt, Homo sapiens
gggggaggcgcccccgacccaccgagggacggcccgggccagccacccccgggcgagagga

SEQ ID NO: 56020 - RNA, 79 nt, Homo sapiens
acgaagagccaaaaacgagaggcaaaaaggagggaaagagacacccggggggcaagggacaagaaggcaacacagcaag

SEQ ID NO: 56021 - RNA, 68 nt, Homo sapiens
gggcggaggggcgcgcgggaacaccggagcccgcgggcagagagaagcccagcccgcggcggcgagaa

SEQ ID NO: 56022 - RNA, 82 nt, Homo sapiens
acgaccaacaagaaccgaacgaggacacgaccccgccccacgcccaggagcagggcggagaacggaaaagcaccaggaagca

SEQ ID NO: 56023 - RNA, 81 nt, Homo sapiens
ccacaaacgccgcaccaggcgagcagcgcccccgacagaagcgaaggggacagggggagaaccgccagggaaacccggggg

SEQ ID NO: 56024 - RNA, 55 nt, Homo sapiens
cagagccggaagcaacacgcagaggagcagccggggaaagaggcaagagaacgcc

SEQ ID NO: 56025 - RNA, 74 nt, Homo sapiens
aagacaccgcgaagcaggggagaagacgcgcgcccagcaagggaccacacccagacacgccggccccgacagcg

SEQ ID NO: 56026 - RNA, 90 nt, Homo sapiens
caaagcccccacgcccagccaggagcaccgccgaggacccagcacaccgagggccgaacgaggcggggggcccgagaccacaccacaccc

SEQ ID NO: 56027 - RNA, 76 nt, Homo sapiens
ccccccgccccagcgggagagggcgccgcagacccggcagggcacggaccgccaggccgagacagggcgccggccc

SEQ ID NO: 56028 - RNA, 65 nt, Homo sapiens
gccagagggaaggacaggcgagcccccgccccgggaaagcggcgcagcccagaggagagaggaaa

SEQ ID NO: 56029 - RNA, 77 nt, Homo sapiens
ggaggacacgggggccacaaagccccccggagacgcaaccaagaaggacaggagaaacaggggccaaaaaaccaaag

SEQ ID NO: 56030 - RNA, 71 nt, Homo sapiens
cgcgggccgcaggccgcgagcagcggacgccggccgccgcaggaggagccgcaagggacagcccggaaacc

SEQ ID NO: 56031 - RNA, 80 nt, Homo sapiens
gagagaccgaaaaagaaggacgagccacaaggaccacacgggccacagcagggccgccgagggccggcccccaggaccag

SEQ ID NO: 56032 - RNA, 81 nt, Homo sapiens
ggcgaggacgcggccacgccgaaaggcgaccccgaaaaccagagacccagacacgcgaaggaacgaaaggccaaaaggcaa

SEQ ID NO: 56033 - RNA, 85 nt, Homo sapiens
cggccagaagcccgccgccccccgcggccccggcgagcagccgccgcccgccgcacccagagacaagcagaccggaagaccgacg

SEQ ID NO: 56034 - RNA, 84 nt, Homo sapiens
gcggccgcgacccccggcaacccggagaaggcacagagcggccgcgccagcgagaaagaccacagcaagaccacgcccccagcc

SEQ ID NO: 56035 - RNA, 74 nt, Homo sapiens
ggaacgggcacgcgccaccgggccgacgggaagaccgggagcacagaagaaaagaacaaggccagaaaaaaacc

SEQ ID NO: 56036 - RNA, 50 nt, Homo sapiens
gcacacaaaacagagagcagaggcgcggcccgagccacaaacagggagga

SEQ ID NO: 56037 - RNA, 85 nt, Homo sapiens
ggacgggaaggcgggagacgagaagccgaaaagcgcagcgagcggagccgccggagggcgaagccgggaaaaagaaccaggccaa

SEQ ID NO: 56038 - RNA, 77 nt, Homo sapiens
ccagcccgacccagagcgcgcgaggacgggccccaggccgaagaagcggccaccaggagagagaaggagagaagagg

SEQ ID NO: 56039 - RNA, 82 nt, Homo sapiens
gcaccggcggcgcggacgacagcgagacaccgcaccaccagggcagcgaaaaccaaacaacccgagaagccagcaggacgag

SEQ ID NO: 56040 - RNA, 77 nt, Homo sapiens
cacgccgaacccagccgggaggccaagggcgggcgagcgacccggaccgggaggggaccgggcccggccgggcgccg

SEQ ID NO: 56041 - RNA, 79 nt, Homo sapiens
gagaccaccgacgaggcaggggaagccaccgcggaaagcacagcaccgacgggggcacggaggagggaggagaaaaccg

SEQ ID NO: 56042 - RNA, 84 nt, Homo sapiens
gacacaaacggacagcgaggacaaggacaaagaaggcaaaccccgcgaagcgccgcccagcagcccagaccccagcagcgcaag

SEQ ID NO: 56043 - RNA, 42 nt, Homo sapiens
ccccgagagcgggacgcaggggggccggagaccacgacagaa

SEQ ID NO: 56044 - RNA, 77 nt, Homo sapiens
agcggagcagggaggagccccagccgcgggaagggaccagccaaccgagagagaccacaagcgaaccaaaggcagag

SEQ ID NO: 56045 - RNA, 78 nt, Homo sapiens
cgcggcagggcggccagccccagccagcggacgagggcaaggcgcacaccgaggagaagacagaggagccagaccaag

SEQ ID NO: 56046 - RNA, 68 nt, Homo sapiens
gcaggagaaaccagcggcgaagagagccaaaacccccgccaacagagcagacacacaaaggaagaaac

SEQ ID NO: 56047 - RNA, 56 nt, Homo sapiens
cgagccccaagccacgacaagacagccggcggaggaagaagaagcggccgcgagaa

SEQ ID NO: 56048 - RNA, 108 nt, Homo sapiens
ccgcccgaggcgaccgcggaccggcgccccggcgcgaagaggcggaccggacggccgagccacaagggcgcagaagccggcagagcccaagagacaacaagccgaaaa

SEQ ID NO: 56049 - RNA, 72 nt, Homo sapiens
ggcaagaagcgcaagagcacagaacgaacacgcacagaaaggacagaacgacacaaaagggaagggagccgg

SEQ ID NO: 56050 - RNA, 56 nt, Homo sapiens
aggagaggaacggccaaaacggggcaggcccagcagggcaggggagagacaaccca

SEQ ID NO: 56051 - RNA, 75 nt, Homo sapiens
aaaacgcggcaaagaaaacaggaagagcagacccgaaagcaaaggaaacgacagaaacggccagcccccacaagg

SEQ ID NO: 56052 - RNA, 70 nt, Homo sapiens
gaaccaaagaaaacaaaaggggacagcaaggaaaaacagaggccgcaagacgaaacgagggcagcacaag

SEQ ID NO: 56053 - RNA, 72 nt, Homo sapiens
agacaagacgccgaaacacgccccacgaaagagcgcagggagaagaaacgaacggaacgaggagagcacgag

SEQ ID NO: 56054 - RNA, 67 nt, Homo sapiens
gaccgggggagccgcccccgacacggcccacgcccagaagcgaggcgaagcagcggcgagaaacgag

SEQ ID NO: 56055 - RNA, 94 nt, Homo sapiens
cggccaggcagggaggagaccggcacccagacaggggcgaaggcagaggaccgagaagccaggccccggcagcaaggaccccaaggccgacagc

SEQ ID NO: 56056 - RNA, 92 nt, Homo sapiens
cgaccccaacggcaccagcccgcacccgcagcaaaaacggccacacgacacacaggccgggaacggcagacgcagcagagagaccaccagcg

SEQ ID NO: 56057 - RNA, 85 nt, Homo sapiens
ggcagagagggggacgaccccgaacccaggacagcaccaggcccaggacagcacgagcggggagacacagagcaccagccagagg

SEQ ID NO: 56058 - RNA, 80 nt, Homo sapiens
gaaggaaaagggcaagcgaaaaaacaacgacaggaccacggaaaacagggagaccaccaacacaccagccagacaggaga

SEQ ID NO: 56059 - RNA, 74 nt, Homo sapiens
gggcgggcagcgggggaaggacacacaacgcccaggaggaacccacacagaaagaccacagcaagaccacgccc

SEQ ID NO: 56060 - RNA, 71 nt, Homo sapiens
ggaggagaggacgaggaggaacccacacccccaaggcacggggccacaccacgaaggggccaaccaggagg

SEQ ID NO: 56061 - RNA, 75 nt, Homo sapiens
cggccgcagcgcaggcagcccagcagcggggacgacgagcccacggcacaacggaccgacagagcagcaaccggc

SEQ ID NO: 56062 - RNA, 45 nt, Homo sapiens
gggaaccgcacgcgggcaacggaagcgcaccaaagccagcggagc

SEQ ID NO: 56063 - RNA, 80 nt, Homo sapiens
gcggcagaagccgagcaacaccccggccaccgacccacaagacggcgaccaacaaagccacaaaagacccagcacaggcc

SEQ ID NO: 56064 - RNA, 49 nt, Homo sapiens
gaagcgcgcacggcaccaaggcaagccggccgcgagaggagacgacgaa

SEQ ID NO: 56065 - RNA, 75 nt, Homo sapiens
caagaaggaggccaaagaagcaaagggccggcaaccgccagacaggaggaacgaagccgcggaggaccccagagg

SEQ ID NO: 56066 - RNA, 75 nt, Homo sapiens
aaaaaaacaggcggcggcgaaacggcacagagagagagggcccaagggcagagacgccagccgacgcccggcaga

SEQ ID NO: 56067 - RNA, 81 nt, Homo sapiens
aagaagaggcccggaccaacagagagaaagccagaaaggagcagcagacagcaccaggcccgaagcagaaaacagagggaa

SEQ ID NO: 56068 - RNA, 81 nt, Homo sapiens
gagcggccggggccggggcgccgccgggcggccgggcgcggcgagcccaggcaagaacggaagcacgggcggaggaaagca

SEQ ID NO: 56069 - RNA, 76 nt, Homo sapiens
gccgagggcggccgaccgcgaacccgggcagcgccccgcgccccgcgcgaccccggcaaagaacagcgaacgacaa

SEQ ID NO: 56070 - RNA, 72 nt, Homo sapiens
agaggcaaccaaaccaagccgaaggaaaggcagaacgccgaacaggagcaacagaaggagaacagacagcac

SEQ ID NO: 56071 - RNA, 68 nt, Homo sapiens
ggaagaaccccccgggagccagaccggcaccgaagaccggggacacagccagggcgcaggcagcgccc

SEQ ID NO: 56072 - RNA, 71 nt, Homo sapiens
agccggggccaaaagaaaggagggagacgcgcacggaccggaaccagaacaagacgaaagacaacgagcgc

SEQ ID NO: 56073 - RNA, 74 nt, Homo sapiens
ccaaggagcgaaggcagcagcgaccagaaagaggagcaacagaacccacaggagggccagaggacaaagcacgg

SEQ ID NO: 56074 - RNA, 83 nt, Homo sapiens
cccccaaaggcgggaaacaggaaacggagaggcgggcggaccaagaccccccccaggagcaggccccccccccaacaaccggc

SEQ ID NO: 56075 - RNA, 73 nt, Homo sapiens
aaaggaacagaacgcggccccagccacaccaagcaggaagacgcaaacacaaggaaggaaccaaccgaggcag

SEQ ID NO: 56076 - RNA, 84 nt, Homo sapiens
cacccgaggcccgccagcccggcgccccgggcgagcaaccacgacggcagagacaggagaggagagccacgcccacagacccgg

SEQ ID NO: 56077 - RNA, 50 nt, Homo sapiens
agcccaccacaaaaacgaaggcggcgggagaaaaccaccaaaaaaagaag

SEQ ID NO: 56078 - RNA, 79 nt, Homo sapiens
ggggccggcccagcaggcggagaacgaggaggggcccgggcggagaacggaaaagcaccaggaagcagagaggaccgca

SEQ ID NO: 56079 - RNA, 76 nt, Homo sapiens
aaggaaccggcaaagcgcaggaacgggaacgcaggagcgaccaggaaggccagaagacagaacgaagaagaagagc

SEQ ID NO: 56080 - RNA, 80 nt, Homo sapiens
ggggcaccgcccgccgcacgggacagcgcgagcccaaaccaagcgcgacaagaaagagcccccgaggaaagcacgcacaa

SEQ ID NO: 56081 - RNA, 80 nt, Homo sapiens
gcaccaacgggaagggccggcccgcccccggccggggcgcagcggaggcaggaagcccggggcggcgacggagcacgacc

SEQ ID NO: 56082 - RNA, 69 nt, Homo sapiens
gacagcggcagcagggcggacggcaccaggacaagcgagggagacacgggcggaagccgagaagagccc

SEQ ID NO: 56083 - RNA, 69 nt, Homo sapiens
aagcacagccagcgaccaaaaacagaaacccagaggggaaacagaggaaagcaccaaggaaccgagcac

SEQ ID NO: 56084 - RNA, 78 nt, Homo sapiens
aacaccgggccggggccccgcagaccgccggaccccgagcccggccaacgcaacagggagcccacgcaagaggggccg

SEQ ID NO: 56085 - RNA, 50 nt, Homo sapiens
acccacagccagcaacaccggaagcgagaacgcggcgacaacgggacgcc

SEQ ID NO: 56086 - RNA, 79 nt, Homo sapiens
aagacggaacccagcaggccaacacggaggaaaaaggaggggaccgaggaacccgaaacacacaagaggagggaagcac

SEQ ID NO: 56087 - RNA, 74 nt, Homo sapiens
caacagaggagggcggcgggcggaggaacagcggcagccacaggagccaggagaaaccagagagcaagacaaag

SEQ ID NO: 56088 - RNA, 69 nt, Homo sapiens
gacaacggggaccagcccaacggagacgacagccggggggagcccgcagcaacccaagcagcccgacca

SEQ ID NO: 56089 - RNA, 53 nt, Homo sapiens
gaagcgcccgagacagcaaaccccacaaccccaaggggagaaagaggcccacg

SEQ ID NO: 56090 - RNA, 79 nt, Homo sapiens
gaaaaggaaaaccgaagaggagccacgaagggggcccagacagcacccaagaaaacccaggccgcgaaggagaagaccg

SEQ ID NO: 56091 - RNA, 73 nt, Homo sapiens
aggagaggcagggcgcgagggcgggggcagcggcagagagacaccaaagcgggaggggcccgccccgcaggac

SEQ ID NO: 56092 - RNA, 54 nt, Homo sapiens
cggaggagcacagagggccccagggccacaacggaagggccggggaggggagaa

SEQ ID NO: 56093 - RNA, 72 nt, Homo sapiens
agaggagcagagacgccggacagaaccaaagaacgaagacacgaggaggcaaggcagggggcaagcacagcg

SEQ ID NO: 56094 - RNA, 77 nt, Homo sapiens
ggaagccggggccagcggcgccgacgcacaggagagagcgaagggccggcagagacgcaacggcggggaccgagcca

SEQ ID NO: 56095 - RNA, 76 nt, Homo sapiens
ggagcaaggaaaagacccggaaagaagagacacagaggagccacacccccaggggcgcaccaacagaagaagcccc

SEQ ID NO: 56096 - RNA, 60 nt, Homo sapiens
agcagacccacggaaaccaggcaagacggaagagccgcaggaggagaaccaaacgcgcgc

SEQ ID NO: 56097 - RNA, 72 nt, Homo sapiens
caagaagggccggagagcgcaggacacaacggcaagcggagaagagcaaggccgaaccgagaggaagggcaa

SEQ ID NO: 56098 - RNA, 71 nt, Homo sapiens
gagagaagcaaaggcgcgaacgcagcaccagcacccaagcacaaggcggccgaccaagggaccagcgcagc

SEQ ID NO: 56099 - RNA, 57 nt, Homo sapiens
aaggaccaagaaccaggaacgaagcaggaagggaacgagcggcaaggcgaagaagga

SEQ ID NO: 56100 - RNA, 69 nt, Homo sapiens
ggaggggacacgggcggaaccccggaaccagcaacggggcggcacacaaggagcgaagggcagggagaa

SEQ ID NO: 56101 - RNA, 66 nt, Homo sapiens
ccggggggcggacgcgcgcggggcagggccagaacgaagcacaacaggcagcgggaaaaccgacac

SEQ ID NO: 56102 - RNA, 70 nt, Homo sapiens
agcaggagaagaagaggagaacccgagccgacagggaagagcaccaaaaaagaaaagccaggaaagagaa

SEQ ID NO: 56103 - RNA, 84 nt, Homo sapiens
gaccgcaaggccgcccgggaacgcgacgcgagagaaggacccacggcgcgcgaaggggggaggaagaagggaagcgaagaagcc

SEQ ID NO: 56104 - RNA, 78 nt, Homo sapiens
cacacgaacgagaacacgcacaacggacagcacacgcgccagcagcccgggggcgacgacgaggaccaggagccaggg

SEQ ID NO: 56105 - RNA, 78 nt, Homo sapiens
agaagaagcgcaggcacaggaagcgggacggcgagaacgaacagaccggccccccaaacacccgagcccagccccgcc

SEQ ID NO: 56106 - RNA, 84 nt, Homo sapiens
cccagccacgccagcagcacgccaaccagcccgagagaccacccaggcagaagccagaggggagcaggcggccaggccaggcaa

SEQ ID NO: 56107 - RNA, 79 nt, Homo sapiens
cggggaccccaaagacaaacgacaagcccaaggagcccagggccaaaaagaccccgaagcagcagagccgacggacccc

SEQ ID NO: 56108 - RNA, 72 nt, Homo sapiens
aagacccacagcaaagccagcgacagaagccagggcacacggcacggacagggcgggacgcagaaccagggc

SEQ ID NO: 56109 - RNA, 113 nt, Homo sapiens
accccaagaagaccacagagggacccggacaaccagaggcagccagcagggggaggggaaaaagagccagaacacgagaaaagaagaagaacaagcacagagacacaacccag

SEQ ID NO: 56110 - RNA, 70 nt, Homo sapiens
agaaagcgagaacaaaaccagcgagagaaccgcagccagaagcaaagcagacagacgcgaaaagacagcc

SEQ ID NO: 56111 - RNA, 77 nt, Homo sapiens
caggggcggcacacaccccacggacccgagggccggaccacgaccgagaggcacacacggaagaaaggaccaggcgg

SEQ ID NO: 56112 - RNA, 75 nt, Homo sapiens
agagacagaggaagaagagagagcggggcagggcagaggacagcaagggacaacagaagagagacggggcaccag

SEQ ID NO: 56113 - RNA, 76 nt, Homo sapiens
gaggaagacgaacgaaacacgaaagggcagaacagccagcaaagacaagagcagaccagcagccgcagcgcgacag

SEQ ID NO: 56114 - RNA, 72 nt, Homo sapiens
gagaaggaacccaccaccaaaccggcggagcacacaagccgagcccggaagccggcaagacaagcgaggcgc

SEQ ID NO: 56115 - RNA, 74 nt, Homo sapiens
ggcgagcggggggacgccggcggagacgcgggcgagagccagccgaggaaccgccaaggccgcaggaaaggaga

SEQ ID NO: 56116 - RNA, 76 nt, Homo sapiens
gccaggggagagcagaggcaaaccgaaagaccccagaggagggagagcaccgcacccaggccgaggcagggcggcc

SEQ ID NO: 56117 - RNA, 84 nt, Homo sapiens
aacggggaagacggccgacggcggaagcgcccggagagaagagcggcagcggagcgacccagcagagggagaggagaggagacc

SEQ ID NO: 56118 - RNA, 75 nt, Homo sapiens
ggaccgagaccggaccgagagcggaccgagagcgcgaaacgcacgagaagggcagaaagaaagcaggaccagggg

SEQ ID NO: 56119 - RNA, 81 nt, Homo sapiens
agagcgcgggccgcaccgccgcgccccgcaccccccgagcagcccggggaccagcacgcaggacagcggccgaagccagag

SEQ ID NO: 56120 - RNA, 56 nt, Homo sapiens
agggcgagccaggagcagcagcccagcacaagacaaaaggagcaaccccgcacaaa

SEQ ID NO: 56121 - RNA, 69 nt, Homo sapiens
gccggccggagcgggaggcgggccagcgacaaaaagaggggagaagcagaccgcaccaggcgggacccc

SEQ ID NO: 56122 - RNA, 37 nt, Homo sapiens
acgccccccgggaaaggaagaggacaccagcccggga

SEQ ID NO: 56123 - RNA, 57 nt, Homo sapiens
cgacgccaggaagaaaacggaaaaaagcagcaagcccagggccaggagccgacacaa

SEQ ID NO: 56124 - RNA, 32 nt, Homo sapiens
aagggaaccagccaaaagaggggcagacgccc

SEQ ID NO: 56125 - RNA, 58 nt, Homo sapiens
acccagaagcagcaggaggcgcgggcaggcagagcaccaggagcgagaagagaggaag

SEQ ID NO: 56126 - RNA, 82 nt, Homo sapiens
ccccgaacagcaaagggaagaaacaaagaagacggcaccaagacagaaggcaccaaacggacagcaagcaacgagaagaaac

SEQ ID NO: 56127 - RNA, 74 nt, Homo sapiens
gaagagagaagccaccagcaaaaccggccgccgcaggcaagcgccccaggggccaccccggcgccgggcgcgcc

SEQ ID NO: 56128 - RNA, 72 nt, Homo sapiens
aaccaggagacccaagaaccaggggagaagaaggaaaccgaagaaccagccccggggacgaaagagacggca

SEQ ID NO: 56129 - RNA, 81 nt, Homo sapiens
cagccgggacggacgccgagcccggggcgcgacggcgcagaaccggagcgggaaaaaggccagaacgaagaaacaaagaaa

SEQ ID NO: 56130 - RNA, 79 nt, Homo sapiens
aaacacgacagaagcagggcgaaccagagaaaacggcaaggaagcggggaaggagaggacaacgagaagaggaccggcg

SEQ ID NO: 56131 - RNA, 48 nt, Homo sapiens
ggaacagcggggcacagacccaccaggagcaaagacacagcaacgagg

SEQ ID NO: 56132 - RNA, 79 nt, Homo sapiens
ggaagccaaggcaccgggacgcgcacccccgcgccgcacggggacgagggggggccccagcccggccgaacgggcgcac

SEQ ID NO: 56133 - RNA, 73 nt, Homo sapiens
ccgccccgcgcggcaggggagagaaggcgcgcaggagagcgcagagacccgcccggaagcgaggcaacaggcg

SEQ ID NO: 56134 - RNA, 41 nt, Homo sapiens
agaacccagagacgggcaggcaaaagagagccaggaagaac

SEQ ID NO: 56135 - RNA, 53 nt, Homo sapiens
agaaggggacaaggacaccggagagagagacaccaaaggaaccacgcaagagc

SEQ ID NO: 56136 - RNA, 50 nt, Homo sapiens
cgacacggggccagggaacccggcaccgccccaggacggggaaggaagcc

SEQ ID NO: 56137 - RNA, 65 nt, Homo sapiens
cagacagggccgcaggcacccccggccggcaaggaaaagacgaggaggaaacagaaccaagggaa

SEQ ID NO: 56138 - RNA, 74 nt, Homo sapiens
gcccccccccaaaaagaccacggggaaagaggccagagccccaagcccccgcacacccgggccaaacgaacgca

SEQ ID NO: 56139 - RNA, 83 nt, Homo sapiens
gaaaagcagaggccgaccccccaggggccgggcgggacaggaccagccccagcaaggcggaaagaaggcggcacaagaaaaga

SEQ ID NO: 56140 - RNA, 58 nt, Homo sapiens
ccaaaagaggagccagaggaggcagaggaaacggagaggggccgcaaggccaggcgcg

SEQ ID NO: 56141 - RNA, 85 nt, Homo sapiens
cgggggagagccgggcccaggggagagcagcagccaggaggagaccagagcagccaaggcggagaaacgagcaccaggagagggg

SEQ ID NO: 56142 - RNA, 80 nt, Homo sapiens
gaccagcaaggcggcagagcaaggggcacgcagaaggaccggccacgcacacggcggcggcgaagccaagacacgggccc

SEQ ID NO: 56143 - RNA, 96 nt, Homo sapiens
gaaccaaaacaaagccgcgagaggaccccccacccaggaggcggcccagggaccggaggacgcgcgccaacgggaccccggaggagcgccccgccc

SEQ ID NO: 56144 - RNA, 71 nt, Homo sapiens
ggaccaagaaggggcacccacagaggagcaagaggagccacgcagcagacggaggcagagcacgaccagcc

SEQ ID NO: 56145 - RNA, 83 nt, Homo sapiens
cgggaggacgaccaggcggacccacgcgcgggaaccaggggcagagggaccaccgacagaaagccaacaggcagaccagagac

SEQ ID NO: 56146 - RNA, 70 nt, Homo sapiens
gaagcgaacgcccaacacccgccccaaccccagggaaacacgagcgaggggaggccaacggcgagcgccg

SEQ ID NO: 56147 - RNA, 61 nt, Homo sapiens
gagaaggccgaacgagccaccggagggagccggaaacaaagaagaggagaaaaagccaagg

SEQ ID NO: 56148 - RNA, 84 nt, Homo sapiens
cagcgccgagggcccccccccaggcccgggccgagggcccaacgaaccgaagagaaaaggccaccaggaaacccaaaagccaga

SEQ ID NO: 56149 - RNA, 82 nt, Homo sapiens
cgacgaggcccgccaagaggcgccgcaggagaaacgccgaagggaccaggcagacgggaagaacccagaaagaaaggagcgc

SEQ ID NO: 56150 - RNA, 68 nt, Homo sapiens
cgaaacgagcagcccaagaccgcaggcacaaacaggaaggccaggcaacacgccgccccagccgggga

SEQ ID NO: 56151 - RNA, 55 nt, Homo sapiens
cgacgcaggaaaggcaaacaaccaagccgccacagggagaaaagagcagaggccg

SEQ ID NO: 56152 - RNA, 78 nt, Homo sapiens
gccccccagcgaggcgcaaacaccgccgggcaggaggaagccagcccgagcaggcccaggggaggaggggcaaccaca

SEQ ID NO: 56153 - RNA, 43 nt, Homo sapiens
agacggccagcgcaccaccgagcagaggagccgccgcgcccag

SEQ ID NO: 56154 - RNA, 74 nt, Homo sapiens
cgcgcgcccgccacggcgccgagccgcggccgacgagaaaagccgacgcaagagggaaagcggagcacagcccc

SEQ ID NO: 56155 - RNA, 70 nt, Homo sapiens
ggaccaagaaccagacacaacagcaggcagcccgcccagcggcacgccaccccgagaaacaaaacaaagg

SEQ ID NO: 56156 - RNA, 76 nt, Homo sapiens
ccgggggcgggcagccgaggccgggaaccagcgagggcggggccacgcaggggccggcggggcgcgaagaagcagg

SEQ ID NO: 56157 - RNA, 78 nt, Homo sapiens
acacccaaccaggcacagagaaagcgccagaccaaaacgaagaagacgagccaaacccaaaaaggaaggggggggagg

SEQ ID NO: 56158 - RNA, 54 nt, Homo sapiens
gaccgccgagaacccaagggggagacaggggggcggcacgcagccaccgaggcc

SEQ ID NO: 56159 - RNA, 41 nt, Homo sapiens
ccagagggggacagcgaaacggaagggacccacaggaccaa

SEQ ID NO: 56160 - RNA, 75 nt, Homo sapiens
cccaccccgcacgggaacaagacagccgggaacaagaagcaccaacggaaaaaacaaaagaaccagccaggaccc

SEQ ID NO: 56161 - RNA, 42 nt, Homo sapiens
ggacgggaagaagaaaggggggaggaagaggaggagagaaga

SEQ ID NO: 56162 - RNA, 61 nt, Homo sapiens
gcgcaccggaagcaccagcgaggaaggcaagccaaaagagcgagaggcgagcaaaagggaa

SEQ ID NO: 56163 - RNA, 72 nt, Homo sapiens
ggccggaagaggaagagaagaaaggaggagaccgaaacaaggaccccccgggagaagaaaagcgggacgagg

SEQ ID NO: 56164 - RNA, 79 nt, Homo sapiens
cagaaggggcaagcaaagggcacccacaaaagcgaaaagccagacaggaacaccagacagaagaacgccgggccaccag

SEQ ID NO: 56165 - RNA, 82 nt, Homo sapiens
gacagggacgaagaaaagggggaggaagcgcgcagggcgagccagccagaccgggagcagccgagagggcggagaagccggc

SEQ ID NO: 56166 - RNA, 78 nt, Homo sapiens
cacagcggagcgcccagaggcgagcccggggaggaagagaggacgggacccaggggagcgcagcaaagcaggggcaca

SEQ ID NO: 56167 - RNA, 80 nt, Homo sapiens
ccgcgggccgccgccccgggaaaacgcgcaacacacggaaacacagaggccaacagcaagagcaaccagggaccacccca

SEQ ID NO: 56168 - RNA, 77 nt, Homo sapiens
cgcggccggggccggagcgcgcaagcggcggaaagggcgcgcgggcccccgaagcagagaaggagggggcagagcac

SEQ ID NO: 56169 - RNA, 78 nt, Homo sapiens
ggagaccaccagcggagcccagaaggccagaccccaaacacagaacaggaaggaggcgcagccaaaagaaacacccaa

SEQ ID NO: 56170 - RNA, 74 nt, Homo sapiens
cgggagccgaccggcacagcagagcgaccccggaggcaaacacaggccggaagcccgaaacaaagaaacccaag

SEQ ID NO: 56171 - RNA, 76 nt, Homo sapiens
gggcccgggcaaggcccgacagaagaggaacagcaaccgggcgcgaaaaaaaaccggggaaaaaagagaaagcgaa

SEQ ID NO: 56172 - RNA, 50 nt, Homo sapiens
ccggaagcaaaaccgagaggagagacaaagcgaaagaaacccgcacagag

SEQ ID NO: 56173 - RNA, 77 nt, Homo sapiens
gcccgacaacgaagacgaaaccagcaccgaggccgcccccaccgagaggacaccagagcaggaagaggagacgggac

SEQ ID NO: 56174 - RNA, 71 nt, Homo sapiens
ccgaccccccggcgccgcgccggcggcggggaaggaaggaaaagaaaacgcgcagaaaaagaggagacacc

SEQ ID NO: 56175 - RNA, 71 nt, Homo sapiens
gccccaggaaccacaggacaggagaagaggggaagaagaaagccagaagagcagagaaggccggaggaaga

SEQ ID NO: 56176 - RNA, 85 nt, Homo sapiens
cccaacaaaaccaacccaaacaccagagaacacacggggagccgcccgcaaggcggaggcaaggcagaccggccacgcagccccg

SEQ ID NO: 56177 - RNA, 111 nt, Homo sapiens
gggggaaacgccagcaggaagaggacacacagagaggccaaagccagagacagagcacaaagaagaagagccaaagcccaggacggggaaacagcagagagcagccagggg

SEQ ID NO: 56178 - RNA, 79 nt, Homo sapiens
cgcccgccccgccgcccgagccggcgccaaggcaccgccagggaggagagcggggcacgcgcccaacgcgcaagaagcc

SEQ ID NO: 56179 - RNA, 75 nt, Homo sapiens
cgaaacggagccagagaaggcagaagagccagagccaaggaccagacgaaaagaaaaaaaggggaaaggcagaga

SEQ ID NO: 56180 - RNA, 78 nt, Homo sapiens
gcagggcagccacaaagaggagcacgagggcccccagaaccacagcaacaccggaccgcccaacagcagccagccccc

SEQ ID NO: 56181 - RNA, 80 nt, Homo sapiens
ggcgaggcgcagaaaccccggacaaggcacgccagacgaagcagaccccacgagcgaaagggaaaaaacgaaggaggcag

SEQ ID NO: 56182 - RNA, 67 nt, Homo sapiens
agaaaggaccaccggggagcgaaacacagagaaccgggaaacccaagaaaggggaggccggcagaac

SEQ ID NO: 56183 - RNA, 76 nt, Homo sapiens
gaaccaacggaacccagaaggcaaacagaacacagaggagcgcgacgccacaagccagccccggcaccgcgcacac

SEQ ID NO: 56184 - RNA, 40 nt, Homo sapiens
gccacccaggcggaccgaagcgagagagcgcagggaagag

SEQ ID NO: 56185 - RNA, 79 nt, Homo sapiens
ggaaacaggaacaggacgacccaggagacgcaggccaaggagaaagcaggggcagccaaagccgaccccgggacagcag

SEQ ID NO: 56186 - RNA, 76 nt, Homo sapiens
cgggcaaagcagaggggagaaagaagcgacggcagacgggggaaccagcaaaaagaaaaagcaggaagaaggacga

SEQ ID NO: 56187 - RNA, 85 nt, Homo sapiens
cacggcgcaggcccacggagcgcagccgccgagacccgaagagggggaaaacgcagggaagagaggacagcaggagggcggagac

SEQ ID NO: 56188 - RNA, 75 nt, Homo sapiens
aacaaggcccaagaggaccagcgcaaggagcacggcgaggagggaaacacagcaaaggcagaggcagggcgcgac

SEQ ID NO: 56189 - RNA, 62 nt, Homo sapiens
ggcgggcgcggcggcggccacgcagaagagaagccagagcccaaggcccgcggaagccagcc

SEQ ID NO: 56190 - RNA, 81 nt, Homo sapiens
aaaagaagaccaccaccagagaggccggccagaggagaacgccaagccaaccgaaaaagccgacaaaaaaaagcaaaagcg

SEQ ID NO: 56191 - RNA, 70 nt, Homo sapiens
ccgcgcggcgcggggccccgcggcggagcaaaacaaacggagagaggagggagaaacaaaggccaaagac

SEQ ID NO: 56192 - RNA, 73 nt, Homo sapiens
cccagcagcagaccggaagagggccacccaggcccgcagaagacgcaggaacacccgacagcagcccccccca

SEQ ID NO: 56193 - RNA, 67 nt, Homo sapiens
gaccacaagagcaggaaacaaggagccaaacaaagaccacagcaggaaggggaggagcacagaacgc

SEQ ID NO: 56194 - RNA, 56 nt, Homo sapiens
cagacggggccacccccacacgcccccagccaaacaggagccaagaaccgaagcaa

SEQ ID NO: 56195 - RNA, 77 nt, Homo sapiens
cggggcacgacaaaagaaccagaaaaagagaaggaggcgcgagcccacagaagcaggccggggacccaaaaacccgc

SEQ ID NO: 56196 - RNA, 77 nt, Homo sapiens
cgggaacagcgcccggcaaccccagacccgacagaaaaagagccaggagcaggggcgcggcagaggcgcggacgagc

SEQ ID NO: 56197 - RNA, 80 nt, Homo sapiens
gcccagaccccacaggggagaggccgaaagcaggcgcgaaaagcagggacgcacccgggggaccagagccagccgcaccc

SEQ ID NO: 56198 - RNA, 79 nt, Homo sapiens
ccgagggcaggccgaaccaggcgcaagccacaggccagcgcacgcgccagaggacaaaacccagccggcacaaaccagg

SEQ ID NO: 56199 - RNA, 89 nt, Homo sapiens
aggagaacccagagaagaagaggcccggagcccccaacaagcccaagaggagagaccccagaggagcgcagaagcgagaggaggaggaa

SEQ ID NO: 56200 - RNA, 72 nt, Homo sapiens
agagggacccgggccccacagagagcccggcagcgacaagcccagggccagacgaagcaccaaacgcgagag

SEQ ID NO: 56201 - RNA, 37 nt, Homo sapiens
gggcccgaacagagggacggggggggcggcaggagag

SEQ ID NO: 56202 - RNA, 56 nt, Homo sapiens
agagacaggagacagcaaacgcaaggcgaagccgaacgcacggccggcgacgcaga

SEQ ID NO: 56203 - RNA, 72 nt, Homo sapiens
ccccacaccccacagaagcggagcaagcagggggcagggaaaacaagaggcacaggacgagacacaacagga

SEQ ID NO: 56204 - RNA, 85 nt, Homo sapiens
cgggccgcgagcggggcgacccgaggaacgaggaagcagaaaggcgaaggaacacacgacacagaaaccaagaggaagaacaagg

SEQ ID NO: 56205 - RNA, 64 nt, Homo sapiens
aggaccacgccgcaccccacaaggagagggcaacggccagccaacccggagccacaccccaccc

SEQ ID NO: 56206 - RNA, 76 nt, Homo sapiens
aaacaagagaccacagaagcacccgagggacccgaggagcccaccaagccgaccgcaggcaagggccgggggaggc

SEQ ID NO: 56207 - RNA, 70 nt, Homo sapiens
ccagggggagcgggcggcagcggaccgggagaaccaggccgaagggggccggggcagcagcccagccaaa

SEQ ID NO: 56208 - RNA, 71 nt, Homo sapiens
gcccggcgaagagacgcaagcaagagaagcaaggaagaagaggcacaaacgagcaggcgacccacaacggg

SEQ ID NO: 56209 - RNA, 76 nt, Homo sapiens
aagaacggcgcacgacaagagcggggcccggcgcacccaccaccgccgcccacggcagcccagggacccgagcacc

SEQ ID NO: 56210 - RNA, 51 nt, Homo sapiens
gacccaggaaacaggacggcacccagcagaagccaaaccgcaggagagaga

SEQ ID NO: 56211 - RNA, 57 nt, Homo sapiens
ggcagaacgacgccggcagaaaaccgagccaaacccccccagaccgaaccgcagcac

SEQ ID NO: 56212 - RNA, 63 nt, Homo sapiens
acacaaagcacgcagaggagacaggaaaaggccaaagccggaccgggcagcggccccaaggca

SEQ ID NO: 56213 - RNA, 65 nt, Homo sapiens
aaggccacgaaacccgaaagggcaaggaggaaggcccacaagcgcagcagcgcgcaagcagcagg

SEQ ID NO: 56214 - RNA, 80 nt, Homo sapiens
ggcaggagaaggggcccggcagccgcccgaaggacagccccgcccagggaagaagagagagacagacacaggaggagacc

SEQ ID NO: 56215 - RNA, 76 nt, Homo sapiens
cccccggcgccgccagcgaggcacagcgcggagaggggacggggacaagggaagccccccaagaccaagaggcgca

SEQ ID NO: 56216 - RNA, 83 nt, Homo sapiens
gacgcgagaagcccagaccgcagggcgggaaaaaaccaagcagcgagcaccagggaaagaacggaagccacagaaacgaccgc

SEQ ID NO: 56217 - RNA, 66 nt, Homo sapiens
gcgagcagaacacggcgagcggcagaccgcgggcccccagcgcacccggaagagcccaccacccgg

SEQ ID NO: 56218 - RNA, 72 nt, Homo sapiens
acccgagaaggcgacaacagagagcccaaagagagaagaggaaagacccaaaaaagcgaggaagagcgacag

SEQ ID NO: 56219 - RNA, 100 nt, Homo sapiens
cagcagccgcccgccaaccccaggggaccagaggaaccagcccgagcgagaccccaacaggcccgaccaacaaagaaacccaacagacggaaaccaccaa

SEQ ID NO: 56220 - RNA, 79 nt, Homo sapiens
gacaacagggcgagggggaaaaaaaagaagaaaaacgaccgcagagcgggagacaaagaggacacgaagcaggaaagag

SEQ ID NO: 56221 - RNA, 80 nt, Homo sapiens
acgagcagaccacacaacggcccccaggaccgcccccggaagaggacagcagcaagcagaaggggcagaccagccccaag

SEQ ID NO: 56222 - RNA, 37 nt, Homo sapiens
ggaaaaagaaggaaccacgcaagccccaaaacccaga

SEQ ID NO: 56223 - RNA, 66 nt, Homo sapiens
ccggcccacaggggggggcaaacccgagagaacggaaagaggagacagcacgagcaggacagaagc

SEQ ID NO: 56224 - RNA, 73 nt, Homo sapiens
cccaaggacaacgacgggccccagcacgcaggacacaccaagaacagaacacagcaggcccagaagcccaccg

SEQ ID NO: 56225 - RNA, 70 nt, Homo sapiens
gccaggccgcagaggggacacgagcaggagaccgaggacgcaaacagcaaagaggcccaaaaacaacccc

SEQ ID NO: 56226 - RNA, 82 nt, Homo sapiens
agagccggaccaggagaacggcggcgggcacaagggcggacccgacccgagaggaggcgccagcgagaaccaaggacacaaa

SEQ ID NO: 56227 - RNA, 52 nt, Homo sapiens
caaccgacacagaagcacggagcccaagagaacacaagacgacagaagaaaa

SEQ ID NO: 56228 - RNA, 115 nt, Homo sapiens
cggagcggcggcaaacaccacccgccgagccacgccgaccagggacgccgagggagccagagaagaaccaggagaaagcaaaccacaaacagacacggcagacagacacaacagg

SEQ ID NO: 56229 - RNA, 77 nt, Homo sapiens
gggaccgccagaacaagaaggcgggggcgcaacacacagagggagaaaacccccagcgaagaaccgagccccgaccc

SEQ ID NO: 56230 - RNA, 68 nt, Homo sapiens
gccacagagggcacagggggggagcacagcgacggaagaaagacccaccagcacggggaggcgacagg

SEQ ID NO: 56231 - RNA, 66 nt, Homo sapiens
aacaaaggaaaacaccaaacggggaggcgagaaacagccgcgggacagggcccgccggcggggggg

SEQ ID NO: 56232 - RNA, 84 nt, Homo sapiens
aggacaagggacaggaacagagcagagcaagagagaagacggcacacaacccagacaagccagcaccccccaaccaggagacac

SEQ ID NO: 56233 - RNA, 79 nt, Homo sapiens
gcgcggcggagaagccagaggaaggaaccacccggagagggaaggaggaaagccagcgcccgcgcacaccagcgcagag

SEQ ID NO: 56234 - RNA, 81 nt, Homo sapiens
ccccgcggagcggcgccgcgagcccaccgccagcgccagagcgagcgccccgcccaggacaggcgcgggaggagcgcagga

SEQ ID NO: 56235 - RNA, 76 nt, Homo sapiens
cgccaacccaaggaaggaccaaacggagaaccagaaagccgagccgggccagcccacacaccgcccccccggagac

SEQ ID NO: 56236 - RNA, 73 nt, Homo sapiens
aggccccccgccccccccccgcgggcaccgaggacccgcccgcccaggagaagcagcgccgaaaagggaggaa

SEQ ID NO: 56237 - RNA, 76 nt, Homo sapiens
ccagagaccacagaaggacgggagaacaccccacagggaagaggacgaagaacggaagcgccccagaggagagggc

SEQ ID NO: 56238 - RNA, 82 nt, Homo sapiens
accgcaacagggcgaggcagagaaaaaaacaacacaaagaaggagcacaggaacaggaagcgaggacgggaagaccacgccc

SEQ ID NO: 56239 - RNA, 82 nt, Homo sapiens
agcaaagcagaacagcccagcaggaagggaaccaagccccaacaacagagacaggccccacccacagagaacaggcaacaaa

SEQ ID NO: 56240 - RNA, 83 nt, Homo sapiens
ggcgagcaccccgcacaggcgaggagccgggaagccaaggagagagaggcaccggggcgcagccaaagggacaggaccggccc

SEQ ID NO: 56241 - RNA, 39 nt, Homo sapiens
cccccgccccggccaaaggaccccgccccccgaggcgca

SEQ ID NO: 56242 - RNA, 107 nt, Homo sapiens
agcagcagccgccgcaaccacagacgcagcaacaacagcagccggcccgaacacaacagaccacggaagcacgagcaggccacaacaccgaaaaaagccgcacagca

SEQ ID NO: 56243 - RNA, 79 nt, Homo sapiens
caccgggacggaccgagaccggaccgagagcggaccgagagcgcgaaacgcacgagaagacgccacaggcacacggaca

SEQ ID NO: 56244 - RNA, 77 nt, Homo sapiens
ccaacaggaccggaagcgaagcacaggcacggcacgggcagggcgagggagcaggcacgcccaagcccgggaaaggg

SEQ ID NO: 56245 - RNA, 71 nt, Homo sapiens
aagcaagccaagccaccaggcaccaccagcaccaccccagagcagccgccgaccccgcgaagaagaggaag

SEQ ID NO: 56246 - RNA, 79 nt, Homo sapiens
caccggcggggggcacgaggaaaggaagcgaaccgccccggacagcacaccagggccccagccgcacaggccacgcagc

SEQ ID NO: 56247 - RNA, 72 nt, Homo sapiens
gcacccggcaaaaaccacagggggaagacgagagagagagacaagaagacacgaagaaggacaaaaaaagga

SEQ ID NO: 56248 - RNA, 57 nt, Homo sapiens
cgacagccagccagacccccaggcagaggcgggaaagcgaggcggcgcgacccggcg

SEQ ID NO: 56249 - RNA, 79 nt, Homo sapiens
gcccgcgggccgggagcgcggcggagacgagccgagacagagcacgcccggcgcggagccagcgcccggcaaggagcga

SEQ ID NO: 56250 - RNA, 78 nt, Homo sapiens
cagccggaggagaggaccggcgccgaacacgacggcacagggggggagagagagggcagcaacgaaaaccacaggaaa

SEQ ID NO: 56251 - RNA, 58 nt, Homo sapiens
gcagagcagcccccagccagccgcgaggacgaccgaaggaagaaacagaaaaaaagca

SEQ ID NO: 56252 - RNA, 67 nt, Homo sapiens
ccaaagaagggagagagagcagggcagagaggcagaaccagaagggaggagggcagggaagcagaga

SEQ ID NO: 56253 - RNA, 80 nt, Homo sapiens
gcggcgcaacaaggcaagacaaagagaagagacggcaagcagaagacagcggacagccgcccggggagaggaaccaacca

SEQ ID NO: 56254 - RNA, 95 nt, Homo sapiens
caagcaggcaaagacggcaaaagcacaaggaccgcggacagagacaacaccgagagagaaaccggcacccgcagggggccccggagcgaggagcg

SEQ ID NO: 56255 - RNA, 72 nt, Homo sapiens
ccaccacaaaaacgaaggcggcgggagcagagaagccaaagacagcaaagggacaccacacagagcaggcac

SEQ ID NO: 56256 - RNA, 56 nt, Homo sapiens
ggagcgcggacgcagagaggggcaggcagacaaacgaggcagaaacagaaacgcag

SEQ ID NO: 56257 - RNA, 87 nt, Homo sapiens
aaaaacacagagacagacggcggcagggcgcccacccaagaggagaggggccagaaagcagcgaggcaccgaaggcgcgagcaccag

SEQ ID NO: 56258 - RNA, 55 nt, Homo sapiens
gaacagcgggccgcagccaagcgccgccgggaggaaaaggcccaggcgagaaaga

SEQ ID NO: 56259 - RNA, 55 nt, Homo sapiens
acgcggaaggagacggagaagaagcgccacaggagccgcagaagcaaaggcaccg

SEQ ID NO: 56260 - RNA, 83 nt, Homo sapiens
gaaccagaggcacaaaacaaggagagagggacgaggccacagcagaaaaaaccgggaggaaaaacgaaaacgcacaaacccag

SEQ ID NO: 56261 - RNA, 81 nt, Homo sapiens
aggaggaaacacagacaggagagaaaacagaagacaaaacacgaacaggcagaagaggagacaagacacacacagaggaga

SEQ ID NO: 56262 - RNA, 78 nt, Homo sapiens
cgcgcgagcacgggcggagcgaacggcgccgaccccgacagaacgggccccgcacccgcggccccggggcagcggagg

SEQ ID NO: 56263 - RNA, 66 nt, Homo sapiens
cggaccccagaggcggaagaaaagcgaacacagggaggggcagcaggagcgccgcacccaggcgga

SEQ ID NO: 56264 - RNA, 74 nt, Homo sapiens
gaagcgggagagcccgccaggagggagggacccagcagaggagaagacagaggagccagaccaagagacagcac

SEQ ID NO: 56265 - RNA, 83 nt, Homo sapiens
cacaggaagcgccacaccaaccaccccaggaacacggcggaccggaaggcaacgggcgagagcagcaggaaaaggaagggaag

SEQ ID NO: 56266 - RNA, 104 nt, Homo sapiens
gaaggaggccggggaggaagagagcaggggggcgccaggcacccgagaaaggggacgggggcggcggccggcgggcaaaggacgccaggaggaagggacaaaag

SEQ ID NO: 56267 - RNA, 78 nt, Homo sapiens
ccaggagcacaacgccacgacaccggcacccagcaccacccggaggagaccggcagcagcagcggagcaacaggaggc

SEQ ID NO: 56268 - RNA, 82 nt, Homo sapiens
cacgcccacaaagcccagaagaagggcaccagcgaagccacccacacagaaagccagggccggagggagaacagagcggccc

SEQ ID NO: 56269 - RNA, 80 nt, Homo sapiens
accggcagccagaaaagacagaccgaggccaaaagaaaggaagaaaacccccaaaaagccaaaaggccaagacaagaaga

SEQ ID NO: 56270 - RNA, 51 nt, Homo sapiens
cggagggaggagggagccgggaggccagggccgaaagggccgggagggaag

SEQ ID NO: 56271 - RNA, 128 nt, Homo sapiens
cagccgccccggcccgccccacggagcagccagcccgcgcacccgccacgacaccgcacgggcaggacaacagcagacgagcgaccgccagcgggagacagaggcggcgcggaggcacagaccagcgg

SEQ ID NO: 56272 - RNA, 69 nt, Homo sapiens
ggagacacaaacagggagcaaaaaagccagagcaggagaagagggcaaagaaaaaggagcaagcgcggg

SEQ ID NO: 56273 - RNA, 75 nt, Homo sapiens
gcgaaagcacaccaaggacagagcgggagccaccagcgccaaagggaagccaggagcccgggggcacggggagaa

SEQ ID NO: 56274 - RNA, 73 nt, Homo sapiens
agcccgagcaagaaagagaaagcgggaacccacaacgaaggaaggaacagaggcacagcgacgcaaaaggagg

SEQ ID NO: 56275 - RNA, 67 nt, Homo sapiens
aacgcaccaggccaaagaaagagaagcaacaagcagaaagcacagcccgaggacccacacaagaaaa

SEQ ID NO: 56276 - RNA, 77 nt, Homo sapiens
ccacgaaccaaaagggacggacaaaggaacaggaccaggcgacggaacgcgaaaagaccaggagaaggaaggaggcg

SEQ ID NO: 56277 - RNA, 74 nt, Homo sapiens
caaaagcaccgaacacacccagcggcgacaagcaacagggagaacagcaagagaaagagcaggaaacagacccg

SEQ ID NO: 56278 - RNA, 76 nt, Homo sapiens
gccggggaaaacccaagaaacacagagacggagggaacggaagacaagggcaagagaaacacaggaagcgagccag

SEQ ID NO: 56279 - RNA, 72 nt, Homo sapiens
gcgcggggccgcccgcccacccagggccggaaaagccaacgccggcgaaggccaccaacggcggggggcgag

SEQ ID NO: 56280 - RNA, 78 nt, Homo sapiens
ccagaaacacaggcagacggaagcacagaagcgcaggggaaaggaggagcaggaggacgaggacaaggaggaccccgg

SEQ ID NO: 56281 - RNA, 72 nt, Homo sapiens
ccccgggcccgagcaccggccggagcccggacgaggggcaggaccggggacacacgacgcgggacgagcccg

SEQ ID NO: 56282 - RNA, 88 nt, Homo sapiens
gcacaggcaccaagagccaaccgagggcgccgagaagccagcacgccgggagcggacacagcccagagccagccccgggcaacaaagg

SEQ ID NO: 56283 - RNA, 75 nt, Homo sapiens
cgggccggccagcgccggaaaccaacaacagaccgaaaagggcggaaaaggaccaaggcccgcaaaagggcgcga

SEQ ID NO: 56284 - RNA, 73 nt, Homo sapiens
gccccacaccccagaaccacggggaaggagccgggagaggccaggccccccggacgcagccgcccggggcccg

SEQ ID NO: 56285 - RNA, 76 nt, Homo sapiens
aggagagaccccacaaccaaccgacacccccgccgccacccacgcccagaggaagccagaccgacaaagaagaggc

SEQ ID NO: 56286 - RNA, 82 nt, Homo sapiens
ggagcccaagaaacgggcagccaggcccccacagcccgcagacgggagagaagcgccggccggaaagaagacggggaggagc

SEQ ID NO: 56287 - RNA, 53 nt, Homo sapiens
gccagaccagagggaacaagacacaaggcagagacgcccccaaagggacacgc

SEQ ID NO: 56288 - RNA, 71 nt, Homo sapiens
ccagggccaacagcaaccaaaacaccgcgcacccacgcaacggaccgaggaaaggcccggagcagaaaaag

SEQ ID NO: 56289 - RNA, 79 nt, Homo sapiens
gaggccccggggcagaggcgagaaggaaccggggcccgccaaggacagaggaggaaagacaagccccaaaagcagccgg

SEQ ID NO: 56290 - RNA, 79 nt, Homo sapiens
cggcggcggcggcggcccccgccagaccccagcgccccccgcccacggacggaccagacgaccccagaccgccggcacc

SEQ ID NO: 56291 - RNA, 84 nt, Homo sapiens
ggagccaggagcgcggcccggggcccgggggcgcgggccgggggggccacaggaagaacaggcagcagaacccggaggaagagg

SEQ ID NO: 56292 - RNA, 75 nt, Homo sapiens
caccgggaaaaggcacgaaggggcagcccaaacgcccgagaaggccacgcgcagaaaaggccaccaaaagccagc

SEQ ID NO: 56293 - RNA, 76 nt, Homo sapiens
aagcagcaaaaacacagaccaggcaagccaaccgagagagggcgaagaagaagaaggaaagagaaaaaagagccaa

SEQ ID NO: 56294 - RNA, 79 nt, Homo sapiens
cccgcacccgggcacacaaaaaacgggcgcccgcgaccagggagacgccccagggcgccggccgagcccgggaaaacga

SEQ ID NO: 56295 - RNA, 72 nt, Homo sapiens
aaaccccgcccacagcacgaggggacggacccccgggaaccagcaggcagaaggaaaaaccaccaggaccac

SEQ ID NO: 56296 - RNA, 73 nt, Homo sapiens
gaggagagccgagaggaacggaccgcaggacgaccgccacgcgcaggccaggaccagccagcccaccggacca

SEQ ID NO: 56297 - RNA, 82 nt, Homo sapiens
agagaccggagagcacacggaaacacacacggaagaggggaaagggaacagaacgaaggcccggagagggaaagcacggcaa

SEQ ID NO: 56298 - RNA, 87 nt, Homo sapiens
ccgcacggaccacacagcgcgggagccacgcagaggacgccggaacacccggaagccgagaaaggggaggggaggaagcgcccggga

SEQ ID NO: 56299 - RNA, 73 nt, Homo sapiens
gcccaggccccccaccaccagaggcaagacagccggcagcgaggggcacagaggcaggcacaaaaccacaagc

SEQ ID NO: 56300 - RNA, 79 nt, Homo sapiens
gccgccagcagaggcggagcccgcagaccgcagaaggccggagacaccagcaggaaaccggagaagacacaccacagag

SEQ ID NO: 56301 - RNA, 65 nt, Homo sapiens
aggaacggaggccccggacggagaaaaagagaggcggccccaggggggaccaacaagggagaacc

SEQ ID NO: 56302 - RNA, 38 nt, Homo sapiens
caggccaaaacggacccgaagaagaccaaaggacaaaa

SEQ ID NO: 56303 - RNA, 82 nt, Homo sapiens
gaacacacgagccacgaaaacaggccgacgcccccaacccaccccacccagagacgagccggggggacgggcccacaccgca

SEQ ID NO: 56304 - RNA, 60 nt, Homo sapiens
ggacgccgcggcggccgcagagcgcaaaagcagggcagcgagaggcacacccagaagcca

SEQ ID NO: 56305 - RNA, 53 nt, Homo sapiens
cagaaagcagccaaccagaaaagagaaccaaccgacacgagccaaaaaccccg

SEQ ID NO: 56306 - RNA, 74 nt, Homo sapiens
acgcccgccccgcccagagaagggaaagaccaaaccccaaagcaggccaaacccaggaggacaacaagaaggga

SEQ ID NO: 56307 - RNA, 75 nt, Homo sapiens
agacggacgcacaggaaggaaaaaggggggacacagcgagccacgcgccaggaagcccggccaaggagccaaccg

SEQ ID NO: 56308 - RNA, 74 nt, Homo sapiens
aaagcagggggccggcaaacgaaagcgaagacaaacaaaagcccagggaaaagaaccccccgggcggaaaaaga

SEQ ID NO: 56309 - RNA, 66 nt, Homo sapiens
ggagaaggaccaagaaccaggcaagaacggaagcacgggcggaggaaagcacaagcagagcccccg

SEQ ID NO: 56310 - RNA, 34 nt, Homo sapiens
ccaaccggaaaaggagccaagaaggccgaccggg

SEQ ID NO: 56311 - RNA, 44 nt, Homo sapiens
gagaaaggaagggacagaggacgcagacgaggcacggagcacca

SEQ ID NO: 56312 - RNA, 81 nt, Homo sapiens
cgcagacggcgggggcacgacagcgcaaggaggccgcacccaaggccgcagacaagggggcggacccaaaacccaggaaac

SEQ ID NO: 56313 - RNA, 70 nt, Homo sapiens
acgcagcagcgcggacccggagcgacaagcgccccgacggagcgccaggacgcccacaagagagggaagg

SEQ ID NO: 56314 - RNA, 61 nt, Homo sapiens
ccacggcagacacacaacccgacccgacgagggggcacgaacaacaagacaagcaaccaag

SEQ ID NO: 56315 - RNA, 58 nt, Homo sapiens
acgagcggaggacacccaacccgggaagaggcagaaacccaggagaccaccgcagggg

SEQ ID NO: 56316 - RNA, 75 nt, Homo sapiens
aaaacccagaacgaagcgccagccgcgaggcaaaaagggaaagacgcccagcccgccgccaagagagggggggcc

SEQ ID NO: 56317 - RNA, 59 nt, Homo sapiens
ccggcggacagccgcacccgcgccccagcagaaaaaacacggaccggaagaccccgagg

SEQ ID NO: 56318 - RNA, 72 nt, Homo sapiens
cgacggaccggcacgccagacccccacgcgcaggaccacgaggagcaacggcgagccgcgaagccacccccg

SEQ ID NO: 56319 - RNA, 68 nt, Homo sapiens
gacagaaacgggagaaacacaggaacaaacgacagaaaggaccaagacagcaggaacgaaccaaaccc

SEQ ID NO: 56320 - RNA, 31 nt, Homo sapiens
gcggcccggaccggcgacacgggcggaccac

SEQ ID NO: 56321 - RNA, 81 nt, Homo sapiens
caccggccaaacccagcgcagaaagcccagggaaccgacagaacggcgaaggggagccacggaaagacaaaagaagaacgg

SEQ ID NO: 56322 - RNA, 60 nt, Homo sapiens
cgggaggggcgaaacgaggaggagaaacgcggccgggccggagcgcaccgggggccaaca

SEQ ID NO: 56323 - RNA, 80 nt, Homo sapiens
ccgaaagaccgaagggacagagacagagacgcccagccagaagaagaagcacgggagaagagcggacaggagaacaccag

SEQ ID NO: 56324 - RNA, 71 nt, Homo sapiens
ggcaacccggggccacccagaaagagaagacaaccacggagccgagaaccaggagcacaggagacgaggaa

SEQ ID NO: 56325 - RNA, 84 nt, Homo sapiens
gaaaaggcggacgggaaggcgggagacgagaagccgaaaagcgcagcgagcggagccgccggaggggcaaagaaaaaggagaga

SEQ ID NO: 56326 - RNA, 76 nt, Homo sapiens
cagagagccccgaaaggccgggcagagcgagccacccccggcgcccgcgggcccgccaggaagaagcggggaggga

SEQ ID NO: 56327 - RNA, 68 nt, Homo sapiens
ggaagaacgagaaaacaagacaacgaagaagaaagcaccgagagcgaaaggggacaaaaaccggacgc

SEQ ID NO: 56328 - RNA, 47 nt, Homo sapiens
aaaaacagagggaaggaacccagcagaagccagccgccacgccgagc

SEQ ID NO: 56329 - RNA, 88 nt, Homo sapiens
cccaccagcgcccgcccccgccccgcacaagggacacaggcaaaacggacaaagaccgcaaaaagacccgaacggaaagccaaaccgc

SEQ ID NO: 56330 - RNA, 83 nt, Homo sapiens
accggcccagaagaacaagcgccaaacggaggcccgaagaaaaagaaccgaaaaagaaaccacagacgagaaaaagacgagga

SEQ ID NO: 56331 - RNA, 84 nt, Homo sapiens
gaaagccgggcaaagccggccgcgaaacgcggagacccaaccgacaagcccagagaacaggaaagcaaaacccaaccccaaagc

SEQ ID NO: 56332 - RNA, 57 nt, Homo sapiens
caagaaaacaggaagggagccccaaagggaaagggagcagcaccggccacacccaca

SEQ ID NO: 56333 - RNA, 76 nt, Homo sapiens
gaacagacaaaaacgaggacaacacaacacgcagggaaagacagcgggaacggcgacgaggcacaaagccaagaag

SEQ ID NO: 56334 - RNA, 38 nt, Homo sapiens
gaacgaggggagacgaggacaaaagccacgaggcacaa

SEQ ID NO: 56335 - RNA, 77 nt, Homo sapiens
caggccagccgcgccagcggggaccgcacacccggccgacgcccaccccaaggcgggaaacagaacgacagcccgca

SEQ ID NO: 56336 - RNA, 85 nt, Homo sapiens
cccggccggagcgggcggagacgccgggcagccgaacggagggcgacggagggaggagcgaagaaaccgcaaaggggagaaaaac

SEQ ID NO: 56337 - RNA, 79 nt, Homo sapiens
acgcaaaaaaacaagaagggaggagaagggcccgccagcaagaggaaaagcagagacacccggcacccaggacgggacg

SEQ ID NO: 56338 - RNA, 67 nt, Homo sapiens
gcagaagcgcccgacccgccgggaacgccagcgagccagaggccaccggcacaagaagaaaagaaag

SEQ ID NO: 56339 - RNA, 86 nt, Homo sapiens
cgcccccccggccggcgcagccgccgcccgcgcgcgaccgccccgggacccggcacagggaggaggacagccaggggcagacaaag

SEQ ID NO: 56340 - RNA, 59 nt, Homo sapiens
gcgggaccggcaaagccacggaagacaaagaggaacagaggagcggaaacgcaggagga

SEQ ID NO: 56341 - RNA, 52 nt, Homo sapiens
gacaaagaccgaaaaccaggagggccggaggacccaagcgggaggagcagac

SEQ ID NO: 56342 - RNA, 77 nt, Homo sapiens
agcagacaaaaccaaccagacaagaaggaaaagaacagagagggccccccgaaaaagccgaggaggagaggagaggc

SEQ ID NO: 56343 - RNA, 80 nt, Homo sapiens
ggggacagcaaccccggaggccggaggaacgggcccgcaagcgcgccgacagaggcccacgcggaccggcagcgccaccg

SEQ ID NO: 56344 - RNA, 63 nt, Homo sapiens
gcggccccggcccggcccccgcaggagcagcgagcgacgcgcccacggaggaggcgggggccc

SEQ ID NO: 56345 - RNA, 77 nt, Homo sapiens
acgagacacaccgccggcccggggcggcgccgaggggaggaggcggaagcaccagaagcccccagcgggaaaagagc

SEQ ID NO: 56346 - RNA, 75 nt, Homo sapiens
acacagaaaccaaccgacgcagcacaagaacgcagacccccagaacaagcaccagaaaggagcaggcaggaagac

SEQ ID NO: 56347 - RNA, 77 nt, Homo sapiens
aggcagcgggcggcgccagcggagaacagcccgaccacgacccagcgacacaggacaggaagagcgaacacacaaca

SEQ ID NO: 56348 - RNA, 80 nt, Homo sapiens
ccaggagcgccacacagaggcggagggaccaggcagaccgacccccacccagaaggggcagaccaacaccacccagcaaa

SEQ ID NO: 56349 - RNA, 84 nt, Homo sapiens
gagccccacacccgccgcgcccggcacgcggcaaggagcccgggaagagacgccgggagcgagcgcgcagggccagccacaagg

SEQ ID NO: 56350 - RNA, 76 nt, Homo sapiens
ggaaagaccacgcgccgaagaaagccacaagcccgcgccagaccaacaagcggcagacccacaccggacacagccc

SEQ ID NO: 56351 - RNA, 78 nt, Homo sapiens
gccaagagccggggccgacagcccgccgggacgccggccgacgggacaccaaggaggaccagagagagaagaaaaccg

SEQ ID NO: 56352 - RNA, 71 nt, Homo sapiens
ccccggggggccggcagggccccgcaccagcaacccaccaagagcacccccacgcccagagccgcgaggga

SEQ ID NO: 56353 - RNA, 56 nt, Homo sapiens
cgcgaagaagcaaggccaaccggaaaaaccgccaaccaaaaacccgcgcccgcagc

SEQ ID NO: 56354 - RNA, 72 nt, Homo sapiens
gaggaaaaacagccaagacggcaaagccccccagaagaccagaagaaggaacgccacagaggagggggacgc

SEQ ID NO: 56355 - RNA, 79 nt, Homo sapiens
ggacgccggcccgcgggacaccccacagccgaggggagagcagagaggaccccggaggaaaagcggaagcggcagcggc

SEQ ID NO: 56356 - RNA, 79 nt, Homo sapiens
aagaagcgcagcggaaccgaccggaccaacccagagacccgcagaggagcccaccgaaagacccaaagggaccagaggc

SEQ ID NO: 56357 - RNA, 84 nt, Homo sapiens
aaggcgacggccaaaggaagaaggaccagaggaccagcacagcaggaggaggaggaggaagaggaagaggaagaggaaagcgag

SEQ ID NO: 56358 - RNA, 100 nt, Homo sapiens
ggagacaccgcagcccggagccggaggagcgcgcggacgccaaccagcccgcgagcgcccgaggacaccaggcagaaagagcccacaagacaaaaaagca

SEQ ID NO: 56359 - RNA, 77 nt, Homo sapiens
gccgaaggagccaccaggccgggaagcccacggcaagccagggcgagcaggaagaagaacaagaacacacaagaaaa

SEQ ID NO: 56360 - RNA, 36 nt, Homo sapiens
gaaacacagaacgcagggaagagggaggggaccaaa

SEQ ID NO: 56361 - RNA, 74 nt, Homo sapiens
caaagaccgcaagaagacaacaggagacggcaagcaagcgagcgccgaaaagcgaaaagaaacaagccgcggca

SEQ ID NO: 56362 - RNA, 81 nt, Homo sapiens
ccgagggccgggcggagaggcggcgcgggcgcgaggacaagaacccaaccagcagcaaaacaccaaggaaagggagcagca

SEQ ID NO: 56363 - RNA, 49 nt, Homo sapiens
accccgaacccagccacgacagccgaaagaccacagcaagaccacgccc

SEQ ID NO: 56364 - RNA, 119 nt, Homo sapiens
gggagaagagggggaagaaaggagagggccggggaaggaggggaggaagaaaacgccgaacaccagagacgggaaaaaaaaagaagaaagacggccacagcggagccggaagccgagac

SEQ ID NO: 56365 - RNA, 74 nt, Homo sapiens
aaagacagggagagaagaaggccaccaggcgagaaaggcacggcagacacaccgaccagaggaaggcgaacccg

SEQ ID NO: 56366 - RNA, 80 nt, Homo sapiens
acccagcgcaaaggaagaggaagaaccccccacggaaaggacgaaagaaagaagcagccccagaaagaaggacgccgcgg

SEQ ID NO: 56367 - RNA, 78 nt, Homo sapiens
gcggccccagcccccgggggggcccgagagccccccaagagaacccagggggagccacgccggagcgggcaccggcgc

SEQ ID NO: 56368 - RNA, 80 nt, Homo sapiens
gcccagcggagaggaacacgggcgaaccaccccaccagggagacagccagaaagaacccaagccaagacgcaggacgagc

SEQ ID NO: 56369 - RNA, 100 nt, Homo sapiens
ccgagaccggaccgagagcggaccgagagcgcgaaacgcacgagaagcacacggacaagccaaaccagcagcggacaggagagcaagcaaaggaacaacc

SEQ ID NO: 56370 - RNA, 53 nt, Homo sapiens
ggaccaagaaccaggccgaccggccccagcagaggaacgggggaccccaagcg

SEQ ID NO: 56371 - RNA, 56 nt, Homo sapiens
cgagacacgcaagagaagcgaccgcgcacgccgcgccggcgaaagcaacgaaggga

SEQ ID NO: 56372 - RNA, 57 nt, Homo sapiens
cgggggcagagggcagcaagaggcgcgcagagggcgcaggagaccaggcccaggaag

SEQ ID NO: 56373 - RNA, 75 nt, Homo sapiens
aacgggggcggccgggacggaggacgcgcagcacaccgacagagaacccaggccaacacacagacagaggcagcc

SEQ ID NO: 56374 - RNA, 88 nt, Homo sapiens
gcccagcgaaggggagaggccccaaaggcgcaccaagaccaacagccccccggaggaaagaacggaaccagcccccgggcgcgccgga

SEQ ID NO: 56375 - RNA, 74 nt, Homo sapiens
ccaggaacgaaagagcccccaaaagcagcaaagcccgagccagagacagacccagcacggaccccccccccagc

SEQ ID NO: 56376 - RNA, 38 nt, Homo sapiens
cgccggcggcccccacgcagcggagccccgggcccagc

SEQ ID NO: 56377 - RNA, 81 nt, Homo sapiens
cgcaaggagcggaaaacacgggccaacacggcgcgaaagccagggaagacaccacgacagcgaggcagccagcagcagcca

SEQ ID NO: 56378 - RNA, 72 nt, Homo sapiens
gcaaaagccacaaaaagcccgccccaggcgaaacgaaaaccagaagaggcaggcgcaagacggagaaaagcc

SEQ ID NO: 56379 - RNA, 77 nt, Homo sapiens
caagcgcgaaagcgccaaaaggacagcagcgcaagccccggggcagagacacaggacacccacccgccggggacaga

SEQ ID NO: 56380 - RNA, 74 nt, Homo sapiens
agcgagcgagggggggcgcgccggaaaccggagcgcgcagcaggaaagggcagcggaggcagagccgaagaaag

SEQ ID NO: 56381 - RNA, 78 nt, Homo sapiens
cgcgaccgaggggacgccgcccgccgcccgccgcaggccacccgggaacggaggagggcccgagaaaagcacagcacc

SEQ ID NO: 56382 - RNA, 79 nt, Homo sapiens
ccagggagaccggccgggaacagacgggaacacgccggcaccgcgccccgggccaggccccgccgaggcacgggagaag

SEQ ID NO: 56383 - RNA, 70 nt, Homo sapiens
aggaccgagcagaacgaaaaggagaaaaggcgggaagaagaccacccagcccacaccgcaaggaaccggg

SEQ ID NO: 56384 - RNA, 76 nt, Homo sapiens
agcccacgcaacgaagggaacacccacccaaagggacgaaggagaagaaggaggagcccaccacagcggagaagag

SEQ ID NO: 56385 - RNA, 84 nt, Homo sapiens
gccagcgggacgaggaccgagaccgcggccgggaccgaggaccccggagcagcgaaaacccgaaacaagaacacaaggggagag

SEQ ID NO: 56386 - RNA, 79 nt, Homo sapiens
gccaccgcggcgacaaaagagggcccgagaggaaagacgagccaacggaggcagccggcggaaacgaagaaaaaacaga

SEQ ID NO: 56387 - RNA, 74 nt, Homo sapiens
acaccaccaggggacggcacggacgacagaagcgacgggagaccggcaaggacacggagccagcgaaggacgga

SEQ ID NO: 56388 - RNA, 82 nt, Homo sapiens
cgcagccgcagaggaggagcgcagcccggcccggcagaagaaacacacaggagaacccccgagaacagagagaacacgccca

SEQ ID NO: 56389 - RNA, 80 nt, Homo sapiens
cgcgaacagaagagaggaagaaaggacagggagagaagccaagaaagacaggacagcccagagcaagcacacggaggccc

SEQ ID NO: 56390 - RNA, 86 nt, Homo sapiens
ccagcgccggcacgaaacccgcaagcggagaaagggaggcgccggcgggaccgcgggaaggcggggcggggccggcgggaggccac

SEQ ID NO: 56391 - RNA, 83 nt, Homo sapiens
acgccccggggcgcggcggagggcgaggcggcgcggccaggccaccccggggagccaaccagaacgaaccagaaaaccggaga

SEQ ID NO: 56392 - RNA, 69 nt, Homo sapiens
agaaggaccaagaaccagcagaagaggcggccacccacgagccgacggcaaacgccagggagccaccaa

SEQ ID NO: 56393 - RNA, 88 nt, Homo sapiens
ccacagcagccaccaaacaggagccagaccaagcaggcagagaagaagcacagagggaaggagaaggagacacagaaggagcagcagg

SEQ ID NO: 56394 - RNA, 74 nt, Homo sapiens
gggggcgcgcaggccgcgacgagggcgcgaggcacacaggaccccgcgagccagcggcgacgggaacaagcccc

SEQ ID NO: 56395 - RNA, 86 nt, Homo sapiens
ccgagcaagaacacccgcaccaacgagaaggaaagcacagaagaaggcggaagaacaaagaaccaaagacccgcgacgagacgaag

SEQ ID NO: 56396 - RNA, 71 nt, Homo sapiens
ccacggcacgcggcccaacagaaggcaccacgagaacgccgcgccgacacgggcaacaggagcgcgggagg

SEQ ID NO: 56397 - RNA, 72 nt, Homo sapiens
agaaagaagagcgcaagcggagaccaggccaaaaggagggaaaacccaccggacaaagaggagggggaaggc

SEQ ID NO: 56398 - RNA, 77 nt, Homo sapiens
caggcaccgaccccaccgagacaccagccaggacggaacgggcccaggggacccgcaccaccagccaggcagaaggc

SEQ ID NO: 56399 - RNA, 67 nt, Homo sapiens
gaccccacccgggcgcgcggcggaaaggcacagacccggagcagcagcggagccgcaacaccaaggc

SEQ ID NO: 56400 - RNA, 62 nt, Homo sapiens
aagggccaccccacagacggaaaacgcacggcaacccacgaagcccagccggagaagcaagc

SEQ ID NO: 56401 - RNA, 64 nt, Homo sapiens
agaggagagaagaagaacagagagaacaaaagagcagagagcagcacccccaagggggagaaac

SEQ ID NO: 56402 - RNA, 80 nt, Homo sapiens
gaaggaacgagaagcgcagagaaaaggaacgcacaggagagcccgcgagccagaccaacacggagcaggagggggaccaa

SEQ ID NO: 56403 - RNA, 61 nt, Homo sapiens
acggggaggcagcaggacacaccggccgagggcccaccaggacggaccacagagacacggg

SEQ ID NO: 56404 - RNA, 79 nt, Homo sapiens
aacgagccacccgcgaaaagagccacggggccaagaagggaagggcgagcacgggccagcccggccacagcagcacgag

SEQ ID NO: 56405 - RNA, 37 nt, Homo sapiens
aaaagaagcccaaagaaagcagcacaaggaaaacgag

SEQ ID NO: 56406 - RNA, 53 nt, Homo sapiens
caagccacagcacaggcacaggaaagggagcagcaccggccacacccacagca

SEQ ID NO: 56407 - RNA, 53 nt, Homo sapiens
ccaccaaagacccggcaccaacaggcacagaacacagaagaagcgaagggacg

SEQ ID NO: 56408 - RNA, 67 nt, Homo sapiens
gaaaacaccggggacagggagagaagaggaagaggccagagaggccgacgacagaacacaagccagc

SEQ ID NO: 56409 - RNA, 50 nt, Homo sapiens
caaggcaacgaagagaggggaggagaagaggggaggaaccaaggaaggcc

SEQ ID NO: 56410 - RNA, 68 nt, Homo sapiens
cgaaggaggcagaggcacagcgcaggaccggcgacaagcgcagagcaggcaaacagggagcacaacac

SEQ ID NO: 56411 - RNA, 74 nt, Homo sapiens
cccaacacgacaggaacagggcagaacggccaagaccggccaacacaggaggagacagcaaggaagaagaaaag

SEQ ID NO: 56412 - RNA, 76 nt, Homo sapiens
caacggcaggacggaaggcaggcccacccgggcaggagaggccgaccacccggggggcccgcgcgaacacaagcgc

SEQ ID NO: 56413 - RNA, 65 nt, Homo sapiens
cgcagagcgggaccacccgggcacagcaggcacggagagaaccgagcggccggagcagaaacgag

SEQ ID NO: 56414 - RNA, 75 nt, Homo sapiens
ggagaggcgacagggacaacagaacaaaggaaggggaggacaagcgccggcacgcgaccgaacgcaaagggaacg

SEQ ID NO: 56415 - RNA, 47 nt, Homo sapiens
ccacagcggaccgccccccacgcagaccgaccaaacagggagcagcg

SEQ ID NO: 56416 - RNA, 77 nt, Homo sapiens
acacacagccaggcccacaaagaaaaagcaaggcccagcagcacacaaggagcaagccaggagaaagcaacagccag

SEQ ID NO: 56417 - RNA, 81 nt, Homo sapiens
agaaagccggcaagagggcgaacaacacggcaacgggacggcgacagcccgcaccaggccggccgaaaaaaaacgaagaag

SEQ ID NO: 56418 - RNA, 66 nt, Homo sapiens
gggagcccaaggggcacagccccggcacggacagagcgggagccaccagcgccaaagggaagccag

SEQ ID NO: 56419 - RNA, 69 nt, Homo sapiens
agcacaaccagccaagggccacagccagcccaagggcagagaaagaccgaacggggaaaaaggccagac

SEQ ID NO: 56420 - RNA, 99 nt, Homo sapiens
ccgcagcaggacacgaaccgccagagggcggcagcggcaccacggggacgcaaaggcgcacacacaaaggggagccaggaagaagacaaaacagagagg

SEQ ID NO: 56421 - RNA, 64 nt, Homo sapiens
aagcgcaggaacgggaacgcaggagcgaccaggcgggaaagaggaaagaagacacgcaagagaa

SEQ ID NO: 56422 - RNA, 72 nt, Homo sapiens
gcaggacaggggaacggggaccaaaccacagcaaaaacaccaggaaagacaacgaaacacacaacaaaaagc

SEQ ID NO: 56423 - RNA, 99 nt, Homo sapiens
gcagaggaagcgccgccaggcccgcaggaccgccggagacagggcaaacacaccgccaggggggagcaggcgaggccgaaggccaagggagccaggggg

SEQ ID NO: 56424 - RNA, 62 nt, Homo sapiens
gacgcagagggcaggccccagccagcgccccgcccacccggaccgccccaaagacccaggga

SEQ ID NO: 56425 - RNA, 71 nt, Homo sapiens
aaacagaccagaggacacaccgcagcaacgggggcacagagaggaggaggcagacgcagacaacaaacaga

SEQ ID NO: 56426 - RNA, 61 nt, Homo sapiens
cgccgggcgggacgggggggcggcccggccccgcagggaaagaacaggagacagcaaaaag

SEQ ID NO: 56427 - RNA, 54 nt, Homo sapiens
gaaacaacacaaccccacgccacagccgacagagaggcgggccagagagcaagc

SEQ ID NO: 56428 - RNA, 77 nt, Homo sapiens
cagcaacgccgggccggaacccccccccccgcgcgccgggcccagccaagaagagggaaagaagacaggaaacaagg

SEQ ID NO: 56429 - RNA, 77 nt, Homo sapiens
agcggaggaggcgccagcagcccggagggggagcgggccggagagaagagaggggcgcgaggagaaggaaacaggcc

SEQ ID NO: 56430 - RNA, 77 nt, Homo sapiens
aagggaagaaggagaacaaaagcaaagccaggaagagagaaggagggcagaaaccggagccccgagcaggacaggag

SEQ ID NO: 56431 - RNA, 78 nt, Homo sapiens
gaaacccgaaaacccggaaaaacagaaaagagcaacggagcgaaaggaagcagaacggaaaaagcaaaagcgagaaga

SEQ ID NO: 56432 - RNA, 68 nt, Homo sapiens
cgcgcaaccagacaagacgccgaaacacgccccacgaaaggacccaacaaaccacacaaggcccgaca

SEQ ID NO: 56433 - RNA, 83 nt, Homo sapiens
acggcaggcgaggcggaacaggccgggcaccaaggcgcagcgacaaaagaagcgaagccaggaacaagaggcggaagacacac

SEQ ID NO: 56434 - RNA, 68 nt, Homo sapiens
cgggggggaaaaccagaggggcaaccaagaagaaacggagaccggaaaaggagcgcaccggcaccggg

SEQ ID NO: 56435 - RNA, 75 nt, Homo sapiens
caacgacaaaaccacagaggagaaaaaaacacgacaacaggccagccgggcgacagagcgaaacccgccaaaaaa

SEQ ID NO: 56436 - RNA, 58 nt, Homo sapiens
gggaccaccagagggaaagcggggcggcagaaccagagaccacagaagaaggaagggc

SEQ ID NO: 56437 - RNA, 74 nt, Homo sapiens
cgccggccgcgcccgcgcgggccgcagccaagccggaacaggagcggcgagcccaaacgcaagggggaagaaaa

SEQ ID NO: 56438 - RNA, 73 nt, Homo sapiens
ggccccaagaccggcagcgccccgagccaaggcccgggacgagcggcccagcgacgagcgaagaggcacaaaa

SEQ ID NO: 56439 - RNA, 53 nt, Homo sapiens
agggaggccacagagacaagagagagaacaaggccgcgcaccaggcgcagaac

SEQ ID NO: 56440 - RNA, 58 nt, Homo sapiens
gaacaaggaaaaagcacaccaaagacgccaaggccccaaaggacaaagcacagacagc

SEQ ID NO: 56441 - RNA, 52 nt, Homo sapiens
ggccccccagcagcccagacaacaggcccaaggggaaagcccgcgacaaggg

SEQ ID NO: 56442 - RNA, 56 nt, Homo sapiens
ggagaaacagagggagaacaagagggacggaaacagacgacgacacggacaggacg

SEQ ID NO: 56443 - RNA, 69 nt, Homo sapiens
cagcaacccacccacaccagaccagccacaggggaaagaaaacaaggccccaaccgaaacaggaaggcc

SEQ ID NO: 56444 - RNA, 78 nt, Homo sapiens
agcgaccagccacaagaacagaggccagcaccacgcacagggacaaaggcaaggagaagcagcggccacgaccccaga

SEQ ID NO: 56445 - RNA, 71 nt, Homo sapiens
acagggcaacgggagaagagcacagcagcccacaagcagggaggcggcggccaggcacacagaaggccaaa

SEQ ID NO: 56446 - RNA, 71 nt, Homo sapiens
gaccaccaggaccagcaccccccaagccccccaggggccgacccccgcgaggaccgaacgaggccgaagga

SEQ ID NO: 56447 - RNA, 43 nt, Homo sapiens
cccaagcgaggacgcggaggacccacgaggaagcggccgcggc

SEQ ID NO: 56448 - RNA, 74 nt, Homo sapiens
gaacggccgaagcaccagggccccaggcagcagaacgcccacagagcgggccccagcgcaaccagggaacccaa

SEQ ID NO: 56449 - RNA, 88 nt, Homo sapiens
gaccgcgaccccaagcaggaaagaagaaacaacagaaggacagggacccaccaggagagggggccaagaggagggaccccggggccgc

SEQ ID NO: 56450 - RNA, 76 nt, Homo sapiens
ggaacggcaggacacacgcggcgcgggaagacggaccgcagggggccacacagccacccaagggaccacccccccc

SEQ ID NO: 56451 - RNA, 48 nt, Homo sapiens
agagacagagaacacaagggaagccaagagaagggaacaacagaaaaa

SEQ ID NO: 56452 - RNA, 73 nt, Homo sapiens
ggacggggaccacacagccagaacagggacgccagccgcagaggaagacccgcgccagcaggaagggaccaaa

SEQ ID NO: 56453 - RNA, 70 nt, Homo sapiens
ccgcccgacccaaagggaaaacagaaacagggcgacacaccaaacgcaggaacccgccgaaaacgagaag

SEQ ID NO: 56454 - RNA, 59 nt, Homo sapiens
ccgggcgcacccgcagcgggacagaccacaggagccagacagcagcgcccaaggacaag

SEQ ID NO: 56455 - RNA, 82 nt, Homo sapiens
gcaccccgagaccgcagccccgccccacgccggcagccccacgagaaacgaaggaggcccaaccacaaaaggagccgacgga

SEQ ID NO: 56456 - RNA, 75 nt, Homo sapiens
cagaacaccaggccagcaccaccggcaggggaggggaaacacagagaacggaacagaagcgagcccgacggaggc

SEQ ID NO: 56457 - RNA, 71 nt, Homo sapiens
ggagccccagcgccaccgccgaccgaagccgcaaaaagggaaaagaggacgaggcgcgaaaaggcaaaggc

SEQ ID NO: 56458 - RNA, 72 nt, Homo sapiens
ccgccagaaggaacgacgccaggagaaaaccaccaaaaaaagaagaagaaaacacggacgggcgcgaggcaa

SEQ ID NO: 56459 - RNA, 81 nt, Homo sapiens
cagcacccagaaaaagcaccccgaggaggaagacgaacgaaacacgaaagggcagggaggaagaggcagagaggacggacc

SEQ ID NO: 56460 - RNA, 92 nt, Homo sapiens
gccagccgggacgcgcggccgccgccgcgcagacgacgagccgccccgcccgcgcccccggggccgcggagccagaaccgagggcaccggag

SEQ ID NO: 56461 - RNA, 69 nt, Homo sapiens
cgcagggcgcccccgaaagacgcgccagcaggcaacaaaaccaaggggaccaaaagcagagacaggacc

SEQ ID NO: 56462 - RNA, 77 nt, Homo sapiens
gacagccacacaacggacagggggaagagcaggaggacaccggggacggggcagcaacccacccaacccgggggccc

SEQ ID NO: 56463 - RNA, 77 nt, Homo sapiens
gacccagccagcacaggcaaagagggcacggaaagacgaaagacgcagaaccgcaacgggagaaggaaacacccaaa

SEQ ID NO: 56464 - RNA, 51 nt, Homo sapiens
cgccgccccccgcacaaggcccacacgcagccacgcacagccaaaaaaacg

SEQ ID NO: 56465 - RNA, 77 nt, Homo sapiens
aagaagaaaaagaaggcccgagcaaagaagagcccgaacaaacaaacacccagaaacaagagacggagcggaaccgc

SEQ ID NO: 56466 - RNA, 82 nt, Homo sapiens
cagaagaggcaaaagcgaggcagaaccccacagccacaccagccaaaggaggagacagcagaagaggcaaacaaaccggaga

SEQ ID NO: 56467 - RNA, 54 nt, Homo sapiens
gaaaacccaagagccgggaaaaggcaaggcgccagagcagcccgaagaggggga

SEQ ID NO: 56468 - RNA, 76 nt, Homo sapiens
gcagagaaagagagggaaaaggaagacacgccgaagaaaagcaagccacagacggaggaagaacaagaaggagaac

SEQ ID NO: 56469 - RNA, 36 nt, Homo sapiens
cacgagagacggcaggagggaagcgaggaggaaaga

SEQ ID NO: 56470 - RNA, 64 nt, Homo sapiens
gaaggcgaagaaaacagccaagcaccagaaggagagaagaacgcggcagaacggaggcaggcag

SEQ ID NO: 56471 - RNA, 38 nt, Homo sapiens
ggagggcgagaacgaccccgagacggacccacccagga

SEQ ID NO: 56472 - RNA, 90 nt, Homo sapiens
ggcgagaaagcacgggggaaacgaccacaggccaccacccaccaccacggcgaggaccggcccagccaggcccggggcagcggcgaccag

SEQ ID NO: 56473 - RNA, 69 nt, Homo sapiens
gccaacagggccaacccgaaccccaacacggcgccagcgagagcccaacaagggagaaggaacgcccag

SEQ ID NO: 56474 - RNA, 77 nt, Homo sapiens
ggaaacgggcgaagcgacgagccgcgaggagaaaagcacggcgccgagaggaaggacacaaggcaagaagcagacaa

SEQ ID NO: 56475 - RNA, 75 nt, Homo sapiens
cagaaaaacgacgaaagaaacaaaagaaaaaaagaacacaagaaaccaccaaaagggccggagcgcgaagacgca

SEQ ID NO: 56476 - RNA, 73 nt, Homo sapiens
gaacacgacaacacagcgagcgaaaccaggacagcgacagcagacaagcaacacaaggggaagaccggaaaga

SEQ ID NO: 56477 - RNA, 67 nt, Homo sapiens
ggcgagaggaaacagaccaaagaggcaagagagagaacaagacaacgaagagaggaaagaagcggaa

SEQ ID NO: 56478 - RNA, 83 nt, Homo sapiens
agcaacagcagcaacgccgcacccgaaaggaggccccgccggggacccgaaaaaaaaggccacagaccggcccacaaaaagcc

SEQ ID NO: 56479 - RNA, 83 nt, Homo sapiens
gagcagggcgggaggagaccgcgcgccccagaccaccggcagggaacagccgagcagaccgaggaggcccaccagcagacgcc

SEQ ID NO: 56480 - RNA, 81 nt, Homo sapiens
caagcgggccacgcacccgcaccaaggccaaggagacgcgcagaagaaagggacaaacacgaacgcccgaacaccacaaac

SEQ ID NO: 56481 - RNA, 73 nt, Homo sapiens
cgcacacagcaggaaagagagagacacagcaggcgaaccacgacagcagagaagaaagcagaacagagcagca

SEQ ID NO: 56482 - RNA, 75 nt, Homo sapiens
aaagacccaaaggaaaccaagacgcaggagcagaagagcgaagaagcgggcacgcagaaaaacagccggacacgc

SEQ ID NO: 56483 - RNA, 65 nt, Homo sapiens
caacgcacgggccggaccccacggaggcacgcggagacagcaaggaggcagcgcccaggaccggg

SEQ ID NO: 56484 - RNA, 77 nt, Homo sapiens
cacaaaagagcagaggaggaacaccaggcacaagagcagacacaagagaaagacccagaaagaaaaaacaagaaaaa

SEQ ID NO: 56485 - RNA, 77 nt, Homo sapiens
cgaacagaaggaacgacgcggaccagaagccagagcgaggacgccggcagggcaaaaaacagagccaaacagcccaa

SEQ ID NO: 56486 - RNA, 80 nt, Homo sapiens
gagccccaaacaagggggacggacagagggaaagggagcagcaccggccacacccacagcacgaccggaacccagcgacc

SEQ ID NO: 56487 - RNA, 64 nt, Homo sapiens
caaaaacagggaaagggccagcacaggagagccgagaaacaaggcaccggacccgcgccccaac

SEQ ID NO: 56488 - RNA, 71 nt, Homo sapiens
ggacaggaccacagcgggccgaaaaacagggccggagaaacagccgggccaagaggggaaagaaaacacac

SEQ ID NO: 56489 - RNA, 80 nt, Homo sapiens
gggggcagcacggaaccacacagggccgccaccaacagagaagacagagcaccaacgagagagaaaggcagaaggaacga

SEQ ID NO: 56490 - RNA, 83 nt, Homo sapiens
caaggcaagaccgaacagaaggaacgacgcggaccagaagccagagcgaggacgccggcagaacccgaggaaaggaggccaac

SEQ ID NO: 56491 - RNA, 49 nt, Homo sapiens
accggcacgcaacaggacagggacaagcgcacagcggagaaagcagcgc

SEQ ID NO: 56492 - RNA, 70 nt, Homo sapiens
cggaacaggggccgccagccccaaaaaaacgcagagaagaagccggaggaggagaagagccgagggagac

SEQ ID NO: 56493 - RNA, 60 nt, Homo sapiens
cgagagcgcggagcgggcggagcggcgagagcccccacggagccgcccacgaggacgcgg

SEQ ID NO: 56494 - RNA, 84 nt, Homo sapiens
gcgcgcgcgccgagccgcgggcccgcagcagccagcaccagcccccaccccaggccccccagccccagcacaaacagcagcagc

SEQ ID NO: 56495 - RNA, 77 nt, Homo sapiens
agccggagcccgcggagggacacagcgggccaggaacggccggaccacacccagcacaccggggggccaggcacacg

SEQ ID NO: 56496 - RNA, 106 nt, Homo sapiens
ggagacaaacaggggaaacagaccgacagacgggaaaccacaccaccacgaaggaaaagagagcgcaccggaaagcaaaaggaaaccaagaaccagaccaccagaa

SEQ ID NO: 56497 - RNA, 52 nt, Homo sapiens
gacaacccggacggccggccaaagaaaagacaggcagggaggcagcggcaag

SEQ ID NO: 56498 - RNA, 77 nt, Homo sapiens
cccgcgaacacacaagcccccccagagaccgaggccaccaagagccccaggcagacaccaacggaagcccgagagcc

SEQ ID NO: 56499 - RNA, 75 nt, Homo sapiens
aaccgaaacggggaaaaaaaccgcagggcggagagaccaggagagaagagacgaggaggaggggagaccgcggca

SEQ ID NO: 56500 - RNA, 70 nt, Homo sapiens
aaagaacccgcagcacgaaagaaagaagaaaaaaagaaagcccaggcacgacagaaaaacacaacagcaa

SEQ ID NO: 56501 - RNA, 73 nt, Homo sapiens
ggcgcagcgcgagcggggccgggcgaagaagcagccacaaagccagccaggagcacccgaagaagacaagaca

SEQ ID NO: 56502 - RNA, 86 nt, Homo sapiens
ccagcgccccaggcggggaggcgccgggcccgccaacccaccagcgcggagccagcgcccggcaaggagcgagcgggagacaccgg

SEQ ID NO: 56503 - RNA, 69 nt, Homo sapiens
ggcaaaagacacaaaggaagccacaagcggcccggggcgaggaccggaccgcaaggggccaggagaacg

SEQ ID NO: 56504 - RNA, 73 nt, Homo sapiens
gaggcccaaggcagaggcgaggcggaagggcaccccacccggaaaacggggccaaccaaggaccaagggacca

SEQ ID NO: 56505 - RNA, 76 nt, Homo sapiens
ccagccaggcaaaagggaagcgaaaccaaccagaagccgagaagaaagacggggaccacgaccacagcaacacagg

SEQ ID NO: 56506 - RNA, 69 nt, Homo sapiens
agagaaaaagaagaagagacgagaagagaaagaagggaagggagcccaaaacaggagcgcagcaagcac

SEQ ID NO: 56507 - RNA, 38 nt, Homo sapiens
gcgaagggagccacacccgggggccagcggcggaaaga

SEQ ID NO: 56508 - RNA, 102 nt, Homo sapiens
gggcaaccagaagagccagggacagccagggacaccagagagaaggccgacagggagggcgaagaaccgaagaacacccagggccacacaaaaaaagaccag

SEQ ID NO: 56509 - RNA, 84 nt, Homo sapiens
agagagagcaagaagaccaagaagaaaggagaaggagcggcagcgccggagaacgcggcggaaggaggaggccgagcagcgcgc

SEQ ID NO: 56510 - RNA, 77 nt, Homo sapiens
ggaccgagaccggaccgagagcggaccgagagcgcgaaacgcacgagaaggcccagacaggggaaaaaggacaccgg

SEQ ID NO: 56511 - RNA, 79 nt, Homo sapiens
gggaccacggcagaagaggacgaggccgacagcacgccgagaaggagacaagcgcaagcagccagagcccgggcgcaaa

SEQ ID NO: 56512 - RNA, 89 nt, Homo sapiens
ccggcaaacagggcccggcagccaacaacagccaggagccgccccggccaccgaccgggcaacgcacaaagaagagagcacaggccgag

SEQ ID NO: 56513 - RNA, 82 nt, Homo sapiens
ggacaggaaaacgacgcaaagacgaacaaaccgaagcagccgcggagaaccgaaccaacagccagccaaagccaggcagcac

SEQ ID NO: 56514 - RNA, 83 nt, Homo sapiens
cacgacccggcgagcagcaccagggcccagaaaacccgccaggccaagcaacccccaagagcagacaaaaaagccaaagagga

SEQ ID NO: 56515 - RNA, 71 nt, Homo sapiens
cgaacacccaggcaggccagagccgaaccaaagagcagcaggagacagaaggccaccgaaccaagccaagc

SEQ ID NO: 56516 - RNA, 57 nt, Homo sapiens
cgcccagccccgagcagcgggaacaggagcgcacgccacgaggagcagggggggcgc

SEQ ID NO: 56517 - RNA, 73 nt, Homo sapiens
caggcgccgagccagccgcacggccagacagcgaaccacacaagacccggcgacacagcaggacgaacagccc

SEQ ID NO: 56518 - RNA, 78 nt, Homo sapiens
ggcaagggaccgcggagcagaggagggcccaccgcgaagggggcagagacagggagggaacgggagccccggcagacc

SEQ ID NO: 56519 - RNA, 80 nt, Homo sapiens
cccagaaggccgaggaaggacggcagagcgcaggacgccacagcaagaggaccccaccgcagaaaagagccggagacagc

SEQ ID NO: 56520 - RNA, 60 nt, Homo sapiens
aaaggcaggccgaacagagagaccaaaacacggaaaagcccggaaaagcagccaagcgga

SEQ ID NO: 56521 - RNA, 83 nt, Homo sapiens
cccagcagggggacacacaggaggacagacacaggaggggagggggggccagcggcggagcggaggaagggaccacgcgagaa

SEQ ID NO: 56522 - RNA, 78 nt, Homo sapiens
acgggcaaagaggccacagaggcagccaaggaaccgcggcagaaaaggagagaaggcgaggaagcccaagcacaaagg

SEQ ID NO: 56523 - RNA, 50 nt, Homo sapiens
cggcccgccaaggcacggggaccgcgcccgcagggagaacagaggcgaga

SEQ ID NO: 56524 - RNA, 100 nt, Homo sapiens
cagaagaccagacccgccgccggaacgcgccgagcggccgcccgcgggagacacaaacacaggcgagacaaaggaaaacccaccccggaggagcagaccc

SEQ ID NO: 56525 - RNA, 102 nt, Homo sapiens
cccaggggccaggcgaagcacgagcagaccggcccgaccgcccacagacccaaacaaaggcgggaacggacagggcaaagcgggaggaggagagagaaagag

SEQ ID NO: 56526 - RNA, 72 nt, Homo sapiens
agaagcaagccggacccacgacggcaggaaaggaggccaggacggagagggagaaggagaccggaaaccgag

SEQ ID NO: 56527 - RNA, 67 nt, Homo sapiens
cggagcgccgcggccacggccccccgccagaagccagagaggaagacggcaccggagcaccccagac

SEQ ID NO: 56528 - RNA, 55 nt, Homo sapiens
aaggaagcagcgaaaggagaacccaaggacaaggcgcggagcgggaaagacacgg

SEQ ID NO: 56529 - RNA, 83 nt, Homo sapiens
gaacccgacacgggcacggagcaaagaagggaaccggagcgcagggcccaggaaacccagcaagggacaggccggcggcacaa

SEQ ID NO: 56530 - RNA, 81 nt, Homo sapiens
accccagaggcggggcgggacgcacccggaccgccagcagcaggagaagaagacggccgagggaagcgagaggaaaacagc

SEQ ID NO: 56531 - RNA, 75 nt, Homo sapiens
gaaggaggacgaggcaagggaacagaaggagcagggacggacaacccccgccccacccaccaaggaccaaaagca

SEQ ID NO: 56532 - RNA, 71 nt, Homo sapiens
agagcaccggacacgaggagaaacagcagaaacgcaccaggccaaagaaagagaagaaaaggggaagaggg

SEQ ID NO: 56533 - RNA, 82 nt, Homo sapiens
cagcagcaggaaacgacagcagcgagcagcaaaaggcgcgaacggaaggcgaacaccgaaaccacgagcggggagaaacagc

SEQ ID NO: 56534 - RNA, 79 nt, Homo sapiens
cgacgacgcggaggcagagaagggaacgcccggcccagccccaaacagacaggggcaagcgggagcgccaagcacagag

SEQ ID NO: 56535 - RNA, 95 nt, Homo sapiens
agcagcagcaaaagcaacagcaacagcagcccagaggcaacagcaccccgcggaacaggaggagaagaaggacacaagaacacaggcgggagagg

SEQ ID NO: 56536 - RNA, 73 nt, Homo sapiens
cgagcgagggggggcgcgccggaaaccggagcgcgcagcagacgcaggaagcaggagcacaacacaggcagcc

SEQ ID NO: 56537 - RNA, 74 nt, Homo sapiens
agccaaacagccacagaaggcagccggcacccgcacaacccagggggccgaacccagaccaacaaaaggacccc

SEQ ID NO: 56538 - RNA, 62 nt, Homo sapiens
gccgagcgagcaccacccaaaaaacaggagaagaccagccaagggaccaggaggagaagcaa

SEQ ID NO: 56539 - RNA, 57 nt, Homo sapiens
acagacgccaccaaaagcaccaggcagaaaaccaggcccagcacagaaacacaccag

SEQ ID NO: 56540 - RNA, 84 nt, Homo sapiens
agccaaagaacggagggccacggaaaggaaaccagccgaccaagcacgcagccacaaggaggcggcggacagggacgagacaaa

SEQ ID NO: 56541 - RNA, 75 nt, Homo sapiens
gccgcgggccgagaccccacaacgggagggccgcggagagacgagcacggcagccaccgacagaaggaaggcacc

SEQ ID NO: 56542 - RNA, 71 nt, Homo sapiens
agcgaccaggacgagaagcaccgggcgagcggagccagcagcccacgccacgccccgcgcagcaggaggag

SEQ ID NO: 56543 - RNA, 76 nt, Homo sapiens
ccgcggaagcggggcgcacaccaccggacaaccgacaaaaggggcccccaaagggaagccaaacacaaaggaagaa

SEQ ID NO: 56544 - RNA, 72 nt, Homo sapiens
gagaaggaccaagaaccagccaagagaaaccaccaagagccaggaaggcaaaggccgagagagagccccagc

SEQ ID NO: 56545 - RNA, 77 nt, Homo sapiens
ggaagaaaacacaggagccggagcagaagcaaagagaaaagaagcgaaagcaagcgagccccgaaaggcccaccgcc

SEQ ID NO: 56546 - RNA, 69 nt, Homo sapiens
ccgcagggccccgagccagccaaggaccacaaaacccaacaaaaacaaaagcacaaagaggaaggaaga

SEQ ID NO: 56547 - RNA, 73 nt, Homo sapiens
ccgaggccagacccggccggggccgaaccgaccagaccaggccccacacaggaaggaggaggaccacaaaccc

SEQ ID NO: 56548 - RNA, 71 nt, Homo sapiens
caacggccaagaggaagggccaggcggaacacaacacgcgggcaaacagcagggaaaaccagaggggggag

SEQ ID NO: 56549 - RNA, 81 nt, Homo sapiens
agggggccgccgcggcagcaagaacagagagagaggggacagacgagagaacgaggccagcgcgggccgccagcggcggcc

SEQ ID NO: 56550 - RNA, 70 nt, Homo sapiens
gagacaaaggcaccaggccaccacagaaacaaaagcaacaaagaggaccaccacaacccgcaacgccaca

SEQ ID NO: 56551 - RNA, 37 nt, Homo sapiens
ccggagaccgacgacggcagcaaccaccgaaacgggc

SEQ ID NO: 56552 - RNA, 72 nt, Homo sapiens
gaaagagggacagccgcacggaggcgaaacacaaaggggaggacagcacaaaaacacaccaagagagcgcga

SEQ ID NO: 56553 - RNA, 77 nt, Homo sapiens
accaccggaaccgccgggggccgggacagacccggaccgcggggcggagaacccgcaccgcagcaagaccagaggca

SEQ ID NO: 56554 - RNA, 84 nt, Homo sapiens
aacagcccacgccaaaccagaccccaggccgccagcccagcgaggaaagccagaaaggggaagcaaagacacacgggagcaagg

SEQ ID NO: 56555 - RNA, 80 nt, Homo sapiens
gcgggaccggccagcgcgcggcgggcgagggcagagcagccgagaagaagccaaaaaacacggaggagcaggagaacagc

SEQ ID NO: 56556 - RNA, 75 nt, Homo sapiens
gacgggaagagcagccggagccgggcggagggggaccccggcccggcagggcggagaacggaaaagcaccaggaa

SEQ ID NO: 56557 - RNA, 86 nt, Homo sapiens
gacacagccgccacaggaacaaacgaggagacgcgagacgaacgggaagaaggagaaagggccaaccccgaagaagcaaacagaaa

SEQ ID NO: 56558 - RNA, 63 nt, Homo sapiens
ggggaaccgccaaagcccgggcgcggaagaagccaagaccaaaccagacccaagcaagccagc

SEQ ID NO: 56559 - RNA, 71 nt, Homo sapiens
acagcgaccagccgccagcaccaagaaagccaaagaaaggcacacaaaagaaagaaaaaaagaacacagga

SEQ ID NO: 56560 - RNA, 72 nt, Homo sapiens
gggaaaacagcaccaagccaggggccccaccaggagccagggaggacgaagaaaggcgccaccgaggacagc

SEQ ID NO: 56561 - RNA, 76 nt, Homo sapiens
aaaccggcaggcgcccggacacagaagaggacaggaagcgggcaccaacagacaaccagggcaagcagaggcaaag

SEQ ID NO: 56562 - RNA, 53 nt, Homo sapiens
ccaccaaaggggaaacagaaacaaggacagcaaggcggcaaggcgggagacca

SEQ ID NO: 56563 - RNA, 79 nt, Homo sapiens
cgaacgacaggacgggggcggccggcccccaggaaggaacggcccaggaccggaccgcagcagaaggggggcagcggag

SEQ ID NO: 56564 - RNA, 68 nt, Homo sapiens
aaccacacgcccaagggcagcaagaaagggaagggggccgaacaggaagaaaagaacagaagggaaag

SEQ ID NO: 56565 - RNA, 72 nt, Homo sapiens
ggacgcgacgccagaggaggggagacggcacccccaggcgcagaagacaagcaacacggaggagcacgcccg

SEQ ID NO: 56566 - RNA, 71 nt, Homo sapiens
acaggcggcaaaagaaaaggcggaaaggagggggagagagacaacaggaaaaaggccgacaacgaaaaaca

SEQ ID NO: 56567 - RNA, 74 nt, Homo sapiens
gagagaggaagagagaagacggcgaagccccagaaaggccaagcccaacaggggacaccggccagggcccggac

SEQ ID NO: 56568 - RNA, 59 nt, Homo sapiens
caggcgggagcaccccagcagcagcccgacccggcgggcaccacagcaggggggcgggg

SEQ ID NO: 56569 - RNA, 62 nt, Homo sapiens
cagaggaggcagaacagaagacacaccaacaaggacaccaaccacaacaaccgcaaacgaag

SEQ ID NO: 56570 - RNA, 58 nt, Homo sapiens
accaccggggaccagccaaaggcagaagcaacacggaaagacaccgagcagacaaacc

SEQ ID NO: 56571 - RNA, 65 nt, Homo sapiens
cacgcccacaaagcccagaagaagggcaccagcgaagagacaccccagcagaaagggaaccagga

SEQ ID NO: 56572 - RNA, 68 nt, Homo sapiens
cgccacggcgccccgcaagacacgaagagccgggagaaagccagcccacggaaagccgcgaccaacaa

SEQ ID NO: 56573 - RNA, 56 nt, Homo sapiens
gccggcgcgccccacgggccaggagggacggaaggcgaccacaccaccccagacac

SEQ ID NO: 56574 - RNA, 57 nt, Homo sapiens
aacgggagaacagcagcagcccacgaacagaaagggcaaccagccagagggcaccgg

SEQ ID NO: 56575 - RNA, 48 nt, Homo sapiens
aagcggcaaaccaaaagagcaacgccgagaaagcgacaggcaggcccg

SEQ ID NO: 56576 - RNA, 87 nt, Homo sapiens
cccaggaccagccgccgccagaggagagcaccggccacggaaaagcaaagccgcggcgagccgcacagggcaacacacgcaccgcac

SEQ ID NO: 56577 - RNA, 83 nt, Homo sapiens
gacggccccgcgcgagaccgcccagaggggcccaccgcgcccacaggacccagaccagccaaagagaagaagaaaggaagcaa

SEQ ID NO: 56578 - RNA, 75 nt, Homo sapiens
gggcgagcggggcgcgccgcagagcggcaccgaaggacaggagggaacggagggaaagcgacaaacaaccaaccc

SEQ ID NO: 56579 - RNA, 70 nt, Homo sapiens
ccggagccacccacaggacccgccaccaaaggaacagacacggagaagaccgcccaggaaggaccgcgcc

SEQ ID NO: 56580 - RNA, 66 nt, Homo sapiens
ccggaggacacagccagggcggacgggaaagcagaacacagacccagcaccacgaaaaaagaacag

SEQ ID NO: 56581 - RNA, 74 nt, Homo sapiens
cccccacacccgcacggagaccacggaaccacgggccacaccaaacccacccaggaggcccacaagcggcaccc

SEQ ID NO: 56582 - RNA, 63 nt, Homo sapiens
cgaggcgcggagagcaacgccgggacagcgcaagggcgcacccacgacgcgcacaccaccggc

SEQ ID NO: 56583 - RNA, 77 nt, Homo sapiens
acgggcaacacacacgcacgggggacgggcagaggggcccggggcagcggggaggaagaggggcccaggacgggggc

SEQ ID NO: 56584 - RNA, 82 nt, Homo sapiens
cgacaagcaaccaaaaaagaacgggggacgaccccccagagccaacacacagaaggaccgacagcccccaggaaggaggcgg

SEQ ID NO: 56585 - RNA, 81 nt, Homo sapiens
cggcccacaccacaaagcccccgccacggaccggagagcagcccgacggccaggaggcgaagagacgaggaagcccaggag

SEQ ID NO: 56586 - RNA, 77 nt, Homo sapiens
ggcgacaaggggcccgaacagaggggacccagagagggaccagggccaaagaagagccggggggcaggcggacagca

SEQ ID NO: 56587 - RNA, 60 nt, Homo sapiens
accgcacagagcagccggacgccccgaccaagaggacagagggaggagggaaggaacagc

SEQ ID NO: 56588 - RNA, 89 nt, Homo sapiens
ccgcccacggaaccggcagagcgagagcccagaagccgagaccagccgcacacacggggcccgaggaagaggccgagacgcaccagagc

SEQ ID NO: 56589 - RNA, 88 nt, Homo sapiens
cgcaaaggcggaggcggaaggggaaagccggagccggccaaaaagggacacagacgccaggcagccggggcagaggaagagaagcccg

SEQ ID NO: 56590 - RNA, 39 nt, Homo sapiens
caaccgaaccagaaacccgcagaaggcggcagggagcac

SEQ ID NO: 56591 - RNA, 52 nt, Homo sapiens
cgagagcaaccacagcggagacaggaagccaaaaacaagagaaacaccaacc

SEQ ID NO: 56592 - RNA, 77 nt, Homo sapiens
caggggccagggaaaggagcagagagagagagcagaagcgcagacgggacacggccggccaggagcggccgcaccac

SEQ ID NO: 56593 - RNA, 76 nt, Homo sapiens
gccgccaacgaggacgaccaggcacccggggcgacggggccaaggagaccgcacgccggacggagcccaccaccag

SEQ ID NO: 56594 - RNA, 75 nt, Homo sapiens
acacgggaccaacaggagacggggccagggagaaaggaaggccaggagcaaacagaaggcccgcacaaaaccccc

SEQ ID NO: 56595 - RNA, 75 nt, Homo sapiens
ccggcccgcgggaagcaggacgcgccgcgccccaagaacagggaagcggaaccaaaaaaagacaaaaacaacacg

SEQ ID NO: 56596 - RNA, 85 nt, Homo sapiens
acgagaggcgggcaggaggacccaaacgaaggccagcggaagccgccaccccaggcggaccaccacaacaagaagccgcgccacg

SEQ ID NO: 56597 - RNA, 99 nt, Homo sapiens
gggcggccccgaggaagcaaggccgcggggggagaccccaccaccggggaccacgggagaggaggaagagacccacagaagaagcagagcggaggggag

SEQ ID NO: 56598 - RNA, 57 nt, Homo sapiens
cgaagaagaaaacacggggccagccacaaacaacccccaccacgccaagagaaggag

SEQ ID NO: 56599 - RNA, 89 nt, Homo sapiens
cacacgaaagagaggggacaacaaacagcagaaacaacgaacgagcaaggaagggccaaggcagaccccacaccggagaacgcaaccag

SEQ ID NO: 56600 - RNA, 80 nt, Homo sapiens
gagacaacgagggaggagaacaaggggacagcaaccgacaagcaaggacgcaaccaaaagcaagacaggcaggagaagca

SEQ ID NO: 56601 - RNA, 80 nt, Homo sapiens
cgagcccgggcacccgcggaccagaggagacgagaaagagcggggaaggcaaagccgaagaagcagcagggagaacaagc

SEQ ID NO: 56602 - RNA, 69 nt, Homo sapiens
cggccacggccaacgccgcgcccgcggagggaaaagggggcgaggaagagacaggcgggggagaagaag

SEQ ID NO: 56603 - RNA, 74 nt, Homo sapiens
agccaccaggagccacgcggggacgcgccaggcccggccaccgacccccacgacgggaagccaaggagaagaga

SEQ ID NO: 56604 - RNA, 83 nt, Homo sapiens
gccgaggagcggcgggcggcggcgcgcggacccaggcgcggaggcgaggccagcagggcggcgcagccgaaggaaagcacgaa

SEQ ID NO: 56605 - RNA, 88 nt, Homo sapiens
gaacacccgaagccggcccagcacagggccagagccccccccaggcagagaccagaccgacagggcgaacagcccgggcaccgaggag

SEQ ID NO: 56606 - RNA, 81 nt, Homo sapiens
agaccgagccacccagaaccacagccaaggagccaaagcgccaggagcagagaggcgggccccaaagccgcagcagaccgc

SEQ ID NO: 56607 - RNA, 82 nt, Homo sapiens
gaccccaaaggaaaaggaagccccaagcagcgccagcagcccgggggcgacgacgaggaccaggagccaggggcgggggaac

SEQ ID NO: 56608 - RNA, 75 nt, Homo sapiens
ccggcggggccgggcggccgcggcgagaccggacccagggacccccaccaaccaggaaaaggagcgccacaggac

SEQ ID NO: 56609 - RNA, 73 nt, Homo sapiens
gccgcgacagcgaacagcgcggccgcaggacaggagagacaacggaggcaagaaagacggagaagcgagaaga

SEQ ID NO: 56610 - RNA, 47 nt, Homo sapiens
aaagggccaaagaagggagagagcgaccaggggacaccggcaggagg

SEQ ID NO: 56611 - RNA, 60 nt, Homo sapiens
cagggcgcgccccagcacccgccccggggcaccacccccaagaccaggaccgcgagcagg

SEQ ID NO: 56612 - RNA, 74 nt, Homo sapiens
acgccgcgaccaccccaacacggaacagcaccgccgcaggcagcccccaccaggaccaggaacgacaaaagcac

SEQ ID NO: 56613 - RNA, 71 nt, Homo sapiens
agcaggccgcgcggcgggaccgggggggacacaagaaacaacccagaagaagcaagcggcccagcagcaaa

SEQ ID NO: 56614 - RNA, 73 nt, Homo sapiens
gcgccgagcccgccagcgacggcgcccgggagcggccggagaccggacaccggcccccacacccgaaaggcgc

SEQ ID NO: 56615 - RNA, 75 nt, Homo sapiens
gagaaaaacggagggagaaaaagcaagaggaaagcagacaccagaggacgcccggcagaagggagcgagcagcac

SEQ ID NO: 56616 - RNA, 74 nt, Homo sapiens
acacaaccccacgccaaagaaaccagcccgaccaagacaaacccgagagcaaaacaaccagccggaaccggaca

SEQ ID NO: 56617 - RNA, 86 nt, Homo sapiens
cggccccaccaacgggcgcccacacccaaggggcacgcgggcggcggccgaggagagcaccgggaaagcccagagacggggaccgg

SEQ ID NO: 56618 - RNA, 70 nt, Homo sapiens
aggcggggggcccaagcaaggccggaagaagagcgcagagcccgacacgggagcgcgaggccaggccaac

SEQ ID NO: 56619 - RNA, 76 nt, Homo sapiens
ggaacagcaggcgcgcacgcgggggacacaacggcaagcagagcccgacagccgcaggggggccccaagacgacac

SEQ ID NO: 56620 - RNA, 60 nt, Homo sapiens
ccggcgccgcgccggcggcgggcgcccgcgccggcagaggaggcgagcacccgccaggga

SEQ ID NO: 56621 - RNA, 70 nt, Homo sapiens
cagagaaaaagcgggacaaaccaggaacccagaaccgcgggcagcaagaaccaccaaacaaggacaggag

SEQ ID NO: 56622 - RNA, 83 nt, Homo sapiens
gggaaccggccacggagagcaccaccgggcaaggacggggacacaagaccagccagcccagccacagagacaggccgcccaga

SEQ ID NO: 56623 - RNA, 82 nt, Homo sapiens
gccgggaccgaacaggcgcaaccaagcccgccaagaaagaccaagaccccgccacagcagcagaaccgaagcagcgcaagaa

SEQ ID NO: 56624 - RNA, 54 nt, Homo sapiens
ccccagcgcagcagagcgccaagacgaaaacgaggaacacgggagcagcgacag

SEQ ID NO: 56625 - RNA, 81 nt, Homo sapiens
cgccgccaagcgggagcagaggggagagcggccgccgccgcgccgcccaccacagaaagcaccgggaggaaagagagccac

SEQ ID NO: 56626 - RNA, 43 nt, Homo sapiens
agggcgcccccgggccgccgcggacgcacgccagaaagcccca

SEQ ID NO: 56627 - RNA, 54 nt, Homo sapiens
aacaaaggcaaaaacgacagggggacggaagcggcagcgggcagccggcccagc

SEQ ID NO: 56628 - RNA, 60 nt, Homo sapiens
gccgaaggcagccccagaaagccaccgcgagaagagggaacaggcacgccccacccgcca

SEQ ID NO: 56629 - RNA, 79 nt, Homo sapiens
gggcagcgcgagaggcggggacccgccgaacggcagccccaagaacggaaaggcaagaacggaagcacgggcggaggaa

SEQ ID NO: 56630 - RNA, 73 nt, Homo sapiens
ggaccgagaccggaccgagagcggaccgagagcgcgaaacgcacgagaaggaagggagcccaaacaaacacag

SEQ ID NO: 56631 - RNA, 75 nt, Homo sapiens
ggcgaccacgccccggggcagcaggcgaccagcgccacgcacaaggacacagagggaggacaaaaagagcccaag

SEQ ID NO: 56632 - RNA, 76 nt, Homo sapiens
aggagcggccaagaaagcagcacacaggcacagggcacagagcagaggacaccacaggaaggaggcgcagagagaa

SEQ ID NO: 56633 - RNA, 43 nt, Homo sapiens
gacgacgcccggcgccagcacacgcaggaacaggaaaagggag

SEQ ID NO: 56634 - RNA, 69 nt, Homo sapiens
caagcccacacagcagcagccacgggggcaccccaggaaagcgcaaagccgacgaggagagaccccgca

SEQ ID NO: 56635 - RNA, 79 nt, Homo sapiens
gaacgaaaggaacaggagccgccaggcgacacaccggaagcaggggccgcgaagcaggccagggcaaggagggacagac

SEQ ID NO: 56636 - RNA, 78 nt, Homo sapiens
gcacccacgaagcaccaagaaacaaagccccaacgaaggggaaaaggaagaaggagaaagacaaagccccgagaaaga

SEQ ID NO: 56637 - RNA, 50 nt, Homo sapiens
agccgggaaaggagccggccggcggcaaagggaaacacacgaaggaaccc

SEQ ID NO: 56638 - RNA, 81 nt, Homo sapiens
gagacagagagaacagcagccagaacgcaggcaagaaagcaggggcaaaggagcagagaacgacaagccacacgaggacag

SEQ ID NO: 56639 - RNA, 79 nt, Homo sapiens
ccgcgaagaaccaaaggggccgccgccaagaccgagcagcagccccacagaccaggcagccagacagggcccccggccc

SEQ ID NO: 56640 - RNA, 73 nt, Homo sapiens
agggggagcacccgcgacggacaccaaggaccgcccagaacccccacgaggaagaaaggccccggagagggag

SEQ ID NO: 56641 - RNA, 79 nt, Homo sapiens
cccgcgcccgacgagcaggaccaccaggccacgaggagggcgcgagaagacaaaggacccccgcgccagacgggccccg

SEQ ID NO: 56642 - RNA, 78 nt, Homo sapiens
cccgcgaaaggacaagggaaaaccaggggacccggacaagcaagggggaaaaagcgcaagggcaaaaaacgacacaga

SEQ ID NO: 56643 - RNA, 69 nt, Homo sapiens
ggacggagacagccagacaggcaaaggggccagggggcagcaaggcccaggggggacaaagaaagaacc

SEQ ID NO: 56644 - RNA, 70 nt, Homo sapiens
ccaccccagcaaccccaccaaggcaggcagaccagaacgcggaggacacagaagggaaccaagcggacaa

SEQ ID NO: 56645 - RNA, 39 nt, Homo sapiens
cagaaaggcaggggccaggaggagggacaacccgccaca

SEQ ID NO: 56646 - RNA, 74 nt, Homo sapiens
ggagacaggaaaaggccaaaggaggaaacccggccggcgggcagacccggacaccaccaacaaggcaccaaacc

SEQ ID NO: 56647 - RNA, 60 nt, Homo sapiens
gcgccccccgagcggggggacgcgccaggcacagcagcagacaaaacagaggagaccaga

SEQ ID NO: 56648 - RNA, 61 nt, Homo sapiens
caacaaaagagccacccaagcacgagcccggcggaaaccgcccaaccccgaggccacccac

SEQ ID NO: 56649 - RNA, 75 nt, Homo sapiens
ggcccgccgggaggaacaccgcaccgggaaaggggccagcagaggcgggccgggagaggagcaggaaccaagggg

SEQ ID NO: 56650 - RNA, 79 nt, Homo sapiens
acaacgggcgaagggagagggcccaggacgaaccagccccaagcacgggaagacccccagccgagcacccgccgggcga

SEQ ID NO: 56651 - RNA, 85 nt, Homo sapiens
ccgagagccgcccgggccagcggccgcgcacccccggccggaggcaccagcaggagaaggaggagacaacccgggagcgcgcgcc

SEQ ID NO: 56652 - RNA, 71 nt, Homo sapiens
gcaggcacacagcaaaggggggggccaggaggagccccagcacagcagagaaaaaaccacaggcgcggaag

SEQ ID NO: 56653 - RNA, 84 nt, Homo sapiens
gcagcagcgaagggaaggggagggcgaaaagacaggagggaggaacagacaccgagccagcaagcccccaacgggaggggccag

SEQ ID NO: 56654 - RNA, 81 nt, Homo sapiens
gggaggcaaagggaggaggaggaccggaggggcccgcgcaagcagcgacggaccccagcacacccggaccgggcggaaggc

SEQ ID NO: 56655 - RNA, 72 nt, Homo sapiens
cgccaggaggaagggacaaaagagcgacgccgacaaaggaggaaaagaagagaccagcgcagcagacaaaca

SEQ ID NO: 56656 - RNA, 75 nt, Homo sapiens
aaagccagcccgaggagcaaggggcaggccaaggcgagccaaaagcggaacccagcgcagaacggcgcagcgccc

SEQ ID NO: 56657 - RNA, 88 nt, Homo sapiens
caggacggaaggggaagaggcccacccggagaaccccacggagaaccagaggggaggggcgaccccggggcccggccagcacgaccga

SEQ ID NO: 56658 - RNA, 78 nt, Homo sapiens
caggggcacgagggacacgcgcagcaccgggacccaacagcgcggcgcgggcgagggggccagagagcacaagaagaa

SEQ ID NO: 56659 - RNA, 72 nt, Homo sapiens
cccaaccgcgccgggcaaacgaaggaagagcagcaaaggaagagaggggaaagacaaggagccgggccgaga

SEQ ID NO: 56660 - RNA, 81 nt, Homo sapiens
cggaaacagaaaaggagcgcccgaaccagacagacacagcacagcagccacgaagagcaaagcaagccgaaaaaccgaaac

SEQ ID NO: 56661 - RNA, 40 nt, Homo sapiens
cggaggagggagccagcacagagaaggcaccggccaaagg

SEQ ID NO: 56662 - RNA, 75 nt, Homo sapiens
cgcggccgaccagagaacagaacacaacaccaagcggaaaaacggaagcagcagaacagcggccagacggggaag

SEQ ID NO: 56663 - RNA, 70 nt, Homo sapiens
ggaacagacgcagggcagggccccgcccggcggggaagcacaggaaagagaggagaggagcgccggggcg

SEQ ID NO: 56664 - RNA, 118 nt, Homo sapiens
ggggcgggagccccggcgggccgcgccgggacggcccaccagccaccccaccgcgcagggagcagacagagacccaccaaggggggaaaaggacagcgacacagggaggaccaggccg

SEQ ID NO: 56665 - RNA, 70 nt, Homo sapiens
gaagacagcgacgcagaccaaaagcagagaggcgcgcggagcggaagaaaccgacaacagacgaaggcga

SEQ ID NO: 56666 - RNA, 81 nt, Homo sapiens
ccccaaagcgagcgaagcagggcgccgccacgccgcaggaggcggagccggcagaggcgagacaacccaggcgcggcccca

SEQ ID NO: 56667 - RNA, 84 nt, Homo sapiens
ggacggagcggccggggccggggcgccgccgggcggccgggcgcggcgagcccaggcaccaagcagccgaagagaaacaaggga

SEQ ID NO: 56668 - RNA, 82 nt, Homo sapiens
aggcagccaagccgagccgccacccggcaagcaccgcaccgggcccggacgacgagcgcccacacgaaggacggaggacacc

SEQ ID NO: 56669 - RNA, 70 nt, Homo sapiens
gaccagaaagaaaacaccgaaaagaggcaaaagacaaagcagagcccacagacaaggccaaaggcaaagc

SEQ ID NO: 56670 - RNA, 51 nt, Homo sapiens
gaggcgcaaagaaggcaacagcgaggcggacaacaggagcacgcagcccac

SEQ ID NO: 56671 - RNA, 90 nt, Homo sapiens
agcggaaggacaggaaccagaacccaggcccacggaggaagagccgggcagcccggagcgggccagggggcaaagagcacccaacgagac

SEQ ID NO: 56672 - RNA, 81 nt, Homo sapiens
agcgcaggaaaggacccccagcaagaaccagaaaccaggacagacaccccaccgcacacggcccgagggaagcgcaccaag

SEQ ID NO: 56673 - RNA, 78 nt, Homo sapiens
ccagccgccgaacagagcccgcccagggaggaggcggacacgccaggcccgcggcaggcggggccaggcccgagccag

SEQ ID NO: 56674 - RNA, 119 nt, Homo sapiens
ccgccacggcacaaccgcgccaacaacagcccccagccaaggagcccgggggccaaacaggagaagaagaagaagaagacaggcgggcaagcggcggagcagacaaccggcgcgcaacg

SEQ ID NO: 56675 - RNA, 55 nt, Homo sapiens
ggggggcaaacccgagagaacgggccccaaaagcgccgcagcgaaccaagagaga

SEQ ID NO: 56676 - RNA, 85 nt, Homo sapiens
ccgccccgcccggagcgccggcggcagaccgacacgccggggcgcccgcgcgcggggaccccacgggaaccaagaaccagaaaca

SEQ ID NO: 56677 - RNA, 73 nt, Homo sapiens
gacagacagggcgccagcacaccccagcacgacccgagagcacaggaaaagacaccgaagccagcggccgcag

SEQ ID NO: 56678 - RNA, 74 nt, Homo sapiens
acaaaccgcggggcaggcgaagggagggccgccccaaccgacgcaccagccggaggaggagggacagggccagg

SEQ ID NO: 56679 - RNA, 50 nt, Homo sapiens
gacgcagggcgcccccgggaacacaggccgagacaaagccagaaaacagc

SEQ ID NO: 56680 - RNA, 74 nt, Homo sapiens
ccgggagaggccgggaagccacggcgggaccggaggaaagaccaggaggaaaggcaagggcagaaaagagggga

SEQ ID NO: 56681 - RNA, 80 nt, Homo sapiens
ggagggcggaaggacccgggagggaacgagcagagaccgaagcagagggccggggcaagggccgggccaccccagacggc

SEQ ID NO: 56682 - RNA, 74 nt, Homo sapiens
caggaggaaccccccaccaggccggacccacagaagaagaacaggggagcagcggaggaagccacaggacgccg

SEQ ID NO: 56683 - RNA, 55 nt, Homo sapiens
aaaagccacggaaggagcccggagcggaacaaaagcgagagcgggacaccagcca

SEQ ID NO: 56684 - RNA, 42 nt, Homo sapiens
aaggagaaagagcacaccagggaggcacaaggaaagcaaaag

SEQ ID NO: 56685 - RNA, 59 nt, Homo sapiens
ggcagaggaagccaccccgaggaagcccgccacggggaagagcaagcgaggaaaaacac

SEQ ID NO: 56686 - RNA, 68 nt, Homo sapiens
ccggcagccaacaacagccaggagcaaacagcaagagggaaacagaaaaaggacaaggagcaagacca

SEQ ID NO: 56687 - RNA, 71 nt, Homo sapiens
cagccccccgcagccgcggcgcgcccgccacggcgccggggccacaagggggggcacgagaagccgccgag

SEQ ID NO: 56688 - RNA, 83 nt, Homo sapiens
gcgcacccgcccgccccagccacccaggccccgccgcccgggggcgccgcccaccgcgcccgccgaccagggaaccgggcagc

SEQ ID NO: 56689 - RNA, 81 nt, Homo sapiens
aacaacagagagcagcacaaaagcacggccaacaaagaaacccaaaccaaccaacccaagggagacaacaagaaacaggag

SEQ ID NO: 56690 - RNA, 60 nt, Homo sapiens
acaaggcacgggggccagcaaccaccaagggaacagcacagggaccaccgaagaccagac

SEQ ID NO: 56691 - RNA, 83 nt, Homo sapiens
agaccaccggcaacacgcggaggacggccccagacggggacagccgaacaccgaaaaagcgacacgagcgccacacagaggga

SEQ ID NO: 56692 - RNA, 80 nt, Homo sapiens
acgggcacccccagaggcgcggaaggaccggccacccagacaagcagaccggaagaccgacggaagaccacaccccgagg

SEQ ID NO: 56693 - RNA, 81 nt, Homo sapiens
aacagcgacccaagagccccacggagccaagacagggccaaaaagggaaagaacaggcggccagcccggaaaaacagacaa

SEQ ID NO: 56694 - RNA, 80 nt, Homo sapiens
aaaggcaaagaaaccacgaggacgggcccggcggcgggagcgcccaccacagcccacccccgaagccccccgaggccgcg

SEQ ID NO: 56695 - RNA, 72 nt, Homo sapiens
cggggcgcgaggaccccggggcaagaagcaagcaaccaggcgccgcaccagaagaggacgcgcaggggagcg

SEQ ID NO: 56696 - RNA, 85 nt, Homo sapiens
gcccggcgcgccgcgggcggccggcggccggcggggcggggagcccccggaaaagacaccgaagccagcggccgcagaccccgag

SEQ ID NO: 56697 - RNA, 61 nt, Homo sapiens
ccaccagagccggcagcaaagagggaacagagcccaaaaggcagagcgaggagagaagaag

SEQ ID NO: 56698 - RNA, 64 nt, Homo sapiens
cggagcccggaagcagcagccaccgaggacggggaccagagaggaccagaaccagaccggaaag

SEQ ID NO: 56699 - RNA, 77 nt, Homo sapiens
gccggagaacggccaggcggccccgagcggaacggagaaagcgaggggccaaaccaagccgaggcccagcggaacgc

SEQ ID NO: 56700 - RNA, 55 nt, Homo sapiens
gggaggaaagcacccacccccaggagggaagccggaaaccccccccccccccccc

SEQ ID NO: 56701 - RNA, 83 nt, Homo sapiens
aaggaccgcggacagagacaacaccgagagagaagaacaagcacacagagacggggacggcaacaacaacaagaaacgggcca

SEQ ID NO: 56702 - RNA, 70 nt, Homo sapiens
ggacaccagagaagcgacggaggcccaccggagaccacaaagccggccgcgcacccgagggcgggagccc

SEQ ID NO: 56703 - RNA, 72 nt, Homo sapiens
ccggaccccccgacaccaacgagcccacccccgaaggagaacacacagcagagccacgggacccacaccgcg

SEQ ID NO: 56704 - RNA, 75 nt, Homo sapiens
gcggcggcggcagcgcaggacagccagcagaacccgaaagacagggggagaggcaaggaaacgacaagagaagaa

SEQ ID NO: 56705 - RNA, 88 nt, Homo sapiens
aagaccaccagcaggcagcgaaaaacaagcggagcagcaaggagagacacagagaaccaaacgaagacagccggcaccggaggaacac

SEQ ID NO: 56706 - RNA, 106 nt, Homo sapiens
cggccaggccagacccgaaggccaggagacccgaccccaagcgcagacgggacacggccggccaggagcggccgcaccacacccagagcacaccgcaggccaaggg

SEQ ID NO: 56707 - RNA, 76 nt, Homo sapiens
cccgcccgcaccgccggccggcggccggagaaacgaggagccaggcccgagagagaaagggaaagaaggagcggag

SEQ ID NO: 56708 - RNA, 78 nt, Homo sapiens
gacccaaggaacgacccccagcgaagacacgaaaaccggagaaggaccaggcacagccacagccgcaagccaagagca

SEQ ID NO: 56709 - RNA, 56 nt, Homo sapiens
gaaaagaacgagccccacagggaaagaaacccggccgcaagagaggagccccacgc

SEQ ID NO: 56710 - RNA, 87 nt, Homo sapiens
ccgggggccgcagcgcgggccgaggcgggcggcggccagcgggcccacagcccaggggaccaaaagacacagcagggacgaaggaga

SEQ ID NO: 56711 - RNA, 44 nt, Homo sapiens
ccgacaggccgagagaaacaacacgcacagggacaccgagaccg

SEQ ID NO: 56712 - RNA, 65 nt, Homo sapiens
acagaagccacagcagcccaaagggaaaaagagccaggcacgacggcaaagagagggaggcgaag

SEQ ID NO: 56713 - RNA, 79 nt, Homo sapiens
ccaaccgcgcaagaggagaagagaagccagcggacaagcggaggccgaggcaagcaagaccaagagagccaccgaagcg

SEQ ID NO: 56714 - RNA, 79 nt, Homo sapiens
gaaacagaacggagaaaagcacaaggagggaaagcacgaagggagcccagcgacacaccagcagcagccaaagaccaac

SEQ ID NO: 56715 - RNA, 72 nt, Homo sapiens
ggaagaagagacgaacggaggagagaaaccaagaagaaaccacagaagcaaggagcacaacaggcagacaga

SEQ ID NO: 56716 - RNA, 86 nt, Homo sapiens
acgagcgggcccggccaggaacagggacagcacccaccccggagggggaccacaagacccacgacagggagacccgaccaccggaa

SEQ ID NO: 56717 - RNA, 66 nt, Homo sapiens
gaggaagacgagccgggaggaacggcccggaaacaggaggacgacaccggaacacgggggcaacgg

SEQ ID NO: 56718 - RNA, 82 nt, Homo sapiens
cgcggccacacggcacccccaaagccccgcgggccaaccgagccacaccgcccacaaggagccaccagccggaggacgccag

SEQ ID NO: 56719 - RNA, 72 nt, Homo sapiens
ccggagagccaacaacaaacgaccgagaaaacagaaccgcacagccgggagcccggccccccacagccccag

SEQ ID NO: 56720 - RNA, 69 nt, Homo sapiens
agagagaggggaaagcccacaagagagggaaggagaaaggcagacgagggacagccacggccacgaagg

SEQ ID NO: 56721 - RNA, 82 nt, Homo sapiens
aaaagcaaacacacgcagcagaaccccggaaaaggagacagaagcgcaagaacccgacaagaaggaacaagaaaaggaaagg

SEQ ID NO: 56722 - RNA, 50 nt, Homo sapiens
aaacggacgcggacagcaaaccaggccgcaggacccccagcccaggaccc

SEQ ID NO: 56723 - RNA, 82 nt, Homo sapiens
caggagcccacaccacacaggaagccccacccaccgggggagacaggacccccagaagcggccgccgcagcgagcagcagaa

SEQ ID NO: 56724 - RNA, 58 nt, Homo sapiens
ccgccccagcccgccggcggcggcggggcaacaacacggcaccacacaagcgaagaag

SEQ ID NO: 56725 - RNA, 79 nt, Homo sapiens
acggaaagcgacaagggaggcgccgccagcggccgggaccgaacaggcgacgagagagaaggaagcgggggggcagagc

SEQ ID NO: 56726 - RNA, 76 nt, Homo sapiens
gccagggggaaagagagaaccaagccaggaaaggaagaaacccaacaacaggggaagaacacaggcgaggacagag

SEQ ID NO: 56727 - RNA, 79 nt, Homo sapiens
cccacagcccagggaaggcaccaaaagggggggcaggaaaggcaccaaaaaggaggcgacagacggcagaccgaaggcc

SEQ ID NO: 56728 - RNA, 75 nt, Homo sapiens
accaagaaaaaaaagaagaggcgcagaaagcaaacggccaagagaagaagaaggcggaaacgaaagaggaggcag

SEQ ID NO: 56729 - RNA, 49 nt, Homo sapiens
agggcagggacagcgcaggcagcaggagcagcgacccgccgggcccagg

SEQ ID NO: 56730 - RNA, 79 nt, Homo sapiens
aggaaacaggcggcggcggggggagcgggaagacaacggcaagcggagaagagcaaggccgaaccgagaggaagggcaa

SEQ ID NO: 56731 - RNA, 78 nt, Homo sapiens
agaggcagaccaggaaaggagacacagaagagcgcgaacacaaggggaaggaaaacaacagagaaaggcagcacgaaa

SEQ ID NO: 56732 - RNA, 77 nt, Homo sapiens
gaggagcggacaagaagacaaccggcgaacggcgcagggagacggcccgccacgggccccgcagccgcgcccgagcg

SEQ ID NO: 56733 - RNA, 52 nt, Homo sapiens
cacaggccacaacgcacacgcccccgccaagagccaaaggcagcgaccggag

SEQ ID NO: 56734 - RNA, 50 nt, Homo sapiens
gcagcgacaggaaacaggaaaggaaagagccagcggggcgacaaagaaag

SEQ ID NO: 56735 - RNA, 78 nt, Homo sapiens
cgaaaggagcggcaggcgcaggcagccgacgaagagggccaggacacggccaaggccggcgagaacgcccgcggcagc

SEQ ID NO: 56736 - RNA, 62 nt, Homo sapiens
aggacgaccagcgggaggccagaggaaggaaccgggggaaacacaaccgccccgggaggagc

SEQ ID NO: 56737 - RNA, 58 nt, Homo sapiens
cccggcgccgcgccggcggcggaggcgacacccgaagccccgaccgccacagcagaga

SEQ ID NO: 56738 - RNA, 71 nt, Homo sapiens
aaagcgagaagagagaagcacacacgaagccagaaaaacggcgaaggcgaagacaagacccaaaaggagac

SEQ ID NO: 56739 - RNA, 83 nt, Homo sapiens
acgcagggaagcccaggggcagggcagccagcggcaccaaaccaaaccccaggcaccgaggccccaccagggcgccaggaggg

SEQ ID NO: 56740 - RNA, 74 nt, Homo sapiens
agcgaacgcaaccaaggagcaacagggcgacagccaggaagccacagacccaaggaaagaaaccagaaacagaa

SEQ ID NO: 56741 - RNA, 74 nt, Homo sapiens
cgcaagaacaacgaacccagccgcagaaagcaacaaagcgagagcacaagaaaacagccccgagcaccagacca

SEQ ID NO: 56742 - RNA, 84 nt, Homo sapiens
ggagagagcgccgggcgcagaagggaacgggccaccgggggccgcagagcagagaccaagaggcacaccgaaacggaaaggaca

SEQ ID NO: 56743 - RNA, 72 nt, Homo sapiens
gaagagagacgcagaccccagggaaccacagcccccacagcagcaggagacagcgaacccacccaacacggc

SEQ ID NO: 56744 - RNA, 63 nt, Homo sapiens
cgggacaaaacgccacaccaagcagaaagcgacaggggggaaagggcaaagaaaacaagaaca

SEQ ID NO: 56745 - RNA, 56 nt, Homo sapiens
agagcacgcccaaagcagaacacagagccagagaaaaaaaacacagaaaggcccaa

SEQ ID NO: 56746 - RNA, 74 nt, Homo sapiens
cccgaccaccggaagaaacggccacaccccccacagggcggcgacggcggcgcgaggaccgaccgggcccgcgg

SEQ ID NO: 56747 - RNA, 84 nt, Homo sapiens
aaaaggacacgaccaagcaaaccagagacacggccccaaggggcacccgggccacaaggccccgggaccaaggacacgcagacc

SEQ ID NO: 56748 - RNA, 82 nt, Homo sapiens
accggcgggaggaacaaaaggccgagacgcaccagagccggaccggggacgcgaagcaggcccgggagacgaccgaccgcag

SEQ ID NO: 56749 - RNA, 74 nt, Homo sapiens
ggggcggccacggccaacgccgcgcccgcggagggaaaaggagcaccaggccaagaaccccaaaaacagcagca

SEQ ID NO: 56750 - RNA, 72 nt, Homo sapiens
ggcgcgcgcccgaggcgaggaggagcgcggcgggaggaggaggagagaggaccaagagcagccgaaaaccca

SEQ ID NO: 56751 - RNA, 85 nt, Homo sapiens
cgcacggaccacgcgaggcggaaagaagaaaccgaggaccggcgacgccagaacaggagaggccaaagagaagccaccgaaacga

SEQ ID NO: 56752 - RNA, 100 nt, Homo sapiens
gccgagagccgcccgggccagcggccgcgcacccccggccggaggcaccagcgcagacgcagccgccggagggcgcggagcggggaccgcacaccgcccg

SEQ ID NO: 56753 - RNA, 58 nt, Homo sapiens
gaccccccagagaagccaggagcacccggcgcccagacaaaacggccgagcgaccagg

SEQ ID NO: 56754 - RNA, 78 nt, Homo sapiens
ccaccgaagagccaagcccagagcggggacgggaaagagggcagaagcagcaagaaaaggccaagagagaaggagaac

SEQ ID NO: 56755 - RNA, 81 nt, Homo sapiens
gaaccaacggaccaacgagcgaacgcggacgagccgcacaaacacgcagaggcaagaagagaggcaggagggccgggacgg

SEQ ID NO: 56756 - RNA, 58 nt, Homo sapiens
aggaacggccgggcgagcggcacagccacgccaaggacgaggaaagccccaggaagaa

SEQ ID NO: 56757 - RNA, 48 nt, Homo sapiens
ccggcagaacccgagccccccagagagacagagggaaagggccccaag

SEQ ID NO: 56758 - RNA, 85 nt, Homo sapiens
gggacgagggcggggaagaaaacagccgacggggccggaagaccgaaggcagcggaggaggagaaagagaggacccccggaccgg

SEQ ID NO: 56759 - RNA, 73 nt, Homo sapiens
cggaaagacggcaaaaccaaggaccagaaccggcacaagacaccaaagaaaaccgagcgccggaaaccagccc

SEQ ID NO: 56760 - RNA, 77 nt, Homo sapiens
ggcgaagaagcgccaccgcagccggggcacccaccgggcgcacgccccgcccccccaccccccggggaacgaagagc

SEQ ID NO: 56761 - RNA, 75 nt, Homo sapiens
ccgcggcgcccgcccagccaacgggacaggaaaaccagcccacagcgcaagaagacgcagcgcgccgggagaagc

SEQ ID NO: 56762 - RNA, 38 nt, Homo sapiens
acagagcagaggagaaggccaagcgcgagaagaagcac

SEQ ID NO: 56763 - RNA, 50 nt, Homo sapiens
agcaacacaaggacaacggcccccggaaggacgagaccaggagacgacca

SEQ ID NO: 56764 - RNA, 73 nt, Homo sapiens
cgggggggcccgcagagagcggagcgcaagaagaaggccgggggcacgccgcacgcaagaagaggacagccgg

SEQ ID NO: 56765 - RNA, 69 nt, Homo sapiens
ggaacagggggccacggagagcggaacaacagagaacagcgaagccaagagcaggacgacaggcagcgc

SEQ ID NO: 56766 - RNA, 90 nt, Homo sapiens
gccgcaggagacgagaggacgggaccaggcgaagcggccgagcaggcgagcgaacgacgaccagcacgggacggacgagacgacggagag

SEQ ID NO: 56767 - RNA, 74 nt, Homo sapiens
ggcgcccagggacgccggagccccagggaagcagcgaaaaaaaagagcgaggggacaaacagacaccagcaaaa

SEQ ID NO: 56768 - RNA, 112 nt, Homo sapiens
ggacccgcgccccagacagccgcccaccagggccaccagcgccccgggaaaaagggcgcacccacgacgcgcacaccaccggcagaccggcgccacagcaccacccgacggc

SEQ ID NO: 56769 - RNA, 79 nt, Homo sapiens
ccaacccagggagcggcgcagaccgagacccggacagggcaggaaacagaggcggggcaccaggcccagacggcgaacc

SEQ ID NO: 56770 - RNA, 44 nt, Homo sapiens
aggcagacaaaagggccaaagaagggagagagagagacagcaaa

SEQ ID NO: 56771 - RNA, 82 nt, Homo sapiens
agaccccgcagccggaggagggcgccggggcggacaagcagaccggaagaccgacggaagaccacaccccgagggagcccag

SEQ ID NO: 56772 - RNA, 82 nt, Homo sapiens
cccccaagggaggcagcaggcaccgacgcaggcagaacagggccacaccaccgccgagagcggcccaggaggaacaaccagc

SEQ ID NO: 56773 - RNA, 66 nt, Homo sapiens
ggccaccggaaaagagggcagaggggaccaagaaaggcccagggaccaaagcccggacaaggcccg

SEQ ID NO: 56774 - RNA, 84 nt, Homo sapiens
ggccggaccgcgcgcgcaggagcaggccaggcagagcagcccaccagggaggggagggggggaggcgcaccccgcgcccaccca

SEQ ID NO: 56775 - RNA, 49 nt, Homo sapiens
ggaggagaaacgcggccgggccgggagacggcgaaaaccaaagaagaaa

SEQ ID NO: 56776 - RNA, 101 nt, Homo sapiens
cccggaaggagggcagaaacgagcaaagcagcacaacagcaacaagacgaaagagagagcagcacaaaccaacagaggagcaagggggaacacgacagacc

SEQ ID NO: 56777 - RNA, 60 nt, Homo sapiens
ccgaagaaagcgcgaggggcgcgagcaggcagcaggggaaccgcgcgaaggacacaccac

SEQ ID NO: 56778 - RNA, 81 nt, Homo sapiens
cgaccacccgcggccccagcgcccggacaccagcagcacggggcaaggaccgaggcgccggccgcgcagcagggaggccca

SEQ ID NO: 56779 - RNA, 72 nt, Homo sapiens
acgaggaaaacaaaagcgacacagcagagaaccggccacaaagagcacaaacaaccggacggcacccccggc

SEQ ID NO: 56780 - RNA, 104 nt, Homo sapiens
aaacaaagaacggacccacaccgaggcacccgaagaagagaccaccaaccagcccccaccacaggagcacgggaagacagagacagagcgaagacgaagaaagg

SEQ ID NO: 56781 - RNA, 74 nt, Homo sapiens
gccgaaagaaaagaaccaaacggcgagaagacaccggcagaaaacaacagacgaggaagaagcaccaaaagcac

SEQ ID NO: 56782 - RNA, 51 nt, Homo sapiens
aaggaggagaaaggaaaaagcacaaggccacgaaggcagagacacaagccg

SEQ ID NO: 56783 - RNA, 74 nt, Homo sapiens
aaaaccaaaggccgaagacaagacaaggccgcggggcagacaccccacaggcaccagcagcaacgaacaggagg

SEQ ID NO: 56784 - RNA, 79 nt, Homo sapiens
gagcccaaaccaagcgcgacaagaaaggaaggaagcagaacacaccggggagaacacagggaaaaccaaggacccaggc

SEQ ID NO: 56785 - RNA, 85 nt, Homo sapiens
gcgcagggacacggcaccgcgccggcccgccagaacgggcagcaaggacgggccaaaaggaagcccacgacaagagaccaggcaa

SEQ ID NO: 56786 - RNA, 79 nt, Homo sapiens
ccgcaggacccggagggcagagaaaccaagggcaagggacgagaggacaggcagagggaggcaacggggagcgggaacg

SEQ ID NO: 56787 - RNA, 69 nt, Homo sapiens
gggagaagagacggggagaagcccgacagagaaaggagaaaaggccgacggagagaaccagaagggcac

SEQ ID NO: 56788 - RNA, 50 nt, Homo sapiens
caggcagagccgcaacccgagggagccgggggaccggccaggaagaaaca

SEQ ID NO: 56789 - RNA, 82 nt, Homo sapiens
cccacccagcaggggacaccagaagcacgaagaccaggacacaaccggaaccgcaggggagaagcccaccacgcaacgggac

SEQ ID NO: 56790 - RNA, 86 nt, Homo sapiens
ccgagacaccagcccgaaacaccaccaaggcgcagagacgcaagcggaagaacagcgcaaggaggggagaaggagcgaggcgaaaa

SEQ ID NO: 56791 - RNA, 74 nt, Homo sapiens
gcgccaagaccgccggacccggggcgccgcggcccggcacgcaccgggggaagcagaccaagaagacagaaggg

SEQ ID NO: 56792 - RNA, 72 nt, Homo sapiens
cagacgagcagcacagacacgggcacagcagaacgccggagggaagcccagaaaccgacaggacaaaggaaa

SEQ ID NO: 56793 - RNA, 74 nt, Homo sapiens
cacgaacagaggcacgggaaaaaacgcagcaaacaccaggagaaacaagcaccgagaagaacaccaaacaagaa

SEQ ID NO: 56794 - RNA, 38 nt, Homo sapiens
caaaaagccgggaacggagaggcggaaaaaagccaaga

SEQ ID NO: 56795 - RNA, 69 nt, Homo sapiens
ggagggacacaaccgaaggcgggcagaagccaggcacaaaaccggaagaaggcggagggaaggcgcaac

SEQ ID NO: 56796 - RNA, 66 nt, Homo sapiens
aaaccacgacagcagaggcagagacagaccagaagacggcacggcacgggaccgagcggcccacca

SEQ ID NO: 56797 - RNA, 58 nt, Homo sapiens
cacgaggacggggcaaccggggacagcccgccgagggacgggccagggcccggcccac

SEQ ID NO: 56798 - RNA, 57 nt, Homo sapiens
ggcaccagaagacggaccggagcacgcgaggcggagaacggaaaagcaccaggaagc

SEQ ID NO: 56799 - RNA, 31 nt, Homo sapiens
ggaggaggcacagagggggcaaaccgaggga

SEQ ID NO: 56800 - RNA, 82 nt, Homo sapiens
acagggacacaaaagaagcaacggagaccagcgaaccagaagaaaaaaagaagagaaagcagcgaaggaaaggacaacccaa

SEQ ID NO: 56801 - RNA, 76 nt, Homo sapiens
agcaacagcagccgcagaggcacaaggggcggcaagagaagaccccgcgggaggaggccagggaaggacacaccgc

SEQ ID NO: 56802 - RNA, 78 nt, Homo sapiens
cgggcccacccggaaggaaggcccagcgccaaacgacaaagcccggcgcagcgggacaccggaagaaagcagccacca

SEQ ID NO: 56803 - RNA, 74 nt, Homo sapiens
gcacccgcgagcgcaacccaagggaaccaacagggaagaagaacacagaccgagcgaaccgaacgccaaaacag

SEQ ID NO: 56804 - RNA, 76 nt, Homo sapiens
gggacggcaaaggcgcaacggccccaacgcacaccgacagagaacccaggccaacacacagacagaggcagccacc

SEQ ID NO: 56805 - RNA, 75 nt, Homo sapiens
agaaaacaccacaaagcaccagaaaaagggaaccagcaggacgaacaggagaaggaacaaaggaaacggacagaa

SEQ ID NO: 56806 - RNA, 80 nt, Homo sapiens
cccacgcaccccaccggcgcgcgcggcggcccgcgcacagggggcagcacgaaaacaccaacgacgcaacgaggaaaggg

SEQ ID NO: 56807 - RNA, 62 nt, Homo sapiens
cgagaagaaccccgggaccaggaacggccgacacgcaacagcaccagaaaagaaagggaaag

SEQ ID NO: 56808 - RNA, 76 nt, Homo sapiens
aaagacgcaaacggcccaccgccccgggggagagcggaccaggacccccagcacgaaggaagccgagaaccgccag

SEQ ID NO: 56809 - RNA, 61 nt, Homo sapiens
cggagcccgagggacggggacggagagaacacgagcccacaggcaagcggcagccacaccc

SEQ ID NO: 56810 - RNA, 69 nt, Homo sapiens
gcggcccgcccccgccccccgcgccggcgcaggggaaagaaaaggcacccaaaagcccagagggacacc

SEQ ID NO: 56811 - RNA, 71 nt, Homo sapiens
aggaggcaaaagaaacaaaagaacagaaggacagacccagaccgaggcgccaggagaacgaacagacaagc

SEQ ID NO: 56812 - RNA, 54 nt, Homo sapiens
cgaaagcgcaagacaccagcccaaaacaggaaagggcccggccagaaagacagg

SEQ ID NO: 56813 - RNA, 56 nt, Homo sapiens
ggaccacccagaggagcaacgccaagaagcgagagaagaaaaacagaaaaagccaa

SEQ ID NO: 56814 - RNA, 72 nt, Homo sapiens
gaccaccgaggagagccggaacagcgggacccacccagcaaacagaacggccgagagaggccaaccacccgg

SEQ ID NO: 56815 - RNA, 67 nt, Homo sapiens
gacaagccggcaacacacggaaggaaagaaaggcacccccagcaacacgcaacgcaaagaaacagaa

SEQ ID NO: 56816 - RNA, 75 nt, Homo sapiens
ccaggcccaagacgccgcgcgaggccagcaacagaagaaagcaagcaccggggaaagcggcccgaaacaagcaga

SEQ ID NO: 56817 - RNA, 61 nt, Homo sapiens
gccccgcagccccccaacaccgcccgccaggacgacgccgaaagaagaaaacccgagcaga

SEQ ID NO: 56818 - RNA, 117 nt, Homo sapiens
caagggaaagggaacaaggaaaagcacccggagggaagagagagcgacaaaaggcggccaggcccggcaaaggaagacaacgcacggccagcacccaagaggaggcggcggaaacca

SEQ ID NO: 56819 - RNA, 34 nt, Homo sapiens
gcggaccgccccccacacgagaccacggaaagga

SEQ ID NO: 56820 - RNA, 68 nt, Homo sapiens
caccaagcgggagacacaccacgccaagggggagaagcagaccgcaccaggcgggaccccgaaaaagc

SEQ ID NO: 56821 - RNA, 70 nt, Homo sapiens
caagaggaacagaaaagaaccagcagaagagggagcccaaagagaaaaaggagagagccagaccaggagg

SEQ ID NO: 56822 - RNA, 57 nt, Homo sapiens
cccacagaccaggcacccgcaggagaggccccaacaagccaaccgggaacggaccga

SEQ ID NO: 56823 - RNA, 61 nt, Homo sapiens
aaggccacgccaaaagcgccagcaaacccgcagaaggagaaacgcagacaccggaaaggaa

SEQ ID NO: 56824 - RNA, 97 nt, Homo sapiens
caagagcagcccacaggggggccgacacaagagcgcgagaccaacagggagcagagcaagagaaaagaacaagaagaaagcagacgaggacacacca

SEQ ID NO: 56825 - RNA, 77 nt, Homo sapiens
ccagccgaagagaaggggggagggacaacccaaagacggccaccgcgcaggaccagcaccacggcggacagccaaag

SEQ ID NO: 56826 - RNA, 88 nt, Homo sapiens
gccgcggcgcagcggcggacccgggcagaagaggcgggagagcccgccgacagcgcgagacaaggacgaggcccaaggaaacggcggc

SEQ ID NO: 56827 - RNA, 87 nt, Homo sapiens
ggagacaaggacaccgcgcaaggccggcagaagggggaggaacacgaccggaagacaggccaaggagagcagcgcggacaggagaag

SEQ ID NO: 56828 - RNA, 104 nt, Homo sapiens
agaagaagcccagagagcaccccagcgaggcccacagaaaagccacaacccagaggccgcgaaccagggcgcgggagcagcaacccaagagaggaccggagcgg

SEQ ID NO: 56829 - RNA, 82 nt, Homo sapiens
ggaacggcacggagccagacacaaaacgaaaaggggacaagccacaagagaagagacaacaggaaggacaaaacggaccgca

SEQ ID NO: 56830 - RNA, 71 nt, Homo sapiens
aggcccgcggcgggccgccagagcgcacacggacccggacccaccccgcacccgagagacgggggcaccag

SEQ ID NO: 56831 - RNA, 75 nt, Homo sapiens
gggaacaagaccagcgggagcaggacagagcgaagaaccccccaagaagacgaaacccccgggccacaagaaggg

SEQ ID NO: 56832 - RNA, 76 nt, Homo sapiens
gaggccggggaggaagagagcaggggggcgccaggcacccgagaaaggggacgcggccccggaggcggcagcagga

SEQ ID NO: 56833 - RNA, 65 nt, Homo sapiens
acacgccccccgccagcgccacggcgcgccacaggagccgcagaagcaaaggcaccgccaaaccg

SEQ ID NO: 56834 - RNA, 77 nt, Homo sapiens
acggcagacaagaaagccaaacgaggagaggaagcaaagacaaacgccgcaaaaggaccggaaaaacaccacccaca

SEQ ID NO: 56835 - RNA, 55 nt, Homo sapiens
aaaagcgccccgggaggagccaccagcaagaagggcaggccgcagcgccccacca

SEQ ID NO: 56836 - RNA, 74 nt, Homo sapiens
acacaccgggaaggagagagcaaacggagaccgggacagaccaaaagcgccgcacagcccaacccaccgaacag

SEQ ID NO: 56837 - RNA, 68 nt, Homo sapiens
ggcgccgaaaaaaagcaaccaccgaaacgggcgaaaaagaagaacagcaaaacacgaaaggcaaagag

SEQ ID NO: 56838 - RNA, 74 nt, Homo sapiens
ggaagacacagcaaggaagacccacggagaaacccgccagagaggaacacgagcgacagaaaggcagcaacccc

SEQ ID NO: 56839 - RNA, 73 nt, Homo sapiens
acgcgcaagacgaggcgcccgggagaagggggaggccccgcaaccaggagcagacaagggcccacaccaaagc

SEQ ID NO: 56840 - RNA, 75 nt, Homo sapiens
acacacacacaaagaccggaaaaaaaggggggaacccagaagcgccagagcgcgagggggagagcagacagaagc

SEQ ID NO: 56841 - RNA, 71 nt, Homo sapiens
cccaaaagcaagcaaggacggaggcaaagggcacggccggccaagaggacacacgaaacacaaaggggcga

SEQ ID NO: 56842 - RNA, 78 nt, Homo sapiens
ggagcacccaggaccaccagaacgcccgccgacacagccaccaagaaggcacaagcagaacgggaaaaggggcggaaa

SEQ ID NO: 56843 - RNA, 67 nt, Homo sapiens
gaaagacaagagcagcacccaaaagaccaggagccacaaaggaggaaccaaccaaaacgacagaacc

SEQ ID NO: 56844 - RNA, 36 nt, Homo sapiens
cagaacgggagaaagcaaaccacaaggcaagcccag

SEQ ID NO: 56845 - RNA, 53 nt, Homo sapiens
cgagaaggggaaacagagagagggaagacagggcggaccagaacagcagccac

SEQ ID NO: 56846 - RNA, 77 nt, Homo sapiens
cagcccccaagaggagaacaggaacaccagcccgcccggcccgcagccccccacaccccacacagacccaccggcag

SEQ ID NO: 56847 - RNA, 77 nt, Homo sapiens
gcccagaggaagccgagccacaggagaggcccaggccgaccggcgcgcggaggcagcccaagacaccccgcggcacg

SEQ ID NO: 56848 - RNA, 58 nt, Homo sapiens
aggggccacaaaacccaggcgcggaagcaaggggaccagaagccaggagaggcgccgg

SEQ ID NO: 56849 - RNA, 82 nt, Homo sapiens
agaagcccggcgccgggaagcccagccgccgaagagagagaacgccgggggaagccgaaggaacgcgcaaccagaccacagg

SEQ ID NO: 56850 - RNA, 53 nt, Homo sapiens
ccaggagacggggaccagcaaagcggaggaaagcgcaggcaggagaaggacag

SEQ ID NO: 56851 - RNA, 86 nt, Homo sapiens
gacgagccgggacgcggcgccgcggcaccagggcgcgcagccgggccggcccgaccccaccggccaacggggaacaagcaagaaaa

SEQ ID NO: 56852 - RNA, 79 nt, Homo sapiens
cgcgcccggcccggggaccacagccgcggcccaggcccaagaaggcaacagacacgcaacagaaacaccagagggaacc

SEQ ID NO: 56853 - RNA, 83 nt, Homo sapiens
cccggccggagcgggcggagacgccgggcagccgaacggagggcgacggagggaggcaagccagaccgggagggagggccgac

SEQ ID NO: 56854 - RNA, 76 nt, Homo sapiens
aaacgcgcgggccaagcgagcaccacgcccgaggccaacacgacaccggaacgcccaccacggggacaccccagca

SEQ ID NO: 56855 - RNA, 88 nt, Homo sapiens
cgcacaagagcgagcacacaggacaggagagaaaccacaggaaagacaaggccccagcagcaggcaaagggaaggcacagcggacgag

SEQ ID NO: 56856 - RNA, 78 nt, Homo sapiens
caggaccagccgccgccagaggagagcaccggccacggaaaagcaaagcgccacagaccgggccaaacaacccaggag

SEQ ID NO: 56857 - RNA, 79 nt, Homo sapiens
ccagccaggagcaccgccgaggacccagcacaccgagggaacccggcaccagccgggcaaaaacccaaaccaacagaac

SEQ ID NO: 56858 - RNA, 81 nt, Homo sapiens
ggaaagacgaaaaccaaccccacggaaaagaaaaccccgccacagaaacccagaaccgggacaacccagcaaacaggccag

SEQ ID NO: 56859 - RNA, 85 nt, Homo sapiens
gcagaaagccaggcaccaccaccccaccgccggaagagaacaaggcaaaaccaccaggccaaacaggccaaagagggcgaaaaaa

SEQ ID NO: 56860 - RNA, 71 nt, Homo sapiens
aagccaagcaacaaaccaacgaaaggacacgagcgagggcgaccagggaacgggaagcacgaagcagcagg

SEQ ID NO: 56861 - RNA, 82 nt, Homo sapiens
ccacagagagccaccggggagaagcccaacaaggacgggaccaagccgagacaccagacccgagccaagaagaccaagagca

SEQ ID NO: 56862 - RNA, 62 nt, Homo sapiens
cacaaggacgcccgcacggcgaggaacagccaagacccacaagaaggacaaaccggcgacca

SEQ ID NO: 56863 - RNA, 76 nt, Homo sapiens
aaggaggagggcagaaggggacagggaaaagaaagagaccaaagaaacagaacagagacacccaacccagaagaac

SEQ ID NO: 56864 - RNA, 82 nt, Homo sapiens
cgagcccagccgaaggagaaggggggaggcaaggaggccacggggccgaagacaccaaccgggcaccagccaaacggaacaa

SEQ ID NO: 56865 - RNA, 101 nt, Homo sapiens
gccccagcgaacacaaagggaggggaaggcggaccgagaacgagggcaggaaccccggggagcgggcgggcgaggccgacaaaagagccagaggacggaca

SEQ ID NO: 56866 - RNA, 70 nt, Homo sapiens
cggaagccgagacaccgcagccggacaagaagcccaagcgaaagaccgcgagaagaccagaaaggggggc

SEQ ID NO: 56867 - RNA, 79 nt, Homo sapiens
cccgaggccccagccccccggggccccgcgggaaagggagacacagaggaagaccacaagaggggcagcagagccccag

SEQ ID NO: 56868 - RNA, 75 nt, Homo sapiens
gccgggccggggagcgccgccgcaacgggcaggggccgacaccgcgagccaggacaaaaccaggcagaaccaaca

SEQ ID NO: 56869 - RNA, 61 nt, Homo sapiens
ccgacgaagcgaggcaccgcagcaccagaacccgcagggacgccaccaaagacccacggca

SEQ ID NO: 56870 - RNA, 80 nt, Homo sapiens
ggagcggccggacacccaccccgcccccaggcagcagaccaagggaggaccgcgcacaaagagaggaacaagcagggcag

SEQ ID NO: 56871 - RNA, 66 nt, Homo sapiens
gcggaacgggggacaggaaaggggggaaaggcgaccaagaggaagaaaagcaccagcgagggcgcc

SEQ ID NO: 56872 - RNA, 75 nt, Homo sapiens
ggaaaaggcgggcacaggccgaccgcgcggacacaaccagagggaagcacgcccgggcacagcggaagagacgac

SEQ ID NO: 56873 - RNA, 63 nt, Homo sapiens
ggcaaagaagaacaggaaggaaggaaagagccaaacgggcgaagcgaggaacaaggcccaaaa

SEQ ID NO: 56874 - RNA, 75 nt, Homo sapiens
accggcccaagaaacagaacacgaagagagggccggcacccgccggaaccgagcaacgcgagcagaagcccagca

SEQ ID NO: 56875 - RNA, 72 nt, Homo sapiens
ggccggccagccacccaaggccccggacgccggagaggcaccggaccggagccgcagcccaaagcaagaaga

SEQ ID NO: 56876 - RNA, 81 nt, Homo sapiens
gccgcagacgcggggacgcggccgcccccccccccccccgacgccagaaacccacgagcgaacaccggagccccgcagggc

SEQ ID NO: 56877 - RNA, 58 nt, Homo sapiens
ccgagaggagccacgaacgcccagcagacaacagaaccgcgcccaggaggcccggaag

SEQ ID NO: 56878 - RNA, 69 nt, Homo sapiens
ccggcaggagccccaggagaccccagaaggggagaaggagaccgagcaacaagacgaagacacgaggcc

SEQ ID NO: 56879 - RNA, 76 nt, Homo sapiens
gaccaggggcaccgcagcgaccacccacacaaacccgggacgggccgagaggccgaagacccagcaaacaagacaa

SEQ ID NO: 56880 - RNA, 71 nt, Homo sapiens
gagcaccgcgccggcccagcaccccgagaaccgcaggagccagagggaaaagggcccaaccggagagcaaa

SEQ ID NO: 56881 - RNA, 65 nt, Homo sapiens
gccgaccaacacccgaggcggacgcagagacagaacaccagaagcagccgaaacgaaccaagaac

SEQ ID NO: 56882 - RNA, 80 nt, Homo sapiens
gcagagaacccacaaagaggcggcccccgaggagggaacaagccagaccaggaggagaaaacaaaaaccaaagaacaaga

SEQ ID NO: 56883 - RNA, 58 nt, Homo sapiens
aaaacaagaaagacacaaccacgaagagggcggcgacggcggcgcgaggaccgaccgg

SEQ ID NO: 56884 - RNA, 83 nt, Homo sapiens
aaggacaccaagagcggaccgggccccgccaaacccaccaagggacgaagcgcaccacgcagagaagggacaaggccccagcc

SEQ ID NO: 56885 - RNA, 65 nt, Homo sapiens
cggaggaaggagcaccaccacaagggggaacggcaggagaacagcaccccccccaccaccaccac

SEQ ID NO: 56886 - RNA, 74 nt, Homo sapiens
ccacccacaccaaaccggaagaccaaaaaagagcccagccacagagcgagaaggaaaaaacagggaagagaaaa

SEQ ID NO: 56887 - RNA, 66 nt, Homo sapiens
acaagggcacggacgagaggcacagaacagcagagaggaaaaaagcaggccgcgagacaaagacag

SEQ ID NO: 56888 - RNA, 76 nt, Homo sapiens
aggccgaagccgagcagaggacaaaacaagagggccagggcccgagcgcccagcggaaccaacagccaggagcccg

SEQ ID NO: 56889 - RNA, 62 nt, Homo sapiens
ggaagaaacccagggcgagaaagagaaggaaggcccgcccgccgcaggaaagaagcaaagac

SEQ ID NO: 56890 - RNA, 73 nt, Homo sapiens
ccagacccggccgcaaccaacggcaagcgccacggggcaaagcggcgaccccgaggcgcgccccagccagccc

SEQ ID NO: 56891 - RNA, 77 nt, Homo sapiens
ggcggagcggcagggcggcgcgaggaggcgggcgagaggacagccgacggaccagagcgagcgccagagccccggaa

SEQ ID NO: 56892 - RNA, 55 nt, Homo sapiens
gcggaccgcacccaaagggacaccgcgacccacaccaagacagagagccaggcga

SEQ ID NO: 56893 - RNA, 76 nt, Homo sapiens
accaagaagaagaaaagacagaagccgaccggggaccaaaacaaaacgagagcaagaggaaagaaaaagaacagac

SEQ ID NO: 56894 - RNA, 75 nt, Homo sapiens
cacagcacccagaccgcaggggggcccacgcggaggacgcagaacacggcgggcggcccgccaacgacgcaagag

SEQ ID NO: 56895 - RNA, 54 nt, Homo sapiens
gaaaggagcagaagacaaaacaggcagaaaacaaggagccccagcggaagccgc

SEQ ID NO: 56896 - RNA, 77 nt, Homo sapiens
ggaaagccgaaggccgcagacgacccgagggagcgaacggacaggggaaagcgcgagcgagcacccggagcagcaga

SEQ ID NO: 56897 - RNA, 77 nt, Homo sapiens
cccgggggggcgggcgcagcgcggacagcaagacaaacagagaacaggacagcaagaacgagggaacgggaaaagaa

SEQ ID NO: 56898 - RNA, 90 nt, Homo sapiens
agaaggagcaggagagcgccaggacaagcacaaccggagcgcaaggcgccagcggagacaccacgccgcaccgcgaggaacccgagccca

SEQ ID NO: 56899 - RNA, 51 nt, Homo sapiens
ggaacaacagaacaacaggaaacccagagacccaccggcgggccgaaaaca

SEQ ID NO: 56900 - RNA, 80 nt, Homo sapiens
gcaagccgggcagcagcccagcggcagcagaaagagcaaaacgccaaggacccaggcgacccaacaaaaggccaaaaagg

SEQ ID NO: 56901 - RNA, 71 nt, Homo sapiens
ggcaacagagggcagccggggcggaaccaaagccagcagcaccaaccaggaaaacgagagacagaccggcc

SEQ ID NO: 56902 - RNA, 72 nt, Homo sapiens
gaaaagccccagggccaccagagagagagaacccggcgagaggaagagagagagacagaagaggaagagacc

SEQ ID NO: 56903 - RNA, 77 nt, Homo sapiens
agccaggaaggaacaagccaagaggacccgaagccacagccccaaggacccagagagggaccagggccaaagaagag

SEQ ID NO: 56904 - RNA, 81 nt, Homo sapiens
agcacccaccccggagggggaccacaagacccacgacaggcacggcagacacaccgaccagaggaaggcgaacccgccacg

SEQ ID NO: 56905 - RNA, 73 nt, Homo sapiens
aaccggccaacggacaggcagcacgccgccaaccggacagcagccggggcgcgggggaggcagccaccaaaaa

SEQ ID NO: 56906 - RNA, 80 nt, Homo sapiens
cagacgacacaacccgggcgcggacaggaaaagccagagagcggcagagaagaagggaggcccaaagagcaaacaaagaa

SEQ ID NO: 56907 - RNA, 85 nt, Homo sapiens
agcagacacgcccacgccgcccagccaagggaaggagcggcggagcccagagcaccggccagaacaagccaaggagccaagacga

SEQ ID NO: 56908 - RNA, 77 nt, Homo sapiens
gcgcggcgccggcggagggaagaagacggcgaagcaccaacgccaagagcaagcccccaacaccagcaaccccgggg

SEQ ID NO: 56909 - RNA, 79 nt, Homo sapiens
ccagggcgaggcggacagagcacaggccaccagccaggagcccaagggaggggaagccgccggccggggccccagggcc

SEQ ID NO: 56910 - RNA, 79 nt, Homo sapiens
agggggcgcaggaccggccgcaggccaccgacacgagacaaccgggagccggggagaagaaccaacaacggaaaaccag

SEQ ID NO: 56911 - RNA, 79 nt, Homo sapiens
aacgcccagaaagcgcaggaaaagcagcgccagaaagagagagcagagaccggacaacagaaggaagaaccgccaaaaa

SEQ ID NO: 56912 - RNA, 108 nt, Homo sapiens
aaggcgggccccccaaaggagacaaaggaacggaggaaggggacagggaccacaacaaggcaaaacaccacagacgaaccagagaaaaccaaacaaaacaaagacagc

SEQ ID NO: 56913 - RNA, 77 nt, Homo sapiens
gaaaaacaagcgagaccacggacaggagaaccagaggacaaaaagcccagggaacaacaagcgcaagaggaagaaaa

SEQ ID NO: 56914 - RNA, 61 nt, Homo sapiens
aggcgggcgccggcggcgggcgcccggagagaccgacagaaggaaacacagcgcgaacgga

SEQ ID NO: 56915 - RNA, 106 nt, Homo sapiens
gaggaggccgccagcagaggcggagcccgcagaccgcagaaggccggagacaccagcagaacaaaccaggggagggaaacgagaaaaacgacgccagcggcggcaa

SEQ ID NO: 56916 - RNA, 71 nt, Homo sapiens
acgagaacgccgcgacagaaaggcaaggccagagaaggcgggagaaagacacgaaccacagaacgcaacag

SEQ ID NO: 56917 - RNA, 73 nt, Homo sapiens
gagaaaaagaacgggaccacgccaagagcgagcaagagccaagagaggacccgggacgaaccggcaaaccccc

SEQ ID NO: 56918 - RNA, 78 nt, Homo sapiens
caagcagcaggagcagcccgcggcgaccaagacaggaaccgcccgccaagggacaccaccccggcacgagaccggcgg

SEQ ID NO: 56919 - RNA, 81 nt, Homo sapiens
agaccagggcccggggacgcaccaaaaagagcagaggaagcggcgcgagaacaggaagcggagaaacaggagaagaaacgc

SEQ ID NO: 56920 - RNA, 99 nt, Homo sapiens
gcgcggggcccaggcggaggcagggcacgaccagccacgcaacccccccccagggagaagcacgggaggacccacggagggcggaaccaacggaggacc

SEQ ID NO: 56921 - RNA, 71 nt, Homo sapiens
acacagcccacgcggaggccaccagaagaagacgggaagagacccgcgaccagaggggcaacccagcaagg

SEQ ID NO: 56922 - RNA, 35 nt, Homo sapiens
gaacaggaaaaaggcacccagcagcgaagagcaaa

SEQ ID NO: 56923 - RNA, 66 nt, Homo sapiens
aacacaaagccccccacgccaccacagagcaacccggcaccccagaaagaagaaaggccccgaacg

SEQ ID NO: 56924 - RNA, 59 nt, Homo sapiens
aaagacgggccccaaagaagagaaaggaaaccagcgcaggcccccagaagacagaaagc

SEQ ID NO: 56925 - RNA, 69 nt, Homo sapiens
gccggccccccacgcgcacacaagggagcccccccaccacccccgaggaaacccagacgacaaggaagg

SEQ ID NO: 56926 - RNA, 67 nt, Homo sapiens
agcagccagaccaagaacaaccgcggacacggagaggaagggagcagggacggggggaaaagcgcac

SEQ ID NO: 56927 - RNA, 90 nt, Homo sapiens
ccgagccacccagcagcggcgcaggccaccggcacagccccccggcagcacaagaccaaagacaagcagagacgaccgcagacgcgacga

SEQ ID NO: 56928 - RNA, 73 nt, Homo sapiens
aggggcgacagacaagccaaaaacagagacccacgcgaggaggggaaccaaccgggaacaagggccagccaga

SEQ ID NO: 56929 - RNA, 79 nt, Homo sapiens
ggaacccccccggaccagaaggcgccagacaaagaccccaaacaggagaaagcaaaacccaacccccagcagagaggag

SEQ ID NO: 56930 - RNA, 57 nt, Homo sapiens
agggacaagacagcccaggccgggaaaggaagacgggaacggagccccccgcacagg

SEQ ID NO: 56931 - RNA, 78 nt, Homo sapiens
ccgagaacggcaggcaagcacaaagccagacccagccgcgccgaaagaacacaaccaggacgagcgcgccgcgagcgc

SEQ ID NO: 56932 - RNA, 69 nt, Homo sapiens
aagagcgccccaggagaaacaaacaacggcaagcggagaagagcaaggccgaaccgagaggaagggcaa

SEQ ID NO: 56933 - RNA, 75 nt, Homo sapiens
ccagaccgccaaaccagagaaagaaacacccgaacagcgagaccagagaagacacacaacaaccccacggagccc

SEQ ID NO: 56934 - RNA, 71 nt, Homo sapiens
ccccgccgccccccggccgaaaaggcgaccgccccaaggaaccacgaaaccgggagaagccggccaggcag

SEQ ID NO: 56935 - RNA, 77 nt, Homo sapiens
gcgggaggaagaggcagaggacccaccgccagccacccacgccagcagagaaagccaacaggcagaccagagacagc

SEQ ID NO: 56936 - RNA, 76 nt, Homo sapiens
ggagcacccagcaaagagcccacacaggggaaccgcccaccgcgcccccagaacagggggcggaaagacgaggaaa

SEQ ID NO: 56937 - RNA, 74 nt, Homo sapiens
gacgcaaccaagcaccgaaacagcagggaaagaaggacaaacagaggccggacagcagggcaacgggcgacagg

SEQ ID NO: 56938 - RNA, 45 nt, Homo sapiens
caggaccgagcccccacggagcagagacagggaagaacgaggcag

SEQ ID NO: 56939 - RNA, 74 nt, Homo sapiens
cgacccacagggaaaaaagggcgagcaaaagaccagagacaccacaggggagaaaagaagaaaagaacagaggc

SEQ ID NO: 56940 - RNA, 73 nt, Homo sapiens
aaagagcagcaccaggaagcaaaggagagcagaaagacgagccgccggggaaaaagcgcagcaaagagacaag

SEQ ID NO: 56941 - RNA, 83 nt, Homo sapiens
gggaggggagcaccgaagagagccagcagggcggaaccgcgggggccagaagcagcgcggagccggcccgggccggacccaac

SEQ ID NO: 56942 - RNA, 95 nt, Homo sapiens
gcgcgaagccggggcggagcacgcgagcaggggaacccacacccgcccccagggccaccgcaggacgccgacaccacccccagcagacgccggag

SEQ ID NO: 56943 - RNA, 86 nt, Homo sapiens
agagaacgcgccggggcgcaccgagcccccaggacggcacagccggcccgggccgggagcgggcaggagcagaagacagagggagg

SEQ ID NO: 56944 - RNA, 77 nt, Homo sapiens
ccagcccggggacacaagcccccaaggaccacagccggacagggaacgagaccgcccaagcacagagagcagcgaga

SEQ ID NO: 56945 - RNA, 70 nt, Homo sapiens
agaaacgcgcaccgggaagaccgaccaaggacgcaagacacagacggaccaaagcgaacccccacaccag

SEQ ID NO: 56946 - RNA, 75 nt, Homo sapiens
caagcgacgcacccgaagagcacagaaaagacagagcgaaggaccagacgcaaccacagaagagcagagagagga

SEQ ID NO: 56947 - RNA, 81 nt, Homo sapiens
gagcgacaggcccaggggcgagccacagcgaaaggaaggagaaggcaccacggcacgagaagggcggcagaggaggagaac

SEQ ID NO: 56948 - RNA, 57 nt, Homo sapiens
cagcggggcccagcgaagagcgaagccggaaacgaaacagcgcagccaggaacagga

SEQ ID NO: 56949 - RNA, 76 nt, Homo sapiens
gaagaagcagggaaaaagaaaacagccaaagccaaccccaggaagaagaaagccagaggagaaagacagagaccga

SEQ ID NO: 56950 - RNA, 53 nt, Homo sapiens
gacggccggaaaaacgaacagacgcacaccacacaaggccgacgcgcacgaac

SEQ ID NO: 56951 - RNA, 80 nt, Homo sapiens
cgcgcagcggcaggcggagagacccgccgccaggaagacacggccgaagcacacgagcggaggacgggacaaccacgcgc

SEQ ID NO: 56952 - RNA, 45 nt, Homo sapiens
aacccggaaacccagcggcccagccgggcgaacccgagcagcgga

SEQ ID NO: 56953 - RNA, 59 nt, Homo sapiens
aaccagcgacacaggaagaacagggcgaggacgagaggacagcagcggacggccggacc

SEQ ID NO: 56954 - RNA, 75 nt, Homo sapiens
cgacaccaaggaagacaaagccggagaaaagcagcgggaagaacaagaaacggaccaaggaaagagggaaggccg

SEQ ID NO: 56955 - RNA, 79 nt, Homo sapiens
ccggggccgcggcgcgcgccagcgcgcccacagggaagccaaaaaccccccacccggggccgagcaagagagggagcac

SEQ ID NO: 56956 - RNA, 85 nt, Homo sapiens
gaagagcgaagagaccggagccgacagacggcggcggcggaggcggagaaggcgcggaggccggggcgggacagggccgggggcg

SEQ ID NO: 56957 - RNA, 76 nt, Homo sapiens
acgggaaaggcgcagagaagcacaggcggccagcaaacagggaccagcacggcaggggccacacagagcccacgca

SEQ ID NO: 56958 - RNA, 73 nt, Homo sapiens
cgcccaaacggcgggaacaggcagagccacacgccggccaagacgggacacggcacagggacgggccaagaac

SEQ ID NO: 56959 - RNA, 73 nt, Homo sapiens
agaccgcgacaggcccgaaaaaaacccaggcggcccaggcggcggagaaaccaccacaaacacgaggccagca

SEQ ID NO: 56960 - RNA, 74 nt, Homo sapiens
caaggacacgggccggcacacccacggaagccaggggagcaacagaggacccgcagaccaacaggaggcgggac

SEQ ID NO: 56961 - RNA, 82 nt, Homo sapiens
acaacggagagacaacaagggccacggacggggcgggccccggccagggcccaggcagccggggcggaacccccagacagca

SEQ ID NO: 56962 - RNA, 84 nt, Homo sapiens
cgcagaggcagcagcagccgcggagcagagccgccggggagggagccagaagcaacgagggccccgagacaaggccccggcgcc

SEQ ID NO: 56963 - RNA, 89 nt, Homo sapiens
ggaccgagaccggaccgagagcggaccgagagcgcgaaacgcacgagaaggaaacaaagcagcaggagaggagagccagagaaggacag

SEQ ID NO: 56964 - RNA, 77 nt, Homo sapiens
ggggccgccccacaggaaccccacccagccagcgggaccagccgcagcaagccagaagaacaaaaaacgcacacccc

SEQ ID NO: 56965 - RNA, 58 nt, Homo sapiens
acggccacccaagcccagggcggaacgggccccggggaccccacaagacccaagccag

SEQ ID NO: 56966 - RNA, 32 nt, Homo sapiens
ccgggaaagccgcaaagccaagacaggaacac

SEQ ID NO: 56967 - RNA, 78 nt, Homo sapiens
ccgccaccggcccgcccggcacccgccaccgagaaccaaaggcagacccagaagagcacaaaacagagaaaagggaag

SEQ ID NO: 56968 - RNA, 81 nt, Homo sapiens
cagcacacagaggagagcgacgagaagaccagcggacccaaaaacaaggaacacccggcagcgaggcggcggaacaaacca

SEQ ID NO: 56969 - RNA, 70 nt, Homo sapiens
cccgaacagcagcagcgcgagcgacaacgggacgggaaaccaccccacggcaacgggccgcccgaagccc

SEQ ID NO: 56970 - RNA, 62 nt, Homo sapiens
gaccgaggaccgagacagaggcgccaagcagccagccgggacccaacacgcaaccacagcca

SEQ ID NO: 56971 - RNA, 77 nt, Homo sapiens
ggaggaggaaccagaccgcggccagagcgcagaccgcgcgaaacgcccagaaaccaagaagcagcacgccggaaaac

SEQ ID NO: 56972 - RNA, 57 nt, Homo sapiens
aggcacaaggacaaacccacccacaaagggggggcccccaaagggaagccaaacaca

SEQ ID NO: 56973 - RNA, 86 nt, Homo sapiens
gcgagaggcggcggcacgacgacggccccagcccagccaccagagcaccaagcagacacgcaggagaggcagaaagaccaaagggc

SEQ ID NO: 56974 - RNA, 75 nt, Homo sapiens
gccgcgaccccagccggcgccgagggcggaaccgagcgggaaaaggaagaagaagcggccgcgagaaggagcgcc

SEQ ID NO: 56975 - RNA, 66 nt, Homo sapiens
cccaccacccgacccagagcccccgcccgaaggaagaaaccaaacgaaacacaacgaccaacggga

SEQ ID NO: 56976 - RNA, 59 nt, Homo sapiens
caggagggcaacccagaacacaaaaacaccccacagaacagaacaacaagacggccgaa

SEQ ID NO: 56977 - RNA, 76 nt, Homo sapiens
ggaggcgaaagcggaacgagggaaaagcacagggccaggaagcagagggacagccaggccagaaacaggcccagca

SEQ ID NO: 56978 - RNA, 80 nt, Homo sapiens
agccgaccgcagcaaaaagcagcaacagaaccgcggaggagccagcccagggaagagaaaccacgaggagggaagccagc

SEQ ID NO: 56979 - RNA, 77 nt, Homo sapiens
ccgccgccggcgcggaaggacgaggcgaggcgagaaacgagggaaaaggaaaccagaagagggacgaagaaaacagc

SEQ ID NO: 56980 - RNA, 61 nt, Homo sapiens
acgagggacaagcagggcggagcagcgggagccaggccaggcagagcagcccaccagggag

SEQ ID NO: 56981 - RNA, 81 nt, Homo sapiens
cggagacaaaaacggcccggagaggagagcagcgagaagggaggaaaaaaccagaagagcaaaacaccacaacgaaccaga

SEQ ID NO: 56982 - RNA, 79 nt, Homo sapiens
cgacagagacggcggagaccccgaaggcgcaaacgacaccacccgaccgaccacacgaaggggcagaagagcacaagac

SEQ ID NO: 56983 - RNA, 79 nt, Homo sapiens
gcgagagcgcggagcgggcggagcggcgagagcccccacgggcccccacagagagcacacaaacaaagcgaaaccacgg

SEQ ID NO: 56984 - RNA, 70 nt, Homo sapiens
ggcagacaaaagggccaaagaagggagagaggaaacaagccccaggcgcccccgcaaaggacaacaggca

SEQ ID NO: 56985 - RNA, 76 nt, Homo sapiens
gagggaacccgcccccagggagggaacaaagcccacagcaccgcgcagagccagcaagaccaaccgaaagaacccc

SEQ ID NO: 56986 - RNA, 81 nt, Homo sapiens
gcccgacgagggaacgacgcagaaaaccagaagccggaaccagcagacccaaagaagcacgaaaaaccccaggccgaagaa

SEQ ID NO: 56987 - RNA, 81 nt, Homo sapiens
gcccaggaccggccaccccacacggcgcaccagggggcggcggggccccccgccagcgggccgaggagcgagcgacaggca

SEQ ID NO: 56988 - RNA, 55 nt, Homo sapiens
ccacccaaacccggaaacagggccaaccagaagacggagcaggcaaaggagaaaa

SEQ ID NO: 56989 - RNA, 77 nt, Homo sapiens
ggcagaaaacaaccgaaccccaaagaggcgaaaaagaggagcccaacggacaagaggccccgagccccggccccaaa

SEQ ID NO: 56990 - RNA, 38 nt, Homo sapiens
ggaaacgagaggggagaaggcgccgcccgcggccgccc

SEQ ID NO: 56991 - RNA, 80 nt, Homo sapiens
ccgcgaagacacccgccgccccgggcagccacgcaacccagcagccggccgacgagccgccggggaggggccgcccaacc

SEQ ID NO: 56992 - RNA, 79 nt, Homo sapiens
agggggaagagagagaaacaaaagcgccagagccaagaacgagggcaggcacgagcaaggaggagccccgaaaagcaaa

SEQ ID NO: 56993 - RNA, 78 nt, Homo sapiens
gaggaaccaaagaaaaaggagcaggcgccagcaaagagaagggaaccgaaccaagagagaaaacagagcaggagaagg

SEQ ID NO: 56994 - RNA, 74 nt, Homo sapiens
caaaccggaccaccccgaagaaagcacagggagcggcaggggaggcgaagaagagcccggacagaaagacgaca

SEQ ID NO: 56995 - RNA, 86 nt, Homo sapiens
cccagcccccgggaccccagaaccacgagacagaggaacccagggcaagaaccggacaccggaaggggacagaaaaacccagagcc

SEQ ID NO: 56996 - RNA, 59 nt, Homo sapiens
accagcaaagcgggcagagcccggccacgccagcagccggacgccagccaagggcggag

SEQ ID NO: 56997 - RNA, 82 nt, Homo sapiens
cggggccgccaggcccgggcgcagccgcgcgacgccgagcgcgccgcgagaccccgccccccaggcggaccggggcaaggag

SEQ ID NO: 56998 - RNA, 74 nt, Homo sapiens
aagcgaccagagcgaaaaacagggaggaggcaacaacagaaaccaggcacagggaggaaaggacagaccacaaa

SEQ ID NO: 56999 - RNA, 71 nt, Homo sapiens
cgccacccggcgcgaccgcccggcaccgggagaaccaccgccaccgccaccagcgccggcccaggcggagg

SEQ ID NO: 57000 - RNA, 86 nt, Homo sapiens
aaggcgcagcagaggggccacgcgggcccgaggcgcaccaagggcgaaggagccggcccaagcacaggccaaagagcaccaagaga

SEQ ID NO: 57001 - RNA, 81 nt, Homo sapiens
ggacacggcggagagccgacgacaccgcagccccccgggaggcccgacgcgacgggcccccagagccgcgcaagaccgcag

SEQ ID NO: 57002 - RNA, 78 nt, Homo sapiens
gaccgacgcgagaagcccagaccgcagggcgggaaaaaaccaagcagcgagcaccagagggcccggccagcaggaacc

SEQ ID NO: 57003 - RNA, 68 nt, Homo sapiens
aggaggggccagccaagaagagaaagcgaacaggaaaacccggccaggggccgaagaaaggagagaac

SEQ ID NO: 57004 - RNA, 79 nt, Homo sapiens
cacgcagccgcggcacgccgcgcggagccagcgccacggccgcaccagggaagccgggggaggccacggacaacagacg

SEQ ID NO: 57005 - RNA, 61 nt, Homo sapiens
ggacaccaagaaagaacagaacgcaggagcagagggcaaagaaagagcccaggacagccga

SEQ ID NO: 57006 - RNA, 73 nt, Homo sapiens
ggaggagacgcgcgagagccgacaccgaaaacgagaaacgaaagagacacgggggcacaaccgagcccgggga

SEQ ID NO: 57007 - RNA, 74 nt, Homo sapiens
cggggaccccggagcccagaagacagagggcgagcaagccagggcgagcaggaagaagaacaagaacacacaag

SEQ ID NO: 57008 - RNA, 80 nt, Homo sapiens
ggggagcagaacggccggaggaaccagagggacaacaggcaggagaaagggagcgcaccccaggggcagagacgcgcaaa

SEQ ID NO: 57009 - RNA, 70 nt, Homo sapiens
gggggcacggggagcaaagaggaccacaccagggcggagaaagaaggaacccagcggggccgccccaccc

SEQ ID NO: 57010 - RNA, 72 nt, Homo sapiens
gagcggcgcgggccccccccaccgcgggaagaagagaaagccgaaaaagacaaggggaggacagcggaaaaa

SEQ ID NO: 57011 - RNA, 65 nt, Homo sapiens
cacgagcagcgcccgggagccccacgagcccgagacagggcagggcagcagcacgaccgacccag

SEQ ID NO: 57012 - RNA, 73 nt, Homo sapiens
ggccagaccggagcagcggggacagccaggaagaaagccaggcccaaggagaccgaaagcagaagaaaggaac

SEQ ID NO: 57013 - RNA, 80 nt, Homo sapiens
gggaacaccaaggggcaacgggccagagagggaaggaaacaagccaggggacccacagcccggcgaccacggggaaccga

SEQ ID NO: 57014 - RNA, 76 nt, Homo sapiens
gaaaaccagcagaggcggaaggacccggaagccacaaagcaaaacggcacgggagaggcaaggccccagcccaagc

SEQ ID NO: 57015 - RNA, 98 nt, Homo sapiens
aaggaggggaacccaccgggggccacgcacaggcacacaaggccggcccccagcagaaaaggacgacccaaagaaaaaaacagggaacaaaacccaac

SEQ ID NO: 57016 - RNA, 75 nt, Homo sapiens
agcgcagccaagaggaaggaaaacccgcaaaagacaaaacagaagaggggcacaaagaaggcagggccaagagga

SEQ ID NO: 57017 - RNA, 82 nt, Homo sapiens
acccagccaagcagaggccacacgaacggaaacccggggaggcgggagcgcccacagcgcccagcgaagaagggggaaggca

SEQ ID NO: 57018 - RNA, 32 nt, Homo sapiens
gcacaaggaaccaaagaaggagagagcacgac

SEQ ID NO: 57019 - RNA, 78 nt, Homo sapiens
accacagagggggggggaaaggcggcacagcaaacacacaagagccagcaaagggagcagcacagaggcagaacagac

SEQ ID NO: 57020 - RNA, 74 nt, Homo sapiens
ggacaagagacaccggggcgaacccccaccaaggagacgcacagcgacagaccaggcccaggcagaagcccaac

SEQ ID NO: 57021 - RNA, 124 nt, Homo sapiens
agcaagcccacgcaaacaagaaggcgaccgacagcaccccaagaaaaccacagacacggccagggggccagcccgcaacccccggcgaccacgggcccggcaacagcgcagcggggacaccggg

SEQ ID NO: 57022 - RNA, 75 nt, Homo sapiens
ggaccgcaggggcgcgcgaaggagcggaagaaggcaggccaaaccaccgaccagggcacaaaaccgccccagcca

SEQ ID NO: 57023 - RNA, 72 nt, Homo sapiens
cccaccccaccagggaagcaccacagccaccacaccaagacaccaggggagaccaggcacacccagaagcca

SEQ ID NO: 57024 - RNA, 71 nt, Homo sapiens
aacaccaaggccaaaaacacagcaacccagcacgaacaagccagacggacagaacaagaagcacccagcaa

SEQ ID NO: 57025 - RNA, 71 nt, Homo sapiens
aaaccagacaccagccagcccacaggacgaaacagcgagagcggggaaagcgacaacccacacaagcgaac

SEQ ID NO: 57026 - RNA, 77 nt, Homo sapiens
gcgagccagcagagaagggcaaaacgaaaggagcccaaagaacagccccagcagagaccagagaagccccccaccag

SEQ ID NO: 57027 - RNA, 70 nt, Homo sapiens
gcaaacaggcgacccgacacagagggaacgaaggggaagcaagaagcacagcacaccggacgggaaacag

SEQ ID NO: 57028 - RNA, 87 nt, Homo sapiens
ggcacagggcgcagcccaggagcccaaggcggcccggcgggcgacggacggccggacaggacagccaggaaggcaggaacagaccaa

SEQ ID NO: 57029 - RNA, 79 nt, Homo sapiens
cggacagcggggacgaggcggacgacgaccggccaacaaggaaacaacggaagggaacaaaagcaacgaaacaggcccc

SEQ ID NO: 57030 - RNA, 77 nt, Homo sapiens
caggacaagaagcgccaggcaaaaggaagaccggggagaaaagcgcaagacccaagaggacacacccgggcacgcca

SEQ ID NO: 57031 - RNA, 78 nt, Homo sapiens
ccaagcaaaagaacgaccagacagagcagaacccaggaaggaaaagaggccaagcgaggaaagcacgcaaacgccgag

SEQ ID NO: 57032 - RNA, 93 nt, Homo sapiens
cgaggaccagaaaccgccccagcgaggaagaggacaggagcggagaggacacacagcaacgaagcaggggaggagggaagaccggacagcgag

SEQ ID NO: 57033 - RNA, 102 nt, Homo sapiens
cacgggagaaggggggccccacgccagaaaagcgaggcaccccagccagcgaacgaagagagcgagcggaaaacggccgaaggcaaagcgaccagaccggac

SEQ ID NO: 57034 - RNA, 72 nt, Homo sapiens
gccgcgggcagggggagagcggaaccgcacgggccggcacagaaacaccaacacacacccagaaggccacaa

SEQ ID NO: 57035 - RNA, 83 nt, Homo sapiens
gccggacccagcaccggcccggcccgcgaacgcgagcacgcgcggaaacccaaagcccggcgaaaaacagccaagagaaagga

SEQ ID NO: 57036 - RNA, 76 nt, Homo sapiens
agccaaaaggacgccccaggcagcagcagagccacccgcagaaaaagcggggaaggggggcaaaaaaaagaagcaa

SEQ ID NO: 57037 - RNA, 83 nt, Homo sapiens
cggcggcgggcgccgagggacgccgaggcccgggcgggggcggcccggggccaggacaaaccggcgaccacacacggggacga

SEQ ID NO: 57038 - RNA, 71 nt, Homo sapiens
gacgaacaagccccaaacgaaagaaccagcaagcaaaggcaaaccccgaaggggcccaaccagcgcagcaa

SEQ ID NO: 57039 - RNA, 76 nt, Homo sapiens
acagagggggacagcgaaacaaacaggaccgcccgcaccaggaggagcagggccacaggccaaagcccaaacccca

SEQ ID NO: 57040 - RNA, 75 nt, Homo sapiens
agaaaaccggagaccagggcaacccagacccaccaaaggacaggagaaaagaaagcaaccagccgagacaagcag

SEQ ID NO: 57041 - RNA, 80 nt, Homo sapiens
gcgcggcggggccgcagcagcagagccgcgcagccaggccccaacaagcccccagaaagaccagagaccggcgacggggg

SEQ ID NO: 57042 - RNA, 73 nt, Homo sapiens
agggagaccggggcacggacgcacgccacccgcgaccagcccgccgacacagccaccaagaaggcacaagcag

SEQ ID NO: 57043 - RNA, 75 nt, Homo sapiens
gaggagcagaaggagcaaaaggcggacaggcaggaacccaaggaccgcaaagaaaacccagagaacaccacccga

SEQ ID NO: 57044 - RNA, 78 nt, Homo sapiens
ggcccacacagccacaagccggacaagcacacacaaaccacaagaaggggcgcgacggagagagccgggaggagagcc

SEQ ID NO: 57045 - RNA, 61 nt, Homo sapiens
cgccgcccggcgccagggagaggaaacagcagggacggaaaggggaaaccgcacgcaacag

SEQ ID NO: 57046 - RNA, 40 nt, Homo sapiens
cagccagcggcgccccgaacgggcacccagagaagcggag

SEQ ID NO: 57047 - RNA, 83 nt, Homo sapiens
accccaggcacacacgcaggcgcccaagaggcccagagacagcgaaacacgaaggaccaaaaaggcacaccaagcccagggac

SEQ ID NO: 57048 - RNA, 73 nt, Homo sapiens
ggacaccggaagcgggaaaggagcaccagaccgcaacaggagcagacggagaaagagaccacgagcccgaaca

SEQ ID NO: 57049 - RNA, 80 nt, Homo sapiens
agacaacaacggggagcggaagagcacccacagacagccagggagccaacaaggagaaggagccaaggccgacaaaaccg

SEQ ID NO: 57050 - RNA, 65 nt, Homo sapiens
agaagaacagccggccaaagacccaaagccaaacccagcagccaggaagacaacgaggggcacgc

SEQ ID NO: 57051 - RNA, 62 nt, Homo sapiens
ccgcgcggccccgagggccccaagacaagcagaccggaagaccgacggaagaccacaccccg

SEQ ID NO: 57052 - RNA, 75 nt, Homo sapiens
gaccgaacagcgcgagggaagaaaagaggagaacaaagaaaacgcgaggacagagccacggaaccgcggaaggag

SEQ ID NO: 57053 - RNA, 76 nt, Homo sapiens
ggccccccccacagccgcaggacccacggagccgccccccagcagggccagcaggagcagaaacccagaggagccg

SEQ ID NO: 57054 - RNA, 73 nt, Homo sapiens
agggaccacaccgacagcggacgccccagcacccccagcgggcaggccaaagaccgaccaagagcacagagga

SEQ ID NO: 57055 - RNA, 72 nt, Homo sapiens
ccaccgcggcgcggcagcgcgcccgagggaagcccagaggcacggggcagaacaccaacagagggccgaccg

SEQ ID NO: 57056 - RNA, 75 nt, Homo sapiens
gcacggcaacaggacgggccaccacgcaaagagcaaagaaacaggccacagggcagggagcaggaacaccgagcc

SEQ ID NO: 57057 - RNA, 59 nt, Homo sapiens
gaggagaaggagcgaaagcgcgccgggccgcccgcggcagagcagcagagcgccgccca

SEQ ID NO: 57058 - RNA, 63 nt, Homo sapiens
ggggaccagagacgaagaccacgccggccgcgaccaaggaagcaaggacagagcacgccaaag

SEQ ID NO: 57059 - RNA, 81 nt, Homo sapiens
cgccaccacgaccgaaagaaggagggccccggagcagccacaccaccgaggccccacccagcacgagcacagccccaccag

SEQ ID NO: 57060 - RNA, 47 nt, Homo sapiens
caaacaagaaaagccaacgccggggagacaaagacacgcgagacaga

SEQ ID NO: 57061 - RNA, 71 nt, Homo sapiens
ccccccccaacaggcggcccaggcaaccaaacgggcgaacaaaaccagccacggagggcaggccgcaacgg

SEQ ID NO: 57062 - RNA, 77 nt, Homo sapiens
gaaacccagaggacggagaccaggagcccaccgggaggaaccagagacacgcgagacccgcggaaggagccagcaag

SEQ ID NO: 57063 - RNA, 68 nt, Homo sapiens
gacgcgggaaagccgacaacacaggaccgagaacaagaaaagcaggcaaggcgagaaacccccgccaa

SEQ ID NO: 57064 - RNA, 72 nt, Homo sapiens
gaccccaaaagagacggacgcacaggaaggaaaaagaacccaacaggacaccaggcccacaaagcacaagcc

SEQ ID NO: 57065 - RNA, 87 nt, Homo sapiens
caaggcaggagaggagccagcccccaccccacaggaaggagaacgaccgccagaagagaagaggaaggagaaaaacaaaaaagagga

SEQ ID NO: 57066 - RNA, 71 nt, Homo sapiens
gagcgccacaaccccagggcaagggacaaggagaccccagccgcccccacgcggacgcccgcgccggccac

SEQ ID NO: 57067 - RNA, 81 nt, Homo sapiens
ccacaagggaacgggcggccccggagagagagccgcgcacgcacagacaagggcaggacccgaggcgccagcagcagcaag

SEQ ID NO: 57068 - RNA, 80 nt, Homo sapiens
ggcggcaagcggagaccccgcgagcggcgcgagcggcagcaggacaccccgggccaaccaaccaaacgaagacagaaacc

SEQ ID NO: 57069 - RNA, 42 nt, Homo sapiens
gggggggaaaaggcgccgaggcccaggaaaccagagaaaaac

SEQ ID NO: 57070 - RNA, 71 nt, Homo sapiens
ggagggcggagccaggggggggccggagcgccaaggggcgaagaccaagacacacagccagcgaccgaaca

SEQ ID NO: 57071 - RNA, 77 nt, Homo sapiens
ccacaacggcccaagcaccgccgggcccgcccgcacgaaaccggccggcagaaggcccccagcacaagggggcacca

SEQ ID NO: 57072 - RNA, 67 nt, Homo sapiens
ccagccacccagagggagcaggcagccagaaaaaacagaaccgaccagcacccgacgccacgggccc

SEQ ID NO: 57073 - RNA, 59 nt, Homo sapiens
ggccacccggagaagggcgagcgcgagaggcacagggccaggcacacaacgagaccacg

SEQ ID NO: 57074 - RNA, 59 nt, Homo sapiens
acgaggaggagaaccagcagaggggaaaggacaaggaaggagcggggaacgacacagca

SEQ ID NO: 57075 - RNA, 71 nt, Homo sapiens
gagaaggccagggaagagcccgcaaaccaccaccaacggcaagaaaggaacagcgcgaagaaagagaccaa

SEQ ID NO: 57076 - RNA, 58 nt, Homo sapiens
gcccggcgcccagcccaccagcacggcagcaaagcccacagggcgccccacggaggcc

SEQ ID NO: 57077 - RNA, 74 nt, Homo sapiens
agcagcccggggcaaccggagccccccaggaggagaaggacagcacccagacccaaagcgcagaacccaggagc

SEQ ID NO: 57078 - RNA, 86 nt, Homo sapiens
gagagggaggcgggaggagcggcagccgcgaggaggcgcgggagggcgagaacgaccccgagacgggagcaggaagaagagagcca

SEQ ID NO: 57079 - RNA, 76 nt, Homo sapiens
gggccgaaccgggagcgaggaaccagaacgaaaagcgccagaaaggccccggccccaacaggcccgcgcccagagc

SEQ ID NO: 57080 - RNA, 67 nt, Homo sapiens
aaacaacaccaagaacaggccggaaaaacagaagaaagcaaggcaaaccagggggccacacagagcg

SEQ ID NO: 57081 - RNA, 79 nt, Homo sapiens
agccacagaagaaagcgcagcaggcacacgcagccagaagcaacaagagaagcagaaaaacagacacgcaagagaaaca

SEQ ID NO: 57082 - RNA, 82 nt, Homo sapiens
cagcacacccagcagcacaccgcacagaccaggcaccaccaaacaagcaagggaccggaggggcgccggcacagggcgcaaa

SEQ ID NO: 57083 - RNA, 55 nt, Homo sapiens
gggaccagccaagacaagagagcggcgaggccaacaggcagaacgcagcaccagc

SEQ ID NO: 57084 - RNA, 86 nt, Homo sapiens
cgggccggagcagccgcgggcgcccgaggggccgagcgagaaaggggagcaagaagaaagagcagggaggagggagcgacaggaag

SEQ ID NO: 57085 - RNA, 79 nt, Homo sapiens
cagagggggaaagccaaggaaaaacggagagccacaaaaaaggaagcgaaagccccaaagccggcacgccagaccacca

SEQ ID NO: 57086 - RNA, 36 nt, Homo sapiens
ggcccagaccaacggcgccacacagaaacacggagg

SEQ ID NO: 57087 - RNA, 89 nt, Homo sapiens
cagccggcggcgaaggcagcgccgacggcagccggcaccgacggcggaccgacccgagccgccagagacccagagcagcagcgaagaga

SEQ ID NO: 57088 - RNA, 84 nt, Homo sapiens
gccaggcagaaggccccccgaacagcaggcgccaccagcccggagaggacacccgcccgggagccaggccgcaccccagaagcc

SEQ ID NO: 57089 - RNA, 73 nt, Homo sapiens
gcaacggcaccggggaaagaggcaaaggcagagggccccaagagacgacagaaaggcagagaaggaaaaaagg

SEQ ID NO: 57090 - RNA, 108 nt, Homo sapiens
aggagggccaagaggcggaagcggaggagcccaggagacccggggacagcacgcccaggccccgccagaggacaaaacccagccggcacaaaccaggaaaggaagccg

SEQ ID NO: 57091 - RNA, 78 nt, Homo sapiens
gaccccccgcggcccgggggcacgaacggaggcggcggccgcgggagggcccggcgcaggggcaaagaaaaaggagag

SEQ ID NO: 57092 - RNA, 70 nt, Homo sapiens
gaaccccgaagacgggagaaaggagaacgggcgacggagccgggaaaggacaagggcccaggggcacccg

SEQ ID NO: 57093 - RNA, 77 nt, Homo sapiens
agccgcccgcccagaacggcggaccggagggccacccgcacggcagcaagaggaaagccgccggggccaggggggcc

SEQ ID NO: 57094 - RNA, 69 nt, Homo sapiens
ccgaacccaacaacccagcacagccacccggccaagccggaaaggaagaccaacaccaccaaacccccc

SEQ ID NO: 57095 - RNA, 70 nt, Homo sapiens
cggaacgggacgcagaaagggcagacacaggcacaccaagggagggggccgaagcagcggcagggcaacg

SEQ ID NO: 57096 - RNA, 74 nt, Homo sapiens
acggaacgccacacagaggaaagcacaaaggaagacgaaccggagaagagcaaaagcagccaacacaacgaaga

SEQ ID NO: 57097 - RNA, 71 nt, Homo sapiens
caaagggcggccaagggcagcgcccgccagggccgagaggacgaaaaaagggccggcccgaaaggggacca

SEQ ID NO: 57098 - RNA, 93 nt, Homo sapiens
gggagcacagccggacccaggccccccaggcggccagaggggacaccaaaaggcgaagacgcccaggccgccaggcaccggaacacgaccccg

SEQ ID NO: 57099 - RNA, 40 nt, Homo sapiens
ggagcccaggcggcagcgccaggggacagcccagaccaaa

SEQ ID NO: 57100 - RNA, 71 nt, Homo sapiens
cccagggggccccgacacgcccggggagcccagcacagcaggggaggacagcagagagccaagacggggcg

SEQ ID NO: 57101 - RNA, 109 nt, Homo sapiens
cagacagccacgcagacggaaacaaggcaacagaaagagcaacagcagggcaacagggcggagaacggaaaagcaccaggaagcagagaggaccgcagaagggaaggag

SEQ ID NO: 57102 - RNA, 79 nt, Homo sapiens
agcagcgcaagcgcacggagaaggcgagccaggacgcccgccggagcagcagcgcccacgccccacccaggcgggcccc

SEQ ID NO: 57103 - RNA, 57 nt, Homo sapiens
caaacacgccggaaaccccgcccacagcacgagggccgccaagggaaagaagacgag

SEQ ID NO: 57104 - RNA, 61 nt, Homo sapiens
ccgagcggacccggaccggggaagcagaggacacccccaaacacggccccacgcccggccc

SEQ ID NO: 57105 - RNA, 78 nt, Homo sapiens
gaccaacaaggaaacaacaggaacacggcccaagcacggagaggcaccgccccagcccgccgcacccgagagagcccg

SEQ ID NO: 57106 - RNA, 53 nt, Homo sapiens
cggcagacgggaccacgaggcaacgccccagagccgagagcgccggaggacca

SEQ ID NO: 57107 - RNA, 64 nt, Homo sapiens
ccaaggaacaggccaagagagccgaacccaccgagccagggaggcgagcggaagaagacagcaa

SEQ ID NO: 57108 - RNA, 76 nt, Homo sapiens
caagggcaacaacgacaccaaggaaaggcgcaccaaggaacacgacagcgccggagcagcccagaaccaggagcag

SEQ ID NO: 57109 - RNA, 75 nt, Homo sapiens
aggaaagaccggaaaaggacccacgaggaagcggccgcggcgaaccccagagccagcgggcagacgaacagcaca

SEQ ID NO: 57110 - RNA, 61 nt, Homo sapiens
aggccaagaccagaaccagcccgggaaagagacagagggaccggcagaacacacaaaagcg

SEQ ID NO: 57111 - RNA, 60 nt, Homo sapiens
aaaagccaaacaaaagaacacaacaaagccccgacaagggaccgggcgggccccgcagga

SEQ ID NO: 57112 - RNA, 79 nt, Homo sapiens
acgcggcgcgagccccgcccccgccgccgcgcacaaccgcacggcagacggcacaggagagggccaaaacgaaggagaa

SEQ ID NO: 57113 - RNA, 58 nt, Homo sapiens
gaaaccagcgagccaacccacacgaccaaggagcacgagcggagaggagcacagagcg

SEQ ID NO: 57114 - RNA, 92 nt, Homo sapiens
ccgccgcgcgcgggagcccagggagcgccgcgcgaccaggaggcggcggcgccgccggcgagggagaaccgaagaacaggaggccagcagag

SEQ ID NO: 57115 - RNA, 78 nt, Homo sapiens
caagaaggaagacagaggaaagcggcacgaagccccagcaagggagaaaaagcagagaccgggaggcagcaacccaga

SEQ ID NO: 57116 - RNA, 80 nt, Homo sapiens
ccagaacacaccccagcggggaagaccaacagacaaccaccaaaggggaaacagaaacaagcagccaaaggcagggaaga

SEQ ID NO: 57117 - RNA, 72 nt, Homo sapiens
cgccaaagcgcgccgccccgggcaaaagaggccgaaaggcgccagccaagaacacaccaagccagcaagaac

SEQ ID NO: 57118 - RNA, 62 nt, Homo sapiens
ggcggagggccgggggaaccgggggagcggcagcagccgggaaggcaaagaagaagcgccca

SEQ ID NO: 57119 - RNA, 40 nt, Homo sapiens
acaaggcccacaggacccgagcagggcggggggaaaagcg

SEQ ID NO: 57120 - RNA, 76 nt, Homo sapiens
gaggcaggagcgagaacagccggccaacaggaagagagaagacagcagcgaacaagaaggggcagcccaccggggg

SEQ ID NO: 57121 - RNA, 72 nt, Homo sapiens
gggagaagagaaagagacgcagcaggccaagagacgaagcccgaacaaccaggcgacaggaaccagagcccg

SEQ ID NO: 57122 - RNA, 74 nt, Homo sapiens
aaggaggacagcaccaaaaaccgcgccgaaaagcgaaaagaaacaagccgcggcaacagcgaccccaagccaga

SEQ ID NO: 57123 - RNA, 81 nt, Homo sapiens
gcccgcgcccgccaggcgacaggggaacagacagaaggagcaggaaccaaagggaccaaagaagccaaccgacacaacagc

SEQ ID NO: 57124 - RNA, 72 nt, Homo sapiens
ccccaggggcagggcgcaccgaggaggggacccagaaagaagcacaaaacaaacgacagcagcagagaaaca

SEQ ID NO: 57125 - RNA, 77 nt, Homo sapiens
caacaaagggagcagcggggaagcgaagaaggggcggaggacaagaacggcgggcgagcaccaccccacagacgaca

SEQ ID NO: 57126 - RNA, 71 nt, Homo sapiens
cgacggacaccccccagagccaagaaagggagggggaaacagccaaggccgaggagagaagaaaaaggcag

SEQ ID NO: 57127 - RNA, 72 nt, Homo sapiens
cacccggccgagacggcggcagcagcggcacagaacagccagcaaagacaagagcagaccagcagccgcagc

SEQ ID NO: 57128 - RNA, 78 nt, Homo sapiens
ccgcgcccgcagcagccacgcagcggcgggcagccgggcaccgcaagacggacccgaccagggccacccgcacggcag

SEQ ID NO: 57129 - RNA, 77 nt, Homo sapiens
gcgggcgcacgggagcccaacacgcggcacgagggccggcccgcgggcagccacaagccaggagcgccgcggcgggc

SEQ ID NO: 57130 - RNA, 74 nt, Homo sapiens
gcccgcagacagaggggcgacgaccgcacaacagaaggggaaacaggacgaaacaacccggaaaacaacaacaa

SEQ ID NO: 57131 - RNA, 63 nt, Homo sapiens
ccggaaggccaaaggcgcgcaaggaggaagggggaccggaccgggcacccaaaggaagcaccc

SEQ ID NO: 57132 - RNA, 70 nt, Homo sapiens
ggaccaagaaccagacgcagaaaacagacacacagcggagacaagcagggccggcaggaggcggggaagc

SEQ ID NO: 57133 - RNA, 69 nt, Homo sapiens
ccgaacaggaaggccccggaaccacagagcggcagcgggaacacggaaggcggggcagaaagaaacagc

SEQ ID NO: 57134 - RNA, 83 nt, Homo sapiens
gagaaggacggacacccgggacgcagcaccagggggcacgcccccggcgcccaggaccgacagcagaggagcgcaagaacgga

SEQ ID NO: 57135 - RNA, 41 nt, Homo sapiens
gagacggcggcagcagcggcacaggagaggcggaaaaaagc

SEQ ID NO: 57136 - RNA, 62 nt, Homo sapiens
ggacccgcccaccgcgcagacaaaaaagcccaagcgcaaaaaaaaggccccaacaaaacaca

SEQ ID NO: 57137 - RNA, 74 nt, Homo sapiens
accgccgcccggcaaacacggaaccacccacagagaagaagaaaaaaagagcacaaaaacacagccacgcacag

SEQ ID NO: 57138 - RNA, 77 nt, Homo sapiens
agccgcgacagacacaccacgcaaaagcgaaagccggacacaccaaacgcagcccagcaaggcggaaggcgaaggca

SEQ ID NO: 57139 - RNA, 69 nt, Homo sapiens
agaaacacacggacaacaaacggcaaagaagaggacccagccaggaaggacacccagcaagagacagga

SEQ ID NO: 57140 - RNA, 77 nt, Homo sapiens
acaagaggcagccagcggacgggacggcgacaggccagaaaggcccaagcgccgggaccagcaggccgcgcccggca

SEQ ID NO: 57141 - RNA, 44 nt, Homo sapiens
cccgcagcgaaggagagcacaggccgcggagcgggacccagaac

SEQ ID NO: 57142 - RNA, 74 nt, Homo sapiens
caccacagagcaaggagagcacgcagcccagcaccaccaggcgggagcaaaacggcaccggcacggaccacccc

SEQ ID NO: 57143 - RNA, 80 nt, Homo sapiens
gccgcaccgcagcgaggccaggaacccggggagaccccgacgggaggccgagacaaagaacgcaaacccaagcggcaaca

SEQ ID NO: 57144 - RNA, 76 nt, Homo sapiens
gacgaccccacccgcgccgcgacccggggaacgcccgcggacggcagggcgcgacaagaagcgcccgcccgacgag

SEQ ID NO: 57145 - RNA, 77 nt, Homo sapiens
aggaacccaagcagggcgaagggaacgcaaggcccccgaccacacgcccgcgcgaggaccagagaagacacacaaca

SEQ ID NO: 57146 - RNA, 75 nt, Homo sapiens
agccaggcagcaggcagccaacacccagaggaggaccagagcacccccaccgccaacaccgaagagaacgggccg

SEQ ID NO: 57147 - RNA, 68 nt, Homo sapiens
cccgaggcgggaacaggaagaagccaagaaggaagggcagcacgagaggaccaaccagaaaagcagca

SEQ ID NO: 57148 - RNA, 49 nt, Homo sapiens
caaagcaccagaccccaccagcaacggcagcccaacacaccggcacccg

SEQ ID NO: 57149 - RNA, 77 nt, Homo sapiens
cggaccgaaggcgcaagagggaggcgcacacacagagaacccccggcccagacagcaagaggcacagaaaacgcaga

SEQ ID NO: 57150 - RNA, 84 nt, Homo sapiens
gacacaagaggagcagaggcgcagagcgaagcagagcagcgccaagaacgagcaggagcgagagaagcccaccagaggcgaggg

SEQ ID NO: 57151 - RNA, 85 nt, Homo sapiens
agaacccagaggcgggaggggccgggaggcagaggggcaggggacagagcgggagccaccagcgccaaagggaagccaggagccc

SEQ ID NO: 57152 - RNA, 58 nt, Homo sapiens
aaagccgcgccagagcgagacagacccggcaggcgaaaggaagacccagccgagcagg

SEQ ID NO: 57153 - RNA, 70 nt, Homo sapiens
acccagccgggcccgggaacgggaccagacacacgcaaggacacgccaaccaaggcaaaccccggagaaa

SEQ ID NO: 57154 - RNA, 77 nt, Homo sapiens
cagaaaccgcgccggagccgcgggccagaccaccgggaaggacagggcagaccgccagcagcacagcaagccacaga

SEQ ID NO: 57155 - RNA, 74 nt, Homo sapiens
caccgaagccggcaaacgcgaagaggaggagaagccaagacaccgcgaaagagagacggggccccacggccagg

SEQ ID NO: 57156 - RNA, 77 nt, Homo sapiens
ccgccccgggcacacaccccgacccgcccccccaggaaacgggaaagggcagagcacagcgcgggaagaagggagcg

SEQ ID NO: 57157 - RNA, 51 nt, Homo sapiens
gagaaaaggccagggcccacgcaaggaccaacccgcccagacggcaaaccc

SEQ ID NO: 57158 - RNA, 91 nt, Homo sapiens
ccaggccagggccgggggacccgaggcgcacgccccgcccggggcaggagccccggccaggaggggccaggagggccccagaaagaagccg

SEQ ID NO: 57159 - RNA, 68 nt, Homo sapiens
aaccggccacgaggagggggcggagaacggaaaagcaccaggaagcagagaggaccgcagaagggaag

SEQ ID NO: 57160 - RNA, 70 nt, Homo sapiens
ggcacaacgcggccggcgcccgcacccaccgagaaccagccaccgacccgcgggaaaaccgccacaaagc

SEQ ID NO: 57161 - RNA, 69 nt, Homo sapiens
agaccaaaaaaggaagaacaaaagaaaaaaaagacccggaagaaagcaggcgggagacaggaaaggaaa

SEQ ID NO: 57162 - RNA, 76 nt, Homo sapiens
cgacaaggagagaagcgcggagccccaaggggcacccacagaaagcgacggcgagccagacacgcgcccgccaccc

SEQ ID NO: 57163 - RNA, 74 nt, Homo sapiens
cagggcccacccccaagagagccgcagccgccagggacgggggccaccggacaggaagcccggggcggcgacgg

SEQ ID NO: 57164 - RNA, 62 nt, Homo sapiens
agccggagggcgggaggaacagacacgcggagacacgagaggcgagggacgacagagcaagc

SEQ ID NO: 57165 - RNA, 91 nt, Homo sapiens
gaaccaccgcacaagagccaagaacaagggccgcgagggaagaggaggagcgcgaagaagaccacagcccaggagcggagaccacggggcc

SEQ ID NO: 57166 - RNA, 70 nt, Homo sapiens
ccaggacggcaggggaccgcacagaggcaagagaagcagccaacaaacgaacgcagaaacgggggaaaag

SEQ ID NO: 57167 - RNA, 80 nt, Homo sapiens
ccacccggcggcggagccacaaccacacagccgcagcagccaggcaagacaggccaacaccgccaccagagaaccacaca

SEQ ID NO: 57168 - RNA, 81 nt, Homo sapiens
ggaagagaggggggcggaagcgaggaagaccaggaccagcgcggaggggcggcggaaggagccaggagaggggcaaaaaca

SEQ ID NO: 57169 - RNA, 50 nt, Homo sapiens
ggccaacgccagggcccacaggacagaggacccagcaggacgaccagcca

SEQ ID NO: 57170 - RNA, 81 nt, Homo sapiens
cgcagcgccaccgcgccgggagcccggcgcgcgcccggcagccgcgggggggccccagcccggccgaacgggcgcacgaca

SEQ ID NO: 57171 - RNA, 72 nt, Homo sapiens
ccccgaagccccccccagccaaagaaaagcggcggggggggcgggccggacccgcacgaggggcggagggaa

SEQ ID NO: 57172 - RNA, 80 nt, Homo sapiens
aacaacaaggggagccgccggacggccccaaccacggagccaggggaaccgcccaccaccaccaccaggaaaacagacaa

SEQ ID NO: 57173 - RNA, 74 nt, Homo sapiens
ggcagaacagcgacacgaacggaagaagcaggaaggcagggagcaagaaacaaaacgaggggacacaagagcgg

SEQ ID NO: 57174 - RNA, 76 nt, Homo sapiens
cgcaggcgagaaaggagagacagggccccacagcaaggaccaaaaggacaagcagggccaaggaaggcaggccccg

SEQ ID NO: 57175 - RNA, 41 nt, Homo sapiens
cagggccgcaggaagacgcaaccgcacccagaccaacacag

SEQ ID NO: 57176 - RNA, 66 nt, Homo sapiens
gaaggacggaaagggcaaaaagggagaagagaagaccagagaaagaacaaccccgcgcacaagaca

SEQ ID NO: 57177 - RNA, 73 nt, Homo sapiens
ggcgcgaggaggaaaggaggacgagagcagcaagcggcaagagccacagagaaacaaccaaggcagggaagaa

SEQ ID NO: 57178 - RNA, 54 nt, Homo sapiens
ggccggccagcgccggaaaccaacaagcgggaaaaccgccacaaagcccccaag

SEQ ID NO: 57179 - RNA, 53 nt, Homo sapiens
ggcgccccaggaaccacggcccgacgccgggaagggcgagcacgggccagccc

SEQ ID NO: 57180 - RNA, 76 nt, Homo sapiens
ccacaggaaacggaccgccagcagccgacagggcagaccgccagcagcacagcaagccacagagagggccggcagg

SEQ ID NO: 57181 - RNA, 73 nt, Homo sapiens
aaagcggaaaaagggagggacaagagcagcaccaagcgcaggagaaggaagccaacaccggagccagaaagcc

SEQ ID NO: 57182 - RNA, 37 nt, Homo sapiens
agccaaacgccaaggcggcagcggaggcagggaggac

SEQ ID NO: 57183 - RNA, 72 nt, Homo sapiens
gcgaaaaaacaggaggacacaagacgccagaagcagcgaaaaagaacacaaaacggcagaaccagcaaaaga

SEQ ID NO: 57184 - RNA, 63 nt, Homo sapiens
gacagggggccgggaaacaggcaagacgggagcaacaggcaacgggaaacaagagaaggagag

SEQ ID NO: 57185 - RNA, 78 nt, Homo sapiens
caggacgacgaggaggagacgaccggccggaaaaccgcaagaccacagcagcaacgaagggggaacagaaaaggcaag

SEQ ID NO: 57186 - RNA, 77 nt, Homo sapiens
caagagagaggagggggcaccgagcaacgagggcaggcgcaggcccaacccagcgagagaagaagcccgcgggcggc

SEQ ID NO: 57187 - RNA, 80 nt, Homo sapiens
cccgagcagaggagcagggagaagagaaagagacgcagacccgggaagaaggaaggccacccggcaaaccacagccggaa

SEQ ID NO: 57188 - RNA, 71 nt, Homo sapiens
ggagaaacgaggagcgcggccaccccccggacccccgcccgagcagaagagcgggggaaagaggacaacag

SEQ ID NO: 57189 - RNA, 72 nt, Homo sapiens
gcgcgcacaaggaccgaccgggcgagcgagagagagcaagcgcagcgccacaaacaggcgaagaaacgggaa

SEQ ID NO: 57190 - RNA, 79 nt, Homo sapiens
aacaaaaggacagaagcaaggacggcaacaccaggagaccaagacacaccaccccagggggggcccaaccaccaggacg

SEQ ID NO: 57191 - RNA, 93 nt, Homo sapiens
cacagggcccgaaccggggcaaccacccgggagaacagaagaggcaggaacgaaccaacgcaggaccaggaaaccaagcgacagacagcggcc

SEQ ID NO: 57192 - RNA, 75 nt, Homo sapiens
gcacaggcccaggcagaccgcagcaaagaagaagggccaagcccggcggcagggaaggaaggcaccaacgcagca

SEQ ID NO: 57193 - RNA, 73 nt, Homo sapiens
cgacgaacacggggacaccaacaggacccgaggggggagaagggaccaggaagacacgggggcaggcagagaa

SEQ ID NO: 57194 - RNA, 78 nt, Homo sapiens
gccccccaccgaggagggaaacacccgaaacagcgcggaaaggaaacccggagaaaaaggcagccccggagacgaaaa

SEQ ID NO: 57195 - RNA, 73 nt, Homo sapiens
cagcggagcccaggcggcagcgccaggcaaagaaaaagggcccgcgcgagcggggaaacagcacaggggagaa

SEQ ID NO: 57196 - RNA, 118 nt, Homo sapiens
gcgggaaccgccacagcaccgaggccgaagggaccacggcccagccagcacgacaccccagacgggccgggcgaccccccacagccaggcggccacccccccacaccgccgccccggg

SEQ ID NO: 57197 - RNA, 69 nt, Homo sapiens
cagagggaacagccaaggcacgcaaaaaaccacgacaagcaacacgacaaaacacccacgaacggacgc

SEQ ID NO: 57198 - RNA, 71 nt, Homo sapiens
gcccggcacaccaccaggggaggaggaaaacacacagacgaaggcaaaagagggggcggcagaggaacggg

SEQ ID NO: 57199 - RNA, 70 nt, Homo sapiens
cgcggcgaggcgcggagagggcggcccagggggccacgcgggagacgagcaaagaacgggacacggagac

SEQ ID NO: 57200 - RNA, 86 nt, Homo sapiens
gacggggacaagaggaggagacggagcacgccaaagggaaacggaaacggccagaagcaggacaaagcagagaacaacccggggac

SEQ ID NO: 57201 - RNA, 54 nt, Homo sapiens
gaagagcgcggccagcaccccaacgggccaaaggcagcgccaacggcaagccgc

SEQ ID NO: 57202 - RNA, 82 nt, Homo sapiens
agagcaaggaaagccagacaccgcaaagaaaggcagaagagaggcaaaaacaaaggaaggaaaggaaaacgaccccgggaac

SEQ ID NO: 57203 - RNA, 79 nt, Homo sapiens
cgaacggagggcgacggagggaggcaccaaccagcggacacacggaaaagggacgggaaaagccgagaaagagaagaag

SEQ ID NO: 57204 - RNA, 70 nt, Homo sapiens
cgcaggaccgcaggcgggcgccgcgcgagccacccagcgagagcccaaaaccaaacgacgcgaccaaagg

SEQ ID NO: 57205 - RNA, 75 nt, Homo sapiens
ccgcagcgggcagcgcaagccagcagaagcagaccccacgagcgaaagggaaaaaacgaaggaggcaggaagagc

SEQ ID NO: 57206 - RNA, 80 nt, Homo sapiens
cagcgaagaaggcccgaggaaaggcaaaagcagaccggaaaacccaccggcaagaccacacccgaggggagcccaggaca

SEQ ID NO: 57207 - RNA, 74 nt, Homo sapiens
aaccggagaaggcagacgacaaaagcccagggaggaacaaccgcagaaccggccgaaaagcacaaacagcaaga

SEQ ID NO: 57208 - RNA, 85 nt, Homo sapiens
caggggggacgggacagagcggcgggacagcccaagggccagcaccgcgcccaggcagagccagaccacgggaggaccagccaca

SEQ ID NO: 57209 - RNA, 77 nt, Homo sapiens
gggaaggagcccggaggggagggaagagacaggaagagggcccagacccaagccagaagagggagaaaaagcagaac

SEQ ID NO: 57210 - RNA, 82 nt, Homo sapiens
ccggcacgcggccacgcagcccgcaaagaacccaacgccccaccagccaggacgcagggcgccggaggcccagggcgggcag

SEQ ID NO: 57211 - RNA, 82 nt, Homo sapiens
cggacacccgagcacagagacgaagaggaccaggagcaaacagaacagagagacgcaggaaaaccgcagacgaagaagcagg

SEQ ID NO: 57212 - RNA, 73 nt, Homo sapiens
cagcccgcacccacccacgacaggacggacccgggaacaccaccccagagcaagcccaaggcacgaccgggac

SEQ ID NO: 57213 - RNA, 79 nt, Homo sapiens
gaggagcagaagagcccaaaaccaacgaaccaaaagcaaccgcgaagagcaggaggcagcacggcaggagacgaggaga

SEQ ID NO: 57214 - RNA, 67 nt, Homo sapiens
gaggacccaggccaacaacccaagggagcgcacgacccacgcggaacgacccaggcgcgcaggggac

SEQ ID NO: 57215 - RNA, 35 nt, Homo sapiens
gcaagagaaggcaccaagagggaaagaaacacgaa

SEQ ID NO: 57216 - RNA, 74 nt, Homo sapiens
ccacagcgccggaaaacccaccaacgcagagggcgcgccagagcccgagcaaaagacaaggccaccgcacccag

SEQ ID NO: 57217 - RNA, 72 nt, Homo sapiens
ccccgccacccaagggcagacgaagcagagagaaaacgaacgaccacgaaccgaaaaaaaaaaacgcagcgc

SEQ ID NO: 57218 - RNA, 56 nt, Homo sapiens
ggaccggggcgggagagcgacccgggccggcagagaacaagaacccaagagacaaa

SEQ ID NO: 57219 - RNA, 76 nt, Homo sapiens
accggaggacgcggagaaccggcacagcccccgggaccagacaacagacgaacgagcacagcacaacgccagaaac

SEQ ID NO: 57220 - RNA, 56 nt, Homo sapiens
gcccagcagcccaggccgagacgaaaggcagaaacccgagaggagcaggagcaacc

SEQ ID NO: 57221 - RNA, 71 nt, Homo sapiens
gaaaagaccgaggcagcaccaccgaccagccacccagacaggcccaggaggcaagagcgagaagagcgcaa

SEQ ID NO: 57222 - RNA, 86 nt, Homo sapiens
ccggcccaaccccgcacacgggccgcggcacccagcaggccaacccgggcccaacagcaacaggccaagccggggaacccagcccg

SEQ ID NO: 57223 - RNA, 70 nt, Homo sapiens
ggcccaagggaaaagcagcggccgcaagaggggagcccaaaagcacgaagcgccagaggacaccgcggcc

SEQ ID NO: 57224 - RNA, 72 nt, Homo sapiens
caaaagcgcagacaacggagccggaaacggaggagaaacacagacagccgccaggaagcaacgcagcgcgga

SEQ ID NO: 57225 - RNA, 72 nt, Homo sapiens
acgcagggcgcccccgggcaggacccgaggcgccagcagcagcaagaccgggggaccaggcgaacgaggcag

SEQ ID NO: 57226 - RNA, 71 nt, Homo sapiens
cgagcggggcgcggcgccccccccgcgggaagaacgggcccgccggcccggagaacagccagggcaggacg

SEQ ID NO: 57227 - RNA, 78 nt, Homo sapiens
acggaagcgcagggagaaggaagaggggaaaaggggggccacacaccagaagagggcccgagcgggggcaaaggccga

SEQ ID NO: 57228 - RNA, 55 nt, Homo sapiens
aaagggggccagcaacccagacgcccacaggacaagaggcagcgccacaggcccg

SEQ ID NO: 57229 - RNA, 72 nt, Homo sapiens
gggccccgcgccaggacacggggcccaggcagcagacgacaggacggcagagccccaagaaagcgcaaccga

SEQ ID NO: 57230 - RNA, 55 nt, Homo sapiens
gccacgggaggaggggagcagcagaagcaagggaacaagagccaacaaggcccca

SEQ ID NO: 57231 - RNA, 80 nt, Homo sapiens
agccaggcagacgccaccagacacaggccagcgcggagcgggcaggccgaggcggaccaccacccgcaccagggacccgg

SEQ ID NO: 57232 - RNA, 51 nt, Homo sapiens
cggcaagagagccggccaggacacacaggggaggcaagcaggggggcaaag

SEQ ID NO: 57233 - RNA, 77 nt, Homo sapiens
agccgaggcagcagcccgcagccacagcaacaagaaacagaagaaaagaagagaagaaacacgcagcagcagaagcg

SEQ ID NO: 57234 - RNA, 76 nt, Homo sapiens
gagggacgcaggcgcaggccagaccaggcccgcaagccaaggaacaagaacggaaaacgccggccgccaccagaaa

SEQ ID NO: 57235 - RNA, 76 nt, Homo sapiens
ccgcaccgccgccacgccacacccgcaacccgggcccgcgcacaagaacgaggcaccgggaagagccagaccggcc

SEQ ID NO: 57236 - RNA, 71 nt, Homo sapiens
agagcaacaagccagcccgggaccgagagccaaacgagcaagagaagacagagagagggaggaaggacaag

SEQ ID NO: 57237 - RNA, 69 nt, Homo sapiens
caacgaaggcaaaccaacccagcacaaacccgaaaaacgacacaaacaaacaaggcagcccaggacccg

SEQ ID NO: 57238 - RNA, 79 nt, Homo sapiens
agcagagcgccagcagaacgggggcagcagcgaggacccccccggccccagcagccggcaaacacaggaggagcagggc

SEQ ID NO: 57239 - RNA, 43 nt, Homo sapiens
cggcgccgggcccgcggggaaagaacgggaacaccacacgcca

SEQ ID NO: 57240 - RNA, 77 nt, Homo sapiens
gagcggagccggcgggcggggaacccaggccccgccgaggcggccaggaaacaaaaagccaacggaaaaagaaacgg

SEQ ID NO: 57241 - RNA, 85 nt, Homo sapiens
gagaagacagccaccaagaccacaggacaagaacggcgcggaacggagacaagagcgggaggcgggagaggagagagaaggagga

SEQ ID NO: 57242 - RNA, 39 nt, Homo sapiens
ggagcccccccaccacccccgaagccaccgcaagcggca

SEQ ID NO: 57243 - RNA, 74 nt, Homo sapiens
ggagcagccagaaagcggcacgaacagagccgggagcaagaagaacacccagaggaccgaagacccccccgagc

SEQ ID NO: 57244 - RNA, 82 nt, Homo sapiens
cagaacccgggaggggaaccagcaccgcagcaaccacccagaaacccccccagaaagcaaaccccacgagaacaaagcacgg

SEQ ID NO: 57245 - RNA, 76 nt, Homo sapiens
gccagcccgacccacacacccccgagcaagcaggccaacaccggacagagcgggagccaccagcgccaaagggaag

SEQ ID NO: 57246 - RNA, 82 nt, Homo sapiens
caccgcggccaccgcaggcacaggccgaacaggcaaagcaaagagaaggagaaggaaaaccagaaaagaaacaaacgcagaa

SEQ ID NO: 57247 - RNA, 54 nt, Homo sapiens
caccgccgcagacccccaagcagcagcggcggagaaaccaccacaaacacgagg

SEQ ID NO: 57248 - RNA, 78 nt, Homo sapiens
caaggacgcacacagcaacacgacggagaccgcggagcacacagaagccgcgcagacacaccacggcccgagcccagg

SEQ ID NO: 57249 - RNA, 76 nt, Homo sapiens
agcaggagaaagcaaaggcgccgaagcgcacgaccccgacacccccaagccggagcgaagaacaccacagggacgc

SEQ ID NO: 57250 - RNA, 97 nt, Homo sapiens
gaaggcagcccggagggcacagaacaacagaagaggagagaggaacccgaagaagaaaggacgacagccagagagcgccacgcccagagcagaggac

SEQ ID NO: 57251 - RNA, 53 nt, Homo sapiens
gcagcgccgcgcgggcggcagaagcccggcacaggggcgggggcacccccccc

SEQ ID NO: 57252 - RNA, 72 nt, Homo sapiens
acaccacaagccgacaaggggcggaggaagggaggagacccgaccccagaagacgaggagcgccaggaaaga

SEQ ID NO: 57253 - RNA, 79 nt, Homo sapiens
cggacggccaggagaacaaggcacacagagacagacaaagcagccgcacagcgccgaggcccagagagaccccagaagg

SEQ ID NO: 57254 - RNA, 77 nt, Homo sapiens
cgcgcaagagaagccacggggaaagggaaaacgaaaagcccacccacaaaaggggggggaccagagacacccgaccc

SEQ ID NO: 57255 - RNA, 72 nt, Homo sapiens
caaaccggcggagccacaggaccacgcaacaacgggaagggaggccaacgaagggagaggaagagaaggagc

SEQ ID NO: 57256 - RNA, 82 nt, Homo sapiens
gaaggcgggagacgagaagccgaaaagcgcagcgagcggagccgccggaggaccaaagacacacccaagccggccccgggac

SEQ ID NO: 57257 - RNA, 81 nt, Homo sapiens
gaggaacacaccccaaaacggcccacggaagcagagcaagccaccaggccaaggcaagggcccgccaagaagcgggggcga

SEQ ID NO: 57258 - RNA, 83 nt, Homo sapiens
cgaccggggagcaagcgaggccacaccccccgaaagaggacccaagaaaagacgacagaaaaaagagcaacgagaagagacac

SEQ ID NO: 57259 - RNA, 84 nt, Homo sapiens
ggacccccaggagggcggcgagggcccgagaagcagcaccgaggcgccagggcccgggggagccagcgccgaggagcccagcgg

SEQ ID NO: 57260 - RNA, 37 nt, Homo sapiens
gagagccgcacacgagacccacaaaccggaggacacc

SEQ ID NO: 57261 - RNA, 61 nt, Homo sapiens
gggaagcagagcgcacaaagggaaaggacaggacacagaacagagaagaagcagacgagac

SEQ ID NO: 57262 - RNA, 83 nt, Homo sapiens
agaagagccaggaacgaaagccaggaacaaccacccggcccaagacgcgaccggaaaggagagagagacagaaccacagacaa

SEQ ID NO: 57263 - RNA, 77 nt, Homo sapiens
aaagaaggagcggaaaaccaggaacggccagggaccgaaaagacgcggccccaaaggaaacacccgaagaacacagc

SEQ ID NO: 57264 - RNA, 37 nt, Homo sapiens
cggaacaagaagacagacaccagcccccggacaaccc

SEQ ID NO: 57265 - RNA, 80 nt, Homo sapiens
cacagcgcggaagccccgaggcagccccgcggaggagcagaagaacaccggcagagagagagacacaccagacgagaaag

SEQ ID NO: 57266 - RNA, 54 nt, Homo sapiens
gaaaacagaaaccagaacaacaggagaacccagaaccaacgacaaacgcagaac

SEQ ID NO: 57267 - RNA, 75 nt, Homo sapiens
gaaacaagagcaccacagcacaggaaacagacaaagcagaggacggagggggaagaccaagacacagagacaaga

SEQ ID NO: 57268 - RNA, 124 nt, Homo sapiens
gcccgaccagggcagaacccagcgcccccccagaacacccagccacggaaccaggagcgcagggaccagaagggcagcaagcccgccagggccacccgcagccaagggccagagaccaggaaag

SEQ ID NO: 57269 - RNA, 85 nt, Homo sapiens
cgacccccgaacccccagcccaaacccggaaacccagcggcccagccggagcccacgcaggagacgggaggagcgacaacggagc

SEQ ID NO: 57270 - RNA, 83 nt, Homo sapiens
cgaagacaaaccacaaaccaggggagaaaccaggacacagggcgaagacggggggacacgcggaggaggggccgcgaaccgcc

SEQ ID NO: 57271 - RNA, 56 nt, Homo sapiens
gagcggccccccgagacggaggagagggccgggccaggcgcagagagggacacgag

SEQ ID NO: 57272 - RNA, 44 nt, Homo sapiens
agaccaagagaaaaggacccggcagcagggcgacagcaagaagc

SEQ ID NO: 57273 - RNA, 70 nt, Homo sapiens
ggaacgggcacgaagcggggaccagaaccgaaagggagaaacggccccaggaagaagcgcagccaagaag

SEQ ID NO: 57274 - RNA, 73 nt, Homo sapiens
aaggaaccacccaggaaacagcgcaagccagccagcagacccgaaggcagacacaacgccgaggaaaacaaag

SEQ ID NO: 57275 - RNA, 79 nt, Homo sapiens
ggcccccggcccggaccagccggcgggccggaccccccgcagccggggacgcagacgaaggcacggaaggacgagcgca

SEQ ID NO: 57276 - RNA, 95 nt, Homo sapiens
ccgagaccggaccgagagcggaccgagagcgcgaaacgcacgagaaggaaaacaccgaaccgacgaaagaggacgggaaagaaaagaaagagaag

SEQ ID NO: 57277 - RNA, 74 nt, Homo sapiens
acaccacaggagagccggaaccccggcccgggcagaaaccaaacgcccaaaagcaggcacaggacaccggggga

SEQ ID NO: 57278 - RNA, 78 nt, Homo sapiens
cacagaggaacaaagaagcgcagcaaaggaagaaagccaaagagccagaacggaagcagaacaccggaaagaaaacag

SEQ ID NO: 57279 - RNA, 74 nt, Homo sapiens
cggagccgagcccgggaaggcggaggggagagacaggaggaggaaacgcggaggccgcagccggggcgccccgc

SEQ ID NO: 57280 - RNA, 84 nt, Homo sapiens
cccggcagaaccggaaggccagagccaggacaaaaccaggcagaaccaacacgaacccaagcacaaacaagaaaacgagcaggc

SEQ ID NO: 57281 - RNA, 71 nt, Homo sapiens
gggcgagacaacagacaggaaggcagcaaacgacagagacaaaaccgacaagccggacggaaggcaaccgc

SEQ ID NO: 57282 - RNA, 65 nt, Homo sapiens
gaaagggaagggaaagaggaggacgccgccagccaccggcgcgaagccagaccagaccagcaggg

SEQ ID NO: 57283 - RNA, 72 nt, Homo sapiens
gccgaaccacagcagcgcagcaagaagggccggagagcgcaggacaggaccgacggaacacgaagaaagaac

SEQ ID NO: 57284 - RNA, 79 nt, Homo sapiens
ccgcccgagggcaaaagccagagccggagagggagaaaaggggggccccgaagccacgaggaagccacacaccggggca

SEQ ID NO: 57285 - RNA, 72 nt, Homo sapiens
ccgacgaacacggggacaccaacaggacccggagaggagccaagcccaacgggacgggaaaacggccacagc

SEQ ID NO: 57286 - RNA, 58 nt, Homo sapiens
ggaggagggcgcggaggagaggagcgagcccagagaaacaggcaggccagaaaggagc

SEQ ID NO: 57287 - RNA, 75 nt, Homo sapiens
aaccgaaaaaacaagaaggacacaggagaagaaaggagaaacagagggagaacaaggaaacccaccagagaaggc

SEQ ID NO: 57288 - RNA, 82 nt, Homo sapiens
aagggccgaaagcagaagaaaagggacgcaagaaacccaggacgagaacagcaacaggagccaagcagcaccggcgggggcc

SEQ ID NO: 57289 - RNA, 73 nt, Homo sapiens
aaaggcaaaacccacgacaagaaggcaccacgcgagagcgggaggaagcggccaccggaaagaccaggcaaaa

SEQ ID NO: 57290 - RNA, 78 nt, Homo sapiens
ggagaagcacggcagacagggcaaagaaaagggacgggaccaacggggaaccccgggggaaaaccaaaagaggccgaa

SEQ ID NO: 57291 - RNA, 89 nt, Homo sapiens
ggaagcccacgagagaagagcaaaggagacgcaccaccgagagccggagggcggcaccccaagaagaggaaggacaggggggggcaacg

SEQ ID NO: 57292 - RNA, 80 nt, Homo sapiens
gcagcgggccgcgccgcgcccagccgagagcgccagaaagagcaaaacacagagacgcggccaacagaaggaaccaagga

SEQ ID NO: 57293 - RNA, 70 nt, Homo sapiens
cacacaccacgcgcgcagcacaagccagaaacccggcagaaaggaagccagaggccccaaagccggggaa

SEQ ID NO: 57294 - RNA, 59 nt, Homo sapiens
cacagacccacagcgaaagcaacaggccaaaaagagagaaaaaccagaaagaaaacaga

SEQ ID NO: 57295 - RNA, 78 nt, Homo sapiens
gaacgcagaggcccacagcaagggagggacccaccgagaaccaccgaaggagacacacaagcacaacaccaccccacc

SEQ ID NO: 57296 - RNA, 79 nt, Homo sapiens
gcgcccaagggacgcccgagccccaaggagccgcggcgcggcagcaggggacagcggagaggcagcgcacagcccagcg

SEQ ID NO: 57297 - RNA, 33 nt, Homo sapiens
cgagcccccaggccgagaaaaggaacaggaagc

SEQ ID NO: 57298 - RNA, 82 nt, Homo sapiens
ccgcgcgcgcaggcgcccagcgcgaagggaccaggccgccagccacggagccgagagggccccacggccacgcagaggagac

SEQ ID NO: 57299 - RNA, 66 nt, Homo sapiens
aacaggggaaaacaccaggcgggggacgccgcccggaggcgaaaggcaaagcgcaaaacggccaga

SEQ ID NO: 57300 - RNA, 41 nt, Homo sapiens
cccagagggcccggccaaggccccgggaccaaggacacgca

SEQ ID NO: 57301 - RNA, 59 nt, Homo sapiens
agacccaaggcgcaagaaaaggagccggaaacggacaaacagaaaagcaccgagcagaa

SEQ ID NO: 57302 - RNA, 74 nt, Homo sapiens
aaagccaaggaaaaacggagagccacaaaaaaggaagcgaaacggaaggaacacggaagccccaggaccccagg

SEQ ID NO: 57303 - RNA, 77 nt, Homo sapiens
gaggcagccaagccgggccgcccgcggcaacaacccgaagagagacggagccgggcacggcaagaccaaccgggccc

SEQ ID NO: 57304 - RNA, 57 nt, Homo sapiens
gccgcgccgcgccgcgccgcaccccgagcgaccggcggagagagcagggacgccaag

SEQ ID NO: 57305 - RNA, 83 nt, Homo sapiens
cggaccggcgccccggcgcgaagaggcggaccggacggccgaggccgggcccgggaggagcaggggcagaggggagaacccag

SEQ ID NO: 57306 - RNA, 72 nt, Homo sapiens
acaaccccgagagggcccggggcgggaagcgacccagcaaaaagccagcccggccacccgcagaacaagacc

SEQ ID NO: 57307 - RNA, 80 nt, Homo sapiens
ccaaaagcaggaccaaaagcggagaaccaggaggaacacggaggacccaaaccgaacaaggcaccaagaagcacagcagg

SEQ ID NO: 57308 - RNA, 81 nt, Homo sapiens
aacgggaaaccgaacaaggagaggaaggggaaaggaaggacagaaaacgggccccagacacaagccccaccaagaggacac

SEQ ID NO: 57309 - RNA, 75 nt, Homo sapiens
ccagcaggaccagacgcacagccagcaacacccaacacaaagcggaagaacacagaaacagccagacaacaaacc

SEQ ID NO: 57310 - RNA, 75 nt, Homo sapiens
ccggggacccccgacgccaggcagcgcccccaaacgccaccagccccaccaagacgggacaagcagggagaccgg

SEQ ID NO: 57311 - RNA, 56 nt, Homo sapiens
gcccgcagaccgcagaaggccggagacaccagcagggcaggagggaccccgggcag

SEQ ID NO: 57312 - RNA, 75 nt, Homo sapiens
ccacccggaggccacgaagccacggagggccggcagacgccaaacgaggcagcaacacaacgcagaaacagagag

SEQ ID NO: 57313 - RNA, 71 nt, Homo sapiens
gcacccaaaggagcaacagacagcccccagaacagcaccaggcaccgcccaacagcgccacacgagacaaa

SEQ ID NO: 57314 - RNA, 50 nt, Homo sapiens
caagaaaacaccaaccccacaagggaccacaaaggagcaaacgaagaaga

SEQ ID NO: 57315 - RNA, 72 nt, Homo sapiens
acgaggacagaaggcaaagaacaccggaagaagacccagcaaaaccaggcaccccgggcccgccagagacaa

SEQ ID NO: 57316 - RNA, 73 nt, Homo sapiens
cggcgccagaggcccggacgacagcccccagggcggagaacggaaaagcaccaggaagcagagaggaccgcag

SEQ ID NO: 57317 - RNA, 60 nt, Homo sapiens
cgcccgccgcaggccacccgggaacggaggaggggacacgagacagggacaggggcggag

SEQ ID NO: 57318 - RNA, 69 nt, Homo sapiens
ccaggacgaaaaagacaaagagccacccccagcaggacggcgggcaaggaacccacaaggcgcgccagg

SEQ ID NO: 57319 - RNA, 83 nt, Homo sapiens
cgaacagaacaagaaccaaagaaaacaaaaggggacaggcccagagggaggcacaacagcgaggacaccaccgagcccccacc

SEQ ID NO: 57320 - RNA, 75 nt, Homo sapiens
gcggccacagcgcagagggccgggcgagacaccaggacaccagcaggaaaacacgggccccagaaacaaggaaag

SEQ ID NO: 57321 - RNA, 83 nt, Homo sapiens
cgaacgcacaacgcggcgccgcagccccggcgaagcgggcgccccagcccagagagccgccaagagcccgagagcgcggaagc

SEQ ID NO: 57322 - RNA, 64 nt, Homo sapiens
ccaacaacggcgccaagagcccaccgggggggaccggaaggacggagaacggaccgaagaagcc

SEQ ID NO: 57323 - RNA, 84 nt, Homo sapiens
ggacccaaggcggagcaggccaaaggaagaaggcgggacgcagagaccggcagcgacggaggacgggcgcggccgacggcgggc

SEQ ID NO: 57324 - RNA, 77 nt, Homo sapiens
acacagcggcgcgaagcaccacgcggcacggaacagcaggaccgcagcagcgcgggcccggagacaggcacaaaaga

SEQ ID NO: 57325 - RNA, 74 nt, Homo sapiens
ggggaaaacccccaaaggagcaaccgacgccgccaagccgccaagacacggcaagggaggaagaagggcgccga

SEQ ID NO: 57326 - RNA, 60 nt, Homo sapiens
cgggacccccagcacaggcagcaggccgggagagaaacggaacagccccaagccggaaac

SEQ ID NO: 57327 - RNA, 78 nt, Homo sapiens
caccggaaggccaccccgcaggcaggccagcagacagcaggccccgaaacaacacggaagcccccaccaagccggaga

SEQ ID NO: 57328 - RNA, 58 nt, Homo sapiens
cgcagggcgcccccgaacggcaacgaaaagagacacgacgcaaacccccaagagaaac

SEQ ID NO: 57329 - RNA, 86 nt, Homo sapiens
aaggcggcgcggggagccagaagcggcaccacacgccaaacgccgaacccccaagacaagagcagaccgcaggaggaggcggaccc

SEQ ID NO: 57330 - RNA, 53 nt, Homo sapiens
gcacccgagccgcaagggagagagaaacaagaaaccggacaaacggagcccac

SEQ ID NO: 57331 - RNA, 73 nt, Homo sapiens
aagaccagcgaacgaaaaggaaagaaaacgcagcgagacaacaggaaaaggaccaggcggaggcggggcggac

SEQ ID NO: 57332 - RNA, 118 nt, Homo sapiens
gcccggaaaccagccccaaaaaaccacgaaggaaaaaggggcgagagagagaccagacagcgggacgagaagaagccaccgggcaccggccgagggcggagcagcgcaggagcaaacc

SEQ ID NO: 57333 - RNA, 81 nt, Homo sapiens
acagaggcccagagcccgggacaagaaagaccgcaaggggaagggacaaggggagcagacacccgcagcaacaagacccgg

SEQ ID NO: 57334 - RNA, 69 nt, Homo sapiens
ggcagagccggagcgccgcgccagcgccagcaggcaccaagaaacgaaagccgaaggccgagccacaag

SEQ ID NO: 57335 - RNA, 72 nt, Homo sapiens
caggccaccacagaaacaaaagcaacaaagagggaaccggccgaaccagaccggagcaggggcagcgaacca

SEQ ID NO: 57336 - RNA, 87 nt, Homo sapiens
cggaaggcggcacgcacgaagcagagagaagcgacgccaggcggccaggcaggaggagcggagagaccagcacgcccggaacccgag

SEQ ID NO: 57337 - RNA, 70 nt, Homo sapiens
ggggggcgacgcgccgccgacaggagaggcgccgagaggacaaaccggcgaccacacacggggacgacgg

SEQ ID NO: 57338 - RNA, 68 nt, Homo sapiens
accgggaaagaggagacaaaccccagacgcgccggagggccaggaaagaccacaggggaaacaagaga

SEQ ID NO: 57339 - RNA, 79 nt, Homo sapiens
ggccaggcggaggacagggcggggcagggccagaaggaaagaggcagaaggccagaagggcgaagaagaaggaaaaaag

SEQ ID NO: 57340 - RNA, 91 nt, Homo sapiens
ccgacccgaagagccggacccggaacagcaagaacgcaccgaaccagcgcaaagccgaaaaacagcagcagaggaaagaaaagaccagagc

SEQ ID NO: 57341 - RNA, 78 nt, Homo sapiens
cgccgcgcagaaggccggggccggccagaagcgggcggcgcgggggagaggcggcccggcagcaaggcgagaagaaag

SEQ ID NO: 57342 - RNA, 68 nt, Homo sapiens
ccgcgcggggacccgacgcccgcacgagaaaaaccgccgcgcagggaccacgggagaaaaaggcgcac

SEQ ID NO: 57343 - RNA, 41 nt, Homo sapiens
gaaagaccgcaaggggaaggaccagaggaccagcacagcag

SEQ ID NO: 57344 - RNA, 79 nt, Homo sapiens
gcaccagcacgcccacccagaggcgacacagccccaacgcggaccgagaaacggacaccacaccggaaggcaggcaaaa

SEQ ID NO: 57345 - RNA, 73 nt, Homo sapiens
ccgaagggagccgggacgcccaggaggcgaggaacacgcaagcgcaggaaaaggaagacacaaaaacggcagg

SEQ ID NO: 57346 - RNA, 76 nt, Homo sapiens
gagacgccacagagacaaggccaagaaagaggcccgccgagagcccggcgccgcggagccgccgcagacgcggccc

SEQ ID NO: 57347 - RNA, 68 nt, Homo sapiens
ggagaacaagcaacggcggggagacaggaaccaaaaagcaacagaagaaagacgggaacgaagcaaaa

SEQ ID NO: 57348 - RNA, 81 nt, Homo sapiens
aaaagagcgagaaacaaggcaaaaagaagagaacgacacgaaagaaagcccaaggaccccgaagacacagcgaggacacgc

SEQ ID NO: 57349 - RNA, 89 nt, Homo sapiens
ggcgaacacaaaaggcgccgaagcaggacccgaagccaaaccaggaggggacgcacaccgagacgaacacagaacagcacgaccagagg

SEQ ID NO: 57350 - RNA, 86 nt, Homo sapiens
accccggagcgacccggacaccgacgcgccacgcggagcccgccggaaccaaaaagaagccccagagccggggccaggagccccaa

SEQ ID NO: 57351 - RNA, 64 nt, Homo sapiens
aaaggagcaacccacgaaaaacaacagacccaggccaagaggccaaccagcccgaaaccaagac

SEQ ID NO: 57352 - RNA, 76 nt, Homo sapiens
cagacgcagggcgcccccgggccgaaagaagaaggggaaagaaacaaaaacaaaaccacacagcaacagaacggca

SEQ ID NO: 57353 - RNA, 81 nt, Homo sapiens
ggcgggcgcgcccagagggcggagccgggagacgggaggcccgaagcgaagaccacccaacccacgccgagacccacgcag

SEQ ID NO: 57354 - RNA, 68 nt, Homo sapiens
aaaagcgccaacagcagaaaacacggaagcaagagagaagagaaggaaaggacggcgaacaaagcaaa

SEQ ID NO: 57355 - RNA, 73 nt, Homo sapiens
agcaagcacaggcagcgcagagccagagaccacaggagcgagagcaaacaggggcggaggaggaggaaagacg

SEQ ID NO: 57356 - RNA, 74 nt, Homo sapiens
ggggccaccgcaaccgggggacggagaacaagggaggcacgcggaggggggagcccggccggccgagacgaccc

SEQ ID NO: 57357 - RNA, 85 nt, Homo sapiens
cagggaagaagggaagcccacgaacacaaagcaggagggagagggccaagaagcagcggacaccccggagccgaggagagaaggc

SEQ ID NO: 57358 - RNA, 84 nt, Homo sapiens
cgaagaaaagaagaagaagaagaaggccaggggaccaagaaaggcccagggaccaaagcccggacaaggcccgagcaccaggac

SEQ ID NO: 57359 - RNA, 78 nt, Homo sapiens
gcccacacggcagcaccagcaggcaaaacgaggcgcagcggggaagagccaagggagggacggacagggagcagagcc

SEQ ID NO: 57360 - RNA, 66 nt, Homo sapiens
gccaaagaggaagcccaccacaaaaacgaaggcggcggaacggggcagaggaggaggggaaagagc

SEQ ID NO: 57361 - RNA, 73 nt, Homo sapiens
caagaaaaaaaccacaaagcggccgaaacagaaaacaagagaccacagaagggcccgacccgaaaagcgcagc

SEQ ID NO: 57362 - RNA, 74 nt, Homo sapiens
cggaacgcgcgccgcacagacgcggagacaaacagagagggccgaggcagacaagggaaaggccgcgcagggga

SEQ ID NO: 57363 - RNA, 57 nt, Homo sapiens
agacaaagcagggggcagacagaaacaccaagccgcagccagaaagaggaggagaca

SEQ ID NO: 57364 - RNA, 82 nt, Homo sapiens
agcggaacagccaggaagggacgcacacaaagcccgaacagcaaggaaaagcagcgccaacggcaagccgcgcagcgagacg

SEQ ID NO: 57365 - RNA, 72 nt, Homo sapiens
gagaggaacggggggagagaacccaaccagggggaaacacagaacgcaggcccgcccaaaagcgcaacaagg

SEQ ID NO: 57366 - RNA, 69 nt, Homo sapiens
gacgacgggagagcgcccccacgagaccagaggcacgggaacacaccgccacagaaacccacaaacaaa

SEQ ID NO: 57367 - RNA, 70 nt, Homo sapiens
gacacagcaaaccgggccacagaggcccacgcggaccggcagcgccaccggaccaccagacaaggacacg

SEQ ID NO: 57368 - RNA, 52 nt, Homo sapiens
gaaaccaggaacgaaacaaaaggagacccaaccaggccaaacacacaggaac

SEQ ID NO: 57369 - RNA, 79 nt, Homo sapiens
ccaagcagccaccagcagcccccagagcgggaccacagggccaccgagcgaggggaggccagcggcagcacaccgaaac

SEQ ID NO: 57370 - RNA, 74 nt, Homo sapiens
agccagagcacaagaaagacaccccgagagcggccgagggaagaaaccagcgcaaggacaacaacaacgaagga

SEQ ID NO: 57371 - RNA, 76 nt, Homo sapiens
gccgcggggggcggcggcgcgagccagcggggccgaaaacgagggaggagcaaaaagaaaaaaaagaacgcaaaac

SEQ ID NO: 57372 - RNA, 72 nt, Homo sapiens
agaaaccggcaagcgcagggcagcaacagacaacgagcaaccagaagaaggacagaagagagacaaaaagac

SEQ ID NO: 57373 - RNA, 67 nt, Homo sapiens
cagccccgagaagcgggacacagaccgcgaccgcacaagcagccgccagcggaaccaagcggcgcgg

SEQ ID NO: 57374 - RNA, 61 nt, Homo sapiens
agacccgagccagacacagagcaggaacgcagccggggacaccaaacaggcccgggaagag

SEQ ID NO: 57375 - RNA, 46 nt, Homo sapiens
ggaaaacacacagacgaaggcaaaagaggacaaaaggcaacccaga

SEQ ID NO: 57376 - RNA, 79 nt, Homo sapiens
aaagagcaaaacaaaaagagcagaggagacaaaccggagaaggagccaagaaagagaagccagggaccgacccagcccc

SEQ ID NO: 57377 - RNA, 79 nt, Homo sapiens
agccccagaggacaaccaccccaggacaggagcagaggagcacagcaagcgggagcaggcagaccaaaggaacagaagc

SEQ ID NO: 57378 - RNA, 75 nt, Homo sapiens
agcagaagccccgacgcaaaccgcaagcaccgaaccgcacagcaagcccaggccaacaggcgcgggacaaccaac

SEQ ID NO: 57379 - RNA, 34 nt, Homo sapiens
cacgccggccacccccaaaacaacgaagagagga

SEQ ID NO: 57380 - RNA, 72 nt, Homo sapiens
aaacgcaagggaagagacccagacagcaggaacggaaggcaagcggcagagccaggaccaaaacagggaagg

SEQ ID NO: 57381 - RNA, 38 nt, Homo sapiens
gagggaaagcacagaagaaagaggggcccagcagcaag

SEQ ID NO: 57382 - RNA, 65 nt, Homo sapiens
gacgaggcggacgggcgagcaccaggacccgaaagaggacagaacagaagagacggaagaagaaa

SEQ ID NO: 57383 - RNA, 55 nt, Homo sapiens
agggcaccccagggaagcagaaaggaccgaaagcacagaacacgggcgaagcaga

SEQ ID NO: 57384 - RNA, 76 nt, Homo sapiens
aaggacaggcagcccagcgggggaagacgacagaggagcgaagaaaccgcaaaggggagaaaaacccgaacaccag

SEQ ID NO: 57385 - RNA, 73 nt, Homo sapiens
cgaaaaggcgacccggggaaagacagcccacagccagggcgacagccggccaagaagcaaggaaaggcaagca

SEQ ID NO: 57386 - RNA, 86 nt, Homo sapiens
ggcacacccccgggcgccccaggaggcaagcagacacgagacagacggacccgcgaaacccccggggaggaacaagccaagcagaa

SEQ ID NO: 57387 - RNA, 72 nt, Homo sapiens
aaggaccaagaaccagcgccggaggaagagcggaaaaggcggagacgaaaaccgggaaggacagccgaccac

SEQ ID NO: 57388 - RNA, 56 nt, Homo sapiens
agacaggcgccaggagcacagaagagcgaggagaacaacaggaacgcccaccacca

SEQ ID NO: 57389 - RNA, 55 nt, Homo sapiens
gggaacaacaacaggacgccacagggcggagcaggagcaaaggagcaagaaacca

SEQ ID NO: 57390 - RNA, 75 nt, Homo sapiens
aagcaaggcacccaacagcaaaaagccacaagcggcgagcgaccacaccggccacagaggaagcggaacgcaggg

SEQ ID NO: 57391 - RNA, 86 nt, Homo sapiens
aggccgggcgaggcgaggccacccgggccgccggcggccacgggcaaacaggacgcgggcccggggcgggaagccaccgaccggac

SEQ ID NO: 57392 - RNA, 37 nt, Homo sapiens
gcaccccacaaaaaaagggggaagccagccaggacaa

SEQ ID NO: 57393 - RNA, 65 nt, Homo sapiens
cagcacggaacgcaagaggagcagggacagcagaccacagcccggcaggcccaaaaacccaaagg

SEQ ID NO: 57394 - RNA, 74 nt, Homo sapiens
gagggcgggaggacaaagggagaaggcagagacgaagggggcgaacacagacaaccacaagggcgagagcaggc

SEQ ID NO: 57395 - RNA, 100 nt, Homo sapiens
gagaggccggccgcgcggagcacgcggagccgcccaggcaggcgacccaaaggcagaggagagaaaacaaggagaaccgcaacaggccggaaacacacga

SEQ ID NO: 57396 - RNA, 44 nt, Homo sapiens
ccaggaggaagggacaaaaggggacaaagggccccagggagagc

SEQ ID NO: 57397 - RNA, 52 nt, Homo sapiens
ggagagggagacagcggcgcaaagaagggacgaaagccccggaggcaaccag

SEQ ID NO: 57398 - RNA, 61 nt, Homo sapiens
cggagcaaacgacgagaaagcccacagccaaagccgggcggacgcggcaggcgacacgaga

SEQ ID NO: 57399 - RNA, 79 nt, Homo sapiens
gaagaaaggcagaagaccggaagagcgcagagaagcgacgcaagaggcccaagagacacaagacgaagagcagggccag

SEQ ID NO: 57400 - RNA, 73 nt, Homo sapiens
ccgaggccgggaaccagcgaggcaaggcagcaagccgcggggccccaacccgggcagaccagaggcgcagacg

SEQ ID NO: 57401 - RNA, 71 nt, Homo sapiens
cacaagaaaggccccacagggaagaagagaagagcccagcgagaaagaagcgaaaagagggcaacaaggga

SEQ ID NO: 57402 - RNA, 82 nt, Homo sapiens
gggccagcccgggaccacggaccaaaggccgggcgcagaacccccagaccacaggcggaaaacaccccaaaagccaaaaggg

SEQ ID NO: 57403 - RNA, 102 nt, Homo sapiens
caaggacaacgcaagggggaagagagagaaacaaaagcgccagagccaagaacggagccccggcggcagggagcccgcgggggaaagacagcggaccagggc

SEQ ID NO: 57404 - RNA, 69 nt, Homo sapiens
gacaccggacagccggggaggaaacgcggaggagccggcggaggggccacacgcagggaacgagcgcag

SEQ ID NO: 57405 - RNA, 35 nt, Homo sapiens
agaggcgaagcaaacacaacgggagggcgggggcc

SEQ ID NO: 57406 - RNA, 55 nt, Homo sapiens
aaccaggacaacccgggcaggcgggccgaagacaacccagaggcacagagggaca

SEQ ID NO: 57407 - RNA, 79 nt, Homo sapiens
cgcagagacaggccgaggagacgcgggcccgagcagccagaccgacccacccgcgcggcaccagcccgaagaagccggg

SEQ ID NO: 57408 - RNA, 78 nt, Homo sapiens
ccccccgccggcccgggggcaggcgggcacgaggaccagcgggccggagccccgagaagggacaacaggagaagcgga

SEQ ID NO: 57409 - RNA, 82 nt, Homo sapiens
cgggcggagacagaagaggcgccaggacgaaggcccacgggcaaggccccggagccagcgggggccaagacaacaagacgaa

SEQ ID NO: 57410 - RNA, 83 nt, Homo sapiens
cccaaccagcggagcgagacaggcgggggaaaagagggggagacagagaggcagcccccccgggccaacaaacccgcgggacg

SEQ ID NO: 57411 - RNA, 74 nt, Homo sapiens
aaaaggaagcagggacgaacaaaacagcggaaaagggcacagaccagacaggagcgcgaaaggggaacccacag

SEQ ID NO: 57412 - RNA, 86 nt, Homo sapiens
ccagagagcgcggccggaggacagaaggccaagagaggccaacagaggaacaaggcccgcagaacccaagagcaaaagcagcccac

SEQ ID NO: 57413 - RNA, 70 nt, Homo sapiens
cacagaacccagcaacaagagggaacaggcacgccccacccgccagccgagcccccgacgcagcacaaag

SEQ ID NO: 57414 - RNA, 54 nt, Homo sapiens
aacaaaagcaggcccaagcaaaagaacgaccaggagacacagcaggccccacag

SEQ ID NO: 57415 - RNA, 65 nt, Homo sapiens
aagaagaggcgccaggaaaaccaccaaaacaaccagcgccccagcagaagcacacccaacacccg

SEQ ID NO: 57416 - RNA, 62 nt, Homo sapiens
ccagagaccacagaggcaacccacccaagcgaggacacacgagaaaaaaccgagaaaagacc

SEQ ID NO: 57417 - RNA, 77 nt, Homo sapiens
cgagggccccaggagaagcgggcacaggagaagcggagggagaagggcagccggagcagcaagcgggccgaccgcag

SEQ ID NO: 57418 - RNA, 56 nt, Homo sapiens
ggccggagacaccagcagcgcacagagcagaggacgagaccggccggagcggaggg

SEQ ID NO: 57419 - RNA, 76 nt, Homo sapiens
cggagcgcaaggcgccaaccccgaacggggggagacgccacggaacgcagcccaaggaaaggcccaggcacagcag

SEQ ID NO: 57420 - RNA, 73 nt, Homo sapiens
cgcgcagcgagcccgagcggcagcgccggaggagccaaaggaagagggccaggggggaggaaaaaaacaacac

SEQ ID NO: 57421 - RNA, 64 nt, Homo sapiens
gcccagcagcccaggccgagacgaaaggcagcacagggaacaccagaggcgggaccacgggcag

SEQ ID NO: 57422 - RNA, 41 nt, Homo sapiens
ccccggcccccggagccaaaaccggaggagcggcgcggaac

SEQ ID NO: 57423 - RNA, 69 nt, Homo sapiens
aggaccagagcgacgagaagagagagaagggagagagaccaaagacgagaggaacccgccgccgaggaa

SEQ ID NO: 57424 - RNA, 36 nt, Homo sapiens
gcccccgggggagccaggccccgcccgcccgccggc

SEQ ID NO: 57425 - RNA, 68 nt, Homo sapiens
gcacagcacccacaaagcaacgcccagcaggaaacaccaaacgggaccgggacagaggagagcgcaaa

SEQ ID NO: 57426 - RNA, 66 nt, Homo sapiens
gacaagggcagagggaacaggcagcaggaagcacggcgggcgaaacagacagaggcacaaaaggag

SEQ ID NO: 57427 - RNA, 51 nt, Homo sapiens
ccacaccaagacaccaggggagaccgcccccggggcgccaccgagcccaga

SEQ ID NO: 57428 - RNA, 63 nt, Homo sapiens
gccccgaagagaaacacacggacaacaaacgacaacgaagagaggaaagaagcggaaaggagg

SEQ ID NO: 57429 - RNA, 69 nt, Homo sapiens
gcacgagcaaaaggaagcaacccagaagagcgaaggacccagcgaggaggggccagaggagccaggagg

SEQ ID NO: 57430 - RNA, 76 nt, Homo sapiens
cgggacagcgggcacgcgccagacaggcaaaaccagaagcgagagaagagcgaaagccacagaaaacgcaagagaa

SEQ ID NO: 57431 - RNA, 77 nt, Homo sapiens
ggccccgaaaccgcggcggggcagagcaacaccgaaaaaacacaccgacagcagaacacacgcgaaaggaaaccaag

SEQ ID NO: 57432 - RNA, 58 nt, Homo sapiens
gcacaagaagaagacgaggcagaacgcgcgccgggcggacgcgcagggcaagggggcc

SEQ ID NO: 57433 - RNA, 82 nt, Homo sapiens
gggaaggaccaccccccaaacgggccgagcacgagaaagcagcgcccccaacaaggagacgagagcagaacaacggggaacg

SEQ ID NO: 57434 - RNA, 68 nt, Homo sapiens
ccaaggcccaaaaaggaaggaaagacggcacccgaagccgcacccgcgaagagacgggacaccagggc

SEQ ID NO: 57435 - RNA, 71 nt, Homo sapiens
gcgcagaccggggagggaaagaaaggcggagaacggaaaagcaccaggaagcagagaggaccgcagaaggg

SEQ ID NO: 57436 - RNA, 81 nt, Homo sapiens
gaagcccccccgacacgagggcgaaagagcgcccggaccaccagagacaccagaaaacgccacggaggaggcgcgaaagaa

SEQ ID NO: 57437 - RNA, 73 nt, Homo sapiens
ccaagacacggaccacgaggacggaagagccaagcccaagccacagaccaaaaagagaaagggaggcaaaaac

SEQ ID NO: 57438 - RNA, 69 nt, Homo sapiens
gcgaagacagcagaccgggggccagcacacaacaacacaaaacgaaggaggcccaaccacaaaaggagc

SEQ ID NO: 57439 - RNA, 55 nt, Homo sapiens
cggacaagccagacaacgccgacagcagacggggaaaacggggcggaagaacagg

SEQ ID NO: 57440 - RNA, 83 nt, Homo sapiens
cccacaaccgggccggccccagagcccaccgggaggagaaggaggaggaacgagcaccgaacccagaccagacgcgaacccaa

SEQ ID NO: 57441 - RNA, 84 nt, Homo sapiens
ggggcgccgcgggccggggagcacggacaaccccacccagaggcccgaggaaaacacaaaggacggcaagaacagaagaccggg

SEQ ID NO: 57442 - RNA, 89 nt, Homo sapiens
cggcggcggcggcggcggccgagggggaggagcgagcgccgagccgggcagagcacaagacccagaaaaaaaggagaaagaagagaaga

SEQ ID NO: 57443 - RNA, 72 nt, Homo sapiens
caaccaaaaacgagcagaagaaacacaagcaaggaaggaaagcagcgcgacggcagaagagagaaagcccca

SEQ ID NO: 57444 - RNA, 67 nt, Homo sapiens
ccccgcgcggccaacgcccaggaccgcaagcgcgcgcccacgagagacgaggaagcgaggggaggcg

SEQ ID NO: 57445 - RNA, 55 nt, Homo sapiens
gagggagccgggcgcgcggccgaggcccggaccagcaccagacagcgaaaaagag

SEQ ID NO: 57446 - RNA, 69 nt, Homo sapiens
gggcagaggcggcggccgcagcggcgcagcgaagcaggaacagccccaggaccaaaaccacacagggac

SEQ ID NO: 57447 - RNA, 76 nt, Homo sapiens
caagccaccagccgacacaaacccacgagaaaccccagggacggcaggaagcacgcgaagggacacagcgcccgga

SEQ ID NO: 57448 - RNA, 81 nt, Homo sapiens
cgggcgcacgcaagaggaggggacacagcgccacggggacagcgccacccgagggcgaagcagccaagacccagcagacgc

SEQ ID NO: 57449 - RNA, 69 nt, Homo sapiens
ccggcgccgggcacgagcaccgccaccaggggaagggggccagcacccgcccgaggacagagaggcgag

SEQ ID NO: 57450 - RNA, 77 nt, Homo sapiens
cggacacgaaagccgggaaaggaaaagaaaagccaagaggaaagccgagggaagggaagaggcgaggccgggagcac

SEQ ID NO: 57451 - RNA, 77 nt, Homo sapiens
gcacacccaaggccacgccggcaggaggcagaaagcaccaccggggaggggagaaccgccagcgacgggaaggcagg

SEQ ID NO: 57452 - RNA, 74 nt, Homo sapiens
aggcgcaggaagggggcagcgcgggcgcgcggccggccggagccagcagcagagaaaaccaggaagaaaggcaa

SEQ ID NO: 57453 - RNA, 70 nt, Homo sapiens
ccgaagagaaggcaacgaagcacagacaccacaaagcaccaacagggacgcagcaacgggcaggaaggaa

SEQ ID NO: 57454 - RNA, 76 nt, Homo sapiens
ggaagagcccaggagcgacgacaagccgaccaaagcagcaagggggcccaggccccaccaggagcgggggagaagc

SEQ ID NO: 57455 - RNA, 74 nt, Homo sapiens
ggaagaaccaagaccagaggagcccagagaggcccgggggcgaaaaacaccaccagggcaagggaaggggcagg

SEQ ID NO: 57456 - RNA, 85 nt, Homo sapiens
cgcacgaaacgcccgaaaacagggccggccgcagagcccaccggaaggagaaggaagaggagcgggaccaaaagccagccccacg

SEQ ID NO: 57457 - RNA, 42 nt, Homo sapiens
caacgccgggccgcagagggaggggagcagaccggaagaccc

SEQ ID NO: 57458 - RNA, 81 nt, Homo sapiens
gcaccccgaagagggaccccccgagaagcggaccccggaaaagacaaggcccccaaggccaaaagaagcgagggagaacca

SEQ ID NO: 57459 - RNA, 67 nt, Homo sapiens
agagagcaaaaacaggcgaggaaaagacaagacacggacaggaaagcgcccaaagaaagcggggaag

SEQ ID NO: 57460 - RNA, 77 nt, Homo sapiens
gcaccaacacggaccagcaagacaccccgagaaccagcggaagccaggccacaggagggccggagagcccagcgaaa

SEQ ID NO: 57461 - RNA, 71 nt, Homo sapiens
caccacagagacgaaggcggcaacaccaccagaggagaacaaaggggaccaagcagccacgggggccaacg

SEQ ID NO: 57462 - RNA, 72 nt, Homo sapiens
cgagaggaaggagacagccacgggacagccagaacaagcgcagaggagcggaggagccccaggaaggcgcca

SEQ ID NO: 57463 - RNA, 63 nt, Homo sapiens
acacaggacaaagaaggccaaaccagcccggacagacagaggcgaacagaagacaagacgaaa

SEQ ID NO: 57464 - RNA, 74 nt, Homo sapiens
gcgaacccagcgggacggcaaaggcacgggcacccaacaaaagcagagagacgcaggaaaaccgcagacgaaga

SEQ ID NO: 57465 - RNA, 74 nt, Homo sapiens
gaagcaaccaggagaaggagcccaggggggcaagccgagcggcaacgaaacaggagccacccaaacagcaacac

SEQ ID NO: 57466 - RNA, 70 nt, Homo sapiens
cacccccggcgggcccgaggcggcgagagaggcaggcggagccgaccgggccaggaagcgaggaggaaag

SEQ ID NO: 57467 - RNA, 70 nt, Homo sapiens
aggaagcaacgccaccagaggaagaagcgcacaccacaacagcacaggcgacagaaaccaagcggaagag

SEQ ID NO: 57468 - RNA, 120 nt, Homo sapiens
acccaaacagggccagcacgccaccgggaaggcggggaggaggccccaaagggcgagggggccgaaaccacccaaggccaaagagagaggcaaaagaggcaaagagacacagaaaagaaa

SEQ ID NO: 57469 - RNA, 78 nt, Homo sapiens
cagaggagcgaaagagagaggcccgaggccacacgggaacgaagaaagagcgcacggcgcgcgggaagcagggacagc

SEQ ID NO: 57470 - RNA, 71 nt, Homo sapiens
cggcgccggaagccgagaacgagccggagaccgaggggagcaggggagcgggacgggcggcgagcggaccg

SEQ ID NO: 57471 - RNA, 58 nt, Homo sapiens
agacagaacagaacccaaaagccgacaaccccagaaacagggccacaaagcccagaca

SEQ ID NO: 57472 - RNA, 109 nt, Homo sapiens
ccagccccggcggggggcggccaggcagcggaacgcgcccccggggcccagggagagcacggccagcccgcagcgggcccaggcggaggcgccaacagaagaaccacgg

SEQ ID NO: 57473 - RNA, 85 nt, Homo sapiens
caacggaacgcggaccaggagcccggacgagaccagccagagagcgacccccgggaagggaccacgggagaggggaagacccaca

SEQ ID NO: 57474 - RNA, 49 nt, Homo sapiens
gcccgggcgcgcgaggccagagagggggagcaaacaaaggcacaccaac

SEQ ID NO: 57475 - RNA, 74 nt, Homo sapiens
gccgaaccggaggcgccaggaaaaagggagacagggaaacgaaaaccaccgggcaccacgagcccacgagagag

SEQ ID NO: 57476 - RNA, 73 nt, Homo sapiens
gccaacgccgcccgacaacaccaaggcaggaaaaccaaacccgggaggaccggacaggcagcggaagaacagg

SEQ ID NO: 57477 - RNA, 61 nt, Homo sapiens
gcacccagaggaccaggcggcgaggggaaagaaccagacgacaggaaggcacagaacgaag

SEQ ID NO: 57478 - RNA, 84 nt, Homo sapiens
ccgcccaagccgcgccccagagagcgcccgagagaacagggggccgcggccaggccacgggaagcgggaggggagaggagaaag

SEQ ID NO: 57479 - RNA, 61 nt, Homo sapiens
gggaccgcaggcccacacggcccgggcaaggcccagacgcccggagacaacccggaaacac

SEQ ID NO: 57480 - RNA, 77 nt, Homo sapiens
acgaaaccgcccaagcagagcgcaggaaggaacgaggaagcagaaaggcgaaggaacacacgacacagaaaccaaga

SEQ ID NO: 57481 - RNA, 77 nt, Homo sapiens
cccccacaggccccaggaaccacaggacagcccacaagggaagaaagagccagcaccaagaacccacccccagagga

SEQ ID NO: 57482 - RNA, 53 nt, Homo sapiens
agaacccacagaggggggcgaagaaaagaaacaggaacacgaaagaggaaaaa

SEQ ID NO: 57483 - RNA, 79 nt, Homo sapiens
gacagcagcagcagcagccagacgggaaaggcagacaggaacccagaagagcggagacaaaggcacaacagcaaggaag

SEQ ID NO: 57484 - RNA, 77 nt, Homo sapiens
cggccgagacaaaggcaccaggccaccacagaaacaaaagcaacaaagagggcagcccgacaaaggcagcagccccg

SEQ ID NO: 57485 - RNA, 73 nt, Homo sapiens
acgaacccgaagcccccaaagagagaaccggagagcacccaacagcaccgcacccggaaaaggaccaccggaa

SEQ ID NO: 57486 - RNA, 82 nt, Homo sapiens
gaggccgccgcgcccaggccgagggccagaagcccccaggaggagaacgagcaacggaagccagaagaagcacccccagcag

SEQ ID NO: 57487 - RNA, 77 nt, Homo sapiens
ccgcccacagcgcggcgcggccgagagccgcggcccggcggaaaggacagcagggggcggggacaggacggccgcag

SEQ ID NO: 57488 - RNA, 37 nt, Homo sapiens
caggccgagacgaaaggcagaaacggcgaggaaagag

SEQ ID NO: 57489 - RNA, 97 nt, Homo sapiens
gagcggcggcggcggcagcgggcgggccccgagagcagcagcggcgcaaaaaccagacaccccacaccaccacccagacgaccaaaagggcacccca

SEQ ID NO: 57490 - RNA, 75 nt, Homo sapiens
cagcgcagggagaggggccgaaggaaccggacagaagcgcggcggcgcggcgagcccccaaaccggaggaaaggc

SEQ ID NO: 57491 - RNA, 75 nt, Homo sapiens
accacaagaaaacaagaaaggaaaagagccccgaacagaagaggagcacggcggcggaggaagaaagaccgacac

SEQ ID NO: 57492 - RNA, 75 nt, Homo sapiens
gaaagcaggcgaacccgcggcgcaaaacggcacaagacagcccaacgccaagacagacgggccagggggcccgga

SEQ ID NO: 57493 - RNA, 81 nt, Homo sapiens
acccccaaaagacggaacaacacgaacgcccgaaggagcccagcaagcccagacaaccagaccagaacgacacaaaccagc

SEQ ID NO: 57494 - RNA, 51 nt, Homo sapiens
cagacgcagggcgcccccggacaaccggacgggcaaggcccagaaggggac

SEQ ID NO: 57495 - RNA, 74 nt, Homo sapiens
agacagcagacgcaccaaagggacagaaccaaaggacaggcagccagggacgccaccaggcagccgcagaggag

SEQ ID NO: 57496 - RNA, 72 nt, Homo sapiens
gagccagaaggaagacaagcggcagaggaaggcggaaggagccggaaggaccacccaaccaggccgcagggc

SEQ ID NO: 57497 - RNA, 79 nt, Homo sapiens
gcagaaacaggacgaaaaaagggcaagaagccagaaggagaccggaaagaagggagaccgcggggaaaagagaaaggcc

SEQ ID NO: 57498 - RNA, 75 nt, Homo sapiens
ccacaagcggccaccaccaaccggaagaacaaaaccagaaagacggacggaggacagccgggacagggccagaag

SEQ ID NO: 57499 - RNA, 74 nt, Homo sapiens
gggcacccgaggcggacgagaagagaacacaccggggaagggcaccgggaccagaaagggcgggaaccagcgag

SEQ ID NO: 57500 - RNA, 40 nt, Homo sapiens
cccggggcccgcccaccacaagaccagaacagagaagaaa

SEQ ID NO: 57501 - RNA, 44 nt, Homo sapiens
aggaaggggccccgaacaccgggggacccgaagcccgcgagaag

SEQ ID NO: 57502 - RNA, 80 nt, Homo sapiens
ccaggcagcagcccagacgcggcacagagagggccgggagcgcgcagccaggcggaaaccccaggcacccgcggccccag

SEQ ID NO: 57503 - RNA, 78 nt, Homo sapiens
gcacgggcgaccccccaaggccgaggccgcggccagggcggcgccgcgccccccacggagaaacgcgaagacgacgag

SEQ ID NO: 57504 - RNA, 72 nt, Homo sapiens
cgaccccccgccacccccgcaacgccacccgcagcaccacgccaaagggaaagcaacggcgcaagcggcggc

SEQ ID NO: 57505 - RNA, 92 nt, Homo sapiens
cagcaaggcagccagcaaccacaacaagggagcacagaaccaggcccacgaaacaggaaacggagcacccaccaacgagagagccgcagggc

SEQ ID NO: 57506 - RNA, 58 nt, Homo sapiens
ccgaggcgaggaggagcgcggcgaaccgacaccgggaaggcaccaacgaaaaaaacaa

SEQ ID NO: 57507 - RNA, 80 nt, Homo sapiens
ggaaaagccacaagacagacagaacagagaagaaagggaacaggggaggcccgaccccgaacccaccggaggcaagcacg

SEQ ID NO: 57508 - RNA, 33 nt, Homo sapiens
ccgggcaccgcccccagccagaagaaaagaaaa

SEQ ID NO: 57509 - RNA, 82 nt, Homo sapiens
cccgacccagcgacaggacccggcgccgggcacgagcaccgccaccaggggaaggggccccaacaccacacaagcaaagcgg

SEQ ID NO: 57510 - RNA, 82 nt, Homo sapiens
gcagccccgccccacgccggcagccccacgaggggaggcacaaggcgggacagccaagccaccagaagggggggaggggcca

SEQ ID NO: 57511 - RNA, 98 nt, Homo sapiens
gaagaggcaccgccggagccgccggaagggcgcccgcagccccccacgcggagcgggcacggacacaagaacgagagccaaaggccagccacgcacag

SEQ ID NO: 57512 - RNA, 68 nt, Homo sapiens
ccaaagagagaacgaaaggaaaccggaaacacagagacaggaagaacgacaggagcaaaccagccccc

SEQ ID NO: 57513 - RNA, 75 nt, Homo sapiens
aaaaaaaacggagggacccaaccaagaaacaacgaacgagcaaggaagggccaaggcagaccccacaccggagaa

SEQ ID NO: 57514 - RNA, 72 nt, Homo sapiens
aaacaggacccaagacagagaagacaaaaaccagagagcaagaacaccaaggcacacagagaaaaaaaggga

SEQ ID NO: 57515 - RNA, 80 nt, Homo sapiens
cgagcggcgggcggcggaggaggagacggcaggcgggggaccaaaacaaaacgagagcaagaggaaagaaaaagaacaga

SEQ ID NO: 57516 - RNA, 64 nt, Homo sapiens
gggaggggagagcgaccaggccagggacacaggaaaggaccaaagcacagcaccccacagcccc

SEQ ID NO: 57517 - RNA, 69 nt, Homo sapiens
cagcaggcaagcaacacagagggcgcccaaccaaccccgacaaaagagacagagccccagcaacggaaa

SEQ ID NO: 57518 - RNA, 71 nt, Homo sapiens
agaggacgcccaacaccacccacccaccacgaaagaaagccaagcacacacgaagacgcccgccacagcaa

SEQ ID NO: 57519 - RNA, 64 nt, Homo sapiens
gcaacaagaaggccaaaaaaacccagcggaaagcaacaaaaggacagcagaccacagcccggca

SEQ ID NO: 57520 - RNA, 78 nt, Homo sapiens
ggcgggggaggcgccgggaagcgacggcgccggcggcccgcaaagaagggaaggacacaaccgaggcccagcaagagc

SEQ ID NO: 57521 - RNA, 60 nt, Homo sapiens
aggcacccagggaagagcgggccaacagccaaaaagagagaaaaaccagaaagaaaacag

SEQ ID NO: 57522 - RNA, 59 nt, Homo sapiens
gcccggcccacgacacaggaagaagacaggaaaagaaggaggccagcgggacacacaaa

SEQ ID NO: 57523 - RNA, 57 nt, Homo sapiens
ggagagacgggagccaaacacccagggaccagcgcccccggcggggccgccaacccg

SEQ ID NO: 57524 - RNA, 82 nt, Homo sapiens
ccggagcggggccgaggccgaaggcccgcggcgccccggcgcagcccagaaccgggacaacccagcaaacaggccagacccg

SEQ ID NO: 57525 - RNA, 76 nt, Homo sapiens
cagcggccgcgcacccccggccggaggcaccagcaaagcaaggagaggccaccaaggagaagcgcaggcgaaagac

SEQ ID NO: 57526 - RNA, 84 nt, Homo sapiens
cggccgggcgaccaagcggaggcgcgcggaacagcgccgaggcgacccgcccagggcagcggggaagaagaaaaggaaccgagg

SEQ ID NO: 57527 - RNA, 55 nt, Homo sapiens
gagggcaagagggcgaaacaggccgacgcaaacgggccggggacacaagcaacag

SEQ ID NO: 57528 - RNA, 51 nt, Homo sapiens
aaaagacgaggcccccaagcggggacaccccaaaaacggcccaggggggcg

SEQ ID NO: 57529 - RNA, 75 nt, Homo sapiens
ccagaacaggggagaaaaaaagaaggaagaaccgccaaaaagagggaaaaacgggcgccaggaacccggacagca

SEQ ID NO: 57530 - RNA, 73 nt, Homo sapiens
gggagccggggcccccagcaagaacgggaacaaaaccggcgggccaaaggagaaacaagaaggagacaacaac

SEQ ID NO: 57531 - RNA, 70 nt, Homo sapiens
cggaagcgagaggacaagcaaacgcaccaggccaggcacacggagagacaggacgacccggacaaccacc

SEQ ID NO: 57532 - RNA, 78 nt, Homo sapiens
ccaaaccgggcgccgaaaacagacagaacagaacccaaaagccgacaaccccagaaacagggggacaggagccagaga

SEQ ID NO: 57533 - RNA, 84 nt, Homo sapiens
gagaggacccgcggggcacccgcaggggcagacagcacaaccagcggccacccagaggagaaggccaccccgccggaggcacag

SEQ ID NO: 57534 - RNA, 58 nt, Homo sapiens
gccacagggcaaggagaaacccacaaagggggcacggggcccagcccgcagccggaaa

SEQ ID NO: 57535 - RNA, 75 nt, Homo sapiens
acacgagggcggcggaaaaagccgccacacgccaaaggaccacagaaggaagaggggggaaagagaaagacagag

SEQ ID NO: 57536 - RNA, 50 nt, Homo sapiens
agaagacagagggcgagggcaaacgaagaaaacgacccagccagaggaca

SEQ ID NO: 57537 - RNA, 79 nt, Homo sapiens
agagcccacaggaaaacaagccggcagaaaccaccaaacagcgcgccacggaggacagcacgggaaggcgcggaccgag

SEQ ID NO: 57538 - RNA, 88 nt, Homo sapiens
cacgaaacgagccaaaggggagcacgaggggaacgcaacccaagcaacgaacaggaaggagaaaagacagcaaaacaaaagaaggaac

SEQ ID NO: 57539 - RNA, 78 nt, Homo sapiens
gcggcccggggcgggcgcgggcgcggcgcgcccccgcgccccccggagccccgggccagaggggcgagcaccaaagcc

SEQ ID NO: 57540 - RNA, 72 nt, Homo sapiens
aaggcaaagaaaaagacaaaaggaagagaagacaagggcccgagggcaggacagcaggcaccggcgaagcac

SEQ ID NO: 57541 - RNA, 72 nt, Homo sapiens
ccagggcccagaggaccccagccgcgcccgggagagcaaggcacaggcagcacagccaggccaaaaccccag

SEQ ID NO: 57542 - RNA, 71 nt, Homo sapiens
gcgcaacaccagggaggccaagcgaccacccaaagaagggcaacggagacagaaaccaggaggccaagcaa

SEQ ID NO: 57543 - RNA, 76 nt, Homo sapiens
agcaggaaaggaggccggaccgaggaaccaccaagaggcaacagccacaacggacaaaaagacagcagaaagcaaa

SEQ ID NO: 57544 - RNA, 59 nt, Homo sapiens
cagagagccggacccaaggcccggaccagggagcgcagggcaaaagcagaccggaaaac

SEQ ID NO: 57545 - RNA, 60 nt, Homo sapiens
gcgcccgagagaacagggggccgcggccaggaaaccaaccgaacaaaggacacaagggca

SEQ ID NO: 57546 - RNA, 78 nt, Homo sapiens
gaagagcccgggcggcgccgaccggccacgggcgagcgcggcaggacaccaaaccgccaccgcgacgcaaggagaggc

SEQ ID NO: 57547 - RNA, 51 nt, Homo sapiens
aaaagcaccccgcaccaacgagaagagggaccaggaggcggggccccccgg

SEQ ID NO: 57548 - RNA, 76 nt, Homo sapiens
gcaccggaaagcggagcaccggacaagcaccagagcccagagcagagagcaaggggaaaaagagaaagagcagcca

SEQ ID NO: 57549 - RNA, 91 nt, Homo sapiens
gcggaggcggaggcagaggggaggcgcgaaagaccccaagaagaagcggaagaggagccgcggaaccaagacacaaggaacagaagacagg

SEQ ID NO: 57550 - RNA, 73 nt, Homo sapiens
ggaccgaccgcaacagaacggacccgaggggaccacaaacaggcccaccggagcagcagcccgacccgaccag

SEQ ID NO: 57551 - RNA, 89 nt, Homo sapiens
ggacacagccccaggaggcagggggaaccgcaggcggaggccccaggggaggcaaacgccggcccgcccgccccacgccgcaccagacc

SEQ ID NO: 57552 - RNA, 75 nt, Homo sapiens
cggcacggagccagacacaaaacgagggacgaaagccgaaagaacgagaagcgaacggagcagggcaaaagaaca

SEQ ID NO: 57553 - RNA, 56 nt, Homo sapiens
gccaagaaaaaaaaaagacaggccggccgccgagagccccgcggcccagccaaccc

SEQ ID NO: 57554 - RNA, 74 nt, Homo sapiens
caaaccccccagagaagaaagacaaaagaacgaagggagggaaacgcgagaccaagccacccaccaacacgggg

SEQ ID NO: 57555 - RNA, 84 nt, Homo sapiens
agacagcccgcagcacgaccagcaggaacgaaaacgcgcgaaaagcaggagaagagaaacaggacgcgaggaggagagaggaga

SEQ ID NO: 57556 - RNA, 57 nt, Homo sapiens
ggcgaaggaggccgagaagaaagggacccaaaacgaaccaacagaccaggcacagca

SEQ ID NO: 57557 - RNA, 97 nt, Homo sapiens
cagccgggcggccgcgcgagccggcggcccggagggggcggcggacggcccgccacgggccccgcagccgcgcccgagcgcccgagcagggacagcg

SEQ ID NO: 57558 - RNA, 73 nt, Homo sapiens
agcccaccagccgcaccaaggagacaggacgaagcccaaaccacaagccacaaaaggagaaggccggaacaac

SEQ ID NO: 57559 - RNA, 75 nt, Homo sapiens
agagggggcggcgaccgagaggcgcggagccggggacgccaaacgaggaccccaccacaagaacgcaggaagagg

SEQ ID NO: 57560 - RNA, 67 nt, Homo sapiens
ccccagcagcaggggcgccagaaccaggcgacggccaagacaccgaagccagggggaaggaaccccc

SEQ ID NO: 57561 - RNA, 77 nt, Homo sapiens
ggcgacaaggccaagaccgccagcaaaggaagacgagggacaccggagaccgaagaacggaagcgcacgaacaaggc

SEQ ID NO: 57562 - RNA, 75 nt, Homo sapiens
cgcccgcagcaagacgcgggcgcgcgaggacgggagaaaaccggaagagaaaggccgggaagcaggaaagaaaaa

SEQ ID NO: 57563 - RNA, 72 nt, Homo sapiens
cggggccccacacccccccggggggggcgagaacgcggacaagcaaacaaagaggaaaaagagggcaacagc

SEQ ID NO: 57564 - RNA, 85 nt, Homo sapiens
ggagcgcggcggagacgagccgagacagagcacgcccggaacaagcacaagcccggcggagcccaccaccacggcaagcacagag

SEQ ID NO: 57565 - RNA, 67 nt, Homo sapiens
gggggggggaagccgcagcggaaagcaggagcacaggcagagcaaggcaaagagggcagcaagcagg

SEQ ID NO: 57566 - RNA, 73 nt, Homo sapiens
ggcgccaccgggccgcgggggcagaaaggcggagccaaggccagaccaagggaaaccacccagagagcagacc

SEQ ID NO: 57567 - RNA, 75 nt, Homo sapiens
ggagaggggaagagacaagaccagggaccggaccaccacgggggaagggaaggggagcccggggcaggcacccac

SEQ ID NO: 57568 - RNA, 77 nt, Homo sapiens
cacccaaaagccaccagcaggcaaagacggacaacacccagcagacagaggagcagggaggcgggaaaaagaggcca

SEQ ID NO: 57569 - RNA, 82 nt, Homo sapiens
cccgggcgccacgagccggcggcggacggcagagacggccgccacagcccagacggcgaaagcgggccaagagacccccgcc

SEQ ID NO: 57570 - RNA, 86 nt, Homo sapiens
gaccccagcgggcccggggaggcaccgacgaggaggacccagcagccagcgaagccccaaggaagccgggacgcccacagacccag

SEQ ID NO: 57571 - RNA, 84 nt, Homo sapiens
gccgaggcagcccagcaggacacccagacagcggacgagcagccggccaacgacgaccgaaggagaacacgccacgggagcggc

SEQ ID NO: 57572 - RNA, 52 nt, Homo sapiens
agagacccagcgagcaggacagcagaccacagcccggcaggcccaaaaaccc

SEQ ID NO: 57573 - RNA, 84 nt, Homo sapiens
ccgacaccgccggagcaacgaaaagagcccggaaggaagagacaggaggcagcagacggacaccagggaccccgacggagagac

SEQ ID NO: 57574 - RNA, 73 nt, Homo sapiens
agaccaccacagaaacagaaggaggccggccgacacaaacaggaccagccacaagaagacagacacgaggaag

SEQ ID NO: 57575 - RNA, 77 nt, Homo sapiens
cccagcaccccacacccccccagcaggccagggaggccagcacggcacagacaggcgggcacacaaacaccagccgc

SEQ ID NO: 57576 - RNA, 89 nt, Homo sapiens
gcgcgcccgcgcgcgcgcccggcggcgcccagggcgacagcgcgagagagcgcggccccaggagcaaggcgccaaccggaggcccacgg

SEQ ID NO: 57577 - RNA, 76 nt, Homo sapiens
gcccccgacacggggcgacacagcggccgagagacgccccgagccccggccccaaagacccaaaacagagacaccc

SEQ ID NO: 57578 - RNA, 81 nt, Homo sapiens
ggggagcggacgggaggagagaaacaggaacgagccgagcaaagcccacaaaagaggcagcagacagcaacagcagcagcc

SEQ ID NO: 57579 - RNA, 89 nt, Homo sapiens
gcccgggaaccgccgggaacccgccagcaccaccgcccaaccccaggacaggaggccagggcacgggaaggcagcacgaggcaaaacaa

SEQ ID NO: 57580 - RNA, 80 nt, Homo sapiens
cgccgcaggggccaccgccggggcacccacccgcaggccccagggggcggacaacacagcccgaaccggagccacagacc

SEQ ID NO: 57581 - RNA, 72 nt, Homo sapiens
ccccccgggcacagggaaaggggagggggccagaaggaagacaagcaccaggagccagaggccccacagaaa

SEQ ID NO: 57582 - RNA, 64 nt, Homo sapiens
ccaggagcagagcgacagcggcgagcagaacacggcgagcgggaaaagaaaagccaagaggaaa

SEQ ID NO: 57583 - RNA, 71 nt, Homo sapiens
gcaaccgccacgagacaccaaggcccgggccggcgaggcgagccagccaccaccaaagaacgaggaaccca

SEQ ID NO: 57584 - RNA, 79 nt, Homo sapiens
gagcgggcagccgccgccaccccgcggccgcacccccgccccaggagggaaggcacacagcgccgcagagcgcgcacga

SEQ ID NO: 57585 - RNA, 57 nt, Homo sapiens
aacaaagcagagcccacgaacgagcccggcacaacggggccacagagagcagccacc

SEQ ID NO: 57586 - RNA, 82 nt, Homo sapiens
caaggccgagggcagaaccggcggggagcggccgggcaaccccaaggccaggggaggccacgaagggggagcccgcagaagc

SEQ ID NO: 57587 - RNA, 79 nt, Homo sapiens
ccaggacaaagacggcgcagagagaaaggacgcagccgagaaggcacaacagaggaccagggacagaagagaagaccgc

SEQ ID NO: 57588 - RNA, 76 nt, Homo sapiens
ggcagcacacagcacgaccaccacgaaaccccaaggcgcagacaccgacggagcgggagccagagagcgccgccac

SEQ ID NO: 57589 - RNA, 80 nt, Homo sapiens
gacgcccagcacaggaaccggcaggagaaggggcccggcagccgcccgaagacacgcaaaaaacaccaaggaccccgaag

SEQ ID NO: 57590 - RNA, 76 nt, Homo sapiens
aaaaggaagaagaggaaaaaagaaaaggaacaaacgaaagagagcagcgcaaccagaaacagggagaagaccacaa

SEQ ID NO: 57591 - RNA, 52 nt, Homo sapiens
aaggacacccggacccaaagggagacgcgcacggaccggaaccagaacaaga

SEQ ID NO: 57592 - RNA, 58 nt, Homo sapiens
cacggcggagaccccccagaggaagagcaggagagagagaacagcacaggagagagcg

SEQ ID NO: 57593 - RNA, 81 nt, Homo sapiens
gacaagaaaggacccaagagcagcggaaagcagaccacaccaggggaccaaaagaacccagccaacccgcagagggagggg

SEQ ID NO: 57594 - RNA, 70 nt, Homo sapiens
caggcaaaacaaccagaaggggagaaggcaggcaccacaaaaaggacaggaacaggaggcccggaccccc

SEQ ID NO: 57595 - RNA, 82 nt, Homo sapiens
gccaggagaggcgggccagcggagccgggacggagagagagggggaaccggggaaggcaccggcaaggggggaggcggacca

SEQ ID NO: 57596 - RNA, 79 nt, Homo sapiens
caacccagcacggccaaaaagaaggcaggagaagaaaggaagagacgacagccagcaggcaggagcccgcccagaacac

SEQ ID NO: 57597 - RNA, 77 nt, Homo sapiens
agaacacagcaaaaaaaacaacaaaaaaacagcagagagggaacacaggcgcagaacgccggcaggaaaggagacac

SEQ ID NO: 57598 - RNA, 74 nt, Homo sapiens
aaacgacccgaagagaagggggacaaagggacacaggaacgccacaagaaacaacagcaaggcgagggccacga

SEQ ID NO: 57599 - RNA, 65 nt, Homo sapiens
ggcaagcaagcacaaaaagacgcaaggcgcgcaaggagcgccccacaaaaccaagcgaggccagg

SEQ ID NO: 57600 - RNA, 39 nt, Homo sapiens
cgccggccagagaagagaacagacgaagaacggaagcgc

SEQ ID NO: 57601 - RNA, 75 nt, Homo sapiens
ccaggcgcccaaacccggaccagggggcacggaccaggagcacccacccaggccccccgacaccacaaagcaccc

SEQ ID NO: 57602 - RNA, 80 nt, Homo sapiens
cagcagcgccccccaccccaccgccaccgaggcccccccgccccccagggaggcccaagcagccccaaaaaacagacaaa

SEQ ID NO: 57603 - RNA, 71 nt, Homo sapiens
cgggaaaggccaacagaacaagagagaccaggggccacacgggcaagcaaaacggagaccgagaagcgagc

SEQ ID NO: 57604 - RNA, 76 nt, Homo sapiens
cccccgcccggaaagcgcccagccaccagcaaccccccaggaacgggacccgaacaacgaaaaacaagcgaacaga

SEQ ID NO: 57605 - RNA, 80 nt, Homo sapiens
agaaagcaggcgaacccgcggcgcaaaacgaaaaaagaagccacccaccagacgaaggaaagagaagacagcaagcaaac

SEQ ID NO: 57606 - RNA, 71 nt, Homo sapiens
caaaaccccgcgacaggagcacggcagcaggagcaacacgaaagaaccgaagcggagaacgcaagaaggac

SEQ ID NO: 57607 - RNA, 74 nt, Homo sapiens
cccaggaaccgaagaacagacccagacccaccagccacaaaccagccagccgccagcacccaacaaacgaagga

SEQ ID NO: 57608 - RNA, 70 nt, Homo sapiens
cgggccgcgcgccggggcaaagaaggcgacgagaagaggcgaccccaccgcgcaaacagcgaagcggcgg

SEQ ID NO: 57609 - RNA, 69 nt, Homo sapiens
cccacaaccgccaccacccagaaccaacggacccaaaaaacaaggaggaaaggccccaagaaacccccg

SEQ ID NO: 57610 - RNA, 81 nt, Homo sapiens
agaagagaggaagcgagcagcacgggcaagcgggcagcgaagagagagaccccccggcggaaggcacacgcacacaccgag

SEQ ID NO: 57611 - RNA, 72 nt, Homo sapiens
agagaaaaagcaccgaacagaaagggagcaaaggaggacaagagagagcaaaggcaggcgaaccgggaacgg

SEQ ID NO: 57612 - RNA, 39 nt, Homo sapiens
ggagcggccagccgacaggggcggaacagaacgacagga

SEQ ID NO: 57613 - RNA, 61 nt, Homo sapiens
ggcaccaaggaaagcagaagacaaaacacccccgccccacaaacagaaagaaaagacaaga

SEQ ID NO: 57614 - RNA, 74 nt, Homo sapiens
ccaaagccacccaaaaagagcaaacaaccggggcagacaacagagcaaagcagcccgaggaggcacgcaaaaca

SEQ ID NO: 57615 - RNA, 55 nt, Homo sapiens
gaaaggcaccgaaggcaccaggcacgggaggacccagcccacggaaagaggcgag

SEQ ID NO: 57616 - RNA, 55 nt, Homo sapiens
acccaaccagggccgggaaacgagagcacaccagcccgaaacgggcacggcccgg

SEQ ID NO: 57617 - RNA, 79 nt, Homo sapiens
cgcggcccgggcgagcccggagaagaggaagacaagcagaccggaagaccgacggaagaccacaccccgagggagccca

SEQ ID NO: 57618 - RNA, 74 nt, Homo sapiens
gaggagggcgcggaggagaggagcgagcccagacaaacgacccaggccgaaagacaacaagagccccgcacccg

SEQ ID NO: 57619 - RNA, 92 nt, Homo sapiens
agcagcacccgagcaaaccccagcaagagcggaggcgcccggcggagcagaggaaccacacgcgacaggcaaccacgagaaaacggaaccga

SEQ ID NO: 57620 - RNA, 62 nt, Homo sapiens
ccggaaaaggccgaagggcacgaaagaggcaagagaggaaagaaacgcggcaagaaagcgac

SEQ ID NO: 57621 - RNA, 49 nt, Homo sapiens
agggggagaaggcacccccagcaggcgcagcccagcccgaaagcagaac

SEQ ID NO: 57622 - RNA, 80 nt, Homo sapiens
ccccacgccccgaggcggcagaccgcccccccagccgcgcggcccccagaccccggcgcgggcacccacaagagcaccag

SEQ ID NO: 57623 - RNA, 74 nt, Homo sapiens
caaccggcgggccgaggccgcaggaggagggagggacgccagaggggaagccgcacgagggagagacggaccaa

SEQ ID NO: 57624 - RNA, 77 nt, Homo sapiens
agggacgcccagaaggaacgcaggcacaagccagaagacgaaccagccaagggacaaggcagagacccccaaaacaa

SEQ ID NO: 57625 - RNA, 76 nt, Homo sapiens
cagaaaggagaccccggaacgaaaaccccccaacaagaacacggaaaggagacggcaagcaggaaacggaggacgg

SEQ ID NO: 57626 - RNA, 38 nt, Homo sapiens
acaggagccccacgccacggccagcgccgcccggcaca

SEQ ID NO: 57627 - RNA, 58 nt, Homo sapiens
acaagcccacagcaggaaaaaaggaagaaggaagaaaaagcggggaaggggggcaaaa

SEQ ID NO: 57628 - RNA, 90 nt, Homo sapiens
gagaagaaccgccgcgcagccgagaacgccgcgcgcgcacccaacagcgaccgagcgacgacgccccggagagcaagcgagcggaaggcc

SEQ ID NO: 57629 - RNA, 72 nt, Homo sapiens
gaaggagacgggaagaaggaaaggagcgcccccaaaacaaacaacccaaggaaacacaggccaccgaggaag

SEQ ID NO: 57630 - RNA, 72 nt, Homo sapiens
ggagggacacacccaagcacggaccaaaaaaggggagcaagaagaaagagcagggaggagggagcgacagga

SEQ ID NO: 57631 - RNA, 78 nt, Homo sapiens
acagcaaggaccagcaaaacaacaaaccagaaaccgcacagcgaaaaaacccaccggaaaagcagacccaaagacgcc

SEQ ID NO: 57632 - RNA, 83 nt, Homo sapiens
aagcgcgcacacccgccgacgaggaacggcggagcagggagcccaaagaccccggagacaggcgccccgggagacgcggccca

SEQ ID NO: 57633 - RNA, 74 nt, Homo sapiens
gaaaaggacgaaccccagaaaacagagccccagagccagaacgaaggagggacgcaggccccaggagggggagg

SEQ ID NO: 57634 - RNA, 70 nt, Homo sapiens
aggggaaagcccgggccaagcgggaggcgccagggaacaggcacgccccacccgccagccgagcccccga

SEQ ID NO: 57635 - RNA, 89 nt, Homo sapiens
cgcgggccgaggagagcggaggagggggcaagaacgcgcaacacagcgaccgacgggaccggcgcaagcagcggaggggaaagaaggaa

SEQ ID NO: 57636 - RNA, 76 nt, Homo sapiens
agggagcgggagcgaggcgaggagaggggagcggggggcgccgcgccaaggaaggaccacgggaggcagaccccga

SEQ ID NO: 57637 - RNA, 78 nt, Homo sapiens
agacaagagcccgcgggcacgacccgaaaaaggcacaaacccagcacagagaagacggcgacaagcaaaagacgacgc

SEQ ID NO: 57638 - RNA, 74 nt, Homo sapiens
ggcggggcgcaaaccgagacaagcaccccgaagcgccgggcccacccagacaggagcccagcagggggaggccg

SEQ ID NO: 57639 - RNA, 76 nt, Homo sapiens
ggaggacgcagccagaaaggaacaacccaaaaaacaacaaccggacacagagaaagaaaagggaacggaaaaaaaa

SEQ ID NO: 57640 - RNA, 64 nt, Homo sapiens
ccacggacgaaagcggcaagaacagccagcaaagacaagagcagaccagcagccgcagcgcgac

SEQ ID NO: 57641 - RNA, 77 nt, Homo sapiens
ggaagaagcgggacccgcagggcaaaggggggaagaacaagcaaacgagaaggagacccaaccagccagacagcccg

SEQ ID NO: 57642 - RNA, 79 nt, Homo sapiens
aggcgccgcgccaggccgggcgggcgggccggcccagggagaacgcaaaaccaccacccccacaaaaaacgcagggaga

SEQ ID NO: 57643 - RNA, 75 nt, Homo sapiens
cccgaaggcccacaggacaggagagaaagacgcccgaaaacgcggcgaacccgggacaaaccaccaaaggccagg

SEQ ID NO: 57644 - RNA, 73 nt, Homo sapiens
gcggggggaaaaggagccccaccaagagggaaaagaggacgaggcgcgaaaaggcaaaggcaagaaagagaaa

SEQ ID NO: 57645 - RNA, 76 nt, Homo sapiens
cgacacgacggcggaacggggaacgacggcccagcaggcggggaagagaaaggggagcgcgcaaggaagcgcgggg

SEQ ID NO: 57646 - RNA, 78 nt, Homo sapiens
ggcacgcccaaggacaagaggggcccgggccgggggagcgcggcgcagccggccagccgggccgcggcccgagggagc

SEQ ID NO: 57647 - RNA, 52 nt, Homo sapiens
ggccacaaggaaaacaaggcgcagcggccaacggccggaagcaccaaaccac

SEQ ID NO: 57648 - RNA, 77 nt, Homo sapiens
gagagagagaagcaaaaggagaacgaaagcggaccagggaaacaacacgaggaggacggcacaaaaagcaccagcgg

SEQ ID NO: 57649 - RNA, 51 nt, Homo sapiens
gaagcacagaaccagcacgcgggacggccgcacaagcgcagagcaagagag

SEQ ID NO: 57650 - RNA, 82 nt, Homo sapiens
acccacccacgccaggaccccgccaaggagccccacgagagcaggagaaagacagcaaagaaaaggagaagaaaggaaaaaa

SEQ ID NO: 57651 - RNA, 80 nt, Homo sapiens
cgcagccagaaaaggggagaagcgcaaagagggagcaaaggaggcgcgcccaccgcgagcggaaaagaccccaccaaaac

SEQ ID NO: 57652 - RNA, 86 nt, Homo sapiens
gaagcagggaaggaggccgagccgggaccaggcccgggggcggcggccacgccaaggacggacagcccaccgaggaagaccaaagg

SEQ ID NO: 57653 - RNA, 65 nt, Homo sapiens
ccagcgacgagcgcagaagggcgaggaaaaggggccaaagcagccacacacacagagagagacga

SEQ ID NO: 57654 - RNA, 60 nt, Homo sapiens
cacccccgccagcagccgccggagccagccaacgagcgcagcacagcagaccgcgaagac

SEQ ID NO: 57655 - RNA, 80 nt, Homo sapiens
gagaagccgaaaagcgcagcgagcggagccgccggagagcgcgcccaggagaagggagcaggagaagcaccagcaccccg

SEQ ID NO: 57656 - RNA, 52 nt, Homo sapiens
cacacaggacagccacgaaccaaggaaccagcaaagagaggcaagaagcaaa

SEQ ID NO: 57657 - RNA, 40 nt, Homo sapiens
gcggcggccacgccaaggacggggaccaagcgccagaacg

SEQ ID NO: 57658 - RNA, 75 nt, Homo sapiens
aagaaccagacaagcggaaaaacagaaccacaggaagcagagccaaaagacaaaacgggaccacaaggagggacc

SEQ ID NO: 57659 - RNA, 81 nt, Homo sapiens
caagagagcagaacgccacacggcaacccgaacgacaaaacgcaaagacgaggaccagggaggagggacacacgacaggcc

SEQ ID NO: 57660 - RNA, 62 nt, Homo sapiens
gccaaccccccacagcagggggagagagggagcaggccaccggaagagggcacaacgggaag

SEQ ID NO: 57661 - RNA, 69 nt, Homo sapiens
gaaggacagagagggaaaggaaggcacggcacacgagaaggcaagggggaaagcggaccaagaggaaac

SEQ ID NO: 57662 - RNA, 74 nt, Homo sapiens
cgagcgccggccccggacagaagagcgccgagaagcagaagcagaccacaagacaaaccggcgaccacacacgg

SEQ ID NO: 57663 - RNA, 60 nt, Homo sapiens
aggaccccaagcagcggacacccccgccaggagaaaagaaagccagaaggaaggaagcaa

SEQ ID NO: 57664 - RNA, 75 nt, Homo sapiens
acagcaacaagacacggagcaaggaggaaaacacacggggccaagacaagcagcagagaggagcagcggggcagg

SEQ ID NO: 57665 - RNA, 74 nt, Homo sapiens
acagggagaaacacggccaggaaacgacacacaaagaaagaggagccggggacaccggaacccaggacgagaaa

SEQ ID NO: 57666 - RNA, 41 nt, Homo sapiens
acgcagacacacaggccaagagcggggccgggagaggaagg

SEQ ID NO: 57667 - RNA, 74 nt, Homo sapiens
gaccaccccgcgcagccaccggacaccgcaggcgagaacgcggacaagcaaacaaagaggaaaaagagggcaac

SEQ ID NO: 57668 - RNA, 83 nt, Homo sapiens
gagggggcacggccccggccagcccaggacaagaacaaagggcggaaggcggcgcagaagaaggcacagggaagagggaagcg

SEQ ID NO: 57669 - RNA, 55 nt, Homo sapiens
ggaagacagcagagaccaaaccagacaagccacaagcaaaaaacagaaggaagag

SEQ ID NO: 57670 - RNA, 75 nt, Homo sapiens
aaaacacagcgcaggaaaagacccaccccaaggcgccccccacaacacagcggcggagacaaggggcaaaggaga

SEQ ID NO: 57671 - RNA, 74 nt, Homo sapiens
ggcgcccggacaacccggcgcagcccgaggacgagagaccggcgcaggagggcgccagcccggcgcgacagcag

SEQ ID NO: 57672 - RNA, 53 nt, Homo sapiens
cacacgggggagcccagaggagacaggcaagcgacgacagaacagccagcacc

SEQ ID NO: 57673 - RNA, 68 nt, Homo sapiens
gccagccccgagccgaggcacggagccagcagcagcaagcagcgggcaagacccgcgccggccccgac

SEQ ID NO: 57674 - RNA, 58 nt, Homo sapiens
caaggggccaccaggaggccagggggcgccagcaaacccccggggcgcccaagagcgc

SEQ ID NO: 57675 - RNA, 75 nt, Homo sapiens
ccccgggggacggaggaggccgcgccgagaaccgaccgagcacaacaacagcaacggaggcgggaccggaacagg

SEQ ID NO: 57676 - RNA, 62 nt, Homo sapiens
cagggagcggccagcccgccagaggagaggagagagagagagagaggaagcgaagaaaaagc

SEQ ID NO: 57677 - RNA, 72 nt, Homo sapiens
gaaaacaggcgccaggacgaaaggccccccggacagccagagaaccaaaggcagaccacacggcacaccaga

SEQ ID NO: 57678 - RNA, 71 nt, Homo sapiens
gcaaagaaaacgaggagcagcacggaagaaaaggggcggaaggagaaaagacggcgaccaacaaagccaca

SEQ ID NO: 57679 - RNA, 76 nt, Homo sapiens
caaagaaaacaagggcagagaaagaacagagacaaaggaccaaagcaacagagcgccaaaaagaggaccccagcac

SEQ ID NO: 57680 - RNA, 60 nt, Homo sapiens
ccgagggaggagcggggacggcgacccaggagaggacacagaagcagagagagccaccgg

SEQ ID NO: 57681 - RNA, 76 nt, Homo sapiens
aaccaagaccgaaaacagaaggaaagaaggaacggagaaggcaaagaagggggaaaaggaggcgccaccccagcgg

SEQ ID NO: 57682 - RNA, 81 nt, Homo sapiens
gccgaagaccagcccagaaaaccaaccccaaagggccagagagcaacgacccagaagacggcgaacacaaacgggcgagaa

SEQ ID NO: 57683 - RNA, 78 nt, Homo sapiens
ccagcccgcggaggccgcggagcgccagccaagaacaaaacaaacggagagaggagggagaaacaaaggccaaagacg

SEQ ID NO: 57684 - RNA, 76 nt, Homo sapiens
ccccagacggaaagcacaaaccacaaaagaaaacgaaaaacacagaggagccccggcaagcagcagcaaaccggac

SEQ ID NO: 57685 - RNA, 75 nt, Homo sapiens
aggcaagaccgaacagaaggaacgacgcggaccagaagccagagcgaggacgccggcagggacagcaaacgggca

SEQ ID NO: 57686 - RNA, 71 nt, Homo sapiens
ggaaccccggagaaaaggccaagaaggcagagaccccgcggaagacaccagaaggggcagcgcccccacac

SEQ ID NO: 57687 - RNA, 80 nt, Homo sapiens
agacccaccaccccaagggcacgagaaggagggcgcggggagcccgcacgagcagcgaacagcaccgcaggcagcagaag

SEQ ID NO: 57688 - RNA, 99 nt, Homo sapiens
gccccccgagaagcccagaggcgcccggggcaacgggccgacagcacagagagagccggagggcaggaagccgccaccaggaaccccaaagaaggagag

SEQ ID NO: 57689 - RNA, 60 nt, Homo sapiens
cgcagggaagcccaggggcaggcgggagcagcggaagacaccaaggccagggagggccac

SEQ ID NO: 57690 - RNA, 70 nt, Homo sapiens
gagggcccaggaacagcagagacaaaaccaaggaggacacaaccgcgagaaccaccagcaaagacgcagc

SEQ ID NO: 57691 - RNA, 57 nt, Homo sapiens
cggcacagcccccggacagggcgggaccaccaggagcagagcggaggccaccagccc

SEQ ID NO: 57692 - RNA, 53 nt, Homo sapiens
agaacgcccgcggacgacccgagggcgacccaccaacaggcaacccagacaaa

SEQ ID NO: 57693 - RNA, 61 nt, Homo sapiens
cccgagccccccgagaagacccagcagcgccgcccaagagagagaagagaggcgcgagggc

SEQ ID NO: 57694 - RNA, 84 nt, Homo sapiens
cgcggcggcagcagcaggagagggacccagacaggagcgcgggaagaagccggcccggggccgcggacgaggaccagcagaggc

SEQ ID NO: 57695 - RNA, 83 nt, Homo sapiens
ccaagacaccccgaccagcacacacgcaaggagacagcagcacaaggaaaacgagagaaacgaaggcgagagaaacagcaagg

SEQ ID NO: 57696 - RNA, 56 nt, Homo sapiens
ggcacgccccccaccccaacagccaaccagaaaaccagaaacaccggcagggagca

SEQ ID NO: 57697 - RNA, 78 nt, Homo sapiens
ccaccacaccaggacccaggggccacaagcccgacgagggaaaaaaaggacccaaggcccagggaaagcaccccagag

SEQ ID NO: 57698 - RNA, 68 nt, Homo sapiens
gaaaagaagaaggcacaaaggaagccaaggagccaaaaaacccggggagccagaagagggggccgggc

SEQ ID NO: 57699 - RNA, 75 nt, Homo sapiens
ccgagaagcggggcaccacgaaggaccgaagagccccaccaaagccaccaagccaagaccagcagccaaaggaag

SEQ ID NO: 57700 - RNA, 74 nt, Homo sapiens
aggaaaacaggaagagaagccacaacacacaaaaagaaaaagggaaaaccaaggaccagcaggaggcaaacaga

SEQ ID NO: 57701 - RNA, 73 nt, Homo sapiens
cacagcccccgccacgaacaggacggcagacaaggaaagcagcacacgcaccaaagagagaaagaagaaaagc

SEQ ID NO: 57702 - RNA, 89 nt, Homo sapiens
gaggcgaccgagacggggagcccaaagcaaagccgcggcccaggagcccgccggcccggcccccggccgcccgggccgcgccgccgcgc

SEQ ID NO: 57703 - RNA, 57 nt, Homo sapiens
cagggccccacgacacaaggcccagaaaccagaccccaagaccccagacgcgaggaa

SEQ ID NO: 57704 - RNA, 77 nt, Homo sapiens
cggacagagggacacagcgggggcccgcggagcagagaccacagggccacgcaacacgacacaggagagagaccaaa

SEQ ID NO: 57705 - RNA, 71 nt, Homo sapiens
aaaaagcgggaacgcaggacccaaagcaggagaggagagaacaagagacgagacaaaagcgcccagcacca

SEQ ID NO: 57706 - RNA, 81 nt, Homo sapiens
agaggcgaggaagaggccgaggacggggaagaggacgaggcagaggaaacccgaggccaggggaagaaggaagaagaacag

SEQ ID NO: 57707 - RNA, 80 nt, Homo sapiens
agggaaccccgccaagcgcacagcaacaggcagcaccaaagaaaaccaaccaaaggaagcgacaaggaaagcaacagaag

SEQ ID NO: 57708 - RNA, 73 nt, Homo sapiens
aaggccccacccagaaaccaagacaccacgcccccccaaaaagagccgaaaaaggacccagcgacaaaggaac

SEQ ID NO: 57709 - RNA, 80 nt, Homo sapiens
ccacaaggcaccaagcggggggggcaggaagcccgaggaacccagaagaggaggaagaggaggaggaggaggaagaggaa

SEQ ID NO: 57710 - RNA, 87 nt, Homo sapiens
gcccccggcccgcgggcggcccacggcgagcccgaagagccaaccacaggagggaaaccacgcaggcaaacgagaaaaagccgagaa

SEQ ID NO: 57711 - RNA, 99 nt, Homo sapiens
aggacccaggagacagagaaacaagagccgcaaggacagacagcaaccaagcacccaaccgaaccccggaagccaggaggaaacggaggccaccgggga

SEQ ID NO: 57712 - RNA, 69 nt, Homo sapiens
aagcaagagcgagagaccagcccggacagccagccaaagaaccagccagcaagaacagcacgcaacaaa

SEQ ID NO: 57713 - RNA, 79 nt, Homo sapiens
ggagcaaagacggcgcggggcagcggccggagggaccagggccacgcaggcagggcagagcaccagcaaggaaacgaag

SEQ ID NO: 57714 - RNA, 70 nt, Homo sapiens
aacgccagaccaaaccggaaaacacggcaggaccgacaacacagaaacagcggcgacagcaagccacaac

SEQ ID NO: 57715 - RNA, 74 nt, Homo sapiens
cccgaggcggacgcagagacagggacggcagccggccgccaccccacaggcgcagaagccgccaggcccccaga

SEQ ID NO: 57716 - RNA, 82 nt, Homo sapiens
aacacggacacccacagcggggcggcggcggcggcggcgcggcccaaaaggggccgccaaggaccagacagagaagaccggg

SEQ ID NO: 57717 - RNA, 86 nt, Homo sapiens
acagaacaccagcacggcgaaggagggcgaaaaacaaggccaaagaacgagcaaaggaaaaaaaagcagggaagaagaacagaaaa

SEQ ID NO: 57718 - RNA, 80 nt, Homo sapiens
agggaaggcgcgaggaggaaaggaggacgaggcccccgaggagggaacaagccagaccaggaggagaaaacaaaaaccaa

SEQ ID NO: 57719 - RNA, 72 nt, Homo sapiens
cgaccagcaggaacggacgcccaaagaggccagaagagggcccacaccacaaggagcaccaaaaaaaggcca

SEQ ID NO: 57720 - RNA, 74 nt, Homo sapiens
ccaggaagaaaacaagggagcacaagggccgaacacagacagccaaccaggcgcggaaaaccccaacacagcag

SEQ ID NO: 57721 - RNA, 80 nt, Homo sapiens
gaagcgcagggagaaggaagaggggaaaagacagagcagcccacccaggcggaggaaggggcaaccagccaggcaacccc

SEQ ID NO: 57722 - RNA, 84 nt, Homo sapiens
ggacaagccacaaggggccagagcgggcgccagcgcagggcagacaacgacacccgaggaggcgcagacaaagaaggagacaca

SEQ ID NO: 57723 - RNA, 78 nt, Homo sapiens
aaggagaggcccagcaaacaaaggcaggaagagaaaagcagcaggcaacaaaagaaaaagaccacagagaggaaggaa

SEQ ID NO: 57724 - RNA, 81 nt, Homo sapiens
agcggcgccccaccgcacgggcaggcacagccagggcgaaagaagaccccgccaccggcccccacgcaccaccaaagccgc

SEQ ID NO: 57725 - RNA, 85 nt, Homo sapiens
gacgggaaggcgggagacgagaagccgaaaagcgcagcgagcggagccgccggagagcagagaaagggggaggcggacccggcaa

SEQ ID NO: 57726 - RNA, 83 nt, Homo sapiens
cgacgggggacaggcgacaggagccagaagggaacaacacccgaggccccacacaggaaggaggaggaccacaaaccccgccc

SEQ ID NO: 57727 - RNA, 38 nt, Homo sapiens
aaagagacaccaccgagagacacagaaagacaagggaa

SEQ ID NO: 57728 - RNA, 77 nt, Homo sapiens
aaggacaaagagacaagccgagagaaagcaagcaaagacagaaggacagagaagaacccagaaaaaagcaaggccga

SEQ ID NO: 57729 - RNA, 56 nt, Homo sapiens
gcgaacacagaggaaaccgcaccgcccggagggccagcccgccagaggcccaccca

SEQ ID NO: 57730 - RNA, 72 nt, Homo sapiens
gcagcgcagcagccaaggagacaccccagcgcaggacacacacacggacggacaaccagcacgggggcgcgc

SEQ ID NO: 57731 - RNA, 71 nt, Homo sapiens
gagggagagccaaagaaggagacgggccccaagagcgaccgcagcacgggggcagaccgcaagccagcgga

SEQ ID NO: 57732 - RNA, 79 nt, Homo sapiens
ggcggcgaaaagaagaacaaacgacgcagagaagaccacagcaccgggaagccagcagcggcagagggcggggggcacc

SEQ ID NO: 57733 - RNA, 76 nt, Homo sapiens
ggagacgcagggccagagaggcagcagaagcgcaacaaacggagaggagccaagcccaacgggacgggaaaacggc

SEQ ID NO: 57734 - RNA, 76 nt, Homo sapiens
ccccaggaggacccccagagagcaacgaacaccacagacgaaagccaagggaacgcaaagaaggccacagggacag

SEQ ID NO: 57735 - RNA, 78 nt, Homo sapiens
gcggcccccgcccgccccgccgcccgagccggcgccaaggggaggggcgaccccggggcccggccagcacgaccgagg

SEQ ID NO: 57736 - RNA, 88 nt, Homo sapiens
gcccgccaaccccggaccccgcggccggggcagcggcgccgcgccgcgcccgagggagacgagcgaaggacgcgcggcggcccccaga

SEQ ID NO: 57737 - RNA, 52 nt, Homo sapiens
accacagaaggagcaaaacccagaccaggacacagaccggaaaccgaggagg

SEQ ID NO: 57738 - RNA, 37 nt, Homo sapiens
cccgcagcgggaacagcgagagaggaacgaggggcac

SEQ ID NO: 57739 - RNA, 82 nt, Homo sapiens
cgcggggcccggcggggcggccggggcggcgcgacggcgggcgcagggcgaaccccgcacaaaccggccggagaaagcagaa

SEQ ID NO: 57740 - RNA, 85 nt, Homo sapiens
gggacgggacggcggcccagcgagggcggcccggggcacccgcacgggaagcaggcccgccacagggcaaccagcagacggaggc

SEQ ID NO: 57741 - RNA, 72 nt, Homo sapiens
gaaccgaaacggaaagaagcaccggagagacagcacagcacccacaaagcaacgacgaagccaagaccgggg

SEQ ID NO: 57742 - RNA, 84 nt, Homo sapiens
cccgcgacgccgagcacccaggcgacgcccaccaaggagcaccggagggcgcccacaagccaccaagaagggccgcagcagagg

SEQ ID NO: 57743 - RNA, 79 nt, Homo sapiens
ccggccgggacccgaaaccccgaccgcagccaggccgacccgaccggaccagacaaggaaccgaacacagggagggcca

SEQ ID NO: 57744 - RNA, 64 nt, Homo sapiens
cagacggcagggaggcacaaaggggaacacagcggcagcgaggacacaccacgggagccggaga

SEQ ID NO: 57745 - RNA, 61 nt, Homo sapiens
gccgggagccgggcccgaccagaccgggcagacccccccagcgcccgccccagcacccgaa

SEQ ID NO: 57746 - RNA, 44 nt, Homo sapiens
aaaacccaccgagcccgccaaagggggggaggacgcaccgcggg

SEQ ID NO: 57747 - RNA, 77 nt, Homo sapiens
cggcccgccccccgcaacgagaaccaagcccaaagacaacaggcccccccgccccccgcggagccccgcccagcacc

SEQ ID NO: 57748 - RNA, 70 nt, Homo sapiens
agacccccagacacacacacccaacccaaaccaagcacccgaaagagcgaaagcccagacaggaagcaac

SEQ ID NO: 57749 - RNA, 87 nt, Homo sapiens
gaagaagcaacacgcaaacgagagcgaggcaagaaaaacaggggcagagagaagagcacacagaaggccaggagcgacagagcgggg

SEQ ID NO: 57750 - RNA, 62 nt, Homo sapiens
agacgggaacgccagcaaggacagagcgggagccaccagcgccaaagggaagccaggagccc

SEQ ID NO: 57751 - RNA, 65 nt, Homo sapiens
gggcccccgcccccccggccccgccccacgccagaacagaaaagcaggaagcaaaagcccccacc

SEQ ID NO: 57752 - RNA, 56 nt, Homo sapiens
ccaggagcggagaccaaagcgagcccccagcggccagacaagggaaagagaaacgg

SEQ ID NO: 57753 - RNA, 63 nt, Homo sapiens
gcccagcaggccgccgagacagcccccggggccaggccagggcccccgccccacccggccgaa

SEQ ID NO: 57754 - RNA, 62 nt, Homo sapiens
ggccaacagccagggaccgaggaggccgacccgacccagaccacccgcccggcccccaaagg

SEQ ID NO: 57755 - RNA, 64 nt, Homo sapiens
cagggcgcccccggcgagaaaggcgcacaccaagcggcgcacaggaaccaccaggacagccagc

SEQ ID NO: 57756 - RNA, 87 nt, Homo sapiens
agaaaaaagcccagcgcggcgcggggcgcggagcgccggagccgcgcgcgcccccaaaggaaagccgaccaagacggcaccccaaca

SEQ ID NO: 57757 - RNA, 87 nt, Homo sapiens
ccccagcagccggcagcagcccccggggcaagagcaggagcccggcaccccccgccgacaaggagggcgacggggacgaccagcggg

SEQ ID NO: 57758 - RNA, 70 nt, Homo sapiens
accgaggggggggagacggcaaccagggcaaccgacaacaggcacaaagagagaaggaacacccacaggg

SEQ ID NO: 57759 - RNA, 76 nt, Homo sapiens
cccagcggggagcacggcgagcagccaggccaggagaggacagacgcaaagagacaggagggacggaagcacagcc

SEQ ID NO: 57760 - RNA, 67 nt, Homo sapiens
cacaaccgaaacgaccccacggccgcaggccggaaacagaagacagccgaaccaagggcgacaacca

SEQ ID NO: 57761 - RNA, 75 nt, Homo sapiens
ggccaagacaaacagacaagacaccagaaagacagggcccagcacgggcgccaacacgcgaacaggaagaagccc

SEQ ID NO: 57762 - RNA, 73 nt, Homo sapiens
caacaaacagagaaccgccaggaaaggacaaccccacagggagaaccggagacaaagcaggaccccacggaag

SEQ ID NO: 57763 - RNA, 83 nt, Homo sapiens
acccaggacaccccgaagccgagaaagaaaggggagcaagaagaaagagcagggaggagggagcgacaggaagaaagaaaccc

SEQ ID NO: 57764 - RNA, 83 nt, Homo sapiens
cagaagagccaggacaaacgcggcgagaaagagagcaaacaaggagcagacggccgcagcaaagaaaaagcggggaagggggg

SEQ ID NO: 57765 - RNA, 81 nt, Homo sapiens
aggagaaaaggagagaaacacggagacagcaccaaacccacagaggcacgaggcccgggggacaagacccgacccgaacac

SEQ ID NO: 57766 - RNA, 74 nt, Homo sapiens
ggagagagcgaacgacgagccgaccagcacccacaggacaaaaagcaggaagaggagcaggacggagggagaag

SEQ ID NO: 57767 - RNA, 58 nt, Homo sapiens
acgcccaaaggagcgcagggcacgcggcgacgaggaccgacaccgcgaggccaacccc

SEQ ID NO: 57768 - RNA, 85 nt, Homo sapiens
ggggagccaagaagccacgcgggagcccaggcaggggaccaaaggaccccacaaagaagacagacagagaccagaagagaggcgg

SEQ ID NO: 57769 - RNA, 82 nt, Homo sapiens
acagggaaggcacaggcccaggaagacggcccgagaaccacaccccagggccagacggcagggaaccaccaccgaagggacg

SEQ ID NO: 57770 - RNA, 82 nt, Homo sapiens
ccgaccaaagggagaaagggaaaagcaggcagcaagaggaagaacaggcacggaaagcaaaggaacgcacagcacgaagcag

SEQ ID NO: 57771 - RNA, 91 nt, Homo sapiens
gcagcgacgccagcggcggagaaccgacgaaagcaaaagacgaccaggagacacaacaggccaaagccaagagaagaaaagcagcgccaag

SEQ ID NO: 57772 - RNA, 56 nt, Homo sapiens
cgaacaagaaccaagaccaggaaacccgaacccagacagggaacagcaaagagcag

SEQ ID NO: 57773 - RNA, 71 nt, Homo sapiens
gaagagaccacacccagaacaagggcccagaaggcagaccaacaagaaaccgcccccgcaagagcccagaa

SEQ ID NO: 57774 - RNA, 81 nt, Homo sapiens
ggccgaggggccaaccagcgaagagcgacaagccgcggcagccgcggaccaccgccgccaggaaggccgcgggaaaggcaa

SEQ ID NO: 57775 - RNA, 94 nt, Homo sapiens
ccaggcacaagggaaagggaccacgggcaaagaggaaccaggaaaccgggaaagggccaccagcagagaaacagaaaacagccaaaaggacagg

SEQ ID NO: 57776 - RNA, 81 nt, Homo sapiens
cgcgcaggcgccaacgccccggggagaagcgagcgaagaaacaggggagaaaccccgcggggaagccgaggaaagcaacgc

SEQ ID NO: 57777 - RNA, 43 nt, Homo sapiens
cccacacacccagccagacagacgagaaaacgaacccagaaac

SEQ ID NO: 57778 - RNA, 81 nt, Homo sapiens
gcagagaggagcggggagcaagcaggaagagggaggaacagcagcggaaacaagcacggacggcgggagggcggccaacga

SEQ ID NO: 57779 - RNA, 73 nt, Homo sapiens
ccgaagacggccaacgcagacaccagaagggcgggaggcagcggcccccacagaaaacagaaacgccggagag

SEQ ID NO: 57780 - RNA, 58 nt, Homo sapiens
ggcggacacacagacccccaccaagcagacaaaacagaggagaccagaccagaagccc

SEQ ID NO: 57781 - RNA, 61 nt, Homo sapiens
ggggcaggcgggcacgaggaccagcgggccggagccccgagaacacggaaaggagccaacg

SEQ ID NO: 57782 - RNA, 77 nt, Homo sapiens
acccccacgcgacaccagggccgcgggaggaccgcgcggggcacacgcacggcaaaagcagaccggaaaacccaccg

SEQ ID NO: 57783 - RNA, 85 nt, Homo sapiens
gccggcgcggcgcggcggccgcagccccgacgggcagccgggccaggggcccccaggggacaagggccaccaggaacaaggaccc

SEQ ID NO: 57784 - RNA, 78 nt, Homo sapiens
caacccgcgggcacaaagcccgccagacaagagaccggggcaggggcaaagaagcaagcgcacgcaagggggccacca

SEQ ID NO: 57785 - RNA, 72 nt, Homo sapiens
agcccaccaggacgaccgcgccgcccagcacgccagaacagcagaccagaggcccaggccccgcacggcagc

SEQ ID NO: 57786 - RNA, 73 nt, Homo sapiens
ccgcccgggccagcggccgcgcacccccggccggaggcaccagcacccgccagcgccgccagcgcccggcccg

SEQ ID NO: 57787 - RNA, 80 nt, Homo sapiens
ccgccacacccgacccgccaagaagccgcgagcaccacagaggcccagggaccaagaggggcgacccgcagcccggccac

SEQ ID NO: 57788 - RNA, 74 nt, Homo sapiens
gggacaggaaacgggcaccggacaaagaggagggaagcgcaagcaccccagaaaaagcagggcagcagcccaga

SEQ ID NO: 57789 - RNA, 80 nt, Homo sapiens
ccccggcccggccccggcggcacggcgccgaccagcaccaggggaagcgggacaacgggggcccgaaagccaacgccagg

SEQ ID NO: 57790 - RNA, 81 nt, Homo sapiens
gaaggggaccccagcccccccagccgaaacgaaagaccacagcaagaccacgcccccagccgggggaccaggccgaacgac

SEQ ID NO: 57791 - RNA, 40 nt, Homo sapiens
aaagcacaccaccccagccaaaaaggggaagaaggccaac

SEQ ID NO: 57792 - RNA, 83 nt, Homo sapiens
ccgagcgcgagcacacaagccggccaaggaggaccgcgccaacaggacgaggagaccgaccaggagaccccagcggagacgac

SEQ ID NO: 57793 - RNA, 92 nt, Homo sapiens
ccccgccacaccccagcgacgaccacaaaaccggaccccccgcccaccccaggcacacaagaaggggcagagaggagagaggccaaggccgc

SEQ ID NO: 57794 - RNA, 74 nt, Homo sapiens
cagccaagccgggccgcccgcggcccgccgcccgccagcggacccgcggcaccgccccgcgcgcgcccggcccc

SEQ ID NO: 57795 - RNA, 64 nt, Homo sapiens
caccgcaggcagacaaaagggccaaagaagggagagagggcaggaagaggccaagggcaccaga

SEQ ID NO: 57796 - RNA, 73 nt, Homo sapiens
cagccaagcaggaccacccaccagccaccaggggaggcaagcaggggggcaaaggaaagaaggcagaaaggga

SEQ ID NO: 57797 - RNA, 78 nt, Homo sapiens
aaaagaagaacgcccgcaaccaaaaggagccccaacacaaaaggaagacccagcgaggaagaaagagccaaaaccccg

SEQ ID NO: 57798 - RNA, 65 nt, Homo sapiens
agagaagacgacgcaccgcaggcagacaaaagggccaaagaagggagagagagcagagaaagggg

SEQ ID NO: 57799 - RNA, 64 nt, Homo sapiens
agaaacaacagggcacagaagccaccaagggccagaagcaaccagaccacagagaagcaggcga

SEQ ID NO: 57800 - RNA, 77 nt, Homo sapiens
aaagcgcccgagacgggcccgccgaaagaagaagccacaaacgaaggagaccagaaccaacacagcccccaggcggg

SEQ ID NO: 57801 - RNA, 73 nt, Homo sapiens
ccccgaaagcgggacacagcccaacagccgggaaggggaaaagaacagagaagagagaagaaggggaacaaga

SEQ ID NO: 57802 - RNA, 96 nt, Homo sapiens
acggccgcgcgccaccccaaggaggacggcggacacggccagcgaggacaggcgaggaaaaccaccacacaggggaaacacccagacaacacacac

SEQ ID NO: 57803 - RNA, 80 nt, Homo sapiens
acccgggaggggcggagggcaagagcgccgaccgggcggcgaggaaggcgccccgggcccgccagaggccccaccaccca

SEQ ID NO: 57804 - RNA, 61 nt, Homo sapiens
acagccggcccgggccgggagcgggcagcagacaacagggagaccccacgggacaccagcc

SEQ ID NO: 57805 - RNA, 70 nt, Homo sapiens
ccagaagcaaaagagacccacagaggagagaacgagccagacagccgccgacccccggcaaagcaccaga

SEQ ID NO: 57806 - RNA, 75 nt, Homo sapiens
gagagcgagcgagggggggcgcgccggaaaccggagcgcgcagcagaaggaccacgggaggcagaccccgacgac

SEQ ID NO: 57807 - RNA, 82 nt, Homo sapiens
gaggaagccccacaggaagggccgaggaagcgagaccaggaaaaaaggggaaacccaggaccacaaaaaggcaagaagcagc

SEQ ID NO: 57808 - RNA, 56 nt, Homo sapiens
agcgcagcaagacggccgcgcggcccgcaggccacacaaggggaaaccgcagaagc

SEQ ID NO: 57809 - RNA, 76 nt, Homo sapiens
ggaccagcaaaaaaagaacccaacacgaagcggcgagcagaagaagcagcggggaaaagggagacgagcacaacag

SEQ ID NO: 57810 - RNA, 41 nt, Homo sapiens
gcaggcgggagccggggcgggcaccagagggaacacaagac

SEQ ID NO: 57811 - RNA, 51 nt, Homo sapiens
cccagcccccaggagcgggaacaggggagcaccgcaaagcaaggcgaacag

SEQ ID NO: 57812 - RNA, 79 nt, Homo sapiens
gccgccgcgcacaccggcggcgggacgacgcggacagcgggcggagccgacgagcggcgggcaaagccgcagcgcaaaa

SEQ ID NO: 57813 - RNA, 80 nt, Homo sapiens
gaaaaggaggacggggacccggacagccgccgacccggcgggggaggagacaaggacccaaagaaagggaagaaaagacc

SEQ ID NO: 57814 - RNA, 73 nt, Homo sapiens
gccaccgggaaggcggggaggaggccccaaagggcgagggagagaaggcgcgcaggagagcgcagagacccgc

SEQ ID NO: 57815 - RNA, 79 nt, Homo sapiens
gcgcagcgccagcgccggcacgaaacccgcaagcggagaaagggaaagacaaggagccgggccgagaaaccgaaccaga

SEQ ID NO: 57816 - RNA, 77 nt, Homo sapiens
agaaagggaacaacacaaagcacaccgccaaacccaggccagagcacaggaaagcccagacgcacacacagaggaca

SEQ ID NO: 57817 - RNA, 47 nt, Homo sapiens
cacccggccccgagacagaagccgaagcaccaaagcaccaggcaaga

SEQ ID NO: 57818 - RNA, 60 nt, Homo sapiens
gacaccaagggcgcgcgacacgaacaccgaggaggccaaggcagcccaaggcgccccccg

SEQ ID NO: 57819 - RNA, 73 nt, Homo sapiens
ggcaacccccagcgggggagaggggagccaacagaagccagccaaacgcaggccgcgggggaacccggcaccc

SEQ ID NO: 57820 - RNA, 65 nt, Homo sapiens
aagaaaagcccaaggacaagggaaccaagaagacggaagaagaaaaagggaaacacaggaaaaga

SEQ ID NO: 57821 - RNA, 76 nt, Homo sapiens
gcggaagccagaagccggcaaaaaaaagcgccccgagaaaaacaggaagcccggggcggcgacggagcacgaccca

SEQ ID NO: 57822 - RNA, 35 nt, Homo sapiens
cgcaggacacgcaagagcggacacggcaaaagcgg

SEQ ID NO: 57823 - RNA, 72 nt, Homo sapiens
agaacagcggccacccgacagcaagcaccggagggagaagacagggaagcaaaaaaagccaacggaccccac

SEQ ID NO: 57824 - RNA, 73 nt, Homo sapiens
aggaccgcaggcaggaacacacgaagccagcccagccccccagacgccaaggacagggcaacacgaagacgga

SEQ ID NO: 57825 - RNA, 52 nt, Homo sapiens
gggcaagcggcgacacacgacggaacacgggcagaaggagaccacacgagaa

SEQ ID NO: 57826 - RNA, 85 nt, Homo sapiens
gcgccggcccgccgcgcgccaccaggccgaccccagacagaagagggacaagccaagaaacccggaacgaggaaaacacggagga

SEQ ID NO: 57827 - RNA, 56 nt, Homo sapiens
gcgcccggaggcccgcaagcccccccggagaaaaaggaagcgaagcacccacccgc

SEQ ID NO: 57828 - RNA, 49 nt, Homo sapiens
gagaaggaccaagaaccagggggacagacaggagaggaggcagaaaaag

SEQ ID NO: 57829 - RNA, 78 nt, Homo sapiens
ccacgggagcaaggagcaggcgaaagagcagaccagccagccccaagcagccgcacgacaaagaacgaagacaagagc

SEQ ID NO: 57830 - RNA, 71 nt, Homo sapiens
gaaggaaaacccacccagagccaggagacaagcccaagcacagccgagaagaccgaagaacaagcaaagca

SEQ ID NO: 57831 - RNA, 70 nt, Homo sapiens
cgaaccgagccggagccaaaggagacaccacacgaacagagccagaagaacggagaggggaacaaaagac

SEQ ID NO: 57832 - RNA, 78 nt, Homo sapiens
agcaaggaggaaaacacacggagaaacaggcgccaaacgacagagaccccaccacgggccggcgaacaccgagacacg

SEQ ID NO: 57833 - RNA, 39 nt, Homo sapiens
ggagaccaccgaaagcgggacagagcgggagccaccagc

SEQ ID NO: 57834 - RNA, 84 nt, Homo sapiens
gagagaacgacagggagccacaggaagaaggccacagggaacaccccaggccgccaggccgaggcccaacacacccccaaaacg

SEQ ID NO: 57835 - RNA, 81 nt, Homo sapiens
acggagaagaggaggagcaacagaaacagaaagaccccaggagaagacaggggaagcggccccggaggcggcagcaggagg

SEQ ID NO: 57836 - RNA, 70 nt, Homo sapiens
aacagggccggcccacggaccaagcgggaagacaaccaaaccagagaaagacccaggccagccacgagca

SEQ ID NO: 57837 - RNA, 48 nt, Homo sapiens
agaaagacccagggcggcgaagggaagagacgacaacgacccaggggg

SEQ ID NO: 57838 - RNA, 97 nt, Homo sapiens
caccgcaggcgaggacggcggaccccgcggcgggaggagccgccccgaggcaagccaacgaaaaagggaaaaccaggaacagcaaaaaaacaggcca

SEQ ID NO: 57839 - RNA, 65 nt, Homo sapiens
caaaacaccaaccaaaagacaccggacacgcagagaccccgcggaagacaccagaaggggcagcg

SEQ ID NO: 57840 - RNA, 90 nt, Homo sapiens
cacggagcgcgcggagcgaacccaccccagggcgcaaggcagaggggaggagacacgaagcgacgcagagccagaagggaggcagggaac

SEQ ID NO: 57841 - RNA, 73 nt, Homo sapiens
caaccacagccggcaagggaggagaggcaggccgcggggcccagcgcgggaacgcaccaacagcagacacgag

SEQ ID NO: 57842 - RNA, 81 nt, Homo sapiens
cggagaagccccgagcaccccacagaggaggcaggaccgggcaaaaaggcagcaccccagagacacagggaagaaacccac

SEQ ID NO: 57843 - RNA, 92 nt, Homo sapiens
agcccgggcgccaccgcgccaccccgcgaggaagaaggaccggggagacaggaacacgggcaagacagcgcgggcaccgccgcagggccggc

SEQ ID NO: 57844 - RNA, 82 nt, Homo sapiens
cgaccagcaccaggggaagcgggacaacgggggaagcagcgaccacgccacaccacagcagcagaagaaagaaaggagaagg

SEQ ID NO: 57845 - RNA, 77 nt, Homo sapiens
agacgaaggcacgaaggcaacagccagagcaagggacccacacaggagcaaggaaacgaccaacaccaaccacagcg

SEQ ID NO: 57846 - RNA, 81 nt, Homo sapiens
aaaagcggcgcccccggcccgagccgacacccagggaaccccaggaggaagagaaagggaaggcccgggccagggaccagg

SEQ ID NO: 57847 - RNA, 76 nt, Homo sapiens
cagaacaagcagcagccagagaagggagaacaggagaaggcaccagaaggaacgcaaaaggcaagagcagaaagaa

SEQ ID NO: 57848 - RNA, 81 nt, Homo sapiens
cccggcagcccaacccagcaggacaaggagccaggagcaggggcgcggcagaggcgcggacgagcagcgcagggcggggcg

SEQ ID NO: 57849 - RNA, 74 nt, Homo sapiens
ggcggcgcccggcggccccggcgccggcaaggggacccaggcgcccgcacgcgagggcaaaagagacggacaag

SEQ ID NO: 57850 - RNA, 63 nt, Homo sapiens
ggcgaggagggcacaaggccaggcccaagagccagcccaggccagcgccagcccacagaccaa

SEQ ID NO: 57851 - RNA, 85 nt, Homo sapiens
aaccaggaggcagaaaccagcgccggacagagaagcccccaaggagcgcagaaaacacggggaagagaaagccaaaaagaagcca

SEQ ID NO: 57852 - RNA, 60 nt, Homo sapiens
ccgcaaggaaacacaacgagaagggcaccgaccgaaccaggagggcccaaggagacggaa

SEQ ID NO: 57853 - RNA, 75 nt, Homo sapiens
cccgccagggggaggacgaagacacgcccagcagggagcggaggagccagacaggaccagaaagacaccagggac

SEQ ID NO: 57854 - RNA, 121 nt, Homo sapiens
gagcaaaaccgaaccagaagacgagagccaacgcaaccaggcgcaggacacacagagaggagacaacaaccggacccagcacgggccccgaagaccgggagcagcagcggcagcgcccacc

SEQ ID NO: 57855 - RNA, 72 nt, Homo sapiens
ccgacaccagccaacacgcgacaccagagacaaacagaagggaagggccaccacgcagcagcagcaaccgga

SEQ ID NO: 57856 - RNA, 87 nt, Homo sapiens
cagaccccacggacgcagcacagggaccccaaggggcaggaagaagaggacaggaccacccagacacaggaaggggacacacaacga

SEQ ID NO: 57857 - RNA, 54 nt, Homo sapiens
gacagagagaaccaggcgcaacagaacgcggcagaacggaggcaggcagcacga

SEQ ID NO: 57858 - RNA, 70 nt, Homo sapiens
gagccagacgagaagaaaaggaggaacaccagcgggaacagaagagcaggacaccaggaacgaaaaggac

SEQ ID NO: 57859 - RNA, 76 nt, Homo sapiens
ccggcacaccagccccgagcaagcgaagaagagggaaaagcccaaggaacaccggaacaccgggggggacgcccgg

SEQ ID NO: 57860 - RNA, 78 nt, Homo sapiens
aagaaaaggagaaaagaagccaaagggacacgaagagcccggaacgccagagcggaaaggaagagaacgccggaagcg

SEQ ID NO: 57861 - RNA, 68 nt, Homo sapiens
caccaacagagcaacgagaaggacacccaaagagagcccgacggagaagacacggaaacccggagccg

SEQ ID NO: 57862 - RNA, 77 nt, Homo sapiens
ggaaccaacacgagaagaagccccacacggacaggggcggcaccaggaaaaagaaagacggcacagaacaaggcccg

SEQ ID NO: 57863 - RNA, 81 nt, Homo sapiens
cgcaagaaagcccgcaaccgggagcgccagcccggggaggaccgaagcaaccaacgcggcagccaagacagagaaaggcca

SEQ ID NO: 57864 - RNA, 79 nt, Homo sapiens
cagacccggacgagagaggaggcagagaaaaccgaaggagcaagagcggcggccacaaaaccccgaccggcggaggaga

SEQ ID NO: 57865 - RNA, 68 nt, Homo sapiens
gagacccgccaggagcaaagagacaaaaccgacaagccggacggaaggcaaccgccggcgacggacag

SEQ ID NO: 57866 - RNA, 48 nt, Homo sapiens
ggggggcaccccaaaagaggcaggccacacagagaacagagggagcgg

SEQ ID NO: 57867 - RNA, 74 nt, Homo sapiens
cccggaacggcgccagcacgggacggacacaaacccccaggaacagccaccgggaggagaaccgaggaagacaa

SEQ ID NO: 57868 - RNA, 79 nt, Homo sapiens
gcgggcggcgaccgcagggacggcagacccgagcaagacgccaggaccggaagcagagaaagggcggaccgaggagggc

SEQ ID NO: 57869 - RNA, 77 nt, Homo sapiens
gagccgccgacaaagggcacaaacagccagagcccagaggggagcagagggaggggggaacggacaggacaggagaa

SEQ ID NO: 57870 - RNA, 74 nt, Homo sapiens
gagaaacggaccaccaccgaaggaacggacaacaagggggaccacacagggcagcccacagaagaaggcccgcc

SEQ ID NO: 57871 - RNA, 72 nt, Homo sapiens
ggcaaacgcgcaggcacaaagaccagggaacaaaaccggaccagcacgagcggcaaagacgcaacaacagcg

SEQ ID NO: 57872 - RNA, 60 nt, Homo sapiens
gaaaaaccaggaaacccagagggagcaaaagacgagggagaccacaaaaggccccagcca

SEQ ID NO: 57873 - RNA, 56 nt, Homo sapiens
agcagccgcccccgccggccggcccaacagagcggaggagggaagaacaggggcca

SEQ ID NO: 57874 - RNA, 74 nt, Homo sapiens
acgcgcccgcaacccgaaccacggacaggacccgcccagcccaacggggagcaacggggcggcacacaaggagc

SEQ ID NO: 57875 - RNA, 55 nt, Homo sapiens
aacaaggccaacaccagcaggaggcaaggaaaccgacgaagcgcggggacggaca

SEQ ID NO: 57876 - RNA, 83 nt, Homo sapiens
ggagaacgccgaaggcggagcgacgggcggcgggccagggggcgcggggccgggcgcgcggcccagcaacggcccccgaaccc

SEQ ID NO: 57877 - RNA, 80 nt, Homo sapiens
gcgccgcaccgccgcggcccggcccggccccgaggccggcaacggagacccaagggcgccggccgagcccgggaaaacga

SEQ ID NO: 57878 - RNA, 67 nt, Homo sapiens
agaaagaaagccaccgagaaacacaaagaaccaagagcggacggggaagcccagaggcacggggcag

SEQ ID NO: 57879 - RNA, 75 nt, Homo sapiens
ccccggccgggccgccacgcccccgcaaagacgcaaaacaaaaggggccaaggacgcacacaccagagaaggcag

SEQ ID NO: 57880 - RNA, 75 nt, Homo sapiens
gccgacccgcccgcccccgccccacgaagccagaaagaagccacccagagagaaccaggagacggcgaagaacag

SEQ ID NO: 57881 - RNA, 86 nt, Homo sapiens
gcaagcggaagggagcccaagaggaccagagggggcccggaggggcgcccaggccgagcacccaggcgcagacagcgggcaggcca

SEQ ID NO: 57882 - RNA, 79 nt, Homo sapiens
gaagcgcagccacaaggccgcaggggagccgagagccacaggaaggggaaagcagcagacaaaggaggggggaaagcaa

SEQ ID NO: 57883 - RNA, 89 nt, Homo sapiens
acgcccggccaagacagcagcaccaaggaccagcaacaagccaagaagcgagagaagaaaaacagaaaaagccaagacagaaacaagaa

SEQ ID NO: 57884 - RNA, 43 nt, Homo sapiens
caagacaagcggcggggccccggagacaggcagaagcgccgac

SEQ ID NO: 57885 - RNA, 77 nt, Homo sapiens
agaacagggacacccaccccccagacacacagaagaaaaccgggaagggggacaggagcagcagacagaccaccaaa

SEQ ID NO: 57886 - RNA, 74 nt, Homo sapiens
caagaacaacgcgcacaacaaagagacggggcgacggggagaggcaggcgaggggacgaccggcaccgccgagg

SEQ ID NO: 57887 - RNA, 74 nt, Homo sapiens
ccaggaaccacaaggaacagaaccaccaaagggaacccagggaaccacccgccccgaccaggagaggacagaca

SEQ ID NO: 57888 - RNA, 83 nt, Homo sapiens
ggggcgcccgacgcccagcacaggaaccggcaggagaaggggcccggcagccgcccgaagaacgagagcccagacagagaaag

SEQ ID NO: 57889 - RNA, 49 nt, Homo sapiens
cgacggcacaagaccccacccaaaagaccaagccccccaccagaaagag

SEQ ID NO: 57890 - RNA, 81 nt, Homo sapiens
gaaccaaagaaccaaaaccaagacccagccaagcagaggccacacgaacggagggagcccagccggagacggggccgggga

SEQ ID NO: 57891 - RNA, 54 nt, Homo sapiens
cggacaaggaccggccccaacaaaggcgccgacgacgcgcacccaacggaggac

SEQ ID NO: 57892 - RNA, 82 nt, Homo sapiens
cgggacgagcgcaccggcgaggacacccccccaagggaaagcacgaagggagcccagcgacacaccagcagcagccaaagac

SEQ ID NO: 57893 - RNA, 87 nt, Homo sapiens
ccggaagggggcggccacgaccaagaagaagccgcggacccgcgcacccagccaaacccaggcccgagaagaagaggaaaacccacc

SEQ ID NO: 57894 - RNA, 73 nt, Homo sapiens
agggccggcaacggccacagcaccggggcaaccaaacgggcgaacaaaaccagccacggagggcaggccgcaa

SEQ ID NO: 57895 - RNA, 81 nt, Homo sapiens
gccacaaggaagcccccgaaaacggagaaaagaacagaggagccggcacagaaaacacccggaaagggccgcggaaaaccc

SEQ ID NO: 57896 - RNA, 73 nt, Homo sapiens
agccgaaggagggcaagacagcgagggacgaaggagaccgcgcagggaccgacacaagaagcagccagaacag

SEQ ID NO: 57897 - RNA, 52 nt, Homo sapiens
gaggaaccagcacaagacaaagcgaagaagaggcgcgaggaggaaagacacg

SEQ ID NO: 57898 - RNA, 58 nt, Homo sapiens
caaaaacaagacggggcgccccacagaggggcgacgcaaaccagccggcgggcgccac

SEQ ID NO: 57899 - RNA, 81 nt, Homo sapiens
cggcggcacggcgccgaccagcaccaggggaagcgggacaacgggggaaaagcagaacagccgcggcccaagaacggacgc

SEQ ID NO: 57900 - RNA, 82 nt, Homo sapiens
cccaagcccgagaggccccaaaaccacccgcggagaacaaccgaacggaaagcggcagcgcagcaagacagagcaccggccc

SEQ ID NO: 57901 - RNA, 68 nt, Homo sapiens
gcggagcacagaagaagcaacacgagaaccaccccgacacaacaccaccaacagagagagcaaaacga

SEQ ID NO: 57902 - RNA, 83 nt, Homo sapiens
gccaccggagagcgaggacgacgggaggcggagggcgcccggcgaggagcgccaggcgaggaggcagcacggcaggagacgag

SEQ ID NO: 57903 - RNA, 107 nt, Homo sapiens
gacccagaacagagcgacagaggcgacgcaaccgcgggagaggcgcgccaaagaaaaggggcaacacagagggccacacggggaaacggccaacagggggccagcca

SEQ ID NO: 57904 - RNA, 61 nt, Homo sapiens
gccgcgaccaaacgacgggggccggagcccacagcgacaggggacaaccgcgggagcacac

SEQ ID NO: 57905 - RNA, 50 nt, Homo sapiens
gggcaaggcgccagaccaagaccggaaaaggagaaagaaacaacgagccc

SEQ ID NO: 57906 - RNA, 76 nt, Homo sapiens
caggcggaacgcaaggaccaaagcaaagaaggagagaacaaggagcaggccaacggccagaagaacgagcaaaaag

SEQ ID NO: 57907 - RNA, 71 nt, Homo sapiens
acagccacacacgacccaacggggcagcaaacgaaaccggcagcagccggaggggaaggggaaaacacgac

SEQ ID NO: 57908 - RNA, 77 nt, Homo sapiens
cggcccaagaaacagcagacgacagagagagggggaagggccaaaagaggaagaggcgggaccaacgggcagagggc

SEQ ID NO: 57909 - RNA, 72 nt, Homo sapiens
gaaaaacaaggaagagaaggcaaaccaaccgaccacgagccaaagcaacacggcacagaaaaagcggaagaa

SEQ ID NO: 57910 - RNA, 83 nt, Homo sapiens
agccacagaggggaggacagcagagagaaagaaaaagcggggaaaacaaaaaaaagaaggagggaagagggggccaggaccag

SEQ ID NO: 57911 - RNA, 74 nt, Homo sapiens
ggaccgagagcggaccgagagcgcgaaacgcacgagaagcggaaaagccagggcggaaaccggcaagaggaaga

SEQ ID NO: 57912 - RNA, 67 nt, Homo sapiens
agaccaccagggggaagagccgaaaaccaaccccggaccacacgacccgggaaaaccacacaaagaa

SEQ ID NO: 57913 - RNA, 71 nt, Homo sapiens
ggaaccagacaggcaggaaaagacagcagaggaagggcagcagaacaacgcagccaccagccagaaccaga

SEQ ID NO: 57914 - RNA, 77 nt, Homo sapiens
cgaggcaacccaagcgcacaggaaggcgggccagacggagccaccgagggcccagggcggaagaacaagcaggggaa

SEQ ID NO: 57915 - RNA, 58 nt, Homo sapiens
cggccccagcccacgagggccagcccgcggcgaaggggcgccgaaccgagcccgaagg

SEQ ID NO: 57916 - RNA, 81 nt, Homo sapiens
ggacacgcaacccagaccacccacaggagcaacagaagagaagcgaaggacgacagccaggggaggacaccacggcaccgg

SEQ ID NO: 57917 - RNA, 74 nt, Homo sapiens
cacgccggccgacacgccagcggaaccagaccagcaaggaggagaagacgaaagaggccaggaggagcgaggag

SEQ ID NO: 57918 - RNA, 62 nt, Homo sapiens
gaagcagcgccaggaagaagagagcgacaggacagaaggacacgagaagaggagcaggaaga

SEQ ID NO: 57919 - RNA, 54 nt, Homo sapiens
caagagagcccacagacccagccacgaaggcgacggggcaagcaagggccaaag

SEQ ID NO: 57920 - RNA, 87 nt, Homo sapiens
ggacggagcagaaccccaggacgcgcccccgggagcgggcgcccagaggaaaaagcaacggacacagaaccaaaggaaaaaaaccgg

SEQ ID NO: 57921 - RNA, 78 nt, Homo sapiens
ggggcagagagaagaacaggagaagcagcagagggaagaggacaggagcgaaggaaaaaacagaagacgcagcccagg

SEQ ID NO: 57922 - RNA, 71 nt, Homo sapiens
cggcaagagagcccaaggccgcaacaagcacggaacccgggcacgaagcagaggacgaagccaagagggcc

SEQ ID NO: 57923 - RNA, 70 nt, Homo sapiens
cacgccaccgcaccccggccgcccccacggccccggcggccaaacaccgcacgacaccccaggaggaagc

SEQ ID NO: 57924 - RNA, 88 nt, Homo sapiens
gagagagccgggagcccgagcgaggaagaaggaccggggagacaggaacacgggcaagacagcgcgggcaccgccgcagggccggccg

SEQ ID NO: 57925 - RNA, 94 nt, Homo sapiens
cccgagcaagaaaggacccacaaagcagaaagaaggacagggacacaaacaccagagggaaaaagaccacagaaacagacgaccgggcgccgac

SEQ ID NO: 57926 - RNA, 38 nt, Homo sapiens
ggaaacccggagaccaaaccgcaaagccagccggcccc

SEQ ID NO: 57927 - RNA, 71 nt, Homo sapiens
aagaaacaagcggcaagagaggcaccccgaagaggcgaggagcaacccagggggaccacgaagcaacgcca

SEQ ID NO: 57928 - RNA, 75 nt, Homo sapiens
gaaggcaggcacaaagaacaccagaggcagcaaaaagggcagaagagcccaagggaaacaaagagccccgggaaa

SEQ ID NO: 57929 - RNA, 75 nt, Homo sapiens
accagacagcagagagagagcggaacgggagaaagcacgggaggagagacagggcgggaccaccaggagcagagc

SEQ ID NO: 57930 - RNA, 78 nt, Homo sapiens
agaagagaagcgaaagcacacgggggagcagacagaccagaccaggccgaaccggggcagcgcgcaaggaggagcagc

SEQ ID NO: 57931 - RNA, 70 nt, Homo sapiens
aagaagaaggagaggcaaagaagaacaggaaggaaggaaagagccaaacggggccagagaaaaccggcag

SEQ ID NO: 57932 - RNA, 75 nt, Homo sapiens
gcgcggaggaaccaaggaggggcgaacagccccaggggggacggaaaaacaaaggaacagccaggacaaccgggg

SEQ ID NO: 57933 - RNA, 60 nt, Homo sapiens
cccagagggagaaggagacagccacggagcacaccaggaaaagcagaaaagagacacaca

SEQ ID NO: 57934 - RNA, 72 nt, Homo sapiens
cccgggacgacggaccggccggcgggcaagcacagcagaagccagaaccacgagggcgcaagcagagaaccc

SEQ ID NO: 57935 - RNA, 74 nt, Homo sapiens
gccgggagccagaagcacaggcccgggcgaaggggccacgcgagggaagaacccaagacacacacagcggagca

SEQ ID NO: 57936 - RNA, 78 nt, Homo sapiens
aagaccacccagaacgacccaacacgagcagagacacgggagcaaaaccagaacagcaccgaagaaacgaaaagagaa

SEQ ID NO: 57937 - RNA, 86 nt, Homo sapiens
aagaaggcgagcaggggcgggagagccccgcagaagacgccgacgagacacgagaggcgagggacgacagagcaagcggcagaggg

SEQ ID NO: 57938 - RNA, 77 nt, Homo sapiens
cgcaccccggaccacgacacgcggcccggcgggccagcagccacagacacggcgacccgcagggcaggggcaaggga

SEQ ID NO: 57939 - RNA, 84 nt, Homo sapiens
gccagcccccggggcacagcaggacggggggccccagcaggggacagcccgagggaggcccaaggaggagccaaaccaaagccc

SEQ ID NO: 57940 - RNA, 90 nt, Homo sapiens
cccgggaccagcaaacacaggcaagccgcggaagcaggagcagggccggcccagggagaacgcaaaaccaccacccccacaaaaaacgca

SEQ ID NO: 57941 - RNA, 84 nt, Homo sapiens
cggaagggcggacaccccacacgccgccacccccaccggaggagaaagagcaacgcacgaggaagaacgaacggaccacggacg

SEQ ID NO: 57942 - RNA, 76 nt, Homo sapiens
cgccgcccggcgccggcccgcccccgcagcagcgccaggccaagacaagcgcgcacgcggccacacggccacggcc

SEQ ID NO: 57943 - RNA, 71 nt, Homo sapiens
gaccaagaaccaggcgaggcgaggggccccgaaccgaggaccagcgggaagaagagcggaccggccaggag

SEQ ID NO: 57944 - RNA, 66 nt, Homo sapiens
gaacccgggagaggagaccagaacgaacccccccccccggagaccaaagccagcgaagaaaagcgg

SEQ ID NO: 57945 - RNA, 76 nt, Homo sapiens
gacgaccgacaggggggaaagagcacccacccgcaccgcgccggagcgaaggggcgaaccaacaccccacaaccag

SEQ ID NO: 57946 - RNA, 85 nt, Homo sapiens
gggaaaccaaagaccaaaaaccgcccagccaagcgaaaacagaagagcagcagcagaggaaaaaagagaccgagagaaagcagca

SEQ ID NO: 57947 - RNA, 86 nt, Homo sapiens
cgggcggggcgcggccgcggggcggaggcaccgcgcgggggggacacgggagccccgcaggacccccgcacacgcccacacagcag

SEQ ID NO: 57948 - RNA, 70 nt, Homo sapiens
cgcgccaccgggccgcaggaccaccccgcacaccacccaaggacggaagaggcaaggcaacaaaccagac

SEQ ID NO: 57949 - RNA, 37 nt, Homo sapiens
ccagagacaacccagaccagaggcgacccgcggcgag

SEQ ID NO: 57950 - RNA, 71 nt, Homo sapiens
gcgcgagggaggaagagaacacccaccggcacaacacacaaaggcagcggccgccggcaccggagaggacc

SEQ ID NO: 57951 - RNA, 74 nt, Homo sapiens
gggggcggacccgcggccgcggcggacccgccggcgacaggccagcccggagagcgcaggaggaccggccccgc

SEQ ID NO: 57952 - RNA, 70 nt, Homo sapiens
caaagaagcccgaggcgcaagagacaaaaaagcagacgccacagggaagacagcagcacccgagggccca

SEQ ID NO: 57953 - RNA, 80 nt, Homo sapiens
caagaggcggacaaaacgccaggcggaccagaaggccagcaaagacgacgcagccagagcagcaagaggccaaggggacg

SEQ ID NO: 57954 - RNA, 77 nt, Homo sapiens
agaagagggacaccccaaaacagagaagggcacagggccggcggccgaacccgacccaagcgaccacccacccagcc

SEQ ID NO: 57955 - RNA, 76 nt, Homo sapiens
cccgcaccggaaggccacgccaagagacgaagaaaagcaggcagaaacaggccagcaacaaaagaaagaagcccca

SEQ ID NO: 57956 - RNA, 56 nt, Homo sapiens
ccccaaaggcggaaacaggggacaacagagccgacacagccaagaagcagagcaaa

SEQ ID NO: 57957 - RNA, 55 nt, Homo sapiens
agcgggaacagagcggacacccggcccacgcagagagccggaggagccaccaaca

SEQ ID NO: 57958 - RNA, 79 nt, Homo sapiens
gcccgaaacagggagacggccaagccaaggcccgaaagaacgaaacggaggagcccaggaggaagaagaagcagccaaa

SEQ ID NO: 57959 - RNA, 77 nt, Homo sapiens
gacaccgaggcccgggggccgaagcgagcgcgggaagagccccccccagcgccgaaggcccgacccagcagcccggc

SEQ ID NO: 57960 - RNA, 44 nt, Homo sapiens
ccgggaccgccgccgccgccgccaccagccacaacacagcggac

SEQ ID NO: 57961 - RNA, 77 nt, Homo sapiens
agaccggaccgagagcggaccgagagcgcgaaacgcacgagaaggaccggccagccgcagcgagaccaggagccgcc

SEQ ID NO: 57962 - RNA, 68 nt, Homo sapiens
ggcacaccgcggggccgaaaacaacgacaacgagcacagcccaaaaggacaaaacagcaacaaggcac

SEQ ID NO: 57963 - RNA, 60 nt, Homo sapiens
cagccagggaccgccccccgccgacaggcccacccgggcaggagaggccgaccacccggg

SEQ ID NO: 57964 - RNA, 80 nt, Homo sapiens
cggagcgcgaaggaagcggggacacgcggccccagcgcccggccccccaccggacacccgcggagcgcgcgacacccagg

SEQ ID NO: 57965 - RNA, 34 nt, Homo sapiens
agggacccggacaccaagaaagagcagccaaagc

SEQ ID NO: 57966 - RNA, 86 nt, Homo sapiens
aaaagagagagaaaaaggacaaaagccaagaggaggacagcgcacacagcaagcacgaggaaagggccgagaaagaagagaggaag

SEQ ID NO: 57967 - RNA, 73 nt, Homo sapiens
ccaggggcaccgcagcgaccacccacacaaacccgggacgggccgagagcgcagcccgcaaaaagcgccacca

SEQ ID NO: 57968 - RNA, 86 nt, Homo sapiens
aacagagccagccagaaaaaacacagccgacagacgccaccaaaagcaccaggaacaagagagagaaccaaaaaccgccccgaggc

SEQ ID NO: 57969 - RNA, 62 nt, Homo sapiens
cagcccgccggacccacgcgcccgaggggccaaaacgaacaagcggagccagacggacgcgg

SEQ ID NO: 57970 - RNA, 100 nt, Homo sapiens
aacccccccgcccgccacagccggcagcgcgaagcagcaaccaggcccggcgagcgaccgccgggggaacgcccgagcggagcagcaggagcggcggagc

SEQ ID NO: 57971 - RNA, 57 nt, Homo sapiens
ccaaaagaaccccagaacagggcgcggggcaggaaaacgggccacaacacaaccccc

SEQ ID NO: 57972 - RNA, 82 nt, Homo sapiens
agggaaacaacaaagaaacaaccggcccagagagaagcgggaaggacaggccaagcccccacaagaggggccagaagacggg

SEQ ID NO: 57973 - RNA, 80 nt, Homo sapiens
ggccaggggaccgggaggggcgaaggcgggcggcagaggcgacagggcccgagggccggggacaaccacagcagcgggga

SEQ ID NO: 57974 - RNA, 76 nt, Homo sapiens
ggcaaaacgagcgggccagcgcgccgggggcccggaaagggacgcgcgcccagggagcgagaagcagccagggccc

SEQ ID NO: 57975 - RNA, 36 nt, Homo sapiens
acgaacagacgcacaccaccgggaggaaacagagcg

SEQ ID NO: 57976 - RNA, 88 nt, Homo sapiens
cggggccccagaggccgcggacaccgaccggagaagggacaagcgaacaggagcgaggagaaaacaagcggacaaagagagcacccag

SEQ ID NO: 57977 - RNA, 76 nt, Homo sapiens
caccgccgcgccccggcgcccccccgaggaggcaggggaagcacaaaagcgcacccgcgccagcgaggaccggaac

SEQ ID NO: 57978 - RNA, 92 nt, Homo sapiens
ggccaggagcaagggaaagaacccggcggggaaaagggaaggaaaagagacgcagcgccccagcaccgcgcaccaaggaagacacaagaaca

SEQ ID NO: 57979 - RNA, 64 nt, Homo sapiens
ggagccggaagcgcgcaagggcaagacacccaagggcagaaagaagaaaaacacaccccgccaa

SEQ ID NO: 57980 - RNA, 59 nt, Homo sapiens
caacccacccaagcccaaaaaggccaaaacagaagaggcaaagcccagccacagcagca

SEQ ID NO: 57981 - RNA, 80 nt, Homo sapiens
cagcggcagaagcagacggaagcaaacagacggcaaaagggacaaggagaacacagcgcccccagcccacaaggaccgcc

SEQ ID NO: 57982 - RNA, 82 nt, Homo sapiens
cggagccgggcgccgggagcgcggaacagcgccacccgccggccggaccaggccgcccgcaaaaccaaagaagccaacaaaa

SEQ ID NO: 57983 - RNA, 85 nt, Homo sapiens
acgaggacgaaaagaaggacaaagcagcagacacggggcaccgcccggggacgaaagcaggagcccgaggccacccaggaaaaag

SEQ ID NO: 57984 - RNA, 80 nt, Homo sapiens
gccaagaccaagcgcgaaagcgccaaaaggacagcagggacacagggaaggggagcgccgcggaggcggacaaggcgcac

SEQ ID NO: 57985 - RNA, 81 nt, Homo sapiens
cgggcgcaagcgcaaccgcgggggcggggacggcgccgagaggacaccagcagccgcaacggcacacacgcccgccaccac

SEQ ID NO: 57986 - RNA, 32 nt, Homo sapiens
accacccgaagacgaagccggagaccgacaca

SEQ ID NO: 57987 - RNA, 82 nt, Homo sapiens
ggaaaaggcaaaaaggccaacaagaaacaggagaacgggaagccccgccgagaaaagccaccacgcgcagagaaaagcaacc

SEQ ID NO: 57988 - RNA, 74 nt, Homo sapiens
gacgacgggagggacaagcccgcagaaaaaccggcaggcacaacaaaaagggccgcagacccaaaacggccccc

SEQ ID NO: 57989 - RNA, 53 nt, Homo sapiens
aaggagccaccagcacggaccaggaggcgagcaacagccagccagcaggcaac

SEQ ID NO: 57990 - RNA, 76 nt, Homo sapiens
gagaagggcgcggggccgggggcaaagaagccgcagaggagcagacaggacgaacaggcaggagaagggcaccggg

SEQ ID NO: 57991 - RNA, 55 nt, Homo sapiens
cccgggagacgcccgcgccgccgggccacgccgcaggacacagccgacagggcca

SEQ ID NO: 57992 - RNA, 74 nt, Homo sapiens
cggggcgacgcgagaacgccggacaaggagagagggcccagggaagagcggagcggggccagccgccagcagca

SEQ ID NO: 57993 - RNA, 76 nt, Homo sapiens
ggcacggggaccacaagaaacgcagaacaaaaaaggaaacaaaaaagggccaagacagcaacaaggaccacggaca

SEQ ID NO: 57994 - RNA, 66 nt, Homo sapiens
cggggcgcaggccccgcgcgaggagaggagaacagaagcccaggagcagacaaaagaggacggggc

SEQ ID NO: 57995 - RNA, 76 nt, Homo sapiens
gaccacccgggcgaagcgggcgagcggggggacgccggcggagacgcgggcgagaagaaaggaccaggcgggcccg

SEQ ID NO: 57996 - RNA, 73 nt, Homo sapiens
cccgagaaccgcaggagccagagaccacggaaaaaccagcaaagccaccccggagaagcagagcacaccaaag

SEQ ID NO: 57997 - RNA, 52 nt, Homo sapiens
gaagaccacacccggaaggaacagcccccccagccgggcggaaacagggagg

SEQ ID NO: 57998 - RNA, 33 nt, Homo sapiens
gaagaggaaccaagaagggaccacagaccagca

SEQ ID NO: 57999 - RNA, 83 nt, Homo sapiens
ggcgaacgaacggagaaccagaaaggagaaaccccccaacccgcaaaggacaaaaacaaagggaagcacagagcacgaccgca

SEQ ID NO: 58000 - RNA, 93 nt, Homo sapiens
ccagcccaaaccgagcccaggcgaggcccagacaggacccagaagaggggaacaccacgccaagaggccggggcggccggccgcaccaaagaa

SEQ ID NO: 58001 - RNA, 81 nt, Homo sapiens
caacaaggacaacaagagacgggacaagacagggcaaaggacagaccagggacagaggacgcagaaaacaaccacccccag

SEQ ID NO: 58002 - RNA, 65 nt, Homo sapiens
aagcggcaaaggggaaaaaaaagggagaaacagaccaaggggcacaccagaaaaggaagacaacg

SEQ ID NO: 58003 - RNA, 79 nt, Homo sapiens
ggaaccagggccaggcgaggaccaacccaccccacccggaacaaaggacccagcgaaagaaccccaacccaagaaacac

SEQ ID NO: 58004 - RNA, 42 nt, Homo sapiens
gcggcccggaccggcaggcaggggcagaaggcgacccagcgc

SEQ ID NO: 58005 - RNA, 78 nt, Homo sapiens
aacagaagaccacaagaaagaagggcagaagaaaacaggagcaaccaaacgggcgaacaaaaccagccacggagggca

SEQ ID NO: 58006 - RNA, 56 nt, Homo sapiens
gagagcccggaccagcagagggccgacggggcagagagaagagcacacagaaggcc

SEQ ID NO: 58007 - RNA, 80 nt, Homo sapiens
cgggcccggcccggcaccccaaaacagcaggcccagacgcccacaacaccgaaaaccgccggggccacacccggagcggc

SEQ ID NO: 58008 - RNA, 84 nt, Homo sapiens
gggagccggcaggacggaaggggaagaggcccacccggagaaccccacggagaaccagaggccgaagggcaagagggcacagaa

SEQ ID NO: 58009 - RNA, 78 nt, Homo sapiens
cgaggagaggcagggcgcgagggcgggggcagcggcaggcccgagagcacccagccccagcgagcgaccaccagcagg

SEQ ID NO: 58010 - RNA, 72 nt, Homo sapiens
cgaaagccccagcaggaacagagacaagccacagggccggacaccaggacccaggccaagccaccaagcgac

SEQ ID NO: 58011 - RNA, 77 nt, Homo sapiens
cgccgcccacggcagcccagggacccgagcaccgccggccccgggccagcccaggaagaaggaccggggagacagga

SEQ ID NO: 58012 - RNA, 72 nt, Homo sapiens
aaagagacaagaccaccgagggaagccaaggcccccagaacacagccccacaggcagacaaaaagaagcggc

SEQ ID NO: 58013 - RNA, 79 nt, Homo sapiens
cagcaccgggaagagaaagaaaagccgaaggcaccagacagaccagacaaagggagcaccagccagaccgggaagaaac

SEQ ID NO: 58014 - RNA, 58 nt, Homo sapiens
ccaccgcaccggggcgcggggggggaagaggaggaggcgcccgacacgacaaaccacg

SEQ ID NO: 58015 - RNA, 82 nt, Homo sapiens
cagacccgccgaagaccccgaggaggggacacaaaggaagaggcagccagacagcaccagcgcccaacgcacacgacaggaa

SEQ ID NO: 58016 - RNA, 74 nt, Homo sapiens
acggccgcaggaccggcccacgcccacaaggaccagcaaacccacaaggggcaccggggaaacccagacgacaa

SEQ ID NO: 58017 - RNA, 77 nt, Homo sapiens
ggaagcggaaaacagaaccacagacacccccgccgaacaagaaggaacacagaggggcgacagcccagacccgaacc

SEQ ID NO: 58018 - RNA, 54 nt, Homo sapiens
cgggcgccgccaccggcgaccgacgcgcaggcggccccggagaaggcccggagg

SEQ ID NO: 58019 - RNA, 39 nt, Homo sapiens
agcgggccaggcgcgcccggaaaagcagaacagccgcgg

SEQ ID NO: 58020 - RNA, 82 nt, Homo sapiens
cacagaaaggaagaccagcagaagaggacaaccagaaaaacagaagcggaaaaggagccagaagagaggagcgcggaaaaaa

SEQ ID NO: 58021 - RNA, 70 nt, Homo sapiens
agcagaaacgcaccaggccaaagaaagagaaaggcaggaaaagaacaccacagaagcaaaaccagacgaa

SEQ ID NO: 58022 - RNA, 76 nt, Homo sapiens
ccccgcccgcccgccggccgcggccgggaaggcgcagccgcagagacagaccaacacccgagaccacccagggacc

SEQ ID NO: 58023 - RNA, 59 nt, Homo sapiens
gccggcccgacaccaagcacgagaacaggaaaaaagccgcacagacggaagcaaggaac

SEQ ID NO: 58024 - RNA, 78 nt, Homo sapiens
gccggccacccaaagcacgggggcaacagagagccccggggcggaaagaagccaaggccaaggagcgggcggcagcgc

SEQ ID NO: 58025 - RNA, 72 nt, Homo sapiens
gcggaccccgcggcgggaggagccgccccgagacaggagggcgaaaggaaccagagcagacaagacgcacgc

SEQ ID NO: 58026 - RNA, 81 nt, Homo sapiens
gagcaggaaggcacaaaggaggaggaggaggacgacgacgaggggaacggcaccacagggagcagcagcggaggacgggaa

SEQ ID NO: 58027 - RNA, 80 nt, Homo sapiens
gaggccgcccgagcggagcggggcgcaggcgccgccgccggacgcggcaacggagaaggaaaggaaaccacccgggaacg

SEQ ID NO: 58028 - RNA, 71 nt, Homo sapiens
agaacagagcagaaacaaagaagagagcaggaagaaggaagaaaaggaccgcacgaaccagacccaggggg

SEQ ID NO: 58029 - RNA, 85 nt, Homo sapiens
aggagacacccgcgaccaaccccgcaggccggagccccgggaggggggaagacagggcccagcaccacaggacgggccgggaagc

SEQ ID NO: 58030 - RNA, 75 nt, Homo sapiens
agaaaccaggagccacggacaagaccaaaagaggcccaccacagagccccaacgcagcagcaccgacaaaggcca

SEQ ID NO: 58031 - RNA, 77 nt, Homo sapiens
acacggaagcaagaggacagcggaaggcgcaaggcacaaaccaggggcccaaaacagaaggcagaacgccaaccagg

SEQ ID NO: 58032 - RNA, 81 nt, Homo sapiens
aggacaggcagagaaggccaggagcgaagcaggagcaggagacacagggcccagagggcgccccagcacacagagcacacc

SEQ ID NO: 58033 - RNA, 73 nt, Homo sapiens
cagaaccggggggagacacagccagccaagcacgccccgagggaaagacaaggagccgggccgagaaaccgaa

SEQ ID NO: 58034 - RNA, 87 nt, Homo sapiens
aaggagcaaagcagcggcgcagcccgggcagccccgcaaagggaacaggaagcagccacggaggggacgcccagacccaccgcaccc

SEQ ID NO: 58035 - RNA, 72 nt, Homo sapiens
cgaaaacagaaggaaagaaggaacggagaaggcaaagaagaaccgacagaagaaaaggcccaccgggcagac

SEQ ID NO: 58036 - RNA, 78 nt, Homo sapiens
cagcggagaacgcggcaaagcgagccccccgggaagacacaaacgcaccaccagaaagccaagcggaaaaggaaaccc

SEQ ID NO: 58037 - RNA, 71 nt, Homo sapiens
aacggaggagcgccgagccagagccacaaaagggaaagcgcaaacgggagcaaaaacgaagaccgacagaa

SEQ ID NO: 58038 - RNA, 58 nt, Homo sapiens
ccggagaggagcagaaggagcaaaaggcggacaggcaggcaccaggcgaggccccgcg

SEQ ID NO: 58039 - RNA, 83 nt, Homo sapiens
accgcagaggcaaggggccaccaggaggccagggggcgccagaaggacagaaaacgggccccagacacaagccccaccaagag

SEQ ID NO: 58040 - RNA, 81 nt, Homo sapiens
cccagaaaaaggaggaccggacaggcgagaacgacagaaccaacaagggaacggcaaagaaagcaagggcggaagaagcgc

SEQ ID NO: 58041 - RNA, 50 nt, Homo sapiens
gggggcccaagcgcaacgggacgacaacaacagacgaaggagcaagggca

SEQ ID NO: 58042 - RNA, 80 nt, Homo sapiens
ccggggcgggcacagggaggcgcgcccgggaccagaagacacccacaggagagagacggagaaaccaacagcgggaagaa

SEQ ID NO: 58043 - RNA, 71 nt, Homo sapiens
gccgaggcggaaaggggccccaccaaagccaccaagccaagaccagcagccaaaggaagaaggacagcgcc

SEQ ID NO: 58044 - RNA, 80 nt, Homo sapiens
gggcggaagaccaagacacgagagggcgggaagaaacggggagccgccacccaccggaagacgccgcgaagagcaaggag

SEQ ID NO: 58045 - RNA, 77 nt, Homo sapiens
accgggcgccgaggcgccacaaaaggaggccaacagacccaacccagaaggcaccaaacggagggggaacaggcggc

SEQ ID NO: 58046 - RNA, 79 nt, Homo sapiens
gccacggacaccccggacggccgggacgagacgagcaccgccggccggagaaaccggcaaccagagggacaggaaaaac

SEQ ID NO: 58047 - RNA, 79 nt, Homo sapiens
cgcaggagacgagaggacgggaccaggcgaagcggccgagcaggcgagcgaacgacggagggagcccagccggagacgg

SEQ ID NO: 58048 - RNA, 41 nt, Homo sapiens
aggagaaggaccaagaaccaggaggacagcaagacgacccg

SEQ ID NO: 58049 - RNA, 75 nt, Homo sapiens
aaacggagggacccaaccaagaacggccgagcgaccaggagaggagcccccgcccgaagaccggggagggccccc

SEQ ID NO: 58050 - RNA, 87 nt, Homo sapiens
gaagcggccaaagccgcccagacggccaccggcgggaggaacaaaaggagagcgccggcgcggaaggcgggcccccgcgcaaggccc

SEQ ID NO: 58051 - RNA, 76 nt, Homo sapiens
gcagcgcgaggccgggccgggggagaccgcgaccgacaggagcggacccgcggaggggcgggagcggccgagggcc

SEQ ID NO: 58052 - RNA, 78 nt, Homo sapiens
gagacacagaccccaaggggggccaggggaaggccgggaaggacagggcagaggggcacagggagaaagaaaaagggc

SEQ ID NO: 58053 - RNA, 87 nt, Homo sapiens
aagggaaggagaaggagggacgcaggcgcaggccagcgcagaagaaagacagcaacggagccaaaaaaagaccagcccaaaaaagcg

SEQ ID NO: 58054 - RNA, 82 nt, Homo sapiens
agcaaaaccgcgcaaagcaacaggcaaaaggcgacagacacagcaccggccccggcagcgggacgcaggacggcagccgggc

SEQ ID NO: 58055 - RNA, 87 nt, Homo sapiens
ggaagagagaaaagggcagaacgaaaaagaagaaccgcaaaagccagagggacagggacaagcgcacagcggagaaagcagcgcggc

SEQ ID NO: 58056 - RNA, 69 nt, Homo sapiens
gacagcccaaaaggcggccagccaccgaggccaacaacacaggcagaagaggggggagggacgaccagg

SEQ ID NO: 58057 - RNA, 78 nt, Homo sapiens
ccgccgcagagccgcggcgccaccgccgcccccaggcaaaaaaagcacaaggcaaacagggcaagagagaggagagca

SEQ ID NO: 58058 - RNA, 81 nt, Homo sapiens
cagccagcacaccccgcgagcaaggagggcgggaccccgcggaacggccgcggggagcggcgcgcgcacaggcacacgaca

SEQ ID NO: 58059 - RNA, 58 nt, Homo sapiens
cagcaggaaccaccgggccaaccgaagcaacgacaaggagaggcacagacagcacaag

SEQ ID NO: 58060 - RNA, 79 nt, Homo sapiens
agagaacacacagagaaagaccagaacaccgcccagaccacacgggggccaaaggcaaaagcggccaggaggccacaag

SEQ ID NO: 58061 - RNA, 69 nt, Homo sapiens
ggaggaggcgcaccccacaggcgcgaagaaaacaagccccggaggcggaccaaaaagagaaaacgcgga

SEQ ID NO: 58062 - RNA, 77 nt, Homo sapiens
agcgaaaggcagcagccacccagaagggcgaaaggagagaggagaacccccaaaaaaccaagggacgaggaaaagaa

SEQ ID NO: 58063 - RNA, 68 nt, Homo sapiens
aaaggcccaacaaaggagacagggaaaccccaccccgggcgagggcgggggcgaaccgcggcccacca

SEQ ID NO: 58064 - RNA, 71 nt, Homo sapiens
ccaaaccggcaggcacccgggcgccggaccgggaaacaaaaccagcaagccgacaggcgacaagcgcgaaa

SEQ ID NO: 58065 - RNA, 78 nt, Homo sapiens
ggaaagggaaacaccaggcaagagaacgcagagcggaaaggcagccacagcagaggaaagagggaaagacaaaggcca

SEQ ID NO: 58066 - RNA, 79 nt, Homo sapiens
gaaaaggccaagaaggcagagcggggcccggcgcacccaccaccgccgcccacggcagcccagggacccgagcaccgcc

SEQ ID NO: 58067 - RNA, 41 nt, Homo sapiens
gcagaaacggccaaggacacaggagaaagcagggcccgaga

SEQ ID NO: 58068 - RNA, 72 nt, Homo sapiens
aaaaagccagaagggcaaaaaggggaaaaagagccagaacacgagaaaagaagaagaacaagcacagagaca

SEQ ID NO: 58069 - RNA, 81 nt, Homo sapiens
ggcccccccccgccggggaccgagcgcgccgcccggcgccggcccgcccccgcagcagcgccagaggaagcaccaaccgcc

SEQ ID NO: 58070 - RNA, 82 nt, Homo sapiens
gcgaagcacacgccgccccgacgcgagggcagccccgccagggaaccccgaggcaggcaggcaccccaggcccgcagccccc

SEQ ID NO: 58071 - RNA, 78 nt, Homo sapiens
ccgccgccgccaccacccacccggacacagggccgcggaccagcggacagaccagaagacacgaagaagagacagagg

SEQ ID NO: 58072 - RNA, 59 nt, Homo sapiens
cgcgccgcaggccacggcccaggccccgcaagaggagccaggagcacggggggaacaag

SEQ ID NO: 58073 - RNA, 58 nt, Homo sapiens
gccgcggagaagacccaagcagcgccgcacccgccgcaaaggaccccaccccccagaa

SEQ ID NO: 58074 - RNA, 75 nt, Homo sapiens
gacggggacccccaacgggcccgcaggagacgacaccaagaggaaaaaccaggcaaggaagcacaagcgacaaga

SEQ ID NO: 58075 - RNA, 116 nt, Homo sapiens
ccccccgggagccccaggaccaccaggcggggaagacaacgcacagcaagcgggggccaacagccagacaaaaccacaacaccgccaagcaaaaggcccacccaagaagaaggaaa

SEQ ID NO: 58076 - RNA, 76 nt, Homo sapiens
agccacggagaggcaagaccaccggggggaaagcagcccggcccagcggccagcgggccggcacgcagacgccggg

SEQ ID NO: 58077 - RNA, 79 nt, Homo sapiens
acgcgggaggacggcccacggcagcgcaccgaggaagccgacaggaccgggggcacggaggggaagcacccagaacccc

SEQ ID NO: 58078 - RNA, 66 nt, Homo sapiens
gaggggaagccaagcaaacgcagaaggacgcccacgagcaaccaagagaccagacagcaggaaaag

SEQ ID NO: 58079 - RNA, 76 nt, Homo sapiens
aacgacccgaccgccagccccagccacaaagggccgagaaaaggggccagcgagccggacgccgggaaggaagaac

SEQ ID NO: 58080 - RNA, 76 nt, Homo sapiens
ccaaacgcagccagaagaagagaccccaaaagaagaggcggcgcaggccagcggaccacagcccgcgcaagaccag

SEQ ID NO: 58081 - RNA, 69 nt, Homo sapiens
gagcgaagcacgaacaaacagaaaagaagcaaaaacaggaacacggaacagagacccaaagagacagag

SEQ ID NO: 58082 - RNA, 79 nt, Homo sapiens
caagcggcggaaagggcgcgcgggcccccgaagcaggggagaaacgacggaaggaaaacccccggggcaaagacaagcc

SEQ ID NO: 58083 - RNA, 74 nt, Homo sapiens
gagcgaagcagggcacacacacccccgacccaagaaaccgagagacacaccacaaccacaggccgacggagccc

SEQ ID NO: 58084 - RNA, 78 nt, Homo sapiens
acaaagcgaaagcacaccaaggcgccggcggcagagcggggagacgagacaaccgccccgccgccgggaaacaagagg

SEQ ID NO: 58085 - RNA, 71 nt, Homo sapiens
gcccacaggacggggagacagcagcaggaacacagccaaacgaaacggaaaggaggacaccggaccagacg

SEQ ID NO: 58086 - RNA, 75 nt, Homo sapiens
aaaaagagaaagcagcaacagacaaggcagacacaaaaggaagagagggaacaaaacaggaagcggaaaacagaa

SEQ ID NO: 58087 - RNA, 79 nt, Homo sapiens
caggacgcagcccggcggacgccggcacagaacgacaaggaccaagaacaaaggagaagaaaccaagaagagaaaaaca

SEQ ID NO: 58088 - RNA, 71 nt, Homo sapiens
agcggcaccacaccgaagaagcccaacacacaagaggaaagaagaccgaaacaaccacggaacaacagaca

SEQ ID NO: 58089 - RNA, 64 nt, Homo sapiens
gaaccccggagaaaaggccaagaaggcagggggagccacggaccagggggacggcgacagcgcc

SEQ ID NO: 58090 - RNA, 72 nt, Homo sapiens
cccaacaccaaagaccgacagaggcgagcgagagaaagagagcgcgaggaagaacgaagccaaaaaggaacg

SEQ ID NO: 58091 - RNA, 72 nt, Homo sapiens
aagccccaccaagggacccacaccggaaccaggaagaaaagagcaagcaacccaaccaaaccagaggacagc

SEQ ID NO: 58092 - RNA, 75 nt, Homo sapiens
ccaacaggacaacacgaacaggccgaaggaggagccaagagggcccgaggaaaaaggaacggaccagacgccaaa

SEQ ID NO: 58093 - RNA, 76 nt, Homo sapiens
gaaaagaaaaagagcaaccccaggaaagaccacccaacgaacaaccagggccccacgaaggacggccagcgcggca

SEQ ID NO: 58094 - RNA, 68 nt, Homo sapiens
gcaaacggaccagaccgaccaccaaaagccgagggaaagaaaccgaaccaaacgccagcgacccagaa

SEQ ID NO: 58095 - RNA, 84 nt, Homo sapiens
ggcgagaaagagcccgaggaagggcggaccaaccacggcaaaccaacaaggccggggggggcacagagccccggaagacagccc

SEQ ID NO: 58096 - RNA, 74 nt, Homo sapiens
ggggggccgggggccggagacgcaccgagaaaccgaaccccacccaaggacgccgccccagggaaacgcaggag

SEQ ID NO: 58097 - RNA, 58 nt, Homo sapiens
accgccacggaaccagcagcacgccccaaccagagagcgagcagaaaaaacaaaaaga

SEQ ID NO: 58098 - RNA, 82 nt, Homo sapiens
agacggccaccggcgggaggaacaaaagagcaaagccccaggaaaaaggggaaaacaccgcgccagccagaaagagcgaagg

SEQ ID NO: 58099 - RNA, 64 nt, Homo sapiens
gcccacacccaagcaggaacaagccgcaagaccgaaaacccggcaccaaggaccaggcacaagc

SEQ ID NO: 58100 - RNA, 70 nt, Homo sapiens
agcggcggaaggccaccagaggcgcacacaggacagcaacgccagcgcacgagcacaccacagaccccaa

SEQ ID NO: 58101 - RNA, 83 nt, Homo sapiens
gggagagaacacacagcgggcgcagcggagaacgcaaaccgcgcggccgaaggacccgcccaaggagaggaagcagaagggag

SEQ ID NO: 58102 - RNA, 58 nt, Homo sapiens
gaagaggggaagcaaagcaaaaaacagggccagacgggaagaaacgagaagggaccag

SEQ ID NO: 58103 - RNA, 40 nt, Homo sapiens
gccagcccgagcaagaaagaggaagaagaagcacggcagg

SEQ ID NO: 58104 - RNA, 73 nt, Homo sapiens
gacggaagccccaacagcggagagaccaaccaaagcgcacaagaagaggaaaagagagcgaccgaacagacaa

SEQ ID NO: 58105 - RNA, 85 nt, Homo sapiens
cgggggcggcggccacgccaaggacggaaggccgccagaagacagccaaaacacccaaacagaccacgcaggagacagagggaca

SEQ ID NO: 58106 - RNA, 54 nt, Homo sapiens
aaaaggcaccgcccgagacaacagcaggagaaggaccaaaaggaacgagacgga

SEQ ID NO: 58107 - RNA, 75 nt, Homo sapiens
aaagccgcccagacggccaccggcgggaggaacaaaaggaggagccaagcgggaaaaggggcaccgacgcaccag

SEQ ID NO: 58108 - RNA, 78 nt, Homo sapiens
cacgcgcagggcccacgacgagacaagaagccgagccacggagcacccaaagagaccacccgcagcgagcagcggaaa

SEQ ID NO: 58109 - RNA, 77 nt, Homo sapiens
ccgggcaccagaagcgggacaaagaccaagggaaagaagccaggccagcaaaggccaaagaccacaccagcacgccc

SEQ ID NO: 58110 - RNA, 74 nt, Homo sapiens
ccaccccaacaggaaacaagggagcaacagcgagcaacaggcaacgaaaacagacaaaacaacggaaaagcagg

SEQ ID NO: 58111 - RNA, 70 nt, Homo sapiens
ccaccagagaacacagcaaaaaaaacaacaaaaaaacagcagagagagaaccgcagccagaagcaaagca

SEQ ID NO: 58112 - RNA, 55 nt, Homo sapiens
gccggagccaaccaccgagaggaccaggaggagcgccgaggacgcagcgagcacg

SEQ ID NO: 58113 - RNA, 76 nt, Homo sapiens
caggccagacccgcccccgaaaggaaacccagcggcggcagaaccagccggcacaaagccgaaccagagagagcaa

SEQ ID NO: 58114 - RNA, 80 nt, Homo sapiens
gagcaggagccacgagagaggaggcgcgcgcgcgccgagccgcgggcccgcaggcaaaaccaggggaccagagcgaaaga

SEQ ID NO: 58115 - RNA, 80 nt, Homo sapiens
gagccgagggaggggaaaggcgcagggcacaaaccgaagagcccggggcgggacgccacgaaagaaagggagacagaccg

SEQ ID NO: 58116 - RNA, 63 nt, Homo sapiens
gaccagccaggcccagccccgaagggcacaccggagcggccgccaggagagccggggagcagc

SEQ ID NO: 58117 - RNA, 54 nt, Homo sapiens
gcgggcggaaaacgaaaaggaagcaaggcgccaccagcaaaaccagagaaacag

SEQ ID NO: 58118 - RNA, 74 nt, Homo sapiens
gaagcgggagagcccgccaggagggagggacccagcagagaacgcgaaagaagccaagagcacacagaagacca

SEQ ID NO: 58119 - RNA, 76 nt, Homo sapiens
aggaaggcaccagcaaggacaggcgagacagcagccgcaagaaaagcgggaacaagcggagcaccacacccagcga

SEQ ID NO: 58120 - RNA, 55 nt, Homo sapiens
aacaaccagcggaaggaaggcaacaaggcaccaggagacacccgaaacagggggc

SEQ ID NO: 58121 - RNA, 55 nt, Homo sapiens
gccccaaccacagcccgcaagggaaccaaaacaggcccgacacgcgacaggaccc

SEQ ID NO: 58122 - RNA, 74 nt, Homo sapiens
ggcccggggacgccacaccaggacgcgcagcggcaggggagcggggcggagaacggaaaagcaccaggaagcag

SEQ ID NO: 58123 - RNA, 41 nt, Homo sapiens
gagaccagcagaacccaccagacagagcacccggcccaggc

SEQ ID NO: 58124 - RNA, 55 nt, Homo sapiens
caccgggcacacgcagaagcacggaggacaagccacaaagagaacaccacccaga

SEQ ID NO: 58125 - RNA, 43 nt, Homo sapiens
ggaccaaaaggacaagcagggccaaggacagcaagagcagccc

SEQ ID NO: 58126 - RNA, 80 nt, Homo sapiens
ggacccgcaggccgcgcagagaccaccagggaagagggagcagggaggaagggccgaaggagcgacaaacaacaggacag

SEQ ID NO: 58127 - RNA, 79 nt, Homo sapiens
ccaggcggcagagaagggacgaaaaggaaaaggagagagccagagcaagagcggaccgccgcccggccaacgcaacagg

SEQ ID NO: 58128 - RNA, 76 nt, Homo sapiens
acaggaagagagacagaaacacagcaacggcaagaccaccccacacagaccgcgccccaggcgaccacacaccacg

SEQ ID NO: 58129 - RNA, 74 nt, Homo sapiens
gcaacgaaaaccggaaaaggggcgcagacccgccagaggcaggagggaaccaggacaccccaggggcggggaag

SEQ ID NO: 58130 - RNA, 81 nt, Homo sapiens
caggggccaggagaaaaagaaagcgacgagagaacagcccccaggagaggcaggcgcaaaggaggcaacggaggagcagcg

SEQ ID NO: 58131 - RNA, 71 nt, Homo sapiens
ccaccagcagggcacacaggaaggaacaggaggaaaccacagaggaccaaaggaagaagcgaagacggaaa

SEQ ID NO: 58132 - RNA, 61 nt, Homo sapiens
ggcaacaggcaccccccagagaaaggagagcggccgcaagaaggcgacccaaaaagagcag

SEQ ID NO: 58133 - RNA, 35 nt, Homo sapiens
ggccagcccgacgccagggggacaaggagaagaaa

SEQ ID NO: 58134 - RNA, 70 nt, Homo sapiens
caacgggggcacagagaggcgaaagaacagaccggcacaggaaaagcgggagagcggagggaaacaaggc

SEQ ID NO: 58135 - RNA, 124 nt, Homo sapiens
cgaggaggcgaaggagggcagaggcgggagcccgaggagagcggagaaaaggaggacacaagacgaaggcccaccaccacgagcgcggccaccaaccccggcagaccagagcagcccaggagga

SEQ ID NO: 58136 - RNA, 75 nt, Homo sapiens
ggcccaggccccccgccccgcgcagcagggcggagaacggaaaagcaccaggaagcagagaggaccgcagaaggg

SEQ ID NO: 58137 - RNA, 70 nt, Homo sapiens
aggccgggccagagcaaaggcaaaagccagccagagacgacaccccaggcccggaacaccagacaagagg

SEQ ID NO: 58138 - RNA, 67 nt, Homo sapiens
ccaagacaccaggggagaccccaaaagcaggccggcaccggaggcagaacccaaggggcaggaagag

SEQ ID NO: 58139 - RNA, 61 nt, Homo sapiens
gcaacaccccagccggagggaagaacaagagagggaaagcagagcccacagaagacccagc

SEQ ID NO: 58140 - RNA, 83 nt, Homo sapiens
acgacgaggaagaggaggcgagggccgggcaaaacccccgagccaccagaaaagggaagcaggaagaccaagaaggacgaaga

SEQ ID NO: 58141 - RNA, 75 nt, Homo sapiens
ggcagccagcagggggagaggaggcacccgggaagcggaaaagcagccagaggaaggaaaacgcgaagaacagca

SEQ ID NO: 58142 - RNA, 73 nt, Homo sapiens
acagacgcaagaggcggacaggcggaacaaagaccggagagaacagaaaaaaagcggcccgggaccaggaaag

SEQ ID NO: 58143 - RNA, 91 nt, Homo sapiens
agaagagacagcccgcagagagaaccgacaggaaccagacacgcaaacagcgaagacaacagagcgccaaggcgggaaccgagcaagcagg

SEQ ID NO: 58144 - RNA, 82 nt, Homo sapiens
gccgcgagcccggaggcggcgggaggaggcggcggccggcccgagagagaaagggaaagaaggagcggagcagaacaaggac

SEQ ID NO: 58145 - RNA, 51 nt, Homo sapiens
acccgccagcccccaggggggggaagacaacccggagaacacccaggggac

SEQ ID NO: 58146 - RNA, 85 nt, Homo sapiens
ggccaagcccccagcgccagggcccccggccacacgaaccggggagaccacgacgcgccccgggcgccagagccgcagcccagcg

SEQ ID NO: 58147 - RNA, 72 nt, Homo sapiens
gggggaccaaacgagaggcgggcaggaggacccaaacgaagaacagcgaaccaagccagggaagccagccac

SEQ ID NO: 58148 - RNA, 84 nt, Homo sapiens
cggggcgcaacgccgaccagcgacacgcggccgcggagaccaccgcggcgcggcagcgcgcccgagccggaaccaaaaagaagc

SEQ ID NO: 58149 - RNA, 58 nt, Homo sapiens
acacaggcgacaacacaccaacggcgaggcggcagcggagccgccgggcgaggcagcc

SEQ ID NO: 58150 - RNA, 78 nt, Homo sapiens
gaagcacacagccagggccggggaggcgcagcaccccaacagcccccaggggagcgagcacaaacgacacacgcaaac

SEQ ID NO: 58151 - RNA, 72 nt, Homo sapiens
ggacagggaccaacagcacccgcggacgcaggaagaagcccagaagagcgccaacgaaagaggcggacgaac

SEQ ID NO: 58152 - RNA, 72 nt, Homo sapiens
aaaccccacaagagcgaacgaaaggaagaagcaagcaaagaacaaaacaggagcaaagccaggagaaacaga

SEQ ID NO: 58153 - RNA, 67 nt, Homo sapiens
gacagccaccaaggagaggagcccaagaggcacgcaccccacaaaaaaagagacaggcacaaaagac

SEQ ID NO: 58154 - RNA, 72 nt, Homo sapiens
ggaagccccgcggagccgccaccacgacacaacaggcacaaagagagaaggaacacccacagggcagacaga

SEQ ID NO: 58155 - RNA, 73 nt, Homo sapiens
aggaccaagaaccagcgccgagaccagaccaccgcacggaacagggagaaagccaaaacgacgacaagacaca

SEQ ID NO: 58156 - RNA, 69 nt, Homo sapiens
ccggaaagcaccgcggagccagccagaagccagacgccgggaaggccaaacccagacacaggaaaaccc

SEQ ID NO: 58157 - RNA, 48 nt, Homo sapiens
gccaacaaagggagcagcggggaagcgaagcaggcccccgccaccagg

SEQ ID NO: 58158 - RNA, 88 nt, Homo sapiens
aagaaacgggccgcgaaccgcagacagcggccaagaagacacaaaggacggaggcacggaggaacacccgcccgacagaggcggggag

SEQ ID NO: 58159 - RNA, 49 nt, Homo sapiens
acagccaccacaccaagacaccaggggagaccgacaaaggccgagaacc

SEQ ID NO: 58160 - RNA, 82 nt, Homo sapiens
gcgacccagcccccgcccgcagccggacgacacgaccgccgcccgcggaacagccagcaaagacaagagcagaccagcagcc

SEQ ID NO: 58161 - RNA, 94 nt, Homo sapiens
ccgcgggccacagccaggcggcagccaacggccgcacggcccaggagcagagggcagagccagccagaggaggaggacgaggcgaggaggagga

SEQ ID NO: 58162 - RNA, 52 nt, Homo sapiens
agccgagaaacgcgaaaaggaagcggaaggaaacccgaaacccacaaacaag

SEQ ID NO: 58163 - RNA, 85 nt, Homo sapiens
ggagccaagagcccgccgagggaaaagcgaaggccgcgaaggggaagaaacgagcgagcccgggacagcaagagccaagcgccgg

SEQ ID NO: 58164 - RNA, 66 nt, Homo sapiens
ccgacagaggagagcagagacagacacaagcgggccaacaaaaggcacgccgccagcgcgccccag

SEQ ID NO: 58165 - RNA, 59 nt, Homo sapiens
cagaggaaccccggggaaaggaagagagagacaaagaagcaagcgcgaaccaagacagg

SEQ ID NO: 58166 - RNA, 58 nt, Homo sapiens
gaacgaaccaaccccacaacaccgccggagacagccaaggaccggaccaaaccagaga

SEQ ID NO: 58167 - RNA, 57 nt, Homo sapiens
ccagccgcggccggaggagcccccaggccagacacgagaccagaagccaagaaacga

SEQ ID NO: 58168 - RNA, 38 nt, Homo sapiens
gccgagccgcgggcccgcagggacgaacagcggggacg

SEQ ID NO: 58169 - RNA, 85 nt, Homo sapiens
ccggggcccacacggccgcccggccaccgcgcccgacgagccgcaggcgaaagagacggcgccgaggaagcacaggcaacaccac

SEQ ID NO: 58170 - RNA, 75 nt, Homo sapiens
gaagaaccgcaaaaagcccaccacccgaagacgaagacaccgcaaagagacgaagggacccccccccggcggaaa

SEQ ID NO: 58171 - RNA, 73 nt, Homo sapiens
gcaaccagaaagccaggagccacgcaggagggggcagcccaggagagcacccgaaggcccgaaccagcggcac

SEQ ID NO: 58172 - RNA, 92 nt, Homo sapiens
ccgaaaacaggcaagcagccgagccccacacagaagccacagagacagggaagaagaaggcaagaaggaagaaaacaggaaaagagaacagc

SEQ ID NO: 58173 - RNA, 79 nt, Homo sapiens
aaaggcaacagcaggacacgcacgccagaacacaaagccaaggccgccgagaggcgaggggacggcggggagcgcagga

SEQ ID NO: 58174 - RNA, 77 nt, Homo sapiens
agagcgcacggcgacgccccaggggaaaacccccgggaccagcgcggccacgcccccacgaccggacggacacccgg

SEQ ID NO: 58175 - RNA, 109 nt, Homo sapiens
cacaagacacccaacggcaagacacgggagccaggaagaccaagcaaaagacgaccaggagacacaacaggccaaagccaagagaagaaaagcagcgccaaggcaggac

SEQ ID NO: 58176 - RNA, 68 nt, Homo sapiens
cagaccagacgcgagacccgcccgacacaccggcacgaaaaacccgcagggccaaccagaagacggag

SEQ ID NO: 58177 - RNA, 74 nt, Homo sapiens
gcaagcgggggaccgaacaaggcaaaagggaaacgggggagaaggaggaacacaaagaggaccagcgacaaacc

SEQ ID NO: 58178 - RNA, 75 nt, Homo sapiens
cagagaaaccagaagcccaagggacaagggcaacaaggccgcggagaagcgacggaggagggggggaggacagcc

SEQ ID NO: 58179 - RNA, 76 nt, Homo sapiens
ggacaaagagcaaacagacagggccgcagggagaccgaaggaccaccggcagcgggaaaaaacgaccaagacaaac

SEQ ID NO: 58180 - RNA, 79 nt, Homo sapiens
ccgggggcggcggccacgccaaggacggaacacagaagcgaacggacagaacacgggaaagaaaaaaccgcgcagccca

SEQ ID NO: 58181 - RNA, 72 nt, Homo sapiens
cgaagaagaaacaagacgagagagagacacacccacaggacgaaaccccgacccccgagacacgcgcaagac

SEQ ID NO: 58182 - RNA, 47 nt, Homo sapiens
ggccggagcggcggcaagaaccaagggcacggccgagcagagaggac

SEQ ID NO: 58183 - RNA, 40 nt, Homo sapiens
agacccgcagcaaaccgacgggcgggacaggacgaagcac

SEQ ID NO: 58184 - RNA, 55 nt, Homo sapiens
gaaccacgaagaaacaccacaaaccggagccgcaacgggaaagaaaaaaggacac

SEQ ID NO: 58185 - RNA, 58 nt, Homo sapiens
cagccgaccagcccccgaaggcagcacgcccgacaacaagccgacgacgcgcagacca

SEQ ID NO: 58186 - RNA, 70 nt, Homo sapiens
agaaggagcagcgaaaaacccgaccccccaagcagggagagaggcagaacagaacaaacggagaaacacc

SEQ ID NO: 58187 - RNA, 78 nt, Homo sapiens
gagagagcacgaaggacccagcagggcaccaggcccgggaggcaagcgggaggcccggaggcagcccaagcgcggcca

SEQ ID NO: 58188 - RNA, 80 nt, Homo sapiens
cagcaagggccgaccacacaagggagggcggagggaaccaaagagagcgcagagaggaacggaaaaccaggggccagaac

SEQ ID NO: 58189 - RNA, 80 nt, Homo sapiens
aagaaaaaagacaccaacgccaaacgaggcagcaacacaacgcagaaacagagagcgcacagaaggagaaagacgccagc

SEQ ID NO: 58190 - RNA, 92 nt, Homo sapiens
gaccggggacgcacggaccaaaaacccgcaacagcccccgcccaaggcggagaacggaaaagcaccaggaagcagagaggaccgcagaaggg

SEQ ID NO: 58191 - RNA, 75 nt, Homo sapiens
ggcgacgcaacagcacgaggccccgacaggcggcgcacggaaacagccacagcagggccagagcagaggcggaga

SEQ ID NO: 58192 - RNA, 74 nt, Homo sapiens
cagacaaaccgccaggaccagaggaggacggcccgagaaagagaaaggagaccacaagaccccgcgccaccaaa

SEQ ID NO: 58193 - RNA, 63 nt, Homo sapiens
ccagagcagacacaccccagagggcgcaagcagagaaaaggccaccaccgcagacaggggcgc

SEQ ID NO: 58194 - RNA, 72 nt, Homo sapiens
gagagccgaggcgccccgcgggagaaggacccccgcgccgggcagaaacgaagcacaggaacaagaagccaa

SEQ ID NO: 58195 - RNA, 77 nt, Homo sapiens
ccaggacggagagggagaaggcaaacgaagcacggcaggccaccagccggcaggacgcgcccgggagggagaccaga

SEQ ID NO: 58196 - RNA, 55 nt, Homo sapiens
cggagaagcaggagcccaccggcaggcgcagcgcgcggaaggggagacccgcgca

SEQ ID NO: 58197 - RNA, 45 nt, Homo sapiens
aagacacacccgacccaggccacacccagcaagggacaaggaccg

SEQ ID NO: 58198 - RNA, 69 nt, Homo sapiens
gccgggcgcccagaaagggggagaaaaggccaagggcaggagacacgagacgcaggaagcagcgaaaga

SEQ ID NO: 58199 - RNA, 74 nt, Homo sapiens
gaaggagcacgaacagggagagcaggacaccagcacaccgcggaggcgcccagacgaagcggccagaaccagga

SEQ ID NO: 58200 - RNA, 65 nt, Homo sapiens
gacaagcacaagcaaagggacaccaccagcaggaaaccacaacacaggcccggagcgccacggag

SEQ ID NO: 58201 - RNA, 54 nt, Homo sapiens
gacaaaagggccaaagaagggagagagccaccgccccaccaacggggccaacca

SEQ ID NO: 58202 - RNA, 70 nt, Homo sapiens
cagacaaagacggcaacaacacaaccggacacaggaagaaggagaaagacaaagccccgagaaagaccag

SEQ ID NO: 58203 - RNA, 79 nt, Homo sapiens
aacaagcccgagggcagccacagcgggaaaagaaagcaacgcgagcccgcacaaccacagagaagcccacccggaaaca

SEQ ID NO: 58204 - RNA, 91 nt, Homo sapiens
gaagagagaaaaccacggacaagaaagcgccaaaaacaacaccaaaaagccgcagggagagggcagaaggcaggaccaagcagggggcaca

SEQ ID NO: 58205 - RNA, 80 nt, Homo sapiens
ccgccagcgcgggcggccccggcccccacacccgagccaggaacagacaagcgggacagcaagggaggcagcagacggga

SEQ ID NO: 58206 - RNA, 79 nt, Homo sapiens
gggccgcgcgcaggcacccgccggcccaccaccccagaggcgcgcccaagccccacgacacccaaccccaccagcccgg

SEQ ID NO: 58207 - RNA, 80 nt, Homo sapiens
cggcagcggaggagggcaaggacaccccgccaggcaaaaggagacgaccccagcaaagcgaccggaagggggccaacccc

SEQ ID NO: 58208 - RNA, 79 nt, Homo sapiens
gcggggagagaggggcgggcgagcagaggggaagcggcggagcaggaggagggcgggacacgcccgagcgccgacgcag

SEQ ID NO: 58209 - RNA, 67 nt, Homo sapiens
cgggcagcccggccgacaaccacgcagaccgaaaagggcggaaaaggaccaaggcccgcaaaagggc

SEQ ID NO: 58210 - RNA, 90 nt, Homo sapiens
ccacggcagaagaggacgaggccgacagcacgccgagaaggggggcacgaacaacaagacaagcaaccaagaaagcgacaaggaccagac

SEQ ID NO: 58211 - RNA, 64 nt, Homo sapiens
aaccacaggaaaagagaaccggggaaggcaaggccggcgagaacgccgggagggaagaaagcaa

SEQ ID NO: 58212 - RNA, 67 nt, Homo sapiens
ggaggagaggagaaaccaagcagacccagccccaggggcaggacagggggaaccagaaagcccgacg

SEQ ID NO: 58213 - RNA, 81 nt, Homo sapiens
cgacggagggaggggagacaccggagagggaagccacaccaggcagcccggggcaagacaccagaagacccacgcagccac

SEQ ID NO: 58214 - RNA, 77 nt, Homo sapiens
cagagagacagagggagaagaggccgaaccccacgagccggaaaacagacagaagggcggaaaggcacaggaagcca

SEQ ID NO: 58215 - RNA, 72 nt, Homo sapiens
ggggcccgaacagaggggcccgagacgggagaaaggagaaagaaacgccgaagcgcgaccaggcccgagcgg

SEQ ID NO: 58216 - RNA, 82 nt, Homo sapiens
ccacaaagcacgacggcacccgggggccacacgcaggccccgcgccagggcacagaggcggggcgccagcacagaaccgcca

SEQ ID NO: 58217 - RNA, 82 nt, Homo sapiens
cgcgaggagcagcggcggcgaggacccggggaggagcccccaacaagcccaagaggagagaccccagaggagcgcagaagcg

SEQ ID NO: 58218 - RNA, 73 nt, Homo sapiens
aaggggagagacaccaccccccccgccccaaagcgcggaaacaggacaaagccggcacgcaaaaggggggagc

SEQ ID NO: 58219 - RNA, 42 nt, Homo sapiens
gaaaaaggccccagaacaaagcgaagagaggagccaccgcac

SEQ ID NO: 58220 - RNA, 76 nt, Homo sapiens
caccagccggacggcggggccgggcccccggccgcaagcagaaggagaagaagcaccagccgacgcgaacggaaca

SEQ ID NO: 58221 - RNA, 74 nt, Homo sapiens
ccaaagcacaggaaccaccgaaagcggcgcaacgagcaaggggagaagggaccacgcccacgacggagcgcgcg

SEQ ID NO: 58222 - RNA, 82 nt, Homo sapiens
cagggagaagaccacgccggaaaaagacacagcagacccacaagcaccgagcgcggcagcacgacaacacagaggacccagc

SEQ ID NO: 58223 - RNA, 78 nt, Homo sapiens
cggagcgagccggggggagcggcggccacggcaccggcggggggcacgaggaaaggcgaggaagaaacaaggcgggcc

SEQ ID NO: 58224 - RNA, 134 nt, Homo sapiens
aggcggacgaggcggaagaccgcgcgcagggccgcagcgggagcggacggcgagcgcgagcggcgcgagaaaggagaagcccaccacgcaacgggacggcgcggcggaaggcgcgccagacgagccacgcgcca

SEQ ID NO: 58225 - RNA, 78 nt, Homo sapiens
ccggccccacccgggaggggggagcggcgggaggccaccgccagaaaacaggacaggagaagaacacccccaagagca

SEQ ID NO: 58226 - RNA, 72 nt, Homo sapiens
ggggccaccaagaagccagaccacagccgaaacaaccaacgacaacaaggcagaagcaagaagagagcccgg

SEQ ID NO: 58227 - RNA, 75 nt, Homo sapiens
ggcaacccacgagagaacagaggcacagcacccaaggggccaaccgaagcggagaaccaaagcgaagagcggaag

SEQ ID NO: 58228 - RNA, 75 nt, Homo sapiens
caggggccacccagggcaggggcgggagccgagccccacaccgccgggcagagggcggacacgacagcgccggac

SEQ ID NO: 58229 - RNA, 75 nt, Homo sapiens
gacggccaaaggacgggacaaagcgaagaaaagggacggccagagcccgaagaagaaccagaggagggacagagg

SEQ ID NO: 58230 - RNA, 84 nt, Homo sapiens
cgcccggcggccccggcgccggcaaggggacccaggcgcccgcacgcgaggaaacccgggaaagcaaaagcgaagggaaaaaag

SEQ ID NO: 58231 - RNA, 65 nt, Homo sapiens
gggccgcggaggggcacgagcgccacaaccccagggaacgaagcccaaaaggcagagacggaccg

SEQ ID NO: 58232 - RNA, 71 nt, Homo sapiens
acaaaggcaccaggccaccacagaaacaaaagcaacaaagaggcgcggagccagcgcccggcaaggagcga

SEQ ID NO: 58233 - RNA, 110 nt, Homo sapiens
cggagcccaacagaggaagagcgaggacccggaaaagagcggagagcggacccgagaagaaggggaaaagcacagaaaccaggacggggcgggaaccaggagaaaagaga

SEQ ID NO: 58234 - RNA, 76 nt, Homo sapiens
agcaggccggcggacggcggcgaagaaaggagaccaggcggacgacacaaacccaacaggagggaaggagggacca

SEQ ID NO: 58235 - RNA, 72 nt, Homo sapiens
agaggaaagcggaaagccaaggcgaagagacacaacaaggccaagcagaccggcaacaggaaacagaacagg

SEQ ID NO: 58236 - RNA, 95 nt, Homo sapiens
ggcgaggacggggcgccggcgccgccgcccccgggccgcggccgcagagcaccggccagaacaagccaaggagccaagacgagagggacacacgg

SEQ ID NO: 58237 - RNA, 80 nt, Homo sapiens
ccccaccccaccgccaccgaggcccccccgccccccaggggaaagggagccagcagaggcggcgcagccgagagcgcaag

SEQ ID NO: 58238 - RNA, 73 nt, Homo sapiens
cgcgacgccaaccacgacgaagcggaaggcagaaggacaccaacaggaaaaggaagccagagacacgaggaga

SEQ ID NO: 58239 - RNA, 75 nt, Homo sapiens
acaggaaggaggagagaagggcaagggccaaaagaggaaggccgcggacccccccccccccaccccacaggagaa

SEQ ID NO: 58240 - RNA, 74 nt, Homo sapiens
aaaacggcaagaggaggccgaaggggcggaaggaaaggagaaaacaaacaaggggagagaggggaacacggaag

SEQ ID NO: 58241 - RNA, 71 nt, Homo sapiens
ggacacgaggagaaacagcagaaacgcaccaggccaaagaaagagaagacccagaagaaccacgcgcaggc

SEQ ID NO: 58242 - RNA, 68 nt, Homo sapiens
cccaaagcaacccaaggaaggaacacaggcccccaacagaggcaccgacagggacaaaagaagcacga

SEQ ID NO: 58243 - RNA, 71 nt, Homo sapiens
agaacgaggaaggcaggacaaaacacaaggaaaaaaccagcgagcacagggaaggaggcaagaaggcacag

SEQ ID NO: 58244 - RNA, 48 nt, Homo sapiens
ggagaaaaggccaagaaggcagagaagacacagaaagaggggagccac

SEQ ID NO: 58245 - RNA, 77 nt, Homo sapiens
cgccacacagggcagacagagaagaaggcgcgcaccggaaaagagccccggaaggaagaaacaaaggaccagcgagg

SEQ ID NO: 58246 - RNA, 61 nt, Homo sapiens
agggagccggggcgccgggcccgggccgggcagccccaggagaaagccagcagcgagcgcc

SEQ ID NO: 58247 - RNA, 37 nt, Homo sapiens
gcgcccccagcgcaggggcggaaggagccagaagacc

SEQ ID NO: 58248 - RNA, 80 nt, Homo sapiens
caacaccgcccccgagagcccaagacaagcagaccggaagaccgacggaagaccacaccccgagggagcccaggacacca

SEQ ID NO: 58249 - RNA, 77 nt, Homo sapiens
gggcggacgcagggggccacccagcccccaccgccgccaagagaagggacgaggggcagcaggagcgccggagcggc

SEQ ID NO: 58250 - RNA, 94 nt, Homo sapiens
cacgacccacgcccaagccgggcaggggagcacacggaggggaggacaaaaccaacaacaagccacccacacgagaggaaggagagggaggaga

SEQ ID NO: 58251 - RNA, 67 nt, Homo sapiens
ccgacagccgcagaaccccgaccgagggggaggcacaccagcgaagggcagccagccaagacccggg

SEQ ID NO: 58252 - RNA, 74 nt, Homo sapiens
gcacagaagaaaaaaccagaggcaaagaagaaaacgaaccccaaaaagggcccccacagccagaaaaaagacag

SEQ ID NO: 58253 - RNA, 80 nt, Homo sapiens
gggggagccgccagcgagcaggaggaggcccggccgggccaggcccaaaccacgccagccagccaggagagcgagagcac

SEQ ID NO: 58254 - RNA, 76 nt, Homo sapiens
gacgcccccaccacaccgggaggaggaggagcagcgcggaggaggaagccccccggccagaacaccggacgcaccg

SEQ ID NO: 58255 - RNA, 79 nt, Homo sapiens
gaagaaacagaacacccaagaaggcaaagcgcgaaaacggggaaacaggaagagaacagaacggaagaaagcagaagag

SEQ ID NO: 58256 - RNA, 69 nt, Homo sapiens
caagaaaaaaaccacaaagcggccgaaacagaaaacaagagaccacagaaggcccaagaaaagcccaaa

SEQ ID NO: 58257 - RNA, 76 nt, Homo sapiens
ggacaacaagagaaccgcaaccgccgccccgcagagcggcgaaccggggcaggagggaccagcagaacagacagag

SEQ ID NO: 58258 - RNA, 72 nt, Homo sapiens
aagcaccagccaagaccgggggagaggaaaaagggaccccgacggagagacaaagaagacggagggggggcc

SEQ ID NO: 58259 - RNA, 80 nt, Homo sapiens
ggggcgcccgccgcgccgccacggaaagacccaccgcaagcagagaaagaaccgggccccacaaaccacggccgcgcacc

SEQ ID NO: 58260 - RNA, 87 nt, Homo sapiens
ccagcggcccggcgcgccgcgggcggccggcggccggcggggcggggagcccccgggcacacagggaccaagaagccccggggacac

SEQ ID NO: 58261 - RNA, 79 nt, Homo sapiens
cagcgccaggacaagccccaccagggacggacgaccagaggccgaggacggagagcaaccagggaccaggaggaaggag

SEQ ID NO: 58262 - RNA, 86 nt, Homo sapiens
cggggccacgcggacccggaagcgccggaagcggccggagcagccccggcaggaggcggcggacacgcagacaagcagaccggaag

SEQ ID NO: 58263 - RNA, 81 nt, Homo sapiens
acagccacgcagacggaaacaaggcaacagaaagagcaacagcagggcaacagaggcggacgggcggcccccgcagacccc

SEQ ID NO: 58264 - RNA, 106 nt, Homo sapiens
cccaacaccggaaacccaaacaccagccacgcaccccaggagaaccaggggaagggaccggaagccccgcgccaaaggacaagaccggacagaaggagggaagcgg

SEQ ID NO: 58265 - RNA, 83 nt, Homo sapiens
gcaccagcgagcagcacacgggggaccccaaaagcaccgaagggcacgaacagcacaggaacagagccagaaggagaagaaaa

SEQ ID NO: 58266 - RNA, 83 nt, Homo sapiens
ggacacaaaccaaaacgagagaagaggcgaaagaagagggaaaagacgagcaggagaagaaaacaagaaaaagaagcaaaaga

SEQ ID NO: 58267 - RNA, 81 nt, Homo sapiens
ggacgagaccaaacggaagagggaggagagagcgaggccacccagaaggccagccccagcggcccccagccccggaagggg

SEQ ID NO: 58268 - RNA, 78 nt, Homo sapiens
aaccgccccggccaggaacacagacgggggcgagcggacccgcagccccaaagcaaacaccagcaacacccgggacaa

SEQ ID NO: 58269 - RNA, 81 nt, Homo sapiens
gcaggacgaggaagaagaacagccgagagagcaacaagccagcccgggaccgagcggcaaccggcacgcaccagagcagcc

SEQ ID NO: 58270 - RNA, 59 nt, Homo sapiens
ccacagaggggcgacggcagcggaggaggagaaagagaggacccccggaccggcccgag

SEQ ID NO: 58271 - RNA, 100 nt, Homo sapiens
ggagagagaagaaaggaaaacagaggaagaagaacacacagaggccccccagcacccaggcggaagcagggcgccacgacagcaaccgccccgggcgaag

SEQ ID NO: 58272 - RNA, 77 nt, Homo sapiens
caacccgaacaggaggaagaacccacgaaacacaggcgccaggggagaggaggcagaaggagaccgcgggacagaac

SEQ ID NO: 58273 - RNA, 83 nt, Homo sapiens
gaaaaagcgcccgagacgggcccgccgaaagcggcccgaaggacccgcaacaggcacgcagcagcacacgagaagccaaggca

SEQ ID NO: 58274 - RNA, 79 nt, Homo sapiens
gagccggcggcccccaggcccaacacgcccaacggggccggcggcagagaccacgcccagcaggagcggcgcaggccac

SEQ ID NO: 58275 - RNA, 81 nt, Homo sapiens
gcggcggcggcgccgggcccggggggggacagcaggcgagccccagcaggaggcaacgagggaacaaccgccgaagagccc

SEQ ID NO: 58276 - RNA, 73 nt, Homo sapiens
gccaccgccacgggccgagacacgcagcggcggccagggaccagggaaccgcccaaaagcccgccagaagaag

SEQ ID NO: 58277 - RNA, 38 nt, Homo sapiens
ccccaagagcgggagacaggcaagcggcgggcgcggga

SEQ ID NO: 58278 - RNA, 59 nt, Homo sapiens
gccgccgcgcccaggagggcgggaagaagcgagagccaaagacagagggaccggcagaa

SEQ ID NO: 58279 - RNA, 84 nt, Homo sapiens
aaaagcagagcgaccggaagggaaagcgccgagagacgggccgcgccgcccgcaagcagaggcgccagacaaagccacccggag

SEQ ID NO: 58280 - RNA, 59 nt, Homo sapiens
agaacccacgggcagcacacacgaaagagaagccccggagacagagagggaagaacacc

SEQ ID NO: 58281 - RNA, 80 nt, Homo sapiens
cggcggcgacagccaggcccggaagcgagggcggccgcgccggcccagacaacaggcggcccgggcggagggacacggag

SEQ ID NO: 58282 - RNA, 84 nt, Homo sapiens
aaagcagcgggcaacaggaagaccaaaaacacccgaaaacacaggaaacagaggagccgcgccaggcgggggaggggcaacggc

SEQ ID NO: 58283 - RNA, 76 nt, Homo sapiens
cgcggccccgggggccagccccgagccgagaacagcccaaggaggaagcggagcccacgaggggaggggccggcca

SEQ ID NO: 58284 - RNA, 54 nt, Homo sapiens
gagccccagcgccaccgccgaccgaagccgcaaaagaaagaccacagcaagacc

SEQ ID NO: 58285 - RNA, 71 nt, Homo sapiens
ccacacggaggggacgaagacaaaaaccagcgccaaccgaagaacagggacacaaacggccagacgagaac

SEQ ID NO: 58286 - RNA, 74 nt, Homo sapiens
gcacgacaaaagaaccagaaaaagagaaggaggcgcgagacaacagagaagcaaaggccagaaacagagaccac

SEQ ID NO: 58287 - RNA, 80 nt, Homo sapiens
acccccacggcccccggcgccccggcccccgccccagcccgccggcggcggcgggccgaggagcgagcgacaggcagagg

SEQ ID NO: 58288 - RNA, 68 nt, Homo sapiens
cagcagcagaagcagcagaaaggccgcggcagggcggcgcggccgaggggccaacagaggcaaggacg

SEQ ID NO: 58289 - RNA, 74 nt, Homo sapiens
gccgagccagggcggcggccaggacaacaaaggagaccgggacgccgaccagaaaggagagaggcgccggggga

SEQ ID NO: 58290 - RNA, 70 nt, Homo sapiens
agaaaaccaaggcgcggaaaggaagagcaagcaccgagaagaacaccaaacaagaagccacaagacagac

SEQ ID NO: 58291 - RNA, 71 nt, Homo sapiens
agaccacagacagaggagaaggcggcccaccccagagcaccggcagacgcaaggaccaaaaaacaaagggc

SEQ ID NO: 58292 - RNA, 81 nt, Homo sapiens
ccagaacccaggcccacggaggaagagccgggcagcccggagcgggccagggacaagagaaaaaaagggcgggcgaacaaa

SEQ ID NO: 58293 - RNA, 57 nt, Homo sapiens
agagcgaagccgccacccaaaccagcaaaccagaacggccgagcgaccaggagagga

SEQ ID NO: 58294 - RNA, 119 nt, Homo sapiens
agccgggcccgcgcgcccggccaagaggcaaaggggaggacgcagcaaaccaccagaagaccgcgaccgcacaagcagccgccagcggaaccaagcggcgcggcacacgagaccagggc

SEQ ID NO: 58295 - RNA, 78 nt, Homo sapiens
caaaaacgagaaagagagcgaaacaaggcagagcacgggacgcaggaacccagcggggaaggaaaacagcaacacaga

SEQ ID NO: 58296 - RNA, 80 nt, Homo sapiens
gcggggccaggcaggacccaacgacaggcgccccggcccaacgagaccagggacagaaggggggcaaggcccacagggac

SEQ ID NO: 58297 - RNA, 79 nt, Homo sapiens
gcccccggccccgacggggcgggggccccagccccacagaccagcccagcacagaaaccgggagaagccggccaggcag

SEQ ID NO: 58298 - RNA, 73 nt, Homo sapiens
cagccagggcagcagacagcaacaagcaaacgacggaacccagagaagacgaagccgggaacggagaggaaga

SEQ ID NO: 58299 - RNA, 80 nt, Homo sapiens
cccgcgcacaacaggcgggcccccaagggccaaaggagacaggaagcccgggaggggaggaaggggagcagggcgccgca

SEQ ID NO: 58300 - RNA, 42 nt, Homo sapiens
ccagggcgacaaagggacccggaggccaggacgagccaggac

SEQ ID NO: 58301 - RNA, 83 nt, Homo sapiens
gaggagaagaggaagaggcaccaaggaagagcgaggccccaggcacagagacagagaggaccaaagacgaccaccaaagccag

SEQ ID NO: 58302 - RNA, 110 nt, Homo sapiens
ggccaagacgagcgacaggagcacacccggagaagcaggagcccaccggcaggacaagggaggcgaggacagacgggcagcggaaagagcaaccagcgggacgccacgga

SEQ ID NO: 58303 - RNA, 77 nt, Homo sapiens
gaaaggccgcaccagcagagagcccgcacggaacagagcggaaaagaccgagcaggccggaacccgcgcccagagcc

SEQ ID NO: 58304 - RNA, 82 nt, Homo sapiens
gcgacggaggcggcggacaggcgacagcgaccgcggcaggaaacacgccgcaccagggaggagagaaacgacaccccccacc

SEQ ID NO: 58305 - RNA, 50 nt, Homo sapiens
acaccgcaaggacccaaaggggaggcaggcgggcagaacaacacgccccc

SEQ ID NO: 58306 - RNA, 83 nt, Homo sapiens
cggagggcgacccccccacgacccaggaccgcgcaggaggaggacgggaaaggaaaaaagaagaagcacacccagaacaagaa

SEQ ID NO: 58307 - RNA, 67 nt, Homo sapiens
ccgcgcgacaaaaggaccagacaaacaaaagggggaggagccaggaggagagaacaagaaaagcgcg

SEQ ID NO: 58308 - RNA, 81 nt, Homo sapiens
caaaaccaccaagcccaggaggcagaagcagcaaccgggcccggaagccagaggaggcagccgccgcaaagggacgacgaa

SEQ ID NO: 58309 - RNA, 90 nt, Homo sapiens
cagaagagcggagagacgaaagaggccccaaggaggccgagccggcagcgaccgacgacagggcccgacccagcagccaccggcaacccc

SEQ ID NO: 58310 - RNA, 63 nt, Homo sapiens
gcacacgacccagagaacccaccccaaggagcgggaaagcaagcggagacccacgacggcggc

SEQ ID NO: 58311 - RNA, 74 nt, Homo sapiens
gcacgaaagccacaaaaggggagaggcccaggaggacagcgccggaggaagagcggaaaaggcggagacgaaaa

SEQ ID NO: 58312 - RNA, 71 nt, Homo sapiens
gagacgaagcgggcggcgaagggccacagccgccaaggggcaaccgcccaccaccagaccccgggacccgc

SEQ ID NO: 58313 - RNA, 69 nt, Homo sapiens
aaagacacaccagaaggcccgcacgcagcacagacaaaccagaacaaggagccagcgaaggaacagacg

SEQ ID NO: 58314 - RNA, 75 nt, Homo sapiens
agcagcagagaagaccaggaaagacaggaggccacccccaaagaaaagaaccccagaaacgaagagaagcaaaag

SEQ ID NO: 58315 - RNA, 75 nt, Homo sapiens
cgcccagacccacacccagcaagaaaagaaaagccaagaggaaagccgagggaagggaagaggcgaggccgggag

SEQ ID NO: 58316 - RNA, 75 nt, Homo sapiens
gccagaaaacggcccaaacgcgaccggaaaggagagagagacagaaccacagacaagggagcagcccaaccccca

SEQ ID NO: 58317 - RNA, 69 nt, Homo sapiens
gcaacaccaaaaacaaaacgaaccaggacggcaagcaacgaaagcaaaccgagagcaggcgaaggccgg

SEQ ID NO: 58318 - RNA, 71 nt, Homo sapiens
cgcaacaggaaagcagcccgaaaaagacgcgagaagccacacggccccagggcaccaacaacaccaaagac

SEQ ID NO: 58319 - RNA, 68 nt, Homo sapiens
caaaacccgcagccggccggcggccgcaccaaagacaaaggaaacacaagcacacggggcgaagccag

SEQ ID NO: 58320 - RNA, 81 nt, Homo sapiens
ggacaggaaaaaaagagcgccccgcccacccggaccgccccaaagacccagggaggaccgagcagccgaaccagccccccc

SEQ ID NO: 58321 - RNA, 87 nt, Homo sapiens
aagccaacagcgggccgacggcgcccacgcacagcacgagacagggcagagccaccgcggcgcaaccacaccggggcaacaggaccg

SEQ ID NO: 58322 - RNA, 35 nt, Homo sapiens
cgcaaaaaggaccgacagcaccagacacgaaagag

SEQ ID NO: 58323 - RNA, 70 nt, Homo sapiens
ggaccaagaaccaggaccagagaaaaagcaccccaggcacgggaacggaggccacgagcaagccagacca

SEQ ID NO: 58324 - RNA, 80 nt, Homo sapiens
gcaacgcccgccggggagccaagaggcaggcccgagggccccccggggccccccgggcaaggcaccagacccggaggagc

SEQ ID NO: 58325 - RNA, 74 nt, Homo sapiens
caccgcccccgcgccccgcaccgcggcaaagagaggacgcagcgagaaagagcaacagcccgaggggaaaaaag

SEQ ID NO: 58326 - RNA, 70 nt, Homo sapiens
cagcgacgcagaccaaaagcagagaggcgcgaacgaaaacaaacggaagagagggcagcaagaaagaaca

SEQ ID NO: 58327 - RNA, 38 nt, Homo sapiens
aaccgcagaaacacggccgagccccccccagcgccgaa

SEQ ID NO: 58328 - RNA, 71 nt, Homo sapiens
cgcagagcgaagcagaagacgaggacacgcagccggccgaggaccccccaggaaggaagggaggaaaagag

SEQ ID NO: 58329 - RNA, 84 nt, Homo sapiens
ggaccaggggcgagggcacccgccgccggacaacaccgcccccagccgggcggacacgagacagaaagccaaacgcagaccgag

SEQ ID NO: 58330 - RNA, 38 nt, Homo sapiens
caccagcagcccgcacagcacggcacaagaagaaggag

SEQ ID NO: 58331 - RNA, 61 nt, Homo sapiens
gcgagggacaaaaggcgaagacgccaagaccacgaaggaccggccagccgcagcgagacca

SEQ ID NO: 58332 - RNA, 78 nt, Homo sapiens
gaggagaaggcacccgcggaaccgacggccagggccggacgcggcggaggcgagcgagggcagccaggccacaggaaa

SEQ ID NO: 58333 - RNA, 79 nt, Homo sapiens
aaagcagaagacaagcaggagaaagacagggcggagaccaggcgaaggaccccaaaccagaaagcagggccgcacccca

SEQ ID NO: 58334 - RNA, 78 nt, Homo sapiens
gcgagacaaccaccgggggccaggacagagacaccacgggcagaccacggagggaggagagagaccgagcacggggaa

SEQ ID NO: 58335 - RNA, 78 nt, Homo sapiens
agcccgcggacgccaggggccagacccacgagagcacccgggcagagaaggccccgcccagagacagggcgggcacga

SEQ ID NO: 58336 - RNA, 55 nt, Homo sapiens
ggcaaggccaggacacacgcaggcggggcacagcgcagccaaaggaaaaggcaga

SEQ ID NO: 58337 - RNA, 71 nt, Homo sapiens
aggcccaagacaagaggagcagacccgggacgaggcagcacacgagcagacaggcacggagaggcaaagga

SEQ ID NO: 58338 - RNA, 55 nt, Homo sapiens
acacggccaacaccagcacgacggacaaggggacccccaaaagacaagggcaaaa

SEQ ID NO: 58339 - RNA, 67 nt, Homo sapiens
ggcccgcgcagagggaaaaagggcgagccagggagaaccgaggagcggcagagcaccaacaccacag

SEQ ID NO: 58340 - RNA, 105 nt, Homo sapiens
gaacaagagagaaagagggacagccgcacggaggcgaaacacaaagggaaaaggagcgccccacagcaaggcgggcaggagggcgcacgcccacagacggggggc

SEQ ID NO: 58341 - RNA, 69 nt, Homo sapiens
agggcagacgagcggaggacacccaacccggggacccagaggaaggagccagaagagaaaaccaccccc

SEQ ID NO: 58342 - RNA, 72 nt, Homo sapiens
caaaaaaccaccccgcacgcaagacaccaagggacgcagcggaagaaaagaaaggcgagaggagaaccagag

SEQ ID NO: 58343 - RNA, 83 nt, Homo sapiens
cagaacagaacccaaaagccgacaaccccagaaacaggcaacaagcagaaagcacagcccgaggacccacacaagaaaagccg

SEQ ID NO: 58344 - RNA, 64 nt, Homo sapiens
aaggcgcaccggaacgaacagcgacgcgcagagaacaacgaagagaggaaagaagcggaaagga

SEQ ID NO: 58345 - RNA, 67 nt, Homo sapiens
agagcgcgaaacgcacgagaaggagcaaaagaagagcagagcacaggaagacccaggaagaagcaca

SEQ ID NO: 58346 - RNA, 79 nt, Homo sapiens
aagcggccgagcaggcgagcgaacgacgaggcaaggggcgaggccccaggcgagggggagcgcagcacggcaggccggc

SEQ ID NO: 58347 - RNA, 82 nt, Homo sapiens
ccgcacgcggcgaaggaagaggagggcaagaagggcaagaagagggcccagaggagacaggggaaccaggaggaggacagcc

SEQ ID NO: 58348 - RNA, 58 nt, Homo sapiens
gcggcccggccccccggacagacgccgacgcccaggcagccggcaccccgccaaccgg

SEQ ID NO: 58349 - RNA, 78 nt, Homo sapiens
cccacgaaccaaaagggacggacaaaggaacaggaccagaccgagaacaggaagaacggaagaagcagaagggaacga

SEQ ID NO: 58350 - RNA, 58 nt, Homo sapiens
cgccgaccccccggcgccgcgccggcggcgagggcaccaacaaagcgccagccagcgg

SEQ ID NO: 58351 - RNA, 91 nt, Homo sapiens
cagaggaacgcaggcccgcacccaacgcaagccggcaccggacacccccaaaagagggaacaggcacgccccacccgccagccgagccccc

SEQ ID NO: 58352 - RNA, 77 nt, Homo sapiens
ggcgcagaccgagacccggacagggcaggaaacagggcacacacgaaacgggcaaccggggccagggccagcaccag

SEQ ID NO: 58353 - RNA, 38 nt, Homo sapiens
gaggcaccaaggaccccaagacagcccgcggcgggcaa

SEQ ID NO: 58354 - RNA, 64 nt, Homo sapiens
aaacaccaggaaggaacagacagaggacaggaggaaaaccaggccgcccacgacgaagcgcaag

SEQ ID NO: 58355 - RNA, 58 nt, Homo sapiens
cgggaagggacaggcccgagccgacacaaaaagacacggccaaacgaccaagaaagcg

SEQ ID NO: 58356 - RNA, 48 nt, Homo sapiens
ggacagaccccaccaggcaggaaaagaaggagacgccgagagcagaaa

SEQ ID NO: 58357 - RNA, 58 nt, Homo sapiens
ggacgggcggaggcggggggaccggcgggcgggccacccgggccaaaacggggcagcg

SEQ ID NO: 58358 - RNA, 80 nt, Homo sapiens
agaaggggcaaccccccaaccaaaaccagaagcagggccgcccgcagccggaggaagcacgaaagcaaagccagccagac

SEQ ID NO: 58359 - RNA, 73 nt, Homo sapiens
gccaaggggaaggaacagaaggaccacaggggccgcaagccagacaaaggggcccggaggccgaaccgaggga

SEQ ID NO: 58360 - RNA, 72 nt, Homo sapiens
agggccgccccgcgcgggccaggagggaagggccagaacgagaaagggacacacaggaagacgaacacggaa

SEQ ID NO: 58361 - RNA, 83 nt, Homo sapiens
cccggacccgcggcgcagacgcacccgcagcccccaggccgcccagcagccgcgccagccagaggacgagcaacaaagaacga

SEQ ID NO: 58362 - RNA, 59 nt, Homo sapiens
aagcccacgaggcaacacgcaaggccgccaccagaagcacgccaaccggaacacaagcc

SEQ ID NO: 58363 - RNA, 35 nt, Homo sapiens
gggggagacgccgccaagcggcggagaaaccacca

SEQ ID NO: 58364 - RNA, 79 nt, Homo sapiens
ccccagccgacgcccgcgccccccagcaaggaaaggccgagggggacggcaagagcacacaccccggaccacggcccgg

SEQ ID NO: 58365 - RNA, 72 nt, Homo sapiens
agaaacagcagaaacgcaccaggccaaagaaagagaagccgaaaaggaaaaggagccagggcggaccccgcg

SEQ ID NO: 58366 - RNA, 90 nt, Homo sapiens
aacagagaaacaacaggccgagcaaggagagaacgcgagggaagaagagagaagaagcaaaccgggaccggaagcaccaaggagaaaaag

SEQ ID NO: 58367 - RNA, 72 nt, Homo sapiens
caggcaaacacagaggggggacccacggaagaggcgggcccgagaggcagccacccgccaaaccaggccggc

SEQ ID NO: 58368 - RNA, 80 nt, Homo sapiens
gcgggcccagggcaggccggccaggcaggcacgagaaggggaggagccgccagggaaaccaaaccccccaaaggcccagg

SEQ ID NO: 58369 - RNA, 77 nt, Homo sapiens
cgcccaacacaaagcagggaggcagcgccgacaacaccgacacagaccaacaaacacccaggacccccggggccaac

SEQ ID NO: 58370 - RNA, 69 nt, Homo sapiens
aaacccagagccagaggaaggaccagaaggaaagagccaccggacgagacaaccgcccagaagcccaaa

SEQ ID NO: 58371 - RNA, 80 nt, Homo sapiens
agccagggaggaaggcgcaggagcccggccaccacacccagcggcgcagacccaggggagcccaccagccagcaacaggc

SEQ ID NO: 58372 - RNA, 69 nt, Homo sapiens
accacgggcggccccagaaggagggcggggggaaagccgccacagacaggccgagggacaaagaaccag

SEQ ID NO: 58373 - RNA, 74 nt, Homo sapiens
ggggaccgcggccaccagccgaccggccccagcagaggaacgggggaccccaagcggacaccagaacgcagcga

SEQ ID NO: 58374 - RNA, 80 nt, Homo sapiens
acacccccaccggcacagccgaggggccccgagagaacagggcaaagccaaggaagacgggacagacagagaagcacggg

SEQ ID NO: 58375 - RNA, 79 nt, Homo sapiens
ggcagcgggcgccgacaggcgcgcggggagccgcggggcggagcgggagccaggacaaaaccaggcagaaccaacacga

SEQ ID NO: 58376 - RNA, 76 nt, Homo sapiens
aggaaccggacagcacaccagggccgggacacacgagggggcagaagaaaaagcaggacaacagggcaaggagcgg

SEQ ID NO: 58377 - RNA, 73 nt, Homo sapiens
ccgacagcgggcgccgcccgggaacaccccggaccaacaggcgggcccaccgggcaccaacgcccgcggaaca

SEQ ID NO: 58378 - RNA, 59 nt, Homo sapiens
gggcgccaaagcgagagagggaagcgcccggccgcacaccggaaaaagacgagaaggaa

SEQ ID NO: 58379 - RNA, 71 nt, Homo sapiens
gaccacagcaaaaaaaagaaacaaagacagcacagaaaacagaggcccgaccggcgaaagcccagggcccc

SEQ ID NO: 58380 - RNA, 120 nt, Homo sapiens
gaaggcgcccaagcagcagcgccggagcccgagggacggggacggagagaacacgagcccacagaaaccaccacagggcgggcccaagaccccaaagaacccaagggccggacagcccaa

SEQ ID NO: 58381 - RNA, 79 nt, Homo sapiens
ccccacgcacacccgagcccgggggcgcacggacaaaacccgcaccgcacccccacccagcggagaagcggaggagacc

SEQ ID NO: 58382 - RNA, 71 nt, Homo sapiens
ccaggccagaagcggccagagccccggacaaagaggaacacgacaggcgaacagcagggagaaagacaggc

SEQ ID NO: 58383 - RNA, 76 nt, Homo sapiens
ggggagacgccggacaaccgccccgagggaagggaggcggcggccccaaaagagaagcaagaacacagagaagaga

SEQ ID NO: 58384 - RNA, 74 nt, Homo sapiens
gaccgcagcgaccaacaaggccgcaggcagaccgacgccaccagcaaccgcaacagcagaggaaaccgaccccc

SEQ ID NO: 58385 - RNA, 80 nt, Homo sapiens
agaagcagagacaccaggacagaaaagacaggcgccaggagcacagaagagcgaggagaccccaacaggaaccccccggc

SEQ ID NO: 58386 - RNA, 82 nt, Homo sapiens
caccagccaggaagggggaggaagaaaacagaacgggaaaggcgagacaaaagagaacacgcgaaagacaagcaggagggcg

SEQ ID NO: 58387 - RNA, 82 nt, Homo sapiens
cggcgcacgaggggaagggcaggaggaggaggaggggcccggcggcggggaggccaggccccgacccaccgggggacgacag

SEQ ID NO: 58388 - RNA, 73 nt, Homo sapiens
agccaaagaaagagaggaagaaagaacagaacagcgaaacaagaggggcgcagaagggaccgaggagagagaa

SEQ ID NO: 58389 - RNA, 55 nt, Homo sapiens
cgcaggggcacaacgaggagaggacaaaagagagaacccccccaaccacccagca

SEQ ID NO: 58390 - RNA, 56 nt, Homo sapiens
gcaccaacaaaaaccaggcgagccacacggggaaggagcccagaccggaggacccc

SEQ ID NO: 58391 - RNA, 81 nt, Homo sapiens
cgaacggaggcgagggagccccgcggacgaggaaagccggccaggacaaggcgggaagaaagaaaaacagggcagaaccac

SEQ ID NO: 58392 - RNA, 70 nt, Homo sapiens
agcaccgcgccggcccagcaccccgagaaccgcaggagccagagggcgacgccaggagcacaccgaaaag

SEQ ID NO: 58393 - RNA, 57 nt, Homo sapiens
ccagccgaaaagccccgcccgcccggaagaaggggggcagaaagaagaggaggacaa

SEQ ID NO: 58394 - RNA, 77 nt, Homo sapiens
ggaaaaagccagaagaaaccggacaaaacagggcgacgcaacagcacgaggccccgacaggcggcgcacggaaacag

SEQ ID NO: 58395 - RNA, 81 nt, Homo sapiens
aggaccagcgcagaagcacagcacacggagaaccacggggaccaagaagcgagcagcccaaacggacccgggaacaagagc

SEQ ID NO: 58396 - RNA, 77 nt, Homo sapiens
ggcggggacccagcccggagcccagccagagggggccgacacacggcgcacaagagggccagggaccaggggacgcc

SEQ ID NO: 58397 - RNA, 81 nt, Homo sapiens
gcgggaaggagccggaggcggcgaggagcgccgccgaggagagcagcgcgaccaaacaggggccacccggcggaaacgcgg

SEQ ID NO: 58398 - RNA, 77 nt, Homo sapiens
cagcgcccgggaaggcgccggggccagcgcagccgcggcggagacgcacaggcccggcagaggggaggagacacgaa

SEQ ID NO: 58399 - RNA, 77 nt, Homo sapiens
ccgcagccccgcgcgggcaccagggaccggagggccggaagcgggccgggacaacgggcaggagccggaagggcgac

SEQ ID NO: 58400 - RNA, 62 nt, Homo sapiens
cgcggccccggcagcacccaagcaagggaaaaggaaaccagaagagggacgaagaaaacagc

SEQ ID NO: 58401 - RNA, 72 nt, Homo sapiens
aaagccaaggacgcgagagacaaacgaaagaccacacggaggaggcgaggccaggggccaaaacaacgccgg

SEQ ID NO: 58402 - RNA, 60 nt, Homo sapiens
cgccgagggcggaggagcgcccggggccggagcagcagagccccaggcagacgacgccgc

SEQ ID NO: 58403 - RNA, 69 nt, Homo sapiens
cccgcagccgcagaggaggagcgcagcccggcccgaaaagggacacagacgccaggcagccggggcaga

SEQ ID NO: 58404 - RNA, 78 nt, Homo sapiens
ggccggcccgaggaaggcaagacccggagaaaagagccggaagcaaaccccaggaccaaagcaaacacggacgaccag

SEQ ID NO: 58405 - RNA, 86 nt, Homo sapiens
cggcgcgcggcgcgccgcccggcgagcgggccggaggaaaagaaaggacagcccaaggcggaaaagcgaaggaagccacaagcaca

SEQ ID NO: 58406 - RNA, 76 nt, Homo sapiens
gaagaccggcagaccggcggccgccgcgccacaggagccgggggggcgcagccggcggaaggccccaaaggcgagc

SEQ ID NO: 58407 - RNA, 77 nt, Homo sapiens
gcgggggcggcggggcaagcggcgccaccaccagcaccaggcacccaagacaggccagaccgaagcagaagcacgca

SEQ ID NO: 58408 - RNA, 73 nt, Homo sapiens
gcgccgggggccccgaacgacggggccgccccgcacaagcggagcacgagggaggccaacagacccaacccag

SEQ ID NO: 58409 - RNA, 38 nt, Homo sapiens
cagggagggccccgagaacccgaagaaagacgagaagg

SEQ ID NO: 58410 - RNA, 77 nt, Homo sapiens
agccaaaaccagaccaagaggaaagcaaacacacggcaagaggaaccaagccaaaccccaagagaaagacagaagaa

SEQ ID NO: 58411 - RNA, 77 nt, Homo sapiens
gcacccgccgggcaacgaagagaccccacccaaaaaaggcgcagaaacagaggacaagggcccgagggcaggacagc

SEQ ID NO: 58412 - RNA, 69 nt, Homo sapiens
agaaggcgccgcggagaccccgcggcccggcagggggaacgggagggggaacgcaacccaggagccccg

SEQ ID NO: 58413 - RNA, 76 nt, Homo sapiens
agccccgagagcgggaacagaccaagccagggcagcggcggacaaagggcacaaccgcccaggggagagggccggc

SEQ ID NO: 58414 - RNA, 77 nt, Homo sapiens
ccaggcggaagcagaggagcaggagcaacccaaaaccgagcgaaacacccaaggaacaaacacaaaccggggaggag

SEQ ID NO: 58415 - RNA, 70 nt, Homo sapiens
gggggacggccagcgaaagacacccagcaaccagaagaacaacaggcgcacaaggcacgcagaaggagca

SEQ ID NO: 58416 - RNA, 38 nt, Homo sapiens
gagggggacagaccaaagaggaaaacgaaggaaggagg

SEQ ID NO: 58417 - RNA, 55 nt, Homo sapiens
ccgaacccaaacgagcacaccgaaccaggcgaccacggcccaccaacaaaccaaa

SEQ ID NO: 58418 - RNA, 78 nt, Homo sapiens
ccacaccacccggaagagaaggcaggggacgagggcaagagcagagacagagaagagcaaagcccacggaaaaccaga

SEQ ID NO: 58419 - RNA, 75 nt, Homo sapiens
gccgcaaaccagacagaggaaaagggcccaaaggaaaggcagacacaagacgagcacccccgagaaaagaaagag

SEQ ID NO: 58420 - RNA, 66 nt, Homo sapiens
caaacgggaacggaagcaggccacccacacgcgcgcaaacagcaccaggccaaccagaacccaggg

SEQ ID NO: 58421 - RNA, 96 nt, Homo sapiens
cacacggaggacacccgagacgaaagcaacccaggccgggcgggggaggcgagacacgggaggcacacacaacgccaacgggagcggagcgcacca

SEQ ID NO: 58422 - RNA, 83 nt, Homo sapiens
cgcgaggagccgccgcgcgcccgcgcccccgcgcgacgccagacaagcagaccggaagaccgacggaagaccacaccccgagg

SEQ ID NO: 58423 - RNA, 71 nt, Homo sapiens
cccggcagggggcgaggagggcgggcgcagcgggccgcaggagcgcgcggaggggcaaacacgaaaagaga

SEQ ID NO: 58424 - RNA, 86 nt, Homo sapiens
cgccccggccgccgcgcccggacacacaggcagcaaagaccagaaccgcccggaagcagaggagaacacagacaccggagaaacaa

SEQ ID NO: 58425 - RNA, 80 nt, Homo sapiens
cagaggagggcccgggagaccaacaccgggccgaaccagaggggcagagaaaacgccagaaggacagagcaccaaagcgc

SEQ ID NO: 58426 - RNA, 75 nt, Homo sapiens
ggaaaccaagacagcccaaacgccccacgaccagaccgcaaaacgggacaagcccgcacgcgcagagacaagccc

SEQ ID NO: 58427 - RNA, 73 nt, Homo sapiens
agcggagcaagggaccacaaaaaggccggccagcccagacacaagacagacccggaccacacgaagacagagg

SEQ ID NO: 58428 - RNA, 55 nt, Homo sapiens
gagcggagaaaaggaaccggccccggacagagcagcagcaaccgggaagcagggg

SEQ ID NO: 58429 - RNA, 57 nt, Homo sapiens
acagccaggaccaggcacccgggaagaggaaaggaccacccacccaccgcgcgggca

SEQ ID NO: 58430 - RNA, 83 nt, Homo sapiens
gggaggaaggacccggggaggccggccacgccccgcacggggcccgggcagagggaaagcagaggacggaacaacccggggga

SEQ ID NO: 58431 - RNA, 75 nt, Homo sapiens
gaccgggaagggcaccacaccgggcgggccacgcacgaccccacagagagggagcaaaacaagacggaaggggaa

SEQ ID NO: 58432 - RNA, 76 nt, Homo sapiens
gcgacaggcccaaggggcccccgggcaccccggaccgcgcagccaccgcggcccccgcggaagagagaagaagcaa

SEQ ID NO: 58433 - RNA, 71 nt, Homo sapiens
gagcgagggggggcgcgccggaaaccggagcgcgcagcaggaccagcgggcgccgacggcgcaaacgcagc

SEQ ID NO: 58434 - RNA, 72 nt, Homo sapiens
ggaggagcgcagcagcccaccgcgcaggccacgaaaccccggaacggcaagcggacgggcgcaaaccagggc

SEQ ID NO: 58435 - RNA, 74 nt, Homo sapiens
agcaggcgccaaccaaggaacaagccaagagagacaaagcagaggaagagaagaaaaagcccacaaccagagga

SEQ ID NO: 58436 - RNA, 93 nt, Homo sapiens
agcacaccggcggagacgggcggccggccgacccccgcgcgacggcgacgcgggaggccaggccagaaaggaggcccacagccgaccgagcgg

SEQ ID NO: 58437 - RNA, 78 nt, Homo sapiens
gcgaggccgagcaacaccgcgagccgcgcggcgcggggccccgcggcggaggaacagggaagagccaggccggcgggg

SEQ ID NO: 58438 - RNA, 75 nt, Homo sapiens
gagcacagcaaaacacggaagagacgcccccacaacaaagagaaagaggacaggcagcgccaaagccaggacaag

SEQ ID NO: 58439 - RNA, 83 nt, Homo sapiens
cacaaggcacaaaaccacagaaacaaagaccagaccaaggagggacccaacagggacagaagaggagggagaacgacggacca

SEQ ID NO: 58440 - RNA, 83 nt, Homo sapiens
aaagggccgaaagcagaagaaaagggacgcaagaaacccaggacgagaacagcaacaggccggacaaagggaacagcgaagcc

SEQ ID NO: 58441 - RNA, 81 nt, Homo sapiens
aggccccgcggagggcagaacagaaccaggcccggccgccgaccacacggaggggcggacccagccgagcgggcggagaag

SEQ ID NO: 58442 - RNA, 84 nt, Homo sapiens
cggcggacgccggcacagaaccccggcccaggccccgagcggagggaggaaaaccccgcagcacagcccccggaggcagggagc

SEQ ID NO: 58443 - RNA, 72 nt, Homo sapiens
cgcccgcggcgccccggggggcggcgcccacccgggaggacagagcagcaaggcgaaccggcgcggagcggc

SEQ ID NO: 58444 - RNA, 105 nt, Homo sapiens
cgcggacagagagcggacgggccaacccaaaaccagggcggcaaaacgagcgggccaggaagaaggaccggggagacaggaacacgggcaagacagcgcgggcac

SEQ ID NO: 58445 - RNA, 78 nt, Homo sapiens
cccgcgccgccgaccccccggcgccgcgccggcggcggacccaaggccagccagccccaggcaccagcggacaggaca

SEQ ID NO: 58446 - RNA, 77 nt, Homo sapiens
caaacggcagagcaggccgcggcgacccagcgagggaagaaaacgccagagaagcagagcagcccggagcgagggga

SEQ ID NO: 58447 - RNA, 81 nt, Homo sapiens
gcgcgcccgaccgcgcggagaccggaccgcgccacaaggagagaaaaagggcacgcccaacaggacagccccccagcgggc

SEQ ID NO: 58448 - RNA, 75 nt, Homo sapiens
gggacccacggccagagcccggagcaggaaaaacacagagacagacggcggcagacagcgcccaaaagaccagcg

SEQ ID NO: 58449 - RNA, 75 nt, Homo sapiens
gagacccaagcccccacagacaaccagcccacgccaccaacagcaacccccccccggagcacggccgaccaaccc

SEQ ID NO: 58450 - RNA, 86 nt, Homo sapiens
cgcggcacggccaacggggccgcccgacgacggacgcacagccaggccaaaagaggagcccagcccgcaccaaaccagccacgggg

SEQ ID NO: 58451 - RNA, 76 nt, Homo sapiens
caggaggccccgaggcgggagcccaggaaaggaggacagcccacggacagcaacagagaacaagagagcaccaacc

SEQ ID NO: 58452 - RNA, 79 nt, Homo sapiens
cgccacaaggccagcaaaagagaagcagaagggagggcggaggagcaagggaacaagagacaaggcagagcagccgacc

SEQ ID NO: 58453 - RNA, 74 nt, Homo sapiens
ccgagggccagaaaggaagaacccgcagaaggccccacacaaaacgcaacgcccggagacgcgccgcccccggg

SEQ ID NO: 58454 - RNA, 56 nt, Homo sapiens
ccccagaggcgggaacaggaccccagaggcggcaagcgcacggaggacacggcaag

SEQ ID NO: 58455 - RNA, 80 nt, Homo sapiens
ggaggaagccaggaggcggcagcgaagaggagagcagagcaagcaacgaagaaacacagaggaggccagagggaagcaaa

SEQ ID NO: 58456 - RNA, 117 nt, Homo sapiens
gaggaggggggccggccagccacccaaggccccggacgccggagaggcaccggaccgacaacccaccccaacaagacaccaccgcccacacgaggacgcaccaggccagggacgaga

SEQ ID NO: 58457 - RNA, 36 nt, Homo sapiens
ccagagaaccgacgggaagaagacaagagcagacga

SEQ ID NO: 58458 - RNA, 77 nt, Homo sapiens
cgcaaccacccaacaaggccggggggggcacagagccccggaagacagcccccagcgaccagacccagggccagagc

SEQ ID NO: 58459 - RNA, 76 nt, Homo sapiens
acaggaccgggagggcgagagaaaggagagcgggagaagaggagaacagccagggcaccaagggcagggagaccca

SEQ ID NO: 58460 - RNA, 72 nt, Homo sapiens
cagacgcccagcggagcaacgaggcgccacaacacaaaggagggaagaacaagagacagagaaaacaaaacc

SEQ ID NO: 58461 - RNA, 82 nt, Homo sapiens
cggacaccccggacgaaccacaggaagcgcggggcggcggcgaaaggacggacggcggacgaacccaaccccagagacagac

SEQ ID NO: 58462 - RNA, 72 nt, Homo sapiens
ggggcccaagaagacacacaacccaggacacaagaaaccccacacggaagaacgaaggccacagagcgaaaa

SEQ ID NO: 58463 - RNA, 88 nt, Homo sapiens
ggaggcgagacgacagcccaaacaggagcggagcagccaaagagggaccaagaaaggcccagggaccaaagcccggacaaggcccgag

SEQ ID NO: 58464 - RNA, 89 nt, Homo sapiens
ccgcggagccggacgcggggggcgggaagagccggggccgggcgacaggagcaggagcggcagaccgaagcaggcaggcaagcgaagaa

SEQ ID NO: 58465 - RNA, 83 nt, Homo sapiens
agggggccgggcagccgcggacccgccaagaagcgcccacgcagcagccggcgcacaagagcagggaccccaggcgcggccag

SEQ ID NO: 58466 - RNA, 69 nt, Homo sapiens
caggcgagagggggccccgagcaaaaagaaccagcagcggggaggcgagcccaccacagcggagaagag

SEQ ID NO: 58467 - RNA, 80 nt, Homo sapiens
cggagaggggcggcgccgcgcggccgagagccgaggaaggcaccaggagaggaggaggggagacgcccaggcagaaagcc

SEQ ID NO: 58468 - RNA, 82 nt, Homo sapiens
aaagaccccaggcgggccagccggaccgaggggcccacccgagggccaagaacacaggacggggccgccacccccccgcccc

SEQ ID NO: 58469 - RNA, 68 nt, Homo sapiens
agaggaacccccgaagggaccagaacggagggggaagaggaagaagcaaagaggcagggcaccgcgcg

SEQ ID NO: 58470 - RNA, 58 nt, Homo sapiens
aacggacccacagaaggacgggcacagcagcccccggagagcggagagaaaagacacc

SEQ ID NO: 58471 - RNA, 75 nt, Homo sapiens
aacaaagcccgccaacggaggacccaagcagggcacaggaacagggcacggagcgagcagaggaggaggaaaccc

SEQ ID NO: 58472 - RNA, 79 nt, Homo sapiens
ggagacgaaagagagggacgcagacggagagaccaagaaaaggaaccccgacaccggggacagcccagaccaaacccca

SEQ ID NO: 58473 - RNA, 79 nt, Homo sapiens
cccggccggggccgaaccgaccagaccaggcgcgcacaccaccgggacgcagacccacgagcaaaagccaggagacgag

SEQ ID NO: 58474 - RNA, 71 nt, Homo sapiens
gagaacacccggaccggacacgccgagcgcacgacgacggagagaggaagaagacggggcggcaccacgcg

SEQ ID NO: 58475 - RNA, 68 nt, Homo sapiens
gcgagaagcacgcacgccaggcacgcggcagggaggaggcaaccggagagcgacccgccggggaaaac

SEQ ID NO: 58476 - RNA, 70 nt, Homo sapiens
acagggggacaggcaaccaccaccagcaacccagaaaaccggcaagccccagaggcagcacaggaaaccc

SEQ ID NO: 58477 - RNA, 80 nt, Homo sapiens
gcggcgcaacgccgccgcgccgagggaccgccgggcggcggaaagcaggaccgacagcacgaggaggagagaagaaaagc

SEQ ID NO: 58478 - RNA, 76 nt, Homo sapiens
aagagccggcggggaagagggggaccagaaaggcggaggccccagggacacaaaccagaaacgcaagaccggcaag

SEQ ID NO: 58479 - RNA, 79 nt, Homo sapiens
cgccaccaggagccccgccaggaggcaagagccccggaccgacccacaggaaacccggacgcgaacccaccaccgccca

SEQ ID NO: 58480 - RNA, 81 nt, Homo sapiens
agagaaccggaacacagccggcccaggcgagagagggcccaaaggccagaacccgagaagcaccaccaacaagagcgacag

SEQ ID NO: 58481 - RNA, 80 nt, Homo sapiens
agccaaggaaaaacggagagccacaaaaaaggaagcgaaaaagagaagcagaggcggaagaacggaaaagcagaagcggg

SEQ ID NO: 58482 - RNA, 69 nt, Homo sapiens
cagacgcgagaacaggcccgaaaggcaaaaagggaccaaaccacagcaaaaacaccaggaaagacaacg

SEQ ID NO: 58483 - RNA, 70 nt, Homo sapiens
gaaggagccaagagaccaaccaaggaaacccccacccagcggagaaggagggccaccacgggccggacga

SEQ ID NO: 58484 - RNA, 106 nt, Homo sapiens
caacggggacacagggagaccaggacagaccaagagaaaaggacccggagcagggcaggacggcacagacacgacaccagagaccgcaagaaaagcaggaaacagg

SEQ ID NO: 58485 - RNA, 47 nt, Homo sapiens
agaagacgaagagaccgaaggcgccccgggccgggggggcccggcag

SEQ ID NO: 58486 - RNA, 76 nt, Homo sapiens
cgccagagggcggcagcggcaccacggggacgcaaagggcagacacaaggaacagccagccaggagaaaaacgaac

SEQ ID NO: 58487 - RNA, 78 nt, Homo sapiens
aggcacgcaagaagagagcagccaagcagggagaagaggagagagcagccaggccccggccgagcccgcccggccagc

SEQ ID NO: 58488 - RNA, 58 nt, Homo sapiens
gaggagccacaggaaccgcaaaggagcccagagccgagagcgccggaggaccacaccc

SEQ ID NO: 58489 - RNA, 80 nt, Homo sapiens
agggggaaccgaccccaaagaccagagaaggacggcggcagcaaccgcgagaaagggcagacaagccggcagccggacgg

SEQ ID NO: 58490 - RNA, 83 nt, Homo sapiens
cccggccaaggcccgcggaacagcggaggacgaagagcgggacccgagcccgagccaccacaaaaggaggagaacagaaaaga

SEQ ID NO: 58491 - RNA, 74 nt, Homo sapiens
cgacccggcgggggaggagacaaggaaacagcagaagaaagaagcgacaaaacagccccagcagaaacaccaaa

SEQ ID NO: 58492 - RNA, 80 nt, Homo sapiens
cccgagagcgggaacagggcccagcagaacccaccaggagacaaccaaaaaggacacgggaaaagggaagaaaaagagaa

SEQ ID NO: 58493 - RNA, 64 nt, Homo sapiens
cgaaccaggaccaggccccaagcccgaggcccagaggaggagggcgcaaggaagcaaaaaaggc

SEQ ID NO: 58494 - RNA, 65 nt, Homo sapiens
aaccaaagcgcccgcgcacagccccgggccgccgggagccaaggcgagcgcaacagcagggacaa

SEQ ID NO: 58495 - RNA, 84 nt, Homo sapiens
gggaagaagcgagagcgagcagcaccacaccaagcaaagaagaaacaccccgccgccagggacaagccagccgcccacagccgg

SEQ ID NO: 58496 - RNA, 76 nt, Homo sapiens
cgacacagcaagacccggccccccgggcccccagcagcacggacaacggggcagggcggggcaggaaccgaaaacc

SEQ ID NO: 58497 - RNA, 78 nt, Homo sapiens
aaagaaaacaaggagggaagcagaggagacggaggcgccaaaaccacagggggggagacagcgacaaccaggacccaa

SEQ ID NO: 58498 - RNA, 94 nt, Homo sapiens
ggccccggccccagacgaggaccaggccgggaggaggacaacacccaaccagacaccagccccaaacggcaagacaccaccaaaggaagaaaga

SEQ ID NO: 58499 - RNA, 76 nt, Homo sapiens
accgacgcggaaaaaaagacccaggaggagcaacacgggaccgaggaggccaacacgccaccacccggggccagga

SEQ ID NO: 58500 - RNA, 66 nt, Homo sapiens
gaacgacggaccgagaggagagccgaaggacaaaggaacaaaggagaacagggaaacgagcaggaa

SEQ ID NO: 58501 - RNA, 77 nt, Homo sapiens
caaacagcccagccgcgccagcgcccggcgccgcgcgccacccccgagggggaccacgaagaaggcggcagaaaggg

SEQ ID NO: 58502 - RNA, 61 nt, Homo sapiens
ggccgggcgccaccccaaaccaggaaagacagacaggagaacccagcgacgacagaagcag

SEQ ID NO: 58503 - RNA, 102 nt, Homo sapiens
gaacagcggaggagaagacaagacaacaggaccaggaaccagggaagagggaagaacacagaagggcaagaaaaagacaaagaggaccgacaaaacgaaaag

SEQ ID NO: 58504 - RNA, 36 nt, Homo sapiens
acgcgcgccaggcgcaagagaagcagcgcacgaaca

SEQ ID NO: 58505 - RNA, 81 nt, Homo sapiens
gagagccgaaggagcagcccaggaccgagaccggagcagccggggcggagcggggaagaggccacggcgcaaccggaaagc

SEQ ID NO: 58506 - RNA, 64 nt, Homo sapiens
gccgcccggggcgaggcagggccagcagcaggcgggaggagcgaagacaaaacgccggccagac

SEQ ID NO: 58507 - RNA, 73 nt, Homo sapiens
aaacccacaagcccacaagaaagaagaacgagacagacacagaagaaggaaccagcaaagcgccacgaagcac

SEQ ID NO: 58508 - RNA, 76 nt, Homo sapiens
gaaaaggaaaacgcaagcagccgaagaaacaggggagacgagcagcaggaaaggaacacccgaaacccgaccaggg

SEQ ID NO: 58509 - RNA, 66 nt, Homo sapiens
ggcggagcacccaccacggagggaaagaccaggcaggacaaacgggaagagaacaccgggggggcg

SEQ ID NO: 58510 - RNA, 127 nt, Homo sapiens
cgcagacacgagggaggcaagagcggcccaccaaggaaaggggacagcaacagccggcgggcggaagcaaacaaggacagacaagccagagcgggggccagagggaggccagccagaacaccagcac

SEQ ID NO: 58511 - RNA, 64 nt, Homo sapiens
cgggcacagcaggcacggaggaccagaaggcaccacaacaccgggcccagcgacccaccggccc

SEQ ID NO: 58512 - RNA, 76 nt, Homo sapiens
gccacggcgccccgcaaggagccgggggggcgagcccgccgagagcgccaaggaggagacaacgggggaagaagaa

SEQ ID NO: 58513 - RNA, 80 nt, Homo sapiens
gcccccgccagccacggagccaaggcggcagcgcgcgagggaccggccaggcaaggagagcgaaaggaaaacaaggcacc

SEQ ID NO: 58514 - RNA, 68 nt, Homo sapiens
caggaaaacacgaaaaaaaagggaaggaaaccccacacagacccaccaccacccggcccaaggggccg

SEQ ID NO: 58515 - RNA, 75 nt, Homo sapiens
gagggggcgcggggaacgggagcggagagaccggccaacgccccaccggcgccacgcggggcacagccacacagg

SEQ ID NO: 58516 - RNA, 56 nt, Homo sapiens
gcagggcggaaggacaacagcccgacaaccagaacaccaggaagcaaggcggcagc

SEQ ID NO: 58517 - RNA, 78 nt, Homo sapiens
ccggccccggagcacaaaaccaccacagggcgggcccaagaccccaaagaacccaagggccggacagcccaaccgaga

SEQ ID NO: 58518 - RNA, 74 nt, Homo sapiens
gcccgcgcccgccccaacccagccacaggaaggaagacccacaagagaccacgcagagacagcacccaaccggc

SEQ ID NO: 58519 - RNA, 62 nt, Homo sapiens
cgcagccggacgacacgaccgccgcccgcgggaaaaagacaagggcagagcagccggggaaa

SEQ ID NO: 58520 - RNA, 89 nt, Homo sapiens
acacgcccccgggcaggacccggacccggaagagaagagggggcaagaaagccccaaaagcacgcacgaaaccggcaagccagcggagg

SEQ ID NO: 58521 - RNA, 71 nt, Homo sapiens
gcccaggagaagggagaagcgacagccacaggcgggcgcggggcgcgggggcccaggccggaggaaccacc

SEQ ID NO: 58522 - RNA, 74 nt, Homo sapiens
aagcgaacaaaaagcagcaaaccggaccaccccgaagaaagcacaggcaggagacagagagaaagcaacagcag

SEQ ID NO: 58523 - RNA, 74 nt, Homo sapiens
aagagggagacagggcgaaccacagacagagcccgcaaaaaacgccccgggcaaggggagcagacaacaaaacg

SEQ ID NO: 58524 - RNA, 74 nt, Homo sapiens
ccacgcggggggacgcccacccgggccacgaagagacccaagaaagagagccaggagaagaccccggcccccca

SEQ ID NO: 58525 - RNA, 66 nt, Homo sapiens
acaggaacggagagaccaagagcccagcgcaaaacagacacagagagcaaagaaagaacacaggga

SEQ ID NO: 58526 - RNA, 61 nt, Homo sapiens
cacagacacccgggaacccacccaccagcgggcccaggcagccggcacccgcacaacccag

SEQ ID NO: 58527 - RNA, 68 nt, Homo sapiens
ccaaaaaggcacgagggaacgggaaagaacagagaaggaagggaccacagaccagcacgccggcgcca

SEQ ID NO: 58528 - RNA, 68 nt, Homo sapiens
cacgcaaggcgagacgacacggaaccagagggggacgggccgaaggaggaacccccaccaaaaggaca

SEQ ID NO: 58529 - RNA, 68 nt, Homo sapiens
ggccgggggcgcgggcggcggcgccggcaggaaggggaggaacgcaagcggggagaacagaaaccaga

SEQ ID NO: 58530 - RNA, 69 nt, Homo sapiens
gaacacccaaccggagaaagacacggacgcaggaaagcccgagcagaaaggcaagagaacccccaaaag

SEQ ID NO: 58531 - RNA, 42 nt, Homo sapiens
ggcccaggccgaccggcgcgcggaggggacaccagccaggag

SEQ ID NO: 58532 - RNA, 79 nt, Homo sapiens
ggcgccccggcccccgccccagcccgccggcggcggcgggaagaaggaggccgaccaggccgacaaagcagacgcccgc

SEQ ID NO: 58533 - RNA, 71 nt, Homo sapiens
aaagacacacggagacaaaccgcgccaaggcacagagcacaggaaggagcccggcagcgccgggaaacacc

SEQ ID NO: 58534 - RNA, 55 nt, Homo sapiens
accccccgcagacagcagcgcagacccggcgcaccagagggaacagaacaccgcg

SEQ ID NO: 58535 - RNA, 134 nt, Homo sapiens
gcccagagcgggagcgggaagaggaagggcacgagccgccgacggagcagcacagcagagcccgaggaacccggaaaagaccagccaaccacgcgagaaaacagaccaggccccagggcggaacccgccggccc

SEQ ID NO: 58536 - RNA, 70 nt, Homo sapiens
gagacccgaagcagcgccaggaagaggaaaaaaaggccaaggcgcgcagccggccggcaagaaccaagaa

SEQ ID NO: 58537 - RNA, 79 nt, Homo sapiens
cgcagaccgcagaaggccggagacaccagcaggcgggggagcgggaggagccagagcacaccgcaccacggccacaggc

SEQ ID NO: 58538 - RNA, 76 nt, Homo sapiens
gacggcggcgaggaccagcagcccaggggcgagaaaccccaaagggagagaagaaagcaaagaaccgcacaccgac

SEQ ID NO: 58539 - RNA, 69 nt, Homo sapiens
aggaccgaaacagaaacggaacaccaaggcagcagacgacaggacggcagagccccaagaaagcgcaac

SEQ ID NO: 58540 - RNA, 91 nt, Homo sapiens
gccgccgcccgccccgccgcccgccgccggccggcgcgcgccccacagacacccaagaacgaggccccgcagcaggcagaaagggagaagc

SEQ ID NO: 58541 - RNA, 77 nt, Homo sapiens
cgaaaacgcaaaggaaggacagacccacccaaacaccgcccagccaagggggagggcagcgccaaacagcgcaaagg

SEQ ID NO: 58542 - RNA, 73 nt, Homo sapiens
gcccacaaccacaggagaagaagaccgagcaagaccggccgggaaggcccagcggcacccgcgagaaaaagga

SEQ ID NO: 58543 - RNA, 73 nt, Homo sapiens
ccggggagacacagcacaagacaggggaagaaggagccgcagccagaaaaggccagccacaaagagcggagga

SEQ ID NO: 58544 - RNA, 61 nt, Homo sapiens
cagaaggagcaggaaccaaagggcggagaaaccagacagaccacagcccagccaaaaagag

SEQ ID NO: 58545 - RNA, 81 nt, Homo sapiens
acggcggccgcagggcgccggagccccccagagccgagagcgccggaggaccacacccggccacagccgcaggaacaagag

SEQ ID NO: 58546 - RNA, 77 nt, Homo sapiens
ccgggaaacgggcgagaccgcggcgggcgcgagcgaggcgcccagacaccccccccgcccaggggagagaagaggca

SEQ ID NO: 58547 - RNA, 73 nt, Homo sapiens
acgaaaaaaaaaccaaagcccgaacagagaaacagaaaacagccaaaaggacagggacagcaaaaaggagaaa

SEQ ID NO: 58548 - RNA, 78 nt, Homo sapiens
gacacccacgccacccggggggcgcacccccggcgcgagacaaacgggggagaggaccgcgagacgcagacggaggga

SEQ ID NO: 58549 - RNA, 87 nt, Homo sapiens
ccagggcagcagcagcagacagcagacagacagccaggcgcccagaggggccccggagccaggagaagggagcaaaccagcggagga

SEQ ID NO: 58550 - RNA, 81 nt, Homo sapiens
gggcgcaggacagccggcggcggagcggccggccacggaggagggggagagcacaaggcgaacaagcccccaggcgagagc

SEQ ID NO: 58551 - RNA, 73 nt, Homo sapiens
gggacagacggaagcacgcaaggaaaaacgaccggcccaccagacggccagaacaaaaaaaggcacaaaccca

SEQ ID NO: 58552 - RNA, 86 nt, Homo sapiens
gccgcagccaccacgccgcagaggccagacgcagaggcgcccgcccaggaggacagcgcgggagcgggagggggccccagagccgc

SEQ ID NO: 58553 - RNA, 72 nt, Homo sapiens
gcagggacgggaggggaggcaaagggaggaggaggaccggaggggcaaaacaggcagcaaggcccgacggag

SEQ ID NO: 58554 - RNA, 67 nt, Homo sapiens
acacagaaaaaaacgaacaaacgccaagcaagcaacacgaggcacacccagaagccacaggagaagc

SEQ ID NO: 58555 - RNA, 82 nt, Homo sapiens
ggaaagcaaaaggaacaaaaaaagcacggacacagcaagacacaaaaacaagcccggaaccagagaaaaagaagaaagaaac

SEQ ID NO: 58556 - RNA, 73 nt, Homo sapiens
aagggcagccccgcaacgaagcggccccagcccgaaagcaaccgggcgcaggccacagcgccaccccaagcac

SEQ ID NO: 58557 - RNA, 74 nt, Homo sapiens
ggccgcccccacacgcaaacccaggggcggggggcaaggcacgcagccgggcccgacccgcgggccgcgggcgc

SEQ ID NO: 58558 - RNA, 82 nt, Homo sapiens
aagccgcccacccaaagcagcgaccccgccaggcaaggggagccagaagggccccagcgggagcaaagccggaaaagagcaa

SEQ ID NO: 58559 - RNA, 64 nt, Homo sapiens
gaggcagaggccaaggccaaaagccaaagcggaaccaacgcaacccaaagcgaccccacacaaa

SEQ ID NO: 58560 - RNA, 38 nt, Homo sapiens
gaacaacagaaggagaaaagagagacgggacaccaggg

SEQ ID NO: 58561 - RNA, 73 nt, Homo sapiens
ggacacgcagagaccaaggcggagcaccgaaaagaggccgagagacccgcgaacgagcacaagggcaccacgc

SEQ ID NO: 58562 - RNA, 77 nt, Homo sapiens
gccagcaccagcaggcccggccccagacgagccgagaaggggggcgcccccgagagccccggagcagggagcgggca

SEQ ID NO: 58563 - RNA, 75 nt, Homo sapiens
acaaggagagaagaaccaaagaagcaaaacacgaggcagcgccccaaccccagaaccgcgcgggacggacaccgc

SEQ ID NO: 58564 - RNA, 79 nt, Homo sapiens
cgggcccggccacggcggagccaagacggcccgccacgggccccgcagccgcgcccgagcgcccgagcagggacagcga

SEQ ID NO: 58565 - RNA, 76 nt, Homo sapiens
gcagaagaacagacggcccaggaggccagaaggaaaacgcgcgcacagcagccgcgcccggcgcgcagacccgcgg

SEQ ID NO: 58566 - RNA, 78 nt, Homo sapiens
gcacagccccaccaggcccagggccggcccccccaggacaacccagaggcaacaaaggcgagcccaaggagaagacac

SEQ ID NO: 58567 - RNA, 59 nt, Homo sapiens
cgcggcgcggcagcgcgcccgagagcggacgaaagaagaaagacaagcgcaaaagggga

SEQ ID NO: 58568 - RNA, 78 nt, Homo sapiens
gcgaacccggcaccccgagggaggaccagagcccgcagggaggaagagagaagaaggagaggccgcagggagcaggac

SEQ ID NO: 58569 - RNA, 79 nt, Homo sapiens
accgggacggaccgagaccggaccgagagcggaccgagagcgcgaaacgcacgagaagggaggaacaggagcaccacga

SEQ ID NO: 58570 - RNA, 82 nt, Homo sapiens
aggagccaggagccaaggcccggggcggggcggaaacccagcgccaaggccaaggggaggagagaacagaagaggaggccgc

SEQ ID NO: 58571 - RNA, 83 nt, Homo sapiens
aggagaccccaggcaccacagcccgaggcccggagcgaccagacgggaacggagccccccgcacaggacaaccaccagccacg

SEQ ID NO: 58572 - RNA, 79 nt, Homo sapiens
accaggcacccgcaggagaggccccaacaagaaagaaggggacaaccgaaagagccaaccaacgcacacaccgaccacc

SEQ ID NO: 58573 - RNA, 75 nt, Homo sapiens
agcgacaccagggccacaccccccagcacgggacacaagaagccagagccgggaagaagcgcgcgggcgaacagg

SEQ ID NO: 58574 - RNA, 51 nt, Homo sapiens
ccagcaacaagccggccggagaaggcgacggccgaaccacaaagcaaacca

SEQ ID NO: 58575 - RNA, 70 nt, Homo sapiens
ccaccacaccgagcccaagcggaaagcacgcgcacagaggaagacgggaagccaagcaggacaaccacaa

SEQ ID NO: 58576 - RNA, 70 nt, Homo sapiens
aacaccagggagccaccaaccagacagaagacgaccggcggggcacgggaagggcagagagaacacgaca

SEQ ID NO: 58577 - RNA, 64 nt, Homo sapiens
ggaaaaggcggagcacccgagagccaccaaagcaaagcaccacaggggaaaacaagcagaaccg

SEQ ID NO: 58578 - RNA, 73 nt, Homo sapiens
aaagaccaacagaaacgaggacaaggaccgccgggcaagacccaagaacaaagggcaaaggacacaccgcaca

SEQ ID NO: 58579 - RNA, 40 nt, Homo sapiens
gaccgccaccgacgccagggagagaccacggggcaggccc

SEQ ID NO: 58580 - RNA, 67 nt, Homo sapiens
agaaaagagcaagggggaaagcaaggaagcagacggaaagcaagacaggaagaacgaaggagccgca

SEQ ID NO: 58581 - RNA, 62 nt, Homo sapiens
aacgcgagcaagaacagcaggagacgggaagagggaaagacagagagaacgaagcaagaaga

SEQ ID NO: 58582 - RNA, 72 nt, Homo sapiens
aaacgcagagggaccgagaggacaacaaaaagaagacagccccccagagagaggagaaccggaaaaggaagg

SEQ ID NO: 58583 - RNA, 77 nt, Homo sapiens
ccgcgggcggaagacaggccacccagcggggagcacggcgagcagccaggccaggagagaaaccaagaggagcagca

SEQ ID NO: 58584 - RNA, 53 nt, Homo sapiens
caacggaacgccgaaaaagaaacggaggaaaagcgggcgcagcgcgcggacag

SEQ ID NO: 58585 - RNA, 82 nt, Homo sapiens
gggggcggccgggcggagagaaccagcgaggacgagcccggccccgcacagggcagcagccagcccggacacaggggaccag

SEQ ID NO: 58586 - RNA, 59 nt, Homo sapiens
cggacccccgcggcgcgcagcccagcaggagggaccacagagcccaccacacagcaggc

SEQ ID NO: 58587 - RNA, 89 nt, Homo sapiens
cagagccagccggagagcgcagcccagagacagcagccgagggggaagacagagaagaccacacaaccgaaggggccgggcaggacggc

SEQ ID NO: 58588 - RNA, 43 nt, Homo sapiens
ccgacagccgcagaacgaaagccaggccagaagaaggaaggcc

SEQ ID NO: 58589 - RNA, 70 nt, Homo sapiens
ggacaggaagggcaggcccgaagacgcggaaaaaaccggagggaacacacggaccacaccgacgcaagaa

SEQ ID NO: 58590 - RNA, 53 nt, Homo sapiens
cggacgggaacagacaaaaggcgggcacaaaccgaagaggacaaggagagaag

SEQ ID NO: 58591 - RNA, 74 nt, Homo sapiens
aaaccccgcacgaaaggccggaaagaggggaggggcacgcaacaacccgaacacgccgcagaccagcaaagaaa

SEQ ID NO: 58592 - RNA, 56 nt, Homo sapiens
agagcggccgccgccgcgccgcccaccacaggcagaagacagccacacaggcaccc

SEQ ID NO: 58593 - RNA, 76 nt, Homo sapiens
gcggcggggcggaggaagcggagggagagcaaaaaccaaaggcagcacccagcagaagcaggggaaaacaccaggg

SEQ ID NO: 58594 - RNA, 83 nt, Homo sapiens
ggaacagacagaaggagcaggaaccaaagggacaacccccaagaaagggagcccagaacgaaacaacccagcagagacccaca

SEQ ID NO: 58595 - RNA, 71 nt, Homo sapiens
gggcggaagacaggccacccagcggggagcacggcgagcagccaggccaggagaggagacaaacggcagac

SEQ ID NO: 58596 - RNA, 68 nt, Homo sapiens
ggagacaggccccggcaccagagagggaaagggcgggggcaagacccagagaagacaaaacaacaggc

SEQ ID NO: 58597 - RNA, 72 nt, Homo sapiens
aaaggagggaagccagaggccaaaggcaggagccgcacggggaagacgaggccaacgcggcgaacacccaga

SEQ ID NO: 58598 - RNA, 52 nt, Homo sapiens
cgccgcaccgccgaaagcacaccacgagcgacccgggaccgacggacgaggc

SEQ ID NO: 58599 - RNA, 74 nt, Homo sapiens
cacaacaggaccagcaagaggaccggaaacggaggaaccgacagaagagccgcagaggccagcgagaaacaaac

SEQ ID NO: 58600 - RNA, 89 nt, Homo sapiens
ccgacagccaggcccgcgagaaggcagcgggggcagagacggggaacagggccacccacacggacgccaacgcgggggcagaaccggag

SEQ ID NO: 58601 - RNA, 53 nt, Homo sapiens
ccgaccacaacaagcaagcaccaccgagcaccgaggccacccgggcccggcag

SEQ ID NO: 58602 - RNA, 56 nt, Homo sapiens
agagaccacaaggacgcgcgcacgagaggagaacagccgcacgggcggcgcccggc

SEQ ID NO: 58603 - RNA, 55 nt, Homo sapiens
aaggcgcggggggccacgcgaggccgagaaagcaccgggaggaaagagagccaca

SEQ ID NO: 58604 - RNA, 75 nt, Homo sapiens
ggcggaccccgcggcgggaggagccgccccgaggacagagcagccaggccacgagccagaaccgagacacacaca

SEQ ID NO: 58605 - RNA, 81 nt, Homo sapiens
acgaaagaaaaccccgagggaaacaagaaaacacaaagaggcagcaaagacagaacacaagccagcaggaggcacaagcag

SEQ ID NO: 58606 - RNA, 42 nt, Homo sapiens
accaacgggaggagcggggggaaggacagcggccagagagcc

SEQ ID NO: 58607 - RNA, 80 nt, Homo sapiens
cgcccggagcgggagcgagcggcgcggcccggcaagaacggaagcacgggcggaggaaagcacaagcagagcccccgcag

SEQ ID NO: 58608 - RNA, 39 nt, Homo sapiens
accgcaccgggggggcggggcaaaagcaacaaccagcaa

SEQ ID NO: 58609 - RNA, 62 nt, Homo sapiens
caaaccccagcggaacccggccacagccagcagcaggaaagaccacagcaagaccacgcccc

SEQ ID NO: 58610 - RNA, 48 nt, Homo sapiens
ccaacccagcacaaacccgaaaaacgaaggacccaagaagaccagccg

SEQ ID NO: 58611 - RNA, 58 nt, Homo sapiens
caagagcggaggagcgaaagcgagaaggaagcgccccgcgacagcccccaggaagcga

SEQ ID NO: 58612 - RNA, 66 nt, Homo sapiens
ccacaggaggcgcggaggacgccccaccgccgacgcccccagccaccagcccccaaaacacaagag

SEQ ID NO: 58613 - RNA, 83 nt, Homo sapiens
cgagaccccacacgccaccgaaaaggaagacaagaagcaccagaagcggagcagaggaggacagcagaggccgaaccagaagc

SEQ ID NO: 58614 - RNA, 75 nt, Homo sapiens
gccagaaaaaggggaaggcgcgcagggagaaccgaaagaacgaagcccgacccagaagcaggagggccaaaagac

SEQ ID NO: 58615 - RNA, 69 nt, Homo sapiens
gggccagcggccgcgcacccccggccggaggcaccagcgaacaagacaccaagggaaggaaacacaaac

SEQ ID NO: 58616 - RNA, 71 nt, Homo sapiens
cccgcccaacacgacccagcagccagagagccaggagagcgggccgaagaaacagagggaaacagaaaaac

SEQ ID NO: 58617 - RNA, 67 nt, Homo sapiens
cgcagcacccgcaaaagccgggcccagagcaaagccgccccgggggaagggcggaggacgcagacag

SEQ ID NO: 58618 - RNA, 75 nt, Homo sapiens
gccgcgccccccaggcccacaaccagcccagcagcagcaagcaggaacacaagggcaagacagccgggaacccca

SEQ ID NO: 58619 - RNA, 81 nt, Homo sapiens
cgacacaaacgaggagacccagcaccccaggagcgccccacaaaaccaagcgaggccaggccgccggaccgccaaggggac

SEQ ID NO: 58620 - RNA, 46 nt, Homo sapiens
cccagggaagacagcgcgagggccacagaaccacgaaaagccgcca

SEQ ID NO: 58621 - RNA, 78 nt, Homo sapiens
acggggcggagccgcagccaagcgggaaccccccgggaagaagcgaagccggggccaagcagagagacggggagaagg

SEQ ID NO: 58622 - RNA, 62 nt, Homo sapiens
aggcaagccccggagccgcacagaaaagccggcaaagacgccagacgacaaaaggggcgcgc

SEQ ID NO: 58623 - RNA, 78 nt, Homo sapiens
cgccagacaaccaggcaagcggaagaaccgaacacacaaagaaaagagcagccgaaccaaggacaaaggccgaagaag

SEQ ID NO: 58624 - RNA, 84 nt, Homo sapiens
ggcgcgcgcacagcgacgagcaccagcccgaccaaccccaagagggagacggggggcggccccggacacgacccgaggacagca

SEQ ID NO: 58625 - RNA, 77 nt, Homo sapiens
acgaaaaccggaacagcagcacagcaaagggcacggcggaccccgggacgagagaccggccgggcagcgccggcaca

SEQ ID NO: 58626 - RNA, 88 nt, Homo sapiens
accgagcccaggagcgccacgcgcggaaggcagcgcccagcagcgcaggagcccccaacaagcccaagaggagagaccccagaggagc

SEQ ID NO: 58627 - RNA, 72 nt, Homo sapiens
gcccacacgacgaccacggcggaggaaggaccccgccaaagggacaagagaaaaaaagggcgggcgaacaaa

SEQ ID NO: 58628 - RNA, 112 nt, Homo sapiens
gccgaggcagaggcgacacaagaagagggcggagcggagacgggagaagaaaagacccaagacaagcaaacccaggaacacccggccggcccggcgccccggggcccgaggc

SEQ ID NO: 58629 - RNA, 78 nt, Homo sapiens
aggaagagacagagaccaagccaaacccccagggaccaaacgccaagcaaaaaagaagacccaagacccagcaaaacg

SEQ ID NO: 58630 - RNA, 78 nt, Homo sapiens
gaaggcgaggcacgaccccacccccgaggcccgaccgggcggagaacggaaaagcaccaggaagcagagaggaccgca

SEQ ID NO: 58631 - RNA, 63 nt, Homo sapiens
cagcccgcaagagaaggaagccagccaacgaccccaggccccggccagccggacacagggcga

SEQ ID NO: 58632 - RNA, 105 nt, Homo sapiens
gagcggcgcccggagcccgcgggccgacacgcggcgggacagcaggacaaccacaccgaaggccaccccaagaagaggggacagaaagacagacagaagaaaggc

SEQ ID NO: 58633 - RNA, 77 nt, Homo sapiens
gaggggagggggaacgcgggcgccgaaggagggccggcagcgcccgcggagacggaagaggacccaggaagccaccc

SEQ ID NO: 58634 - RNA, 61 nt, Homo sapiens
aacacaaaccgaccacacacaaggaacgccaaaaaggaggccccccggcccgcgacagcgg

SEQ ID NO: 58635 - RNA, 72 nt, Homo sapiens
gccgcccaacccacgggcgccggccccgggcacgcaacccccccccgaacagacgaggcgaggaaccaaagg

SEQ ID NO: 58636 - RNA, 68 nt, Homo sapiens
caagaggccaacacgaaggccaccgaggccggaaccgaacaagacagaaagcgggacgcgcaacccca

SEQ ID NO: 58637 - RNA, 85 nt, Homo sapiens
agcaaaaccagcgggcggccgcgcccccaggacacaagaaagccagcagcagacgaaaccaggacgggaaaaaccagcaaggacg

SEQ ID NO: 58638 - RNA, 78 nt, Homo sapiens
ggcggcggcccagcgccaagaggggacaggaccggcccaacagggcagccgggccccccgcgccgcgggggccaagcc

SEQ ID NO: 58639 - RNA, 48 nt, Homo sapiens
gaaccgcccgcggcccaaggacgcaggacccagacaacggcaagcgga

SEQ ID NO: 58640 - RNA, 74 nt, Homo sapiens
gacgcaagcccacgacggacgcgcgagggcgacccggcagcgccccgaggcagagccagagcccaagcccccgc

SEQ ID NO: 58641 - RNA, 77 nt, Homo sapiens
agagagaaaaaggacaaaagccaagaggaggacagcgcacacagcaagcacgaggcagaacagaaagcgcaaggcag

SEQ ID NO: 58642 - RNA, 85 nt, Homo sapiens
ccgcacagccgcggcggcagcagcaggagagaaagacaacgaaacggcaaaccgagccacgcaaaagaaaaggacgggaggacac

SEQ ID NO: 58643 - RNA, 79 nt, Homo sapiens
ggcccagggccggcccccccaggacaacccagaggcaacaaaggcgagaggccaagaggaacccgcacaacagaaagca

SEQ ID NO: 58644 - RNA, 65 nt, Homo sapiens
aagaaccccacgaaggcagcaccagcacgccaggaaagagagaagaaaaccgaacaacaaaccag

SEQ ID NO: 58645 - RNA, 58 nt, Homo sapiens
ggagggcaagagggcgaaacaggccgacgcaaacgagacaccgaggcccggcacgagc

SEQ ID NO: 58646 - RNA, 69 nt, Homo sapiens
ccccggagaaaaggccaagaaggcagggaggaaaagcacgaaggaagccaagcagaacaaaagaaacca

SEQ ID NO: 58647 - RNA, 55 nt, Homo sapiens
gaaggaccaagaaccaggaggcaccaagcaagaaaagccaaggaccacaccaccg

SEQ ID NO: 58648 - RNA, 55 nt, Homo sapiens
aggcggacagcagcgcaggcaaaaaacagggcggagaacggaaaagcaccaggaa

SEQ ID NO: 58649 - RNA, 76 nt, Homo sapiens
cacaagccggcccacgggcgcccaggaccccacacaggacagggggggcagccggccgccggggggaagcgacgcc

SEQ ID NO: 58650 - RNA, 81 nt, Homo sapiens
gacgcaaagaccgcgaccagacaggcggcgccaccgaacagacccggaaggacggcgagggcgcacagaaacggaggcaga

SEQ ID NO: 58651 - RNA, 84 nt, Homo sapiens
aaacgggccaaaggacagagaagacagagaccccgccccccgaggcgcagcccgaacccagcagccacacgccaacaacgagac

SEQ ID NO: 58652 - RNA, 71 nt, Homo sapiens
gagaaggaccaagaaccagggcgcaaggaagcaaaaaaggcaagcaagcacaaaaagacgcaaggcgcgca

SEQ ID NO: 58653 - RNA, 70 nt, Homo sapiens
gccaacacaccgaggggaacacaagaggccccaacgcagaagccgagaaacaagccacccccgaaagagg

SEQ ID NO: 58654 - RNA, 87 nt, Homo sapiens
cccacgcccggccgacaagcacgcaaggagaagcccaccacgcaacgggacggcgcggcggaaggcgcgccagacgagccacgcgcc

SEQ ID NO: 58655 - RNA, 77 nt, Homo sapiens
gaggcccccagccagggaacggcagcacggacagagcagaagccagagcgacaaaaaaacaccggagacaaaaccaa

SEQ ID NO: 58656 - RNA, 70 nt, Homo sapiens
gaggaacccagaacagggccgggcggcccaagggaaaagcagcggccgcaagcccccgcagggggagccc

SEQ ID NO: 58657 - RNA, 77 nt, Homo sapiens
aggacgaaggggagcgggaggagcgggggccgccggcggcccggccaggagaccaaggaccggacagaggaagaaac

SEQ ID NO: 58658 - RNA, 107 nt, Homo sapiens
gccgccgccgccgcccagagacgcgagcccgccgccgccgccaccacccacccggacacagcggagcggcggacaccagaagagaaaagggcaagccagacgcacag

SEQ ID NO: 58659 - RNA, 39 nt, Homo sapiens
caggccggggagcgccagcaagcaccgagaagaacacca

SEQ ID NO: 58660 - RNA, 77 nt, Homo sapiens
acgaaggcgacccgcgcagaggcgcgggcgcgaacaccgggagcacagagcacggaagccagaagacagcgccagac

SEQ ID NO: 58661 - RNA, 87 nt, Homo sapiens
gaacgaggggccccaagagcacagaccagcagccgccaaagcccagcagagcaaaggcccgagaagcgggcccaccaccaagccagc

SEQ ID NO: 58662 - RNA, 92 nt, Homo sapiens
caggccgcgcagagcgggaccacccgggcacagcaggcacggagggggcacccgaggaggaagagggcagggcccacggaaagaagggaaac

SEQ ID NO: 58663 - RNA, 87 nt, Homo sapiens
cgcgggcccaaaagaaacacggccccccagcccaggcagacaagagagggcggcagaaggaacaccgagaaaccgcacaccggagac

SEQ ID NO: 58664 - RNA, 75 nt, Homo sapiens
ccgagagggagcggagaccggggccggcacagaaccagcaggcgaagacgcaggagagcacagacggacccgcac

SEQ ID NO: 58665 - RNA, 84 nt, Homo sapiens
agaccgggcgcggggggaacggagcgcagagccgcggccggcacgggaaaggccggcgcggaagaggccggcggcgggacggcc

SEQ ID NO: 58666 - RNA, 77 nt, Homo sapiens
ggaagacagccgagaccagaagggaagaaacaccaggacacaagggcacgagcaaaaaaaagccccgagcaacaaac

SEQ ID NO: 58667 - RNA, 69 nt, Homo sapiens
ccaggagcacagggccgaagcaaaaagcgccagcacaaacaacaggaaagaaaaagcggggaaaacaaa

SEQ ID NO: 58668 - RNA, 73 nt, Homo sapiens
ccccccagccgggccaccgcagagagaaaaccagcgaaggcggaagacagccgcgccggcacagccaccaggc

SEQ ID NO: 58669 - RNA, 79 nt, Homo sapiens
gcggggccgcacgggaccccggaacccgcgcgcgcccacgacgccgagggaaacccaaagaacgaaggggagaaccccc

SEQ ID NO: 58670 - RNA, 78 nt, Homo sapiens
caaccgcggggcaagcgggccacgcacccgcaccaaggccaaggcgaaccacgggaacaaaggcgaggacaaggaggg

SEQ ID NO: 58671 - RNA, 69 nt, Homo sapiens
gcccggcacgggcggcgggcccggggacgcgcgggagaccggggcaaaggagaccaagaagaccccaaa

SEQ ID NO: 58672 - RNA, 76 nt, Homo sapiens
agggggaggcagacgggggcgaggaggaggaccaggagcggaagcagacacaggaggcgagagcagagcaacggca

SEQ ID NO: 58673 - RNA, 81 nt, Homo sapiens
gcagaaaaggaagagggaaacaacaagaagaggaacacgaacaaccacgccacggggacaagccgacaggagcaaggccac

SEQ ID NO: 58674 - RNA, 64 nt, Homo sapiens
acggaccgagagagacagacgaacgcaaccccaagaggggagacgagaaggaaaaccgcaggca

SEQ ID NO: 58675 - RNA, 85 nt, Homo sapiens
cacgccagggacacagcgcaccgcaaaccgggcacgggggaacgggaccacgcagagaaggagaagaagcaccagccgacgcgaa

SEQ ID NO: 58676 - RNA, 78 nt, Homo sapiens
aaccaaagaagagacggccagcaggagggaaagagcgaaggccaaacgaagaggggcaagcgcgagaagagcggcgcc

SEQ ID NO: 58677 - RNA, 59 nt, Homo sapiens
cgacaccgagccgccgccgaccgaggccgaaaggacacagaagcgggagaaacgcacgc

SEQ ID NO: 58678 - RNA, 79 nt, Homo sapiens
cgccacgcaccggacgacgcccggcgccagcacacgcaggcagaaccagagaccacagaagaaggaagggccacccagg

SEQ ID NO: 58679 - RNA, 83 nt, Homo sapiens
cgagccgaggaagaggaaagggccccggggaagccagagcgacgaagggacacccaggacaacggcagggaggcacaagcggg

SEQ ID NO: 58680 - RNA, 73 nt, Homo sapiens
aacaagaacaggcgcaggcaagacggacccaggaggaaagcgaacgcgaaaagaaaagccgagagcagccaga

SEQ ID NO: 58681 - RNA, 54 nt, Homo sapiens
accacaccagacgagagagaccgagcggccggaccccagaagcgagccccgggg

SEQ ID NO: 58682 - RNA, 49 nt, Homo sapiens
gcagccggggcagcccagcggccgcggggggaagcagaccaagaagaca

SEQ ID NO: 58683 - RNA, 77 nt, Homo sapiens
gcggaaacaaagagagccagacccaggccggaacagacaccccgaagaaccccaaagaaacccagagaccaacaaag

SEQ ID NO: 58684 - RNA, 77 nt, Homo sapiens
cgggacggaccgagaccggaccgagagcggaccgagagcgcgaaacgcacgagaaggccgagacacaaagcggcagg

SEQ ID NO: 58685 - RNA, 80 nt, Homo sapiens
ccggaggagcagagggaaaagaacagacacgccagcggaggaggagcagccaaacagaaggcagcgcgcagcgagcgaga

SEQ ID NO: 58686 - RNA, 57 nt, Homo sapiens
gggaccccacgggcgaccggcaagagagggaccaggccaacccccaccccggacccg

SEQ ID NO: 58687 - RNA, 72 nt, Homo sapiens
gggcacgaacccagcggccagacacaacacgcgagggcagaagacaccaaagaggggaaccccggaaccaga

SEQ ID NO: 58688 - RNA, 72 nt, Homo sapiens
gagcgcccgccggaggagcagccaggacagcccaaggcggaaaagcgaaggaagccacaagcacagcccaca

SEQ ID NO: 58689 - RNA, 63 nt, Homo sapiens
acaggaaagggccacgggagccgccgccggagcgagaacacggccgcaccccccgaagaaggg

SEQ ID NO: 58690 - RNA, 52 nt, Homo sapiens
cggccaccacccgcgcgaaccaagccaacaggacccggaagggacaccaccc

SEQ ID NO: 58691 - RNA, 70 nt, Homo sapiens
aggagagcgggcccaggccacgaacgacggcacgaagcagaagagccaggacaaacgcggcgagaaagag

SEQ ID NO: 58692 - RNA, 60 nt, Homo sapiens
gaggaaggcccgcgcagccacccggacgcggagaagcggaggagaccaaggaggccacca

SEQ ID NO: 58693 - RNA, 78 nt, Homo sapiens
accgagcacgggccaggaaaagccgcgaagaacccaaagaacccgggcgggaccgaaggccaagagcacgggaaggac

SEQ ID NO: 58694 - RNA, 73 nt, Homo sapiens
agaagagaagacaagccaaagcaacagaccaaaaacaggcccggcgagccccgcagaaccaacgacaaacgca

SEQ ID NO: 58695 - RNA, 102 nt, Homo sapiens
acagccgccaccggccccgcccgcgaccaggccccccgaggggcgcggcaccgagcgcgccaacacagcccaaacggcaccggccgcgggagaaaagcgccg

SEQ ID NO: 58696 - RNA, 69 nt, Homo sapiens
aaggaccaagaaccagaggcaggaaaagaacaccacagaagcaaaaccagacgaaggggaaaccaggag

SEQ ID NO: 58697 - RNA, 75 nt, Homo sapiens
aaggaccaagaaccagcccacgccgaagcaccacaagcgacaggaaggagacgccaaggaaaagccaaagaacaa

SEQ ID NO: 58698 - RNA, 82 nt, Homo sapiens
gccaacgccggcgacaccggccggcgcagagaaggcaccggccaaagggggcgaccgggacaggacgacgacagcgcccgaa

SEQ ID NO: 58699 - RNA, 71 nt, Homo sapiens
gaaggagcaaaaggcggacaggcagcgaggcaagccggcaggggaagcaaccagggcggcaggcgagggcg

SEQ ID NO: 58700 - RNA, 76 nt, Homo sapiens
agccccgaggggggcgagcagacccaggcagccgcgcaaggcaaagaacggccaaggaaggagcgagggcgaggac

SEQ ID NO: 58701 - RNA, 62 nt, Homo sapiens
ggaggacacggaagagggaagaaagaagcagcgccagaccggccaacgccccaccggcgcca

SEQ ID NO: 58702 - RNA, 74 nt, Homo sapiens
aaaaaccgcaaaaccagcaagagaggagcaaagaaggacgcagagccagccacacagccccacaggcccagcca

SEQ ID NO: 58703 - RNA, 86 nt, Homo sapiens
cggccggccgcggcggccgcgcagggagcccgaggcaacgccggggcgcccgaggcggaaggcgcagaccgaccaggacgaggagc

SEQ ID NO: 58704 - RNA, 90 nt, Homo sapiens
cgcaagacacgggccccggaaacagggagccaacccaggaaacgaacggcccgaccagaaaccccaccacgcggcaggggccgccgagga

SEQ ID NO: 58705 - RNA, 62 nt, Homo sapiens
cgcgacacgggagcagggccaggcccgcagccaccccaggacagggacaggcagccaagagg

SEQ ID NO: 58706 - RNA, 52 nt, Homo sapiens
ggaagcaggacccgcaagacgaaacacgcaggaaaaaacggaagcacaaaac

SEQ ID NO: 58707 - RNA, 81 nt, Homo sapiens
cagagggccgagaaggacaggacagggggagcggccgggcagggccggcaacagcccgggaggcagccacaacccggggcc

SEQ ID NO: 58708 - RNA, 74 nt, Homo sapiens
caacggcagcaccaaccgaacacgcgggcgagaagccgagcagaacgggcaccccgggcggaaaagagggaagg

SEQ ID NO: 58709 - RNA, 66 nt, Homo sapiens
agcagaccgggggccagcacacaacaacacagcacccccgacagacaaaccccagcaaaaaaaaga

SEQ ID NO: 58710 - RNA, 78 nt, Homo sapiens
gcgccagcgcggcccccgggcccggcagcggcggccggggcggccccaagcaacagcaggacaagggcagagagcacg

SEQ ID NO: 58711 - RNA, 77 nt, Homo sapiens
ccggcccagagccaaaggagccccacaaaaggagagcgacgcaggggaggacagggaacggcgaggagccaccggga

SEQ ID NO: 58712 - RNA, 79 nt, Homo sapiens
cagccgggaaaaccagggacaggcagcaccgcaggcaggcaacgccaccgacccagccagaacggaagaccaaccagaa

SEQ ID NO: 58713 - RNA, 63 nt, Homo sapiens
ccacaggaggcgcggaggacgccccaccgccgacgcccccagccaccagcccccgcgaacgga

SEQ ID NO: 58714 - RNA, 82 nt, Homo sapiens
cccggggaaccgaccacgaaggaaggcccggcgacccccgcgcagggggccccccagcggggccagccccacaacccgccag

SEQ ID NO: 58715 - RNA, 62 nt, Homo sapiens
caccggacggcggaaaggcccaggcgccccgcagaaagcaccgcaaggcagagggcagacag

SEQ ID NO: 58716 - RNA, 74 nt, Homo sapiens
gcgccagccgcagcgccacggcgccgagagcggggcccggcgcacccaccaccgccgcccacggcagcccaggg

SEQ ID NO: 58717 - RNA, 82 nt, Homo sapiens
gacagcgcgcaccacccgcaggacaagcagaccggaagaccgacggaagaccacaccccgagggagcccaggacaccacgag

SEQ ID NO: 58718 - RNA, 84 nt, Homo sapiens
agcggcagcccgcggcggcgcgcccagggcagggcccaaggaaggacccgccagcggaagaccaccaaaagcaggaaaacgaga

SEQ ID NO: 58719 - RNA, 75 nt, Homo sapiens
acccaacggcgccggagaaggcaaagaaaccccaaagccagcaagaccacagcagcacgcaccagccagcgaacc

SEQ ID NO: 58720 - RNA, 74 nt, Homo sapiens
gcaaacaccaccacggcccccggaaaggcaagaaccagcggcacggagagaagaggaaggaagaggaggcaaaa

SEQ ID NO: 58721 - RNA, 71 nt, Homo sapiens
ggagccagaccagcgcacgaagcgcggagagaggaaggaacaccaggcccggcggcggagggggggcgaag

SEQ ID NO: 58722 - RNA, 37 nt, Homo sapiens
ccaagacacgcacgaacagaagacgacacgccgaagc

SEQ ID NO: 58723 - RNA, 79 nt, Homo sapiens
cgcccggcggcggagagaagcgccaaaggaccggacccagagaagaggaaaaccaccgggcagagccgccgggccaggc

SEQ ID NO: 58724 - RNA, 78 nt, Homo sapiens
gaggagcagggcagagcacgcgcgcagcgaagcccagggaggccaccagaggccagggaaggacacaccgcggaaaga

SEQ ID NO: 58725 - RNA, 76 nt, Homo sapiens
gaaaggaagcccccagcgaacgggacgcaaaaaaacaagaagggaggagaaggcaggccggacccccgcacgcgcc

SEQ ID NO: 58726 - RNA, 110 nt, Homo sapiens
aaacaagaaaaacaaagccaaggaaaccccaacacagagccaagcgccaaacagaagaggagcacggcggcggaggaagaaagaccgacacagagaacaggaggaacgag

SEQ ID NO: 58727 - RNA, 81 nt, Homo sapiens
aaacgaaacagaacagagagaagcccaagacaaagcaggaggacacaagaagggaggaaaggcggacccaggaaccaccac

SEQ ID NO: 58728 - RNA, 74 nt, Homo sapiens
acacaagcaaagacgggccaccagacccaccagaggcgacccgcggcgagagcccccccagagcgccagggccc

SEQ ID NO: 58729 - RNA, 101 nt, Homo sapiens
gagcgcggccacgaaggcggcgggcagcgcgaggcccgcgcccacacggcgccagggacgaaaccacgcagcgacaaccggaaccagcgccagcccaccgg

SEQ ID NO: 58730 - RNA, 76 nt, Homo sapiens
cgaaacagaaacaggcacccacccgaggcgaacaagaaccacgacgcagaacggaaaacagaagcgcaagcgacca

SEQ ID NO: 58731 - RNA, 50 nt, Homo sapiens
ccaggaacgcaagaccaaggggaccccgacggagagacaaagaagacgga

SEQ ID NO: 58732 - RNA, 72 nt, Homo sapiens
acaccaacaaaaaacaggcccagccccggccggacccaagccagaagcccgcaaagcccccagaccgcagaa

SEQ ID NO: 58733 - RNA, 81 nt, Homo sapiens
accagggacgcccccgacccggcggccaagacgggagccgccgcggggggagccgggcagccgggcagaggagcagaaaag

SEQ ID NO: 58734 - RNA, 57 nt, Homo sapiens
cgccaccaggcacacacggcagcacaggcaggcgcccacgaggcccccgaggaacac

SEQ ID NO: 58735 - RNA, 75 nt, Homo sapiens
ccacacccagggacccccagaaggaacggagacaaaaacggcccggagaggagcccccaaccccagaaccccacc

SEQ ID NO: 58736 - RNA, 68 nt, Homo sapiens
aaaaggaaccgaagaaaccaaggcgaggggaaaaggaaggaaaccgggccagggagacggcaagccag

SEQ ID NO: 58737 - RNA, 59 nt, Homo sapiens
accagcagaaggccccggaggaggcagacccagaaaaggaccaccccccgacgaaccgg

SEQ ID NO: 58738 - RNA, 45 nt, Homo sapiens
ggcgcgcaggccgcggggagcaccgggaggaaccgacgggaggcc

SEQ ID NO: 58739 - RNA, 77 nt, Homo sapiens
agaaacacaagacgaacgggagaacagcagcagcccacgaacagaaagggaacacaccagcgggcacagcacagcag

SEQ ID NO: 58740 - RNA, 76 nt, Homo sapiens
gccgagcaacaaccgccgagcgaacccaggagaaacgagagggacagcaaggaagacgccagagagcggcacaccg

SEQ ID NO: 58741 - RNA, 60 nt, Homo sapiens
cggcaggaaggggaccgggcggcggagcggcggaagaagggccgcccccaaagccaacca

SEQ ID NO: 58742 - RNA, 51 nt, Homo sapiens
cgggagaggagagcccccaggggagccggcggaacggccgggcaggccggc

SEQ ID NO: 58743 - RNA, 55 nt, Homo sapiens
gacgcgccggagggccagaaggagaaaccaagagaaagaaggagaacaaacgccc

SEQ ID NO: 58744 - RNA, 109 nt, Homo sapiens
gcacaagagccccgcgacaggcccaacgagcggcagaacgccgcccacaggccaaaagaaacccccaaaaccggaagaaagagaaggaacagaggacacgcacaccaca

SEQ ID NO: 58745 - RNA, 84 nt, Homo sapiens
agaccaaggacaaagacaaacaccaacgcagggaacaccccacgggggcaccccgaccaggacaggacacacaccccgcagggg

SEQ ID NO: 58746 - RNA, 76 nt, Homo sapiens
gaaagagaggcccccggccgacaagcaagcagcgcgccggccccaacacggaccgccgggagaacccaacccaaag

SEQ ID NO: 58747 - RNA, 88 nt, Homo sapiens
ccaaaaggacggcccgccccggcacaccccagccccggccacagaagcccggaccgacaggaaagaaggagcccacaaagaaaagaac

SEQ ID NO: 58748 - RNA, 77 nt, Homo sapiens
caaggggccgacgaggcggagaagacaacggccgggggcccgggagggcaggcggaacaagagaagcagggagagca

SEQ ID NO: 58749 - RNA, 38 nt, Homo sapiens
cgagcaggaggcgccacagaacgcaacgaccgaccagc

SEQ ID NO: 58750 - RNA, 58 nt, Homo sapiens
agaagggaaaaggaccaacccaaccaacgggcaacaaccagccacggagcccgcacgc

SEQ ID NO: 58751 - RNA, 79 nt, Homo sapiens
gcgaaaggaaagaaccagaggaaacggacgaggaaggagaacccagaaaggcacccggaaacaagccacgaaggagaga

SEQ ID NO: 58752 - RNA, 83 nt, Homo sapiens
gcgcgcccgcagcggaggcagcccgccagcccggcggagccagccggcaccaagggaggcgaagcagcggagacaggggcccg

SEQ ID NO: 58753 - RNA, 50 nt, Homo sapiens
agaggcgccggcgggaaaacaacagccggagcagggagacacgaggaaga

SEQ ID NO: 58754 - RNA, 82 nt, Homo sapiens
agcagaaggagggaggaaggccccacagacacgagaggcgagggacgacagagcaagcggcagagggcaagcgggaaaaaga

SEQ ID NO: 58755 - RNA, 80 nt, Homo sapiens
cgcgggccgcggcgcccggggaaagccgggccccgagggcggaccgaggcaaccagaaaacggggagggaccagaagaag

SEQ ID NO: 58756 - RNA, 67 nt, Homo sapiens
aaggcaccacccgaaacaccagagagcacgcccagcccagcggcaggcgggcagaggggacaaccaa

SEQ ID NO: 58757 - RNA, 114 nt, Homo sapiens
gcgacggggcaagggcgagaccggagagccgcaggacggcgcggcagagccccgacgccacagaacggcacccgccggcgccccccggcacaacccgcgggcaccagccccgga

SEQ ID NO: 58758 - RNA, 77 nt, Homo sapiens
caaaagggacggacaaaggaacaggaccaggcaaaaagcgaccgcaggcaagaagaaagaaacgaagcacaccgaag

SEQ ID NO: 58759 - RNA, 71 nt, Homo sapiens
cagcgaggagcaggcggagcacccaccacggagggaaagaccaggcaggacaaaccggcgaccacacacgg

SEQ ID NO: 58760 - RNA, 76 nt, Homo sapiens
caaaccagcaggcaccaaggaaagcagaagacaaacagccagcagcccccccaagggggacacagcaggcaccaca

SEQ ID NO: 58761 - RNA, 80 nt, Homo sapiens
aacgaccagaggagcacaagaaagaggcccacagcgacaaggccaaggagagcacgagccaaggcggcagaccagaccgg

SEQ ID NO: 58762 - RNA, 59 nt, Homo sapiens
cagagggccccccaggccgccccgcccggaaggccgagcggccccgagccgggacaccc

SEQ ID NO: 58763 - RNA, 48 nt, Homo sapiens
aggggcacgagcgccacaaccccagggaaagggagcagcaccggccac

SEQ ID NO: 58764 - RNA, 72 nt, Homo sapiens
aaacggcaccacaagcaacaacaaacgggcggcaaacccacagagggggggcgggcccgagcccggaacaga

SEQ ID NO: 58765 - RNA, 74 nt, Homo sapiens
cgggggccgcgcgaagacaggaccagggcacggaggacccaaagacaggaccacgcaccagcagagaaggaaag

SEQ ID NO: 58766 - RNA, 72 nt, Homo sapiens
acccccgggcacgagccaccaggcccacaccacgcacggcagcaacagcagcccaagagaagccgccgcacc

SEQ ID NO: 58767 - RNA, 75 nt, Homo sapiens
agaacccaagcaaccacccaaagacacagaaggaccccccaggaaccaggagcagaagaaaaagaagggaacgga

SEQ ID NO: 58768 - RNA, 73 nt, Homo sapiens
accggggaccgccaccgcagccgccaggaaaaaggggaaacagagaaccagcaaagaggaccaaaaggaaacc

SEQ ID NO: 58769 - RNA, 78 nt, Homo sapiens
cgcccgcccaaggcccgcgggcgggagaacggaaaaccccaacccggggaaaggaaggaaaaacgggaaaagaaccgg

SEQ ID NO: 58770 - RNA, 55 nt, Homo sapiens
acggaagaaaaggggcggaaggagaaaaggccaaaacagaagaggcaaagcccag

SEQ ID NO: 58771 - RNA, 83 nt, Homo sapiens
agccaaccggagccccaaggcaagaggaggaacgacgagaagagaggaagagagagacgcaacggagaggaagaacaaagagg

SEQ ID NO: 58772 - RNA, 54 nt, Homo sapiens
cagcagccagagagccacccaggaccaaccagcccacgcagagcggagaagccc

SEQ ID NO: 58773 - RNA, 82 nt, Homo sapiens
gcaacacaaaccacaagcgaagaggagaccaagaaaagacgaagcggacaagaccagcagagggaacgcaccaaaaagggca

SEQ ID NO: 58774 - RNA, 66 nt, Homo sapiens
agaaacaaaagacagcacaaagaagccgagacaaacggcaccaagagggagcgaggcggccagggc

SEQ ID NO: 58775 - RNA, 76 nt, Homo sapiens
cgaacaacccggccagagcaggccaagacaagcgcgcacgcggccacacggccacggccaccaccggcggcccgcc

SEQ ID NO: 58776 - RNA, 76 nt, Homo sapiens
gcgcccccggggggaggaggagcccaaaagcccggccagaggggagaggaagcggaacgggaacggccagccagcg

SEQ ID NO: 58777 - RNA, 66 nt, Homo sapiens
cacaaccgagacaccaaaaagacggaaggacagaacggaaaagagaaaacaaagccaccaaaggac

SEQ ID NO: 58778 - RNA, 78 nt, Homo sapiens
accggaggacgcggagaaccggcacagcccccggaggacaccccaaggcaccggcgggcgacgagaacaaccccgaga

SEQ ID NO: 58779 - RNA, 77 nt, Homo sapiens
agaaaggccaacgagaacaagcacagggacggacaagggagggccaagaacccggaggagggcaacaccggacagca

SEQ ID NO: 58780 - RNA, 67 nt, Homo sapiens
aacccacagaagcccaacagggaaaaggaaaccagaagagggacgaagaaaacagcgcagcgcccag

SEQ ID NO: 58781 - RNA, 71 nt, Homo sapiens
cgacaagacaggaccacaagacgccagaacacaagaagaagcagccaaaaaccgggaaaacccaaccccaa

SEQ ID NO: 58782 - RNA, 74 nt, Homo sapiens
cggccggcaagaacagcgacaaggagagaagcgcggagccccaaggggcaggcacacaagaggcccggaaagcg

SEQ ID NO: 58783 - RNA, 33 nt, Homo sapiens
agcacagcagggaccagagcgggccgcacgggg

SEQ ID NO: 58784 - RNA, 72 nt, Homo sapiens
cggaacgggagaaagcacgggaggagagcaagagagaaggacgacgcaggaaagagcaagaccagagcgccg

SEQ ID NO: 58785 - RNA, 81 nt, Homo sapiens
cacgggcgagaagcccacgaggcaacacgcaaggccgccaccaggaagccaacccagagaccaggacagaggaagaaaggc

SEQ ID NO: 58786 - RNA, 34 nt, Homo sapiens
gcacaccacggcccgggggggagacacagccaga

SEQ ID NO: 58787 - RNA, 76 nt, Homo sapiens
gaggccaagccaccccggcggaaccgcccccaggaacgagcagagcgacagcgaagcgcagcaacacaagccccag

SEQ ID NO: 58788 - RNA, 73 nt, Homo sapiens
gcgacgcccaagcgggaaggaccgaacccccacccacccccaaaggcagggggaaggagccacccccaacccg

SEQ ID NO: 58789 - RNA, 64 nt, Homo sapiens
aagcacgcagacgacgagcgagccaaaaggggggacacccaagaaccacgaagcgcccgagacg

SEQ ID NO: 58790 - RNA, 80 nt, Homo sapiens
acacagacacaggagcggcaccaccgaaggcaggaaaggccacgagaagcaggagcaggcagcccagaagaagaagaaga

SEQ ID NO: 58791 - RNA, 73 nt, Homo sapiens
cgggagaccggggaacgagccaaagaagagcgaagcagggcacacacacccccgggagaagaaaggggaccgg

SEQ ID NO: 58792 - RNA, 64 nt, Homo sapiens
gggagaacccagcggagaagcacaaagggccacccgacccagcggagacagagccagacacaac

SEQ ID NO: 58793 - RNA, 58 nt, Homo sapiens
cacggcagacacacaacccgacccgacgagcccgccgcgcacgcgagcccggcagcgc

SEQ ID NO: 58794 - RNA, 65 nt, Homo sapiens
aggggccggaagcaccaggacagaggcagagcaacagggacacaagcaagaagaaagggaccgac

SEQ ID NO: 58795 - RNA, 68 nt, Homo sapiens
gaaaagaccccgcaccgcgaaacagaagacaaacacgaagaacaaagagccgcgaagcagccacggac

SEQ ID NO: 58796 - RNA, 67 nt, Homo sapiens
cggcaccacacgcagaacgggcggacgggcgcccagccagcggcgccgacaccggaacagcgcccgg

SEQ ID NO: 58797 - RNA, 80 nt, Homo sapiens
gacgaggagaaaacccagaaaaaagggcagagcggaccgcgaagagagacacgcaggaaagccccagccacccacaaaca

SEQ ID NO: 58798 - RNA, 65 nt, Homo sapiens
gagaagaaggagagcaaggaaggagcaccaccaaaacacagcgcccgagcggcgccgacacggga

SEQ ID NO: 58799 - RNA, 75 nt, Homo sapiens
aggaggaggggacggagaggacgacggaggcgagagaccgcggcgggagagccagggaacgagcccacgggagcc

SEQ ID NO: 58800 - RNA, 77 nt, Homo sapiens
ccaccgaacccggcacacgagggccgcacccccacacgcaggaaacacgagggaagccacagggaggaggaccagcg

SEQ ID NO: 58801 - RNA, 70 nt, Homo sapiens
cagccagagggcggagccgccagagggcgaaggagcgcgaaccaccgcggcagaacggcggggccgagga

SEQ ID NO: 58802 - RNA, 123 nt, Homo sapiens
cggccccagccagaagacagggcacccgcggccgcgcgcagccgcgcggaccccggcgagggaaaccagcccagagaagacgggagcccccggggcccgcccagcaagccagcgccggaccca

SEQ ID NO: 58803 - RNA, 79 nt, Homo sapiens
ccggccggcccgcgcggcagacgggccccccgggagacacaggcgagaacgcggacaagcaaacaaagaggaaaaagag

SEQ ID NO: 58804 - RNA, 69 nt, Homo sapiens
gaaaccaggccacccacaagcaacagccaagccaccgggcggcaggggcccggcccaaacccggaggga

SEQ ID NO: 58805 - RNA, 69 nt, Homo sapiens
gaaacaaaacgacaagggaagccccagcaagacccggccagagcagggcaggaagaccaaaaagaaacg

SEQ ID NO: 58806 - RNA, 73 nt, Homo sapiens
ccagccgggacggggcccagacccccagacggaagcaacggggcggcacacaaggagcgaagggcagggagaa

SEQ ID NO: 58807 - RNA, 73 nt, Homo sapiens
ggaagaggaggaagggagcacccgaccgcaacccaccaaggagcacaggacgaagaggaaggaaaaaacaggc

SEQ ID NO: 58808 - RNA, 65 nt, Homo sapiens
gcgagggagaaagccacggcaggaggaggcaccaggcagcagggaggaaaccaggcaacaggaag

SEQ ID NO: 58809 - RNA, 91 nt, Homo sapiens
cacagcacccgggcgcggcggccagccgcaccgggacgacaccggggaccggacagggacgggagaaagaacagacaagccgcaagaaccg

SEQ ID NO: 58810 - RNA, 68 nt, Homo sapiens
ccgaaggcacgccgcggcgcaggacacacgaagccgagaggccggacgagcgcgcacaggcggaaccc

SEQ ID NO: 58811 - RNA, 55 nt, Homo sapiens
cccgaccgcagccaggccgacccgaccggaccagacaagggcggaccgagagggc

SEQ ID NO: 58812 - RNA, 58 nt, Homo sapiens
ggggggacgcgccaggcacagcagcagaccaggcagcgaggggaagggaaccaaaaag

SEQ ID NO: 58813 - RNA, 81 nt, Homo sapiens
ccacccgcagcgggaacaggcgagcacacagagaggggaagggcagcagcagcagagaaccaaacccaaagcgaacacaaa

SEQ ID NO: 58814 - RNA, 87 nt, Homo sapiens
gaggagaggcgcccccgccggccgccgcgccgcccggcagcccggcagcacccaggccacagaggaggaaagagaggggaaagaagc

SEQ ID NO: 58815 - RNA, 58 nt, Homo sapiens
ggaaggcagcgcacgacagcaaaaggcaaaccgacaccagcgacacaagcgcgaggga

SEQ ID NO: 58816 - RNA, 90 nt, Homo sapiens
gaggagggcgagcaggaccgacccgggcacccgggcccgggaccccccgcgccgcagcagggacgggagcagcggaaggcccagaccgag

SEQ ID NO: 58817 - RNA, 64 nt, Homo sapiens
gcgagacgccaccagaacacgacgcaacacacccaccgcagcacaaacggcggcgagccgaaga

SEQ ID NO: 58818 - RNA, 85 nt, Homo sapiens
cccaccccggcgcccgcgccagcggcgggagagacaggcccagaacaggacagagcaggacacaaaaaggaacccagaaagacaa

SEQ ID NO: 58819 - RNA, 53 nt, Homo sapiens
caagaggacaaaaggcagcagacgacaggacggcagagccccaagaaagcgca

SEQ ID NO: 58820 - RNA, 58 nt, Homo sapiens
cggaggaggaccacgccgcaccccacaagacacgggcacggaccagaagaacccaccc

SEQ ID NO: 58821 - RNA, 75 nt, Homo sapiens
gaacccgggacaagaacgcagccgccggccgaccaccggaacggacagcccccccaggcgcgagacccacggcgg

SEQ ID NO: 58822 - RNA, 73 nt, Homo sapiens
aaaaaagagacccacagccagcaacaccaagcggcgcagggcaagaggaaccgagggagagaagaaacaacgg

SEQ ID NO: 58823 - RNA, 52 nt, Homo sapiens
aacagaagaggcagggcaaaacgagggcgaggagggaccacgccccagcggc

SEQ ID NO: 58824 - RNA, 101 nt, Homo sapiens
gcacagcaagggcaaagcccggaagagggaaggggaaacgcggagccaaaaacaccaaccggccaaagaaaggaagaagaagaaaacgaaaaggagaagag

SEQ ID NO: 58825 - RNA, 82 nt, Homo sapiens
aagaccccgcgagagcgccccagccgccgaccccaggccacgagcagaccgggacaccgcagacgggagcgggccgagaaaa

SEQ ID NO: 58826 - RNA, 78 nt, Homo sapiens
gacacgccgcgagcgccccggccaaggccaggaccagccagcccaccggaccacacacacggggcagggcggggagcg

SEQ ID NO: 58827 - RNA, 80 nt, Homo sapiens
ggaaaacaaggggaggagacgcaagcaacaaggcaaggcaaccacgagaaaacggaaccgaaagcaagaggacaagaaga

SEQ ID NO: 58828 - RNA, 59 nt, Homo sapiens
agcagagacggacaagaacagcagcaaggcgccaccggaagaaacgggaggggaggagc

SEQ ID NO: 58829 - RNA, 83 nt, Homo sapiens
caggagaaggcgacaggaaccagccgggggccaaccgaggagccacgcagcagcccaggagacagccagcacgaacgcgcaag

SEQ ID NO: 58830 - RNA, 75 nt, Homo sapiens
acggaaaaagagcagaccgaaaagcggcacgacaacaaaaccacagagaggccggagaaggcgacggccgaacca

SEQ ID NO: 58831 - RNA, 68 nt, Homo sapiens
aggaaaaccagagcccaagccccccaagggcaccacccacgcagaaaaccagacgagagacagaagac

SEQ ID NO: 58832 - RNA, 92 nt, Homo sapiens
caaggaggaaaacagaccaaaaagaggagagaacaaacccggcccccaagagcgaaaagcaaaccggagcgcgaacgcggccgagaccacgc

SEQ ID NO: 58833 - RNA, 81 nt, Homo sapiens
cggagcgaaccaccccaaacaggggacggaaagagagccgcagcgcagaacaagggaaaaaagggcaaaaagggcaaaaaa

SEQ ID NO: 58834 - RNA, 77 nt, Homo sapiens
gggagacacgagaaaggagaaagacagcaaagaaaaggagaagaaaggaaaaaaacaaccccgggcaccccgccagc

SEQ ID NO: 58835 - RNA, 83 nt, Homo sapiens
caagaacgcgggccaggcccagcagggccacggccaacccgaaaaaagccgggaacggcagacgcagcagagagaccaccagc

SEQ ID NO: 58836 - RNA, 74 nt, Homo sapiens
gccccaggggaacgcgagcgaacacagaacacaagaaacaagcaacgacagccagaacgcaaagcagagcaaac

SEQ ID NO: 58837 - RNA, 69 nt, Homo sapiens
ccagaacgacgaaggggacacacgggccacacccagcagaagagcgcagcccagaaggaacgagccacc

SEQ ID NO: 58838 - RNA, 64 nt, Homo sapiens
aagaacagcaagcccggccagggcccgaacgccgagcagaggcacaaggacagccgaccccccc

SEQ ID NO: 58839 - RNA, 71 nt, Homo sapiens
caccacgggcagaccacggaggaaaggaccgcccagcccgagagcgggaacaggcacccgccaccacgccg

SEQ ID NO: 58840 - RNA, 60 nt, Homo sapiens
gccaaccgcgcggaggaggaaacaagggcagagccagcaaagccagaggcccaggacagc

SEQ ID NO: 58841 - RNA, 76 nt, Homo sapiens
gaaggccagagcacgagcacgggaagacgagggcggggcagcgaggccccggccgggcccccgcggggaggagccg

SEQ ID NO: 58842 - RNA, 79 nt, Homo sapiens
cgcacagcaaacaaaggaaaagcaagcgaaccaggagccgcccagcaaaacccaacgggaacccgccggaaaacggaga

SEQ ID NO: 58843 - RNA, 97 nt, Homo sapiens
gagggggggcgcgccggaaaccggagcgcgcagcagaacaccagcaggaaaaaagagcggcagaaggccaaacggccgagcaggcgagcgaagagac

SEQ ID NO: 58844 - RNA, 76 nt, Homo sapiens
gcggcaggcgcgcgggaggcgggcgcggagccgggaacaacagaaaaaacaagagaggaagcccagaggaacaagg

SEQ ID NO: 58845 - RNA, 87 nt, Homo sapiens
agaagaagcgcggccgcaccggccaaggggaccaaaagaacccagccaacccgcagagggaggggaggggcgagcggaggagagcgg

SEQ ID NO: 58846 - RNA, 75 nt, Homo sapiens
cccccacaggccgaagagccaggaggccgcccccacagagaggagagaagcgggggccaccgccccgacgggggc

SEQ ID NO: 58847 - RNA, 77 nt, Homo sapiens
gccgcccgagggaggcgacgggggcgaagagcgcgccgcccccgcccacccaggacacagagcgggacaaaacagca

SEQ ID NO: 58848 - RNA, 82 nt, Homo sapiens
ggaaggacaccaagagcggaccgggccccggaagaagagccgggcaagggcacccaaaaaccgaagacggggacgggaggga

SEQ ID NO: 58849 - RNA, 85 nt, Homo sapiens
gcgggccgggagcgcggcggagacgagccgagacagagcacgcccggaggccgaagcacgcaggagcggcggcgggagcaggagc

SEQ ID NO: 58850 - RNA, 81 nt, Homo sapiens
ggacgagagcaaggagaggcagggacagcccagagcaagcacacggaggcccgggagccagaccgggagcccgccccagcc

SEQ ID NO: 58851 - RNA, 78 nt, Homo sapiens
gaaggcccgggggacggaaagaggacgccgagagcggcccaggaggaacaaccagcccacccggagagggcacgcgcg

SEQ ID NO: 58852 - RNA, 68 nt, Homo sapiens
agaccgagcggccagcacagcccaaccagccaaagaacacggcagaagcccccaagggaaaaaggaag

SEQ ID NO: 58853 - RNA, 79 nt, Homo sapiens
gagcaaggacaccaccagggagccaggagaggcgagcgggaaagccgaagaaaggagggcgagagcacggagcaggggc

SEQ ID NO: 58854 - RNA, 76 nt, Homo sapiens
ccaccaacacacacgacaaacccacgccacaccgggcacgagccgaaaacccgagacagaacaaggcgcaggcgca

SEQ ID NO: 58855 - RNA, 67 nt, Homo sapiens
ggcgccgaggccccaagacaaaagaaggcggagcggggagagacagaagaaggagacaaaaaaagcg

SEQ ID NO: 58856 - RNA, 103 nt, Homo sapiens
gagggagagagcgagcgagggggggcgcgccggaaaccggagcgcgcagcaggaggcagcacggcaggagacgaggagaggacagcaggacacccggacccca

SEQ ID NO: 58857 - RNA, 38 nt, Homo sapiens
acgcaccgagccgcgcggccagggggcggaccggccaa

SEQ ID NO: 58858 - RNA, 41 nt, Homo sapiens
cagccgcggacccagaagaccacccaccccccacccaggga

SEQ ID NO: 58859 - RNA, 80 nt, Homo sapiens
gagggagcaaggacaccaccagggagccaggagagggaagcaagagaagccgacagaccacccaggaacacagagcgaaa

SEQ ID NO: 58860 - RNA, 71 nt, Homo sapiens
ccacgcggaaaagggacccccgggaagaagacacagaaaacagcggaagaacgccccagcccagacacgga

SEQ ID NO: 58861 - RNA, 68 nt, Homo sapiens
gaggcaaagaaaaggagaaaagaagccaaagggacacgccgaagccaggcggaaagcaaaagacgaaa

SEQ ID NO: 58862 - RNA, 57 nt, Homo sapiens
aaaaccggcccccaacgacaaaagcgcagaaggccagacacagaaccaggaaagcac

SEQ ID NO: 58863 - RNA, 71 nt, Homo sapiens
gaggaaacacagaaagaccccaaggacacagagcacaagccccccacacaggaaggcaccccagaaaccaa

SEQ ID NO: 58864 - RNA, 80 nt, Homo sapiens
aggagcgcgagcggaagcccaaaggggcgggacaggccagggacagcccaacccagcgcgaagccagaggccacgaagga

SEQ ID NO: 58865 - RNA, 68 nt, Homo sapiens
cagggggagaagaaaccagaagcgaaggaacgagggagaacaacaagcacaggaggagcaagcgcgcc

SEQ ID NO: 58866 - RNA, 70 nt, Homo sapiens
ccgaaggcccacaggacaggagagaaagacggagggagaggcgcacacaggaaagacaaccaggcgaaga

SEQ ID NO: 58867 - RNA, 58 nt, Homo sapiens
gaacagcggggcgcggcaccgagggccaggccagagccgcaggccaggacgccacccg

SEQ ID NO: 58868 - RNA, 79 nt, Homo sapiens
acccggcaggggagcccgggcccagagaggcaggagaggaggagggcccgccccggcggccacaggcaagccccccacg

SEQ ID NO: 58869 - RNA, 77 nt, Homo sapiens
ccgaaggagagccggccggcagcggacacgcagcacagggggaaaacgacccccaggaaaaagaaaaggaccagaaa

SEQ ID NO: 58870 - RNA, 78 nt, Homo sapiens
cgggcaaccgaaagagacccccagaccaggaaagacaggagaagcagaaagcaggggaaccagacaaggaggaggcaa

SEQ ID NO: 58871 - RNA, 113 nt, Homo sapiens
caggcgaaggggagcaggccgagcccgagccgcagcacgagccaaaccgagggagaaacccacaaaggaggggaaggagacaagcagagaagcccgaggagcacaaggagcgc

SEQ ID NO: 58872 - RNA, 63 nt, Homo sapiens
cgaaaggaaaacagaaccacagaacaagacgcaaggcgccaccggaagaaacgggaggggagg

SEQ ID NO: 58873 - RNA, 78 nt, Homo sapiens
ccaccggccagagggcggagacacgggaaggcaccgacacgcggggccacgagaggggacccgcggcccaggcgccgg

SEQ ID NO: 58874 - RNA, 85 nt, Homo sapiens
ccgaggaagaccagaaacacagccgagaggaggaagaagaagaagaagaaaaagccaaccagagggggagcagaccggaagaccc

SEQ ID NO: 58875 - RNA, 101 nt, Homo sapiens
agccgcgcgcgagggccggggcgggcgccgcgggacccccgggccagggacccaaagacaggaccacgcaccagcagagaaggaaagcaaaccgaagcagg

SEQ ID NO: 58876 - RNA, 68 nt, Homo sapiens
ggcagcacgaaccaagcggagacagaaccaagcccgcacgacgcgggccggacacccaggccgcaaga

SEQ ID NO: 58877 - RNA, 87 nt, Homo sapiens
gcggccccagcagacgcaggcagccccaaagccgaacaggcagggccagacccaggggcccgggcagagggaaagcagaggacggaa

SEQ ID NO: 58878 - RNA, 101 nt, Homo sapiens
gcgaccgcggggacgaggggacacaagacggcgaggagaagacacaaggggcccgcgagcaccgcccggccgcgcggcccggaccggcgcgggaggccgag

SEQ ID NO: 58879 - RNA, 79 nt, Homo sapiens
aggaaaacaaccgagggcagagaccggggacgggaacaagcaggcacacaccaaaccaggagggcgaacacgaggacca

SEQ ID NO: 58880 - RNA, 71 nt, Homo sapiens
aggcgcaggacacacagagaggaagaagagcaccggcgacaaaggacagccaccccgacacccgacaaagg

SEQ ID NO: 58881 - RNA, 80 nt, Homo sapiens
gcagaaagggcgaccaccaaaaaaacgggaaacagcgcccccgaaccacgggaggcacggccgagagacacgaagacagg

SEQ ID NO: 58882 - RNA, 69 nt, Homo sapiens
cacgagcaaacaagcccacaaacagaggcagggggaaacagggacgacagaaaaaaaaaagccggggcc

SEQ ID NO: 58883 - RNA, 74 nt, Homo sapiens
caggcaaaccccgccagaggcagcagggccaaccagagcgaggccgaagacccagaggaccccagcaccacaga

SEQ ID NO: 58884 - RNA, 56 nt, Homo sapiens
ggacggggagaggggagcgccggggcggcccaggcgagcggaacagcagaccagag

SEQ ID NO: 58885 - RNA, 85 nt, Homo sapiens
ggagggcggagacaacagaaacagaaacgagggaaacaggggcgaaagacggaaaggcccagaggacgaccgccgaagccacgac

SEQ ID NO: 58886 - RNA, 78 nt, Homo sapiens
cgagaaagccccgggagaagcagcgccgcccggggcagaccaggcaggcgggacaagggcgcaccggggcgcagcgag

SEQ ID NO: 58887 - RNA, 54 nt, Homo sapiens
gccagagcggaagccaaaggcaacgacaagaaccggaagcccagccagggacaa

SEQ ID NO: 58888 - RNA, 71 nt, Homo sapiens
cagggcggcaaagggccacaggagaaaacaaagaggcgaaacacccagaagcaagcgaaacccagggaaac

SEQ ID NO: 58889 - RNA, 82 nt, Homo sapiens
aagcacacacccgaaggagggggccacgcggaaaaagaagagaaacgcccaggccaaagaagagaacggggcacacagacac

SEQ ID NO: 58890 - RNA, 68 nt, Homo sapiens
ggcacaaacaagcaacgagggcgccaacggggagaaggaggcacaagaaggaccccggacacccaacc

SEQ ID NO: 58891 - RNA, 65 nt, Homo sapiens
aaagcccaccgggcaggcgagaccagcaccaagggaaacagaaccgaagccggaccggggcccag

SEQ ID NO: 58892 - RNA, 79 nt, Homo sapiens
gagagcgccacccgggacacagcgccaccccgagcagcggggaagcgggagaaacccacaaggccgcacggacagccgg

SEQ ID NO: 58893 - RNA, 75 nt, Homo sapiens
gggccagcaaacacagcaagagcaaaagcccgggaaaggaaacaggaacacgaaagaggaaaaacgcacaagaaa

SEQ ID NO: 58894 - RNA, 84 nt, Homo sapiens
cccaaacccaaagggccggagagccaggcgaggcgcacacaaaggaacgccacgcccgacgagcaaaggcagaggcgccaagac

SEQ ID NO: 58895 - RNA, 80 nt, Homo sapiens
ccgcgcacacgccgggacgcgacgccagcacgacccaccgcacgcagaagcggacagagcagcccacccaggcggaggaa

SEQ ID NO: 58896 - RNA, 62 nt, Homo sapiens
caggaagcagagggcagggggcaaacaagccgaccggaaaaaggagcagagagaacgggaca

SEQ ID NO: 58897 - RNA, 74 nt, Homo sapiens
ggccgccccggagcccgacgcggcaagcaggaaagcagcacggaagaaaaaacaaagaaaccgcacaagaagag

SEQ ID NO: 58898 - RNA, 85 nt, Homo sapiens
cgcggacccggagccgcacaaaccagggccgccagaagccagaaagacaacaaaggcgcaagcacaaacaagccgaaaaagggaa

SEQ ID NO: 58899 - RNA, 71 nt, Homo sapiens
aggaaggacacaggcagaaccgcacggccaagcccacacagaggaaaccgggagagagacagaaggcgaaa

SEQ ID NO: 58900 - RNA, 67 nt, Homo sapiens
agacacccgccgacgggcagcacacccaccgagccgagaggggaaaggagaagcagcgagggcagga

SEQ ID NO: 58901 - RNA, 66 nt, Homo sapiens
aggaaggccgcagcccagcgagcgccacagggccggccgcggcggaaggacacggcaaagagaccc

SEQ ID NO: 58902 - RNA, 78 nt, Homo sapiens
ccaggccagccgcagccgggggaggggcgccggaggacaccacagccggaaacgaaacagcgcagccaggaacaggac

SEQ ID NO: 58903 - RNA, 80 nt, Homo sapiens
agagagccgcccccccggagccgagagaggccggcccccacccggacaggcaagacaggccaccacgggcacgcggaagc

SEQ ID NO: 58904 - RNA, 69 nt, Homo sapiens
gcgcggcgcggggaccgcggcccgggaagacagccagcaagggcgaagaccaggagcaacggaaacccc

SEQ ID NO: 58905 - RNA, 70 nt, Homo sapiens
agaggaacagaacgcaagcaaaagcgaggaaaaggagcagccagggaacaagccgcaagaccgaaaaccc

SEQ ID NO: 58906 - RNA, 72 nt, Homo sapiens
agcagagcacccccaaagacagagaagaaagcagagacaggaaggaggcgccagggagcgggaaaggccgag

SEQ ID NO: 58907 - RNA, 82 nt, Homo sapiens
gcgggcggcgcggccgcgccagacagaaccacgggcggcggcccaccaccgcccgcgagaacgcaaccgggccggaaaagcc

SEQ ID NO: 58908 - RNA, 77 nt, Homo sapiens
cccaaaaccagccgacaaagagggggcccaagaagcaagggagaacagagcaaccaccaaagagagaggggaaagcc

SEQ ID NO: 58909 - RNA, 66 nt, Homo sapiens
gaccagagaagcagaacgcaggaggagaacgacagggcaccaccggacccagcaccaaaaaagaac

SEQ ID NO: 58910 - RNA, 76 nt, Homo sapiens
aggggacggcagccccaggccgccaggacggcacgaaaagaagacagaacggccagggccaacaccggagcagcgc

SEQ ID NO: 58911 - RNA, 74 nt, Homo sapiens
gcaacagggaacgccgcgcagagcccagcccgggaacagcggcccacccagagacacccaggaaaccccacagc

SEQ ID NO: 58912 - RNA, 73 nt, Homo sapiens
gagcccaggaagcgcagacacaggggcaccaccgcaccaccccggaaaggcagccggccggcccagagaagac

SEQ ID NO: 58913 - RNA, 92 nt, Homo sapiens
cgaggacggggcggacgaggccgaggcagagacaccagcgcgaagcgagccaagagaaggcaccggccaaagggggcgaccgggacaggacg

SEQ ID NO: 58914 - RNA, 82 nt, Homo sapiens
ggcggacgcagagacaggggcaggaccggaaggaacaaaggagaaggggacagggagagagacaggcgacgagagcacgggg

SEQ ID NO: 58915 - RNA, 96 nt, Homo sapiens
gagcggagagaaggccggcgggggaggaaaacggggacgcacaaaaaggccggcgcggcccagcaagccgaaagcagaagccacggggcgggcggg

SEQ ID NO: 58916 - RNA, 45 nt, Homo sapiens
cagcggagccagaaagcaggggcccagccagggcagaggaggagc

SEQ ID NO: 58917 - RNA, 87 nt, Homo sapiens
gcgggggggagagccacgacgccgggaccgggaccgccgccgccgccgccaccaggaggagcggggggaggggcgaacggccgcccc

SEQ ID NO: 58918 - RNA, 57 nt, Homo sapiens
aaacacaaggaaaacgcagcagaccggagaaaagcccaaggacaaaccggcgaccac

SEQ ID NO: 58919 - RNA, 85 nt, Homo sapiens
ccggcgccgcgccaccccgggagcagaaggaccgaacccaggagcccgcacgggcgggggggggcacccccaaaggaagggcccc

SEQ ID NO: 58920 - RNA, 66 nt, Homo sapiens
ggggccccgggcagacccggccggacaaccgcgacaggaaccccagagcccagcagaccaggcccc

SEQ ID NO: 58921 - RNA, 77 nt, Homo sapiens
cagacaggagaaagaagacagccacagaaagcccggaacagcgcgacagagggagaccccaagacgaccaggagaac

SEQ ID NO: 58922 - RNA, 70 nt, Homo sapiens
caaaccagcaagagaggaaaagacagaccaaagggaccaaaccacagcaaaaacaccaggaaagacaacg

SEQ ID NO: 58923 - RNA, 83 nt, Homo sapiens
ccggagcccgagccgcgggaagaggcggcgccgccacccccccccagcagcgagcgacgcgcccacggaggaggcgggggccc

SEQ ID NO: 58924 - RNA, 77 nt, Homo sapiens
caggcagagcagcagagcagggggaacgccagccgcacagaaacggcgaggaaagagaggagccccggaaagaaaag

SEQ ID NO: 58925 - RNA, 74 nt, Homo sapiens
aaaaccagggcccacagaggaggcaccaaccagcggacacacggaaaagggacgggaaaagccgagaaagagaa

SEQ ID NO: 58926 - RNA, 54 nt, Homo sapiens
gaaaagcggacagccaagcaccacaggaaggaaggacccgcgcgaaggaagacc

SEQ ID NO: 58927 - RNA, 71 nt, Homo sapiens
ccggccacaagaccagcacaaggacaggccaagagcaaaaaaaagagcacaggaggcaaccaaagaaccca

SEQ ID NO: 58928 - RNA, 82 nt, Homo sapiens
cagaagaagggaaggcgcgaggaggaaaggaggacgagagaccacaagcgaaccaaaggcagagcggcgaacagaaaaagaa

SEQ ID NO: 58929 - RNA, 77 nt, Homo sapiens
acaaaaccggaagaggccgaagaacgcccaacaccgaagaagcaggcacaccccccacaccagaaaaaaccaacaac

SEQ ID NO: 58930 - RNA, 84 nt, Homo sapiens
caacagcgggggcccgagggaggcaaggacagcaggggaccggaggacccccaacgccccacagaggaggggcggcaggccacg

SEQ ID NO: 58931 - RNA, 61 nt, Homo sapiens
gaagaggcggacggaggagcaggcgagaagagaaggcaaggagagagacaccacacaaaaa

SEQ ID NO: 58932 - RNA, 75 nt, Homo sapiens
cgcgaggcggaagcgccgccgggcggcggacagaagaggaccagagaagacacacaacaaccccacggagcccca

SEQ ID NO: 58933 - RNA, 86 nt, Homo sapiens
ggcggccgccccgcagagggcgcagcggcggagaagggaccgcacgcccagaacggaagaagcgggaaccagaggacccccccgga

SEQ ID NO: 58934 - RNA, 83 nt, Homo sapiens
aaaagacccggggccggcccgcaaggcgcccccccagagagccagaaagaaaaggggggccggaggagagcagaggaggccgg

SEQ ID NO: 58935 - RNA, 78 nt, Homo sapiens
aagacaacaaccagccgaacacccaagcaaacagaagagagcacccacaggaaaccgaacagggaagggaaccccgcc

SEQ ID NO: 58936 - RNA, 82 nt, Homo sapiens
gccacgaagcaacaccgagaagcaacagaccccgaccccaagcagcagagagaaacaagaaagaaaggaaacggcacaagag

SEQ ID NO: 58937 - RNA, 85 nt, Homo sapiens
ggcgcaggacgggcacagcagagaccaaaggcagggcaaggaaacggccacaagagaaggagcaagaagagaaaaacaaagcaca

SEQ ID NO: 58938 - RNA, 71 nt, Homo sapiens
cgcggcgggccggcggcgcggcccaacaacaacagaagagaagagaaagaaggggacgacacagcagaaaa

SEQ ID NO: 58939 - RNA, 64 nt, Homo sapiens
gccaggggagcccagcggcgcgccggcagcaggaggccgccggggaggcggggcgccaggccag

SEQ ID NO: 58940 - RNA, 75 nt, Homo sapiens
gccgcggcccccggcacaggcagcggaggagcccgaccgacccggagagaacagaaagaccaagcagaagagagg

SEQ ID NO: 58941 - RNA, 64 nt, Homo sapiens
cagacccccaagaaggacaagccccggcaccagaagaaggggcaccgaagacagaacgagaagg

SEQ ID NO: 58942 - RNA, 76 nt, Homo sapiens
cgccaggcagaaggccccccgaacagcaggcgccaccagcccggagaaaaaggcacaaacccagcacagagaagac

SEQ ID NO: 58943 - RNA, 71 nt, Homo sapiens
acgacaccaaacaacaaggggggaaaggacaaagaaccgaggaccccaagaacaacagagaaaggccaaaa

SEQ ID NO: 58944 - RNA, 71 nt, Homo sapiens
caaggaagcggcaaagccagaaagaggaggccagagcgggggggcagcagccaggacgaaggaaaaaggaa

SEQ ID NO: 58945 - RNA, 88 nt, Homo sapiens
ccgagcgcaaggacagcgcgaggccgcgcagcccagcgcagccaggcgaccagacgaggggagacggacgggggagagaggccaaacg

SEQ ID NO: 58946 - RNA, 66 nt, Homo sapiens
agagcgcggagccgcgcccccggaggacaccccaaggcaccggcgggcgacgagaacaaccccgag

SEQ ID NO: 58947 - RNA, 76 nt, Homo sapiens
agccccgaagagcgggaacaggaagccaggagggaagcccagaagacgcacaagagagaccgaccaaaccccggaa

SEQ ID NO: 58948 - RNA, 53 nt, Homo sapiens
acaacaggccacccaaccgaaaacggaccagaacccagggagccaagaagaac

SEQ ID NO: 58949 - RNA, 81 nt, Homo sapiens
ggcgagggcccgccaagggcgcgaggggcgcacggcgaccggggagaagcacgcagaaaaagaggcaacaagggacaaccc

SEQ ID NO: 58950 - RNA, 73 nt, Homo sapiens
cagcagcagacccaagaagacagaccccgaggagacgggacacacaggaagacgaacacggaacgggcgagaa

SEQ ID NO: 58951 - RNA, 77 nt, Homo sapiens
ggacccacggggccaagccgcgccggagcggagcgcgggcgccggggagccagagacaggaaaaagccgagaggcac

SEQ ID NO: 58952 - RNA, 76 nt, Homo sapiens
aagccaccagagcggcccccagcaccacagcccgcagccccgccagccacccccagggccccccaggaccgcgcac

SEQ ID NO: 58953 - RNA, 73 nt, Homo sapiens
cacaggaaaccagcggcgagagagagcaacgaagccgcggcaaggccgccagagaagcccccagcggcacccg

SEQ ID NO: 58954 - RNA, 57 nt, Homo sapiens
cccgagcacagagacgaagaggaccaggagcaaacagaaaagagcccggaacgccag

SEQ ID NO: 58955 - RNA, 47 nt, Homo sapiens
ccgaggggaaaggagcgacaggaccaggagaacacagcgaaaaaggg

SEQ ID NO: 58956 - RNA, 73 nt, Homo sapiens
aaaggcgacacagaaggaacagcagacaagacgagcccaccacggacagcaaacaggaaaggcccgagccaaa

SEQ ID NO: 58957 - RNA, 80 nt, Homo sapiens
gcagcggaaggggaaaccgagggaggccagcggccgcaccgaggcgagcaggagcagggaacaggaaacgaacccaacag

SEQ ID NO: 58958 - RNA, 63 nt, Homo sapiens
ccagcaaacggacccggccagggcgacagacaagaaggcacagaaagacggggagagaaacag

SEQ ID NO: 58959 - RNA, 112 nt, Homo sapiens
gacgcgcagcaggcggggaggacgaggggcccgggcccagagcggaagacaagacggacccaaagacaggaccacgcaccagcagagaaggaaagcaaaccgaagcaggcgg

SEQ ID NO: 58960 - RNA, 69 nt, Homo sapiens
ggagacagcccaaaacccggaagagcgccccaggagaaacaacgaaccccaagcccgacggggacccac

SEQ ID NO: 58961 - RNA, 69 nt, Homo sapiens
gaagaaccgcagccgagcggggccggccacagcacccgacagagcccagacaccagaacgcaaggaacc

SEQ ID NO: 58962 - RNA, 82 nt, Homo sapiens
aggagcaggcgagaagagaagggcccgacccaggcaagcgagcaggcgagcaggagcccacagccgagcagcggcccagagc

SEQ ID NO: 58963 - RNA, 83 nt, Homo sapiens
gagcaaaaggaagcaacccagaagagcgaaggacccagcgaggaggcccagcgacaccaagagcaccacagaaaaccccacca

SEQ ID NO: 58964 - RNA, 58 nt, Homo sapiens
aaagaaccgcagacagccccacccggagacacgcccgagccaacccacagcccacgga

SEQ ID NO: 58965 - RNA, 83 nt, Homo sapiens
gggcgcccacacccaaggggcacgcgggcggcggccgaggagagcaccgggaaagccccgcgccgcccacccccgccggcgcc

SEQ ID NO: 58966 - RNA, 71 nt, Homo sapiens
ggaaaacaaggcaacagcaggcggcgcgagaaaggaaaaggcagagaaagaaacccggaacaacggcaaag

SEQ ID NO: 58967 - RNA, 80 nt, Homo sapiens
ccccgaccgggcgccagcccccggacagccgcccgggggcggaagcagcagagggaggggcaaacacgcagcgaggcccg

SEQ ID NO: 58968 - RNA, 82 nt, Homo sapiens
caaaaaaggcaaagaggaacgcggccacgagacgggggggccagaaccgggaccagaacgagacaaggaggaccacaggaga

SEQ ID NO: 58969 - RNA, 51 nt, Homo sapiens
ccgacagccgcagaacgacaaggcacgaggcgcggcgaccaccacagcaga

SEQ ID NO: 58970 - RNA, 65 nt, Homo sapiens
gggaggggaaacgaagcgcacgaaacaccaagggggaaggcgaagaagagggcaacccgaagaac

SEQ ID NO: 58971 - RNA, 80 nt, Homo sapiens
accgccccccgcaccgccccggcggcccgcgcacccccgccgcaaggcccagggccgcaccgcagcaaccgagaagaagg

SEQ ID NO: 58972 - RNA, 49 nt, Homo sapiens
cgcaacaccagcacagaggccgagcaaccgggacaggcccagaagagcg

SEQ ID NO: 58973 - RNA, 72 nt, Homo sapiens
cccagcagcaaacaaccacccaacacgccacgggcaccccgacagcaacccgagcccggggccaagaggaaa

SEQ ID NO: 58974 - RNA, 73 nt, Homo sapiens
gaaccaagagagcgggacacaaaggaaagacaaaacggagcaagaagaaagagaaaaagcaacggccagacaa

SEQ ID NO: 58975 - RNA, 74 nt, Homo sapiens
aagcccgccgcaccagcaagcgcggggggacacaccggaagacgcaacacaggccgcgagggggcaccgaagag

SEQ ID NO: 58976 - RNA, 66 nt, Homo sapiens
caggcgcaaagcaagaaagccacgaagaccagaacggaggagggccgaaaaccccggcaagcagca

SEQ ID NO: 58977 - RNA, 81 nt, Homo sapiens
acaacggggagagccagcacagaggccacaccaccgaagcggcagaagcagcgcggaggaagaagacgcgaccagggacga

SEQ ID NO: 58978 - RNA, 80 nt, Homo sapiens
caggagccccaggaggggggaggcgcaccaaccagggagccaaggagagagaggagaagcgcgaaggcccggccagagga

SEQ ID NO: 58979 - RNA, 81 nt, Homo sapiens
caccccaaagcaaacacccagaagaaccgaccgcccagggacccggcagcaaccccaacaaacgccagaggcagccccccc

SEQ ID NO: 58980 - RNA, 79 nt, Homo sapiens
ggacgcgcacagcccccacgcggaaagaagacccgccggcaccggcccgcaggaccgcggaggcaggagaggaagacca

SEQ ID NO: 58981 - RNA, 77 nt, Homo sapiens
cgcgagagaggagagggcagacggacaagagcgcggaacaggacgccccgagggaagaggacaggcccacggcggca

SEQ ID NO: 58982 - RNA, 56 nt, Homo sapiens
acaggggggccggccgcgcagccggaaggagggccccggagcagccacaccaccga

SEQ ID NO: 58983 - RNA, 103 nt, Homo sapiens
cggcaaaagcccgccgccccggggacaagaaacagagcaaaaaccggaaaggcaaaccagacagaaccgacggggaaaggaaagcagcccgaaaagaaggagg

SEQ ID NO: 58984 - RNA, 78 nt, Homo sapiens
gaagcgaccaaagcgccgaggaccggcaacagggcggcggggaaaagagagaacggacgagaccaacgcggaaaccag

SEQ ID NO: 58985 - RNA, 74 nt, Homo sapiens
caaccaagaggaaagggggccagcaacccagacgcccacaggacaagaagaagacggcacgggacccccagcac

SEQ ID NO: 58986 - RNA, 78 nt, Homo sapiens
ccccaccgcccgggcccgaggaggcagccaagccgagccgccacccggcgaacacagaaccggagagacacacagcag

SEQ ID NO: 58987 - RNA, 82 nt, Homo sapiens
gcgcgcccccaggaggcgagcccgcggaaccgcagccagggcagagaacacacagaagagaaaaaccgaacacaggacacac

SEQ ID NO: 58988 - RNA, 79 nt, Homo sapiens
ggaggagccgcagccaaaagggagccagggacacagagcagaagcgcggacacccagaagaaccgaacggaaggggagc

SEQ ID NO: 58989 - RNA, 61 nt, Homo sapiens
gacggggaggaggcgcgggccgaggaggcacgaaggcagccccggggaacccacgcgaccg

SEQ ID NO: 58990 - RNA, 37 nt, Homo sapiens
gcccgggacagaggggacgggggacgcggaagagaca

SEQ ID NO: 58991 - RNA, 80 nt, Homo sapiens
gagaccaagaggaagagcaaggagaggcccagcaaacaaaggcaggaagagaaaaggacccaaccgcggcacacagaaaa

SEQ ID NO: 58992 - RNA, 57 nt, Homo sapiens
cgcgacggccccgggaaggaggcgcgacccggggcgcccccgcagccgagggccaaa

SEQ ID NO: 58993 - RNA, 74 nt, Homo sapiens
cccgggagacgcccgcgccgccgggaaacaacacgaggaggacggcacaaaaagcaccagcggggaggaacaac

SEQ ID NO: 58994 - RNA, 61 nt, Homo sapiens
agaacaggacggcgagagaccggaggggaggcagcagcggcacccgagagagaagggcccg

SEQ ID NO: 58995 - RNA, 80 nt, Homo sapiens
cagcgcgcgcacgccgagcccacgacggacgccgcccgaacacacccgagcccaccgccgcagcacacccccaaagcgcc

SEQ ID NO: 58996 - RNA, 56 nt, Homo sapiens
ccgcacgagaacagagacaccgcaggagaaggaccaaaaggaacgagacggaagag

SEQ ID NO: 58997 - RNA, 65 nt, Homo sapiens
ggccagcggccgcgcacccccggccggaggcaccagcgacaaggcacgaggcgcggcgaccacca

SEQ ID NO: 58998 - RNA, 84 nt, Homo sapiens
cgccccgacagagacggaggagccggggccaggcaggaagagagaagggcacagaccaagacaacgaaccccggccaggacagg

SEQ ID NO: 58999 - RNA, 74 nt, Homo sapiens
agaggcgagccgcgagagggccggcaggcccgggaaggggcagggacagacaggggccacaaaacccaggcgcg

SEQ ID NO: 59000 - RNA, 74 nt, Homo sapiens
caggcagaaggccccccgaacagcaggcgccaccagcccggagaccaaaaacgacagaagacgaggcgccaaga

SEQ ID NO: 59001 - RNA, 54 nt, Homo sapiens
ggaagcggcaaaccaaaagagcaacgcgggccaaaagcagagaaccaaagaaca

SEQ ID NO: 59002 - RNA, 59 nt, Homo sapiens
gcgcgccaggccgacagccgcggccgggcccgagaggcagcgagaagaaaaagaagaga

SEQ ID NO: 59003 - RNA, 77 nt, Homo sapiens
ggagccgagaacacgggccaaccgcgcgcgaaagcgcgcaagaccagaaaacgaccacaagaaggcacacggaaaga

SEQ ID NO: 59004 - RNA, 74 nt, Homo sapiens
accggccggcccagcgggaggaaagcgcccggcgaccccaccaacaacgaacgcggcaggcgcacaaggaagga

SEQ ID NO: 59005 - RNA, 85 nt, Homo sapiens
gaaggccaggcgggggcccgaacccggcgacggcagggcccacggcacggccccgcggcgcgcagaggagccgcccgcacccagg

SEQ ID NO: 59006 - RNA, 81 nt, Homo sapiens
gaccacgcacacgcagccagcgcgggaggccaccgccccaccagcaggcaacgccacagaccgccagcgccaggacacggg

SEQ ID NO: 59007 - RNA, 75 nt, Homo sapiens
caacaacccaccaggcacccggaccaagaaaacggggaaaaacacagagaaggccgcagagcagacggaagaccg

SEQ ID NO: 59008 - RNA, 78 nt, Homo sapiens
gccggaggggcaagaaggagacaaggagcgaaccgagccgacagagagaaacgagacggaacccaggcgccgcacaac

SEQ ID NO: 59009 - RNA, 75 nt, Homo sapiens
cgggcggggaccccggcccggcagcagcgacgggcggaccccaaggagaacagggggggcaggcgagcggggggc

SEQ ID NO: 59010 - RNA, 78 nt, Homo sapiens
aggcgcccacgggggcccgcggcgcccggcgcgaaggggaacaacagcaccaccaaccgggagcgaccggagagagcc

SEQ ID NO: 59011 - RNA, 79 nt, Homo sapiens
aggaccccggaagccagaaagagcaagcccccaacaccagcaaccccgggggagacaagccggacggggcagcgggcag

SEQ ID NO: 59012 - RNA, 62 nt, Homo sapiens
gaggccgagggcaaggcgccagaccaaggaagccagagaagggaccagacgacgagcggggc

SEQ ID NO: 59013 - RNA, 85 nt, Homo sapiens
cggggcggcggcgccggcgcgggcccgggccccgagcgcccgaacagggagcaggcgcagagagcaggcggccagcgggggggac

SEQ ID NO: 59014 - RNA, 84 nt, Homo sapiens
cccggacccggacaggagcccaagggggaagggacacggaggaccgaggaagaaggcacgaccgacacaagaagcgcgggcccg

SEQ ID NO: 59015 - RNA, 73 nt, Homo sapiens
caacaaaaccggagaagcaaaagaaacccagaagacccagagaacacaccaaggaggaaagacccagcgcacg

SEQ ID NO: 59016 - RNA, 80 nt, Homo sapiens
gaaagagaccacagagggccagccaaggcaacaagccaaccaccacggccagcgacaggcgagacagacggagaaaggcg

SEQ ID NO: 59017 - RNA, 70 nt, Homo sapiens
ggcgccggggcagcagacgggcgggaagcggggaaaggaaaacaccagcacaccaaagaccggggccacc

SEQ ID NO: 59018 - RNA, 34 nt, Homo sapiens
ggaacaccacgaacaaagaaccgccgcacccagg

SEQ ID NO: 59019 - RNA, 73 nt, Homo sapiens
cagcagagaagaacagcaggaaggccagacgagagaaacgacaccaagaacgagcgcgaaggacaagcgagag

SEQ ID NO: 59020 - RNA, 87 nt, Homo sapiens
cacgccagccgcaccagccgcccaagccgcacagccgcggcggcagcagcaggagagacagagaacgcagaggacaagcagccaacg

SEQ ID NO: 59021 - RNA, 71 nt, Homo sapiens
aaaaccgagaggaacaacaccaccacagccaagggcagagagggggcccagagaaaaggcggggccagcgc

SEQ ID NO: 59022 - RNA, 49 nt, Homo sapiens
aagaaaccagcaagcagaaagagaaagggcaccaggcgcaccggaccca

SEQ ID NO: 59023 - RNA, 66 nt, Homo sapiens
caaagaccaggagagggcggccaagcccggaaagagcacagaaggaaaagaacgcgcgagaagggg

SEQ ID NO: 59024 - RNA, 52 nt, Homo sapiens
gcgccgagggcgaggcggacgcgcggcgcgcagccagcaggcagaacacagg

SEQ ID NO: 59025 - RNA, 75 nt, Homo sapiens
aacccggggagaccccgacgggaggccgaggacacagccgagaaagacaaaagaccccacaagacagacaacaag

SEQ ID NO: 59026 - RNA, 73 nt, Homo sapiens
gggacaaaggcgcaagcgagaggaaacgggccccaaggcgaccgggcacggggccaaaaaggcacgagggaac

SEQ ID NO: 59027 - RNA, 82 nt, Homo sapiens
aggccagaccccgggagcccagccaccacagacaggacgagacaagggcaacgagacacccagcggcccggccccgccggga

SEQ ID NO: 59028 - RNA, 84 nt, Homo sapiens
accgccgacccgcccaccacgccagcagcgcgacggcaggccccccagaccggccaggggacaggagacgagacgacgaaggcg

SEQ ID NO: 59029 - RNA, 59 nt, Homo sapiens
ccggccggagcgggaggcgggccagcgacaaaaagaggcgccggcggcagagcggggag

SEQ ID NO: 59030 - RNA, 63 nt, Homo sapiens
aaagaggaggcagaagagacgaaggcgcccaagacgacagagaacacgagaggaggaccaccc

SEQ ID NO: 59031 - RNA, 78 nt, Homo sapiens
agaacacacaccgaagcaacccaaagcacgaacaagcaagcaacacaggaaagggaggaagaagaagaaaaaaaaacg

SEQ ID NO: 59032 - RNA, 71 nt, Homo sapiens
accgagacccgcagcgagccaacggcgaccaagcgggagacgagagggccccaaagggaccagggacgcgc

SEQ ID NO: 59033 - RNA, 74 nt, Homo sapiens
ccccgcagcagcagcccaaaggaagacggagcggaaccgccagaccacaagaaaagcagaagagccggagagag

SEQ ID NO: 59034 - RNA, 68 nt, Homo sapiens
aaaaaggcacgagggaacgggaaagaacagagaagggagggccgaacaggggggaacgacaaacaagg

SEQ ID NO: 59035 - RNA, 70 nt, Homo sapiens
acaccacaccaaaagagggggaacaaggccgcagccaagccggaacaggagcggcgagcccaaacgcaag

SEQ ID NO: 59036 - RNA, 72 nt, Homo sapiens
aaaccacagcgagaaaggcccccacacccggaacgacaccaggaacccaaggccagaacacagcagaaaggg

SEQ ID NO: 59037 - RNA, 72 nt, Homo sapiens
ggagaaggaaagcgcagaaaagcggggcccggccaaagaaccgacaaccaagggccccgcggaccaaggaag

SEQ ID NO: 59038 - RNA, 77 nt, Homo sapiens
cgccaggcccagacgccaacgcaggagcacccaggacccagcagccagcgaagccccaaggaagccgggacgcccac

SEQ ID NO: 59039 - RNA, 81 nt, Homo sapiens
gcgagggacaaaaggcgaagacgccaagaccacgaagggggagagacaaccagagcggaaagggagaaaagcccccagaaa

SEQ ID NO: 59040 - RNA, 87 nt, Homo sapiens
cgaagccccggagaaccacccggaggagacggggcagacaacggagcccgggagagcagcaccagcagaagagggcccgaccacggc

SEQ ID NO: 59041 - RNA, 82 nt, Homo sapiens
ggagggcacaaggccaggcccaagagccaggcaagcaacaaggagccggggcaacggacgagagcacaaagaccagcagagc

SEQ ID NO: 59042 - RNA, 75 nt, Homo sapiens
agcccccacccccccgccaggccccagagacaccaggagggaaagcccgaagagagaaacaagccaacaggagcg

SEQ ID NO: 59043 - RNA, 63 nt, Homo sapiens
ggaagcaccaaaggccggaggcaccacaacacgacaaaaagcgagcccgagaacacagggcgc

SEQ ID NO: 59044 - RNA, 71 nt, Homo sapiens
caccccaagccacagggccgccgacagcagagacaggagcaccaagcccaagaagccgccaggcaggccag

SEQ ID NO: 59045 - RNA, 74 nt, Homo sapiens
agcaccaaacacgcacagacagggcagaccgccagcagcacagcaagccacagagagggccggcagggcgggca

SEQ ID NO: 59046 - RNA, 86 nt, Homo sapiens
agggagcggaggcggcgcccccggcggccacgacgcgcggccccgccgcgaggagcgcagaggcggagacagaggggccaacccgc

SEQ ID NO: 59047 - RNA, 55 nt, Homo sapiens
aaagaacgaggggccacggaccaaccgagagcaccaggaaacgaaaagagacagc

SEQ ID NO: 59048 - RNA, 80 nt, Homo sapiens
cggcggcgcggccggcagccggcagcgcagcggcacccacagcaggacccaggagggacccaggacccaagaaaacccgc

SEQ ID NO: 59049 - RNA, 79 nt, Homo sapiens
gggaggggacggcgccgcacgaggaccaccaggcacggcacggggcagagcaggccccccagggcgcgacacagagcgg

SEQ ID NO: 59050 - RNA, 79 nt, Homo sapiens
ggcagcgccccagcaaaagcccccagccggggccgggcccccgggccggcgaagagaccgcggaccgcccccgcgcccc

SEQ ID NO: 59051 - RNA, 74 nt, Homo sapiens
gaagacgggagaaaggagaacgggcgacggagccgggaaaggacaagaaaacccaggaacgagaaaaagcgaga

SEQ ID NO: 59052 - RNA, 64 nt, Homo sapiens
aaacggaccagcgaccgggcagaggaaagcggacgaaccccgggcgcggcaaagagaacgcccg

SEQ ID NO: 59053 - RNA, 76 nt, Homo sapiens
ccggggagggcaagaccaaagccgaacagacgggcgacacgaagggaaaaagggcccccaagccggcaggggaacg

SEQ ID NO: 59054 - RNA, 54 nt, Homo sapiens
gacaagacagcgaagggagacaggcgaacacgaaagacaccccaaacgcccagg

SEQ ID NO: 59055 - RNA, 73 nt, Homo sapiens
ggaggagaagacaagacaacaggaccaggaaccagggaagaaggaggaaggaccgagcgcaggaaccaggcca

SEQ ID NO: 59056 - RNA, 76 nt, Homo sapiens
aaagaaaagaaacaccgaaccgccacccaggcccaagaagggcgccaacccccaacccacgcgggcagccagaacc

SEQ ID NO: 59057 - RNA, 74 nt, Homo sapiens
agagaccgcaccaaagacaaggaggaccaaccacaggggacccacacacaacaaaccgagacccgcagagacac

SEQ ID NO: 59058 - RNA, 55 nt, Homo sapiens
acgaccacaacaggggcgcgaggccgggcagacgcccgaaccggcagaaaccgga

SEQ ID NO: 59059 - RNA, 56 nt, Homo sapiens
gagaaaaggaggaaaaggcaccggggacaaacacgcagcgaaggagccaaccagga

SEQ ID NO: 59060 - RNA, 61 nt, Homo sapiens
gggcgcgggggccgcgcgaagacaggaccagggcacggagacgaaaaggggaaaggagaaa

SEQ ID NO: 59061 - RNA, 75 nt, Homo sapiens
gaaacgcagcgcgcccccaggaggcgagcccgcggaaccgcagccaggccacagagcgaaaaaaaccaacacgca

SEQ ID NO: 59062 - RNA, 53 nt, Homo sapiens
gccacggccccaccgcaggcaccaccacaagggcggacccagaacgccggagg

SEQ ID NO: 59063 - RNA, 83 nt, Homo sapiens
gacgccagaagaacgaggaggagaaggccaggagacaagaagcaaaaaggaagaaccgggagaacgcagaagaaagaagaaga

SEQ ID NO: 59064 - RNA, 55 nt, Homo sapiens
ggcgagagggagccgcagcgagcagaccaagagaagacagaacacacgacaccag

SEQ ID NO: 59065 - RNA, 71 nt, Homo sapiens
ggagcccgcagaccgcagaaggccggagacaccagcaggcggcaaggaagaggcccggaaagggaaaaacc

SEQ ID NO: 59066 - RNA, 75 nt, Homo sapiens
ggcccagaaacgggccgcgccaccaagccaacaacacgccacggcgaggccacacgcccacggagcacgcccggc

SEQ ID NO: 59067 - RNA, 74 nt, Homo sapiens
gccagaaggaagcaacagacgggaccgaaagacgcaaaccgacaccagcgacacaagcgcgagggaaccacaga

SEQ ID NO: 59068 - RNA, 39 nt, Homo sapiens
ccgccagggaagaaacgggggaccccagcggaacacacc

SEQ ID NO: 59069 - RNA, 83 nt, Homo sapiens
aaggagaagagcggaggaccgcggcgggaacagcaggccacagagcgcgcggccaagacaagagccagaccaggaccaggcgg

SEQ ID NO: 59070 - RNA, 79 nt, Homo sapiens
ggcagggaagagccgcacagaggcaaaaagagcaccacaagcaaggaacaaaagaaagcaaggaaccaaaaaaacaaag

SEQ ID NO: 59071 - RNA, 76 nt, Homo sapiens
aaaagaaggacgggggcacgaagcagggccgacacaagcccgcaggagacggaagcggaagcacacgccagacgcc

SEQ ID NO: 59072 - RNA, 74 nt, Homo sapiens
ggccgagcaaggagagaacgcgagggaagaaaggccgggcgccgccgaaccagcaaagacagaaagagcacaag

SEQ ID NO: 59073 - RNA, 82 nt, Homo sapiens
gccgcaccagccgcccaagccgcacagccgcggcggcagcagcaggagagggaagcaaacaggaggaggcgcaccaggaagg

SEQ ID NO: 59074 - RNA, 35 nt, Homo sapiens
ccgagagcaggacaagcccccagccggcccgccca

SEQ ID NO: 59075 - RNA, 88 nt, Homo sapiens
acgcaacccagaccacccacaggagcaacagagccccacggaaacacggcgagagggaccagcagagcaacagggcaaggccacaggc

SEQ ID NO: 59076 - RNA, 78 nt, Homo sapiens
ggaaaaggaaccacccaagagaaagggaccaagaaaggcccagggaccaaagcccggacaaggcccgagcaccaggac

SEQ ID NO: 59077 - RNA, 77 nt, Homo sapiens
gacaacggcgaccagcccaccgaaaggagagaagcagggggagcagggcgggaagacagaaaaacaaagaaagacag

SEQ ID NO: 59078 - RNA, 63 nt, Homo sapiens
ggagacagcgccgcagagggacaccagcaggaaaacacgggccccagaaacaaggaaagggca

SEQ ID NO: 59079 - RNA, 59 nt, Homo sapiens
ggggagaaagaaggggaaggacgcgcggggcggagaacggaaaagcaccaggaagcaga

SEQ ID NO: 59080 - RNA, 59 nt, Homo sapiens
cggcggacggggcgaggcgagcaggacccagccaggcacagggaggcaacaggaccagg

SEQ ID NO: 59081 - RNA, 79 nt, Homo sapiens
gaagccaggacccgggccccgccgcccccgaccgaagagacagggcgcaccagcccaggcagacaagccacgcaaccca

SEQ ID NO: 59082 - RNA, 62 nt, Homo sapiens
caccccaaaagcaccggccccgcacagcaaaccaggcagcagggacagagcccagaaaccag

SEQ ID NO: 59083 - RNA, 72 nt, Homo sapiens
cgcgacgggaacgcgccacggcgcgagcccagaggaaccaaggaagagaaaccagagcgaccaagccagaag

SEQ ID NO: 59084 - RNA, 70 nt, Homo sapiens
ccggccccccgcccaggcggggccgagcgacacgcagacaccacggccgccgaggacacgcggggcccgc

SEQ ID NO: 59085 - RNA, 74 nt, Homo sapiens
cggagaaggaacgagccagcagcggacacgcacacaagagagggccgggcgggaagaaaggaaagaggagaaag

SEQ ID NO: 59086 - RNA, 78 nt, Homo sapiens
acaccagcagaaggcccacagcacagggaagaaaacgccagagaagcagagcagcccggagcgaggggagaccgggga

SEQ ID NO: 59087 - RNA, 99 nt, Homo sapiens
caccaggagagcaggaagaggaaccacaagaaaacaaaagaaacgcccacagaacaccgagaaccaaggagaagcaaaggaggccggaacagaaaccgg

SEQ ID NO: 59088 - RNA, 52 nt, Homo sapiens
agcagcggaccaaggcgcggggaggggagaagaaggccgcaggacccccagc

SEQ ID NO: 59089 - RNA, 76 nt, Homo sapiens
gaaagacaaagaagcaacacagaaacggaaaaggaaccacccaagagaaagcaagcgcacgccacgggaaagagga

SEQ ID NO: 59090 - RNA, 74 nt, Homo sapiens
ggcccggccaccgccaagaccagcaggggcagcgagacacacgggcaggaccccccaggggcgggggcggagca

SEQ ID NO: 59091 - RNA, 68 nt, Homo sapiens
cgacccaaccaaagcacaaaaaacaccgaagccagaagacggaaaaaacaggaagggggagcaacaga

SEQ ID NO: 59092 - RNA, 71 nt, Homo sapiens
ccccccagggccaggcgccgccagaacgaccggagagaacagaaaaaaagcggcccgggaccaggaaagac

SEQ ID NO: 59093 - RNA, 78 nt, Homo sapiens
ccaaaccacgcacgacagagacagaccaacacccgagaccacccagggaccgaggacggccgggcaccaggaacaaag

SEQ ID NO: 59094 - RNA, 55 nt, Homo sapiens
cccggacaaccagaggcagccagcagggggaggcaagaacgccccggcaaggacg

SEQ ID NO: 59095 - RNA, 66 nt, Homo sapiens
cgccacgcgcggaaggcagcgcccagcagcgcagggccgcaagcagggggaacacccgcccagccg

SEQ ID NO: 59096 - RNA, 73 nt, Homo sapiens
gaggacggcgacggaggggacaccacgccacccaagagagagcaaaaaccgagaaccagaggcacacagacaa

SEQ ID NO: 59097 - RNA, 80 nt, Homo sapiens
ccagcaccgcggagggagcgcgcagagaaacagaaaacagccaaaaggacagggacagcaaaaaggagaaacgggcagaa

SEQ ID NO: 59098 - RNA, 84 nt, Homo sapiens
ccacggaaaaggaacagagccaaaccagaagaggagggcccagaagaaaaagaacagccacaggaagagggaacaaagaaggaa

SEQ ID NO: 59099 - RNA, 76 nt, Homo sapiens
agaagagacggaaagccaagaggcccaaggagaccacggggggaaggaagcgagacccggcgcgagaaggaacgcg

SEQ ID NO: 59100 - RNA, 67 nt, Homo sapiens
cgggaggacgacgagagaggaagcaaagcgccaaagaccaaaagaaaggaagaaaaaagacaacgaa

SEQ ID NO: 59101 - RNA, 75 nt, Homo sapiens
aaacaccaccccgacccaaaacaggacaaaccgcccagcgaaaacaggggaggaacgacagagccggaagagagc

SEQ ID NO: 59102 - RNA, 77 nt, Homo sapiens
aagccccaccaccccaaaggagcggagagagagaagggccggaccccgcacacagcgccgccaccccccgacaccgg

SEQ ID NO: 59103 - RNA, 63 nt, Homo sapiens
gcccagcccccgagcggcgggaacaggggggaggcaaagaaagaagcccggaaacgggcggaa

SEQ ID NO: 59104 - RNA, 74 nt, Homo sapiens
ccgacggaccccaccacccaccgccccccggccaagccgcgacaagggggacggacggagagacggggcaccgg

SEQ ID NO: 59105 - RNA, 45 nt, Homo sapiens
cggagccagcgcgcagaccagcggaaaagggagaacagaagaaca

SEQ ID NO: 59106 - RNA, 58 nt, Homo sapiens
gaccgccgggcccaacgcgcccacgaagagggccaggacgacggaagggaccaggccg

SEQ ID NO: 59107 - RNA, 74 nt, Homo sapiens
ggaaaaccaaccagaagacgaacaaacagcaagaaagaccacaagaccaggccgggagggcccgaacccaaagc

SEQ ID NO: 59108 - RNA, 60 nt, Homo sapiens
aaacagcaagcgaaacccgaacaaagccagaacgcaaagcagagcaaacgagcaggacag

SEQ ID NO: 59109 - RNA, 77 nt, Homo sapiens
gagggggggcgacgacgaagacagcggagaggagagcgggcggaggacgagggaggccaacagacccaacccagaag

SEQ ID NO: 59110 - RNA, 68 nt, Homo sapiens
gacgacccaacagcaagccggaaaaggagacgaagaaggaacccccacggcgaagccagcggacgggc

SEQ ID NO: 59111 - RNA, 77 nt, Homo sapiens
gagcgcgaggggaggccgggagccgaggacagaaggaaggaaagacaggaaagaacagaagaccaggccagaaggac

SEQ ID NO: 59112 - RNA, 62 nt, Homo sapiens
aaaaagaaacaaagccggcgaccagaaaaacaacgggcgaacgaagcaggagagaacaccag

SEQ ID NO: 59113 - RNA, 81 nt, Homo sapiens
cacaggacagcgccggccacccaaagcacgggggcaacagagccgacaaaaggagcccccgaaccagcgaaaagccccgcc

SEQ ID NO: 59114 - RNA, 70 nt, Homo sapiens
ggagcaaaaggcggacaggcagggaggacacgggagccagaggaaccaagcacaccacgagaggggccgg

SEQ ID NO: 59115 - RNA, 52 nt, Homo sapiens
cccagccccaggcacagaccccagcgagcggaagccgcagaaggaccggcca

SEQ ID NO: 59116 - RNA, 76 nt, Homo sapiens
agggcaccacagacaagaaagcccccacggaaggccacgagggcggaccccgagagcggagcaggcaggcagaacg

SEQ ID NO: 59117 - RNA, 80 nt, Homo sapiens
gacgaagaacagaaggcgacaaggccaagaccgccagcaaaggaagacgaggaagcgaagagggaacaccccaccgacaa

SEQ ID NO: 59118 - RNA, 80 nt, Homo sapiens
gcaccgcggagcaaaaaaagagcccgcaagaagaacagagacagcagccaaacccccaggagacgaagaaacaaaaaacc

SEQ ID NO: 59119 - RNA, 78 nt, Homo sapiens
gaaggaccgggaagggcggaacgggggacaggaaagggggcagcggaccagcgagacagacccccaggggagcccggg

SEQ ID NO: 59120 - RNA, 64 nt, Homo sapiens
cccgcccaggccaaaacaaaagaaccaggggcagcccaggaggcagcaccggggacacgcgccc

SEQ ID NO: 59121 - RNA, 72 nt, Homo sapiens
ccgggccaaaggacgaagaacccacagagacaacaggcacaaagagagaaggaacacccacagggcagacag

SEQ ID NO: 59122 - RNA, 82 nt, Homo sapiens
cggacccgggcccccccgccggccggcccgggcaccgggccggagagccgcaccgagcaggcgggcaacaacgggagaacgg

SEQ ID NO: 59123 - RNA, 73 nt, Homo sapiens
gcccagacaccacaggcgggaaaggacccaggccggcgggcggggccccggggggcggcggcgcggcgcggac

SEQ ID NO: 59124 - RNA, 79 nt, Homo sapiens
cggaaccccaaacccccagacaagaacacaacccaaacccgcccgagggagcccaggcggcaggagagcaaggggcaac

SEQ ID NO: 59125 - RNA, 75 nt, Homo sapiens
cagcaagagaaaaacccaacccgacccagggggagaagcaaagcgaaagaacaaaaacagaaaaagagcagaccc

SEQ ID NO: 59126 - RNA, 73 nt, Homo sapiens
acaagaggacagggagaaagggccccaagaaaacgggccgggggaaccagaaaagaaagaacgccaagccgac

SEQ ID NO: 59127 - RNA, 84 nt, Homo sapiens
ggggccagcgggaggggcccccgcccagccccaggaccagcaccccaaggggccgccgcacgccaacaggggaagcgaagagga

SEQ ID NO: 59128 - RNA, 36 nt, Homo sapiens
ccaagcggagggacagacagacccaacgaccccccc

SEQ ID NO: 59129 - RNA, 71 nt, Homo sapiens
aacgggagaacacgacaccggcgaggaacggcaggccagaaaggccgaggaagcgccgacagggaaaacac

SEQ ID NO: 59130 - RNA, 80 nt, Homo sapiens
ggccaaccagggaaaggagagggagggaccaggccagcgcagaagacgagaagccaggaggagaagcggcccggcaagaa

SEQ ID NO: 59131 - RNA, 77 nt, Homo sapiens
cccggccagcaacggacacgaggacccaaagacaggaccacgcaccagcagagaaggaaagcaaaccgaagcaggcg

SEQ ID NO: 59132 - RNA, 85 nt, Homo sapiens
caccaggagaccaggaaaaggccacagggcccgagagccaaaaaagagagagaacaacaggggggagaggagagaaccagaagag

SEQ ID NO: 59133 - RNA, 89 nt, Homo sapiens
ccacgcggacgcgcaaccacccgccagaacgacaaagaggagggacacacaggaagacgaacacggaacgggcgagaagaaagcagaga

SEQ ID NO: 59134 - RNA, 84 nt, Homo sapiens
gacagccagagccgcgcagcagcagagcgcgcaggcagccagaaggaaggagcagacaagggcccacaccaaagccaccagagc

SEQ ID NO: 59135 - RNA, 86 nt, Homo sapiens
ggagccggccagcgcaccaaccagcgcggaaaaggaacagaagaggaaccgaaacccaagaaaaaccacccagcaaagaagcaagc

SEQ ID NO: 59136 - RNA, 73 nt, Homo sapiens
acgcgcggaaggcagcgcccagcagcgcaggcaagcggcagccacacccggagaaggagccgcccagggacga

SEQ ID NO: 59137 - RNA, 77 nt, Homo sapiens
ggcggaccggcaccaaacggcccgcgggcgggcggagacccagaggcccgggaggaacaggagcaccacgagagagg

SEQ ID NO: 59138 - RNA, 64 nt, Homo sapiens
acaagcccaacagccagggccaggcgcagacccccaagaggagggaaagggagcagcaccggcc

SEQ ID NO: 59139 - RNA, 41 nt, Homo sapiens
ggagaagccagacgaagaaaccaaaggggcaggaccggagc

SEQ ID NO: 59140 - RNA, 87 nt, Homo sapiens
accaggagccccaaagcccaggagcgggggcgacgagcaggggaagagccagaagcagcaggaccggcggaggagcgagagcaggac

SEQ ID NO: 59141 - RNA, 74 nt, Homo sapiens
aaccaaaaaacaagaaaggacgaagaaagcagcagcggaggcggggaccccaaaggaaagagcccagggaacga

SEQ ID NO: 59142 - RNA, 72 nt, Homo sapiens
ggagaagcaagaggcgcaaagaaggaggagcaaaaaggacagagcacagagccagcacaggaaggagacgac

SEQ ID NO: 59143 - RNA, 75 nt, Homo sapiens
gggcgcggccgcgagacaccggcagaaggaacacaaaggggaccgcccagggggaggaaggcaaccaagaccacc

SEQ ID NO: 59144 - RNA, 77 nt, Homo sapiens
cgaacgaggcaagcagcgccgagcccaggcaagagcccgcgagaagacaggaagggaaggggcggagacgggcggaa

SEQ ID NO: 59145 - RNA, 79 nt, Homo sapiens
ggaacacacggaacacaccgcagccagaggaagacggaccaggagcggaggaggaccagacaagcggaggagagaaagc

SEQ ID NO: 59146 - RNA, 74 nt, Homo sapiens
caacaaaaccgcaacaggagcaaaggagcccacggcgggcgcaaaggaaaaggggaagaaggagaccagaaaag

SEQ ID NO: 59147 - RNA, 79 nt, Homo sapiens
gacaagacacccaccaccagagccaggccccggggccccagcggcaccagcggagaccacgggagccgcgccggagcca

SEQ ID NO: 59148 - RNA, 84 nt, Homo sapiens
gcggggaagaaggcaaaggccgacccggacgcagcaacgggcagcccaggcggcccccaccccagcggaagccgacacgagaag

SEQ ID NO: 59149 - RNA, 104 nt, Homo sapiens
acgcccaccaagagacgcccgacgccgggacccggggcccgccgcccccccccccccacccagcccccgcaagaaaagggagacgacagaccggggcaagcccc

SEQ ID NO: 59150 - RNA, 58 nt, Homo sapiens
agcccgggggaacgagccggagagcccgcaggaaacaggaacacgaaagaggaaaaac

SEQ ID NO: 59151 - RNA, 76 nt, Homo sapiens
cgagaggagaaggcgagaacgagagaggcagacaaacccacagccagggacacggcagggggaaggacagacggca

SEQ ID NO: 59152 - RNA, 83 nt, Homo sapiens
ggcgcgcggcgcgccgcccggcgagcgggccggaggaaaagaaagaagacgaccccgacgcaggccaggagccgcggacagaa

SEQ ID NO: 59153 - RNA, 70 nt, Homo sapiens
gaggggcgccagcggcccccgcagcggccagcggacgcgcaccggcaaaccaggcgccccgaggagaagc

SEQ ID NO: 59154 - RNA, 72 nt, Homo sapiens
acacacccgaggagacaggaccaaaggccacgaccgcggacgcacgcgggccgagccgagccccagaccccg

SEQ ID NO: 59155 - RNA, 73 nt, Homo sapiens
ccacacggggccgaaagaggcgcagcacgcagccccagcccggcccaagcagacccccaaagggcagggagag

SEQ ID NO: 59156 - RNA, 72 nt, Homo sapiens
cgggcgaagcgacgagccgcgaggagacgagcaagaagacaaacaagggaaggccgcacaggccaaggagga

SEQ ID NO: 59157 - RNA, 67 nt, Homo sapiens
cggcgaagacaccggagccaccacagacaccccacgggagggcaggacaaggagacggccacagagg

SEQ ID NO: 59158 - RNA, 74 nt, Homo sapiens
ccaacgaagacaccgagcgaaagagaaagagggacgcagagcgcaacccagcaccccccacagaggagacacaa

SEQ ID NO: 59159 - RNA, 72 nt, Homo sapiens
ggcacaaacaagcaacgagaaccagcgcgccgacaaacgcaggcacagaggcacggcaaggacaaacagaga

SEQ ID NO: 59160 - RNA, 75 nt, Homo sapiens
cggaacccgcgcgcgcccacgacgccgaggacgccagaaagagggcaacggccgacgaacaccgcccaacgcagc

SEQ ID NO: 59161 - RNA, 45 nt, Homo sapiens
gacaccaacgggaccagaaggaacgcaaggcggggaaaaaaaggc

SEQ ID NO: 59162 - RNA, 70 nt, Homo sapiens
gcggacgacagaacccggccgacccggaccaacaaccccaagagcccaaaaggcagagcgaggagagaag

SEQ ID NO: 59163 - RNA, 56 nt, Homo sapiens
gacgcgcggaggagaagagacccggggaggcagagagacggggcgccggagccagg

SEQ ID NO: 59164 - RNA, 62 nt, Homo sapiens
ggccaggaagcaacggaagcgcagcaacagcaagccccgggcagacaacggcaagcggagaa

SEQ ID NO: 59165 - RNA, 84 nt, Homo sapiens
gggagccaggaaggaaggagcacccagaagcagggacagggagcggggggaggaccagaaacaggagcgagcgaagaacagcac

SEQ ID NO: 59166 - RNA, 71 nt, Homo sapiens
gcggggggaaggcggggcccaaggcgccacaagaccaaaacaagaaggcagacaggagggcaagaaaccgc

SEQ ID NO: 59167 - RNA, 80 nt, Homo sapiens
gcagcccccacaacagggaagcagccccaaggccagcggagccagcacccccacaagcagcagcacaggagggagcagga

SEQ ID NO: 59168 - RNA, 75 nt, Homo sapiens
ccgacacagcggagcgcccagaggcgagcccggggaggaagaggacaccgaagcgcgaggcgaccaggcggggca

SEQ ID NO: 59169 - RNA, 71 nt, Homo sapiens
gacgacgcaccgaagccgaccagaagaagccagcccggagcgggcacaggccagggcgccggccgagcccg

SEQ ID NO: 59170 - RNA, 60 nt, Homo sapiens
cgaaaagcagggaagcacacgcggcacagaggccgggaagagagagggacccagagagca

SEQ ID NO: 59171 - RNA, 70 nt, Homo sapiens
gagaacccaggcagaggagaagggggaacggccacgcagcggcagcgcccggaccagcacaacagaacca

SEQ ID NO: 59172 - RNA, 77 nt, Homo sapiens
aagaaaccccccggccaggagaggaagcccgcgggcccccagcagcaggccacaggccacgacgcggcaccccgacc

SEQ ID NO: 59173 - RNA, 58 nt, Homo sapiens
gggacgcggccacagcccacgagggcaccaaaaacaagccagagcaagacccacgaag

SEQ ID NO: 59174 - RNA, 83 nt, Homo sapiens
cgaggaccgagaccgcggccgggaccgaggccggggccaaagcgaccaaccccccaccgcacgcagggggccccccgcccggg

SEQ ID NO: 59175 - RNA, 54 nt, Homo sapiens
agcggcccggggaaggaagcggagaacgcgggcaggaccagggccacagggcgc

SEQ ID NO: 59176 - RNA, 72 nt, Homo sapiens
ggaggggaagagcaggaaccggggcaggcgccaggcagccacagccgagcagcgggccacggacacagccag

SEQ ID NO: 59177 - RNA, 73 nt, Homo sapiens
ccagaccccgagaaaaagaaggcgaggaaaaccaccacacaggggaaacacccagacaacacacacaacagga

SEQ ID NO: 59178 - RNA, 61 nt, Homo sapiens
ccacaggacaggagagaaagacggaccggcacggagagggcgcccggcacgcggcgacggc

SEQ ID NO: 59179 - RNA, 65 nt, Homo sapiens
acacacagagggacggaaccacaacaagaaggacagcaaaggagcaggccagagcaagacccacg

SEQ ID NO: 59180 - RNA, 79 nt, Homo sapiens
cccagccacccaggccccgccgcccgggggcgccgcccaccgcgcccgccgaagacgaccccgacgcaggccaggagcc

SEQ ID NO: 59181 - RNA, 60 nt, Homo sapiens
caagaagcgaacaacgagagacaagcagagcaacccacgagcggagaacagggaacgaaa

SEQ ID NO: 59182 - RNA, 77 nt, Homo sapiens
gccccccagagagagccccaacaggaaggcagcaggacacccagccagcaggacaggcacacccgggcagccccagc

SEQ ID NO: 59183 - RNA, 72 nt, Homo sapiens
agaaaggcccaccggccgggagggcccagggcggggcccgagaaagccgacgaccagaggcagaacagaaga

SEQ ID NO: 59184 - RNA, 54 nt, Homo sapiens
aaccccccgggcgcaagccccacacaaggagagcaagcagggagggcccacgaa

SEQ ID NO: 59185 - RNA, 69 nt, Homo sapiens
gaggacagggcaggcaggcgaacgcaagcagacggaagaagacgaagaaaacccgaagcgcaaaacaaa

SEQ ID NO: 59186 - RNA, 79 nt, Homo sapiens
ccccagaggaaacggcccacgggaccacagcaggccaaaacagaagaggcaaagcccagccacagcagcagcccagcag

SEQ ID NO: 59187 - RNA, 71 nt, Homo sapiens
ggcccagccccaccgcgaccgcagccccaggccccagaggcaggccgaggccccagcagcggagggggagc

SEQ ID NO: 59188 - RNA, 76 nt, Homo sapiens
gaccccagggcaggacccgccacagacccaggccagcacccacccaccgggacaggagccacaccaaggggcaacc

SEQ ID NO: 59189 - RNA, 71 nt, Homo sapiens
ggaaacagaggcagaggcaaaacgacagaccccaacaccaacaagacgaaaaacggaagaagggggaagag

SEQ ID NO: 59190 - RNA, 71 nt, Homo sapiens
gcaaaccagcaaggcccaaaaaagggcccaacgcgcaggccacgggccggcggggaaacccaggcgaacag

SEQ ID NO: 59191 - RNA, 55 nt, Homo sapiens
caaaaagacgcacaaggcaaggggggccacaccgaaccagcacgggaggcgaggc

SEQ ID NO: 59192 - RNA, 59 nt, Homo sapiens
caggcagaggcaacagaggagcaacaaggagacgcgagaaggaagaagaacacaacaga

SEQ ID NO: 59193 - RNA, 82 nt, Homo sapiens
ggccgaccccgccgccccaggcgcgcgcaccccgccgcgcccacgcccaaccgaaaaagacaccaaggcgaccggcccgagg

SEQ ID NO: 59194 - RNA, 107 nt, Homo sapiens
ggcccagaaaaccccagcaggacgcacgcacgagccggcccagccgaagggagagcaggaagagagaaggccacgcccgaccccaagcaacaacggggcagggacag

SEQ ID NO: 59195 - RNA, 73 nt, Homo sapiens
gcaaggaaagccagacaccggaggaggacaggacggaaagaacaaccaagaagggagagaaacgcaggggacc

SEQ ID NO: 59196 - RNA, 75 nt, Homo sapiens
ggacaaggcagaagagcaacaagcaggacgacagcagaaacagccagagaacacaaaggccaacgcggccaccag

SEQ ID NO: 59197 - RNA, 71 nt, Homo sapiens
ccagaccagcaagggcccagggacaagagggaaaggagagggacagcgcagaaccggccgaaaagcacaaa

SEQ ID NO: 59198 - RNA, 76 nt, Homo sapiens
gcgcgggggcccgcgcagcagcgaccacggaagagaccgagaccaggaaccaggcaggggaacggagcgaaccagg

SEQ ID NO: 59199 - RNA, 71 nt, Homo sapiens
ccacggaaaggaggaagaagacaccggggacagacaggaagaagccacacacagaagacccaaagagaaca

SEQ ID NO: 59200 - RNA, 71 nt, Homo sapiens
gacggacgaccaggagggagcgggcaggaagagcggagagcagccccaaaaccagaaaacaaaggggagag

SEQ ID NO: 59201 - RNA, 86 nt, Homo sapiens
ccaccacgggcaggccgaggaaaaacaaaacgcacacaaaaaccacgagggcgggcgagcaccacagaccagccagccccaagcag

SEQ ID NO: 59202 - RNA, 78 nt, Homo sapiens
ccgccacagaacccgcgaccgcccaagccagagccaccggaagagaggccacaggaaggcgaagccgacgagcccgaa

SEQ ID NO: 59203 - RNA, 80 nt, Homo sapiens
cacgcgcaggcagcccgccgcgcaacgccacgcaggcgcacgaggagcgacccaagaacacgaccaggaagaaacaccaa

SEQ ID NO: 59204 - RNA, 76 nt, Homo sapiens
cgagaaaaggaagaaaaccaagccggaaacaagccaacagaggagcaccagggccagacggccgaacccgacccaa

SEQ ID NO: 59205 - RNA, 84 nt, Homo sapiens
ccacagaggacaggagaaaggcgaaggcaggagggcaaccacgacggcagagacaggagaggagagccacgcccacagacccgg

SEQ ID NO: 59206 - RNA, 81 nt, Homo sapiens
acaggaggcccgggacagggcaaacagaccgaggaacaccgcgaaaccccaggccacggcgacgccgacacaagaggagaa

SEQ ID NO: 59207 - RNA, 86 nt, Homo sapiens
cgagaaggaaagcaccagacgccaccacgggcacccgcgccgggcaccgaggaccagccaagacaggagcacagccaaggaaaaaa

SEQ ID NO: 59208 - RNA, 73 nt, Homo sapiens
ggggaaccgccggcgacggagaaaacagagcagaagaagggagcgacagaaaccccgaaccaaacagagccca

SEQ ID NO: 59209 - RNA, 61 nt, Homo sapiens
gcgggcgagcggagcgcaacaccgcggggggagacggcgcggccgcggaaagcaaagacag

SEQ ID NO: 59210 - RNA, 61 nt, Homo sapiens
aaaaaaaccgccccgccagcagaaggaggggagcggacagacggggagaccgaagccggga

SEQ ID NO: 59211 - RNA, 40 nt, Homo sapiens
cagcccaacgagggcgccgcggagccggcggcacaaccag

SEQ ID NO: 59212 - RNA, 81 nt, Homo sapiens
aggagccaagaccacagcagcacccaggcccaggcccccgcgcgcgcgaggccagccaggcccagcagagagcccgcccca

SEQ ID NO: 59213 - RNA, 86 nt, Homo sapiens
cggagcaagagggaccccagaaacgaccgcaaaggcacccggggcagaccggaccaagagaaagacaagagcaccacagcaaaacc

SEQ ID NO: 59214 - RNA, 61 nt, Homo sapiens
ggaggacgagcaaaagagcaccgaaccggagaccgaggagggagcacgccaacacaacacc

SEQ ID NO: 59215 - RNA, 70 nt, Homo sapiens
ccccggaacaagaaccacgcccgcaccagccacaaacggaggagagaggacaggcaaagaaaaaaagggc

SEQ ID NO: 59216 - RNA, 70 nt, Homo sapiens
cacaaggaaaagaagaacaaaagagagaacacgaaaaagggccggaaaggaaaaacaccagaacggaaac

SEQ ID NO: 59217 - RNA, 73 nt, Homo sapiens
gaccagccgagcgggccgacaaggggccaaagacccgggcagaaccgcagagagaagaacagcagagggaagg

SEQ ID NO: 59218 - RNA, 69 nt, Homo sapiens
aaagggaagaaaacaaagagagaaagcagcagcaagccccagagaccacgcggcggaccaagccagcgg

SEQ ID NO: 59219 - RNA, 82 nt, Homo sapiens
ggaccccaaggcacaggcgaccaccccaaaagcaccggccccgcacagcaaaccagaggcggcccaacgacgagaagaggag

SEQ ID NO: 59220 - RNA, 75 nt, Homo sapiens
agcacaccaggagcagagcggaccaaggaacacccggggcacaacagacaggggagccgccaccaaaagcagacg

SEQ ID NO: 59221 - RNA, 58 nt, Homo sapiens
ggagaggagagacgggaggagggaaggagaaaaggcgagaacaggcgaaagccgggca

SEQ ID NO: 59222 - RNA, 81 nt, Homo sapiens
cccccagagcagagagaggcgcgcagacggggcacgccaccccccgcacaggggcgggaccaagacggaccggcacgcggc

SEQ ID NO: 59223 - RNA, 81 nt, Homo sapiens
cccagcaggcggggaagagaaaggagaagagaggagcaggaggcacgccaccggaaaaccggcggaccccaagggaacgcg

SEQ ID NO: 59224 - RNA, 52 nt, Homo sapiens
cagcacgcacgccaagacgaggggaccaaaccacagcaaaaacaccaggaaa

SEQ ID NO: 59225 - RNA, 80 nt, Homo sapiens
ccgcggggcaaccgccacgagacaccaaggggcagagagaagagcacacagaaggccaggagcgacagagcggggaacac

SEQ ID NO: 59226 - RNA, 74 nt, Homo sapiens
gggcgggccgggcaggaccggacgggcgccggggcaagagagaaggagcacgagcagacagaaggagaccggag

SEQ ID NO: 59227 - RNA, 69 nt, Homo sapiens
aaagaggccacggaccgcgagacccggagaaggcaggacacccacaaaggaaaacaaaaggaaggggag

SEQ ID NO: 59228 - RNA, 79 nt, Homo sapiens
gcagcggaacagaccccccaaggccgcagacagagagggcagccccagcggacacgggcgggccaccgcccaggcggcg

SEQ ID NO: 59229 - RNA, 67 nt, Homo sapiens
aagagagagcgccggcagagcgcaggacacaagaggacgacgcgcacgcccgcaggacacggagggg

SEQ ID NO: 59230 - RNA, 76 nt, Homo sapiens
gcggagagaagcgccaaaggaccggacccagagaagaggaaaaccaccgggcagaaacaaccagcccacagcagaa

SEQ ID NO: 59231 - RNA, 69 nt, Homo sapiens
ggccagagcaaaaacggagacggcaagcagagaaagcgaacggaagcccgcaggacaagaaggaaaaag

SEQ ID NO: 59232 - RNA, 81 nt, Homo sapiens
acaacggagaaggaaaagaaccagaagcgagagaaaagcccccaaaagcagcacagaacccaaaggcggcggcaaaacgga

SEQ ID NO: 59233 - RNA, 75 nt, Homo sapiens
cccagacaacaggacgccgccaaggaggaccaacgacaacagcaaggcaaaacccggaagaggggcagacaccca

SEQ ID NO: 59234 - RNA, 66 nt, Homo sapiens
accacaggagcagcgcgaaggcgaagggcacagccgaaagcacaaaaggcccacacgcggccgaaa

SEQ ID NO: 59235 - RNA, 81 nt, Homo sapiens
caaaaccaaagggcaccagcaaacgacaccagccgcaaagcacacgaggcagcccgccccgcagcgagccaacggcgaaca

SEQ ID NO: 59236 - RNA, 113 nt, Homo sapiens
gaagaacccggagcgaggaacagaagaagaagaaccggaagaaacgccgagaagcccaaaggcgcacccccgagagagccacggaagggcgccaaggagccaccgccaccacg

SEQ ID NO: 59237 - RNA, 50 nt, Homo sapiens
gacaggggagccgaagagaccgaagcgccggccagaccaggcgagccgag

SEQ ID NO: 59238 - RNA, 67 nt, Homo sapiens
ccgagggccacccccgaggcggaccgcagcccggacggacagccagcagcgcagcgcccgcagccac

SEQ ID NO: 59239 - RNA, 82 nt, Homo sapiens
cacagccgccccaacaacacaggcacacgccagagagggcaacagggaaaagacgaaaccggacccgagccagagacaagaa

SEQ ID NO: 59240 - RNA, 67 nt, Homo sapiens
ccggacgcggcaacggagaagcaaaagagaggaagcagcggcccggaacgcacacggcccagacccc

SEQ ID NO: 59241 - RNA, 73 nt, Homo sapiens
agacaccgccgcaggccggacacggggacggccccccgccaaacgacgccggacaaccacagcccggagagcc

SEQ ID NO: 59242 - RNA, 72 nt, Homo sapiens
gcagcggacgccggccgccgcaggagaaccaaggagacagggaaaaccgaccagagaaaagaagccgggaag

SEQ ID NO: 59243 - RNA, 71 nt, Homo sapiens
aaggagcccagcaaaacaaaacaaggaagcgagggaaagaggcaaaaccgagaaaaggaccaaagagagcg

SEQ ID NO: 59244 - RNA, 54 nt, Homo sapiens
gaacacaaaggacagacagagagagggcgcgaccagccacagaagccagccaac

SEQ ID NO: 59245 - RNA, 72 nt, Homo sapiens
agagagcgagcgagggggggcgcgccggaaaccggagcgcgcagcagacggcccgccacgggccccgcagcc

SEQ ID NO: 59246 - RNA, 56 nt, Homo sapiens
aaagaggcgaggggagaggccgacacgccaaaaggcagaggagacgaccagaaaac

SEQ ID NO: 59247 - RNA, 79 nt, Homo sapiens
cggcgcccacgggggagcgagccggagacagggaccggagggccggaagcgggccgggacaacgggcaggagccggaag

SEQ ID NO: 59248 - RNA, 80 nt, Homo sapiens
ccaaggaggacccacgagacagggacaggcggccaaaagaaagaccggcagacagaaaaaggaaaacaccagggaaaaga

SEQ ID NO: 59249 - RNA, 107 nt, Homo sapiens
aaaagcagcccgccacccagagacacccccgaaaccacccccaggggagaggaaggcacccagacagggggcaccggggcaccggggacaggacaacggaagaccag

SEQ ID NO: 59250 - RNA, 69 nt, Homo sapiens
aaagggaaagcgagagccgagagaacaagacgaagggaagaccaggagagggaaaggcccgggaaagga

SEQ ID NO: 59251 - RNA, 47 nt, Homo sapiens
gagaagggccccaacaagagagggaggccccagagaaggccgggccc

SEQ ID NO: 59252 - RNA, 80 nt, Homo sapiens
cccccccccccacgcaaccccagaccaacacacagagaagccgcgggagcggaagacaggcccggagcccgacggaccgg

SEQ ID NO: 59253 - RNA, 75 nt, Homo sapiens
aacaagagggcaggcggcgacgagaaaggcgcaaagacccacaggaccgcgaacaaggaggccacaaaacacccg

SEQ ID NO: 59254 - RNA, 74 nt, Homo sapiens
aaggagcaaacggaaagagcacagcccggggggaaaggggacaagagcgggcagaagagcaagcccgccaggcg

SEQ ID NO: 59255 - RNA, 82 nt, Homo sapiens
aagccagcaacaagaacgaagccaccaaccaaagcaagaccaggcacagggaagaggccgggcccaagaagcacgaagcggg

SEQ ID NO: 59256 - RNA, 70 nt, Homo sapiens
aaaacgaaacacgcgaaaccaaggaaacaacgaacgagcaaggaagggccaaggcagaccccacaccgga

SEQ ID NO: 59257 - RNA, 41 nt, Homo sapiens
gcagaaaagcgaccaggcgagagcagacagacagcgaacac

SEQ ID NO: 59258 - RNA, 114 nt, Homo sapiens
acaggaaaagacccagcgacaacgaagaccacaccagacacgggggacagaaagcaaaaaacccggacaaccagcggggcacaacaagggcacaacagagccaccccaccaccc

SEQ ID NO: 59259 - RNA, 71 nt, Homo sapiens
gacccagccagaccagggacaaagagcaaacagacagggccgcagggacaagagaaaaaaagggcgggcga

SEQ ID NO: 59260 - RNA, 78 nt, Homo sapiens
cgccaagaggaggcaagaccagagacaggaagggcgcgcaggaacaagaagaagggcaaccacagagccaagaaaaag

SEQ ID NO: 59261 - RNA, 75 nt, Homo sapiens
ccacccacagaccagccggaacaagagacccgggagcacggcccaggcagccaagaaggcagagagacacacaag

SEQ ID NO: 59262 - RNA, 98 nt, Homo sapiens
cgaagccggagggccacccgacgcagagggcaggccccagccagggcggagaacggaaaagcaccaggaagcagagaggaccgcagaagggaaggaga

SEQ ID NO: 59263 - RNA, 78 nt, Homo sapiens
aagagggcccgcaggcgagaaacggaccaccaccgaaggaacggacaacaagacgcccggcaagaggggagagcccgg

SEQ ID NO: 59264 - RNA, 78 nt, Homo sapiens
cggcgaagaccccgacaggaacagacaagaaccagagaaccccaaagacaaaagagcgaaaacaggcaagacggagcg

SEQ ID NO: 59265 - RNA, 80 nt, Homo sapiens
ccccaaggggaagcgaagaaacagaaaaagacgcaagaaggacagagcgcgcccaggagaagggagcaggagaagcacca

SEQ ID NO: 59266 - RNA, 73 nt, Homo sapiens
cgggcgcaccggcgacgcgccacagaccgggccaaacaacccaggaggaagagacacgcggagggaggacccg

SEQ ID NO: 59267 - RNA, 98 nt, Homo sapiens
ccgcgaaggaccagagagggagcccgccacacagcccgacggccagcgccaaccccgagagccggcccaccggcgggcgcgccggccgcgccaccccg

SEQ ID NO: 59268 - RNA, 90 nt, Homo sapiens
aacgaagcagccgagacgaggagaaaacccagaaaaaagggcagagccaccggaggggaagaacgcagaaaccccgcaaaaaaaacagaa

SEQ ID NO: 59269 - RNA, 78 nt, Homo sapiens
gcgcacccaagaggggaagaggacgggcaggcggaagcgccagaggagccaccaggacacaaccagagggaagcacgc

SEQ ID NO: 59270 - RNA, 35 nt, Homo sapiens
agagcggaccgccgcaaagaacggccaaggaagga

SEQ ID NO: 59271 - RNA, 80 nt, Homo sapiens
agccgggggaagcggggcgccggcgcaccggagaggccagggggacacagcaggccaggaaagacgaacaacaccccaga

SEQ ID NO: 59272 - RNA, 71 nt, Homo sapiens
caccaaaccagggaaacagaaaccaacagacgcgaaagaaaaaaggcgaggccgccaaagggagcgaggag

SEQ ID NO: 59273 - RNA, 36 nt, Homo sapiens
aagcggagggagaacgcaagacggggacagaagacc

SEQ ID NO: 59274 - RNA, 75 nt, Homo sapiens
agagagcgaaaggaaaagagaaagaccgagagccgaggcagaacaaagcgcgcaagacgcaacacaaacgagaaa

SEQ ID NO: 59275 - RNA, 64 nt, Homo sapiens
gaggagcccgcgggacacaggaccacgcggagaggggccgaagacgcagcagaagccagaccgg

SEQ ID NO: 59276 - RNA, 78 nt, Homo sapiens
cccaggcacagcggggcagaccggaggagaagccccagaggaccaagaagaacggcagcaggacaaaccggcgaccac

SEQ ID NO: 59277 - RNA, 75 nt, Homo sapiens
aaaggaaaacgcggaaaaccgacacaacaggcagcaccgggaccggaggcccagagcgacggacggagaaccagg

SEQ ID NO: 59278 - RNA, 82 nt, Homo sapiens
ggacggccgaggaaggaacggcccccccccagcccgccccaaaagggcggcaccccaccgcccagccacagccccccccaca

SEQ ID NO: 59279 - RNA, 83 nt, Homo sapiens
cccaccacggaagagaaagaagaaggggaagccccagcaaaggcaagcaagcagcagacggacccaacaacccagcagccagg

SEQ ID NO: 59280 - RNA, 88 nt, Homo sapiens
aagaagaaaaacccaagaaagagcgcagcgggagaaggaaggagggccccggagcagccacaccaccgaggccccacccagcacgagc

SEQ ID NO: 59281 - RNA, 80 nt, Homo sapiens
acacacccccagccgaaccgcagcaccccaggcccacacccggcaaccccacggcccgggcaccaagaggcacgcgggcg

SEQ ID NO: 59282 - RNA, 83 nt, Homo sapiens
gggcaccaagagcagcccacaggggggccgacacaagagcgcgagaccaacagaacggagcggagcccagaaggggaacggcg

SEQ ID NO: 59283 - RNA, 72 nt, Homo sapiens
cgcgggcgacaaaaccgcccaccaaccaggcacgaaaaaacagaagaaccgagaaccgacaccgcggaaaca

SEQ ID NO: 59284 - RNA, 75 nt, Homo sapiens
agaacagcccaagaggccgaccgagacgggcggagaggagaagggggcaaccacgagaccgaggcgcgggagcgc

SEQ ID NO: 59285 - RNA, 81 nt, Homo sapiens
cgacgcgagaagcccagaccgcagggcgggaaaaaaccaagcagcgagcaccagggcccgcaagcagaacaaaacgagaaa

SEQ ID NO: 59286 - RNA, 82 nt, Homo sapiens
gcagaacagaacacccagccagggcagaacaaggggcaaagaaaaaggagagaaaaagaggcaaaacaacaagaagaaaaga

SEQ ID NO: 59287 - RNA, 78 nt, Homo sapiens
caccacccacccggaaaccaacacacacagccggaggcaacgcacagaaccagaagaaggcccagcaggaggcgaaag

SEQ ID NO: 59288 - RNA, 76 nt, Homo sapiens
agaacccccaaaaaacaaggggcacggcgagaagaacagccaccgggacaacccccaagaaagggagcccagaacg

SEQ ID NO: 59289 - RNA, 80 nt, Homo sapiens
gcaggcggcgcggagagggggcgcgagcgggggagacgggcagacaacgaacaagcgaagaaccagcagcaagacaacgg

SEQ ID NO: 59290 - RNA, 66 nt, Homo sapiens
accaccaaagaagcgagcggcgagagacgacaggaaggggaagcaggccaacccagaacacacccc

SEQ ID NO: 59291 - RNA, 84 nt, Homo sapiens
ggcacagcgccgcgccgccgccgcggggcagcagcagccggcagcagcagcggggccgccccccgggcgaggcagagacgccag

SEQ ID NO: 59292 - RNA, 54 nt, Homo sapiens
cacgaaagccccacccgccgcagcaagcagagggacgagcgggggcggcggccg

SEQ ID NO: 59293 - RNA, 37 nt, Homo sapiens
ccagacagcagcggaagcaagggacccccagacgagg

SEQ ID NO: 59294 - RNA, 79 nt, Homo sapiens
ccgcagcgaggccaggaacccggggagaccccgacgggaggccgaggagagcacaagccaacccgcccgaggcccccca

SEQ ID NO: 59295 - RNA, 58 nt, Homo sapiens
cgcaagaaggccaggacagacagacgaggcggccacagagaccgccagggagaaacag

SEQ ID NO: 59296 - RNA, 70 nt, Homo sapiens
cccaggagaaggaccgaagcggcagaggcccagagaaggacaggagcccagccggcagcgcagcaaggac

SEQ ID NO: 59297 - RNA, 60 nt, Homo sapiens
cccacccaccaaagccagaggacggagggcaggaccggaaggaacaacaccaaacccaag

SEQ ID NO: 59298 - RNA, 85 nt, Homo sapiens
gcagggaccgggccaagacgagcgacaggagcacacccggagaagcaggagcccaccggcagggcccaggcaccacaaccagggg

SEQ ID NO: 59299 - RNA, 76 nt, Homo sapiens
ggagggaggggaaagacccacaccaagaggccacacacccccacggcgagacccagagagccaagaggggcagcgg

SEQ ID NO: 59300 - RNA, 59 nt, Homo sapiens
caaggagagccaggaggagcgggccccaacccaccaaaagcacaggagaagcaaaaagc

SEQ ID NO: 59301 - RNA, 81 nt, Homo sapiens
ggcgagaggcggcgccgccccaagagcgcagacggccagccgaaaccacgacacgcacagaacccaaagcccaagagggcc

SEQ ID NO: 59302 - RNA, 57 nt, Homo sapiens
cagccaccgccccggcccgcgggccggcccggcacagggagagcaaaagacccggaa

SEQ ID NO: 59303 - RNA, 88 nt, Homo sapiens
gagccgccgagacgccgaagagcccgccgcccgcgcgagcccaggaccgggggccgggcgaggaggccgggagaagccgaagcgccga

SEQ ID NO: 59304 - RNA, 50 nt, Homo sapiens
cccccagccgcaccaccaagggggacggaagcggcagcgggcagccggcc

SEQ ID NO: 59305 - RNA, 56 nt, Homo sapiens
cgggagaagaggcaaagaaacaccaagggagggcagaacaacagcagcagaacgga

SEQ ID NO: 59306 - RNA, 81 nt, Homo sapiens
ggagcccgaccgccaaaagccagggagccacccagcccgcaggccagcccgcagcgggcccaggcggaggcgccaacagaa

SEQ ID NO: 59307 - RNA, 72 nt, Homo sapiens
aacggcacacgcgagcgaacagagagaagggcgggagaaaccaaggaaagagaaaagcgggaggcgagggaa

SEQ ID NO: 59308 - RNA, 68 nt, Homo sapiens
gacaagcgccacgcccggcaaacaggggggggcacaaggcccgcggagacaacaaaggaagcccacaa

SEQ ID NO: 59309 - RNA, 82 nt, Homo sapiens
cccgagaagggagacgacgcgcgggccgcgagcggggcgacccgagccaccgggaacaagccaggggaggcagccaagccgc

SEQ ID NO: 59310 - RNA, 74 nt, Homo sapiens
gcggcggcccaccaaggaaagggcgacagcaacagccgccggcggaagaacgaccgaagcaggagcagagagcc

SEQ ID NO: 59311 - RNA, 76 nt, Homo sapiens
ggaagagaccaagcaccaagaaaacgccaaggaacggcgagagcgagacaaaacagggcaaggcgcccagaagcgg

SEQ ID NO: 59312 - RNA, 80 nt, Homo sapiens
gcccccaccgaacgccgggaggccgcgcccaacagcaagcgagagggagcgaagaaggcaagaaagggaccgaaaggaac

SEQ ID NO: 59313 - RNA, 61 nt, Homo sapiens
gaccccgcaggacggaaacccacaggcacacccaacccccaaagacgacgagcggcaaacg

SEQ ID NO: 59314 - RNA, 79 nt, Homo sapiens
ggaggaaagaggagagaacccaacacagggaaaggaaccgcggacaggggagggaagccacaaagaggggacagccacc

SEQ ID NO: 59315 - RNA, 62 nt, Homo sapiens
aagcccagcgggccggacggggcggggggaacgggcccgacaagagaggcggagccaccccc

SEQ ID NO: 59316 - RNA, 81 nt, Homo sapiens
aaggaaacacagaggaagcggagagaagagccccagaaaaagaccagggaaaagcccagcgaagaggacccagcaggaaca

SEQ ID NO: 59317 - RNA, 84 nt, Homo sapiens
ggaggaccacaacccagccacgagacaagacacaaggagggggcagagcgagggcaaacagaccacggaccagagagaagcgga

SEQ ID NO: 59318 - RNA, 83 nt, Homo sapiens
ccggacgccagcggacacgcgggcgaggagaagacagaggagccagaccaagagacagcacaggcgagcgagcagagacacca

SEQ ID NO: 59319 - RNA, 33 nt, Homo sapiens
gacccaccgacgagcaagaagcagggcgagcgc

SEQ ID NO: 59320 - RNA, 65 nt, Homo sapiens
aaaagcggcacgacaacaaaaccacagagaggcgccaccaggggccagaaccgcccacggccccc

SEQ ID NO: 59321 - RNA, 75 nt, Homo sapiens
gcaggagaaggaaaggaggcgaagaacggcaaccgagccgggacagacagccaccagaacaaagcagaagaacaa

SEQ ID NO: 59322 - RNA, 57 nt, Homo sapiens
cggcccgcgggggagccccgggagccgcacgccaacaagccaaaggaagagccacgg

SEQ ID NO: 59323 - RNA, 77 nt, Homo sapiens
cgacggaccccacacacccgacgaaccgagcacgaacaccaggacaaaagaagggcagcacaaaggaaagccccaaa

SEQ ID NO: 59324 - RNA, 52 nt, Homo sapiens
gcaaaacgaggcgcagcggggaaggacaccgccgcccagccacaggaccgac

SEQ ID NO: 59325 - RNA, 77 nt, Homo sapiens
caccaccaacggaaaacaacacagaggaggggacacaaaggaagaggcagccagacagcaccagcgcccaacgcaca

SEQ ID NO: 59326 - RNA, 80 nt, Homo sapiens
cggccgcggcaccgaaccacaaggaggacgaggcgaaggaggggaggagaccacgagggcagccccaggcggaagaggca

SEQ ID NO: 59327 - RNA, 84 nt, Homo sapiens
gcgggccgagcagcggcgccaggagcccggcgcggcccgggcagccgcgccccacccgagaagcgcggacgcccacacaaggga

SEQ ID NO: 59328 - RNA, 71 nt, Homo sapiens
cacaggcgaaaaaaaacagaaaccaccaacaaaagcgacgggcccaaccgaccagaaggaaagcacaaacg

SEQ ID NO: 59329 - RNA, 79 nt, Homo sapiens
gaaaaagaaacacacaacaggaagagaaaagaggaagaccaaagaagaacacagacaagaagagaaaccgcaaaaagaa

SEQ ID NO: 59330 - RNA, 73 nt, Homo sapiens
cgaacccaacgaggagcaggaaaaacagagagaaggacggagaagcgaaagccagaccggcaagagcggaaga

SEQ ID NO: 59331 - RNA, 77 nt, Homo sapiens
aaccagccggaccccagcgggggaagaaggacaagaggccagggcagggaagcaaaaccgaccaaaaaccaggcaca

SEQ ID NO: 59332 - RNA, 76 nt, Homo sapiens
cgcagccgcggcgccggggagccccaagccaaggccaccgagccacaagaccacagcaccgacccccgacccggaa

SEQ ID NO: 59333 - RNA, 71 nt, Homo sapiens
aagggaaaccagcaagagagccgaagggaggaagcccgggacaggaaaagccagagagcggcagagaagaa

SEQ ID NO: 59334 - RNA, 84 nt, Homo sapiens
ggaggagagcgacaggacaaagccacaagaacgcaggcaaacagccgccgagggcccagggggaaaagccgcacgaagcaggaa

SEQ ID NO: 59335 - RNA, 56 nt, Homo sapiens
aaacagggcccggcagccaacaacagccaggccccgccgggcgggcacccccacca

SEQ ID NO: 59336 - RNA, 74 nt, Homo sapiens
gagccaaagcagccacacaacagcgaggaaccaaaaagcaacacacaggcccagacgacagaggcacagcgaaa

SEQ ID NO: 59337 - RNA, 76 nt, Homo sapiens
aaacacaccacgcggcgcgacccacacagacaacagccggggcagcgcccgagacacgagccccaaggggaagcac

SEQ ID NO: 59338 - RNA, 73 nt, Homo sapiens
gaaaggaagagaccccaaggagcaggggaaggagacgggcaggagcgagccacccggaacaagcgggcggcgc

SEQ ID NO: 59339 - RNA, 55 nt, Homo sapiens
ccagagcgcgcgagcggaccaggagggcacccccgggacggggccagaaacagag

SEQ ID NO: 59340 - RNA, 83 nt, Homo sapiens
ggaaggagcacaccaccaacacggcaacgcaggccagcaaccccagccaagcaagaccagaaccagaaccacagccccgagga

SEQ ID NO: 59341 - RNA, 77 nt, Homo sapiens
aggacaaacagcacaagagcggacaaggagacccgaccaccggaagccacggcccggacccccgccacgcaagaccg

SEQ ID NO: 59342 - RNA, 65 nt, Homo sapiens
ggcacaaggagaacacgccgaagagaacaagacgggaagaccaggagcacagcaagcgggagcag

SEQ ID NO: 59343 - RNA, 38 nt, Homo sapiens
gcccgggagagcaaggcagcccaacgaagagcagggca

SEQ ID NO: 59344 - RNA, 39 nt, Homo sapiens
gcaagggacccgaccagaaaggagcgaaaacgccacaac

SEQ ID NO: 59345 - RNA, 57 nt, Homo sapiens
gggagcagggaccgcgggaaaggaagcgacggcgcacaggaacccccacgagccaga

SEQ ID NO: 59346 - RNA, 78 nt, Homo sapiens
agcccaaggaacaccgggcaacagaaaggcaaggcgaccgaaaccggaaggccaaaacaagggaagcaaaggaaacgg

SEQ ID NO: 59347 - RNA, 37 nt, Homo sapiens
cgggcgggacccgacagcagggaggccgagcgccgga

SEQ ID NO: 59348 - RNA, 106 nt, Homo sapiens
aaaacggaggcaaaggaggcgccgggccccgcccaggacccgacggggaagccaggagcagaacgaaccaggccaggaaccccagccggagcagaaagaagagcca

SEQ ID NO: 59349 - RNA, 53 nt, Homo sapiens
cccaggagaaaccggacgcgacggggccccggaccccggaaccccgaccccgc

SEQ ID NO: 59350 - RNA, 99 nt, Homo sapiens
accaccacacccagggcgcaggcccccagcagaccgacgagccccagagaaggggcaaaggagcagagaacgacaagccacacgaggacagcccgcaac

SEQ ID NO: 59351 - RNA, 69 nt, Homo sapiens
ggcagcagaaagagcagggagaagcagaacagacggacacagggcagccaccgagcggggaagcgaaaa

SEQ ID NO: 59352 - RNA, 76 nt, Homo sapiens
ggaacacacagcaagccgccgggacagccacgacgagcgagcccagccccgcggaaccaaggccccccaagaggga

SEQ ID NO: 59353 - RNA, 81 nt, Homo sapiens
gcagaagagaccccaagaaagaggacgcaccaccagagcaaggcaggccagagagccccgacgccgcaggaacaggcagag

SEQ ID NO: 59354 - RNA, 76 nt, Homo sapiens
gaacgaaccgagccacaacagccaaggaaaaaaagcagagaggagcggggagcaagcagaccgaaacaaggacccc

SEQ ID NO: 59355 - RNA, 56 nt, Homo sapiens
cgccagcaaacagcccgcaggaaggagagggacccgggccccacacaacaagggcc

SEQ ID NO: 59356 - RNA, 72 nt, Homo sapiens
accggagaaacgaccgaaacccaagggcggggaaaggcagcggcaaggccggagagacacagggccgccaga

SEQ ID NO: 59357 - RNA, 71 nt, Homo sapiens
cggcccgagaggaaggcaggcacaagggacaagacagcccaggccgggaaaggaagacaccgaaaacgaga

SEQ ID NO: 59358 - RNA, 68 nt, Homo sapiens
cagagcgagaccaggaaagaagggggcagaagagggcgagcaggcgacccaaaagagcgaaggaaaac

SEQ ID NO: 59359 - RNA, 78 nt, Homo sapiens
caggcaagcacacaagggacgcgaccaccaagaacaaaccaggggagggaaacgagaaaaacgacgccagcggcggca

SEQ ID NO: 59360 - RNA, 73 nt, Homo sapiens
gacagaggaccaaagcggaccagagacaggcaggccgccgccaccgcccacccccacgcgggcccggcccccc

SEQ ID NO: 59361 - RNA, 52 nt, Homo sapiens
agaaccaaacccgagagaagggaccagccagcaggcaacaggcccagaccag

SEQ ID NO: 59362 - RNA, 74 nt, Homo sapiens
caagaggaccagagggaagcaaagggagagcaggccgcagaccaacaaaggggcgcaggccggccaagaaccag

SEQ ID NO: 59363 - RNA, 97 nt, Homo sapiens
ccaggaggcagggagcagcagcccccacgcgcacagaggcagccggcgcaggagcagcagcgcagacggaacacgcgaacacgcaaaaggaagcggc

SEQ ID NO: 59364 - RNA, 69 nt, Homo sapiens
aggaacaaaagaaaaaacacaaaccgcggaaggacaagcaggggcgcaggcagggccagccgaacccag

SEQ ID NO: 59365 - RNA, 35 nt, Homo sapiens
gaagaaggcagacagggaccgcccccgcaggggga

SEQ ID NO: 59366 - RNA, 65 nt, Homo sapiens
agaaaaaacgcagaacggcaaaaaggaaaggcccgagccaaaagacccagagaaaggagcacgaa

SEQ ID NO: 59367 - RNA, 68 nt, Homo sapiens
acagcaacagccccaccccgaaacgccccgaaaagacgggcaacaggcgagcacacagagaggggaag

SEQ ID NO: 59368 - RNA, 93 nt, Homo sapiens
gaggcgcccccgggggcccgacgcacacgggggcggacaccacaagaagggcgccagagccggaggaaaccacagagcagccagcagaaggga

SEQ ID NO: 59369 - RNA, 75 nt, Homo sapiens
aagagaagacagcagagaaccacaagcagaacaaaacgccacccaggcaggaggaccaaagagagacacacccga

SEQ ID NO: 59370 - RNA, 77 nt, Homo sapiens
ggcaggcacacgagaggaacacgaaagggggaacggagcaccggaagagcagaaggagaaacgggggagaaagccag

SEQ ID NO: 59371 - RNA, 77 nt, Homo sapiens
gacagaccggcaggcaggaaaacgggagaacacgacaccggcgaggaacggcagccagcggaaacggagggaaagaa

SEQ ID NO: 59372 - RNA, 63 nt, Homo sapiens
cggcccccacccaaggagaggccaaggcgaaagcaccaaaaaggccccaacagcagccccaga

SEQ ID NO: 59373 - RNA, 73 nt, Homo sapiens
gacggaaagcgacaagggaggcgccgccagcggccgggaccgaacaggcggcccccccgggggcgagaagaaa

SEQ ID NO: 59374 - RNA, 76 nt, Homo sapiens
gaaaacagcaaggagccaaaaaaacacggggaccacaggacaaaggccgggggacacgggagcgacaagccgcaca

SEQ ID NO: 59375 - RNA, 71 nt, Homo sapiens
aagcacacccgaaaagcgccaaggaaaaggacgagaacgccgcgacagaaaaaagcaccgggaggaaagag

SEQ ID NO: 59376 - RNA, 80 nt, Homo sapiens
gcgagcgcgaacagaagagaggaagaaaggacagggagagaagccaagaaagacagcaaaaaccgagccgcggaacggac

SEQ ID NO: 59377 - RNA, 78 nt, Homo sapiens
caaccagacgccagcgggacgaggaccgagaccgcggccgggaccgaggggacgaacagcggggacgccccagcagac

SEQ ID NO: 59378 - RNA, 66 nt, Homo sapiens
aaacagggcccaccagggaggcgggacaccaggacacaggaagggcacaagacacaagaaacccgg

SEQ ID NO: 59379 - RNA, 57 nt, Homo sapiens
cgaacccgaggggaagaaaggagcgcacgccacgaggagcagggggggcgccgcgcg

SEQ ID NO: 59380 - RNA, 72 nt, Homo sapiens
ccaaagcgcccaggcacccccagcagcaagggagaaaggaaacagcagaagcggagagagcggaaaaggaaa

SEQ ID NO: 59381 - RNA, 77 nt, Homo sapiens
aggaccccaaagccagaccagaagagagcgagcggaaaacggccgaaggcaaagcgaccagaccggacccgggaccg

SEQ ID NO: 59382 - RNA, 77 nt, Homo sapiens
cgacccagagcccccgcccgggccacccccaaccaggaccaaagacgaccaccaaagccagcccccagaacacgccg

SEQ ID NO: 59383 - RNA, 77 nt, Homo sapiens
agggccgagccagccgcggccggaggagcccccaggccgaagccgagccacggagcacccaaagagaccacccgcag

SEQ ID NO: 59384 - RNA, 81 nt, Homo sapiens
gcaggccaacccgggcccaacagcaacaggccaagcacccgggggagcgcccaggacacacccccagcgaagaagaagaga

SEQ ID NO: 59385 - RNA, 88 nt, Homo sapiens
acccgcagacagaacccacgaggcaccagcaacgaggaccgaaaagacgcggccccaaaggaaacacccgaagaacacagcgccagcc

SEQ ID NO: 59386 - RNA, 77 nt, Homo sapiens
ggccaggggaggaggagcgcggaggcgaccgcagaggccgggaagaaggagggacacagcagcgcggagagcggccc

SEQ ID NO: 59387 - RNA, 64 nt, Homo sapiens
agcccgcccaaccaacggcagccgagaccgacccgcccgcccgcggccccgcagcagcccaaga

SEQ ID NO: 59388 - RNA, 77 nt, Homo sapiens
gggggacacacgcgaccggcgaggcccaccaagccagaacccaccgcaaccgcccggagcgcaacaaaaaagggagc

SEQ ID NO: 59389 - RNA, 54 nt, Homo sapiens
acgcacaacagagacaccccccgcgccagaaccaaccacaacagcagcgcaaga

SEQ ID NO: 59390 - RNA, 69 nt, Homo sapiens
gcagcaacaagaggagcgcccccccagcggcacgcagccccgcggcacaaccagggagagaggcagaac

SEQ ID NO: 59391 - RNA, 67 nt, Homo sapiens
cgagaaaaaccgaaagagccagccaagagcaaaaaaaagagcacaggaggcaaccaaagaacccagc

SEQ ID NO: 59392 - RNA, 89 nt, Homo sapiens
gcgaaccagcggaaaaaggggaagaagaagggcaagaaggcgccagcagagccaagacgcagaccggggcggaaaaaggcaaaagggag

SEQ ID NO: 59393 - RNA, 74 nt, Homo sapiens
cagggccccgaggccgcgagggccaggaggagcagccggggaaagaggcaagagaacgccacgaaagaaaagac

SEQ ID NO: 59394 - RNA, 72 nt, Homo sapiens
aaccaacgcagggccggccagcaagaaagcaaagacaccgcagcacgaggggccgggagaggaaggccccaa

SEQ ID NO: 59395 - RNA, 75 nt, Homo sapiens
gagacccggccgacgcccggaagacaagagaacgagagcccagacagagaaagcagacacgaacaagccgagcga

SEQ ID NO: 59396 - RNA, 76 nt, Homo sapiens
gcagacaccccccagccagccggccacacacggcacaagggaagagaaaagacacagggacaagagcgccagccga

SEQ ID NO: 59397 - RNA, 81 nt, Homo sapiens
gcgacagcggccggggcgcaggcgcccggcggaaggcagggggggacaaggaggaaggaagaaaagaaagacagagacaga

SEQ ID NO: 59398 - RNA, 78 nt, Homo sapiens
ggcgaccaccaggggccgaggagaagccaagcgcggccggccccgccgcccaggaacacacaccggggacggaagaag

SEQ ID NO: 59399 - RNA, 73 nt, Homo sapiens
cggcacagggaccgcacaccaagaaccacacaacggcccggaggggccaagaagcggcacccgggcaccaaag

SEQ ID NO: 59400 - RNA, 76 nt, Homo sapiens
aacagaagacaaacacgaagaacaaagcagagagagacacagccgaaagcggacgcaagagcaagaccagccgcgg

SEQ ID NO: 59401 - RNA, 76 nt, Homo sapiens
caccaagaagcacgaccgcgaggagaggggcgccccccccggaagacagcccaccccccacacacccgggaaccag

SEQ ID NO: 59402 - RNA, 72 nt, Homo sapiens
agaagaaaacgggcacaaaggaggagcgccaaaccagacccgcccccgggaaacagcccgcaacagagagcg

SEQ ID NO: 59403 - RNA, 77 nt, Homo sapiens
cacacaaaaggaccacgaggagcaagaggggggggcccccccgaagaaaggaaccggggagcggcgaaaaaaaaggg

SEQ ID NO: 59404 - RNA, 74 nt, Homo sapiens
ggagcgagaacgccgccgaacgccgcccgcacgccgccggcacagaccgaacgaaagagaacagaagagacaag

SEQ ID NO: 59405 - RNA, 68 nt, Homo sapiens
ggagcgggcggagcggcgagagcccccacggaggcacacccagaagccacaggagaagcaagaggcgg

SEQ ID NO: 59406 - RNA, 44 nt, Homo sapiens
gagcaaaacggaagaggccaagaggcccagaagcaaaccggagg

SEQ ID NO: 59407 - RNA, 76 nt, Homo sapiens
ggaaaaaggagcgaccacagagaacaaagacgagacagggacacagacaaaaagcgcgcagcaggagaacccacaa

SEQ ID NO: 59408 - RNA, 75 nt, Homo sapiens
gccagagcggggcacggagcgggcccggggacccagggaaagggaccccagacccacgggagcacgaagccaaga

SEQ ID NO: 59409 - RNA, 66 nt, Homo sapiens
aagaaccagggagaagccgcccgaacaccaggaagcaggaaaaaagaacaagaacgcaaggacaac

SEQ ID NO: 59410 - RNA, 50 nt, Homo sapiens
gaagaaagagccaaacgccaaggcggcacaacggggcggcacacaaggag

SEQ ID NO: 59411 - RNA, 84 nt, Homo sapiens
gacaggagccaagcaccagaggaccggcagagccacgccaagaccgcccccaagagaagagcccagaagaagagagaagacgca

SEQ ID NO: 59412 - RNA, 73 nt, Homo sapiens
cccacccccgccacacgcacgccaaaacggaagcccgccggcgccggggcgggcacaagggaagacagcgccc

SEQ ID NO: 59413 - RNA, 71 nt, Homo sapiens
gagcgcgaaacgcacgagaaggaagcagaaagagacgccaaaacacaagagagacgagaaagacaaaacaa

SEQ ID NO: 59414 - RNA, 63 nt, Homo sapiens
cgcaacgcggagcgcaaggcgagggacgagaacgaggacagagccagaggaccccggacaaac

SEQ ID NO: 59415 - RNA, 58 nt, Homo sapiens
caaggacacaaggaaagacacaggagcacaacggaggaaacgaaacccacagcaccgg

SEQ ID NO: 59416 - RNA, 76 nt, Homo sapiens
ccccgggcccgggaaaacacacggccaggaccagcaacaaggcagagcgaacccaagcagaaggggggggcccgga

SEQ ID NO: 59417 - RNA, 89 nt, Homo sapiens
ggcaagggcgcggacgacacgggccgcgacagcagccacgaggcgagccagagccgcagcccacacggcaaccacgagaaaacggaacc

SEQ ID NO: 59418 - RNA, 80 nt, Homo sapiens
gaagagggaagacacgcggaaacagaggcccggaccccgccgcgaagcaagaagagcaacacagcaaagggcagacgaac

SEQ ID NO: 59419 - RNA, 77 nt, Homo sapiens
gaccggcgacccgcgacgccgagcacccaggcgacgcccaccaaggacccaaacagacagggggggcggcacaacgc

SEQ ID NO: 59420 - RNA, 38 nt, Homo sapiens
ccccaagagcgggacacagaggggagaccaggaagggc

SEQ ID NO: 59421 - RNA, 78 nt, Homo sapiens
caacaaccgcgggcacccacggaaaagaaagagacggcgccgaggaagcacaggcaacaccacccgcgccgcgcccgg

SEQ ID NO: 59422 - RNA, 48 nt, Homo sapiens
cagacagccacaaagaaggaagaaaagcgcgaagaaccagagcagaaa

SEQ ID NO: 59423 - RNA, 87 nt, Homo sapiens
ggagaggagcagcccccggagacagcggcacagagggccgccagagggagggggacccgggggaggagagcccccagagagaccccg

SEQ ID NO: 59424 - RNA, 47 nt, Homo sapiens
cggaagggaggaacaggccaggaaccggcaacgcacacggcgccaca

SEQ ID NO: 59425 - RNA, 68 nt, Homo sapiens
gaaaaagcaggggaagcagcgcacgccaggccacgaacgacgcacggaggccacaacaccacaccaca

SEQ ID NO: 59426 - RNA, 38 nt, Homo sapiens
cccccgagggcgggaacagagagaagacagcaaagggc

SEQ ID NO: 59427 - RNA, 79 nt, Homo sapiens
ccgaggggcgacccgccgcgagggacccggccgggcccacgcaccgggagcggcaagaacgggcgggacgaccccacaa

SEQ ID NO: 59428 - RNA, 74 nt, Homo sapiens
ccaagaagcggcgggccgcgcggcgggagaaccacggaggggacgggagaaagaacagacaagccgcaagaacc

SEQ ID NO: 59429 - RNA, 51 nt, Homo sapiens
gcaaaaagcccaccacccgaagacgaaggaggcaacccacacacgaccacg

SEQ ID NO: 59430 - RNA, 71 nt, Homo sapiens
gcagacccaagaggagcggggccacacgaagagccaggcacaagaagaggcaagcagggagcaaaagagac

SEQ ID NO: 59431 - RNA, 74 nt, Homo sapiens
ggacggcgacgggcggccggcgcgaggcgagagggaggaaccgaaaggaaaccgaggacacagaaaagggcaca

SEQ ID NO: 59432 - RNA, 71 nt, Homo sapiens
cgccagcgccgcccccgccaacaggaacccaaccgaagaagaacagacccagacaaacacagcagcgacgg

SEQ ID NO: 59433 - RNA, 39 nt, Homo sapiens
accgggcagcaggaccgacaagaacccacaggagggcca

SEQ ID NO: 59434 - RNA, 81 nt, Homo sapiens
ggcagccagagccggacagaggacaaggcccaggcacgccgggcgcccgcgaagagcagccaagccgaggagacaaccccg

SEQ ID NO: 59435 - RNA, 63 nt, Homo sapiens
ggacggagcgccggccgcaccaccgccccggccggcccaccggaaacaacagcaggaagcggc

SEQ ID NO: 59436 - RNA, 65 nt, Homo sapiens
gaaaaacgaggaaggagaaacgggagcagaccccacacagcggagaaagaagagaggggcaccgg

SEQ ID NO: 59437 - RNA, 78 nt, Homo sapiens
gacagagcggcgggacagcccaagggccagcaccgcgcccaggcagagccagaccgggaaaaaagagccggacgacag

SEQ ID NO: 59438 - RNA, 85 nt, Homo sapiens
gaaaggagacccgacgcaacgcggagcgcaaggcgagggacgagaacgagcacaaacggcagaacgaagcccccggcaccaagag

SEQ ID NO: 59439 - RNA, 72 nt, Homo sapiens
accagaaagcaaacgagggcacacggcggaaccagaagacaaaaacaaggccgcgcagacggagcgacggca

SEQ ID NO: 59440 - RNA, 76 nt, Homo sapiens
acgcagggcgcccccggaaacggaggcgaccaggcccagaaacgagccacagggagccaagagggaggaggcaacc

SEQ ID NO: 59441 - RNA, 82 nt, Homo sapiens
ccgcccgggaaggcacgggacagcaacagggacgcgacaccgcacgagcggcccaggacaagcccaaccagggaccaggcca

SEQ ID NO: 59442 - RNA, 71 nt, Homo sapiens
gcgaacgccacccagcccaggacgggcgcgggcccaggccagggacggggggcaggcgcagaccgcaggca

SEQ ID NO: 59443 - RNA, 76 nt, Homo sapiens
agcagaggaaaaaagaacacagggagcgagaacgggccaggcaggaagaaaccccgaaccaaacagagcccaagga

SEQ ID NO: 59444 - RNA, 51 nt, Homo sapiens
ggcgaccgccccaggaacaagggcgggacccaggcggcaaggccaagcaag

SEQ ID NO: 59445 - RNA, 70 nt, Homo sapiens
aaagagaaaagagaaggcagggggagaagacgggaacggagccccccgcacaggacaaccaccagccacg

SEQ ID NO: 59446 - RNA, 76 nt, Homo sapiens
gaaacccagacgcaaaggaacaagcgccaccaaggaagcccggcaaacgagacaaccagaagacaaaaacaaggcc

SEQ ID NO: 59447 - RNA, 80 nt, Homo sapiens
cccaccagacggcgccccaagaccaacgaggcgaggaaccaaaggccaccccgccgagcccacccaccaagaagcacgga

SEQ ID NO: 59448 - RNA, 79 nt, Homo sapiens
ggccaggagcgcgcaaggaggcggaggcgcggacgcagacagacccgacaaagacgcacaacggccaaagcgaaaaaag

SEQ ID NO: 59449 - RNA, 32 nt, Homo sapiens
agggcaggagcagaagccaaaacacaggagaa

SEQ ID NO: 59450 - RNA, 68 nt, Homo sapiens
cacgccaccggaaccagcgggaaggagcgccagacccaccaccccaccgacagcccccgcgaacggag

SEQ ID NO: 59451 - RNA, 78 nt, Homo sapiens
ccacagaaggcgcgacgccggggaagaaggaagccaagaccgaggaagggggccaggcgaccagaccggacccagcac

SEQ ID NO: 59452 - RNA, 60 nt, Homo sapiens
acgaagaccagaacggggccacacgcggacccggagggaccagacgggcgccacaggcga

SEQ ID NO: 59453 - RNA, 57 nt, Homo sapiens
caacagaaaccaccacccccccaagaagcagaaaggggcagaggaacggccaagaca

SEQ ID NO: 59454 - RNA, 71 nt, Homo sapiens
aagacgagcccaccacggacagcaaacagggggcacccgaggaggaagagggcagggcccacggaaagaag

SEQ ID NO: 59455 - RNA, 56 nt, Homo sapiens
gacggccacacggcggccgcagggcgccggagccccccagcaacggggcggcacac

SEQ ID NO: 59456 - RNA, 72 nt, Homo sapiens
gagcgcaaaccagcacggaaaaaaaacaaccaacccacaggacaaccgagaaccggccacccggagcgcaga

SEQ ID NO: 59457 - RNA, 68 nt, Homo sapiens
cgagcaggggcgaaccgacagccccagaagcccaaaccccagaaaacaagggagccagaaaacggagc

SEQ ID NO: 59458 - RNA, 75 nt, Homo sapiens
gccgccgacagcagagacagagcacgaacccaggagccgggcagccgcgacacagcagcaggggcgcagagcagc

SEQ ID NO: 59459 - RNA, 71 nt, Homo sapiens
aaagcccaaaccagaaacagacagcacacagacagcaggcgcccaagggggggccgcccgcccaaggcagg

SEQ ID NO: 59460 - RNA, 37 nt, Homo sapiens
gacagacccgacgcacagaccagggagaaaaacagac

SEQ ID NO: 59461 - RNA, 72 nt, Homo sapiens
ggagaacaggaggacgcaggccaaacaaaacgagccgcagggcacccaaccaccagcaaggccaaacaaaca

SEQ ID NO: 59462 - RNA, 45 nt, Homo sapiens
gcagaacccaagaccaaaagggaacggacaaacagcgcgagacca

SEQ ID NO: 59463 - RNA, 71 nt, Homo sapiens
aaacaagcaagcgccacagagcagggggagaccaggagcagagccaagaagagccaggaaaaaggcaaaga

SEQ ID NO: 59464 - RNA, 55 nt, Homo sapiens
ggaacacgcgaagcacaaccagagcgcaagagacagaacagacagaaaaaacaac

SEQ ID NO: 59465 - RNA, 75 nt, Homo sapiens
aaagaacaaacaagggaacagcagagcggcgaccaccagaagacaaggaggaacccggaagaaaaaaaaaacaag

SEQ ID NO: 59466 - RNA, 51 nt, Homo sapiens
gccaaagcaggggcaacccagaacccccagaggcagagcaacagggacaca

SEQ ID NO: 59467 - RNA, 70 nt, Homo sapiens
gacaagccaaacggcaaggaacacagagaagcccacccagagagagaagaacaaggcggccaaaccaaga

SEQ ID NO: 59468 - RNA, 74 nt, Homo sapiens
aagcgagacccgggggcaacgccaccgacccgccccagcagcagaacggccagcggcagaccggggaccccgca

SEQ ID NO: 59469 - RNA, 72 nt, Homo sapiens
ccagaggaccagcggacaaagaacgaggggaaagaagcaacaaggcacaaccacagaagaacaaaagcaaaa

SEQ ID NO: 59470 - RNA, 82 nt, Homo sapiens
cagcgccaggcccagacgccaacgcaggagcacccagccccaagagacgacagaaaggcagagaaggaaaaaaggaccagag

SEQ ID NO: 59471 - RNA, 82 nt, Homo sapiens
gagagaggacacggcgggccgaccaaggaccccaaggaaagcggagggaaaggccacccaccacgagcgccccccgagaccg

SEQ ID NO: 59472 - RNA, 78 nt, Homo sapiens
aagaaaacacagcgggccgccgcgaccggggaggccaggccaggaaaacacggaaccaacccgccaccaagaaagccc

SEQ ID NO: 59473 - RNA, 73 nt, Homo sapiens
gacagaaggaccaaaaggagccggcccaggaggacagaccggaacacccagaagaaagcgcgcccccaaccag

SEQ ID NO: 59474 - RNA, 80 nt, Homo sapiens
agagcagaagaaccccggacggacgagggaacaaaacgggacaaacgcagccgaaagcaccgggaggaaagagagccaca

SEQ ID NO: 59475 - RNA, 85 nt, Homo sapiens
acccagcggagcaagggaaagagaccggagagaggaaaaaaaagcaccggcaaccgccaggaaagcgaacgcgaaaagaaaagcc

SEQ ID NO: 59476 - RNA, 52 nt, Homo sapiens
aagaacgaaaccggaaccagacagaaggaagaagagagggcgaaggaggcca

SEQ ID NO: 59477 - RNA, 85 nt, Homo sapiens
ggacacccacaaggagcagcggagcgagagaggaagggaaacccagacgacaaggaaggccaagggacccacgaccaaccaagaa

SEQ ID NO: 59478 - RNA, 76 nt, Homo sapiens
ggccccgaaaagcaaagaacgccaaacccggagagacaggaaacggaggcgaccaggcccagaaacgagccacagg

SEQ ID NO: 59479 - RNA, 75 nt, Homo sapiens
gcaccgagaggccagaccagagcagacacccgggcaccaagcagggcacaggaaagacaaaccaaggaacaggac

SEQ ID NO: 59480 - RNA, 71 nt, Homo sapiens
ccagcccgggcggcgcggccaggcgaagaggagaggaaggcaccaaagacagaacaaagaagagaaccgag

SEQ ID NO: 59481 - RNA, 67 nt, Homo sapiens
aagccgcagggggaagagcgacaaggacgaaggcgggccgaaaagagaagacgccgggaacacccga

SEQ ID NO: 59482 - RNA, 75 nt, Homo sapiens
gccccaggccgcaagacccagcgcccaaccgcccgggacaccagacacgaaggaccacaggccccggagggggga

SEQ ID NO: 59483 - RNA, 85 nt, Homo sapiens
ggggccgggacgcagccggagacgcggcccggaccagccacgggagaagggcagcacggcagaacccgccacagcacacgaaaac

SEQ ID NO: 59484 - RNA, 73 nt, Homo sapiens
ggcggggaaaacagagaccggggaaccaccccacaccgacacagacaacgacgaacgacaaacgacgaaacac

SEQ ID NO: 59485 - RNA, 80 nt, Homo sapiens
caccagcgaacggagaggagccagagccccacgggaaggagagcagccagcagcagcagcagaggaaaaaagagaccgag

SEQ ID NO: 59486 - RNA, 70 nt, Homo sapiens
cccccagccacgggaacgcagagacagggggaacaagcacgcacacccagagggccaaggccaaaagaaa

SEQ ID NO: 59487 - RNA, 95 nt, Homo sapiens
ccgggacgaggccgcccgcacccagcggaggggaaggccaggcccggccagagcagaaaaaccccagagccggcagggggcagaagccagcccag

SEQ ID NO: 59488 - RNA, 76 nt, Homo sapiens
ggaacccgaagaagaccaccgggagagagggaaaaaacaaccccgccggccccagggaaaggaccgaggcaggaaa

SEQ ID NO: 59489 - RNA, 70 nt, Homo sapiens
caccgcgcaaggaggagcggggccgaagccgaggggagagggaacaaggccgagggaaggaccacggaca

SEQ ID NO: 59490 - RNA, 41 nt, Homo sapiens
cccccaccgggccggacccgaggaagcgggcaccaacagac

SEQ ID NO: 59491 - RNA, 67 nt, Homo sapiens
aggagcgaaaggaaaccggccaacggacagacccacaggaccgcgaacaaggaggccacaaaacacc

SEQ ID NO: 59492 - RNA, 71 nt, Homo sapiens
cagggcagggaaaagcgccgggcggaccagcaggagaagacagaggagccagaccaagagacagcacaggc

SEQ ID NO: 59493 - RNA, 74 nt, Homo sapiens
ggccgaccgagacgggcggagaggagaaggacccgggccccacacaacaagggccggaagaagaagaacccccg

SEQ ID NO: 59494 - RNA, 68 nt, Homo sapiens
cgcagggcaaggcagggagcccgacaacacagggcagggaaggagaacagagggaaaaagaccagaga

SEQ ID NO: 59495 - RNA, 76 nt, Homo sapiens
ggggaccccaggcagcaggccaacgcagccgcccgcgacacagcccgggaggaccagggggcccacccagcaccgc

SEQ ID NO: 59496 - RNA, 40 nt, Homo sapiens
cccgccaccccagcaccccagagaggaaacgaggcccaga

SEQ ID NO: 59497 - RNA, 80 nt, Homo sapiens
cccgggcgccgggcccccagccgacagccagggcggaagcccgccccagagcagggcaaggagagccaagcggaccaaga

SEQ ID NO: 59498 - RNA, 70 nt, Homo sapiens
cagagccccaacagccccgcggccacagcgcaagagggacccagaggaagagacaaagaacaggaaccag

SEQ ID NO: 59499 - RNA, 45 nt, Homo sapiens
gaggagcacacacaaagaggacccgacagcccgagaaaagacgcc

SEQ ID NO: 59500 - RNA, 77 nt, Homo sapiens
gagggagccaagacgcgaggcaggaaaagggccaccgacgggagagagcaccccaacagggcagcaggccagcccga

SEQ ID NO: 59501 - RNA, 79 nt, Homo sapiens
cagacaggaacacgagaagccaaggcagggcgggacgaggaacgaggacccagaaagccacaccaaaccagaaaagaac

SEQ ID NO: 59502 - RNA, 59 nt, Homo sapiens
gaaggaacgcagaaacacaggaccccccccaacgaggaagcgggcaccaacagacaacc

SEQ ID NO: 59503 - RNA, 91 nt, Homo sapiens
aaagaaaggggggagagccacaggcaaaaggcccagcaggccaaagaaaaccagcaagacgggagacaaacacaggaaccaagggcaacag

SEQ ID NO: 59504 - RNA, 77 nt, Homo sapiens
acacggggaagcgcaaaaacaagacggggcgccccacagaggggcgacgaagaggaaaaggggagcaggaggcgaca

SEQ ID NO: 59505 - RNA, 82 nt, Homo sapiens
cgaagacccgcccgccgcggcgcaccacgcagacacaacacaccagaccaaggaagacagagagcaagaccccagcccaacc

SEQ ID NO: 59506 - RNA, 78 nt, Homo sapiens
ccaaaccagccagagcggaggagaaggacgggccccaaggaccagcaccggacgggaccaccagcccgggggggaggc

SEQ ID NO: 59507 - RNA, 78 nt, Homo sapiens
aagacgcgggggccgccccccgaaaacagggccagacgggaagaaacgagaagggaccaggggcggaagcggaaaaca

SEQ ID NO: 59508 - RNA, 77 nt, Homo sapiens
agccaccaagaggccagaaggcagaacagcgacacgaacggaagaagcaggaagcaccaggaagaagaggcggaaga

SEQ ID NO: 59509 - RNA, 101 nt, Homo sapiens
ccccagcgggccgcggcccgcaccccgggaggggcgccccgacgccaagagaggacggggacgggccccaggacgaggaagacaaggccagccacggaagg

SEQ ID NO: 59510 - RNA, 76 nt, Homo sapiens
ccgaaacggaaagaagcaccggagagacagcacagcacccacaaagcaacggagaaaaggacgacggaaccaccac

SEQ ID NO: 59511 - RNA, 56 nt, Homo sapiens
ccccccggcgagccaagaacacggccacccaacagaagacaacaggcacaaagaga

SEQ ID NO: 59512 - RNA, 76 nt, Homo sapiens
aaggggggcagaggccggaccccagcacacagaagccgagacggaccgccagaagcagcgcgacggagagccaagc

SEQ ID NO: 59513 - RNA, 71 nt, Homo sapiens
caaaacaccgggccgcagccaggacgagccacaggagcccagcaaccggcaacagcccagaaaaaccgaca

SEQ ID NO: 59514 - RNA, 58 nt, Homo sapiens
gacacggccagacgcccccaagacaaaaccgaacgcggagagagcccgggaagaacaa

SEQ ID NO: 59515 - RNA, 60 nt, Homo sapiens
gcccaggggccaggaccggcggacagccccaggccagaaaggaggcccacagccgaccga

SEQ ID NO: 59516 - RNA, 80 nt, Homo sapiens
ggggcccagcagacagccgaggggagcgcggggcccggcagaaaggacgcaaagcaaggagagcgcgagagaacaggggc

SEQ ID NO: 59517 - RNA, 85 nt, Homo sapiens
ccagaggaagaccaaacaagggcacacagggaccaagaagccccggggacacgcgagaaaagacgccgaagggaagaccagcggg

SEQ ID NO: 59518 - RNA, 100 nt, Homo sapiens
gaaagaccagggaaccacagggaacccaagagacccgcccagggacacaggaagcgccagccccccagccaaggacagcgagcccagggcgagcgccacg

SEQ ID NO: 59519 - RNA, 76 nt, Homo sapiens
aaaagagaagaggaagaaaaaaggagaggacagaaagcgcaaaggagagacccaaaagacacgcaagacagaaaga

SEQ ID NO: 59520 - RNA, 82 nt, Homo sapiens
ggaccaggcgaagcggccgagcaggcgagcgaacgacgggcccccagagccgacggcccccaccccccacaagacgcggccc

SEQ ID NO: 59521 - RNA, 81 nt, Homo sapiens
ggagacggacacacaagagacggaggaaggggcgccggccgagcccgggaaaacgacagcagcagcagggccggaagacgc

SEQ ID NO: 59522 - RNA, 76 nt, Homo sapiens
cccccagaaaggaaccagggccgaaaggaaaagcagacaacgaagcccacggccgggagggaaagcacaaggaaga

SEQ ID NO: 59523 - RNA, 51 nt, Homo sapiens
gcaagcgggccaccacagaaaagaagaagcaaggaagccggaggcaaggag

SEQ ID NO: 59524 - RNA, 55 nt, Homo sapiens
gcccggacgggccccgagagcaagaacagccagcaaagacaagagcagaccagca

SEQ ID NO: 59525 - RNA, 68 nt, Homo sapiens
caacaccagcaaaacagaaccccaaaccccaacaagggccgggcccgagccaaagcggagagagaggg

SEQ ID NO: 59526 - RNA, 80 nt, Homo sapiens
acgaggggccggcgagaggagcgggcgcacgggaggggaacgggccgaacgcaggaacaagagagagaaccaaaaaccgc

SEQ ID NO: 59527 - RNA, 75 nt, Homo sapiens
gccagccaacgaagagagagaaggagggagggaaaccaagaacagagaacgaggaagaaaaggaaacccaaaaag

SEQ ID NO: 59528 - RNA, 86 nt, Homo sapiens
cccggcagcaccccaggaacaaggagcaaagaagggaccaacccgccagagacgcaaaggcaccccgcagccagccccgaacccac

SEQ ID NO: 59529 - RNA, 68 nt, Homo sapiens
acccccagggacgcaaacacggaacccagcaccaacgagaaaagaaaaaggaagagaagagaacaaca

SEQ ID NO: 59530 - RNA, 76 nt, Homo sapiens
gaggcaaggcagcaggacgagcaagcagcacacaggccagcaagagcaaggaggcagggagcgaggcggccagggc

SEQ ID NO: 59531 - RNA, 70 nt, Homo sapiens
ggacccggccagcgacgcaccgagaaaggaaggaaaaccgacgaaccaaacccgggaaagaaaaacccag

SEQ ID NO: 59532 - RNA, 72 nt, Homo sapiens
cccaagcagcagaggaacaacgcaaacagcaagaacaggacagagcaacaacaaggaagcgagccaacagga

SEQ ID NO: 59533 - RNA, 58 nt, Homo sapiens
cacggacaaggaagggcgaggacacgccaccacaccgacccacgacaagaacggagag

SEQ ID NO: 59534 - RNA, 53 nt, Homo sapiens
cagagggagaaaaaaaaaacccagaggcaagcggacacgcccaagaagaaccg

SEQ ID NO: 59535 - RNA, 73 nt, Homo sapiens
cgccacacccgacccgccaagaagccgcgagcaccacaggcggcgcaaccaccgacccggcgcgcggacccag

SEQ ID NO: 59536 - RNA, 97 nt, Homo sapiens
caccacagaggaccagaaagcacagcagaccgggaggcacaggggcaacaaggacacccagaaggacgcaaccccaaagcagcaaccaagaaaacgg

SEQ ID NO: 59537 - RNA, 80 nt, Homo sapiens
gagaggagcgggaaacgggagggaaccagcaacaagccgacgaacccgggccggcccaccccacacagagcgccacccca

SEQ ID NO: 59538 - RNA, 79 nt, Homo sapiens
gcacggagacaagcggccccagcgccccgagccggaccgcccagcccccggccccgcgcccgggcagccccgaaccccc

SEQ ID NO: 59539 - RNA, 73 nt, Homo sapiens
gaagaagagggagccggacaagacaaggacagagaagaggggcaaggccaggcccgagagacagaggcagccg

SEQ ID NO: 59540 - RNA, 55 nt, Homo sapiens
gcagcaaaacacgcccgagacccggccaccagccggagaggcccccgccgcaacc

SEQ ID NO: 59541 - RNA, 73 nt, Homo sapiens
gccgcgagcagcgcacgcgccgggccgcgaggagcgcgccaggaacagagacagacccgggggcccccaagga

SEQ ID NO: 59542 - RNA, 86 nt, Homo sapiens
agcaggccccgggagcaagcggggacggcgcggccagaacaaacggacccaggacaaaacgacaccagccaaaccagcagccccca

SEQ ID NO: 59543 - RNA, 72 nt, Homo sapiens
cgaagcaggacggagccacgccaagaagcgagagaagaaaaacagaaaaagccaagacagaaacaagaacca

SEQ ID NO: 59544 - RNA, 80 nt, Homo sapiens
aagagcccaggcaaaacaagaagcccgccgcagcaagagagagcaaggagcaggcgcagagcagagcagagcagggcggg

SEQ ID NO: 59545 - RNA, 85 nt, Homo sapiens
acaaccagaccccaacagagacaggaaaaccgccagaacagcccaagcccaagagagccccaaaacagaagaaagagagaggcga

SEQ ID NO: 59546 - RNA, 70 nt, Homo sapiens
cccaaccagcccagcgcgcggccccaccggaagacgagcgacaggcgacgaggaagcgggccagcggaag

SEQ ID NO: 59547 - RNA, 68 nt, Homo sapiens
cgcagggcgcccccggaaagggcagagagcccaaggagacaaaggaccgccagcgccagggaaaggac

SEQ ID NO: 59548 - RNA, 70 nt, Homo sapiens
cgccaggacacacggcacaaggcgggggagccaagggagagggaagaaaacaccggcgaaaccaaccgcg

SEQ ID NO: 59549 - RNA, 71 nt, Homo sapiens
aaaggcaagcccagcagcggcccaaggcgcaccccacggacagcgagaggggcagggcccgggcgcccggc

SEQ ID NO: 59550 - RNA, 75 nt, Homo sapiens
gaaccaaggaagaccacaggcagcaaagaaaacgaggcgccaggaacccaagcaagcaccagcccaaaagaaaac

SEQ ID NO: 59551 - RNA, 79 nt, Homo sapiens
cggcgccagcagccagccggcacgccaccgacaagcaagccgaagagaaagggccagaagcccccaggaggagaacgag

SEQ ID NO: 59552 - RNA, 74 nt, Homo sapiens
gcggaggcagccaggcaagaggcgcgcagccccgagacacaccggaccagccgaaacaagaaaacgaaaaaccc

SEQ ID NO: 59553 - RNA, 76 nt, Homo sapiens
aggacgacagaccgagggaggacaccggaccccggacgcgggaaagaacaacgccacaaccccgaacgacacaaag

SEQ ID NO: 59554 - RNA, 35 nt, Homo sapiens
accagcacgcccacccagagaacggagaaacccgc

SEQ ID NO: 59555 - RNA, 73 nt, Homo sapiens
ggcaagaagcagagcgcagagggagcaagggaaggaaacaaaacgacccgagcagagacaagggacgcgaagg

SEQ ID NO: 59556 - RNA, 77 nt, Homo sapiens
gacgggagggcaacgagcacaacaggagcacgaggagggccaggccgggcccgaagagacaccagagcaacgcaaca

SEQ ID NO: 59557 - RNA, 82 nt, Homo sapiens
gagcagccaaagcgacagagggaggggccaaagggagagggacaacacacgagcacaaacacaagcggagacagaagcacga

SEQ ID NO: 59558 - RNA, 61 nt, Homo sapiens
ccagcaccccaccaaacgggacggcacaagcaaggaacaggaacgggaaaaacacaaaaca

SEQ ID NO: 59559 - RNA, 106 nt, Homo sapiens
ggcggcgacggccacaggggcggcgacggcgcaggcgaagcgaaacaggcacggaagacaagcggagacaaagggccgaaacaggaggacaagaaccacgacagaa

SEQ ID NO: 59560 - RNA, 77 nt, Homo sapiens
ccgaagcgacgagcaagacgccaggccgcagcgggagacggcacaggacacaaaccaggaacaggcgcccgaagggc

SEQ ID NO: 59561 - RNA, 60 nt, Homo sapiens
cagaaccccacagcaagaggacgggggagaggcaccagcaacagaccaaccgcagcaagc

SEQ ID NO: 59562 - RNA, 83 nt, Homo sapiens
gggagaagggcagggcccgacacagcgagaaggcccaaagaacaaggagggggccagaggccagaccggcccgggccgggcca

SEQ ID NO: 59563 - RNA, 59 nt, Homo sapiens
aaaaacgggggagagccacggaagccgacagacaaccaggagggagccacaccaaagcc

SEQ ID NO: 59564 - RNA, 94 nt, Homo sapiens
gcgaagaaagaagcagaagggaagcacaggcgccagggcaaacaccaagaaacaaggaggacgggacccagaacaccggacagacccgaagcgc

SEQ ID NO: 59565 - RNA, 80 nt, Homo sapiens
ccggcgcaggggagcgaaggcgaggggcagcggcaggagagccggccgcgacaggacggaagcacaaacaccagcccgaa

SEQ ID NO: 59566 - RNA, 78 nt, Homo sapiens
aaaggaggcagcgcaaggagggcggcgggacgcaccgaggccagaccgccgaggcaggcacggggacacaaggccacg

SEQ ID NO: 59567 - RNA, 76 nt, Homo sapiens
caggaaagaagcggcaaaggccaagcacggcaaagggcagcaaccaaaagccaggaaaagcagcagcaacgggaac

SEQ ID NO: 59568 - RNA, 78 nt, Homo sapiens
cgggccagcgacccgcgccagcgcccagggggggaaaccaccggggagggcacaggcacgaacagacagagaaaccaa

SEQ ID NO: 59569 - RNA, 77 nt, Homo sapiens
ggcaagcaaaagggcaaagcacacaaaaccaaacaccaagcgacccgagccacaacgcgaccaaaagacgggagccc

SEQ ID NO: 59570 - RNA, 78 nt, Homo sapiens
gaggccaggcgaggagagcgaacaaccccagaagagcggaaaagaagaagagagccaaccaaagaagggagaggagga

SEQ ID NO: 59571 - RNA, 79 nt, Homo sapiens
gagggaggaggaaccccgcaagggcagaagggaagaacaggaggggacaccgaaaagaggaggagagcgaggaagacgg

SEQ ID NO: 59572 - RNA, 64 nt, Homo sapiens
agaggacgaccagaagaagaacagagaagagccagaaacagagacgggcagcaggagcggaggg

SEQ ID NO: 59573 - RNA, 78 nt, Homo sapiens
ccggaagcaggccagaacacaggcgcagagcccaccagagccaacccggcagaccaacgcccaacccagcagggggcc

SEQ ID NO: 59574 - RNA, 79 nt, Homo sapiens
caaagagaccccggaacccacgcccccgagagccgccaacacccggccgagggcacacacaacggggccgacgggccac

SEQ ID NO: 59575 - RNA, 51 nt, Homo sapiens
ccacgcggccagcgaaaacgcccagaagagaagcaagggccccaagcgcac

SEQ ID NO: 59576 - RNA, 69 nt, Homo sapiens
accccagccaggaacccccaccaaccgacagagcgccaggccagagcgaaaccccccgagaacaagcag

SEQ ID NO: 59577 - RNA, 79 nt, Homo sapiens
cccaacccagaacggacaacgcggccaagggaggccgccagccgaggcgaggagcgggggagcggcgccaaggagccgg

SEQ ID NO: 59578 - RNA, 77 nt, Homo sapiens
cggagccccggaccagccggccggcccgccaaggagaacggacaccgcaacccgggagaagccgcgggagcggaaga

SEQ ID NO: 59579 - RNA, 73 nt, Homo sapiens
gagggaccacagcgagaccgcgccggcgaccaggagacaagaggacgacgccggaccccagagagggacaaca

SEQ ID NO: 59580 - RNA, 59 nt, Homo sapiens
aaagggaacccacaggcaggcaaacaagggcaggcgccccaggagccacacgggcagcg

SEQ ID NO: 59581 - RNA, 75 nt, Homo sapiens
cccagacaaaccgaaggcgacagagacaggacagcaggaagagaacagcaaaaccagacgccgggaagagcgacg

SEQ ID NO: 59582 - RNA, 78 nt, Homo sapiens
agaagaggaagcccgacaacgaagcggaccagcaccaccacagccagccagaacagaaggcccgaaccaggcacaacc

SEQ ID NO: 59583 - RNA, 82 nt, Homo sapiens
gaaacgacaggcaacaagacaagcggcggggccccgggacaacccccaagaaagggagcccagaacgaaacaacccagcaga

SEQ ID NO: 59584 - RNA, 55 nt, Homo sapiens
cggggaggaggcgaagccacacagagggcaagccacagaccccgccggggaagaa

SEQ ID NO: 59585 - RNA, 77 nt, Homo sapiens
acaaaagcaacaaagagggccccagggaaaggaccgaggcaggaaagaggccagacgcagggaccggcaccgacggc

SEQ ID NO: 59586 - RNA, 51 nt, Homo sapiens
cgagaacggagagaacgcggaaggagacggagaagaaagccaaacgagcaa

SEQ ID NO: 59587 - RNA, 38 nt, Homo sapiens
gcacggcacggggcagagcagagggaaaacggcacgca

SEQ ID NO: 59588 - RNA, 75 nt, Homo sapiens
aaccacacccagggacccccagaaggaacggagacaaaaacggcccggagaggaggcggcccggcagcaaggcga

SEQ ID NO: 59589 - RNA, 79 nt, Homo sapiens
ggacgccggagaggcaccggaccgggagcgccgccgcgagacgacacagcgacgaaggcgcggccagggaggcggcggc

SEQ ID NO: 59590 - RNA, 67 nt, Homo sapiens
cccccgggagcagagccaaggggcgagaacaaggagagagcagccgggacagaggcacgacaacccc

SEQ ID NO: 59591 - RNA, 77 nt, Homo sapiens
aaagggccaaagaagggagagagacaggacacagaacagagaagaagcagacgagacagaaaaagaaccagacagag

SEQ ID NO: 59592 - RNA, 79 nt, Homo sapiens
ccaagggcggcgacacgacggcggaacggggaacgacggcccagcaggcggggaagagaaagggccacaaacgaacagc

SEQ ID NO: 59593 - RNA, 76 nt, Homo sapiens
aagacgacagaacggcagcggagaaaacaaccaggacggcaagacgaggcaaaaagacacagaacaagagcgccaa

SEQ ID NO: 59594 - RNA, 83 nt, Homo sapiens
gcagcgaaaggaaaccgccccgaaagccccagggcgagagaggaaagggccagggagcgccgaccacccggagcgaggcaacc

SEQ ID NO: 59595 - RNA, 76 nt, Homo sapiens
agaaaaacgaggcccagagacagaacaaggccagacacaggaacgccacaagaaacaacagcaaggcgagggccac

SEQ ID NO: 59596 - RNA, 67 nt, Homo sapiens
gaaggaccaagaaccagaccaagagaggcacggcggccagcgaggggagcacacaacaacggagaga

SEQ ID NO: 59597 - RNA, 83 nt, Homo sapiens
ggcagagaacacaggaccaggccacccaaggccgaaggccccaggccaggccagacgggcgccagggcggaaccaagcaggga

SEQ ID NO: 59598 - RNA, 56 nt, Homo sapiens
aacgaaacacgaaagggcagcgaggggcacagaggcaggcacaaaaccacaagcga

SEQ ID NO: 59599 - RNA, 37 nt, Homo sapiens
ccagacagcacacaagcaggccagaagaccgaagaca

SEQ ID NO: 59600 - RNA, 88 nt, Homo sapiens
cccagcccgccagcgcgccgggacgccggggccaaagcgaccaaccccccaccgcacgcagggggccccccgcccggggcaagaccac

SEQ ID NO: 59601 - RNA, 54 nt, Homo sapiens
caacaaggaaagaggcacacccagcccgagcaagaggaaacacaaaccaacggc

SEQ ID NO: 59602 - RNA, 71 nt, Homo sapiens
ggggcgcccggcgccggccgagaaggcagaggcggaaacgcccgcagaagaaggaagaggaacaagcaaaa

SEQ ID NO: 59603 - RNA, 71 nt, Homo sapiens
acagaggagcccaagcaagaagaagaagcccgaacaaggccccaacaggggaagaagagagggcgaaggag

SEQ ID NO: 59604 - RNA, 78 nt, Homo sapiens
aggagaggcccagcaaacaaaggcaggaagagaaaaggcagagaagcaagcgaaggaacgcgaagaagagcaaaagac

SEQ ID NO: 59605 - RNA, 75 nt, Homo sapiens
ccccaaagaaacaacaggccaggcccggacaggacacaaggacccccgaaggccagagacccaccgggcgaccac

SEQ ID NO: 59606 - RNA, 82 nt, Homo sapiens
accgaacagaaggaacgacgcggaccagaagccagagcgaggacgccggcaggggcggccgagcccgggggaggccccggag

SEQ ID NO: 59607 - RNA, 74 nt, Homo sapiens
aaaagaccccaaaccccgcgcaaggcagagaaacggaaagacaaaacagaggagaccagaccagaagccccgaa

SEQ ID NO: 59608 - RNA, 69 nt, Homo sapiens
accacaagaggacaaccggaaaggagcgccgcaggccaaaaaagagccacccggaacccgggggaaaac

SEQ ID NO: 59609 - RNA, 84 nt, Homo sapiens
aagaacaaaacggcaaccgcaaaagcacgagaaagaaacgaaacaggaacaggggacggacccagacagccgccagcggaaaga

SEQ ID NO: 59610 - RNA, 34 nt, Homo sapiens
cagcggccacggagggcgccacagaccgggccaa

SEQ ID NO: 59611 - RNA, 43 nt, Homo sapiens
gacaagacaacgcgcagcagcagcggaagagcggacagcgagg

SEQ ID NO: 59612 - RNA, 75 nt, Homo sapiens
ggcaaacccgagagaacgggcagacagccacacacacccccgccggcgcacaccacccgagagcagcccacggaa

SEQ ID NO: 59613 - RNA, 77 nt, Homo sapiens
gggacagcaccgcagcagagcgaaagcacacgcggagggcgggaaaccaacccgcaaggcagaaccagcaagggaag

SEQ ID NO: 59614 - RNA, 77 nt, Homo sapiens
ggaagaaacagaaacaccaacagccagccccaggaggagggccacaacaaccgagcgaggaggccgcacccaggcgg

SEQ ID NO: 59615 - RNA, 75 nt, Homo sapiens
caccaaaaacaaagaggagagaagcggaaaagaagaagagagccaaccaaagaagggagaggaggaggcccgcag

SEQ ID NO: 59616 - RNA, 66 nt, Homo sapiens
gccaaagagcaagccaaccaagccaggcacacaggaagaggacaccagcccgggagaagaggcaac

SEQ ID NO: 59617 - RNA, 85 nt, Homo sapiens
ggagcaaggaaaagacccggaaagaagggacacagacggagcaaacccccaggacaagggcaacgcgggaagaggagaaaacaag

SEQ ID NO: 59618 - RNA, 78 nt, Homo sapiens
gacgccagcgggacgaggaccgagaccgcggccgggaccgagggagaggggcgggagccgagagaagccaacccgggg

SEQ ID NO: 59619 - RNA, 81 nt, Homo sapiens
ggcgggaagcggaggccggcacgcccgcccgaggcgacggccgcggcgcacagggccaaccgccccccagcagcaggcacg

SEQ ID NO: 59620 - RNA, 96 nt, Homo sapiens
acgacgagcgggcccggccaggaacagggacagcacccaccccggagggggaccacaagacccacgacaggagagaagagacccacgcgagaacca

SEQ ID NO: 59621 - RNA, 77 nt, Homo sapiens
aacgagacagaggagcccagacccacgcgacaggagaagaacgaaaacaaacggaagagagggcagcaagaaagaac

SEQ ID NO: 59622 - RNA, 77 nt, Homo sapiens
aaaagcaagaacccacgggacaaaagccggaggcagacaaggaaacgggcagaaaggggaagaagaaggcggaaggg

SEQ ID NO: 59623 - RNA, 84 nt, Homo sapiens
aggaaagcagcccgaaaaagacgcgagaagccacacggaccccagccaggccacggggacaacaggcagcagcgcagcgcacag

SEQ ID NO: 59624 - RNA, 106 nt, Homo sapiens
aacgcaaagagcagcccccacaagcgaagagcaaaagcacagaaaggacacaaaggaggcagcaacacagagaccagaagaccacagcgacagcggcagagagaga

SEQ ID NO: 59625 - RNA, 67 nt, Homo sapiens
caaccacagccaagagcagccaaacgacgccacgaacaaaagagagacgcggggaaacacaggcagc

SEQ ID NO: 59626 - RNA, 84 nt, Homo sapiens
acaccgccagcgccaagggcggggagcagaggcgggaggcggcagaagcagccagaggagggcacaggcggcgcggagcgcgcc

SEQ ID NO: 59627 - RNA, 108 nt, Homo sapiens
agcagaccacccggacaccacggaccaaaaagacccgaccagagcccgaggagagacaggaaggccgaaggagagaaaaaaaccgaggcgccagagaagcggaagaag

SEQ ID NO: 59628 - RNA, 89 nt, Homo sapiens
gcacacaagggccgaagcagggcacaaaaccaaggccaagcaagggaaccaaacaagacaaaggaggcagcaaacagcacacaacggac

SEQ ID NO: 59629 - RNA, 83 nt, Homo sapiens
ggacgccggcccgcgcgcgcaccccgcggacgccacagcgcagcaagaacgaggccaaggaggagggacacagagacagcgaa

SEQ ID NO: 59630 - RNA, 77 nt, Homo sapiens
acaggaaacgcacagaagaaacaacagagagccaccagaacgagagccagaaaggaggagcaaggaagcccaggaac

SEQ ID NO: 59631 - RNA, 73 nt, Homo sapiens
ggagacagaaaggagcgagaaaagagaacccaggaagaagacggagcagaacgaaaagaaggagccacgcgcc

SEQ ID NO: 59632 - RNA, 85 nt, Homo sapiens
accacagccaagcccaagcaaaagccaacagagcagcagcacgggcagcagacccccaacaaccacaaagaaaaagaaagggaag

SEQ ID NO: 59633 - RNA, 85 nt, Homo sapiens
gcagccaaaggcacgacgcccgggaagagggggagcggccagcgagagccagggcccaaagaaccgcggagccggagcgaggcgg

SEQ ID NO: 59634 - RNA, 71 nt, Homo sapiens
ccagggcccagcaccgcagggcccgaaggacaaggaaggaagaaggcggaggaacacaccgcgccccgaaa

SEQ ID NO: 59635 - RNA, 78 nt, Homo sapiens
gaggagggggacgaagcccccagaaagacaccgagaggacggcagacagaggcacaaaaggagaaagcagaagaaaca

SEQ ID NO: 59636 - RNA, 73 nt, Homo sapiens
gaagcgaagacagagaacgaagcgaccaaagcgcacggcagcgagagccaccaccaaagacccgacaagcaga

SEQ ID NO: 59637 - RNA, 81 nt, Homo sapiens
agaaacggaacaccaagagagacaacaagcgaagaaaggacccgcccagcaggcacagacaccagacacagcccacagccc

SEQ ID NO: 59638 - RNA, 110 nt, Homo sapiens
gggcccccgagccaagcaggcccccaggcccccccacccggaacgccgggacgaggccaggagaccccaaggagcagaaggggccaggaggcgccagggggacccacgaa

SEQ ID NO: 59639 - RNA, 36 nt, Homo sapiens
gacagccgcggacccagaagggaacccgaaagacaa

SEQ ID NO: 59640 - RNA, 50 nt, Homo sapiens
ggggccaccaagcaccacagaaaggacacaccgagcacacgaagcagaca

SEQ ID NO: 59641 - RNA, 70 nt, Homo sapiens
agaagcgcggcagggagcgcgggggcccgcgcagcagcgaccacgaacccgacaagaaagagcaaaggga

SEQ ID NO: 59642 - RNA, 70 nt, Homo sapiens
cgagggccagggaggacacgcaggaggaaggcccagcgaagagggagaccaacgaggggacgcgcaacaa

SEQ ID NO: 59643 - RNA, 100 nt, Homo sapiens
cagcggcggcccagaacaaccccaagacgaacgccccgcagggagaaagagaggagcaggaagaagaccacgcccccagaaggcaaaaccaggaacaaag

SEQ ID NO: 59644 - RNA, 68 nt, Homo sapiens
aaaaaacccaacagggacacccggagaagcgcgcacggcaccaaggcaagcaagagaaggcagcgcgg

SEQ ID NO: 59645 - RNA, 88 nt, Homo sapiens
ccgccaccgggcggggccgcggcggcggagcggaaaaccaacacagcgggaggagcgacgcaggaacccacccacgggcgcaacacgg

SEQ ID NO: 59646 - RNA, 60 nt, Homo sapiens
cgcaaccccggcgcagcaggagcgcacggccgcaccacacagacagggccagcacagcaa

SEQ ID NO: 59647 - RNA, 57 nt, Homo sapiens
aaaacaaacacacgcaaaggagaaaggaaccgacagaggccggaagagcgggagcgg

SEQ ID NO: 59648 - RNA, 78 nt, Homo sapiens
cgcagcagaacacccccgacagcagcacacccgggcaaaggagcagagaacgacaagccacacgaggacagcccgcaa

SEQ ID NO: 59649 - RNA, 60 nt, Homo sapiens
gcagggcggagagacaccacaggacaaggagcaccaagaaccgacccagaacgcaaacag

SEQ ID NO: 59650 - RNA, 66 nt, Homo sapiens
gcccccagcaccacagcccgcagccccgccagccacccccagaacccaagaaggcagaagccagcc

SEQ ID NO: 59651 - RNA, 42 nt, Homo sapiens
agcgccggggcacgacacaaaaacagaggcggggcaccaggc

SEQ ID NO: 59652 - RNA, 88 nt, Homo sapiens
aaaagaagaggaagcccagaaagggaaaaacaccagaacggagaggggcgaacgccaaaagacgaacacaaagggaaagaggagaggc

SEQ ID NO: 59653 - RNA, 76 nt, Homo sapiens
gaacgaaggaaagacacaagagaccacaagaccgaccaggaaaagacaggaacggccgaacacagagggagaagag

SEQ ID NO: 59654 - RNA, 72 nt, Homo sapiens
ggccagcagcaggcagcagggcgggcacgagcaaccggcgagcgagggcgggaggccaggcagcacgcagac

SEQ ID NO: 59655 - RNA, 93 nt, Homo sapiens
ggaccggcccagaggacacgaccgagagggacacggagaccgggagcaagccccgggaaaagaaagagccaaccacggcaccccaaaagcaca

SEQ ID NO: 59656 - RNA, 73 nt, Homo sapiens
agggagcgggccccagaaaaacaaggaaagaggggaaaggagggagaagccccggggaaagaggaggaaaaca

SEQ ID NO: 59657 - RNA, 69 nt, Homo sapiens
acagaacgccaggaccaaaacagggagaaacacagccagaagcaccagcagacggaacaacgagagaaa

SEQ ID NO: 59658 - RNA, 75 nt, Homo sapiens
aaaacggaacgcacgaaacgaaagaaaggagaacaagacaggccagaggagagggagacgcaaaccaccgacaca

SEQ ID NO: 59659 - RNA, 77 nt, Homo sapiens
ccacagcagccgggaggagagcgacccagcacgggcggacccgcccagacagggggcagggcccagaggccggagcg

SEQ ID NO: 59660 - RNA, 74 nt, Homo sapiens
gaggccagcacggccgcggcggggcccccccgcgaccccacgagggcggagaacggaaaagcaccaggaagcag

SEQ ID NO: 59661 - RNA, 57 nt, Homo sapiens
gcgaggagcagcgaaaacggggagagccggaccccagcgcccgcaaacccgccgacc

SEQ ID NO: 59662 - RNA, 76 nt, Homo sapiens
gcggagcccgcagaccgcagaaggccggagacaccagcagggccacgccgcaggacacagccgacagggccagcaa

SEQ ID NO: 59663 - RNA, 69 nt, Homo sapiens
gcccaccccagagcaccggcagccaaaaaagggaaacccagagaagacggaagagcgcccgggggagaa

SEQ ID NO: 59664 - RNA, 74 nt, Homo sapiens
gagaggccggccgacccgagaacaggagagcgcgcgccgcgcgcccgcacaaacgccggggacaacaacccgaa

SEQ ID NO: 59665 - RNA, 63 nt, Homo sapiens
cccagaagaagggaaggcgcgaggaggaaaggaggacgagacgcaagaggcgccccaaggaaa

SEQ ID NO: 59666 - RNA, 69 nt, Homo sapiens
acaaaagggccaaagaagggagagagcccagcgacccaacagagacccgcaagggcacagggccccccc

SEQ ID NO: 59667 - RNA, 63 nt, Homo sapiens
caagcaaccggagaagacaacggcagcagggaagagagaaggacgcaagaccagcacacagac

SEQ ID NO: 59668 - RNA, 73 nt, Homo sapiens
gagagaagccaaaccccaggcgaccggaacgcacaccaccgagggaacagagagcagacagacacacaagagg

SEQ ID NO: 59669 - RNA, 76 nt, Homo sapiens
gggacaccaggaacccggccacagcaacggaggcggcaaaagcagaccggaaaacccaccggcaagaccacacccg

SEQ ID NO: 59670 - RNA, 76 nt, Homo sapiens
gcaaacagagaaacaagaggaacagaaaagaaccaggcgaaccgagaggaagggcagcgcaaggcggagaacagcg

SEQ ID NO: 59671 - RNA, 74 nt, Homo sapiens
cagggcaaaaacggagggcgaaggcgagaaggggaggaacagggcgagacgaacaacgcgcgcaggagaccacc

SEQ ID NO: 59672 - RNA, 37 nt, Homo sapiens
gggaccagcgacgcacccgggcgcggggggccaccaa

SEQ ID NO: 59673 - RNA, 68 nt, Homo sapiens
gcgccacggccgccaggccgccacaacgaagagcggaaggacgggagggaacgcaccccacaaccagc

SEQ ID NO: 59674 - RNA, 73 nt, Homo sapiens
aaggaccgaaacagaaacggaacaccaagagggcggacggcagacaggcagcaaccggccccgcccaccagcc

SEQ ID NO: 59675 - RNA, 58 nt, Homo sapiens
gacaggcgagagaggaggacacgaccggggcacaagaccgaaagagcaggcaagcaaa

SEQ ID NO: 59676 - RNA, 42 nt, Homo sapiens
agcaagagaccagagcccaagggcggcccgaaaaggcggagg

SEQ ID NO: 59677 - RNA, 70 nt, Homo sapiens
gccacagaggacggcggcgcagccccgggagacaccaccgaagcacgaacacagggcgaggggccgaaaa

SEQ ID NO: 59678 - RNA, 84 nt, Homo sapiens
acccacgagggcagccggcgggaggaacgccacgcagcgccggaaacgccacagaaggagggggcagagcacggcaggcagaag

SEQ ID NO: 59679 - RNA, 70 nt, Homo sapiens
gcacaagccagaggccaacccagggccggaaaggaaaaacaccagaacggaaacagaaggacacaccaga

SEQ ID NO: 59680 - RNA, 71 nt, Homo sapiens
cgcggccagcacggcaacgcagcccgaggacaagcggcggacgggagaaagaacagacaagccgcaagaac

SEQ ID NO: 59681 - RNA, 40 nt, Homo sapiens
gccaagggcacagagggagaggcccccgaagaccgagcga

SEQ ID NO: 59682 - RNA, 62 nt, Homo sapiens
aaaccaagggaaacaccaagacaagccccccgaaaaagccgaggaggagaggagaggccgag

SEQ ID NO: 59683 - RNA, 59 nt, Homo sapiens
gcgcccacgcagcagccggggaggcagggagcccagaaagaagagaaaaagagagagaa

SEQ ID NO: 59684 - RNA, 56 nt, Homo sapiens
gggacggcaggaaccggagacccacagaccagggcaaggaggaaggcccacaagcg

SEQ ID NO: 59685 - RNA, 76 nt, Homo sapiens
ggggaggagccacagagcagcgagcagcaagaggagcggcaggcggggcagaagagaccgaagcagcgcggagcac

SEQ ID NO: 59686 - RNA, 80 nt, Homo sapiens
ccgggaccggccggagaggagcgacgcgagggccgagacggcgcggcaagggccggagcgagggagagcaggaacacaga

SEQ ID NO: 59687 - RNA, 39 nt, Homo sapiens
aagggcagaggcccccacgaccaaaaaaccaaggacgac

SEQ ID NO: 59688 - RNA, 80 nt, Homo sapiens
gacacgggagaccgcgagggaaaggagcgggacccggaccccaggagagccaccaaagaacaacaagagccgcagaaggc

SEQ ID NO: 59689 - RNA, 82 nt, Homo sapiens
acggagggagacaaagcagcgcccgcgccgggcccggaaagcgccgcccagcagccgcagggagagagcagagaggggagca

SEQ ID NO: 59690 - RNA, 34 nt, Homo sapiens
ccccgagaagcgggaacagcggggacgagagccc

SEQ ID NO: 59691 - RNA, 73 nt, Homo sapiens
gcagccgggccagggccagagcaaagggaaagaaaggcaaagcgagcaagagggagaccaaccaggcgggaaa

SEQ ID NO: 59692 - RNA, 77 nt, Homo sapiens
cgcgcgaggaaaggccgaggagccggagccgcaggagaagacagaggagccagaccaagagacagcacaggcgagcg

SEQ ID NO: 59693 - RNA, 76 nt, Homo sapiens
aacagaagaccagcacagccagagggcaccccaacccaacccagaacaggcgcagaaccagaggggacgcagaggg

SEQ ID NO: 59694 - RNA, 73 nt, Homo sapiens
aagccccaaggagcccggccccacaccggcacacagcagcccaaaaggcagagcgaggagagaagaaggaggg

SEQ ID NO: 59695 - RNA, 75 nt, Homo sapiens
acaagcgaaaacaaaccaagacaacaggcacagaacagaagggagaaaaccaaacaagagaagaaaaaagacgca

SEQ ID NO: 59696 - RNA, 82 nt, Homo sapiens
cggcccgggcccccagggacagcggacggaaagacggcagaagacgcagacggaacagcacgagcacgagcaggcccgcaag

SEQ ID NO: 59697 - RNA, 74 nt, Homo sapiens
acaaaagcgccagagccaagaacggagaaaagaaagccagaaggaaggaagcaacgaaccaagaaaaaacggaa

SEQ ID NO: 59698 - RNA, 79 nt, Homo sapiens
cggaaaccagaaacgcacaggaagagcgagaaacgcggaaagaagcagaagggggaaacaggaagagaacagaacggaa

SEQ ID NO: 59699 - RNA, 77 nt, Homo sapiens
aagggcgcgcgcccggacgccacgcacccgcgcgagaaggacaaaccggcgaccacacacggggacgacggggaagc

SEQ ID NO: 59700 - RNA, 73 nt, Homo sapiens
cagaaccgggggcagccaagcaggaacgggacccagacccacccgcaacggacccagccccgagaagccaccg

SEQ ID NO: 59701 - RNA, 69 nt, Homo sapiens
gaaggaccagcgaagaggacccaccggggcccacgcacggaaaaggcaagggcaccaaagaacaacaga

SEQ ID NO: 59702 - RNA, 74 nt, Homo sapiens
gagagcggcagcagcaccagcccaagagaagcacgaaacacgggaaggagggaccgccggaggacccagggagc

SEQ ID NO: 59703 - RNA, 69 nt, Homo sapiens
ccccggagcagccagagagcccccaccgaccagaagaggcgggggagcccgcagagcaagcaaaggaca

SEQ ID NO: 59704 - RNA, 72 nt, Homo sapiens
accggcaaccacaagccaggaagaagagccgcccggacaagagccgggaagcgggaaggcacggagcaccag

SEQ ID NO: 59705 - RNA, 41 nt, Homo sapiens
aagaagcgcccacgcagcagccgggaccagaccccacaaga

SEQ ID NO: 59706 - RNA, 71 nt, Homo sapiens
ggaaaaagggcgcagcaggaagaagcgggacgagaacagggaaccgggacaggcacaagcggcagaccaga

SEQ ID NO: 59707 - RNA, 82 nt, Homo sapiens
cccccacacgaccggcccggcagcgcgccacagcccgcgaagccaacgaggcgggggcggagaacggaaaagcaccaggaag

SEQ ID NO: 59708 - RNA, 78 nt, Homo sapiens
ggggccggcagccgagaggagcggagcgccagggggccacagcccaggaccgacagcagaggagcgcaagaacggaga

SEQ ID NO: 59709 - RNA, 75 nt, Homo sapiens
gggagagggaggagcccagaccggccagcgaagccaaagaccaaaacaagacaagcaagacagggccagggcaaa

SEQ ID NO: 59710 - RNA, 81 nt, Homo sapiens
gacagaagcgaacaagccccagagggaaaaaaggagaccccgggacacgcggaagggccgaggaggagacagaaacgaggg

SEQ ID NO: 59711 - RNA, 69 nt, Homo sapiens
aaacaggaagagggagcccgccgacagcccacacaaagcaggaaagcaaaggacaacaaccaaaccgaa

SEQ ID NO: 59712 - RNA, 84 nt, Homo sapiens
gccagcaaccgggcgcgccaaccggggcgagccgggggcgggcggccggcgcggcgcccgccaggcaagacaggccaacaccgc

SEQ ID NO: 59713 - RNA, 62 nt, Homo sapiens
ggagacaggcagcacaagcagaggagcgcacgcaaagcagggagaacccaaagaagggaaaa

SEQ ID NO: 59714 - RNA, 72 nt, Homo sapiens
accgcagaaggccggagacaccagcaggaggccggaaaacgaaggagaaagacaagcagacgcccagagaaa

SEQ ID NO: 59715 - RNA, 86 nt, Homo sapiens
cgcgccggacggcgccggagggcccgcccccggccgccaccggacgacgcagcacagagaggaaacgaggaaacgaccaccggagg

SEQ ID NO: 59716 - RNA, 76 nt, Homo sapiens
aaaaacaaggcgggcaaaagcaaagaaaagaccacacagaaccagaagaccaacgggagccgcaaggacaacagcc

SEQ ID NO: 59717 - RNA, 75 nt, Homo sapiens
cagggcggcacccaggcgaagacaggggggccgaggccaggcagcagacgacggagaccggaaggaacaagccgg

SEQ ID NO: 59718 - RNA, 61 nt, Homo sapiens
agggcaggcacggggacgaaagaaaggcaaggccaagccggagaaggaacaacccccagaa

SEQ ID NO: 59719 - RNA, 97 nt, Homo sapiens
ccgacgccccgaaaaacggagcagccgaaagccagaggacaggagcaggaggaggcaaaacagacagaacgcagaaagcaggcaccgacagaccaag

SEQ ID NO: 59720 - RNA, 70 nt, Homo sapiens
cgccgccggccgacggccggcgggcgggggccccgcgccgcggccgagcagcggaaaaccgagacacccc

SEQ ID NO: 59721 - RNA, 70 nt, Homo sapiens
gcagcgggcggaggaggcccggaccggagaaaaagagcgggacccccagacacaccgacgaggagagaca

SEQ ID NO: 59722 - RNA, 64 nt, Homo sapiens
cggcgcccagacaggccggagcacgccgaacgaggcggggggcccgagaccacaccacacccac

SEQ ID NO: 59723 - RNA, 69 nt, Homo sapiens
ccgcggcgcagagcaccgggcagaccaggcaaagcgacccgcgaacgagcagaaccagggcacaggcac

SEQ ID NO: 59724 - RNA, 81 nt, Homo sapiens
ggcacagcacgggcagagccaggccaaaaggcgcaagccaaggacacagcacacacacgggcgagcggaacacagagcagg

SEQ ID NO: 59725 - RNA, 70 nt, Homo sapiens
ccccccgcccccccccccacgcaaccccagaccaacacacaggacaagagaaaaaaagggcgggcgaaca

SEQ ID NO: 59726 - RNA, 71 nt, Homo sapiens
gacgggaagagagaaaacacgggagcaggcaaaagcaacaaccagcaaggagaggcaaccagaccgaggcc

SEQ ID NO: 59727 - RNA, 79 nt, Homo sapiens
caccccgcgaggcccccgggcccgggaaaacacacggccagaggcagcgagaagaaaaagaagagagagacacggacaa

SEQ ID NO: 59728 - RNA, 71 nt, Homo sapiens
gcccggggaacagggcagcaagcgacagccgcggaacacccacagcgccacacgagaaccaccaccccgca

SEQ ID NO: 59729 - RNA, 77 nt, Homo sapiens
gaaacggcacaaggaagccgagcccaaggaaacaacaaggaccaagcacccaaaaaccgagaagaaaagaaagcaca

SEQ ID NO: 59730 - RNA, 90 nt, Homo sapiens
ggagcgaggaaccaccggacgaagacagcaaggagacccgccaaagccgccgggcaagcgcaaggcccgggccacagaagcgaaagaaca

SEQ ID NO: 59731 - RNA, 83 nt, Homo sapiens
gcgagacccgggcgggggcaccgagggcaccacgcgcggagaagaggaagagagagagggcccaaaccaccagaaccgaagaa

SEQ ID NO: 59732 - RNA, 83 nt, Homo sapiens
aagcaagcgccacagagcagggggagaccagcgaacagcagaagaagcaacaggaggcgagaaacgcacgacaagaaaggaaa

SEQ ID NO: 59733 - RNA, 65 nt, Homo sapiens
gggagacagagaaacaccagcagcacaagaaaacgcagacccaaccgcgaccgcgaagcgaacac

SEQ ID NO: 59734 - RNA, 53 nt, Homo sapiens
gaccgaacgacacggcggaaacgacgcaggaggacccagagagggaccagggc

SEQ ID NO: 59735 - RNA, 81 nt, Homo sapiens
gccggagaggggaggaaacgcgccggaaaggaagaccaggacgcacagggaaaggaaagcaagccaggaggaaacgacacc

SEQ ID NO: 59736 - RNA, 83 nt, Homo sapiens
gggagcaaccggagagggcgccgggccgagggcagaacgcagagcggccaagccggcaggagccagcaaggcagcaaagagcg

SEQ ID NO: 59737 - RNA, 73 nt, Homo sapiens
gagccaccacgcaagcgacggcagccagcgagcgaccacccggaggagaagaggcgcggaacaagcgggagag

SEQ ID NO: 59738 - RNA, 80 nt, Homo sapiens
caagccgaaccgggagaagaccccggcgcgggaacgaaaacagcccgaaaacccggggagaccagaagggccgaccgaaa

SEQ ID NO: 59739 - RNA, 52 nt, Homo sapiens
gccccaagacgcaggaggcggaaaggggacgaagcagaagaaggacacccca

SEQ ID NO: 59740 - RNA, 35 nt, Homo sapiens
cccaaccgaagaaaacaaggcacaaaccccagagc

SEQ ID NO: 59741 - RNA, 74 nt, Homo sapiens
aaaccaaacagcaaagaaccacggccaacagaagaggaagcacccgcgagaaagaagggcacagcgaaacagcc

SEQ ID NO: 59742 - RNA, 81 nt, Homo sapiens
ggcacaagcaacaaaaagaaacagaacacggcacgagcgggcgggccccggccagggcccaggcagccggggcggaacccc

SEQ ID NO: 59743 - RNA, 55 nt, Homo sapiens
cggagccagaaacaaccgcaaccacccaacaagacaacagcagcgagagagaaaa

SEQ ID NO: 59744 - RNA, 65 nt, Homo sapiens
cccagaagggagaccagcagaacccaccaggccggcaaaacggccgggacaaacaagcccaaccg

SEQ ID NO: 59745 - RNA, 38 nt, Homo sapiens
gacagacggagcaagaccaagccaccaaacccagaggg

SEQ ID NO: 59746 - RNA, 80 nt, Homo sapiens
gccaggagggcgggccacgcggcccggcggccccccggcccccgcagccgacggcagcccagccacagaacggagacaac

SEQ ID NO: 59747 - RNA, 80 nt, Homo sapiens
ccaggggagggaaaggcaccgggacagacgaggacggagccgggccacggcaggagcgccggcccggaagaggacagcga

SEQ ID NO: 59748 - RNA, 75 nt, Homo sapiens
gggaagcggaacagccagaaggacccgaaaccagcccacgccaggcaagggaagaaaacgccagagaagcagagc

SEQ ID NO: 59749 - RNA, 80 nt, Homo sapiens
cacacagccgcaagaggaggcaagacaggaacacgcccggggaagaccagagcaaaaaagacacaggcagagagggaaaa

SEQ ID NO: 59750 - RNA, 80 nt, Homo sapiens
ggagacagcccaaaacccggaagagcgccccaggagaaacaaagccaccgagcgaagacccgagaacaagacgccgggca

SEQ ID NO: 59751 - RNA, 78 nt, Homo sapiens
accggaaagaggacgaagcagaaagcaaggaaacgagcagaagagagaaccacaggcacagcagagccagcgcccaga

SEQ ID NO: 59752 - RNA, 74 nt, Homo sapiens
cgggaaacgggagggaaccagcaacaagccggaagaagaagcgcacaaggagcacaacagggagcggaagacga

SEQ ID NO: 59753 - RNA, 73 nt, Homo sapiens
gcgacgcggccgaaccagggagccggggaaaagccaaaaccaagaccagcacggcggggcaggagggagaaac

SEQ ID NO: 59754 - RNA, 74 nt, Homo sapiens
gcggcgaacggcggaggcagggcacgcggaccacccacccaaagagcaccgacacccacacgcacacgaagaag

SEQ ID NO: 59755 - RNA, 75 nt, Homo sapiens
gccgaggccgggaggccggcccggagaccagggcaagaccaaaacccaggaagcagcccgaaagaagcaaaccgg

SEQ ID NO: 59756 - RNA, 80 nt, Homo sapiens
aaaggaggggaacccaccgggggccacgcacaggcacacaaggccggcccccagcagacaagcaaacaacggaaaggagg

SEQ ID NO: 59757 - RNA, 78 nt, Homo sapiens
gcagggaggagaggcaaaaagaaggggggcagcacagcggcaggcaccgcaggaaggacccgaccgcacggagggccc

SEQ ID NO: 59758 - RNA, 82 nt, Homo sapiens
aagaagcccaggacgagacacacggcacacaccagcaggcgcagaacgagggacaaaagaccggagacccgaaagaggaaga

SEQ ID NO: 59759 - RNA, 69 nt, Homo sapiens
accgggagagacaaaggggcaagaccagccacggggaaaaagcgggaccgcagccagcacaacaaacag

SEQ ID NO: 59760 - RNA, 71 nt, Homo sapiens
aaacccgacaagagagacaaccgacgaggaccacccgcacccaggggacgcacggcccaaccccgagcaag

SEQ ID NO: 59761 - RNA, 86 nt, Homo sapiens
gacccagacacaacccggccacgaggcccgcgcacgacccagccccagaggacaccagcggggggccaaggggaaacgcaggaaga

SEQ ID NO: 59762 - RNA, 79 nt, Homo sapiens
caagaccaggcacgccggcaacaaagaggcccgaagaaaagccgaagagagcaaccccagagaaaagaacagaaaagac

SEQ ID NO: 59763 - RNA, 30 nt, Homo sapiens
cacagaaaccggccggggaaacacacgaac

SEQ ID NO: 59764 - RNA, 78 nt, Homo sapiens
cccccgagagcggaacacaggccagagaaacaacggcccgaagagagaccgggacaaaacaccaacacggggagagga

SEQ ID NO: 59765 - RNA, 85 nt, Homo sapiens
gccagcccggggcgagccgcccgcccgccgagcagccagagggagaaacgccacaccgggaaaggagggcccagaagccaagagg

SEQ ID NO: 59766 - RNA, 86 nt, Homo sapiens
ggaaagccgcaagccggggccaacagcaccacagacgcaggcaccaacaaacgcacgcccccgaaagaggcagacagcggcaagaa

SEQ ID NO: 59767 - RNA, 66 nt, Homo sapiens
ccgggagcgacagagaagcgcaggcggagacgacaaacggaagagagaaacgggcgcagcgagaga

SEQ ID NO: 59768 - RNA, 80 nt, Homo sapiens
ccggcagccggcccgcagcgcgccccgggagagaaaaccagacgagagacagaagacgaaagggcaagaaagagagcacg

SEQ ID NO: 59769 - RNA, 80 nt, Homo sapiens
agaaggccaagagcaaaacagagaccagggagcagggaaacaagagaagagccaagaaccccaaaaccaagacccaggcc

SEQ ID NO: 59770 - RNA, 68 nt, Homo sapiens
aaagcccccaaacgaccgagacagaggcacaaaaggagaaagcagaagaaacaggagaaagcaaaaaa

SEQ ID NO: 59771 - RNA, 69 nt, Homo sapiens
ggcgacagcgggaggagaaaggaggagggagacaggggcaaaaaacggcagggaagaggcgagacagaa

SEQ ID NO: 59772 - RNA, 73 nt, Homo sapiens
ggggaaagggaaaacagagacagcgcaagaacagcccaggcacgcagcacgggggcaggggccgacccagaac

SEQ ID NO: 59773 - RNA, 65 nt, Homo sapiens
ggcggggggcccaagcaaggccggaagaagagcgcagagcaagcgcgaaaggcggccggaacgga

SEQ ID NO: 59774 - RNA, 76 nt, Homo sapiens
aaggagcaagaacccagaagaggcagcagcggaaggcagcgggagccgaaaacggaaggaagcaggaaaaaagaac

SEQ ID NO: 59775 - RNA, 63 nt, Homo sapiens
ggagagacggcggcggaaaaccccaaaaggacaaagagagacaagagagacaccccaaccgac

SEQ ID NO: 59776 - RNA, 79 nt, Homo sapiens
gacaggaccgacagcacaacaccgcacggggagccaagccggccccgagccccggccccaaagacccaaaacagagaca

SEQ ID NO: 59777 - RNA, 72 nt, Homo sapiens
agagcagggacaaaggagaaacagagacaccccagaaacacgcccgaagacaacaaacacagcacaccggcc

SEQ ID NO: 59778 - RNA, 73 nt, Homo sapiens
cgcccaccaccaagaagaaaccagccggggggggcgcggcaaggcagcgggaccagacagacgaggacccaag

SEQ ID NO: 59779 - RNA, 85 nt, Homo sapiens
gagcaagaggcggacaccccggacgaaccacaggaagcgcggggcggcggcgaaaggacggcacgcagcacgggggcaggggccg

SEQ ID NO: 59780 - RNA, 77 nt, Homo sapiens
acgaagcccacgccgggacccagcgcagaacaagaggaaagaggggaaggagccaagcaggagacgcaccgccaacg

SEQ ID NO: 59781 - RNA, 80 nt, Homo sapiens
ccaggggcgccggggcagcagcgaccccacaggcagcgcccgggcacggggacaagggccaggaaagaggagggagggag

SEQ ID NO: 59782 - RNA, 87 nt, Homo sapiens
cggcccggccgaaaacgacggcggcaaagcaccgacaacgggggacacgcaagagacgcaccgagagaagcgcagcaccagaaaaag

SEQ ID NO: 59783 - RNA, 80 nt, Homo sapiens
ccacaaagcaccagaaaaagggaaccagcagggacagagcgggagccaccagcgccaaagggaagccaggagcccggggg

SEQ ID NO: 59784 - RNA, 65 nt, Homo sapiens
ggcagggcagaggacaggaggcgcagccgagccaaagaaaaagccggccagggcggaaaaagggg

SEQ ID NO: 59785 - RNA, 72 nt, Homo sapiens
ccgccagggccacaaggggcgggacccagcaacccaggaaaaccgccgccggggccagcaagaacaaaaagc

SEQ ID NO: 59786 - RNA, 53 nt, Homo sapiens
acaccagcccacacagccgagccacgacggcgagcaagacggcggggaaaaac

SEQ ID NO: 59787 - RNA, 78 nt, Homo sapiens
ggacagagcgaccaggggcgagagcgggcaccccccaaacgacgcagccacggagaggagaggaaaaacgagacgcag

SEQ ID NO: 59788 - RNA, 69 nt, Homo sapiens
aggaaggggagaacaccgaagcccccacaagggaagaaccacacggggacgagagccccggcacaaacg

SEQ ID NO: 59789 - RNA, 60 nt, Homo sapiens
ccgcgggcccgggacagacacaggagcaaaccacacacccaaaaaggccgacagaagaga

SEQ ID NO: 59790 - RNA, 82 nt, Homo sapiens
cgcgcccgcccggccggcccgcgcccccgccgcgcccgggagacgccccgccgcccacccagagaagacggaacaagaaagg

SEQ ID NO: 59791 - RNA, 80 nt, Homo sapiens
aggcgggacacccagcaccccacgcccggccgacaagcacgcaacgcccgggcagccagaagcagaccaggaggacggaa

SEQ ID NO: 59792 - RNA, 38 nt, Homo sapiens
ccgcgccgcgcagagcaagcaacccacagagagagagg

SEQ ID NO: 59793 - RNA, 68 nt, Homo sapiens
gacggagcaagagaacgcaagagacggaagaccgcaggaaagcaggaaggcaagaaagccaaggacga

SEQ ID NO: 59794 - RNA, 71 nt, Homo sapiens
cagacgacaagccgggagcgggcggccaaccagagcacccgcggccaggcggcaacagccagcaggagccc

SEQ ID NO: 59795 - RNA, 77 nt, Homo sapiens
ccaaaacccacaccgagagacgagaacccagcaggcaccgacacaaccgcccaggagacagacccagcacggacccc

SEQ ID NO: 59796 - RNA, 52 nt, Homo sapiens
accggaaagacaaggaagggccgagacggacgaaaaacaggaaaaaacaagc

SEQ ID NO: 59797 - RNA, 76 nt, Homo sapiens
aacgaacagacgcacaccaccaaggcgcacagaacacagcgaagcaaaccgaagaggcagaggaggagccaacagg

SEQ ID NO: 59798 - RNA, 67 nt, Homo sapiens
cggggaaacaggaaagacagacccccaaaaggaaaaaaagcaaggggaacacccagacccccagcga

SEQ ID NO: 59799 - RNA, 83 nt, Homo sapiens
agaaggaagccagcagccaagccggggcagcagcccaccccaaagcagagccggagcccacggagaggcccggagagaaggaa

SEQ ID NO: 59800 - RNA, 78 nt, Homo sapiens
cagcagcaaccgcaacagcagcacaaaaaacccgcagcaacagaccaggcaaggggcgcaccgggaaaggaacaggag

SEQ ID NO: 59801 - RNA, 82 nt, Homo sapiens
cggacgcaggaagagaagaaccaggccgggccagacacgacaccaccaccccaccccgggcgccaccaggggccagaaccgc

SEQ ID NO: 59802 - RNA, 67 nt, Homo sapiens
gagcccacaacaaccacagacaccgaaaacgagaaacgaaagagacacgggggcacaaccgagcccg

SEQ ID NO: 59803 - RNA, 80 nt, Homo sapiens
aacggcgcgggggacaccagaacgaggagacgagacgaggccggcaacccacaggcgggggccaccaaaaaaggggaaac

SEQ ID NO: 59804 - RNA, 68 nt, Homo sapiens
cagaaagagcaacagcagggcaacagcgcgccccggcgcaccgacggaccgggaaggagcacccagga

SEQ ID NO: 59805 - RNA, 108 nt, Homo sapiens
ggggcagcgccgagcggagggggcgaagagacgccagaagaacgaggaggagaagggagggcgacagaccagagaaagagaagggccaaacaagggcacaagcacgaa

SEQ ID NO: 59806 - RNA, 72 nt, Homo sapiens
gaaggcaaaaacgaggaagaccagcaggcaaggagaaaagcaaggcaagaggaagacaagggaaaagggacc

SEQ ID NO: 59807 - RNA, 75 nt, Homo sapiens
cagggacgcccagaaggaacgcagggagacaagggcggcaaagcagaacgaagaggagaccagcccccaaaggaa

SEQ ID NO: 59808 - RNA, 68 nt, Homo sapiens
agagacaagcaacacaccacagcagcgaagcagggggaggacaagcggcccacgggaccccgacggag

SEQ ID NO: 59809 - RNA, 55 nt, Homo sapiens
agaaaggccaggaagcggagcaggacgaacggaggaaccacgcacagaggagcgg

SEQ ID NO: 59810 - RNA, 88 nt, Homo sapiens
aggcggagaccgcaggcgaccccgcagcggccgggcgcgcggcccccacccagcggagcagccagcagaggcgcgccggagggaggaa

SEQ ID NO: 59811 - RNA, 84 nt, Homo sapiens
ccgagccgaaggagagacaaaggcaccaggcggagaagcagaacagcacaccgagaggacacgacaacaccccaacgacaggag

SEQ ID NO: 59812 - RNA, 77 nt, Homo sapiens
gcaaccagcaagagcgagaagcacgagaaaagaccagagaagaagcgggggacaggggggaccagacaaccaacaca

SEQ ID NO: 59813 - RNA, 84 nt, Homo sapiens
gaggacaccacagaagaagaagcagaaggacgagcaaaccaggagagcaaggaggagaccaggaaagcacaggagggagcagga

SEQ ID NO: 59814 - RNA, 72 nt, Homo sapiens
gggagcaggccagcgggagcaccacagacaccagaccacccgagaaaggcgggggagaaacgcagacacaag

SEQ ID NO: 59815 - RNA, 63 nt, Homo sapiens
aaagaagagaacggagcacaagaccagaaacacccaggcaaagcaaaacacgaccggccaaag

SEQ ID NO: 59816 - RNA, 77 nt, Homo sapiens
aaagaaggcaaggagagaagagaagaacagcacaggacaggcgggaaaacggcacaaggcgacgagggagggcagac

SEQ ID NO: 59817 - RNA, 82 nt, Homo sapiens
cagcacccccgcacccacgcggcccgcgaaagggcgcaaagacgaagaacggaagcgccccagaggagagggcggagagacg

SEQ ID NO: 59818 - RNA, 77 nt, Homo sapiens
acgacgccccgcgccgggggacgcgggcgggccggccagcccccagagcgggaggacgcacggccacgaccgagccg

SEQ ID NO: 59819 - RNA, 80 nt, Homo sapiens
gcggggccccacacccccccgggggggcggagcgacaaaagagaagaccagaaagaaaagaccgaagagagaggaacacc

SEQ ID NO: 59820 - RNA, 65 nt, Homo sapiens
ccgccggagaagaacaaaccaggggacggaagcggcagcgggcagccggcccagcacagggagca

SEQ ID NO: 59821 - RNA, 80 nt, Homo sapiens
cccggccgccccggagggagacgcgcgccgaggagaacccagcggcacccagccacaccccaccgcccagagaagggaag

SEQ ID NO: 59822 - RNA, 71 nt, Homo sapiens
ggacaccaaacacacgggaccgaaacaggccggggcacagcacagcgccggcgcaagaacgccggcgagga

SEQ ID NO: 59823 - RNA, 78 nt, Homo sapiens
gggcgcgcgagggacgacggaggaccgaacgagaagccaacgccacaagacgaggcacgcagggacgcacaacgagag

SEQ ID NO: 59824 - RNA, 83 nt, Homo sapiens
acccgccgccgccgggcggagaaaaccggcgcagagccaaaaggaaccgaggaaaagcaggggaaacgacgcagcggagagac

SEQ ID NO: 59825 - RNA, 78 nt, Homo sapiens
cggagcccaggcggcagcgccagaacagaagcagagacagaagcccaagccagaagcggcaacccgacaggagaaggg

SEQ ID NO: 59826 - RNA, 76 nt, Homo sapiens
aacaggcccacgcagagaaacgggcagcaagaccgcccacccgcgcacccacggagcgagagagacccgcgaaacc

SEQ ID NO: 59827 - RNA, 74 nt, Homo sapiens
gggacggagaacacgcgcagcggaggagaaagcaccaacagcagcggcagccaagcccaccgacagacaaggga

SEQ ID NO: 59828 - RNA, 76 nt, Homo sapiens
agagacagacgaaaaagccagcaacaggaccagcccaaaaccaggcccaaggaacgagagaggaagcaaagaagag

SEQ ID NO: 59829 - RNA, 76 nt, Homo sapiens
gaggggagaagagcgacagagaacgaacacgagaaccaagcagaaggaagaagcgaacacagcggcaaagggaaag

SEQ ID NO: 59830 - RNA, 71 nt, Homo sapiens
ggagcggcaggaaggccaccacagggccaacaagcagcgagccggacacaagagggcaagaaaggcgcgac

SEQ ID NO: 59831 - RNA, 66 nt, Homo sapiens
agggaccaggagccccgcggcggggaggcacgagagaagggacagacagcagccacaacaacgagg

SEQ ID NO: 59832 - RNA, 81 nt, Homo sapiens
agccggggcgggcggcagcgagcggccaggggcccaaggagaggaagcaggagcagaggaaaggagaggaaaccacccaga

SEQ ID NO: 59833 - RNA, 82 nt, Homo sapiens
ccaacaaccccacagaggacaggagaaaggcgaaggcaggaggggcaaccacaggagcggcgagaacacagcaaccccaacc

SEQ ID NO: 59834 - RNA, 75 nt, Homo sapiens
acagagagcagggagaacacaggaacggaggcggacaccggacacaacaagacacaaggaagaaggggagcaccg

SEQ ID NO: 59835 - RNA, 68 nt, Homo sapiens
gcccacaagagcgggaacagcggaccagcagacaacaggacaggcaacaaggaagaccaacggagaag

SEQ ID NO: 59836 - RNA, 78 nt, Homo sapiens
gcaccgacaccaggaaaacaacaccaaaacagacacgaagacccggaaaaagcacaaggagaagacggggcgccggcc

SEQ ID NO: 59837 - RNA, 55 nt, Homo sapiens
acgaaggggaaagggaagcaagagccagacccaaagccaggaggggaggagggag

SEQ ID NO: 59838 - RNA, 80 nt, Homo sapiens
gcggagcaaaaaaagagcccgcaagaagaacagagacagcagccaaacccccagggcggagaacggaaaagcaccaggaa

SEQ ID NO: 59839 - RNA, 62 nt, Homo sapiens
ggaacccgccagcaccaccgcccaaccccaggccggacaagacgcagagagccgacagaccc

SEQ ID NO: 59840 - RNA, 55 nt, Homo sapiens
aagggggaaagcaaccagaagaggaccacagcaaaaaaaaagacgagcaaggggg

SEQ ID NO: 59841 - RNA, 90 nt, Homo sapiens
gacgagaccaccggccaacagaacaggccgcccgccgaagaaacacaagagcaagagaaacaacagaaagggagcgaaaaggggagaaca

SEQ ID NO: 59842 - RNA, 75 nt, Homo sapiens
caaccgcaggcggcccagcccaaacagggacagaaagacagggcggcgagccaaggggaaaggagcaagaagaca

SEQ ID NO: 59843 - RNA, 82 nt, Homo sapiens
ccgagagcggaaccacaagcaccagcacgccggcaaggcagcagccccggggcggggcgggcggggacccgcggcaggcccc

SEQ ID NO: 59844 - RNA, 62 nt, Homo sapiens
gcgaggggccaaggcagaagaaacggagaagggcaaaggcaaagaacagagcagcaccagca

SEQ ID NO: 59845 - RNA, 80 nt, Homo sapiens
ccccgggagcaccggaggaggagaccgacagaccgccgacgacgcaagcagcgggaggagcaacggggagaagggaagcg

SEQ ID NO: 59846 - RNA, 55 nt, Homo sapiens
gcaaagaagaagagacgggagagaaacagaggggagaagcagaccgcaccaggcg

SEQ ID NO: 59847 - RNA, 76 nt, Homo sapiens
ggggggaacgacgaacagggcaaaccgcaggcacaacacaagagaagcgacgcgaagggcacaaccaaagcggaga

SEQ ID NO: 59848 - RNA, 88 nt, Homo sapiens
cagcgcgccggccgcgaggccacggagagccgccggagagcccaggagcaggggagacaggcaaccgccgcgggccgagcccgcccgc

SEQ ID NO: 59849 - RNA, 65 nt, Homo sapiens
ccccagaaaaccacacccgaaggaagaccgcccccgacaaagaagacgccccaaaaggggaaagc

SEQ ID NO: 59850 - RNA, 64 nt, Homo sapiens
aagaccgaccgcccaggagcacccccaaaacagagccaaggaacgaacagggcgggcggaggcg

SEQ ID NO: 59851 - RNA, 77 nt, Homo sapiens
ccgggagccgccaggcccccaagggaccaggccaagccaccaagaccaagagcgccacaacgacccacaagacacca

SEQ ID NO: 59852 - RNA, 79 nt, Homo sapiens
gagggaagacggggagacgagcggcgcagacacaggcggaagcaggaacccaggaccgggggcggagggggcagccaac

SEQ ID NO: 59853 - RNA, 65 nt, Homo sapiens
cacaaaccaaacgaaaaacagacggccgcaagaccaggagaggacaaaccggcgaccacacacgg

SEQ ID NO: 59854 - RNA, 66 nt, Homo sapiens
agcgaaagcaacagcccaccggacgggaggcgcagggagcaggagaagcggagcgaaggggcgggc

SEQ ID NO: 59855 - RNA, 75 nt, Homo sapiens
cacacgaagcaagaacagaccggcacaggcggaagagcaacaaggaccagaagaaccagcagcagaaaaaacagc

SEQ ID NO: 59856 - RNA, 78 nt, Homo sapiens
ccacaggaggcggccgcacaaaggccggggggggcacagagccccggaagacagcccccagcgaccagacccagggcc

SEQ ID NO: 59857 - RNA, 81 nt, Homo sapiens
acgcgggacgcggcggcgccggccccggggagaaacgggcggagaacggaaaagcaccaggaagcagagaggaccgcagaa

SEQ ID NO: 59858 - RNA, 82 nt, Homo sapiens
caccgcaaggcgggccccggaagaaggcagcagaggagaggagacacaggacagacaggcccaagagcgagaaagaggcaac

SEQ ID NO: 59859 - RNA, 87 nt, Homo sapiens
gcagcgcccgcgccgggcccggaaagcgccgcccagcagccgcaggggacggcaaaacagaacagaaaggcggagaaaaaagagggg

SEQ ID NO: 59860 - RNA, 70 nt, Homo sapiens
agaagagccaccacgccaccgcagaccagcggagcacggaaaggggggaagagcaaaaaagacccaaaaa

SEQ ID NO: 59861 - RNA, 79 nt, Homo sapiens
cgcgcgccggggaggcgccggagcgccgcggggcccggagaccgcggccaggagccaagaagaccagaccgcgggagga

SEQ ID NO: 59862 - RNA, 57 nt, Homo sapiens
gacaagagacgacacgcaagcaggcaaccgaaacagcccgacggagcagcagcgccg

SEQ ID NO: 59863 - RNA, 71 nt, Homo sapiens
agcgagggcacgggcggcagcccgagaccgcagcagccaagaccaaaagaccaaggcagcacgaacaggcc

SEQ ID NO: 59864 - RNA, 76 nt, Homo sapiens
aaaggcggccgaagcgacccggaagcggaagggaagaaagcagggcgagcaaaaaaggcccggggcagccacccag

SEQ ID NO: 59865 - RNA, 82 nt, Homo sapiens
cgagagcaagagggagaggccaggaaccaagcacaggacggacgggggcaaccggacagagaagcccaagagaagcaggagg

SEQ ID NO: 59866 - RNA, 72 nt, Homo sapiens
acccagaaaaccgagagggaagccccggaaccagcgagagacaccaaaaaaaggcacggacaggacgagggg

SEQ ID NO: 59867 - RNA, 71 nt, Homo sapiens
agggggcacccgcggccggcccggggccccgggaccggcgcccccccggaccgagcaggaggacgaccagg

SEQ ID NO: 59868 - RNA, 81 nt, Homo sapiens
ggggaaacccggcacaggagacgagggcagagggcagaccggaagagaagaaggagcagaaggaaaagggccaagggggcg

SEQ ID NO: 59869 - RNA, 87 nt, Homo sapiens
cccaggccgcgccgagcccgccgcgcgggcccgcccgacgcggaagagagaccgacagagccacaagaaacaaaggcacggcacggc

SEQ ID NO: 59870 - RNA, 81 nt, Homo sapiens
ccaagcggcaacaccagcagacggggcgagccgcggcgagagggcacaccggcagggaacggaacgacacggaaacgcccg

SEQ ID NO: 59871 - RNA, 72 nt, Homo sapiens
agacggcgaaggcccccgcgggcgccaacagggaggagggagcgccaccgccaggccccgaccgaaggagga

SEQ ID NO: 59872 - RNA, 73 nt, Homo sapiens
gagcggcgggaggccaccgccaggaggccacaccggcccgcagaggaggaaggcccgcacacacccgcaggca

SEQ ID NO: 59873 - RNA, 87 nt, Homo sapiens
cggcggacgcgcccgggacgcgcggcggcaccgggaggccgggccgagcgagagaacggacgagaccaacgcggaaaccagcaagaa

SEQ ID NO: 59874 - RNA, 71 nt, Homo sapiens
cccggggacccccgacgccaggcagcgcccccaaacggaaaaacgggccgagaaagcgagcgaaaagaaga

SEQ ID NO: 59875 - RNA, 82 nt, Homo sapiens
caccaaaagaacccaggagcgacacagagaccgggcgcaaagcagaacgcgaagaaggaagacggaaagcacggcagccccg

SEQ ID NO: 59876 - RNA, 86 nt, Homo sapiens
gggaaaggagccccgaaaacgaggaagaaggaccaaaacagcaggcaccccgcccccgaggcagcgagcggaagcggaaggaagaa

SEQ ID NO: 59877 - RNA, 88 nt, Homo sapiens
gcaagcgagggaccgggacgccacagccagccccaccaggcggggaagagccaagacccaaacacaaccagcaaaagaaaccaacaga

SEQ ID NO: 59878 - RNA, 86 nt, Homo sapiens
gcggcccaggagcggcggcgaagaaggaggcaggcacgggagccgaagccgcggcccaggagcccgccggcccggcccccggccgc

SEQ ID NO: 59879 - RNA, 62 nt, Homo sapiens
cccgggccaccggggggagcaccagcggaaaccaaacccgggacgaggggccccagaacacc

SEQ ID NO: 59880 - RNA, 79 nt, Homo sapiens
ggcacaaccaagccgccggggaacagcccgagcagcagcgagacccagaccgggggcagacccaaaggaaacgcacgaa

SEQ ID NO: 59881 - RNA, 72 nt, Homo sapiens
ggaaagccaccggaaaaacagaaggagcccggaacccgaagggacaagaagccgccgccaagacagacccaa

SEQ ID NO: 59882 - RNA, 95 nt, Homo sapiens
aagcccgccacagcggcccggccccccggacagacgccgacgcccagagagagagaacccgagcgccgcagcggagaaagaaggaacgagcaagc

SEQ ID NO: 59883 - RNA, 78 nt, Homo sapiens
ggaaacgcacagaagagagccaaaggagggagagggcccaggaagaggcaaggcacggaaaaaccgcgagcccggggg

SEQ ID NO: 59884 - RNA, 72 nt, Homo sapiens
gccaagaaccaaaaaggaccacgaaggcccagcgaccgcgaaaccgagcaggagaaccagacacgcaaaaca

SEQ ID NO: 59885 - RNA, 85 nt, Homo sapiens
agcccaccaacacagcaccaacagcccaagaagaacaggaagggaaaaggccgaggcacagcgggaagaccgcaaagacgacccg

SEQ ID NO: 59886 - RNA, 83 nt, Homo sapiens
gcccccgccgcgagacgccgccgacgccgcgcgggccgcgcgcgcgcgcccggaaaccggcaggaaaaacaagggaccccaag

SEQ ID NO: 59887 - RNA, 73 nt, Homo sapiens
gaagacacgccgagagagaagccagggggcgggccccagacggacccagggcggagaacggaaaagcaccagg

SEQ ID NO: 59888 - RNA, 83 nt, Homo sapiens
gggcggccgcgacccccggcaacccggagaaggcacagagcggccgcgccagcgaaaagggcaagcagaaaccgggaaggggg

SEQ ID NO: 59889 - RNA, 84 nt, Homo sapiens
gagcaggaaagccagggggacccagcacagagaaaacccgcagcccaaagggcagaagaagaagaagacgcaagacggcagggg

SEQ ID NO: 59890 - RNA, 80 nt, Homo sapiens
agaagccgcccgaacaccaggcagaaggagagcaggggccaggagggccgaagcccacagcgaggcagagaagcgacccc

SEQ ID NO: 59891 - RNA, 70 nt, Homo sapiens
gaagccgaggggcagagggcgaccgaccgagcagggcacacccgcgaggaaagagaaggcagaaacaaaa

SEQ ID NO: 59892 - RNA, 72 nt, Homo sapiens
acaggcaagagggcaacaagagccaggcaacgaggacagcagaggcacacaaacggaaccgcacaaagcaga

SEQ ID NO: 59893 - RNA, 74 nt, Homo sapiens
agcggacacggccacgggcagggcccgcgggaaaggcagggccgccaagaccggagacaggaacacggccccgg

SEQ ID NO: 59894 - RNA, 59 nt, Homo sapiens
aagccgccccaagagcaggaggggggcaaaccacagacacgacgaagccagggaccccg

SEQ ID NO: 59895 - RNA, 86 nt, Homo sapiens
aaccgccgcgcgcgaccaaaggcgccgcgggcggacacgccagaggaggaggccggggaaggccgcgggggcagcaagcagcaggg

SEQ ID NO: 59896 - RNA, 84 nt, Homo sapiens
ggcgcgccccacggcggaccacacgaagggcgcgccggccgcggccagccggaggagccaggaaacacgaccccccgagagcac

SEQ ID NO: 59897 - RNA, 78 nt, Homo sapiens
cgaggaccggaacgggggaagcagacccgggaagcgcggaaaaagggacaaagaagaagagaaggcacaaagacggaa

SEQ ID NO: 59898 - RNA, 81 nt, Homo sapiens
gacagaacggcgaggagcagcgcaacgagcggaggcccggagccacacccgaccccacaggagaaccggggcaagagacgg

SEQ ID NO: 59899 - RNA, 54 nt, Homo sapiens
aaaagcagccaccagcaggaacgccaggagcgccgggagacacacgcaaaaaga

SEQ ID NO: 59900 - RNA, 73 nt, Homo sapiens
ggccaaggggacgagcaaaggaagcgcgaacagcagcgcaggagggggaagacagagaagaccacacaaccga

SEQ ID NO: 59901 - RNA, 62 nt, Homo sapiens
gcaagaaaaggagccggaaacggacaaacagcggcgcacgacacgggaaaaggggggcaccc

SEQ ID NO: 59902 - RNA, 72 nt, Homo sapiens
cggaaaacccacggggaagaccacaccccgaggaagggccccacaccaaaccgccacgcaacagacgcagag

SEQ ID NO: 59903 - RNA, 85 nt, Homo sapiens
gcgcgcgggagcgcacggccccaacgacaagcagaccggaagaccgacggaagaccacaccccgagggagcccaggacaccacga

SEQ ID NO: 59904 - RNA, 74 nt, Homo sapiens
agaggcccggagacgggccgaaggaccgcggcacgcgggccggcggcgcggcaagagggccccggaggccgcca

SEQ ID NO: 59905 - RNA, 78 nt, Homo sapiens
agagaagaccgcccaagcgcccggaggcccacagcagggggcagaggaagaggaggccgagagacccagacgcacagg

SEQ ID NO: 59906 - RNA, 60 nt, Homo sapiens
cacccaccaaaccggagggggaaaaaacccaaggcgcaaaggccggaaagcaaagacagc

SEQ ID NO: 59907 - RNA, 80 nt, Homo sapiens
agacccaggacaccccgaagccgagaaagaaagccaacaggcagaccagagacagcgccacgcacccggggagcagacca

SEQ ID NO: 59908 - RNA, 73 nt, Homo sapiens
gagggcaaaacacagaagaagcaggccgcacgaacgcaagaaggaaggaacacaaagggcgcgggaggggaaa

SEQ ID NO: 59909 - RNA, 81 nt, Homo sapiens
gccaagcggggagcgcccgcgacagaggagggaggaaaacaaccgagggcagaggaggagcgcacgacgggaacccacgag

SEQ ID NO: 59910 - RNA, 78 nt, Homo sapiens
ccgggcgaggccggcgccgccgcgccccggccccccggccgcacaggcgcgggccaggcacgacaccgcaacgacaca

SEQ ID NO: 59911 - RNA, 79 nt, Homo sapiens
cagcgcaggccgagaacacccaaggcaagaacccgaccgacggagagacaggcaaagacacggggaccaccagcacgga

SEQ ID NO: 59912 - RNA, 59 nt, Homo sapiens
caagaccgggacacccgaagcgggaaagagagaggaccagaaccagaccggaaagcacc

SEQ ID NO: 59913 - RNA, 70 nt, Homo sapiens
ggagaaaaggccaagaaggcaggaagaagacggcacgggacccccagcacaggcagcaggccgggagaga

SEQ ID NO: 59914 - RNA, 82 nt, Homo sapiens
agccccggcacccccggaccgaccagggcagacccaggggagcgccacgaagggcaccaacccgcggcaccagggaacgcca

SEQ ID NO: 59915 - RNA, 74 nt, Homo sapiens
cgcgggagggcgggaggcccggagcgcccggagccggaggaagggagccgcagccgccacgggacgagcgccca

SEQ ID NO: 59916 - RNA, 55 nt, Homo sapiens
caaccccaacaccgggcccacaagccgcagaaggaacggcagccacacagcccgg

SEQ ID NO: 59917 - RNA, 42 nt, Homo sapiens
gccgagggcagcggcaaacgcagacggaggaaaccgaggcgg

SEQ ID NO: 59918 - RNA, 63 nt, Homo sapiens
ccgcacgcgcacggacggcacagcccgccgaacccgaaaggagggagagaagaagggcaggac

SEQ ID NO: 59919 - RNA, 68 nt, Homo sapiens
ggcaagcacaaagcaaaaaacgcaacaccagcacagaggaggcagcccagaacgcagcagaacacgga

SEQ ID NO: 59920 - RNA, 34 nt, Homo sapiens
agagcccccgcccggaagaacaagcgggggaacg

SEQ ID NO: 59921 - RNA, 72 nt, Homo sapiens
ggggcggccaagacacgcacgagaaccgggcaaccagcagagaccgccccaaccgagggccaggggagcgga

SEQ ID NO: 59922 - RNA, 66 nt, Homo sapiens
cgagaagcagagggggaagaaaaacagaggagcaaagacgcagaggaagggcagcagaacaacgca

SEQ ID NO: 59923 - RNA, 72 nt, Homo sapiens
cagcgggcccggggaggcaccgacgaggagggggagaaaaaccaaacaggagccaggcagacccccgccgac

SEQ ID NO: 59924 - RNA, 56 nt, Homo sapiens
cacgcagcagaagcccggacccggcaagccgaaacggcagaccccaaaaggaggag

SEQ ID NO: 59925 - RNA, 74 nt, Homo sapiens
cacaaggccagaacaccagagcaaccacacgccagaccagaagacccggaggaaagcccagagggaagcgcaag

SEQ ID NO: 59926 - RNA, 76 nt, Homo sapiens
gcggcacagggcccgcgcaccgcccagagggacagagagaggcagaagaaaaagcacccccaagcgagagagcggc

SEQ ID NO: 59927 - RNA, 67 nt, Homo sapiens
gccagcacaacggcaggccagaagagccaagcaagcacggccaagaagagccagggacggagagaaa

SEQ ID NO: 59928 - RNA, 63 nt, Homo sapiens
ggagacaccacgacaaggccgccagagaccaaagggcccagacccgggaccagccggacgccg

SEQ ID NO: 59929 - RNA, 62 nt, Homo sapiens
agcggacccggaccggggaggagaaggcagagcccccccaggcagaagcccgagcgggaacc

SEQ ID NO: 59930 - RNA, 80 nt, Homo sapiens
agaggagagaacccaacacagggaaaggaaccgcggacagagcacagaacaaaagggcacccagagccaaaccagacaaa

SEQ ID NO: 59931 - RNA, 82 nt, Homo sapiens
aggacacgggggccacaaagccccccggagacgcaaccaagcagcgcacccacaccagaaagcggcgggcacaggggaaaaa

SEQ ID NO: 59932 - RNA, 79 nt, Homo sapiens
gccgagaagcggggcaccacgaaggaccgaagaggggagacagcaggaaggcagcaagccccaccccccgccagcccgg

SEQ ID NO: 59933 - RNA, 75 nt, Homo sapiens
agccacggccaacagagaacaaccaagcccagaaccgggacaacccagcaaacaggccagacccgacaggagcga

SEQ ID NO: 59934 - RNA, 49 nt, Homo sapiens
aaaacagccgggggcgacacaggaagaacagcaggaacaggaacaccac

SEQ ID NO: 59935 - RNA, 99 nt, Homo sapiens
cgccaaacgaagcgggaggggcgaaacgaggaggagaaacgcggccgggccggggagaaccgccagcgacgggaaggcaggacccacgcacgagcaacg

SEQ ID NO: 59936 - RNA, 70 nt, Homo sapiens
accacaacggaaaaggaacaagcccgcaggcgcacgggacaacccgagacgggaacccagagacgggccc

SEQ ID NO: 59937 - RNA, 73 nt, Homo sapiens
ggaaaaaagaaaaccagaagcggagcgggggcccgagaagccgacgggggccgcaaggccaggcgcgcagagg

SEQ ID NO: 59938 - RNA, 114 nt, Homo sapiens
ggggaggagaggccaagcgcggcagggcccccaccggccgaccgcgcgccacggaccgaaggagaagaaggagaaggggaggagaaggcaagccggaaagagcgaaagaaagaa

SEQ ID NO: 59939 - RNA, 73 nt, Homo sapiens
caaaagccgacaaccccagaaacaggcagagcaaaaaggagccgggcaaaaacaggacggaaccgaaacagga

SEQ ID NO: 59940 - RNA, 66 nt, Homo sapiens
caggaacagagcgagggaggagagagggagagccaaagaagcggagaagagagcggaaagagcaac

SEQ ID NO: 59941 - RNA, 74 nt, Homo sapiens
agaaagaagaaggagagcccaagccggaacagccaacaaagagaggcaaaccgacaccagcgacacaagcgcga

SEQ ID NO: 59942 - RNA, 78 nt, Homo sapiens
cgcgccacacaggcaaacgaaggaaacagagaacaggccccggggagaaaagaggaacgcaaggaagaaaagggaacg

SEQ ID NO: 59943 - RNA, 45 nt, Homo sapiens
gaagagaacgaaaggacgagagacaagggaaccaacgaacaacgg

SEQ ID NO: 59944 - RNA, 78 nt, Homo sapiens
gccgcggcagaccgaggggcaccgaccgcacgggccacccaaaacaggaccaagcccaccaagggacgccagcaccca

SEQ ID NO: 59945 - RNA, 79 nt, Homo sapiens
ccacaacccccgcaggaacagcacaaacacggggggaccacggaaagagggaacagacacaccaacagcagcagcggag

SEQ ID NO: 59946 - RNA, 70 nt, Homo sapiens
ggaacaaagcagcgccagcaggggggaagccagaacacgccaaggcaaggcagggacgggggccggaggc

SEQ ID NO: 59947 - RNA, 78 nt, Homo sapiens
cgagcgcacaacgaacacgacaagaaaggaccggcccaaggaggagaaacccagcaggcacgaaagggggaccgaaga

SEQ ID NO: 59948 - RNA, 73 nt, Homo sapiens
cagcaccgggacgcacagagaccggaagaccaagcaggagaaccgaccggaaagcgcaaagccgacgaggaga

SEQ ID NO: 59949 - RNA, 83 nt, Homo sapiens
cgcgggcgggcgcggggcggcggagaggaaccggggcacgccccgagccgcccgccgccgagagagaagagggggaaaaagga

SEQ ID NO: 59950 - RNA, 82 nt, Homo sapiens
caaagcgagagagggaagcgcccggccggaggcaggggaaagggaggcccgcaccccccggccgccgcacagccagagaggg

SEQ ID NO: 59951 - RNA, 72 nt, Homo sapiens
agggaaaggaaccagggggaagaagacggacagaagcaacaaaggaaaaacggggagcggaaggcagagccc

SEQ ID NO: 59952 - RNA, 80 nt, Homo sapiens
cgaggggacagaagcagcggaaccggccacgacgagacaagccccaggagcaccaccaacccgcccgaccggccgcagca

SEQ ID NO: 59953 - RNA, 82 nt, Homo sapiens
caaaacggcaccacgggcacagccccacgcggccacggccagggaacaaggcacaaaaaaacaggaaaacggaagacggccc

SEQ ID NO: 59954 - RNA, 78 nt, Homo sapiens
gcgagcacaaacggggcggggccggggaacacacaggacagcccaagagacaagacccacaagaaaccaacgagagcg

SEQ ID NO: 59955 - RNA, 84 nt, Homo sapiens
caagaccagccgaagccgcggggccgagggagacgcggcggcagcggagacgaaccagcggacaggacgccacgcggaggagcg

SEQ ID NO: 59956 - RNA, 74 nt, Homo sapiens
gaccacagaagcaaaaaccacccagaacagccgagagaagcaaaagcacagcacggagaggaaaaagaaggaga

SEQ ID NO: 59957 - RNA, 62 nt, Homo sapiens
cagggagcacgacacagcagagaagaaagcgggccacaaccacaaggccgcccagacacccc

SEQ ID NO: 59958 - RNA, 51 nt, Homo sapiens
ggggagccggcggaaagagccaccaaagaagaccagacaggggaaggagag

SEQ ID NO: 59959 - RNA, 83 nt, Homo sapiens
cgcgccaaccagacgcgcgggagaaggaagaggcccagcagaagggaccgcgagccaccccccgccccacccagggcggccca

SEQ ID NO: 59960 - RNA, 39 nt, Homo sapiens
aaagaaggcaaaacacggcaggagcaggagcgcggcagc

SEQ ID NO: 59961 - RNA, 68 nt, Homo sapiens
ccaccgagggaccaggcccagaaagagaacgacaacagacaaacacagcagagccaacgaaaaaggac

SEQ ID NO: 59962 - RNA, 109 nt, Homo sapiens
acacccccgaccgcagcgcgcgcggcccacggcgggcgcgcccagagggcggagccaagacaagcaaacccaggaacacccggccggcccggcgccccggggcccgagg

SEQ ID NO: 59963 - RNA, 87 nt, Homo sapiens
cgcgagaagcagcgggggggcaggcgacgaagaggaaagcgaacgcgaaaagaaaagccgagagcagccagaccggcgaagaaagaa

SEQ ID NO: 59964 - RNA, 83 nt, Homo sapiens
gcgcccaaagagaccagcgccaccgacccggcccgggggagcccagaaccgcggcgcgggaaggagcagcgaggccagccgca

SEQ ID NO: 59965 - RNA, 34 nt, Homo sapiens
cacgagggcagggcggaaggggcggaaacagacc

SEQ ID NO: 59966 - RNA, 79 nt, Homo sapiens
aagagaaaaaccacgccccaaagaaaggaggccaagggaggacaccaggcccagcacgagagagcgacgacagcggggg

SEQ ID NO: 59967 - RNA, 86 nt, Homo sapiens
cggaaacaccggaaacaggccaccgaccacagccacccgcggaacagcaagaaagaaagccgaaccacaggagaacagcaccaacg

SEQ ID NO: 59968 - RNA, 75 nt, Homo sapiens
acaccgggccgggagcaaccacggacaaccccaagggagacggagacaacaagcggagagagagagagcacccaa

SEQ ID NO: 59969 - RNA, 84 nt, Homo sapiens
gagcaccacaccgggagaagcgaggcggagaaacgacgaaccaagagaagaggaagaggccacgagaagcaaaggaggaaggag

SEQ ID NO: 59970 - RNA, 75 nt, Homo sapiens
ccaaacgggagacaacccccgaaggagggccaaaggggcagcagccagaagggaaccccaacgcgccaagagggg

SEQ ID NO: 59971 - RNA, 70 nt, Homo sapiens
ggagagaaccgggaagaagcagcaagagggaaccaggacgccagcaacccagagggggaaagaccaaccg

SEQ ID NO: 59972 - RNA, 85 nt, Homo sapiens
acacacccgcgcgcgcccgggaggaaggaacgaggcaaggagcaaagcagcggcgcagcccgggggaggggggaagacagggccc

SEQ ID NO: 59973 - RNA, 75 nt, Homo sapiens
aggggcgcggccgaacagccccgcgggaagcgacgaggagcgagggcggaagagcgcgggaggggaggccaccaa

SEQ ID NO: 59974 - RNA, 84 nt, Homo sapiens
aaggccaaaagacacagggaaccaccaggagacacgaaacgaacggaaaaaagcggcaccaagccaaggagggacgaacgaccc

SEQ ID NO: 59975 - RNA, 70 nt, Homo sapiens
gaaaacagacacagaagccagaggaacaagaagggaggaacaggagcaccacgagagaggcaggaagaca

SEQ ID NO: 59976 - RNA, 79 nt, Homo sapiens
ccccacagcaggggacagcacagggcacgacccagccgaaaaaggaagagccaccccaagaggggccgagcgaaggcaa

SEQ ID NO: 59977 - RNA, 58 nt, Homo sapiens
cccgagcagaggggacccggaagcggcaccagaaggccagaggcacggacgaccccgg

SEQ ID NO: 59978 - RNA, 72 nt, Homo sapiens
acgccgcaccacgaaccagaccaagcggggggagagaacagcacacagaggcgcaaggggaagagaaaagac

SEQ ID NO: 59979 - RNA, 61 nt, Homo sapiens
cagcagcggggcggggcgaagaagcagcacaaggcgagccaggaaccacacggcggaggca

SEQ ID NO: 59980 - RNA, 72 nt, Homo sapiens
cgggggcggcggccacgccaaggacgggaggccaccacgaaaaccgaccgcacaccgaggggggcgcaccgc

SEQ ID NO: 59981 - RNA, 51 nt, Homo sapiens
acgaaaaacggcaaccagcaggccgaagagaaggggccacacgcggacccg

SEQ ID NO: 59982 - RNA, 75 nt, Homo sapiens
gagaagccgcaacgccccgccaaagcaaccagaggcccggaccgagcccaggcaaacccccagaaagcccagaaa

SEQ ID NO: 59983 - RNA, 87 nt, Homo sapiens
cggaaagcgccgcccagcagccgcagggcggagaagccgaagggccagaaccacccccaggggccacagcagagggagcgacgggaa

SEQ ID NO: 59984 - RNA, 75 nt, Homo sapiens
agagaccaaaccacggccaaccacagagggcagacacaaggaacagccagccaggagaaaaacgaacccaacaga

SEQ ID NO: 59985 - RNA, 77 nt, Homo sapiens
aggacccgcggggcacccgcaggggcagacagcacaaccagcggaacgcacaccagcaccagcccaccaaaccagca

SEQ ID NO: 59986 - RNA, 34 nt, Homo sapiens
ccgccccagagccgagagcgcagggcagacaaaa

SEQ ID NO: 59987 - RNA, 63 nt, Homo sapiens
cggcccggcgcagcgagcgcggacggagaggaaagcgggaacacagaggagcacgaagagcag

SEQ ID NO: 59988 - RNA, 80 nt, Homo sapiens
cgcgggaagaggcggcgccgccacccccccccagcagccaggcccagacagccgccgaagaaaagcccagggagcccccc

SEQ ID NO: 59989 - RNA, 49 nt, Homo sapiens
aggggccgagaacgacagagcggcccagaaggacggaacagccagggag

SEQ ID NO: 59990 - RNA, 70 nt, Homo sapiens
aacaaacccggagaccagaagaaccacaaagccaagacgcaagcgcggagagagaggaccacagcccacg

SEQ ID NO: 59991 - RNA, 68 nt, Homo sapiens
ccacaagccaaaacccgaaaaaggccccccgagaagacgacgcaccaaacccccacggacagccccag

SEQ ID NO: 59992 - RNA, 86 nt, Homo sapiens
ggcggggggaagcccgcgccgccggcaccagaggcgagcacacagagaggggaagggcagcagcagcagagaaccaaacccaaagc

SEQ ID NO: 59993 - RNA, 73 nt, Homo sapiens
agccgccacggaggcaaagcagccgagccagcgggccggcaccggcacgaggagcgcacacccgcccagccaa

SEQ ID NO: 59994 - RNA, 33 nt, Homo sapiens
agaaagagggcgccaggagaaaagaagccgaac

SEQ ID NO: 59995 - RNA, 87 nt, Homo sapiens
gaggccgcggaggagaagccggaggaggacaacgacaccaccgcagcgacgagcagggagaacggcagaaccaagggaccaaagcgg

SEQ ID NO: 59996 - RNA, 76 nt, Homo sapiens
acaaggcagggagaccgcacgcgcccaaggaagcgaaagcccagcacgcagagagcagagaacgagaaagagcccc

SEQ ID NO: 59997 - RNA, 80 nt, Homo sapiens
cgggcaccaacggggcccaacaccaacgagaccacaccagccccacgcgggcagaagcacaggcagaaccggcgacgcgg

SEQ ID NO: 59998 - RNA, 83 nt, Homo sapiens
gacagggcaggagaagaggaaccgcaaagccaagggaagaagcagaagcaagcccagggcaaggaccgggaaaacggaccagc

SEQ ID NO: 59999 - RNA, 86 nt, Homo sapiens
agaggaacacggcccacacacccaggcgcggagggaagacgcccgggccaccaagcaagggagcagaggaacgcaccaggcacacg

SEQ ID NO: 60000 - RNA, 83 nt, Homo sapiens
gggagagcgaggcgaccacgaaaacgggaaggcggaaccgacagccccccgagaagggaaagagcacacgggagcgcccccga

SEQ ID NO: 60001 - RNA, 66 nt, Homo sapiens
aggcacaaaagcacgcccagccccagcacaccgcaccagcgaggcggcgagggagcgcccccgcca

SEQ ID NO: 60002 - RNA, 76 nt, Homo sapiens
caagaacgcacccagcagacccaacaccaacacgaggagaaggcagccccaggggcccagccagagagagccccga

SEQ ID NO: 60003 - RNA, 57 nt, Homo sapiens
cggagggaaccaagaaagagagggggaaccggggaaggcaccggcaaggggggaggc

SEQ ID NO: 60004 - RNA, 61 nt, Homo sapiens
ccggaacgcaggacagcacgcggaaaaggaacaagggggcgcaacagcccaggcagcacgg

SEQ ID NO: 60005 - RNA, 75 nt, Homo sapiens
ccggggcgaaaaggaaccgagacccagacaaggggccgggcggggcaggaagccaggagaaccacaaccccacca

SEQ ID NO: 60006 - RNA, 91 nt, Homo sapiens
agaaaaagaagaggagacaaacgggaggagaagcgaaggaggcagagacccggcgaggcgagagacggagccaagcggaaaagacaagaga

SEQ ID NO: 60007 - RNA, 84 nt, Homo sapiens
aaacggaagcgcagggagaaggaagaggggaaaagccgaacacccaacaagaaggcaacgacaaacagccaagcaagccccagg

SEQ ID NO: 60008 - RNA, 83 nt, Homo sapiens
ccgcaccgcggcaaagagaggacgcagcgagaaaggagcggcggcaggaggcccaccaccagcggggccggggcgcgagggca

SEQ ID NO: 60009 - RNA, 77 nt, Homo sapiens
ccaaagcgcgccgccccgggcaaaagggaagagaaagccaaacccacccccgggcaggcagacgccggccgcacccg

SEQ ID NO: 60010 - RNA, 60 nt, Homo sapiens
caaagcagccggaaaggagccaagaggagaagagacgccaacagaccggggagaagggac

SEQ ID NO: 60011 - RNA, 71 nt, Homo sapiens
gaagggggaagccgcaaaccagcaaggcccaaaaaagaaccaaaggcaagaaccggagcaggagaaaagcc

SEQ ID NO: 60012 - RNA, 82 nt, Homo sapiens
gagacccgccgccgaggaggcccggggagcgaaggagcgcagcaccagcccaacaagagcagagacgagaaaaggacacacg

SEQ ID NO: 60013 - RNA, 63 nt, Homo sapiens
cagcccaaacgcacaagcaaaaccacccacagagacaggacgacccggacaaccacccacaag

SEQ ID NO: 60014 - RNA, 52 nt, Homo sapiens
ccccggcaaggaaaccgcaggcgccccccgggagagaagaggaaggacagag

SEQ ID NO: 60015 - RNA, 79 nt, Homo sapiens
aagacgccaggaccggaagcagagaaagcccgccgacacagccaccaagaaggcacaagcagaacgggaaaaggggcgg

SEQ ID NO: 60016 - RNA, 68 nt, Homo sapiens
agaaggaccaagaaccagcgacccccggaccggaagagaaagggcccgaccgacgcagcggaagacag

SEQ ID NO: 60017 - RNA, 73 nt, Homo sapiens
ggaacgacgcggcggggagggaaggaaagcgagacgacgggaccgaaggaccccgccagagacaaccgagcgc

SEQ ID NO: 60018 - RNA, 82 nt, Homo sapiens
gggcacgggggccagaacacagcaggaccacccgggacaagggaacgggcgagcaagagaggagcgggaaggccccgcaccc

SEQ ID NO: 60019 - RNA, 77 nt, Homo sapiens
gaaggaaaagccaagcaggagaaaccagccaaacaacagaggagcgcggcagagaacacggaaagacgagcagcacc

SEQ ID NO: 60020 - RNA, 67 nt, Homo sapiens
cgccggaaccaccacacacggagcgagcacagccaaaaaacaacaaagggaaccaagcaggaagcag

SEQ ID NO: 60021 - RNA, 79 nt, Homo sapiens
gaaaggcggggcgagagcgccaaagacccccacaggcgcagcaggggagaccacaggacaccgcacccgaaggcccagg

SEQ ID NO: 60022 - RNA, 80 nt, Homo sapiens
agaagaggcggggaggacacgacgcgcaaaggggccccacggcccaggagccggagagcacagggccgcagaagagcggc

SEQ ID NO: 60023 - RNA, 80 nt, Homo sapiens
gccccaacaccagagcgcacaccggggcaaaagggacaaggagacaggggccaggccaggggcaggggaagcacccaacc

SEQ ID NO: 60024 - RNA, 52 nt, Homo sapiens
cgccacccgcgcgccgccgccgaggagaaaggagcacacaacaaaccggagg

SEQ ID NO: 60025 - RNA, 63 nt, Homo sapiens
ccgacgccaggcagcgcccccaaacggcccagagcgcggcccaggggccaacggacagaggcc

SEQ ID NO: 60026 - RNA, 79 nt, Homo sapiens
cggcgccgcgcacgccgagccacgggggcgcgacggcagaggccgaagggcaagagggcacagaagacggcgccccaca

SEQ ID NO: 60027 - RNA, 84 nt, Homo sapiens
ccgccgccagcggcgcaggcccagagcgcgcgagcggaccaggagggcacccccgggacggacaagagaccaacgaagaacccc

SEQ ID NO: 60028 - RNA, 83 nt, Homo sapiens
ccaaggccaaggaagcccgagagcaagcgagggcgccagcagcgcaccccagaggccgcgggagggcccacaaccgagcggcc

SEQ ID NO: 60029 - RNA, 66 nt, Homo sapiens
aacggagggaaacaacaagcagaaccagcagaccggcaacaggggagagaagaaccgaagagagca

SEQ ID NO: 60030 - RNA, 50 nt, Homo sapiens
accgggacgacaccggggaccggacagggagaggaccaggagcggccgac

SEQ ID NO: 60031 - RNA, 61 nt, Homo sapiens
agaacgaaagccccaccgcgccccagcggccacggagggaaacccaagaaggagacaaaag

SEQ ID NO: 60032 - RNA, 82 nt, Homo sapiens
ccccaaccagcagagagggagagccagaaccaacagagccaacacaagcaccaggccggcgaccaccaggggccgaggagaa

SEQ ID NO: 60033 - RNA, 104 nt, Homo sapiens
agaaggcagcagaagggcgacgagaccaacaagacgagggcgcagcacagcagcgcgcagacaggacaaccagcggaggcacgacgccaaaccaaaaagcaagg

SEQ ID NO: 60034 - RNA, 81 nt, Homo sapiens
aaagcggggacccagacccggagcccagggaagcagccgaccagccgcggagccgggggcaggcacaggccaacgcgccac

SEQ ID NO: 60035 - RNA, 78 nt, Homo sapiens
caagaggggaagaggacgggcaggcggaagcgccagaggagccaccaggacgcgccacggagagacacggcggggggg

SEQ ID NO: 60036 - RNA, 67 nt, Homo sapiens
gcgggcagagaccagcaccggagaaggcacgcagccagaggggccagaagagagaggaggcacgccc

SEQ ID NO: 60037 - RNA, 72 nt, Homo sapiens
agcgagaaaccaaagggaacgggggagagaagccacaaagcaagcagggaacgacagcacgacagacagagg

SEQ ID NO: 60038 - RNA, 56 nt, Homo sapiens
agccggccccgcagccggcgcgcggccagaaccccccagcagccgcccacagacca

SEQ ID NO: 60039 - RNA, 73 nt, Homo sapiens
cggccccggcgagacggagaaggcaaaggagcaacagcagcaacgcagcagcggcagcggcaggagcccacac

SEQ ID NO: 60040 - RNA, 71 nt, Homo sapiens
gagacaaaacagccgagaaccacgaaaaggaacagacgagccggacgaaaaagagccacgcccccacgagc

SEQ ID NO: 60041 - RNA, 81 nt, Homo sapiens
ccccacagcccgcccaacaccaaaaacagcaccaggcccgaagcagaaaacagagggaaagaaacagccccagagcccaga

SEQ ID NO: 60042 - RNA, 84 nt, Homo sapiens
ggagacaacagcaggggcagcgggccgcaggggcgcgcagcgcggggagcgccagcccaccccagagggagaaaccaaccccgg

SEQ ID NO: 60043 - RNA, 55 nt, Homo sapiens
ggccgggagaccgcggaggaaggggccccgaacaccgcacgagacagacagcccg

SEQ ID NO: 60044 - RNA, 53 nt, Homo sapiens
ccgagaccgacacggggggaaggcgcgacgaaacgaagaaaccagcaaccaac

SEQ ID NO: 60045 - RNA, 70 nt, Homo sapiens
agcaacagaaggcgaggagaaaccaaagaacagccaagacgcaggcagagacgacaacccggcccaagcg

SEQ ID NO: 60046 - RNA, 51 nt, Homo sapiens
gaggacaaggcagcaaagaagaggacaaagaggccaggagacacgccaccg

SEQ ID NO: 60047 - RNA, 83 nt, Homo sapiens
gggcacccaaacgaacccaagagaggacaccacacagccaagagcgccgccgaagaagaaaggaccaggcgggcccgagacaa

SEQ ID NO: 60048 - RNA, 82 nt, Homo sapiens
agcagccccgagcacgggccgaggcccaccgcgacacaccgccagaccccccccgagagaggggcgcccccgggagaccgca

SEQ ID NO: 60049 - RNA, 71 nt, Homo sapiens
gaaagcagcccagggggccaaaccgaaaggacggaccagaccccccaggagacggggcaccaaaccaaagg

SEQ ID NO: 60050 - RNA, 78 nt, Homo sapiens
ggaaaaaacaaaaggagagcgccaaaccaacgagagggaggaacagcaccgacagcagggaagaacggaaaccagaga

SEQ ID NO: 60051 - RNA, 58 nt, Homo sapiens
gggccgcccgacggcggccaccgaagaagcaacagcagcaagaaaccgaggcaaaaag

SEQ ID NO: 60052 - RNA, 36 nt, Homo sapiens
ggcaaagcaccgaacggaccaaaagggccgcccccc

SEQ ID NO: 60053 - RNA, 71 nt, Homo sapiens
ggacgggcccacagcccggagccccacaggagaagacagaggagccagaccaagagacagcacaggcgagc

SEQ ID NO: 60054 - RNA, 34 nt, Homo sapiens
caggacaaacacacagacccccagggcagccaga

SEQ ID NO: 60055 - RNA, 77 nt, Homo sapiens
aaaaagagcaggaggacacaaggaaacccagcagcaaggagacccaacaccccggccagacgggccaccaggccggc

SEQ ID NO: 60056 - RNA, 56 nt, Homo sapiens
gaccagaaaaacaggacccgaaacacgggccgggagaggaaggccccaagcagcca

SEQ ID NO: 60057 - RNA, 53 nt, Homo sapiens
accagaaggagcgcaaacaaacggacagagacgagagccgaggcgccggaaac

SEQ ID NO: 60058 - RNA, 57 nt, Homo sapiens
caaggaaaccccaacacagagccaagcgccaacacacaaagcgcccaagacgcgagc

SEQ ID NO: 60059 - RNA, 72 nt, Homo sapiens
ccgacgccaggcagcgcccccaaacggaccccaacaacaggagagagcaagcgagcagggagaaaggaaagg

SEQ ID NO: 60060 - RNA, 89 nt, Homo sapiens
cggcggcggcggcggaggaggaagaggcacgcgagggggcgcgaggggaacggaggccagagcgcgcggagcagcagcaggagagccca

SEQ ID NO: 60061 - RNA, 74 nt, Homo sapiens
ccaggagcgccacgcgcggaaggcagcgcccagcagcgcagaccgcgagaggaggaggaccagccccagccgcc

SEQ ID NO: 60062 - RNA, 35 nt, Homo sapiens
cccacgggccacgaaacggaacaccaccccagagc

SEQ ID NO: 60063 - RNA, 76 nt, Homo sapiens
gaaggaccaagaaccaggaacaagcaaagcaggcgaaagagaaagggaagccaaaaaacaacgacaacaggcaaga

SEQ ID NO: 60064 - RNA, 69 nt, Homo sapiens
aaaccaccaacaacacagacaaacaggagacgcggcgcgcaccgggggcgcgcaggggcagcgcgacgg

SEQ ID NO: 60065 - RNA, 65 nt, Homo sapiens
gcaaacgaaggcagcaaagggagaagcgcgggagaacggagcccagaggccagcaccagcacaca

SEQ ID NO: 60066 - RNA, 73 nt, Homo sapiens
cggcaggaccgggcagaacaacgaacagaagcacaaccagagccggccccgcgcagaacaaaaaaggaaacaa

SEQ ID NO: 60067 - RNA, 39 nt, Homo sapiens
agagaacgaagcagcaaagcgagacccggagaaggcagg

SEQ ID NO: 60068 - RNA, 66 nt, Homo sapiens
gagaggaccacccagaggagcaaccggccgcaaaacggagcgaacacaggcgagagcgaaaacgaa

SEQ ID NO: 60069 - RNA, 73 nt, Homo sapiens
gagccggccagcgcgccggagccgccgaggccgggaacgggaaacgcgcgccgagaagccacccgccgagagg

SEQ ID NO: 60070 - RNA, 83 nt, Homo sapiens
gggcccacacaacccaggcaaccaacagaaaagagaggaacagcacggaagaaccgaagaaagcaagaacaaccggacaagcc

SEQ ID NO: 60071 - RNA, 67 nt, Homo sapiens
agaggcgaggcacggacagcggcagcaggcgggacaacacaagggaaccaaggagggcgccgcgggc

SEQ ID NO: 60072 - RNA, 59 nt, Homo sapiens
cgggcgagcggggggacgccggcggagacgcgggcgaggccaggcgccggcaggagcga

SEQ ID NO: 60073 - RNA, 92 nt, Homo sapiens
acaagacagggcaaaggacagaccagaggagcaggagcggccgcggagcaggagcgagagcaggaacagaagaaggccaaagccggccaggc

SEQ ID NO: 60074 - RNA, 41 nt, Homo sapiens
gggggcaaacccgagagaacggccgagccgcgccgccagga

SEQ ID NO: 60075 - RNA, 52 nt, Homo sapiens
aaggcgaaaaacacagaaaggacgcggaaaaagaggagcgccgcgcccaggc

SEQ ID NO: 60076 - RNA, 78 nt, Homo sapiens
ccaccccccacacgggggaccagcagggaccaagaggaaacggcgccgcaggcgccaaaaggaaacacggaagaccac

SEQ ID NO: 60077 - RNA, 75 nt, Homo sapiens
gaacgaacacacaccagaagcagacgagaccggagaaggaaagacaagccgagagagggaggcccgaggaagagc

SEQ ID NO: 60078 - RNA, 72 nt, Homo sapiens
acgggccaacccgagagccccagccaccaggggcagcgccaacaagaagcaagaacaaaccagcgggaaaaa

SEQ ID NO: 60079 - RNA, 48 nt, Homo sapiens
gacccagacggggcgaagaggacagcagaccacagcccggcaggccca

SEQ ID NO: 60080 - RNA, 72 nt, Homo sapiens
ccaacgagcagcccagcgaccaaaaggggggcagaaagaagaggaggacaacaagccaacagagagagacga

SEQ ID NO: 60081 - RNA, 54 nt, Homo sapiens
gagaccaacgggagccccaagaccccacgacagccccagccagcaaaccagccc

SEQ ID NO: 60082 - RNA, 73 nt, Homo sapiens
cagaagcccggcggaaggaaaacaaagagggaaaacggagaaaagcccccccaggccagcgcaggaacacgag

SEQ ID NO: 60083 - RNA, 83 nt, Homo sapiens
ccgcagagacagccaacacggcacccacaggagcgggacggagcgggccaccggggccacgacagcgagcgaccccggccgag

SEQ ID NO: 60084 - RNA, 74 nt, Homo sapiens
cgccaccgaagagccaagcccagcgggaccccacaccagccagggaacaacggcccccagcagacagagcggga

SEQ ID NO: 60085 - RNA, 55 nt, Homo sapiens
ccgcgccgccgaccccccggcgccgcgccggcggcgggaccagaccaccacagcg

SEQ ID NO: 60086 - RNA, 84 nt, Homo sapiens
cggcgcgccgccgaaggcgggcgcagcggcggagcggagcggagcccggagggcggaacccggggacccagaacccagacacca

SEQ ID NO: 60087 - RNA, 62 nt, Homo sapiens
gacaagccgacagcaccgcaggacagagaaggcaaagcaggggggcaagcacacaagaagcc

SEQ ID NO: 60088 - RNA, 78 nt, Homo sapiens
aggaaccaccggacgaagacagcaaggagacccgccaaagccgccgggcaagggcagggccagaaaacagacagagag

SEQ ID NO: 60089 - RNA, 81 nt, Homo sapiens
agcccgacgcaaaccaaggacggggaccgcacacccaaggcgaacacccgcaaacaccacccaagcaaacaggagccggac

SEQ ID NO: 60090 - RNA, 57 nt, Homo sapiens
aaaggaagcacaccagaggaccacacaacagagaagggaaaacgccacagccaggag

SEQ ID NO: 60091 - RNA, 78 nt, Homo sapiens
ggagcgcggcgcccaccgggaccggagcgcacagcgagggcaccaccgccgccccagcgggaggacgggcgaaagagc

SEQ ID NO: 60092 - RNA, 70 nt, Homo sapiens
cggaggaaccgagcgggccgaccaccgacaggccggacacagggcacacgaccccccagccgcgccccgg

SEQ ID NO: 60093 - RNA, 74 nt, Homo sapiens
gaccgcccgaaccggaacaggacacgagcgggccacgaggacccaaagccagcaaggggccagagaaaaccggc

SEQ ID NO: 60094 - RNA, 57 nt, Homo sapiens
ggacaaccagacgacaaggagaccgacggccggaaacccagcggcggcagaaccagc

SEQ ID NO: 60095 - RNA, 80 nt, Homo sapiens
aggacccgggacaccgcacagccgggaaaggacagggccgagggggcaccccgccaggacaaaacgccaggcagagaccc

SEQ ID NO: 60096 - RNA, 102 nt, Homo sapiens
caaaacggaggagcagagcgaaacggaagagaaaaccgaaaaagcagaagcacaagccaaacgacaccggacaaggacggacaacccacagaaggagacaaa

SEQ ID NO: 60097 - RNA, 31 nt, Homo sapiens
gagagggcacaacaaaccccggcgcaggaac

SEQ ID NO: 60098 - RNA, 77 nt, Homo sapiens
ggaaagcacgcacacacagcaggaaacacaaacacggaaagcacagaagagcaacaagcggaagaccacaacgacgg

SEQ ID NO: 60099 - RNA, 74 nt, Homo sapiens
caagcacagacgcaaaaacaggccgaggaaggcgggggaggagacagcgggaagccagcggacccagacaccgc

SEQ ID NO: 60100 - RNA, 78 nt, Homo sapiens
accgagccgggcccaccccccaccaaggaaggccccggagcagacacagcccaccggccgagccccaccggcccacca

SEQ ID NO: 60101 - RNA, 75 nt, Homo sapiens
aacgaacaaaagcgccgggaagcaagaggcaaagagaacgggacggaacacccgaggcgagaagccccagaagga

SEQ ID NO: 60102 - RNA, 78 nt, Homo sapiens
cgagggaccaggccgacccgcggagacagacaagacaagaccggcggggaagcgcgacgcacaaggaaaaacagagag

SEQ ID NO: 60103 - RNA, 76 nt, Homo sapiens
aagacaaaacgagccacgcacaacccgcaaagccagagaagaagcgggaggagagggcccaaagcaacgccaagac

SEQ ID NO: 60104 - RNA, 77 nt, Homo sapiens
gagccgccgcagaagcaaccaacgagacaagagggcacaacaacaaccccccaggcaaaaaagccacggagaccaga

SEQ ID NO: 60105 - RNA, 54 nt, Homo sapiens
aagaaccgcagccgagcggggccggccacaggaccgaaggaagagaccaagaga

SEQ ID NO: 60106 - RNA, 77 nt, Homo sapiens
cccaagcaggggaggagaacaaaacgaagagggaaagccaccccaggccagcggggagcgggagagaaagagccgaa

SEQ ID NO: 60107 - RNA, 73 nt, Homo sapiens
gaacacgccggagccgccaggacccagagagggaccagggccaaagaagagccggggggcaggcggacagcaa

SEQ ID NO: 60108 - RNA, 60 nt, Homo sapiens
ccggacgacccccagcgagccagcggagcgcggcagccggcgggggcagcgccagagaga

SEQ ID NO: 60109 - RNA, 75 nt, Homo sapiens
cggagcgcccggggcggcccggcgcggcacagcgccgccagcagggccgaccaggaagaccgggagcacagaaga

SEQ ID NO: 60110 - RNA, 68 nt, Homo sapiens
gagccgcgccgcgaacaggaagcccgaagcccacacaccccgaaaacaaagaaaaggcacacacaccc

SEQ ID NO: 60111 - RNA, 71 nt, Homo sapiens
cccccacccgacccggcaccacacgcagaacgggcggacgggcgcccagccagggaccaagagggggcacc

SEQ ID NO: 60112 - RNA, 84 nt, Homo sapiens
gggaagccaggagcagaacggaagcgagcagcgcaaagcacaaagaacgcacaccaccagaacgagggcgggaaagaagccgca

SEQ ID NO: 60113 - RNA, 56 nt, Homo sapiens
aaagggccaaagaagggagagagacagcacccaagaaaacccaggccgcgaaggag

SEQ ID NO: 60114 - RNA, 86 nt, Homo sapiens
acgccagcgccgagggcgagacggcagccgaaaagacgaggcgaggaggcgagacacccaacccaccccaccccggagggccagac

SEQ ID NO: 60115 - RNA, 54 nt, Homo sapiens
cagacgacggcgcccgcacgcgaaaacaaaaaggggcgcgagagggaaagagaa

SEQ ID NO: 60116 - RNA, 127 nt, Homo sapiens
gccaacggcccagccgaggagcggcgggcggcggcgcgcggacccaggcgcggaggcgaggccagcagggaaagacaaggagccgggccgagaaaccgaaccagagaccagagaagaaacgcaaagc

SEQ ID NO: 60117 - RNA, 60 nt, Homo sapiens
cagaagaaaagaagcgcagaagaaagacgcaagggcagaagacaagaccccaagagagaa

SEQ ID NO: 60118 - RNA, 85 nt, Homo sapiens
cggagagagggcggcggcgcgagcgcccaggccacggagcgcaaaccggccgcacgacgcgcagaggaacaagcaagaaaacagc

SEQ ID NO: 60119 - RNA, 50 nt, Homo sapiens
caaggcggaaaagcccaagaaacaaacaggacaagagaaaaaaagggcgg

SEQ ID NO: 60120 - RNA, 39 nt, Homo sapiens
cgccacagggccacaggagcaagagagacggggcgccgg

SEQ ID NO: 60121 - RNA, 75 nt, Homo sapiens
gacacaaaccccggggccaccgagaaccccacagcgaaggaaaaggagccccgggccccaggcgcagacggaccg

SEQ ID NO: 60122 - RNA, 61 nt, Homo sapiens
accagaggcagccagcagggggagagagaggcgcccaaagagcaacggggagccaagacag

SEQ ID NO: 60123 - RNA, 57 nt, Homo sapiens
acaagcgccccgacggagcgccaggacgaacaaacggacccaggacaaaacgacacc

SEQ ID NO: 60124 - RNA, 71 nt, Homo sapiens
aaccacgcacaacaccaagcacaccacccgaaagaaaggcaccacaacgcaaggcgcaccgcaaaccgggg

SEQ ID NO: 60125 - RNA, 58 nt, Homo sapiens
agcaaggccgggagaccggagaggaggcgcgagaggaggccagcggacacagcgccaa

SEQ ID NO: 60126 - RNA, 53 nt, Homo sapiens
cccgaagagccacggcagggacgagaaaggcccgcagaggagaggagagagga

SEQ ID NO: 60127 - RNA, 80 nt, Homo sapiens
gcccgggccagcccaggaccccaggggaacaagaggccacgcagagccacgccgggcaagaaggaacagacaaaaacggc

SEQ ID NO: 60128 - RNA, 54 nt, Homo sapiens
ccacagacacgcacaggagaagggcccggagagagaagcaaagcggagcggaag

SEQ ID NO: 60129 - RNA, 73 nt, Homo sapiens
agaaagggccccaagaaaacagccaacccgcaacaacggcagaagaaaagcccggaaaacggaaaaaaaacag

SEQ ID NO: 60130 - RNA, 78 nt, Homo sapiens
aacaacagaaccaagggagggaaagaccacagaagagcaagagccgaagaaacgcaaaacaacaaggaaggcaaaggc

SEQ ID NO: 60131 - RNA, 42 nt, Homo sapiens
ggccggacgggacccagaccagagcaaggaggacagcgggag

SEQ ID NO: 60132 - RNA, 81 nt, Homo sapiens
cgggaagagaccaccaaacaggcgaaacccacagacaaagggaagaacaaacccagaacccacacgaacgcagacgaaggc

SEQ ID NO: 60133 - RNA, 83 nt, Homo sapiens
cgcccggacggggcggacgcagcaagcggggcgcggccccaagcccccgcccgggaaaggcaacgcgacaggaagggcaccac

SEQ ID NO: 60134 - RNA, 77 nt, Homo sapiens
gcgcggcggggcagaccgcggggacgcgggcggcgcggccgcgccagacagggcccaggggcacccgcgcacagcag

SEQ ID NO: 60135 - RNA, 50 nt, Homo sapiens
aaggggagccagccagcggacccgacaaggaagcgacccggaaccgggaa

SEQ ID NO: 60136 - RNA, 83 nt, Homo sapiens
gcgacgagcgacccgggagacacgacgacaagcagaccggaagaccgacggaagaccacaccccgagggagcccaggacacca

SEQ ID NO: 60137 - RNA, 71 nt, Homo sapiens
gggcgagcaggagcgagagggcgaacaccacgccacccaagagagagcaaaaaccgagaaccagaggcaca

SEQ ID NO: 60138 - RNA, 78 nt, Homo sapiens
gcagcccagcaccaccaggcgggagcaaaacggcagcaggaaacgaagacggagaaaacagcgagccaggagcaaaca

SEQ ID NO: 60139 - RNA, 73 nt, Homo sapiens
ggcacgaagccgagccaaaggacagggcagaccgccagcagcacagcaagccacagagagggccggcagggcg

SEQ ID NO: 60140 - RNA, 76 nt, Homo sapiens
ggggcggcagcgcgccaagcgccggcagaacaaccgcggggcaagagccacaccagacaaggcccaacaaacaccg

SEQ ID NO: 60141 - RNA, 64 nt, Homo sapiens
ccaccgggcccgcagggggccaggagaagcgcagccaccaggagagaacgccgcgccgcgcgac

SEQ ID NO: 60142 - RNA, 79 nt, Homo sapiens
acgcacgggaaccggaccaggaggaggcaggaccaaaagggaaaagcaccgcggaggcacccaccacgggccaggcggg

SEQ ID NO: 60143 - RNA, 41 nt, Homo sapiens
ccggccggagccgagcggagccgaccgcgaaggaggacagc

SEQ ID NO: 60144 - RNA, 83 nt, Homo sapiens
cgcgcggcgcggggaccgcggcccggcacaccgacaaacgaagcggggccaggggaggacccgcccccagccgggccacccgg

SEQ ID NO: 60145 - RNA, 87 nt, Homo sapiens
cacgaccaccgcacacccgacacagcggagcgcccagaggcgagcccggggaggaagagaaaagccaaccgacgggccagagaggca

SEQ ID NO: 60146 - RNA, 72 nt, Homo sapiens
aaacccacagaaccaaagcagaaagaaggggaagcacagcaacccccacaccccccccagacagccaggagc

SEQ ID NO: 60147 - RNA, 80 nt, Homo sapiens
aacggaagaaagccagaacagcaagaaacaaacgcacccagaaacaagggggggccgcccgcccaaggcaggaagagggg

SEQ ID NO: 60148 - RNA, 78 nt, Homo sapiens
accggccacgacagcaccaccagcgggagagagacagcggacgggagaccgagccacaccacgcgcaggcccgcaagc

SEQ ID NO: 60149 - RNA, 68 nt, Homo sapiens
ggaggcccaagacccacaacaaaaggagggaaaagccgaacggggacgaggaagaggcagaggcgaac

SEQ ID NO: 60150 - RNA, 82 nt, Homo sapiens
cagcccagaaccaaagggaaggcagcacgggggcagggcaaaacacacagcgaggagcacagcaagcgggagcaggcagacc

SEQ ID NO: 60151 - RNA, 84 nt, Homo sapiens
cgcgagcaaggagcgcggaacggggagcgccggagcagcggacccaggcaggacccaaagacaggaccacgcaccagcagagaa

SEQ ID NO: 60152 - RNA, 61 nt, Homo sapiens
caacaacccccaagcagcaagaagggcgccaagccggcaagagaaagagaggccagaacag

SEQ ID NO: 60153 - RNA, 75 nt, Homo sapiens
cggcgcagcgcgacggcgccggcagggaggcaagcgccccgacccgcaggccagaaacagcaacgcggagagagc

SEQ ID NO: 60154 - RNA, 72 nt, Homo sapiens
ggaagcccgagcagccgacccgcccaggccagagccagacaaagccagaccgcggagggagaaaggagagcc

SEQ ID NO: 60155 - RNA, 74 nt, Homo sapiens
accgcgcaccagagaaagaagcagcgacccagaaacacacccaccgcggagacggaagcccccaaagcagaaac

SEQ ID NO: 60156 - RNA, 66 nt, Homo sapiens
accaaggggacgaggcaaaaagcacagaagagaggaaccaacgccaagaggcccagaagaaccaac

SEQ ID NO: 60157 - RNA, 66 nt, Homo sapiens
agcgaaagaaacaacacaaccagaagcggaaacaagcggaaaggacacagaggccgcgacagccac

SEQ ID NO: 60158 - RNA, 62 nt, Homo sapiens
aggggccgacagcccacagcccaccaaagggaacgggaagaagcgcacggggaaggagccag

SEQ ID NO: 60159 - RNA, 39 nt, Homo sapiens
ccgaccgccccgaaggcgcacggcggaggcagggcagac

SEQ ID NO: 60160 - RNA, 80 nt, Homo sapiens
gaggcgagaacagcaccgggagaaacaacaacgcacacgggaggagccaacagcaggaaggcagagaccaaaagagacgc

SEQ ID NO: 60161 - RNA, 57 nt, Homo sapiens
ggcagagcgacccaggcacaaccaccgccacaccagcagggaaaaggagccacaaag

SEQ ID NO: 60162 - RNA, 76 nt, Homo sapiens
agcacaccggagagacgaggccccgccacaagaagagggcagacaggagggaaagcacaccagcagggaccaagcc

SEQ ID NO: 60163 - RNA, 84 nt, Homo sapiens
cgagcgcgcgagccagacagacgcgagcgacaagagaaggaggaaaggaccaggccaaccggagcgcacccacgccacaagccg

SEQ ID NO: 60164 - RNA, 85 nt, Homo sapiens
cagcccccaagcccccaggcacccaggagacaagcaagcgcaaagccgaaaaacagcagcagaggaaagaaaagaccagagcaag

SEQ ID NO: 60165 - RNA, 78 nt, Homo sapiens
cggacgggcgcccagccagagcacaagacccagaaaaaaaggagaaagaagagaagaagaaaacaaccagcaggaaag

SEQ ID NO: 60166 - RNA, 77 nt, Homo sapiens
gagcggagccggcaggaaggggaccgggcggcggagcggcggaagaagacaagcagagacgaagcgaagggagcaca

SEQ ID NO: 60167 - RNA, 57 nt, Homo sapiens
ccggaaaccaacaagggaggagcggcgagcaggaccgggcacggggagccaccggac

SEQ ID NO: 60168 - RNA, 70 nt, Homo sapiens
agagaaagcgagaaggacgaagcaaaaagacacgcggcacccccaacccacgcgcagagaaacaaaggaa

SEQ ID NO: 60169 - RNA, 79 nt, Homo sapiens
aaaacccacacaggacgcggacaagggcggcagagccaggaccccaggagcgggccagcccgcccccaggagggcagca

SEQ ID NO: 60170 - RNA, 72 nt, Homo sapiens
accaagggcgcgcgacacgaacaccgaggaggccaaggacgggccaacgcacggcccggcagagccagcacc

SEQ ID NO: 60171 - RNA, 74 nt, Homo sapiens
aggggggagccaacaacaagggcgcggcagagcggagagaacagagagaagggcgggagaaaccaaggaaagag

SEQ ID NO: 60172 - RNA, 74 nt, Homo sapiens
gccagggcccacacccccccccccgacaggcaagaagcagagcgcagaggaaagaagagagggagggaaacaga

SEQ ID NO: 60173 - RNA, 75 nt, Homo sapiens
gagcgcccgggaaccccaggcccgggggcacaaggggcaggccacggggcgcgcaggccgaggcgaggccagggg

SEQ ID NO: 60174 - RNA, 78 nt, Homo sapiens
agaaagaggacaggcgcgggcagcgggaagcgaggccccaggacaccaaaccgccaccgcgacgcaaggagaggccgc

SEQ ID NO: 60175 - RNA, 77 nt, Homo sapiens
cacccggccaacccagaaccccagcaccgaaagggaccgaaaggagagcaaaggaagaacagcagcagcgccacagg

SEQ ID NO: 60176 - RNA, 83 nt, Homo sapiens
gagagggacacgcaggacgagcggccgaagcagcgcggcagcagagcgggagcgacagggagaagaagcgaaggaggggggac

SEQ ID NO: 60177 - RNA, 74 nt, Homo sapiens
agcggaagaacacagcgggggcaaacaagcgagaaaaacgccacaaccaaacgcgcaaagcgccaaacgaaaag

SEQ ID NO: 60178 - RNA, 72 nt, Homo sapiens
agcccagcacgccgcgacggccccgggaaggaggagaggagcaaccggaagggacaaaagaacaaaaaagga

SEQ ID NO: 60179 - RNA, 112 nt, Homo sapiens
agaacaagacagcaagagcagcccgcgagagcccagaaagagcgaaccacagcgcggagaaagggagaggaggggcgaagaagcgagggcagccggagagaacaggaccagc

SEQ ID NO: 60180 - RNA, 55 nt, Homo sapiens
ccaacaccacccacccaccacggaggaaaggaaacacaggagccaagggacagcg

SEQ ID NO: 60181 - RNA, 79 nt, Homo sapiens
gcccggacccgcggagggcgacagaggcgaggaggaggagccagggcgagcaccaagacagggcaccgcacccaggcgg

SEQ ID NO: 60182 - RNA, 70 nt, Homo sapiens
ggagagagcggcacaaaaccccagccagcaaagacaccaccagaacaagggacagaaagagccaagaaca

SEQ ID NO: 60183 - RNA, 72 nt, Homo sapiens
cacccgaaaaccaaaccacggacgccacagccagcacgagcgcgacccaccaagggcccagccaaaccgaga

SEQ ID NO: 60184 - RNA, 84 nt, Homo sapiens
gagaagaggaggggagaaggcgggccgcgccgcgaagcccgccaggagcccggaaggggccgcacgagacagaaagacacacca

SEQ ID NO: 60185 - RNA, 71 nt, Homo sapiens
cagccggccgagccccagccgaccggaggccagagaggagcccacccccaacagaagagagaggaaaccga

SEQ ID NO: 60186 - RNA, 73 nt, Homo sapiens
gaacacaggaaccgccccgagaggaaacacccccagaagaggcaagcggcagccacacccggagaaggagccg

SEQ ID NO: 60187 - RNA, 71 nt, Homo sapiens
agaagagacaaggagagaaaggaacccgaaccaggcacgagaagagaagcccagagcaaaacaccccaaac

SEQ ID NO: 60188 - RNA, 58 nt, Homo sapiens
aggcaacagaaagagcaacagcagggcaacagaaccgggccgaggagggcggaaccac

SEQ ID NO: 60189 - RNA, 67 nt, Homo sapiens
cagcgcggcgccgcggccggccacacggacggggggccacccaccggacccagggggaagcgacaaa

SEQ ID NO: 60190 - RNA, 75 nt, Homo sapiens
agccaccaggagcccgagagagaaggggcagcagcccagccaaagccggaaaaggacccagagccacgggggcag

SEQ ID NO: 60191 - RNA, 111 nt, Homo sapiens
cagcacggaggaaagaggagagaacccaacacagggaaaggaaccgcggacaggccaccggcgccagagcaagcccgccccgagccaaaggaagaaaagcgagccggagca

SEQ ID NO: 60192 - RNA, 66 nt, Homo sapiens
cagacacagaccgcaagaacaagaccgccccgaccgcgcaggccacgaagacggcaaggaggaaag

SEQ ID NO: 60193 - RNA, 82 nt, Homo sapiens
cacacagagcacgcccacaggggggggccaagagcgcccagcggacacagccccggagaaagaagagcgaagcacaacacgg

SEQ ID NO: 60194 - RNA, 80 nt, Homo sapiens
gcggaggagccacggaaggacgacgacaaacacgcagaggaaggagcagcgcaagggaccagcaaaaaccacaaaagaac

SEQ ID NO: 60195 - RNA, 57 nt, Homo sapiens
aaggaggacgaggcaagggaacagaaggagcagaccagggcagcgacgccggcggac

SEQ ID NO: 60196 - RNA, 56 nt, Homo sapiens
accacaccaaagcacccgaaggcagcagacagccgggaacggagcaaagacacagc

SEQ ID NO: 60197 - RNA, 56 nt, Homo sapiens
aaggggcccagcgcacagaaagcagaccacacagacaaccgacccagcaagggacc

SEQ ID NO: 60198 - RNA, 83 nt, Homo sapiens
gcggcaccgaacaccgggggcgggcagccgaggccgggaaccagcgagggacagcaccaggcggaagacaggagaccaaaaca

SEQ ID NO: 60199 - RNA, 75 nt, Homo sapiens
cggggagccgccagccgaacccaccccagaccagcggcgccggagcaccggagcagaagaccgagcccccgaacc

SEQ ID NO: 60200 - RNA, 76 nt, Homo sapiens
caaaccacgggccaaaaaagcaggagaacacgagcaaggcacaagacacgaagagcaccccagagcgggacacaga

SEQ ID NO: 60201 - RNA, 77 nt, Homo sapiens
cggaaagaagccgcggcgccagcgacgcccaacaccgccaaacaagagaacgaaagaggcgaaaagagaacgggagc

SEQ ID NO: 60202 - RNA, 75 nt, Homo sapiens
gcgccacgccccaacaacgcgcagcagcagccagccaggaggcgccgagagacgcaagagagacggggcgccagg

SEQ ID NO: 60203 - RNA, 77 nt, Homo sapiens
gcgccccgcccagccgccgcggcccaacggccccagcagagcccgcgaccaggacagggcagaccgccagcagcaca

SEQ ID NO: 60204 - RNA, 80 nt, Homo sapiens
acggagcaagggaaagagccgcaggcaagggacgaccaggaggagggcccagaaaaagcggggaaggggggcaaaaaaaa

SEQ ID NO: 60205 - RNA, 84 nt, Homo sapiens
aaagacagggcagccccgcggcgggcacaccccggaggggcaagagcggaggagagggaaggccacagaaacacacagaagggg

SEQ ID NO: 60206 - RNA, 68 nt, Homo sapiens
cagcccagcacgaaaggaacaccaggcacacaagcgccacaagaaaacaagagacgggggcaccggcc

SEQ ID NO: 60207 - RNA, 80 nt, Homo sapiens
cggggaaggccgcgggggcagcaagcagcagggacgcgaggccagggagcggagaagggaggcgggacgcaccacccggg

SEQ ID NO: 60208 - RNA, 54 nt, Homo sapiens
cgcccagaagccagaccccagcgagacgacgggaccgaaggaccccgccagaga

SEQ ID NO: 60209 - RNA, 66 nt, Homo sapiens
gaggaaagcaagacgcgagccgggcgcgggaaccagggccccgggacacggcggcgcaggagggcg

SEQ ID NO: 60210 - RNA, 78 nt, Homo sapiens
ggcgcgccgcaggcggcagcaggacaacgagccacggaggcggagagagccggccacccaccaggaacacccaaacaa

SEQ ID NO: 60211 - RNA, 56 nt, Homo sapiens
ccaggacaggacccagcgcgggacagccagacaagggaggcgaggacggacaaaag

SEQ ID NO: 60212 - RNA, 73 nt, Homo sapiens
gacgcagccgggaagggcgcacgaaggggaaccgaagcgaacacagcgaccagagcacaaaggggcgcacagg

SEQ ID NO: 60213 - RNA, 83 nt, Homo sapiens
ggcggcgcgcggaggaggcgcagcagcggaagaccccagccagcccagggccgaaaagaaaacaggagaaccacccgccaaca

SEQ ID NO: 60214 - RNA, 79 nt, Homo sapiens
agcaggggggcgccaggcacccgagaaaggggacggagagacagcgcggagaccacccagccggcgaaacacaaagccg

SEQ ID NO: 60215 - RNA, 77 nt, Homo sapiens
cgggcggagacaggaccgcggcgagcaagggaggagagcagaaggccaggaaggggcaaggggcgggacccggagga

SEQ ID NO: 60216 - RNA, 67 nt, Homo sapiens
gggagggacagggggagaaacacccgaacgaaggagaaacacccgaggacccagagaccccacggac

SEQ ID NO: 60217 - RNA, 67 nt, Homo sapiens
ccggcaggcgcccggacacagaagaggacagggcggagaacggaaaagcaccaggaagcagagagga

SEQ ID NO: 60218 - RNA, 72 nt, Homo sapiens
agcgagaccacgcaccacgggcggcaccggaacgcaagcacagacccccagaagggaggaagggggcccaac

SEQ ID NO: 60219 - RNA, 80 nt, Homo sapiens
ggcaagaagcggcgcgggagcgaccgaacccagaaccgcgggcagcaagaaccaccaaacaaggacaggagggaaggccc

SEQ ID NO: 60220 - RNA, 74 nt, Homo sapiens
cggcgacccaacaaggcccgggcccccgcccccgacagaccccacgcccaagcacacccagccggcgcacgcca

SEQ ID NO: 60221 - RNA, 85 nt, Homo sapiens
aaaggaaaggacccaccaagcggagcagaggaagccaagggaggaggccgaagacgcagaagggccacagcggaccggagagcag

SEQ ID NO: 60222 - RNA, 69 nt, Homo sapiens
gcgagggcacagagagcgaaggaccaagggaaacacagcagaaaccagagcaagacccacgaagggcac

SEQ ID NO: 60223 - RNA, 72 nt, Homo sapiens
gccggagcgcaccagggaagcccagaggcacggggcagaacaccaacagagggccgaccgggggaggacagg

SEQ ID NO: 60224 - RNA, 81 nt, Homo sapiens
cagaacagccggggagagacaaaacggagcaagacagccccaaagacggaggccgcgacagccaccaaagcagcgcggaca

SEQ ID NO: 60225 - RNA, 104 nt, Homo sapiens
agaagacgacgcaccgcaggcagacaaaagggccaaagaagggagagaggaaaaaccaccccggcaaaagcaggagaagcaggcacgaacacccagcaccccca

SEQ ID NO: 60226 - RNA, 77 nt, Homo sapiens
cagggagcggagaccagcaccaccagcaggcacagaggcggagaagaacccaaccaaaaccaggcggcaaccccggg

SEQ ID NO: 60227 - RNA, 82 nt, Homo sapiens
gcaccacccccggccgcccccaggcagagagacgaagagagaagcagggcagaaagagcggaaacgagaagagcaaacacaa

SEQ ID NO: 60228 - RNA, 61 nt, Homo sapiens
gaaggggcccgaagcccccgcaggaaccacaacccaaccagcccaccgaacagagaagcca

SEQ ID NO: 60229 - RNA, 75 nt, Homo sapiens
ggagaaaaggggcgccagcgcgcgaggccaaacaagacacggccaggccggaagggcacaaccaccgggggacga

SEQ ID NO: 60230 - RNA, 71 nt, Homo sapiens
gaagacaaagagaggagccgaaggagaagcagggacaagcgggggggcggcccaccggcccgcccgagccc

SEQ ID NO: 60231 - RNA, 51 nt, Homo sapiens
aaggaccaagaaccaggagacggaagcggaagcacacgccagacgccagca

SEQ ID NO: 60232 - RNA, 81 nt, Homo sapiens
agcagcaagcacagagagaccaccacaaagaagggagagagccgggccagcaaaagcaaccgcggcaccaacagaccagca

SEQ ID NO: 60233 - RNA, 58 nt, Homo sapiens
gagagagaccggagaggggagaggccgcaggagggaagcgcacggaaaccgccccggg

SEQ ID NO: 60234 - RNA, 80 nt, Homo sapiens
acccggggggaagggccgaaggagaacccaggacgccgccacagagcaaaaggagaacgccccgagcgggagccgccaag

SEQ ID NO: 60235 - RNA, 78 nt, Homo sapiens
aagacaaccagcaacaaagaaccagaagcccaggaaaaggggaaggaacaaaccaaagagcagaccccccggaaaaaa

SEQ ID NO: 60236 - RNA, 58 nt, Homo sapiens
gaagcaggacgcgccgcgccccaagcacgagccagggagccgccgggaccggcccggg

SEQ ID NO: 60237 - RNA, 75 nt, Homo sapiens
caacccgggcccgcaccccaacgcccccgccgcccggcacgccccaggcgccagagcgagggccgcggagacgac

SEQ ID NO: 60238 - RNA, 63 nt, Homo sapiens
ccaaacaaccacaagcggagacccggaggaaagcccagagggaagcgcaagaagcaggccaga

SEQ ID NO: 60239 - RNA, 75 nt, Homo sapiens
gggggccagccggaccagcaccccaccacgacacgggaggacggaggccgagcccgaaacaaccccaccggcccc

SEQ ID NO: 60240 - RNA, 79 nt, Homo sapiens
gagagaggagagaaaagccacggacccgccagaaccagcaggcgaagacgcaggagagcacagacggacccgcacgacc

SEQ ID NO: 60241 - RNA, 77 nt, Homo sapiens
aaaaaggaaacccaagagcacgaggacagaaagaacccgagaagggcagggaccccacacaaacaaagaaaggaaac

SEQ ID NO: 60242 - RNA, 76 nt, Homo sapiens
gccgcgcaggagaccgggagcggcagaagacggcgacagccccgcgcagcagcacaccagaccagaaagagccagg

SEQ ID NO: 60243 - RNA, 80 nt, Homo sapiens
cccggagcccagggaagcagccgaccagccgcggagccgggggcaggaaacaaagccagaccgccgaggggggacgaacc

SEQ ID NO: 60244 - RNA, 68 nt, Homo sapiens
gcggaagcgccaaccggacaggcagcagacagcagaagagaggaagaagacagcaacggaaccacacc

SEQ ID NO: 60245 - RNA, 66 nt, Homo sapiens
gggcagaggggacaaccaacgcagggccgggccagccccacaaagcggaagcacacgaggggaaac

SEQ ID NO: 60246 - RNA, 83 nt, Homo sapiens
gagcagcagccgcccgccaaccccaggggaccagaggaaccagcccgagcgggaaccaaagaaagcggagaaaacaaagaaaa

SEQ ID NO: 60247 - RNA, 81 nt, Homo sapiens
gggcggcagcggcggcgggcgggggggaaggacgggcgggccggcgccggagacgagccgaggaacaaaacgcaagacacg

SEQ ID NO: 60248 - RNA, 73 nt, Homo sapiens
aaagcgagaaccggaaaacgacgccccaacggccaaacaaacccgaccgaaagacccccgaagcaccaaagcg

SEQ ID NO: 60249 - RNA, 73 nt, Homo sapiens
aaggaacggaaacaaagagccggaaggggagaagaagcaccaacagaacagaccagaacggccgcagagaaaa

SEQ ID NO: 60250 - RNA, 76 nt, Homo sapiens
cggacagccaagacgagaccaccaagacgacgaacggaacagaaccggcagggacgaaccaaagcaaaccacggga

SEQ ID NO: 60251 - RNA, 56 nt, Homo sapiens
gccgacgccggggcgaggaccgacggagggaagaacagacacagcaccgacacgcg

SEQ ID NO: 60252 - RNA, 80 nt, Homo sapiens
gaaagcagcacacaggcacagagggagagacacagaccaagaacaagccagcaagaggagccacaaaaggggggaagaac

SEQ ID NO: 60253 - RNA, 80 nt, Homo sapiens
ccgcgacagcgggcagcgcccgggacaagcaccaagccccccccccgggagcggaagccaggcacccgggggccagcaga

SEQ ID NO: 60254 - RNA, 71 nt, Homo sapiens
aggcgcacaagagccaagggggaagacagagggacaagaaggagagagagggcacacagaaggggcaccgc

SEQ ID NO: 60255 - RNA, 81 nt, Homo sapiens
gagacggagccgacgcggggcagcgccgcaccgaggcagcccgcggcaccgggggacaggccggcaaagcaccaggcacag

SEQ ID NO: 60256 - RNA, 77 nt, Homo sapiens
cagaaagcacaccaaccagagcaggcagcaggggaaccgcgcgaaggacacaccaccggacacaaggagagaacacg

SEQ ID NO: 60257 - RNA, 84 nt, Homo sapiens
ggcgcgccgccgggggaggcgcggagcgaaggaagggggcccaggggggccaggcgacgaagagaagaggcggcgaaaggagca

SEQ ID NO: 60258 - RNA, 74 nt, Homo sapiens
caagccagagggaaaccagcccaagcaccacccacgaccgggaccgagacagagccgccaggagagggaccgca

SEQ ID NO: 60259 - RNA, 84 nt, Homo sapiens
gcgcgagcaggcacgccgaggggccagccgggccgccgagacgccgagcgggagcgcagggaccgagaggagcggcgagacacc

SEQ ID NO: 60260 - RNA, 76 nt, Homo sapiens
ggccgagaggaagacgagccgggaggaacggcccggaaacaggaggacagccggcagcgcccgagggagcaaggag

SEQ ID NO: 60261 - RNA, 92 nt, Homo sapiens
cgccgggcgcggaggaaggggcgcgccgcggggagccacgcacacggacaggaccggccccagccccaaaagccccgcgacagcaccaagcc

SEQ ID NO: 60262 - RNA, 78 nt, Homo sapiens
cggccaaagagcggaaaggcaaaaggacagcaaagagccaacgacgcaccagaggaacacagaacccgaaaacacaag

SEQ ID NO: 60263 - RNA, 78 nt, Homo sapiens
ccgacgcgggcgcgagggcagaaccggggggacgcggaagagacagcagaacaagagccaggaccggacaggaaggga

SEQ ID NO: 60264 - RNA, 84 nt, Homo sapiens
cgagggagggccgagccagccgcggccggaggagcccccaggccggccacggacagagcgaaggggagaggaggaggcgaccca

SEQ ID NO: 60265 - RNA, 79 nt, Homo sapiens
gcccgggcgcggaagaagccaagggcaaagccccacaagggacggcccccgaggcagcccgacgggaggcacaacaagc

SEQ ID NO: 60266 - RNA, 60 nt, Homo sapiens
ccccaccgcggccagccacgggacagggaacccagcgagcgcggaacacgagcaagcggg

SEQ ID NO: 60267 - RNA, 68 nt, Homo sapiens
ccgcccaagccgcacagccgcggcggcagcagcaggagagcccgggaccgggagcccgggaccgggag

SEQ ID NO: 60268 - RNA, 102 nt, Homo sapiens
gacgacagcggcgagcgggggcggagaccaggagaccccacggagcgggcgacgagcgacccgggagacacgacggaggggccaggccacgcggggccggcc

SEQ ID NO: 60269 - RNA, 58 nt, Homo sapiens
gacaacaccagggggaggccaggggaaaggggaagagcgaagaccgccccagcaagga

SEQ ID NO: 60270 - RNA, 33 nt, Homo sapiens
agggaagacgaaagacaccaaaggagccgaccc

SEQ ID NO: 60271 - RNA, 68 nt, Homo sapiens
gggccacgcaccaacccaaacaggcgcggggccccacaccagcaggaggaaaccgacacaaagaggag

SEQ ID NO: 60272 - RNA, 75 nt, Homo sapiens
ggagcaaaggagcaagaaaccagacccggaaacgcagccccaggaggcgccaagggcagcagcaggagaagaagc

SEQ ID NO: 60273 - RNA, 74 nt, Homo sapiens
ccacgaggcaacgccccagagaccggccagccacagagcagagaaagccggaccagcagggagccggggcaacg

SEQ ID NO: 60274 - RNA, 75 nt, Homo sapiens
agagagcgacgggaggaggggcaggccccaaaggcagaagaaacaggccccaccagagcacggaacagaaggacg

SEQ ID NO: 60275 - RNA, 80 nt, Homo sapiens
cgcggcggggggggcaagagccgcgccggcagggaacgcagggaccaggccggcacgacaagacccaggcacagcacaca

SEQ ID NO: 60276 - RNA, 84 nt, Homo sapiens
ggcacgcccgcggccgccggacggccgggcgcggaggcaaggacggggacacaagaccagccagcccagccacagagacaggcc

SEQ ID NO: 60277 - RNA, 70 nt, Homo sapiens
cggcaccgcgcacgagcagggacggcgagacagaaacagaagaggagcgggaaggccccgcacccggaga

SEQ ID NO: 60278 - RNA, 85 nt, Homo sapiens
ggcggaagcgcgcacccacaccagggcacacaggggagaggaacaacaaagaagccacaagcacaggaaaggaaccaggagaaga

SEQ ID NO: 60279 - RNA, 73 nt, Homo sapiens
gggggagacggcgggcagggcaaaacgaaaacaaacggaagagagggcagcaagaaagaacaagaaagcgaac

SEQ ID NO: 60280 - RNA, 65 nt, Homo sapiens
acccaccaaaaaccgggaacgacacggagggaagaggccagaggacccgcgcccaggcccgccag

SEQ ID NO: 60281 - RNA, 80 nt, Homo sapiens
gccccggcccacaggggggggcaaacccgagagaacggagggacaggacacgcagaccggcccgacccgaggcccgaggg

SEQ ID NO: 60282 - RNA, 58 nt, Homo sapiens
agaacaccccacagggaagaggagccggcccaacagagaacggcaaacagcgagaaac

SEQ ID NO: 60283 - RNA, 77 nt, Homo sapiens
agccaagaacaagcagcgggccagaggaaggacacgacgccccacgccacccggacccccgcgacccgccacagagg

SEQ ID NO: 60284 - RNA, 76 nt, Homo sapiens
gaggcagagaccggcggcagagggcggaagacgcacgggccaggaccaagacggccagacaggggaggccacccga

SEQ ID NO: 60285 - RNA, 37 nt, Homo sapiens
gaggcgcacaagagccaagaagccagaggacaacaga

SEQ ID NO: 60286 - RNA, 95 nt, Homo sapiens
cacaccccacaggccgccccaacaccagggaagagacacacccaggcaaacacagagcagcccaagcgagagagagagcagcggggcgaggcgcc

SEQ ID NO: 60287 - RNA, 85 nt, Homo sapiens
gccccaccgaccgagcgggaggccacagcagccagccggcccgaggacaccgacaccagcagacgcaccacgacggggaagagag

SEQ ID NO: 60288 - RNA, 55 nt, Homo sapiens
aggcgaaagcggaacgagccagagacgcgcacgaaacgacgaagaggcccgagga

SEQ ID NO: 60289 - RNA, 78 nt, Homo sapiens
gaagaccgggcgccagggccgccgccccgcccggcgcccgagaggcggagcaccccggaccccacgacacgggaccga

SEQ ID NO: 60290 - RNA, 75 nt, Homo sapiens
caccagacaccgagaccccggagcacacgacagcaggggacaacggagggaaagacccaaggcaggcaacgagac

SEQ ID NO: 60291 - RNA, 55 nt, Homo sapiens
aggcccaccgggaacccaggagggaagggacccaaagcagcagacaggaaggaaa

SEQ ID NO: 60292 - RNA, 79 nt, Homo sapiens
gagaaaaggccaagaaggcagacaagggaggcgaggacggacaaaaggaaacggacgggaggccagccagcagaaggag

SEQ ID NO: 60293 - RNA, 72 nt, Homo sapiens
cgaacaaacagcaagaaagaccacaagaccaccagaggagcagccaagaagccccccaggggcccgcagacc

SEQ ID NO: 60294 - RNA, 73 nt, Homo sapiens
cgcccgcccccgccccgcacaaaaccccggggccaacagcaccaccggccaccaacaagggaggaaaggggag

SEQ ID NO: 60295 - RNA, 65 nt, Homo sapiens
ccccgcgcgcgggcccgccagacacgccgccgccgcagagacccacgcaaggagagaagcacaag

SEQ ID NO: 60296 - RNA, 62 nt, Homo sapiens
cagaggagccacacccccaggaagagccgcgggcagggaaagcagccacagacgccgaaaac

SEQ ID NO: 60297 - RNA, 70 nt, Homo sapiens
accaaaggccaggacgccgggacagacgggggagccccggcggagacgagccaggcgcgggccaccccac

SEQ ID NO: 60298 - RNA, 74 nt, Homo sapiens
ggaacgcgcgccgcacagacgcggagacaaacaggaacaggagcgaccaggacacccccgcccgccacggagac

SEQ ID NO: 60299 - RNA, 72 nt, Homo sapiens
caccgcggggcgacagggagagaaacaggcaggccagaaaggagcgcaaaccagcacggaaaaaaaacaacc

SEQ ID NO: 60300 - RNA, 83 nt, Homo sapiens
ccggccgccgcgggaccgaggaaaagccgcaccagagccggcagcgcccgagggagcaaggagaagagcggaacccagaccgc

SEQ ID NO: 60301 - RNA, 82 nt, Homo sapiens
caacccaggcaaccaacaggacagcacggcacccgacgggacgcccagcacggcacacgccccgcaccagcggcgcagcccc

SEQ ID NO: 60302 - RNA, 64 nt, Homo sapiens
gggacagcggggacggcacggcgcgcgcaggcccggggcacccggacggggcggacccaggccc

SEQ ID NO: 60303 - RNA, 36 nt, Homo sapiens
aaccaggccaacaacaggcagagagagagcggagag

SEQ ID NO: 60304 - RNA, 63 nt, Homo sapiens
gcgacggagcagcagcaggccgcgacaggggggagaggggggacggcaagcagagaaagggaa

SEQ ID NO: 60305 - RNA, 83 nt, Homo sapiens
gggcgaagcacgacacagaaggggaggggagggaaaggcccaggaaaaagaagagacgccaaaccgccaagaagcgaaaaaaa

SEQ ID NO: 60306 - RNA, 64 nt, Homo sapiens
accacacaaaaaaggccagagaaacagcaaagcccacaaccagaagaaaaaaacggaggaacaa

SEQ ID NO: 60307 - RNA, 58 nt, Homo sapiens
gcggggcaagaggaggcgcgagaggaccacccgcacccaggggacgcacggcccaacc

SEQ ID NO: 60308 - RNA, 58 nt, Homo sapiens
caagcaagcaccaaggaaggcggagcagcaagccgagagcgagcgcccggaggagggc

SEQ ID NO: 60309 - RNA, 59 nt, Homo sapiens
cgcaccgcagccgcgagagaggcaagccgggggaccagccaaggaagcaacacagcagc

SEQ ID NO: 60310 - RNA, 67 nt, Homo sapiens
gggggcgggcaggccggccacagacaagaaggacgagagagacaaggaaaaaaacggcagaggagca

SEQ ID NO: 60311 - RNA, 68 nt, Homo sapiens
gcgccgccgccgccgccgccgcagcgggagggcgccaccacaggaaagccaggccagaagaaggaagg

SEQ ID NO: 60312 - RNA, 76 nt, Homo sapiens
ggagccgagccgcaaggggccgcccacaaggccacggacccagcggaaacgggcgccgcgcccggggagacagaaa

SEQ ID NO: 60313 - RNA, 51 nt, Homo sapiens
gcccggagacgaccaagaggacgcaaaccagaaggagaaaaaggaacgggg

SEQ ID NO: 60314 - RNA, 82 nt, Homo sapiens
ggaaaacaagccggaaaggaggaaaaagaagaccagcgacaaaagagaaacccggcaggagaaacccgagcagccccacgca

SEQ ID NO: 60315 - RNA, 75 nt, Homo sapiens
agaggacaacgcagaaagaacacacacagaacgcgcagaaaacaaaggcaaggcgacaaacacaagacgggagga

SEQ ID NO: 60316 - RNA, 80 nt, Homo sapiens
gcgcccgcgcacgcgcaagaccgcgaggcgagaccccggacccacaaaccgggagaccaagaacggcacacggacggaga

SEQ ID NO: 60317 - RNA, 56 nt, Homo sapiens
accgagagacccagcgagcagggcgccaacccgagcggcagagggaacagccacaa

SEQ ID NO: 60318 - RNA, 59 nt, Homo sapiens
aacaacacggccacgaaccagagagggacgagaacgcaaggcggggaaaaaaaggcagc

SEQ ID NO: 60319 - RNA, 64 nt, Homo sapiens
gccgggccgaacagcagacgccgcggagaacacacaacccgaccacagggcccacggacccgcc

SEQ ID NO: 60320 - RNA, 54 nt, Homo sapiens
gggagaccagacggggaggggcccagcagggcgcgcgcggaagagacagacagg

SEQ ID NO: 60321 - RNA, 75 nt, Homo sapiens
gcagaggggcggagcggcgacagaccccaaaacacgagacgcgcagaacgcgggaacgcaagaccgaagaacccc

SEQ ID NO: 60322 - RNA, 80 nt, Homo sapiens
gcgagccggggggagcggcggccacggcaccggcggggggcacgaggaaagcgaaagacaaacggcaaagaagccaacaa

SEQ ID NO: 60323 - RNA, 80 nt, Homo sapiens
gaagcggggcgacccaaaggcaggaacgcaccgcagaggaagcaagcccaccagagaagcgacccaggaccaggagggac

SEQ ID NO: 60324 - RNA, 78 nt, Homo sapiens
cgcagccacagagaggaaccccaagccaagcccaagacaaaaacggaagaagaggagaacgaacggagaccaagagga

SEQ ID NO: 60325 - RNA, 73 nt, Homo sapiens
gagggagaacacagccaccgaacacggggacggggcgaaagacaaagaagcaacacagaaacggaaaaggaac

SEQ ID NO: 60326 - RNA, 84 nt, Homo sapiens
ggacggcacagcccgccgaacccgaaaggagaaaagcaccaaagcagcaacaaagcacacagcgcgccaaagcaagagcgccga

SEQ ID NO: 60327 - RNA, 80 nt, Homo sapiens
ggaggagccgggcgcagaaccagaccgggagcacgcacgccacgaaggcagagaacagcgggcggagaagaaaacaaagg

SEQ ID NO: 60328 - RNA, 72 nt, Homo sapiens
ggaaagcagaagaaggagcggaacacacagcaagccgccgggacagccacgacgaagagaagccagagccca

SEQ ID NO: 60329 - RNA, 46 nt, Homo sapiens
gacaaggcgcgccccgaggcccagcgggacaaggagaaccggcacg

SEQ ID NO: 60330 - RNA, 77 nt, Homo sapiens
ccaaaaccacaaacgccacgcagaacagccaccaagaagccgggcaaggagaacaacacaaaccgaggggaagagag

SEQ ID NO: 60331 - RNA, 78 nt, Homo sapiens
ggccgggccagaggaagagaagagcaaacccgaaacagcgcgaaggcaggaaaaaaaggggcaccaagaaagaggagg

SEQ ID NO: 60332 - RNA, 83 nt, Homo sapiens
agaacagccaccccacagagacgaggaagcacagccagcacagcacaagacacaggccccagccgcccccacgggagccggac

SEQ ID NO: 60333 - RNA, 71 nt, Homo sapiens
cccccaagacagccgccccggcagggaccaccaaccagcagccccaagacaagcaaacccaggaacacccg

SEQ ID NO: 60334 - RNA, 87 nt, Homo sapiens
gagacgcccccgccgggaccggcacccgaaccggccgccgggagcgagaacccgagcagcgccagagcaacacaccgcgccccagca

SEQ ID NO: 60335 - RNA, 81 nt, Homo sapiens
gcggagcagcgcccggggacacccggaggacgagcggaggaaggccagggagaccgccacgacgagcgcaacagcgaccac

SEQ ID NO: 60336 - RNA, 60 nt, Homo sapiens
gagcaaccaggaaagaagaggacccgcgggagaggaggcgccgcaccaagaaaaaccagc

SEQ ID NO: 60337 - RNA, 94 nt, Homo sapiens
ggacgcgggcaccacggcgccggaccacagccggccgcccgccaaaggaggcacggcaaagagacggaggaccgcaagaaaaggaaacgaggaa

SEQ ID NO: 60338 - RNA, 81 nt, Homo sapiens
gaaggggaggcagcgcggcccagaaaccaccgcgcaaccgccgccccagcccacgcgcgccggccaaccacaacccccagc

SEQ ID NO: 60339 - RNA, 51 nt, Homo sapiens
cggccgcagaacgggaccagccgcggacgccagcagcccgggggcgacgac

SEQ ID NO: 60340 - RNA, 72 nt, Homo sapiens
ccaggggggagcggaccaacagaagccgggcccaaagaacaggacccgcggacaacgggacggcgagagagg

SEQ ID NO: 60341 - RNA, 84 nt, Homo sapiens
gaagagcagagcagagagagaagacacagaaaccgagcaagagcgggcaggggggccggaaacaacgggccaagggacgcacac

SEQ ID NO: 60342 - RNA, 72 nt, Homo sapiens
gggacccccagaaggaacggagacaaaaacggcccggagaggagaccagacaggaaagaagacagagggcgg

SEQ ID NO: 60343 - RNA, 73 nt, Homo sapiens
ggacagccggccaggcccccgcgagaaacagcgaccaggaagaaacaccaaacagcccaacggcaaagaaagc

SEQ ID NO: 60344 - RNA, 66 nt, Homo sapiens
agaagaaaaaacgcacagggggcagcagggaccccgacggagagacaaagaagacggagggggggc

SEQ ID NO: 60345 - RNA, 84 nt, Homo sapiens
agcacaagaaaagaaaacaaggacacaggacaccgggaggggagagaggacgggagaccagcaggagaccaagacacaccaccc

SEQ ID NO: 60346 - RNA, 71 nt, Homo sapiens
cggagcacaacgaacagaccgggcgcccccccccacacacacaaaacaaacggagagaggagggagaaaca

SEQ ID NO: 60347 - RNA, 71 nt, Homo sapiens
cccaccacaggaaggaaaggacaaggagaacaagagaaaacaccgccacacgaaaaaggacacaaaagcaa

SEQ ID NO: 60348 - RNA, 70 nt, Homo sapiens
gagggagccaggagaggaagccacagagacaggccagacccgcccccgaaagaccagaggacaagacaaa

SEQ ID NO: 60349 - RNA, 78 nt, Homo sapiens
ggagcacacagaagggccaaggaaaaacgagcagaaagaagccagaaagggacaaggccccaggcgcaggaaagacac

SEQ ID NO: 60350 - RNA, 77 nt, Homo sapiens
cggagcgggcagcgccagaccgcgacaggcccgaaaaaaacccaggcggcccaggacgaaaaggacccagagaagca

SEQ ID NO: 60351 - RNA, 80 nt, Homo sapiens
caagggacgacaccaggccaccaccgcgcacgccagcagcaagccacccaggggaccacacacgcggaacaaacccaaac

SEQ ID NO: 60352 - RNA, 60 nt, Homo sapiens
aaagaaaaagaacccaaacaagacgcaagagaggaaagacaagccccaaaagcagccggg

SEQ ID NO: 60353 - RNA, 77 nt, Homo sapiens
gcggagcgaagggcagaggaagcgccgccaggcccgcaggaccgccggagacagggcaagcaccaagaagagcccgg

SEQ ID NO: 60354 - RNA, 73 nt, Homo sapiens
gcccagggagaaaggcccaccggccgggagggcccagggcggggcccgagcccacaggacacaggaagggaaa

SEQ ID NO: 60355 - RNA, 65 nt, Homo sapiens
cggagaaggagcgcaacccggaaaagccaggaccggccaggcaggcagcacagggaacaagacac

SEQ ID NO: 60356 - RNA, 76 nt, Homo sapiens
acgagggcgaaaaccagacaccagcccggacccagaagggggggagcccgcacgcggaccgaggaggcacagacac

SEQ ID NO: 60357 - RNA, 77 nt, Homo sapiens
ccacagcaccccgaggcccgacccagggaccagaccccacaagaaaacacacaaccacaggcccaagcaaacacacc

SEQ ID NO: 60358 - RNA, 77 nt, Homo sapiens
gggcaaacccacgccaagcacagccagccccaggggaaccaccccaagggggcaaagaaggccccaagaaacagaga

SEQ ID NO: 60359 - RNA, 73 nt, Homo sapiens
ggaaaggcgcaggcagagaaacacaaaccagggagggaggacacaaaaaaacaaaagcacggagaccacccaa

SEQ ID NO: 60360 - RNA, 70 nt, Homo sapiens
gaaaccagagaggggcaccccggggacaagccgcaccacgccaaggaaaggcagaagccccagaggagcc

SEQ ID NO: 60361 - RNA, 72 nt, Homo sapiens
ggccccacgacacaaggacagaaaacagccacgcaaagggaggaggagggagacagaccagaacaccacgaa

SEQ ID NO: 60362 - RNA, 76 nt, Homo sapiens
ggagggcggcgcgccgagcgagaacaagcagaggaaagacacgccagagaagaacaggacacaacaggagacggaa

SEQ ID NO: 60363 - RNA, 68 nt, Homo sapiens
gcgaaggagaaaaagcaggggaagcagcgcacgccaggagcacccacgggagaccggggggcaagaaa

SEQ ID NO: 60364 - RNA, 66 nt, Homo sapiens
cagacaccaggcagacgaggagaaagagcccaggagagcagcacggaggggagaagggggagaaag

SEQ ID NO: 60365 - RNA, 53 nt, Homo sapiens
ccccaggccaagaagacaaaggcccaagggccagcgcgccgccaggaccgggc

SEQ ID NO: 60366 - RNA, 77 nt, Homo sapiens
gaagagccaggagagggagaccaagagaggcgcaccagaaggggaggaccaggagaagccaaccaggggacggggca

SEQ ID NO: 60367 - RNA, 77 nt, Homo sapiens
cgcggaccgcggacagcgaacccggagggggggaccaggggaacgccacgagcggggcagaccagacgcacccacgg

SEQ ID NO: 60368 - RNA, 79 nt, Homo sapiens
cgggggcggagagagagggcccagcccggcaggacacgaagcgcagggacgcaagagggaggaacccacgccacccgga

SEQ ID NO: 60369 - RNA, 84 nt, Homo sapiens
gcgacagagggacgaggcaagagccgggaggcccagacccacaccgagccacgggacaggagccagcggcccaggggcggggga

SEQ ID NO: 60370 - RNA, 79 nt, Homo sapiens
agcgggcacagccggccggaccccacggggacggacccgccgcgcccgcgcgagcacaggaccccgagggagccgcggc

SEQ ID NO: 60371 - RNA, 70 nt, Homo sapiens
agggcggggaggggacgaaccaggcagcccaaaaaaaagcagagagacgcaagagagaaaagccagacca

SEQ ID NO: 60372 - RNA, 59 nt, Homo sapiens
ccaaagggaaaagcaaacaaggcacacggaagacaaagggcaaagaggggaccgcgaca

SEQ ID NO: 60373 - RNA, 73 nt, Homo sapiens
cgggcaacaaggggagaagggacccagacacagaacgagggacagaagacgccccagggcaccgcgcccaaga

SEQ ID NO: 60374 - RNA, 58 nt, Homo sapiens
aacaaaggcaaaccacacgcagaagaagcacagaaggacagcgagaaccccggcgcag

SEQ ID NO: 60375 - RNA, 71 nt, Homo sapiens
cagacgaaaacagacacagccagccagccacacggcagaaaaagagaccgacccaaacggaccgaaacgag

SEQ ID NO: 60376 - RNA, 45 nt, Homo sapiens
ggaccagacagcaggggacgaggaggcgcggaggaggaggaggaa

SEQ ID NO: 60377 - RNA, 66 nt, Homo sapiens
cgcagcgccaccgccagaaaaagcgggccgcaccgacgagggccgccggaggaagccgcccgaggc

SEQ ID NO: 60378 - RNA, 82 nt, Homo sapiens
cacacagaaaccagcaaggaaggagagccagccgaaggccaagacccggagcccaggaacagacacggcgagacccacggag

SEQ ID NO: 60379 - RNA, 76 nt, Homo sapiens
gagaccaccgaagacgcacgccaagacagggaaagcaaaccaccagagacccacagcaccccgcggaagaccccgg

SEQ ID NO: 60380 - RNA, 62 nt, Homo sapiens
ggagggcacaaagagaacgggcagcgggggcagagacggggaacagggccacccacacggac

SEQ ID NO: 60381 - RNA, 65 nt, Homo sapiens
gcgccagaggagccaccagagggacacaaggacaacacggaccagaaaaaggaggaccccccggc

SEQ ID NO: 60382 - RNA, 66 nt, Homo sapiens
ggacccacccacagcacacccaggacaacgaaaggccagcaccaggggcaccggcagacaaacaac

SEQ ID NO: 60383 - RNA, 59 nt, Homo sapiens
cagaaacagcagacggaggccgggagcaggcaaaggccaaaacagaagaggcaaagccc

SEQ ID NO: 60384 - RNA, 64 nt, Homo sapiens
ggccaccaaaaagaacagggggagacaccgcgccaagggagaagaccccacgccccagagacaa

SEQ ID NO: 60385 - RNA, 71 nt, Homo sapiens
acggaggcaccagaagaagcaccagagaaagagcgcgcacgaaagcacacgaaaaggaaggaaaaacgcag

SEQ ID NO: 60386 - RNA, 65 nt, Homo sapiens
gcacacaggacagcagccccccccagacccccaacgaaaaagagccacgcccccacgagcgcccc

SEQ ID NO: 60387 - RNA, 34 nt, Homo sapiens
cgcccgggggaggcgagccgacgaagacagccac

SEQ ID NO: 60388 - RNA, 110 nt, Homo sapiens
ggacagaccccgaaaccaagcgccgacagaaaagaaaaccccggcgagcaagagcaccagagcagagcggggaaccgaacagaaagacagcgacacccagcaaccaacag

SEQ ID NO: 60389 - RNA, 53 nt, Homo sapiens
ggaccacaaggcaccaagcggggggccgacaggaacgaagagggaccgcgaga

SEQ ID NO: 60390 - RNA, 77 nt, Homo sapiens
aggcgcaaaaagaaaccacgacgagcgagcacaacaccaagaggacggggagaaaaaggcagcaaaaaaaaaccacc

SEQ ID NO: 60391 - RNA, 74 nt, Homo sapiens
gggccaacccgaaccccaacacggcgccagcgagagcccaacaaggaaagcagaagccaacaacagcaaacaaa

SEQ ID NO: 60392 - RNA, 91 nt, Homo sapiens
cccgccggagcagcgagggcccccagccagcccgacagccgcaaaacgcagcgcggaggagggaagggcacgagcacgaaaagcacgccca

SEQ ID NO: 60393 - RNA, 80 nt, Homo sapiens
cagcaagccggagagagaaaccagcaccaggggcggaacgcagagaagaagggaaaaacgaagagccgaagaacaccagc

SEQ ID NO: 60394 - RNA, 70 nt, Homo sapiens
aaacgaccaaagacaagaagggggacggaagcggcagcgggcagccggcccagcacagggagcagaaccc

SEQ ID NO: 60395 - RNA, 79 nt, Homo sapiens
cccggaagcaagaagacaaacgaggggagaaagaaggggaaggacgcgcgggagaagcaacagcagcgccacgacccgc

SEQ ID NO: 60396 - RNA, 71 nt, Homo sapiens
caaccgagcagggacagaagaccaagaagcaaaacgaggagccaagcgggaaaaggggcaccgacgcacca

SEQ ID NO: 60397 - RNA, 68 nt, Homo sapiens
gcggcagaaggccccaagcgccgcggggaaacgggagcggcgaaagaaaaacaggaccgcgcgccacc

SEQ ID NO: 60398 - RNA, 71 nt, Homo sapiens
gcagccggcgccggcgcacggcccgagcgggggcagccgcagaggcgcgggagcggcaggggaggcgaaga

SEQ ID NO: 60399 - RNA, 59 nt, Homo sapiens
ccgcggccggagcggggcggaggagcagccggggaaagaggcaagagaacgccacgaaa

SEQ ID NO: 60400 - RNA, 73 nt, Homo sapiens
gcgcgcgccgcgagcgcaggagagccgaacaggaaccgagaccggacagaaacgaagacagacaaaccaaaag

SEQ ID NO: 60401 - RNA, 56 nt, Homo sapiens
gaagcgacgagccgcgaggagccccaggcccggggccacgccccagcgggcaccac

SEQ ID NO: 60402 - RNA, 71 nt, Homo sapiens
gaccgcgccgacggcagaagaagaagcagagagccaggaaaagaaagagaacccagccgccgacaggcagc

SEQ ID NO: 60403 - RNA, 81 nt, Homo sapiens
acagaaagagcaacagcagggcaacagcgacaccacacaaaggccaccacagaccgcgagggcagcagagcacaccgggag

SEQ ID NO: 60404 - RNA, 72 nt, Homo sapiens
cggacagcggggcccgcggaaaacaggcagcgagaggaagaaaggacacaaagcagaagaaaagccacaaac

SEQ ID NO: 60405 - RNA, 73 nt, Homo sapiens
cgggcgcaccccacccgggccgcccgaaggcccggcgaccggcagggagcagccgcccgccacgcgaggcccc

SEQ ID NO: 60406 - RNA, 76 nt, Homo sapiens
gcgagacccgccaggagcaaagggcaagcaagcccacaagcggaacaaacggaaagcgaccgaaggcaaccggcgg

SEQ ID NO: 60407 - RNA, 72 nt, Homo sapiens
gcggagacacggagcaaccaaaagccaagggagaaagaaagaacgcgggaacacaacccaccggagagccgg

SEQ ID NO: 60408 - RNA, 87 nt, Homo sapiens
ggccccgaggaggcgcagcccgagcccgaccccgacccccggcccccccggcggggccccccaggcacagagaggagagcaccgacc

SEQ ID NO: 60409 - RNA, 58 nt, Homo sapiens
gccgaaacagaaaacaagagaccacagaaggagcacagaccagcgcgcgaccggagcc

SEQ ID NO: 60410 - RNA, 56 nt, Homo sapiens
cgcggcagaggaagaagaaggcgcaaagcgccgaagggaccgacagcccccaggaa

SEQ ID NO: 60411 - RNA, 64 nt, Homo sapiens
agagggaagaaaacccaaagaagagaggaagaagaccccaagcaagaaaaggggacagaggagc

SEQ ID NO: 60412 - RNA, 87 nt, Homo sapiens
cggagccagaggagaggcgcccccgccggccgccgcgccgcccggcagcccggcagggccggcccagggagaacgcaaaaccaccac

SEQ ID NO: 60413 - RNA, 73 nt, Homo sapiens
cggccaagagccccagaacgaggaagaaagggacacaaagcgcgggaaagaaccccgcacccggaacaccagc

SEQ ID NO: 60414 - RNA, 66 nt, Homo sapiens
cggggaaggacagaccaaacacaccaaggacaagaaggcagcggccgcccccgcacaaagggaccc

SEQ ID NO: 60415 - RNA, 72 nt, Homo sapiens
acacccaagagaagagaaaaccagcgcaggacaaagaaaaggacgggacacggagaggcgcgggaggaaacg

SEQ ID NO: 60416 - RNA, 71 nt, Homo sapiens
ggaaagaaacccacgggcagagcgaaaaaggacaaaggacaccagacagaaccacacaaaacaacggcgac

SEQ ID NO: 60417 - RNA, 59 nt, Homo sapiens
gcagccgacgcgggaagaagcgggcgcgggcaggcccccacagaggcacccgacacagc

SEQ ID NO: 60418 - RNA, 65 nt, Homo sapiens
gggaagagacagcgcagagaagcggaccaaacgacccggagacgaaagcaaggaaaagcagaaga

SEQ ID NO: 60419 - RNA, 80 nt, Homo sapiens
cgacgacgcggagaacaaagaccaacccgggacaagccaagcgaccacaaaaggccccaccgccaagagacccggaagaa

SEQ ID NO: 60420 - RNA, 76 nt, Homo sapiens
aggaagacacagcaaggaagacccacggagacaaacgccacgcaccgaaaaaggggaaaagagggaccagcacaga

SEQ ID NO: 60421 - RNA, 74 nt, Homo sapiens
gaaaagcagcggccgcaagagagggaccgccgggcccaggcggccgaacccggaccaagcgaccccgccgggcc

SEQ ID NO: 60422 - RNA, 66 nt, Homo sapiens
ggccggaaagcacaggaaaaaccaaaggaaccaggcgagcagaacaaggagaaagaccaagcacac

SEQ ID NO: 60423 - RNA, 87 nt, Homo sapiens
caaggacaacccggcagcacgggaagggacgcggcgcacggcgcggaggggccgagggcaggggggccgccacggcggccaacaccg

SEQ ID NO: 60424 - RNA, 41 nt, Homo sapiens
ggaaccacccaccgagggaccagaggaaaggcaagggcaga

SEQ ID NO: 60425 - RNA, 82 nt, Homo sapiens
acggaaaaaggcgaaaaagcgccaggcaaggggggcgaagaccaaggaggggcagccgcgggaccaggagcaacgcggggga

SEQ ID NO: 60426 - RNA, 57 nt, Homo sapiens
gaggccccccagccacggaaacggaggaacgcaaaaagcacaggaagagaaacaaag

SEQ ID NO: 60427 - RNA, 79 nt, Homo sapiens
gaggccgcggagcgccagccaagaacccacagaggaacacaaaaaacaggcgacggggaaacaccaggaggagagccgg

SEQ ID NO: 60428 - RNA, 70 nt, Homo sapiens
aaaagcagccgggaaaggagccggccggcggcaaagaaggaaggagccagcacggggccacaccgagccc

SEQ ID NO: 60429 - RNA, 75 nt, Homo sapiens
aggagaccagccccacacccccgggacccccgaagcgagggccggggaagaagaccaaaggacaaaaaagacgga

SEQ ID NO: 60430 - RNA, 74 nt, Homo sapiens
cgaccggggcgggcgcggcgagggcagcggggaagaagaaaaggaaccgaggccccccggcgacacggcgaaga

SEQ ID NO: 60431 - RNA, 68 nt, Homo sapiens
agaaacaccaacacaaaaaaaaccaacagccccccagggaaaggaagacaggacgcgccaacgagaca

SEQ ID NO: 60432 - RNA, 72 nt, Homo sapiens
aaaaaaaaacaaccgaggggccgacccaagcacaccagaaagggcggaaacagggagggccacagcccccgc

SEQ ID NO: 60433 - RNA, 74 nt, Homo sapiens
gccgagagccgcccgggccagcggccgcgcacccccggccggaggcaccagcaggaagcgcagcgggaaagaaa

SEQ ID NO: 60434 - RNA, 67 nt, Homo sapiens
ggcagaaacagaggacaaggcagcaaagaagaggcaccgggaaaacgcagaggaacgagggggagcc

SEQ ID NO: 60435 - RNA, 70 nt, Homo sapiens
caagggcagcaagaaagggaaggggggggagagaacggccaagggagccgccaccgagacccaagaggcg

SEQ ID NO: 60436 - RNA, 62 nt, Homo sapiens
gacgccgccggcaggcccgcgcaccagagcggggcccggcgcacccaccaccgccgcccacg

SEQ ID NO: 60437 - RNA, 69 nt, Homo sapiens
aaaagcacaaagggaggagcggacccacccccgaagcaaggagaccaggggaaaaggaaaacggggagc

SEQ ID NO: 60438 - RNA, 103 nt, Homo sapiens
caaacgccccccgccgcaggcccggcacggaagcgaggcaaacacgagaagaacaaggccacacagccgcacgagaggaacgcgacaagaagacggagagaag

SEQ ID NO: 60439 - RNA, 77 nt, Homo sapiens
gcgggagaggcgccggggccgcacaggaggagagaccagcagcaaacccacgcggcgcaccgcacaccagcgcggcc

SEQ ID NO: 60440 - RNA, 73 nt, Homo sapiens
ccagcggcggagcggaggcgaacagggggacgggggcagggaaagagaagaagggcaagaaaacagaggaaaa

SEQ ID NO: 60441 - RNA, 64 nt, Homo sapiens
ccagccccgcgagaggaagcgccaccagccaaggcagggccccgggagaagaccccgaagaccc

SEQ ID NO: 60442 - RNA, 82 nt, Homo sapiens
cggacagggacagaccagggacacaacgggaaaccggaccgaagagccagaagcagcaggaccggcggaggagcgagagcag

SEQ ID NO: 60443 - RNA, 68 nt, Homo sapiens
cccaaacagaccacccccggcgaagagcacaacacagaagaaacggcaagcaaggacgaacacacaag

SEQ ID NO: 60444 - RNA, 61 nt, Homo sapiens
gcaaccagggaaacaggagagggggagagacaaccagagcggaaagggagaaaagccccca

SEQ ID NO: 60445 - RNA, 57 nt, Homo sapiens
acagcgcgacacaggaggccgggaggagcccggagacccggacggaaaagaaggcgg

SEQ ID NO: 60446 - RNA, 35 nt, Homo sapiens
acgcagcgcgacccagcagagaaagccgcacaccc

SEQ ID NO: 60447 - RNA, 66 nt, Homo sapiens
gcgcgcacagccgggcgcggacgaacaccagggggacaagcggagaggcgagagagaaacacaggc

SEQ ID NO: 60448 - RNA, 81 nt, Homo sapiens
gggaaacagccacaagcaccagaaaagccaggacaaaaccaggcagaaccaacacgaacccaagcacaaacaagaaaacga

SEQ ID NO: 60449 - RNA, 55 nt, Homo sapiens
acgacggcggggagagaaaacccagcgccaaaggagcccggccaacgcaacaggg

SEQ ID NO: 60450 - RNA, 73 nt, Homo sapiens
acaccaaaaagcaaacggaccagaccgaccaccaaaagaaggaaaacacccggcagggaaggaaggaacgcaa

SEQ ID NO: 60451 - RNA, 74 nt, Homo sapiens
agccgggcagcagcccagcggcagcagaaagagcagcaaagcgaaaaagaccgcagggaaggccgccacgagac

SEQ ID NO: 60452 - RNA, 37 nt, Homo sapiens
ggcaaggccaagggacgacaggcgcgggcacagggag

SEQ ID NO: 60453 - RNA, 61 nt, Homo sapiens
aggcaaggggccaccaggaggccagggggcgccaggaacagaggcggcgagccaggaacgg

SEQ ID NO: 60454 - RNA, 74 nt, Homo sapiens
gggccaggggagagagaagaaccgagcaggacgaaaggaacccgaccaccggccacacaagccagcaacagcaa

SEQ ID NO: 60455 - RNA, 72 nt, Homo sapiens
acccaccgggaaaaggcacgaaggacccagggagaacccaccacgagaggcaaaagccaggaagcgcagaaa

SEQ ID NO: 60456 - RNA, 56 nt, Homo sapiens
agccaagcgagaagaagagaaacaacggggagaacggaggagaagaacgaaaacga

SEQ ID NO: 60457 - RNA, 60 nt, Homo sapiens
gcagcccccagccagccgcgagaccaggcccgcaagccaaggaacaagaacggaaaacgc

SEQ ID NO: 60458 - RNA, 61 nt, Homo sapiens
cacggcgccaaaaggacgagagacaagagagacaccccaaccgacaaagagcaccagacag

SEQ ID NO: 60459 - RNA, 52 nt, Homo sapiens
aaaggagacggagggccaaaggcgccgagggcgcacccccgagccaaaggca

SEQ ID NO: 60460 - RNA, 78 nt, Homo sapiens
aggaaggcaaagaaaacagaccgagggggaccagccgagcaacgcccgcaggggccagcgggaagaccacacccccga

SEQ ID NO: 60461 - RNA, 79 nt, Homo sapiens
gcaaaagagacagacggacaacagcccaacaacacccagaaccagcgagagaacaaaacaggaaaaagaaagaagaaca

SEQ ID NO: 60462 - RNA, 69 nt, Homo sapiens
cacggaaacagccacagcaggaaggagaggaagagcaggcccagccaacaaccagaaaaaccaggagag

SEQ ID NO: 60463 - RNA, 112 nt, Homo sapiens
cgaaggaacccaagcagggcgaagggaacgcaaggcccccgaccacacgcccgcgcgaggcaaccggcggccccgcccagggaggcaccccgagcgaaagcacggacaccga

SEQ ID NO: 60464 - RNA, 89 nt, Homo sapiens
ccagcacgggggagcggagcccaggcaggaagcagcccccagcccggacgccgggcccgggagagaggaccgccccccagcagacgagc

SEQ ID NO: 60465 - RNA, 76 nt, Homo sapiens
cacgccccaacgccgggacagaaagaaggaaaaaacgcaagaaggaagaaagagagaaagcaaggaaaacgacaag

SEQ ID NO: 60466 - RNA, 62 nt, Homo sapiens
aggaacaccaccaaaaacagccaaaacggacaagccaaggcacgagccaaagaaacaaacac

SEQ ID NO: 60467 - RNA, 79 nt, Homo sapiens
cccgaagcagcaacccccggcgaccaacccgaccggcgggacggcaggaccggaagagggggcacacagacaccacccg

SEQ ID NO: 60468 - RNA, 72 nt, Homo sapiens
aagcagagcgacgcgcgccgcacggaggcaagaagaaacccaccgcaaagagagcgggccaacagacgggcc

SEQ ID NO: 60469 - RNA, 35 nt, Homo sapiens
cacccaaggccgcagacaagaagcgcacgcccagg

SEQ ID NO: 60470 - RNA, 70 nt, Homo sapiens
ggccacccccccgcgccgccggcacgcgggaaccagccaaacgagacagccacggcagaggaaggcacaa

SEQ ID NO: 60471 - RNA, 68 nt, Homo sapiens
cgaccagcgcgccccagggccggagcgcaccaccgagacaagcaggaaacgcagcagaggcagaacgg

SEQ ID NO: 60472 - RNA, 88 nt, Homo sapiens
cgggcaaccagcgggcccggccgccacccgggaaagacaggccgacagcggaagcccgaaagagagacaaacaggaaacccgggagag

SEQ ID NO: 60473 - RNA, 75 nt, Homo sapiens
cccgaggcaccccagccccccgggagagaaggaaccggacgacgaacacaggcccgccgccgggccccaaaagag

SEQ ID NO: 60474 - RNA, 80 nt, Homo sapiens
aaagggccaaagaagggagagaggcgaggaggaggccgagaccagccaggggagacccaggggggaggcgcacaacccac

SEQ ID NO: 60475 - RNA, 78 nt, Homo sapiens
agccacaaggacaaccagcagacaagcgcacacgcacggggaaaaggccaggagcagcgagaggcggccaacccaagg

SEQ ID NO: 60476 - RNA, 56 nt, Homo sapiens
gcgccgggaggaggccggggccgcgcgagggcgcccagcggccggcgccgaccagc

SEQ ID NO: 60477 - RNA, 44 nt, Homo sapiens
cgcagcccaccacagcccccagggacacggccaacacgggaagg

SEQ ID NO: 60478 - RNA, 71 nt, Homo sapiens
gggcggagcccaccgcgagaagagcaagacagggggccgggaaacagggacagcccacaagggagccggac

SEQ ID NO: 60479 - RNA, 76 nt, Homo sapiens
ggcccgagccgcaaagagcaagagcagggaacagagaccacagaaggaaggaagaagacaaagagcggaaggcagg

SEQ ID NO: 60480 - RNA, 66 nt, Homo sapiens
cgcgacaccgcgagggacaaagaccgaaagcaaaagcaacaaccagcaaggagaggcaaccagacc

SEQ ID NO: 60481 - RNA, 66 nt, Homo sapiens
gacaccccggggcgaaaaacagggcaaaggcaagcagaggcggagcacccgaagcaaagagcacag

SEQ ID NO: 60482 - RNA, 61 nt, Homo sapiens
ggcccgacgcgggcccggccgagcgccccggacaagagagggcggcagaaggaacaccgag

SEQ ID NO: 60483 - RNA, 72 nt, Homo sapiens
ggcaccggcggggggcacgaggaaagacggggacggcaaaaaggggcccacaacaaccgcagggcgagccac

SEQ ID NO: 60484 - RNA, 78 nt, Homo sapiens
acaaaacaaacgaaaacgcaagccaggcaaacagggcaggcacaggcgcgaacaccaaggggcagaagacacgcagcc

SEQ ID NO: 60485 - RNA, 80 nt, Homo sapiens
accaggccccggccccagccggcccacgacaacaaccagccgcaccggagggcgacgagcggggcaagggcagcagcgga

SEQ ID NO: 60486 - RNA, 95 nt, Homo sapiens
cggaggacggggccgggcgaccgggcaccagcaggacccgaggccaggagccaggggcccagaagacccgcgaccggcagcagagccgcccgcac

SEQ ID NO: 60487 - RNA, 50 nt, Homo sapiens
gcgcccgcgcgcgcggcgcagggaagacacacccaggaccaaccgaaaac

SEQ ID NO: 60488 - RNA, 77 nt, Homo sapiens
ggaccaacgggaacaaaacacacacccgcagacaagaacggagaggaaccgaacaagacagaaagcgggacgcgcaa

SEQ ID NO: 60489 - RNA, 72 nt, Homo sapiens
caaccggccacgaggaggggcccacgaggccccgggggcccggaacaggagcgaaggcccgcccccccgaag

SEQ ID NO: 60490 - RNA, 77 nt, Homo sapiens
gcaaaccccagacagccggggaggcccgacagcccaggacacccccagagaaggccccaaaggcgagccacacggaa

SEQ ID NO: 60491 - RNA, 80 nt, Homo sapiens
gcagagaggccagccgaggcggcgggacccccaagggaaagccaacggcaggagccgcggaacagagacaaccacaacca

SEQ ID NO: 60492 - RNA, 82 nt, Homo sapiens
ggagccgcgccgccgcccccagccccccgcccggggagggcaccaggaagggggagcaacagacaagcccgaaaggaacagc

SEQ ID NO: 60493 - RNA, 58 nt, Homo sapiens
cggaggcgcagcgccaagagaagccggccacacacggcacaagggaagagaaaagaca

SEQ ID NO: 60494 - RNA, 65 nt, Homo sapiens
cacgcggggagcggaagaagaccccccccccgcccagcccaggcccgggccgagcgccgcgacac

SEQ ID NO: 60495 - RNA, 63 nt, Homo sapiens
cgccgggggccgcgcgcccggacgcaaacagcagacggaagaccccacggcaaaaccacaccc

SEQ ID NO: 60496 - RNA, 86 nt, Homo sapiens
gaaggacaagaacagcgccgcaccagcaggaggggaggacaaaaccaacaacaagccacccacacgagaggaaggagagggaggag

SEQ ID NO: 60497 - RNA, 78 nt, Homo sapiens
cccaagccaggaccaggagcgcccaaaagcagcgcacggaagaggcacaaggaaagacacggacgacacccaggagcc

SEQ ID NO: 60498 - RNA, 47 nt, Homo sapiens
ggccaaccgaggagccacgcagcaggcccccgagaggccccggcgac

SEQ ID NO: 60499 - RNA, 52 nt, Homo sapiens
aaaccgacaagcgcgcaaagggacaaccaacagagcgagaaggcaacacaac

SEQ ID NO: 60500 - RNA, 77 nt, Homo sapiens
gcaaaccgccgggagcagccggacaagagaccacacccaggaagccaggcacgcacagcgaaaggaagccagaaccg

SEQ ID NO: 60501 - RNA, 39 nt, Homo sapiens
ggaagaagcggcaagacaaagaggaggagagaaagaaac

SEQ ID NO: 60502 - RNA, 73 nt, Homo sapiens
cgccacggcgccccgcaagacaagggaggcgaggacggacaaaaggaaacggacgggaggccagccagcagaa

SEQ ID NO: 60503 - RNA, 53 nt, Homo sapiens
acgccgcccagacaaccagaggaaccagcaggcaaagaaagcaaaagaagagc

SEQ ID NO: 60504 - RNA, 71 nt, Homo sapiens
cccagcgccccaaggaggaaaggaaaaaagaccacgagcgggagagaggagaacacggagagaaagaagac

SEQ ID NO: 60505 - RNA, 86 nt, Homo sapiens
gcgggcccggggacacgcgcgggcgggagcggcccacgacgggacacgccccggagggggcggcccgccaacacgggaggaagaac

SEQ ID NO: 60506 - RNA, 73 nt, Homo sapiens
gcaacagccacagggggccagggaagcccccacagagagcacacaaacaaagcgaaaccacggaagaaaaggg

SEQ ID NO: 60507 - RNA, 72 nt, Homo sapiens
cgccccgggggccacaggggcccgacaacggcacggccaaagccacccccaaaggcagaggaagaacgagca

SEQ ID NO: 60508 - RNA, 75 nt, Homo sapiens
aggcggcgggggggcggcgggaccccgagggggggcgcggggcccacgccccaggacaaaaggcgggacaacacc

SEQ ID NO: 60509 - RNA, 66 nt, Homo sapiens
ggcagaagcgaggaggggagaaagaaaaaggggccaagaaccgcaaggcgccggagacccaggccc

SEQ ID NO: 60510 - RNA, 74 nt, Homo sapiens
cggggagccggggaagaggcgcccgggacaggacccgcaggaccacgacggcgcggggaagcgggcccgaggac

SEQ ID NO: 60511 - RNA, 77 nt, Homo sapiens
ggaggagcaaccaccaaagggcagaagcccaacacgggccaggcacgagacgcccaccgcaggaccaccgacggacc

SEQ ID NO: 60512 - RNA, 77 nt, Homo sapiens
gagcgggacgcaggcgcgcgccccggaggcccgagagccccggcccagccccacggcagcagacgacaggacggcag

SEQ ID NO: 60513 - RNA, 76 nt, Homo sapiens
agacaccccgggggccccgagcaaaccaggaaagaccggccccaaacaaaacaagacccccagggacagaaacaag

SEQ ID NO: 60514 - RNA, 54 nt, Homo sapiens
ccgcgggagagaggacccccccccccccccaagcaagaaccaggagcaccgggg

SEQ ID NO: 60515 - RNA, 74 nt, Homo sapiens
gaaagggccgccacagaaaccagggaggcagagaggaaacgagacccagaaaggggaagcacgcaaggcacgcc

SEQ ID NO: 60516 - RNA, 49 nt, Homo sapiens
gcaccaggccaagacggagcccccccccaggcacacaaagagaaaggga

SEQ ID NO: 60517 - RNA, 61 nt, Homo sapiens
ccggagcggggggaaagacaccagggcccgcaggacgagaaagaggcaacaagaaaagacg

SEQ ID NO: 60518 - RNA, 70 nt, Homo sapiens
aggacaaacaagaggagaaaaagggccgaaacacaaacggagaacagagaaagagacgaggggacaacga

SEQ ID NO: 60519 - RNA, 71 nt, Homo sapiens
cggaggagggggggccccgcggaggccgagaggcaaggagacacaagcgggacggaagaggcccggcgacc

SEQ ID NO: 60520 - RNA, 72 nt, Homo sapiens
gaacaaaccgaagaacagcgggaaagaaggcaaaacacggccacaagggagacccggggacggagacccggc

SEQ ID NO: 60521 - RNA, 78 nt, Homo sapiens
agaacaccgcccgccagaggaaagcgcgaggagaccccgagaaagaaaacaaagccaagccaaaagacccagaagcca

SEQ ID NO: 60522 - RNA, 79 nt, Homo sapiens
gcaagcaggcaaccgaaacagggagggacgccgccggggcggcgcagcgcgcgcgggcgaagcgagcgggaccacggcc

SEQ ID NO: 60523 - RNA, 68 nt, Homo sapiens
acgcagacggagggagggagagcccacgacagaacgaaaagaaaggaccccaggggccccacacggcc

SEQ ID NO: 60524 - RNA, 66 nt, Homo sapiens
ccgacgaacaccacacgaccgaagaacaccaaggaggaggcgaccggcccgaggaccgccgcacga

SEQ ID NO: 60525 - RNA, 83 nt, Homo sapiens
cggccgacaaggcggagcaggaagagaggaggaaaagagacagaggaagaggagggcccacgggggacagaagaccgggagcg

SEQ ID NO: 60526 - RNA, 78 nt, Homo sapiens
cccacaaaggcgagcgcgaggaagaagcacccgacaccccaaggagagccacagcagagagaacaggagagaaaaccg

SEQ ID NO: 60527 - RNA, 90 nt, Homo sapiens
ggaggccaacggcagaagccaccacaaaagcgaaagggcacaccacagcgacaagaccgggacgagaagaagccgcacaccacgaagaga

SEQ ID NO: 60528 - RNA, 50 nt, Homo sapiens
acgcagcggccaccccagagaccgagcccagcggacccaaaggacccccg

SEQ ID NO: 60529 - RNA, 74 nt, Homo sapiens
gccagggaaaggagcagagagagagagcagaaggcaaggccccagcccaagcgggccgacgagaggaaagcaca

SEQ ID NO: 60530 - RNA, 81 nt, Homo sapiens
gcacccgcaccaaggccaaggcgaggaaaaggcagagccgaaaaggagcgcgagaccaaacagaaggagagcagaagaaga

SEQ ID NO: 60531 - RNA, 101 nt, Homo sapiens
agcacggacaagaggagaggaccaccacagccagaaaagagagaaacaagcggacacagaggagcaagcccgcaaagcccgacagagccaccaagcggagc

SEQ ID NO: 60532 - RNA, 79 nt, Homo sapiens
agcagagcagcagaagccggcgcgcggaggggcccgccaccagagcacacagcacaaaagaccccacagcgagagagag

SEQ ID NO: 60533 - RNA, 73 nt, Homo sapiens
gcggggagccacgcacacggacaggcgacggaagcgacacgaggcgaaaggggaacagcggggaacgggggcc

SEQ ID NO: 60534 - RNA, 83 nt, Homo sapiens
gacaacgagcaaggaaaccggcgaagagagagaaacgaaaaagaggaaggagcgagggagcacaagcagcggaacggaaccac

SEQ ID NO: 60535 - RNA, 67 nt, Homo sapiens
agcgaaaaaaggcagaggcggaagggaggaacaggccaggaaccggcccacgccaaaaagggaaaaa

SEQ ID NO: 60536 - RNA, 57 nt, Homo sapiens
cacgacggcaggaaaggaggccaggacggagagggagaagacccgacacgaccgaaa

SEQ ID NO: 60537 - RNA, 88 nt, Homo sapiens
ggagccacgcagaggacgccggaacacccggaagccgagaaaggcgggcacccaggcgggagagcagggccaaccgacccagcgaggg

SEQ ID NO: 60538 - RNA, 83 nt, Homo sapiens
cagggaagcgcagaaagcaggcgaacccgcggcgcaaaacgggggcacccgaggaggaagagggcagggcccacggaaagaag

SEQ ID NO: 60539 - RNA, 67 nt, Homo sapiens
gccacacagcgcgaccgagaacgaaagagaccagaggaacacagccgagaggcaggggaccccccga

SEQ ID NO: 60540 - RNA, 78 nt, Homo sapiens
agcgcaggcccggccgacggccacacggcggccgcagggcgccggagccccccagaggaagacggcaccggagcaccc

SEQ ID NO: 60541 - RNA, 85 nt, Homo sapiens
ggagcagacaaagaaagaagacagacagagagcaggcgagcagccaaagccgagcgccgggaggaccgcaggacgagcggggcgg

SEQ ID NO: 60542 - RNA, 75 nt, Homo sapiens
caaacgggagacagcgccaccacgaccgaaaagagaagaaaggagaggcaggcgggaccgagaagacgcgccaag

SEQ ID NO: 60543 - RNA, 70 nt, Homo sapiens
aggagagcccgacaggcagaggggagagagacacgagacgaaaaagcagggccggcccagggagaacgca

SEQ ID NO: 60544 - RNA, 58 nt, Homo sapiens
gcggacagcccaagagagagcaaggcgccaccggaagaaacgggaggggaggagccgg

SEQ ID NO: 60545 - RNA, 73 nt, Homo sapiens
aacgggaagacgccggacaaacaggaaaggccccacccccacaccgcaccaggagacaaagccacaaaaacac

SEQ ID NO: 60546 - RNA, 105 nt, Homo sapiens
gcggcgcgcgggcgggaggcgcggggccggggccgcgcgcccacccaacccgagaccaaaccaagcacaacccacgacgaggggcacgcccaagcgccgacaaac

SEQ ID NO: 60547 - RNA, 78 nt, Homo sapiens
cccgcgcgagccggagaagccgcagcgcgaggccgccgcgcgcccggggccggggcggagaacggaaaagcaccagga

SEQ ID NO: 60548 - RNA, 33 nt, Homo sapiens
cacgggcagcaacgaaggagcggagaacggacc

SEQ ID NO: 60549 - RNA, 77 nt, Homo sapiens
ggaggagacgcgacggagacgaaccgcaggaacacgggaccgccggcaaccagaaggcagaacacggcaagcacgac

SEQ ID NO: 60550 - RNA, 106 nt, Homo sapiens
aaaggccggaaggcgacgcacggccaaaggccaacaagaacgagccccccccacgagacaacgggaaacccagacgacaaggaaggccaagggacccacgaccaac

SEQ ID NO: 60551 - RNA, 77 nt, Homo sapiens
ggagcgagaccggagcgccacggccacggcccccacaagcaaacaaacagcagacagaagcagagacaaaaagaaga

SEQ ID NO: 60552 - RNA, 58 nt, Homo sapiens
agccccgcacagcagagagcaacccgaaaagagaacaagagaacgggcaacccagacc

SEQ ID NO: 60553 - RNA, 85 nt, Homo sapiens
gggccgcgcacacgccgggacgcgacgccagcacgacccaccgcacgcagaagcgggaaccaacgccaagaggcccagaagaacc

SEQ ID NO: 60554 - RNA, 81 nt, Homo sapiens
cgccgcggggcagccgccgcccccgggaggccaacacaaaggaggagacagaaacgccgaagcggcgggaaaagaagagga

SEQ ID NO: 60555 - RNA, 81 nt, Homo sapiens
ggaaacagcaagcgaagccgaaaaagcgcccgagacgggcccgccgaaagacagaagcgaaggggacagggggagaaccgc

SEQ ID NO: 60556 - RNA, 75 nt, Homo sapiens
caaaaagcgggaggcgagccacgcagaccaggaagagcaggcgggccagcaaacggggcgcgaggacgcggaccc

SEQ ID NO: 60557 - RNA, 78 nt, Homo sapiens
cacgaagaagaaaccggcggccaaaaaaaaaaaaggaagcacaccaaggaaacgggagacgagagagaaaaaaaagag

SEQ ID NO: 60558 - RNA, 40 nt, Homo sapiens
cccaagaccccaacgcaggcccagaggcagagcacacaac

SEQ ID NO: 60559 - RNA, 103 nt, Homo sapiens
gcccggcccgggccagcgggggcgagccacagccagcgagcgacgcgcccacggaggaggcgggggccccacaagaagaccaacaggaaggcgaggagcggga

SEQ ID NO: 60560 - RNA, 51 nt, Homo sapiens
gcaagaaaaggagccggaaacggacaaacaggaaccacaagcagcaaggcg

SEQ ID NO: 60561 - RNA, 75 nt, Homo sapiens
caaagaagcgggagaagccggaaggaaagaccacagcaagaccacgcccccagccgggggaccaggccgaacgac

SEQ ID NO: 60562 - RNA, 86 nt, Homo sapiens
aagggcaaaaggagagaaagggcaggcaggcccaccggcaaggcacccagggcgcgagggaaaagggggggccgaagaagccaggg

SEQ ID NO: 60563 - RNA, 64 nt, Homo sapiens
gaaaggccagaccaagagaacagagaagagccaaacaaccaagaaccagcacgccaaagcaggc

SEQ ID NO: 60564 - RNA, 70 nt, Homo sapiens
gcagaaggcccacagaaaaggaaagccgaccgaggccgcagcaaagagggaaggaaggaacgggcacggc

SEQ ID NO: 60565 - RNA, 58 nt, Homo sapiens
ccacacacgggaaacacaaaacgcccggggacacgagaccggccagcagacgaccacg

SEQ ID NO: 60566 - RNA, 79 nt, Homo sapiens
ggcggacggggagcgaacgggacagcccacacccggcgcggaggcccccagaaacccacaaagccccgaggggcaggga

SEQ ID NO: 60567 - RNA, 74 nt, Homo sapiens
gcagaagccgcgaaaaaggggggccgagaacaggccaagacaaccgggaaagcagcccaaggagggcgacacac

SEQ ID NO: 60568 - RNA, 80 nt, Homo sapiens
cagcagaccacagacccacagcgaaagcaacagcccggcccccacgacacaccgaagaggcccacggagaggacaagagg

SEQ ID NO: 60569 - RNA, 72 nt, Homo sapiens
aaagggcacgacaacgcagaagagcgcaggagcaaccaccagggacacaggggacagcaggcaggaaaacaa

SEQ ID NO: 60570 - RNA, 71 nt, Homo sapiens
cgcgcacacaagggagcccccccaccacccccgagcagacagcaagcgcgggcggcgacccagacgcccca

SEQ ID NO: 60571 - RNA, 80 nt, Homo sapiens
gcgggccgggcaagcccgcgggcgcaagaaccgcggcaggagaggcagcgcagaaggcagccccgacccgcacagacacc

SEQ ID NO: 60572 - RNA, 82 nt, Homo sapiens
ccgaggaccccaccgccaggaccccccaggagagcgccccagggcaagccccgcccggccaacaagggggggaagagaaggc

SEQ ID NO: 60573 - RNA, 61 nt, Homo sapiens
caaccgcggggcacacaaaggaaacaggaacacgaaagaggaaaaacgcacaagaaaccga

SEQ ID NO: 60574 - RNA, 68 nt, Homo sapiens
aaggaccaagaaccagcaaaagcaaacagacccccccagccaaaggaccgaccaagggacccaaagga

SEQ ID NO: 60575 - RNA, 74 nt, Homo sapiens
agggaagcgcgaacaagggaccgccgaggcaagagccacaccaaggcggcagagaaggccccgcaggccgcagc

SEQ ID NO: 60576 - RNA, 82 nt, Homo sapiens
cggcgcgcgcgcccgccgccccgcccacgaggagcacagccgggccgcgcgaagaccgccagagcggaacgaccccagagcg

SEQ ID NO: 60577 - RNA, 74 nt, Homo sapiens
ggagaaaaaaacccaagcgagaacaggcaagcagaagaggaacagaagaagcagagcagagacggagcagcagc

SEQ ID NO: 60578 - RNA, 41 nt, Homo sapiens
cacagggagggccccgagaacccgaacgccacagcaccgga

SEQ ID NO: 60579 - RNA, 56 nt, Homo sapiens
aggcaaccacagagagagagagggaggggcagaaggccgccacgccccaggaagcc

SEQ ID NO: 60580 - RNA, 72 nt, Homo sapiens
cgggcgggcccccccacccagagaaaacggggacggacccaggccaggaaagaaagaaccgccacgggcgcg

SEQ ID NO: 60581 - RNA, 41 nt, Homo sapiens
cgccccgcgccccgcagggccagaacgagcccgacccagga

SEQ ID NO: 60582 - RNA, 50 nt, Homo sapiens
gaaagagccaaacgccaaggcggcagcaaaggaacagagcacacagacca

SEQ ID NO: 60583 - RNA, 74 nt, Homo sapiens
cagcaaggccgcccagcagaccgccacccagcccaagagagcaaacacgaaacggacccgagaggggcagagac

SEQ ID NO: 60584 - RNA, 78 nt, Homo sapiens
agagagggagacagaggagcacacagaccgaggaggggacacagacacaaccacgaagaagagggacacccccaggag

SEQ ID NO: 60585 - RNA, 79 nt, Homo sapiens
ccagccgaaacaccagagaccacccgaacacccaagcaacaacagggaagggacacagggacgagccaggaagaccacg

SEQ ID NO: 60586 - RNA, 72 nt, Homo sapiens
cggcagaagaaagcaagacccaggacaccccgaagccgagaaaggcgaaacagaccccgaaaagcccggaag

SEQ ID NO: 60587 - RNA, 52 nt, Homo sapiens
aaggcaccagagagaggccgaacggagcagacaaagggcagagaacacaccg

SEQ ID NO: 60588 - RNA, 74 nt, Homo sapiens
cccccgcgcccgggcccgccccggccgcggccgggcccaggaaaccgccaaagacaaagaagacaggggagaac

SEQ ID NO: 60589 - RNA, 84 nt, Homo sapiens
gccgccccgcaaccggcagccgccgccgggaagcgcaggggagcggagcaagaaaccaagacaaacaaaagacgcccccgagag

SEQ ID NO: 60590 - RNA, 64 nt, Homo sapiens
aaggaaaacacaaccccaccggcaaagcaacaagacgaaccaaggcgggaaggagcccaaagaa

SEQ ID NO: 60591 - RNA, 39 nt, Homo sapiens
gggaacgaggaagcgcccaagacaagacagcaacagcca

SEQ ID NO: 60592 - RNA, 70 nt, Homo sapiens
gccagacgaaaagccggacccaggagaagaggggagagggaccacacagaaacggacccaagaagaggag

SEQ ID NO: 60593 - RNA, 91 nt, Homo sapiens
agacaagccccaaggagcccggccccacaccggcacacagcaggccacaagaggaagcgaagaagaggacgccgccagcgagccagcaggg

SEQ ID NO: 60594 - RNA, 83 nt, Homo sapiens
cgagcgaggaggccggcgcagccccaagacagagcgcacccggcaggcgcaacagagcgccggcggaagcagaagaaagaagg

SEQ ID NO: 60595 - RNA, 78 nt, Homo sapiens
gaaagcccccgacaaaagaacccaagccagagaaggaaagcgaggggaaggaggacacagcaccagagaaccgggaaa

SEQ ID NO: 60596 - RNA, 61 nt, Homo sapiens
gagaggagcgacgcgagggccgagacggcgcggcaagggggcagacccaaaggaaacgcac

SEQ ID NO: 60597 - RNA, 55 nt, Homo sapiens
caggcaccacaaaaaggacagaacggccgagcgaccaggagaggagcccccgccc

SEQ ID NO: 60598 - RNA, 78 nt, Homo sapiens
agaaccaccaggagagcaaggcagaagaccgaaggagaaggcggcccagaagaaggcacaggaggagcagagagaccg

SEQ ID NO: 60599 - RNA, 60 nt, Homo sapiens
acacaacccgacccgacgagcacgagaagagaagcccagagcaaaacaccccaaaccaga

SEQ ID NO: 60600 - RNA, 86 nt, Homo sapiens
ggcccccgggcaagaggcgcaaacaagccaacccaggaggaaaaacgaacgggagaaccagaagacccacgaggaacaaccaacag

SEQ ID NO: 60601 - RNA, 53 nt, Homo sapiens
agcgccccaccccagaggcgcggagcgccccaggggaagaaagagggccacgg

SEQ ID NO: 60602 - RNA, 74 nt, Homo sapiens
aagcaggcagagcaggcaccgagcaaagagaccgccagcgccgcaagcagcaagaagaggacagagacgaggcg

SEQ ID NO: 60603 - RNA, 79 nt, Homo sapiens
ggccggacccacagaagaagaacagagacggccagcccaacagaaaaggacaggaccggaaccaccacccagacaggaa

SEQ ID NO: 60604 - RNA, 81 nt, Homo sapiens
ggcgccggccccggggagaaacgccagaaagaccgcgacaaacagcaaaacaaaggggaagaccaagaaaagaaagaacac

SEQ ID NO: 60605 - RNA, 69 nt, Homo sapiens
aaagcacaagaagaagacgaggaaccgccccagaggaggacaggccccaggacggaaaaacaagacgcc

SEQ ID NO: 60606 - RNA, 71 nt, Homo sapiens
ccagggaagcgcagaaagcaggcgaacccgcggcgcaaaacgcccgaaagagaaccaggcccaagcaacaa

SEQ ID NO: 60607 - RNA, 117 nt, Homo sapiens
cccaggagagcacagcagagagaggaggagacagcacccaggccccaagagcaaagccacgagaagcgcgcaagacgcaacacaaacgagaaagacagcccgaacggagaaagagac

SEQ ID NO: 60608 - RNA, 80 nt, Homo sapiens
ggggcgccagcccaccaagaagggccgagcacagcaagcaagaccaaggcccagcccaccagaggcccccccaagccccc

SEQ ID NO: 60609 - RNA, 68 nt, Homo sapiens
ggaacgcccgcagaaaaagaggcccccccccccgcgacgcagggcgacagccaggaagccacagaccc

SEQ ID NO: 60610 - RNA, 74 nt, Homo sapiens
cgcaggaagagcgaaaaaacaggaggacacaagcacgccaacgaaaaggaacgagaaaaagaacagccaagaaa

SEQ ID NO: 60611 - RNA, 73 nt, Homo sapiens
accaggcaagaacggcgcacgacaaggacccaaagacaggaccacgcaccagcagagaaggaaagcaaaccga

SEQ ID NO: 60612 - RNA, 81 nt, Homo sapiens
gagaaaagaagcaggaccacaagaagagaagggaccccaaacagacaagcgggaacccaaccgaacccgaagagggagaag

SEQ ID NO: 60613 - RNA, 70 nt, Homo sapiens
agagacagcgaggacagaaggaaggacaccagaggacgcccggcagaagggagcgagcagcacgggcccc

SEQ ID NO: 60614 - RNA, 82 nt, Homo sapiens
aagagcccgcccgcgccccgccgcggggcgcgcggcgccggcggcgcgcggcccccgcgcaggccccgggaccaaggacacg

SEQ ID NO: 60615 - RNA, 58 nt, Homo sapiens
aggacgacccaggagacgcaggccaaggagaaagcagacaggagcgcgaaaggggaac

SEQ ID NO: 60616 - RNA, 79 nt, Homo sapiens
gcagaaagagcaagcagcaagcggccagacagagccgagaaaaagcggaccgggcacgccaagcccaggccggagaagc

SEQ ID NO: 60617 - RNA, 84 nt, Homo sapiens
ggagcgaggaaccggaccccggcagcgccaccggagagaagccagcacaagcggggcggccacaccacaggcgcccggccaccg

SEQ ID NO: 60618 - RNA, 40 nt, Homo sapiens
aacaaggacaacgccagggagggcagaacaacagcagcag

SEQ ID NO: 60619 - RNA, 75 nt, Homo sapiens
gaggagacaagcggagcgagcgcgcaagccccggggcagagacacaggacacccacccgccggggacagacgcgg

SEQ ID NO: 60620 - RNA, 53 nt, Homo sapiens
cacagagggagacgaagaggcagaagagccgagggacaaagcccccagaggaa

SEQ ID NO: 60621 - RNA, 83 nt, Homo sapiens
ggaggcgaggagcccgcgggcggccggcgggcggggcggcggcgcgacagagccagaaccagaaaagcagcgaacaagaaccc

SEQ ID NO: 60622 - RNA, 33 nt, Homo sapiens
gcagaaagaggagcgagggaacgaccaccggcc

SEQ ID NO: 60623 - RNA, 72 nt, Homo sapiens
gaacgcagacccccagaacaagcacggaagacaacacaccaacagaggcagcaaaacgaagcccaccagaaa

SEQ ID NO: 60624 - RNA, 92 nt, Homo sapiens
caaagccgcccagacggccaccggcgggaggaacaaaagcccaccgggggacggcacggcaggcggacgcccggggccccccggaccacgag

SEQ ID NO: 60625 - RNA, 81 nt, Homo sapiens
cacaccccaggaaaaagacagcccgcagcacgaccagcaggaacggcacgacagcgaggcacgggccgccaacacaccagc

SEQ ID NO: 60626 - RNA, 70 nt, Homo sapiens
aaaaggccggacgggcggccggcggccagggggagaggcggaggccaggcagcgaggccccggacgggca

SEQ ID NO: 60627 - RNA, 74 nt, Homo sapiens
agggcgaaacacacaagcacaaacgaagaacaagaagacacccccaccggcccgcaaacagggaacaagcaggc

SEQ ID NO: 60628 - RNA, 77 nt, Homo sapiens
aacggaggggcaagagaccggcggcacggcagagacagagacaagagacaggaggagccaccgacccaggccggagg

SEQ ID NO: 60629 - RNA, 83 nt, Homo sapiens
cgaccgggacggccggcaggccgccgccgagcgcgggcagaggggcaggagccgccgacccagccgacccacgggcagcgcgc

SEQ ID NO: 60630 - RNA, 56 nt, Homo sapiens
cagggaccgccgcgcacgggcaaggcgacagggcaacaggaaaacaacccagagaa

SEQ ID NO: 60631 - RNA, 61 nt, Homo sapiens
cagaaggcagcagaccccgaaggcgcagcgaggaggggaagccccccgcaggaccagggaa

SEQ ID NO: 60632 - RNA, 55 nt, Homo sapiens
aaagagaaagaacaagaacacgcagcacgggaccgggaaaggggaaaggacgcgc

SEQ ID NO: 60633 - RNA, 71 nt, Homo sapiens
ggaaagccaaggaaaaacggagagccacaaaaaaggaagcgaaagaagaagagagggcgaaggaggccaca

SEQ ID NO: 60634 - RNA, 62 nt, Homo sapiens
ccccgaaaggcggaaacagcaccccgcagggaccagagcggaagcccacgaggacccgggag

SEQ ID NO: 60635 - RNA, 79 nt, Homo sapiens
cacccccaagaaccaacccccaaaggcgggacagagggagaccaaccgaaggacaagggaaggagcagaggcaaagagc

SEQ ID NO: 60636 - RNA, 65 nt, Homo sapiens
ggacagagccaaaccaaggccagaggagggacacaaagaaccgggaaaaaggagagccaccacaa

SEQ ID NO: 60637 - RNA, 75 nt, Homo sapiens
cagaaacaaaagcaacaaagaggagacccacggcagggggaggccgggcgggggcagccccccccgccacgacac

SEQ ID NO: 60638 - RNA, 50 nt, Homo sapiens
cagaaaaaggggcaaaaggggcaaagacaacaaaagacaaggaagagagc

SEQ ID NO: 60639 - RNA, 59 nt, Homo sapiens
cagagcagcccagggagcaggagcgaaagacgaacgaaaacaaacggaagagagggcag

SEQ ID NO: 60640 - RNA, 78 nt, Homo sapiens
cagccccagcggcagacggaaacgacagaagcagagcccaagaggaaacaagagacgcagacacagaaacaccagggc

SEQ ID NO: 60641 - RNA, 79 nt, Homo sapiens
acagcaaggacggcggggccgggggaccgagcagcgggaggcgccccccagccggaagggcagagccgggacagaccgg

SEQ ID NO: 60642 - RNA, 83 nt, Homo sapiens
ggcggccaaaggccaggacaccaacgggaccagaagaaaccaaaaacaggcgggagagcaggagaggacaggaccgcgggggg

SEQ ID NO: 60643 - RNA, 80 nt, Homo sapiens
cagaggaacgaaacgacaaggcggaggcaggagaaaccggccagaggggacgcgggacaagagacggaaagcggcgccag

SEQ ID NO: 60644 - RNA, 82 nt, Homo sapiens
agcaggaaggaccacccaaggagcagcagcagcagcagcagcagcagcagcagcagcagcagcagcagcagcagcagcagca

SEQ ID NO: 60645 - RNA, 69 nt, Homo sapiens
cacacaagagaagacccaccgaggaggaggaggggaagcccgacagacgggaaccacgaagagaagggg

SEQ ID NO: 60646 - RNA, 77 nt, Homo sapiens
ggagggccccgacagcggaaccaacaagggcaaacaagggagccaggccgaaggagcgcgagccacaaccagcgcac

SEQ ID NO: 60647 - RNA, 80 nt, Homo sapiens
ggaagaaaagaagacagccagcggagcacacagaagccgcgcagacacaccacggcccgagcccagggccgaagcaaaag

SEQ ID NO: 60648 - RNA, 54 nt, Homo sapiens
accaagaaccaggcccgaccccgaacccaccggaggcaagcacggagccgcgcg

SEQ ID NO: 60649 - RNA, 67 nt, Homo sapiens
aggggcgaagccaaacccaaaaagagaaagacccgccaaaggcgaaaggggaaaacgaccgggacag

SEQ ID NO: 60650 - RNA, 62 nt, Homo sapiens
ggcaaccagacgggccaagcccggaagagaggccggcaggagacccgccccgaccggagaca

SEQ ID NO: 60651 - RNA, 83 nt, Homo sapiens
ccaagaaggagagaagagcagaacccagacgaacaggaggcagaaccaacagaacgacggggcccccagagaaccgacgcacc

SEQ ID NO: 60652 - RNA, 81 nt, Homo sapiens
agcgcccacacagagcggggcccaccccgccggaagcaggcaagaagcagcagcagaggaagaaaggagcccagaggaacc

SEQ ID NO: 60653 - RNA, 74 nt, Homo sapiens
agcaaagaagcgggagaagccggaagggaaggggaagacggcagcgggccggaggcccaaaagaaacaagaaac

SEQ ID NO: 60654 - RNA, 74 nt, Homo sapiens
agcaaggagaggaacggccaaaacggggaagaacgcaaagcgaggcaacaaacgaaccaggaaggcaaacgaag

SEQ ID NO: 60655 - RNA, 84 nt, Homo sapiens
aaccagaaagaaccaagacaaacagaacagagagcggggcgacaccgggggagagacgaagcccccggaagagaaagagcaaaa

SEQ ID NO: 60656 - RNA, 56 nt, Homo sapiens
aacaagaaagacacaaccacgaagaggagggcacagaaggaaggaaaccaccaccg

SEQ ID NO: 60657 - RNA, 78 nt, Homo sapiens
aacaccacagaagacaggacacaaagcacgcgacaggaaccagggacaagggagaagaagccacaccaaaccaggccc

SEQ ID NO: 60658 - RNA, 90 nt, Homo sapiens
cagagagccaccacaggaagcgcggaaggcgaggagagcaggccggccccgggcccaccgcccccccagcccacgggcacccggccccgg

SEQ ID NO: 60659 - RNA, 85 nt, Homo sapiens
gccacacaccggcaacgcggcacggcccagcgcgcgcaaaagggagaccacaacagccaccaaacagaagaaccgcccaacggaa

SEQ ID NO: 60660 - RNA, 70 nt, Homo sapiens
aagccgcgcggggacccgacgcccgcacggaaccaggggaccacaacgcgcccaagggacaaaggaaaca

SEQ ID NO: 60661 - RNA, 82 nt, Homo sapiens
ggcggccgccgggcaagcagaacgggccgggacacagcaggccaggaaagacgaacaacaccccagaacagaggagcccagg

SEQ ID NO: 60662 - RNA, 63 nt, Homo sapiens
cccgggggccacggagccacgcgcacaaaccaggaagacagcgcccagcaacccggcaccccc

SEQ ID NO: 60663 - RNA, 55 nt, Homo sapiens
gaaagaccccgccaggcagcaaaaacaagcagagaagaacccaaggacagcaggc

SEQ ID NO: 60664 - RNA, 81 nt, Homo sapiens
gggccccggcagcagcccgacgcaaaccaaggacggggaccgcacacccaagccccccccacaagagcggaaaagaacaaa

SEQ ID NO: 60665 - RNA, 74 nt, Homo sapiens
cacgcagaggaaggagcagcgcaagagggaacggaaaaagcaacaaaacacaccaagaaaagggaaccgaagcg

SEQ ID NO: 60666 - RNA, 81 nt, Homo sapiens
gccgcagagagacacgagagaagccaaaggagacacgacacaggggagcaggcggaggcaaggggcagaaccagcgagaaa

SEQ ID NO: 60667 - RNA, 85 nt, Homo sapiens
aagaaggcgagcaggggcgggagagccccgcagaagacgccgacgaggcagcagcaaggacaagaggagaaaagccagcaagcac

SEQ ID NO: 60668 - RNA, 77 nt, Homo sapiens
ggaaccagaggccgccaccgccagcggagaggggccacaacaacaaacggacaggcaccagccccacgggaacagaa

SEQ ID NO: 60669 - RNA, 107 nt, Homo sapiens
accccaacgcgcccgggcggcaagacggacccacggagaagggaacgcggaaaggaaagaccacagcaagaccacgcccccagccgggggaccaggccgaacgaccc

SEQ ID NO: 60670 - RNA, 71 nt, Homo sapiens
gaccgcggggagcgaagcgcgcggagaaaccacaaccccagaacgaacaaagacaacagccggaacgcccc

SEQ ID NO: 60671 - RNA, 71 nt, Homo sapiens
gacacaagcggacagaacagacgggacccccagccaaaggcaaagacaacgaagagaggaaagaagcggaa

SEQ ID NO: 60672 - RNA, 69 nt, Homo sapiens
aagcaccacgaaaggaggcaaggcagaccgggggccagcacaagaagcgccgcgcagacaccacaccaa

SEQ ID NO: 60673 - RNA, 72 nt, Homo sapiens
gggagaccaagagacagacaccgccccgagacgaggcccaggcagcgcagagccaacagacgagcagaagcc

SEQ ID NO: 60674 - RNA, 87 nt, Homo sapiens
gaaagcgccaggccagaaacaggccccgcggacgccgggccgcgggagagccgggaggagacgcgacggagacgaaccgcaggaaca

SEQ ID NO: 60675 - RNA, 67 nt, Homo sapiens
aaagaccaagccaacgaggccccgcagcgacgacggacagcaaggaaccccgcccccccgcccccgc

SEQ ID NO: 60676 - RNA, 78 nt, Homo sapiens
cgaaccaagcacaaagcaaagacagagaaagaagggaagagggggccgaaggcccgagcccggggagaccccaacacc

SEQ ID NO: 60677 - RNA, 85 nt, Homo sapiens
cgacaagccgcggcagccgcggaccaccgccgccaggggacccggcccgagcacagcaagaagcccacgacgaggaggaagacgg

SEQ ID NO: 60678 - RNA, 75 nt, Homo sapiens
agaggacaagagggcagaagaagaacgcgagaccgcaagagaaaaggcaaacagaacaaaacgaagaggagaaag

SEQ ID NO: 60679 - RNA, 86 nt, Homo sapiens
ggagaacagcggcgcgccggcaagagcagcgggagcggcgcggggaagggggcgggccgcagagcaggggcaggacaaagcgccca

SEQ ID NO: 60680 - RNA, 82 nt, Homo sapiens
ccggggcggcgccgaggggaggaggcggaagcgcgcaggcaggcacaaggcccaggcacaggccccaggaggcccaaaaggg

SEQ ID NO: 60681 - RNA, 53 nt, Homo sapiens
ccagccccaggggaacagagggggcggagcccggacggaaagaaacacgagca

SEQ ID NO: 60682 - RNA, 73 nt, Homo sapiens
gccaccaggagcccgagagagaaggggaggggcggagacaggcgaggaggaggcgcaccacggagaaaccaac

SEQ ID NO: 60683 - RNA, 78 nt, Homo sapiens
agagcacaggcgcgcaaacggaggaaagggcacagaggggcccagaaaacaagccagcagggaggaacaccggagaaa

SEQ ID NO: 60684 - RNA, 77 nt, Homo sapiens
ccgggacccagccaggcagaccccgggcagcaggggcgcgcagaggaggcggggacggcgcagccccggcgggccca

SEQ ID NO: 60685 - RNA, 69 nt, Homo sapiens
caagggaacagcagagcggcgaccaccagaagacaagaagacagcccaacaaggcgggacgacaacacc

SEQ ID NO: 60686 - RNA, 77 nt, Homo sapiens
ccaacacacccccccaagcgacgagagaacgcccaaggaagccaaggcaacgccagcgggcccgccaacccgccacg

SEQ ID NO: 60687 - RNA, 66 nt, Homo sapiens
gaagaggggacagacagaggcagggccgcaagagacaccacaaaaggacacccgagcgcggaaaaa

SEQ ID NO: 60688 - RNA, 57 nt, Homo sapiens
gaggaagcaaagccaagggcgaggagagagaacaagaacacagaaaaacccaaaaac

SEQ ID NO: 60689 - RNA, 88 nt, Homo sapiens
cacccccgccagcagccgccggagccagccaacgagcgcgaaccagccggccgacgaggagcagggcccccggacgcacaccacaagc

SEQ ID NO: 60690 - RNA, 73 nt, Homo sapiens
gccccaaaggcacaccgcgacccagcaaagagccacaaagacagaggcaagacaggaggaagagacagcgaag

SEQ ID NO: 60691 - RNA, 89 nt, Homo sapiens
gagccccgcaacaccgcggcccacgggacccccaggagggacccgcaggcagagagacgaagagagaagcagggcagaaagagcggaaa

SEQ ID NO: 60692 - RNA, 70 nt, Homo sapiens
aggaacgacccaaaagcgaagggaaaccaaggaggccccacaggacacccaaggccggagggaagcgcac

SEQ ID NO: 60693 - RNA, 84 nt, Homo sapiens
caccgagcaacaacagccacaggcacccccagccagaacacgcaggccagccggccccccaggcaccccagccagcagcccagc

SEQ ID NO: 60694 - RNA, 94 nt, Homo sapiens
cccgacggcggccggacgccgaccggagggggccggggagcccgaccggaccgcggagaccccccccgcggcccgccaggcgacccacggacag

SEQ ID NO: 60695 - RNA, 73 nt, Homo sapiens
gcccgccggcgccccggagcggagcgcaggcgccgagacgacaacgcggcccacagggaaagacaagacaagg

SEQ ID NO: 60696 - RNA, 77 nt, Homo sapiens
agcagagagcggaaaacggcgcagccaacaagggggggggacagccccagagacggcaaccaaagaccggaaaaagg

SEQ ID NO: 60697 - RNA, 74 nt, Homo sapiens
cgggccccgaagcaaggaagggaagacagccgccaccaggcgcccccccagcaaccacccacagacccgagaca

SEQ ID NO: 60698 - RNA, 60 nt, Homo sapiens
gggagccgaaggccccaaagcgggaaagcgcaaagagacccgcacgggaaggagaacggc

SEQ ID NO: 60699 - RNA, 81 nt, Homo sapiens
gccgcgggcggaagacaggccacccagcggggagcacggcgagcagccaggccaggagagcccaaagacaacaggcccccc

SEQ ID NO: 60700 - RNA, 80 nt, Homo sapiens
cggcggggaggaggaagaggcggccggcaagagcggcggagcgcaggggagaaccggaagggcggaaaacaccccaaaag

SEQ ID NO: 60701 - RNA, 78 nt, Homo sapiens
gaggcgggagcggagacccgcgcgccaggcgcgcccgggagagggcgagaggggaccggagcaacaccccccaggcca

SEQ ID NO: 60702 - RNA, 81 nt, Homo sapiens
agcggcggccacggaggcaccagaagaagcaccaggcaggggaaacccaccgccaaacacgggagacaccagaaagaggcc

SEQ ID NO: 60703 - RNA, 88 nt, Homo sapiens
cagcacacagagaggagcagagcacagacaacggagaaaacggagcggagaagaaaaaccgaaaacacagcccaagagggcgacaaaa

SEQ ID NO: 60704 - RNA, 68 nt, Homo sapiens
gcggcccaacccaccggagagaggaaaacgagacagcccacccaccgccccgcagagaagacggccaa

SEQ ID NO: 60705 - RNA, 74 nt, Homo sapiens
gcggggacaggaccgggggcccgcccagagcgcggcgaggaaaacgcgagagagacgcaaccagcacaaagaaa

SEQ ID NO: 60706 - RNA, 97 nt, Homo sapiens
cgccggcccacagagcgccccggcgccggcccaccacgggccgacccccaccagaggacggggaacccgagaagaggagggaacccgcagcccaccg

SEQ ID NO: 60707 - RNA, 66 nt, Homo sapiens
ccccagcaccaccccgaaagggccagggaaaacacaccaaacaggccaccaagcacggagccgcga

SEQ ID NO: 60708 - RNA, 73 nt, Homo sapiens
agacaaaagggccaaagaagggagagccaggcggccccccccagagccagaggagcagggacccagccacgcc

SEQ ID NO: 60709 - RNA, 81 nt, Homo sapiens
ccgcccgagcgaggcggagaaggaccccggacccccccacgcacgcccgcgccgggaaccaagcgagcaacagcagaaaag

SEQ ID NO: 60710 - RNA, 79 nt, Homo sapiens
caggcgcgcccccaaaccacgagccgacagcccaggagccaaggaaacaagaaacgagcgccggcgagcagacagcgaa

SEQ ID NO: 60711 - RNA, 80 nt, Homo sapiens
gccccgcaagaagggccgggggcgagccggagcgaccccggcagggaaccaagaccaggacaaagaagacccggagagac

SEQ ID NO: 60712 - RNA, 48 nt, Homo sapiens
caccgcaacaacgcccagcgagaaaagggacacagacgccaggcagcc

SEQ ID NO: 60713 - RNA, 77 nt, Homo sapiens
ggaggggccgggaggcagaggggcaggggacgcgcggcccccagccccccccgcgccagcacccgcagcccccgccc

SEQ ID NO: 60714 - RNA, 80 nt, Homo sapiens
gccaaacagaccgaaagacaaaacggcacgacaaacaacagaacccgaaacccacagaaagcaaaccccacgagaacaaa

SEQ ID NO: 60715 - RNA, 75 nt, Homo sapiens
gggggccccccgcgacaagcagaccggaagaccgacggaagaccacaccccgagggagcccaggacaccacgaga

SEQ ID NO: 60716 - RNA, 74 nt, Homo sapiens
acgccggagagcagaagaggagccaggaaggcacacgcagaacagaggaagcaaaaagccaaaacagcacggca

SEQ ID NO: 60717 - RNA, 79 nt, Homo sapiens
ggagagccccgcggcagccgcgccggggccaaggggacccaccgggggagcaagcaccgcccaggcagccagcccgccc

SEQ ID NO: 60718 - RNA, 73 nt, Homo sapiens
gggggcgcacccccgggaacggggggccacgacgggccaaagcggagaagacacaaggcgcagcgcgccaaag

SEQ ID NO: 60719 - RNA, 59 nt, Homo sapiens
ggaaggcagcgcccagcagcgcagccgacacagcccccgaggagcagccacaccagccc

SEQ ID NO: 60720 - RNA, 81 nt, Homo sapiens
cgaagagacgaggaggcaggcgccacacagcacccggcagcaacagccagaacggggcaccaaaggaggacgaagacgggg

SEQ ID NO: 60721 - RNA, 82 nt, Homo sapiens
accgccgaggacccagcacaccgaggaggcacagggccaggcacacaacgagaccacggcccaaacaacagggcaaagagcc

SEQ ID NO: 60722 - RNA, 74 nt, Homo sapiens
ccacccaaacacacacacacccccggacggaaagcacccaaagccgccccaaggcaggagagggaagcggcagg

SEQ ID NO: 60723 - RNA, 57 nt, Homo sapiens
gacgcaaaacagaccaggaggagaagaagggaggcagagaagcgcaagccccggggc

SEQ ID NO: 60724 - RNA, 80 nt, Homo sapiens
gggcagccgccgacgagcaggagaacccggaagccccgccccccagcccagccgaccagagccacccgcaccaggagagc

SEQ ID NO: 60725 - RNA, 69 nt, Homo sapiens
agcacaacagaggcaaagaggaacagggcaaagagaggccagcacaacacgcgccaaagacacaccgag

SEQ ID NO: 60726 - RNA, 77 nt, Homo sapiens
gacagagcgccggcccagccccaggagagcagcagaggcggccaacaccgccagccccacacagcacagccgccccc

SEQ ID NO: 60727 - RNA, 68 nt, Homo sapiens
agagaacgagccagacagcaggccaaaccagccgaaggggcagacaggagaggagagacgccacgaac

SEQ ID NO: 60728 - RNA, 100 nt, Homo sapiens
cacaacaggaaagaaaaggaaaaacgaagaacggcgcaaaaccagaggagggcggcgaagggggagagacaaccagagcggaaagggagaaaagccccca

SEQ ID NO: 60729 - RNA, 75 nt, Homo sapiens
cgcacacgagcggaggcgaaggcacggagcgcaagagcagggacaacccaccaaacagcggaagggccgcaggga

SEQ ID NO: 60730 - RNA, 92 nt, Homo sapiens
gcaggaacgagcggcggcggcggcagcgggcgggccccgagagcagcagcgggaagaaggagaaagggccaaccccgaagaagcaaacagaa

SEQ ID NO: 60731 - RNA, 77 nt, Homo sapiens
agagacccaacgcaaaacaaaggaagggccaccaggacagcagagaacccgaaggaagagagaagacaaggggcccg

SEQ ID NO: 60732 - RNA, 91 nt, Homo sapiens
gcagcgcccccgccccacacgaacgcaggaacagccacgccaaggcaaccgaggagacgcagaagcgaggaacccaacacagggagggcca

SEQ ID NO: 60733 - RNA, 75 nt, Homo sapiens
aacacggcggccagggccgcggggaccgaaaggacagaacaggaccggaaagcacgaaacacgggaaggagggac

SEQ ID NO: 60734 - RNA, 82 nt, Homo sapiens
acagacggcccgaaacaggcgaacggcgcgcaggcgggagggcccccaagacccaacagagggagccgcaaagaacaccagc

SEQ ID NO: 60735 - RNA, 79 nt, Homo sapiens
aagacgacgaggaagagcccgccgaaggaaagcgaacagacggaggaggcacagacaacgcgcgaggagagcacagcac

SEQ ID NO: 60736 - RNA, 34 nt, Homo sapiens
cgaggacaggaaaaacaggcaccgcccaacagcg

SEQ ID NO: 60737 - RNA, 72 nt, Homo sapiens
aggcgggagagggaggagcccagaccgggcgacccgccgggcggcagggggaccagccagcaacccgccccc

SEQ ID NO: 60738 - RNA, 83 nt, Homo sapiens
aacgaggcaagcagcgccgagcccaggcaagagcccgcgagaagaaacgaaggaggcccaaccacaaaaggagccgacggaac

SEQ ID NO: 60739 - RNA, 73 nt, Homo sapiens
cagaaaacccgaccaacgccccagcagcccaagagaaccaaggaaggagaagaaaacccagggaccagcggag

SEQ ID NO: 60740 - RNA, 62 nt, Homo sapiens
gggagaggcgcgggaggcgaggaggcggcggcggagacgggaaagcgagaggcggggacagc

SEQ ID NO: 60741 - RNA, 71 nt, Homo sapiens
caaaaaagccccaggcccgggcgccccccacagagaaaggggcgagcaccaaagccaaggaagcccagaag

SEQ ID NO: 60742 - RNA, 68 nt, Homo sapiens
aggaagccgagcagagcaaaccaaaaaccagacgaacaaggaaaccgaggggaaaagcaggaaaaaga

SEQ ID NO: 60743 - RNA, 67 nt, Homo sapiens
ccaagaggcccaggaaagcccgagaggcagcgccaacgaaacaaacgcgaaaaccaccccgggcggg

SEQ ID NO: 60744 - RNA, 75 nt, Homo sapiens
caaccagagaggaagacaacgaggaaaaagaagaccaccggacagcacggagaaaggggagagagcgagaaagag

SEQ ID NO: 60745 - RNA, 82 nt, Homo sapiens
gggagaggcggccagaagaaaacgaggggcggaacacccgccaaagcagagaaaaaagacgccaaaccacagagcgaaaaag

SEQ ID NO: 60746 - RNA, 73 nt, Homo sapiens
aaacagcaagaaagaccacaagaccaaagcaaagccagggagggaaccgaagccacgggcgggggacgcgacc

SEQ ID NO: 60747 - RNA, 52 nt, Homo sapiens
cgaagaggcaccaaaaagaaccgcagacagggggcagaaacgggacgggagc

SEQ ID NO: 60748 - RNA, 103 nt, Homo sapiens
cccagggacgccacgggacacacgcaacccaaggcacaggcaggaagcggcagagaagcagaagaagacaaagacaccacagaagcaacgggagcaaagaaac

SEQ ID NO: 60749 - RNA, 68 nt, Homo sapiens
gcgaagcaccaccgagaccgagaggaaaacccaagacaaggaagggcaaagcccacagcacaagaggc

SEQ ID NO: 60750 - RNA, 62 nt, Homo sapiens
gggcagagggaccacggggagccccacgaggccccccagccaccggccggccagcacgacca

SEQ ID NO: 60751 - RNA, 111 nt, Homo sapiens
ggaagagcagcgcaccacaggggcccaaaccaagaagcagagaggggccagcacacagcgcagggaagcgcaacagcaaaggaccgcagcccaccaggaaaggagggggcc

SEQ ID NO: 60752 - RNA, 68 nt, Homo sapiens
ggcaccccacgggacgagagaaacaggaaaccagagccaagcggaaagaaaacagagacgccagagaa

SEQ ID NO: 60753 - RNA, 45 nt, Homo sapiens
gccagcccaagccgacagaaaacccgcagcccaaagggcagaaga

SEQ ID NO: 60754 - RNA, 97 nt, Homo sapiens
cgccaggcgaccacgagcccccaggccgagagagacagggaaacgaaaaccaccgggcaccacgagcccacgagagaggacagccccaggaaggcag

SEQ ID NO: 60755 - RNA, 83 nt, Homo sapiens
agccaaaggcacgacgcccgggaagagggggagcggccagcgagagccagggcccaaagaaccgcacacggacccgacaccgg

SEQ ID NO: 60756 - RNA, 36 nt, Homo sapiens
cgaggggagggcgagccgccagggcgcacggaaggg

SEQ ID NO: 60757 - RNA, 79 nt, Homo sapiens
gcaagagcccccgccggagaaccgaagaccacaaccggcgcacacaggggaccggccggggaagcacagccaggggcgg

SEQ ID NO: 60758 - RNA, 84 nt, Homo sapiens
cccacacagaggcagacgacgacagaacccgacaagaagcacgaacagcaggccaaagaccagaggcccaggaggcaagagcga

SEQ ID NO: 60759 - RNA, 75 nt, Homo sapiens
cacagaaccgaaacgccccagcagcacgcaaacaacacagaggacacagaaggaccagccaaggaagcaacacag

SEQ ID NO: 60760 - RNA, 74 nt, Homo sapiens
agccgccgacccgccgagcaaaaggaaagcacaccggcccccaaaaacaagaggcaagaacgccagcaaccaac

SEQ ID NO: 60761 - RNA, 77 nt, Homo sapiens
acaccgagggggccagcccaagaacccgaggaacaccggagaaagacagcaaagaaaaggagaagaaaggaaaaaaa

SEQ ID NO: 60762 - RNA, 124 nt, Homo sapiens
caacacagccccgacggacgcccaagacaacgaagccaccggcgggccccgacggcgacgaaaaacgcgcgaaaagcaggagaagagaaacaggacgcgaggaggagagaggagagggaacggg

SEQ ID NO: 60763 - RNA, 78 nt, Homo sapiens
gagccccacagcgggacacggagccccccccccagcgccgccgccagaccaacaccccgccccgcaggagaccccgag

SEQ ID NO: 60764 - RNA, 77 nt, Homo sapiens
cgccagcccacaggagagggcgcaggaaggagggccccggagcagccacaccaccgaggccccacccagcacgagca

SEQ ID NO: 60765 - RNA, 76 nt, Homo sapiens
ggcggaaccgaacgcaagaaaagcccacgcccagacccgcaggcccaccacaggaagcaggggcgcaggcaagaac

SEQ ID NO: 60766 - RNA, 78 nt, Homo sapiens
accgggcaggggggcgccgggcccgcccgccgccggggagcccagaccggccacacccggggcccaacccagagcaca

SEQ ID NO: 60767 - RNA, 87 nt, Homo sapiens
caacgcggggaagaagaaagcaacaaaacgaccacgaaaacaagccgaccgcgaccgcacaagcagccgccagcggaaccaagcggc

SEQ ID NO: 60768 - RNA, 75 nt, Homo sapiens
aagggcggcggcccaccggggaccgaggccggggaaaggaggcaaacgaccaaacacggcccccccgcaccgcgc

SEQ ID NO: 60769 - RNA, 78 nt, Homo sapiens
gacccaccacccaggccccgacgccccgagacaagcagaccggaagaccgacggaagaccacaccccgagggagccca

SEQ ID NO: 60770 - RNA, 57 nt, Homo sapiens
gacacagcacgaggaaagggcccaacaaaagaacccgaagaggagagaccggaggaa

SEQ ID NO: 60771 - RNA, 104 nt, Homo sapiens
agcagcgcggacccggagcgacaagcgccccgacggagcgccaggacgggcaggaagggggaggccaggggaggagaggcgccaagaacgggaaaacacaccag

SEQ ID NO: 60772 - RNA, 72 nt, Homo sapiens
gagagccgcagagcgcgcagaccccgacgaaaaagagccacgcccccacgagcgccccccggaccacgaagg

SEQ ID NO: 60773 - RNA, 76 nt, Homo sapiens
ggagcacccgagccccgaggccgcccggacccaggccgggcccgggaggagcaggggcagaggggagaacccagcc

SEQ ID NO: 60774 - RNA, 71 nt, Homo sapiens
gaccgcgagacaaccaagcagggaaaagcacagggccaggaagcagagggacagccaggccagaaacaggc

SEQ ID NO: 60775 - RNA, 75 nt, Homo sapiens
gcagcagagagaccgaaagaaagacaacccgaaagaacaccgaaccaggacaggcaaaaagacagccgaaaaagg

SEQ ID NO: 60776 - RNA, 56 nt, Homo sapiens
gccccaaacagcggaacagcaaagaagcccaggaccacaagccagaaaacacgcgg

SEQ ID NO: 60777 - RNA, 83 nt, Homo sapiens
cgagcggagccgacaggcacggccacaaggaggaggccgagggggcggggcccaaccagcagggacaggaagaggggcgacgg

SEQ ID NO: 60778 - RNA, 84 nt, Homo sapiens
cggcggagagagcggagccggcgggcggggaacccaggccccgccgaggcggccagaaacagacgaagggacacagaaaaaagg

SEQ ID NO: 60779 - RNA, 72 nt, Homo sapiens
agccaggccggcgccccccgagcgcagaccgcggccgcaggggcgcgcgcacaagcaaggacaaacgaaagc

SEQ ID NO: 60780 - RNA, 68 nt, Homo sapiens
cgggggccacacgcaggccccgcgccagggcccggagacaggcagagcccccagacccccaaggacga

SEQ ID NO: 60781 - RNA, 86 nt, Homo sapiens
ggcggcgcagccaccccgcgggaacgcccagcgcgagaagacggcccagcagagcacccaaccagcgggaacacagcgccgccccc

SEQ ID NO: 60782 - RNA, 79 nt, Homo sapiens
gggagccccccacccggccaggaagcccccccgcccgaggagaaggagaagccacacaagagggccaccagcgaaccag

SEQ ID NO: 60783 - RNA, 74 nt, Homo sapiens
gcgcccacccggcgcccgcgcccgacgcgcgcccgcggcaaggacagcccaaggcggaaaagcgaaggaagcca

SEQ ID NO: 60784 - RNA, 52 nt, Homo sapiens
aaagagcaaagaaacaggccacaggacaacaaggagaacaggcagacaccac

SEQ ID NO: 60785 - RNA, 72 nt, Homo sapiens
gaacagggccagcaccgcaagcgagagcaggaaagccaaccaaccacccagaagggccaaacaaggccagga

SEQ ID NO: 60786 - RNA, 84 nt, Homo sapiens
gggcccgggcgcggcgggcgcgcccgccagcgcccggagaacggggcaacgaggaacaggccaagaaacaacacagccaaggcc

SEQ ID NO: 60787 - RNA, 74 nt, Homo sapiens
gcgagaagcaagcggaacccgagggcggagaacggaaaagcaccaggaagcagagaggaccgcagaagggaagg

SEQ ID NO: 60788 - RNA, 98 nt, Homo sapiens
accgcacacagcgcgcaacgcgggagagcccgggccacccccccaggcaaggagaaccagggcacagcgcagcggagcgaggaaagcaggcgggccca

SEQ ID NO: 60789 - RNA, 63 nt, Homo sapiens
cacgcccgggcccccgaccgcggggggagggccaccagccaggaggaccaggagagcgagccg

SEQ ID NO: 60790 - RNA, 75 nt, Homo sapiens
gaagaagagagacagagccaaacccccaaggcggagaacggaaaagcaccaggaagcagagaggaccgcagaagg

SEQ ID NO: 60791 - RNA, 86 nt, Homo sapiens
gagccccccgcagcgaccggaagacgaggcggcgggggacaagcggcgccccagagcggacgaggagagcacaagccaacccgccc

SEQ ID NO: 60792 - RNA, 83 nt, Homo sapiens
gcacgcggcgcgggagggacacacccggcacacccaaccgagacgccgggagcgcgcccgcagccgcaccggagagcccgccg

SEQ ID NO: 60793 - RNA, 63 nt, Homo sapiens
agcaagaaaccgcccccagaacacaacagggcaaaggccccgacagcaaagaggcgcggaaca

SEQ ID NO: 60794 - RNA, 80 nt, Homo sapiens
cccgggcccaacagcaacaggccaagcccagcccccggacacgggcggccggaaggcgaggccccgccagcccgccggcc

SEQ ID NO: 60795 - RNA, 72 nt, Homo sapiens
gaggccgggcgagcagcaggagcaccggcccaagaaacaggcaaggcgccggcagagagggcgggaagagag

SEQ ID NO: 60796 - RNA, 79 nt, Homo sapiens
cccaccccaccgccaccgaggcccccccgccccccagaaaaacagccaggacccaaacaaaaacgcgcccacaagacgc

SEQ ID NO: 60797 - RNA, 53 nt, Homo sapiens
gaacagaagcacaaccagagccggccccggcaaggagcgagagcgcacacggg

SEQ ID NO: 60798 - RNA, 72 nt, Homo sapiens
cccgcggcgcgcagcccagcagcccaaagacggggacgaagccccagagagacgaggcccaggcggcccgaa

SEQ ID NO: 60799 - RNA, 83 nt, Homo sapiens
cggcccaggcgcacacggaagggcacagaagaagccaaaaacgggccagaaagaaacgaggcacaaagaaaaagagcccagac

SEQ ID NO: 60800 - RNA, 73 nt, Homo sapiens
cgggaagcccaaagcaaggagaccgacccaagccagcaacaagcccagcggcaaagccagaaacggaaccggg

SEQ ID NO: 60801 - RNA, 70 nt, Homo sapiens
aagccggccagggcggaaaaagggggagaagggccggagcgggcgaacaggacacaagccccagcaacag

SEQ ID NO: 60802 - RNA, 77 nt, Homo sapiens
cagggcccagcaggccgaccgcccgccacggaaaacacgaaggagagaagagaagccggaaaggccgccaagaagga

SEQ ID NO: 60803 - RNA, 73 nt, Homo sapiens
gggacgacaaagaggcggcagggaccagcagacgggaaggacgggccaacgcacggcccggcagagccagcac

SEQ ID NO: 60804 - RNA, 78 nt, Homo sapiens
ccacgcggggggggccaagagacagggcacaccaaacccacgggggcacccgaggaggaagagggcagggcccacgga

SEQ ID NO: 60805 - RNA, 74 nt, Homo sapiens
cagcaagaagccggagggacacccccaaaaagaccaagggaacggaagccccagcccgcgcgagccaggcgccc

SEQ ID NO: 60806 - RNA, 70 nt, Homo sapiens
agaaaagagacacaagaggaagcacgcagggcaaaggcaggacaaagcggaggcgccagcacacggggcg

SEQ ID NO: 60807 - RNA, 75 nt, Homo sapiens
agagaaaacagcggagcgggccacaaaggaccacagggacaagcagaggcgagccagggcgagaaaccacaagga

SEQ ID NO: 60808 - RNA, 82 nt, Homo sapiens
acggggcagacgaggggacgccgcacgccgcccacggacgccgggaggaccggcggacaggaaccgggccccgaccgacccc

SEQ ID NO: 60809 - RNA, 54 nt, Homo sapiens
gcgacggcccgaacgagcggaggccaacaaaggggggccccgccggaggccgaa

SEQ ID NO: 60810 - RNA, 86 nt, Homo sapiens
ccgcggagccggcgcgagaggggcgcggccggagcgggcggcgagacaaaggcgacgcggcggagaaaccaccacaaacacgaggc

SEQ ID NO: 60811 - RNA, 86 nt, Homo sapiens
cggcgggcgcgcacgacgacggcggacgcagcggcgggggcccagagaagcaaaagaaacaaggcaagacggaagcaagaagaaaa

SEQ ID NO: 60812 - RNA, 72 nt, Homo sapiens
ggacacccccggcagacaggaccacgaaggaccgccaggaagggcagcgaagaagacgagccccgacaccag

SEQ ID NO: 60813 - RNA, 75 nt, Homo sapiens
gcggccagcagacaaagacggcaacaacacaaccggacacaggcagcgagagcccagagaagggaagaaagcgga

SEQ ID NO: 60814 - RNA, 40 nt, Homo sapiens
gacagcgcaggcagcaggaacaggaaaagggaggcaaaga

SEQ ID NO: 60815 - RNA, 41 nt, Homo sapiens
ccccgccgcgcggcccagcaccagacaaaccaccaccaagc

SEQ ID NO: 60816 - RNA, 71 nt, Homo sapiens
agcgccaggaagaaagaacaggagaagagcagggggagcccccgaccacgagcgcccgaagaagagaaaca

SEQ ID NO: 60817 - RNA, 72 nt, Homo sapiens
gccagagcgaggacgccggcaggccaagccgacgccagcgggcgccacccaacaggcgcaccgcccacggcc

SEQ ID NO: 60818 - RNA, 57 nt, Homo sapiens
cgcgcccaggagcacggacgccagaacggcggcggccggggcagcgccgcgagccag

SEQ ID NO: 60819 - RNA, 72 nt, Homo sapiens
gagagaagaaaaagcagaagaaacagcgaagcagaacccccagaagagcacgcgggagaggaagagggggaa

SEQ ID NO: 60820 - RNA, 73 nt, Homo sapiens
ccaggccgcccacaccagaagcagagccgcaaaaacgcggcagaacggaggcaggcagcacgagacacaccac

SEQ ID NO: 60821 - RNA, 58 nt, Homo sapiens
cccccaccggacagcaagaacacaccacacaaagaggagaggaagaggagagaggcgg

SEQ ID NO: 60822 - RNA, 79 nt, Homo sapiens
ggagcccagccagagggggccgacacacggcgcacgccaacgaaaaggaacgagaaaaagaacagccaagaaagacaac

SEQ ID NO: 60823 - RNA, 82 nt, Homo sapiens
gaggagcagaagaacaccgcagcgcaagcggggccaccaagcaggagaaggagccccggaggaaacaagggccgcaccgacc

SEQ ID NO: 60824 - RNA, 76 nt, Homo sapiens
cggacggcccgcaaggccgaggcgcagcgaccccaaaggcacgcccccggggcaaagggccgccggcccaggcgga

SEQ ID NO: 60825 - RNA, 71 nt, Homo sapiens
agcgaagaaggaaagcaaggacaggcacgccacacacagagcagcaaggcgaaccggcgcggagcggccgg

SEQ ID NO: 60826 - RNA, 69 nt, Homo sapiens
ccgaagagccaagcccagcgcaagccccggggcagagacacaggacacccacccgccggggacagacgc

SEQ ID NO: 60827 - RNA, 87 nt, Homo sapiens
gacgcagagaggacccaggccagcacaggaagacaaagcaagacccagacccgggaaaccagggggaaggccccgggcagccgagcg

SEQ ID NO: 60828 - RNA, 73 nt, Homo sapiens
aggagggagaaacagcaaccggcaagggccacagggcacaagggcaggaagcaggaagaaagaccccggacgc

SEQ ID NO: 60829 - RNA, 83 nt, Homo sapiens
cccgagccagcccacgcagccgccccgaaggagccaggaaaaagcaaaagggcccaaggcccgaccaggaacaaagagagaaa

SEQ ID NO: 60830 - RNA, 81 nt, Homo sapiens
cccaacacacggccacagccacagaggacggagcgccgccgccgggaccccgcccagcagcccccgggcgcgccggacagg

SEQ ID NO: 60831 - RNA, 78 nt, Homo sapiens
ggaagagcagcgcaccacaggggcccaaaccaagaagcagagaggggccagcacacagaaagaagagagcagaaaaaa

SEQ ID NO: 60832 - RNA, 54 nt, Homo sapiens
cgcagggcgcccccggcagcaacgaagaggcacggagccagagagaccccagga

SEQ ID NO: 60833 - RNA, 69 nt, Homo sapiens
gaccaaccaaaaaacgacacacaacgcaacaagaagaccagcacaagagaaaagacacagacgacccag

SEQ ID NO: 60834 - RNA, 51 nt, Homo sapiens
ggacccagcaaaagacaacaagggagggcacagccaagacaacaaccaagc

SEQ ID NO: 60835 - RNA, 67 nt, Homo sapiens
agaaggaaagcccgaacccgcagaggcagagcaacagggacacaagcaagaagaaagggaccgacag

SEQ ID NO: 60836 - RNA, 35 nt, Homo sapiens
cgcgcagacccgcccggcgaacaagaggcgccagc

SEQ ID NO: 60837 - RNA, 43 nt, Homo sapiens
gacagaggaggcgcagacaacaagaacagccgaacagggcacg

SEQ ID NO: 60838 - RNA, 85 nt, Homo sapiens
aaaagaggcgaaaggaagcaagcagcagaagagccaaggaaaaacagcaagaacccaaaagggcccaggcacagaaccggaaggg

SEQ ID NO: 60839 - RNA, 74 nt, Homo sapiens
cccggaaccgagagccccgaggggggcgagcagacccaggcagccgcgcaagaccgaaccgaagaaccccaaac

SEQ ID NO: 60840 - RNA, 82 nt, Homo sapiens
gaagccaagaagaggacccaggacagggccaaagcggcaggagaaggaagggaccggaaacgacaaggcaacccacaagagg

SEQ ID NO: 60841 - RNA, 81 nt, Homo sapiens
gaccccccccaggcagacgggacagcccagaaaccgccaaagacggaaccgccacagcaccaaaaaccaagggagggaacc

SEQ ID NO: 60842 - RNA, 83 nt, Homo sapiens
caccagaaaggaacggaagaaagaagaaaacagagccccacagagaccagagaaagaccaggagagaagacgaaaaagaagaa

SEQ ID NO: 60843 - RNA, 74 nt, Homo sapiens
aaggagcggaaaaccaggaacggccagggccagacgagcaggcacgcaggagcccgacccacagcagcgagcca

SEQ ID NO: 60844 - RNA, 78 nt, Homo sapiens
agagccacaggcagggacccagcaccaagcgcaaaggaggccggaagccgaggccgccagcgccaagaaaaaaacaag

SEQ ID NO: 60845 - RNA, 76 nt, Homo sapiens
agaagcgcgaccacaggaaaaacggagcacagaggagggaaagaccgcgcgacagaacacaaagaggaccgaacag

SEQ ID NO: 60846 - RNA, 69 nt, Homo sapiens
gccccgcccggcagcgaccggaggacaccccccaggcacagccacaccccagcggccaaggacgaacgg

SEQ ID NO: 60847 - RNA, 73 nt, Homo sapiens
cagcgggaccccagcgcgggcggcggcggcgggcgggagccccagaggccccccggacagaccacccagcccg

SEQ ID NO: 60848 - RNA, 51 nt, Homo sapiens
ccccccgggaaagcggaacagacagaagcagacagccagacaagaccccaa

SEQ ID NO: 60849 - RNA, 73 nt, Homo sapiens
gagagagaggccggagcccaccaagcgggaagaaggccgccaacaaagaccgaaagaaccagccaaaacagaa

SEQ ID NO: 60850 - RNA, 76 nt, Homo sapiens
cacgagcacggcccgcgcacgcccggagagaggccggggccgccacgccgggaaggaagccgcccccaacgcagac

SEQ ID NO: 60851 - RNA, 87 nt, Homo sapiens
cccagggaagcgcagaaagcaggcgaacccgcggcgcaaaacgcgcacacgagacaaaccaagaaaccacccaaacaagcggccgga

SEQ ID NO: 60852 - RNA, 58 nt, Homo sapiens
aaggggagaaggcaggcaccacaaaaaggacaggagaagccgacaaggccagaggcag

SEQ ID NO: 60853 - RNA, 74 nt, Homo sapiens
gacccagccgcgccaaaggaagccggaggaaaggaaaaaagaaaccacagaggaagaagaagccaaacacggaa

SEQ ID NO: 60854 - RNA, 70 nt, Homo sapiens
cgcgcgggccgccgaacggcggaacccagccccaggcgggggaggaggaggggacgaggcagaaacgcac

SEQ ID NO: 60855 - RNA, 61 nt, Homo sapiens
aagcaagcgccaacgacggacaaccgggacaccgacacacgggcgagcaagaacaagccgg

SEQ ID NO: 60856 - RNA, 73 nt, Homo sapiens
acaaacggacggcggagaaggccagcaacccacgcagaaaaggcggcgcagccgaaggaaagcacgaaggaac

SEQ ID NO: 60857 - RNA, 70 nt, Homo sapiens
ccgcccgcggggacccgcagccgggaccaggcagacgaccaaggagcaggcggggcaggcccaaaacagc

SEQ ID NO: 60858 - RNA, 125 nt, Homo sapiens
gaagaccccaggcaagcggagacgcgccagacacgggagccggggcgccgacaagacgagggggccaagagccaaggcccccccccaggacaaagggaaagaagccggcagaaacaaggacggcg

SEQ ID NO: 60859 - RNA, 75 nt, Homo sapiens
ggaccccggaagccagaaagggaaagagagagacgggaagccaccaaaaacaaggaagcacacaggacgcgaggg

SEQ ID NO: 60860 - RNA, 79 nt, Homo sapiens
ggacccccagaagccagaaagggccagcagaagggaagcaccaaaaaaagaccagaagaaggaccgaagcggcaacacc

SEQ ID NO: 60861 - RNA, 72 nt, Homo sapiens
cggaggcccacagcagggggcagggagcacgccggaaagcacagcaagggaaagaacaggaagggaagaccc

SEQ ID NO: 60862 - RNA, 58 nt, Homo sapiens
ggccaccacgcaaagagcaaagaaacaggccacaggagaagaaggcaggcccacacca

SEQ ID NO: 60863 - RNA, 76 nt, Homo sapiens
gaggagcagagaaccggcccaacccgcggggggagaggcaccagcaacagaccaaccgcagcaagcacagagacag

SEQ ID NO: 60864 - RNA, 93 nt, Homo sapiens
gcagccacaacaccggcaggaaccaccaggacagaggacaagacggacagaaacgaacagcgggcgagccaggggagccagagggaagaggaa

SEQ ID NO: 60865 - RNA, 79 nt, Homo sapiens
ggcagccaaccaccagcccgggggcagcaggaaacgagaagaacgaaagagaaacccaaaaaaaggagcaaaagagcga

SEQ ID NO: 60866 - RNA, 65 nt, Homo sapiens
gaaagcgacacacagacgaacaccacgacgaaaggaaaagaagagaccgggaggacggagaagcg

SEQ ID NO: 60867 - RNA, 97 nt, Homo sapiens
ccgaaccaggaccaggccccaagcccgaggcccagaggaggagagaaggccgaggagagggaccaaggcaaaaggaccggggaagaggaggggcaga

SEQ ID NO: 60868 - RNA, 77 nt, Homo sapiens
ccaggaacaagggagcccgccagcaagccagacaacaggccaaagccagggagggccagccccacaagacgacgaag

SEQ ID NO: 60869 - RNA, 83 nt, Homo sapiens
gcaaagagggcaccaaaacaccgggccgcagccaggacgagccacaggagcccagcaaccggcaacaggagcagcagagcacc

SEQ ID NO: 60870 - RNA, 57 nt, Homo sapiens
cgccggccggagcgcagcggagcagggcgggaggagaccgggaagacaaccagggga

SEQ ID NO: 60871 - RNA, 73 nt, Homo sapiens
gacacccaacacaagcaggcaggagcagaaaggcaagacgggaaaagcggacagcaagagcagccccggaacg

SEQ ID NO: 60872 - RNA, 74 nt, Homo sapiens
gcgagggacaaagaccgaaagagaaagaagaaacaaagagggacccagccaccaaaaggaggcgaagggccagg

SEQ ID NO: 60873 - RNA, 57 nt, Homo sapiens
aaacgccccacgaccagggcgagcaaggcaaccagcaagaacaggccacgccagcaa

SEQ ID NO: 60874 - RNA, 79 nt, Homo sapiens
aaaaaccacagcacaccgcaccaaacccggaaggaacaacagccagacgccgcacgccagcccagcccaccaccccccc

SEQ ID NO: 60875 - RNA, 80 nt, Homo sapiens
cccggccgggacggcgcccccacgcgcgggggccacggcgcggacgccagcccagcccagaaacccagaccgcaacgggc

SEQ ID NO: 60876 - RNA, 58 nt, Homo sapiens
ggaacagacagaaggagcaggaaccaaagggggccaccgcaggccgcgcgcgcgggac

SEQ ID NO: 60877 - RNA, 73 nt, Homo sapiens
gccccgcaagaagggccgggggcgagccggagcgaccccggcagacagcgaacccacccaacacggcaaaaca

SEQ ID NO: 60878 - RNA, 62 nt, Homo sapiens
acggaaggggaagaggcccacccggagaaccccacggagaaccagagaacaacaagaaccag

SEQ ID NO: 60879 - RNA, 53 nt, Homo sapiens
cggcgaggagaacgcccgcggacgacccgaggggagacaaccagaaccacgga

SEQ ID NO: 60880 - RNA, 47 nt, Homo sapiens
aacaagggacgacgggaaaagcaacacaaagacgcgagggccacaag

SEQ ID NO: 60881 - RNA, 58 nt, Homo sapiens
gggaagaggggcagcccaggaccggcacggagagggcgcccggcacgcggcgacggcg

SEQ ID NO: 60882 - RNA, 82 nt, Homo sapiens
cggggcgaacgggaaagacaaaggcagccaccgaaacccgcgaaccgagcaccgcacccgaagccaggccgcgcgggggcag

SEQ ID NO: 60883 - RNA, 57 nt, Homo sapiens
gagcggagaaaaggaaccggccccggagggacgaggccacagcagaaaaaaccggga

SEQ ID NO: 60884 - RNA, 67 nt, Homo sapiens
aaacggcacacccaccaagcacccaacagaagaagagccagccagcaggcaacaggcccagaccagg

SEQ ID NO: 60885 - RNA, 84 nt, Homo sapiens
acgcaggggccaacggcccaccagcccccacgcagaggccagcgaccacaagcagaagaggccccggccccaacaggcccgcgc

SEQ ID NO: 60886 - RNA, 51 nt, Homo sapiens
gaaggcggcgcgggagccacacccagagaggagccaagcccaacgggacgg

SEQ ID NO: 60887 - RNA, 72 nt, Homo sapiens
ggaggaagaacccaccagcaggaaaaaaagacgggaacggcccgaccgggccccacggaaaaccagacaaac

SEQ ID NO: 60888 - RNA, 79 nt, Homo sapiens
gggaggggccaaaggaggcaaccacaggaggaaccaaacgagagacaaagaggcgagaacagcacaaccagcccagccg

SEQ ID NO: 60889 - RNA, 69 nt, Homo sapiens
ccacaaaaacgaaggcggcggcaggaccagcagagcaaggagacccagccgacagcagcgcagcagccc

SEQ ID NO: 60890 - RNA, 47 nt, Homo sapiens
cgcaagcggcacaaaggaggaaacagaaacagaaggagaacacccag

SEQ ID NO: 60891 - RNA, 79 nt, Homo sapiens
agaggcggaaaagagggggaaaaagcagggaggagaggcaaaaagaagagcacgcagccgggggaggccacagcgagcc

SEQ ID NO: 60892 - RNA, 77 nt, Homo sapiens
agcaaaaacacagaaggaaaacccagacgacacaacccgggcgcggaaagcgccagcagcgaaccccagacggaaag

SEQ ID NO: 60893 - RNA, 81 nt, Homo sapiens
ccccccacgaacccgcaccgggcagcacagcggcaaggggagcgagaggacaacccccaccagaccaccgccccaacccga

SEQ ID NO: 60894 - RNA, 82 nt, Homo sapiens
cgcgcggccgggcggcgaggaagaggaaggaaggagcgcagcggccgggggagcacccagaacagcagcaaggcaagaaagg

SEQ ID NO: 60895 - RNA, 76 nt, Homo sapiens
aggccaagacccacaggccccccaggccacccaggaccagcggcacacccccccgcggcccaaaaagcccgggcag

SEQ ID NO: 60896 - RNA, 83 nt, Homo sapiens
agcgaggaaccagaacgaaaagcgccagaaaggccaagaagacgcggagggaggcgaggagggaccgagccacaccgcgcgcc

SEQ ID NO: 60897 - RNA, 96 nt, Homo sapiens
agcgagggggcggcggcgacagccaggcccggaagcgagggcggccgcgccggcccagcaccacgcgcgcccgagcggacaagagcagcgggagcg

SEQ ID NO: 60898 - RNA, 70 nt, Homo sapiens
gggcagagcgagccggagaagagggggcccggggggaggaggggcaggcccggcgccagaacggaagacc

SEQ ID NO: 60899 - RNA, 80 nt, Homo sapiens
cgcgcggaggcgggagcgcggaaacggaaccgggaggcgacgcacacgagcggaggcgaaggccagcacaacacgcgcca

SEQ ID NO: 60900 - RNA, 82 nt, Homo sapiens
gcaggcggggggcgcagaggacacgaggcggcgggcggagacaggaccgcggcgagcaaggacacacagcaacgaagcaggg

SEQ ID NO: 60901 - RNA, 83 nt, Homo sapiens
cacggccacccacagaaagaagcagagggccagggggacacgcaagagacgcaccgagagaagcgcagcaccagaaaaaggaa

SEQ ID NO: 60902 - RNA, 82 nt, Homo sapiens
caggcggaaccacgcacccggcgagggaaagcacaaggcagggaggagaaccccaagagcaccaaaaggaaagagagaaagc

SEQ ID NO: 60903 - RNA, 64 nt, Homo sapiens
aaggacacccgcaggaaccggcagaggagaaacagacggccccgagggcggaggcgggggcgac

SEQ ID NO: 60904 - RNA, 82 nt, Homo sapiens
ggacccggcaggccgcccccggcaagggaagagcacccgaccacacggcaccaaccccacccaagggcgaccaccaccgagc

SEQ ID NO: 60905 - RNA, 71 nt, Homo sapiens
aaaggcgcgagagcacgcaccgaagcaaaaccaacgcaaccaccccaggaaagacaggagagagggagaaa

SEQ ID NO: 60906 - RNA, 70 nt, Homo sapiens
ccgagaaaaaaaacagccaagcaggacaagcccccacgaggaaaacccccccaccgaaggagggccccac

SEQ ID NO: 60907 - RNA, 81 nt, Homo sapiens
cgcaccgagaagccccggacgacccgaggccaagccaccaggaccccggcgcgggacacgcccggggcaggacgcaccaac

SEQ ID NO: 60908 - RNA, 55 nt, Homo sapiens
cccaaacgcaaaagccgccccaagacgagagcgacaaacccagccagggggggga

SEQ ID NO: 60909 - RNA, 75 nt, Homo sapiens
aacccaaagagcacccaacgagagaaacacaggcgggagggacaagaagaaaggggaccgagagccgggaaggcc

SEQ ID NO: 60910 - RNA, 71 nt, Homo sapiens
cgggcgaggaagaggacaacaccggagccgggaagaccacgcagcggagcaggcccgggcccgacggcccg

SEQ ID NO: 60911 - RNA, 80 nt, Homo sapiens
gcgcccgcaggacgccccagccaggacggagaagagggaaaaaagacggcccagaaaaaccagcaacaacgcccgaaaaa

SEQ ID NO: 60912 - RNA, 76 nt, Homo sapiens
aaggaccggaagcagagaaaaaagccaggcccaccagcagaaagaaaaggaagcacggagaaaaggaggcccagaa

SEQ ID NO: 60913 - RNA, 87 nt, Homo sapiens
acgagagaggcaccgggacggaccgagaccggaccgagagcggaccgagagcgcgaaacgcacgagaagacaccggaccaaagccga

SEQ ID NO: 60914 - RNA, 77 nt, Homo sapiens
ggggcgagaggaacgccccccgggcggcggggagggagccccaaaagcacgcacgaaaccggcaagccagcggaggg

SEQ ID NO: 60915 - RNA, 82 nt, Homo sapiens
acgagaaagacacggcagcgcaggcagaccgcaggcgcaaggccaggcgacccgacgggccaccgggcccaacgaaccgaag

SEQ ID NO: 60916 - RNA, 68 nt, Homo sapiens
gcaccggacggcaagcacaaccacagcggacaaggcacagacagaggacaggggaaagaagagccaag

SEQ ID NO: 60917 - RNA, 83 nt, Homo sapiens
cagagaccggccaaaccacccagcagggaaaacgaggcgccacaaaaaccagcccacacagcgcagaccgggccgcaacacgg

SEQ ID NO: 60918 - RNA, 70 nt, Homo sapiens
ggagcgaaagccacccacaaacaaacacccacggaaccagagacgggaaccagaagaggccaaccagcac

SEQ ID NO: 60919 - RNA, 79 nt, Homo sapiens
caacaagcagcaaggaaggccacagccagcaccaccgggccccaggcgcccgccagcaagggggaggcccccagacccc

SEQ ID NO: 60920 - RNA, 60 nt, Homo sapiens
ggagcgcgcccggcccgccccccgcaacgagaaccaagagagcccgagggaaaagacagg

SEQ ID NO: 60921 - RNA, 35 nt, Homo sapiens
ggaggcggagaacggaggagacagggaaacgaaaa

SEQ ID NO: 60922 - RNA, 79 nt, Homo sapiens
gcccgcacccaccgagaaccagccaccgacccgaacaaggcagaggaagacccagcaaaaaaacacaaaacaggccgag

SEQ ID NO: 60923 - RNA, 60 nt, Homo sapiens
ggaccaaaagagaagcaccaaggaccagccgaagcagcaaaagaccaaaccagccaaaac

SEQ ID NO: 60924 - RNA, 59 nt, Homo sapiens
aaaacgacaacagaagcgcggaagacaaaccgagaaggaggaggcagcagcaagcccag

SEQ ID NO: 60925 - RNA, 77 nt, Homo sapiens
ccgcaccacaggcgggccgcaaggagcggacccaccggccaccggcggagcgagggcgcaggggcacagcgacgccg

SEQ ID NO: 60926 - RNA, 123 nt, Homo sapiens
gaccagagccagagggcaggcggaaggaggaggaggcacagcaggcggcccaggacaagggagagggaagcgcccgcggcgggggagaggggcggaagcaaacacccaaagagaccagaggag

SEQ ID NO: 60927 - RNA, 78 nt, Homo sapiens
ccggaccccacccaccccacccgcagcagccccccagccccaggcggcggggaccagaggcagcgggagaagacgcca

SEQ ID NO: 60928 - RNA, 60 nt, Homo sapiens
ccagcggcgcgccggcagcaggcccagaaggggaagacccccagcgaacagagacccaaa

SEQ ID NO: 60929 - RNA, 74 nt, Homo sapiens
cgggcaccccccagcagccagcaacaccccggggaaagcagaagcgccgggagcgccgccaggacaggcccgac

SEQ ID NO: 60930 - RNA, 61 nt, Homo sapiens
cgcggaccagaccccaggcggggacgaagggaacccgccgggcggcccggcacccagcccc

SEQ ID NO: 60931 - RNA, 89 nt, Homo sapiens
aagcccccacagcacccaacccaaacaacaaccaagccagaagcgaagaacagagggaggaggaaagccaacgaaagaaaagaaggaga

SEQ ID NO: 60932 - RNA, 75 nt, Homo sapiens
cccccagagaaaggagagcggccgcaaggcccagagcggagacgccaccaccccccagagggaccagaggagcgg

SEQ ID NO: 60933 - RNA, 83 nt, Homo sapiens
aggccaacacgcgggcagcgaacaagcgggagcaaggagggcgaagagcgaggagaacagagcgggagagccccccacgaccc

SEQ ID NO: 60934 - RNA, 58 nt, Homo sapiens
cgcgaaacgcacgagaaggaaaaccgagccaaagcagagcaaaccaaacccagccacc

SEQ ID NO: 60935 - RNA, 79 nt, Homo sapiens
cgcaggcccggcccgcccggacagagcccgggcgcgcaggccaagggagccaaggaggcgcagccaagacaggaaagca

SEQ ID NO: 60936 - RNA, 81 nt, Homo sapiens
aggaacccaccagacacacaaaaccgagcggggacagggaaaggaaagcaagccaggaggaaacgacaccaaaccgggggg

SEQ ID NO: 60937 - RNA, 79 nt, Homo sapiens
acacgccgcacacaccaagcagaggaacaagaacgcgcccccgccgcgcccgggcggggggcggcaccacgcccccccc

SEQ ID NO: 60938 - RNA, 75 nt, Homo sapiens
cggcgccggcgcacggcccgagcgggggcagccgcagaggcgcgagacagagcaccagggcccaggcggccgaac

SEQ ID NO: 60939 - RNA, 81 nt, Homo sapiens
agacacgcccggagaggggccggcgccggcacaagcagaacaagcgcacacgcacggggaaaaggccaggagcagcgagag

SEQ ID NO: 60940 - RNA, 61 nt, Homo sapiens
caaaggcacgcccccggggcaaagggcgaaccgaccaagaacaacacccagagggccagga

SEQ ID NO: 60941 - RNA, 74 nt, Homo sapiens
ggaccaggaggcgagcaacagcgcaagcccgcccccgagcaaccacgcacagcaagaaaaaaagagacacaggc

SEQ ID NO: 60942 - RNA, 74 nt, Homo sapiens
ccggccggagaagacgcgacagaaacaggaaaagaaggaggccagcgggacacacaaagaaagacgaaggacac

SEQ ID NO: 60943 - RNA, 73 nt, Homo sapiens
agcaccaaagcacgcccaaaggccagagcacagcgccaaagcagcaacgccgagaacgacagcagaggccagc

SEQ ID NO: 60944 - RNA, 56 nt, Homo sapiens
aggaagaacacccccaccggccaggcgagaaaggcaggacgccggagcagccacgc

SEQ ID NO: 60945 - RNA, 77 nt, Homo sapiens
agacagcaacaacaaccagcagcaacaaggaaacaggaaagagagcccagcagcacacagacaacgcaaacagccac

SEQ ID NO: 60946 - RNA, 64 nt, Homo sapiens
cggcgcagcgagcgcggacggagaggaaagcgcggaagccgcagaaggaccggccagaagcaag

SEQ ID NO: 60947 - RNA, 47 nt, Homo sapiens
ggaaagcgccccagggcagggccgaaaagaaggacccaacaccgccc

SEQ ID NO: 60948 - RNA, 74 nt, Homo sapiens
cggcccccaaagcgggaacagcacgcccgagcaacgggggggcccaccgacagaccgcggaccacgcaagcccc

SEQ ID NO: 60949 - RNA, 65 nt, Homo sapiens
ggagaaggccaaggagagacacaaggcaaagagccagacccgagacaacccaaaaccacgagcac

SEQ ID NO: 60950 - RNA, 74 nt, Homo sapiens
cccagcacacagccagagagccaggaagcaaggaggcacaggaagagggcggcacgcggccagagagcacaacg

SEQ ID NO: 60951 - RNA, 70 nt, Homo sapiens
aaccccaccagcaccgaaagcggacaaggcaaaaccagcaagcggacccagacaaaaggcgaacccccgg

SEQ ID NO: 60952 - RNA, 68 nt, Homo sapiens
gaagaaacccagcaacgcgacccagagagaggaccgaccgcgcgcccaaagaccagaaacacgcaccc

SEQ ID NO: 60953 - RNA, 60 nt, Homo sapiens
ggaagggaccccaggaaacagggagagcacaccgggacagccagccaacagcccaagaac

SEQ ID NO: 60954 - RNA, 67 nt, Homo sapiens
cggaaacgacagaagcagagggacaccaagccgcagaacgaggccagaaccagacagggcacacgcc

SEQ ID NO: 60955 - RNA, 57 nt, Homo sapiens
acgcggccgggggcccggccccggcaggggaagaagagccgggcaagggcacccaaa

SEQ ID NO: 60956 - RNA, 74 nt, Homo sapiens
cccccgccccgagcaaaaaacacagggacgagccaccagagaaggaccacgggaggcagaccccgacgacacag

SEQ ID NO: 60957 - RNA, 75 nt, Homo sapiens
gagaagaaccaaggcggagggcaccacaggaagcgaaaccaggagaacggcgagaggaagacggagccgccggcc

SEQ ID NO: 60958 - RNA, 72 nt, Homo sapiens
acacccagcccgcgcacgagaggagagaaaggggcgggacagcggggagccggcccaccggcacaccaaacg

SEQ ID NO: 60959 - RNA, 80 nt, Homo sapiens
caacccacggcgcagcagcaccacagagggaagaccgaaacgaggccagagagcagaagcagcggccaaagcaacaacgg

SEQ ID NO: 60960 - RNA, 82 nt, Homo sapiens
cgaccagcaggggcaaccaccccaggcccccaacagacagccagaagaaagggaaaacagcacccagggggagaaaaaaaac

SEQ ID NO: 60961 - RNA, 70 nt, Homo sapiens
cacaaagagagagaaagcccggaaacacaaccaggggagcagacaccaagaaaaaaacgcccaggaaaaa

SEQ ID NO: 60962 - RNA, 70 nt, Homo sapiens
agacgcagaagagacgggagcacccaaaaaccaaggaaagacaaggagccgggccgagaaaccgaaccag

SEQ ID NO: 60963 - RNA, 53 nt, Homo sapiens
aaaagaggggaaacaagagcggacacacaaagaaaccgaaaagccgaaaggaa

SEQ ID NO: 60964 - RNA, 78 nt, Homo sapiens
cggcgccagcggagaacagcccgaccacggaacacagcagcccaacacagacaggaacccaagggcaagaagaaaaag

SEQ ID NO: 60965 - RNA, 72 nt, Homo sapiens
caccggcaccaccccagccaggacgcgcgcacggccacgccaacggcccagaggcaccagcggggacagagc

SEQ ID NO: 60966 - RNA, 100 nt, Homo sapiens
cggaacaacacccgcagaagcgcaaaagggaagacgagggcagcaagaggagccaggagcacggggggaacaagaccgccgggacggaagacgggagcgg

SEQ ID NO: 60967 - RNA, 71 nt, Homo sapiens
cacgggacccggaaagccggacggcagagcacgcaaaaaggcccaagagccgagggccaagagagaagaga

SEQ ID NO: 60968 - RNA, 70 nt, Homo sapiens
cgcggccaagaacagaggaagggaagggaagaacccaagaggacagcggggaccccgaaaccaaaccaac

SEQ ID NO: 60969 - RNA, 54 nt, Homo sapiens
cgagcggacccggaccgggggagaggagccaagcccaacgggacgggaaaacgg

SEQ ID NO: 60970 - RNA, 38 nt, Homo sapiens
ggaaaagggcagccgcacggggaccagaccccacaaga

SEQ ID NO: 60971 - RNA, 71 nt, Homo sapiens
aaaccgagaacccgaccccgcggagacagcgagacccgccaggagcaaaggggcaaagaaaaaggagagaa

SEQ ID NO: 60972 - RNA, 65 nt, Homo sapiens
cgcgaggggcgggagccgcgcacaccaccacaccgggaaaaggcaacagaaagacggcaacacac

SEQ ID NO: 60973 - RNA, 78 nt, Homo sapiens
gggacaacggcacagcgccaacaccgcgcccggggcacgaccccgcaccggacagcgcgcccaccgaacacgacgccg

SEQ ID NO: 60974 - RNA, 79 nt, Homo sapiens
ccacacggaaacccaagcaccgcaggacacaacacgccaccccgcacaacagcgccagggaagggcgagcacgggccag

SEQ ID NO: 60975 - RNA, 82 nt, Homo sapiens
gccccccggcccgcggcgcggccccccgggcgcggcaaccgggcaaaggagaaagaggagccaaagggccaaggggaaaacg

SEQ ID NO: 60976 - RNA, 80 nt, Homo sapiens
agaaaaagaagaagcggaaacaacgccccgcaaaaggcaacccaccagaacgcaaaggcaaaaaaaccacaaaagaagca

SEQ ID NO: 60977 - RNA, 74 nt, Homo sapiens
gaaggaccaagaaccaggggcgggagcaggaggagagaaccccaagcccacacgaggccgcgcccccccgaccc

SEQ ID NO: 60978 - RNA, 85 nt, Homo sapiens
ggacacgcgcagggcccacgacgagacaagcaaacaccagcaacacccgggacaaaaacgggggccaccacccccaccgaaccag

SEQ ID NO: 60979 - RNA, 86 nt, Homo sapiens
ccagcaccaccacaaggcccgaggccccagcccccacagccgggacgacagggaacccgaacggcgaggaacggaaaaagaagaaa

SEQ ID NO: 60980 - RNA, 53 nt, Homo sapiens
cagacccaccgcccagggggaggaggaagagaggagcgccgcaccaggcggag

SEQ ID NO: 60981 - RNA, 51 nt, Homo sapiens
gacgcagggcgcccccgggcaggagacagaacgagcgaaaggaggaaacaa

SEQ ID NO: 60982 - RNA, 69 nt, Homo sapiens
agggaagccgccaccgcgccaacacgggcacaggagcccccacagacaccccaccagccggagaaccgc

SEQ ID NO: 60983 - RNA, 80 nt, Homo sapiens
gcccggccgacggccacacggcggccgcagggcgccggagccccccagaccccaacaggaaccccccggcggcagagagc

SEQ ID NO: 60984 - RNA, 69 nt, Homo sapiens
accagaggaggacccagcaaaacgcaaaagaggaagaagaaggagcagcgggaaccaggagcacaggag

SEQ ID NO: 60985 - RNA, 79 nt, Homo sapiens
agaagcgcccagcccggagggagcagagccccaggacaaacaaggagagaacccggacccagaggaaagcagaaacacc

SEQ ID NO: 60986 - RNA, 69 nt, Homo sapiens
ccgcagcgggaaagaaaccggccccaaacccagccacagagcacaccccgaagagaacgggaaggaaaa

SEQ ID NO: 60987 - RNA, 82 nt, Homo sapiens
gcggccgagacaaaggcaccaggccaccacagaaacaaaagcaacaaagagggaaacgagggaaagagcacggaccgcggaa

SEQ ID NO: 60988 - RNA, 62 nt, Homo sapiens
cagacggccccgaccaccaggaccggccaggcaggcagcacagggaacaagacacgacacac

SEQ ID NO: 60989 - RNA, 51 nt, Homo sapiens
cacgagaggcgggggaccagggagagcaaccaaagggaccccaccacgccg

SEQ ID NO: 60990 - RNA, 80 nt, Homo sapiens
ggacagagggagccaggcagagcacggggcaccgggcccagaggagcagcccggagcgggagccccgggcagcgcacagc

SEQ ID NO: 60991 - RNA, 78 nt, Homo sapiens
cgcaacaaaggcagacgagcgccagagaggacgccaaccaaaggacaggcccaaggcaagccacccccccggaagaga

SEQ ID NO: 60992 - RNA, 80 nt, Homo sapiens
gagaggagggccgacccccccgccggggagggcccagcgcaccgacagaaagacagaaccagcacagcaaaaaaggcagc

SEQ ID NO: 60993 - RNA, 78 nt, Homo sapiens
ggagccggccgacgcgggcgcgagggcagaaccggaggaggcggcagccagaaaggcaggacacccaggaaggacacg

SEQ ID NO: 60994 - RNA, 55 nt, Homo sapiens
cccccccaacaggcggcccagacagagcgcggcacgagcaccagagaggggccca

SEQ ID NO: 60995 - RNA, 71 nt, Homo sapiens
gagaggaccaacaaacacaaagacgaacaaagacggcaacgcgcacagcgcagagaagggaagccaacagc

SEQ ID NO: 60996 - RNA, 63 nt, Homo sapiens
gagcgagcgccccagcgagaaggagggagaaaggcgggcccgggaacagagcccgacagacgg

SEQ ID NO: 60997 - RNA, 83 nt, Homo sapiens
cgccccccccccggcccgcggcgacggcggcggggcggcggacgaccggagagccgccacccgaagggccccccaagcccagg

SEQ ID NO: 60998 - RNA, 80 nt, Homo sapiens
gcccagcccccgagggcgggaacaggcgcgcagccgagagcaccaggggacccgcggcagaaagcggacccagggaacca

SEQ ID NO: 60999 - RNA, 71 nt, Homo sapiens
ggccagggccacaacaaaggaggagcccaagggcaggcacgccgggggagaggcgccggcgaaagcaacga

SEQ ID NO: 61000 - RNA, 88 nt, Homo sapiens
cggaggcgacggggcggcccggagccggcgcgaaccggcccccgcagcgggacccgggagacgccccagaggcgaagccacaggcaga

SEQ ID NO: 61001 - RNA, 77 nt, Homo sapiens
agccacggcagacacacaacccgacccgacgaagggccgaacccaccgagccccggggaggagagcgccggaacgcc

SEQ ID NO: 61002 - RNA, 76 nt, Homo sapiens
caaggccgacccaaggaaacaggaccaagacaagggaggcgaggacggacaaaaggaaacggacgggaggccagcc

SEQ ID NO: 61003 - RNA, 86 nt, Homo sapiens
gcgccccgcgcaaggaggagaccgacaacagcacccgcgcccaagaccgcgcaacccgggacaggcccaaggcaagccaccccccc

SEQ ID NO: 61004 - RNA, 52 nt, Homo sapiens
agaaacacccaggagccagggaagacgaggagcccagccccaagcagcacaa

SEQ ID NO: 61005 - RNA, 70 nt, Homo sapiens
aaagaagcacccccgggaccaggggcccgacagcgcaacagggcaggaagaggccaagggcaccagacag

SEQ ID NO: 61006 - RNA, 54 nt, Homo sapiens
accaagaaccagagcaggacaggcgcggggaccccaggcaggacggccaccccc

SEQ ID NO: 61007 - RNA, 70 nt, Homo sapiens
ggagagaagacgacgcaccgcaggcagacaaaagggccaaagaagggagagagacagcacgagggcccga

SEQ ID NO: 61008 - RNA, 76 nt, Homo sapiens
ggcgacgaggcacagcgcgcaagaagggaggacccacacagcaccaagacggagaagaggcccagacacccaagcc

SEQ ID NO: 61009 - RNA, 69 nt, Homo sapiens
gacagggcggcggcgccaggcagggcgcagggcgcgccagaggacaccagacccaaggcgcaagaaaag

SEQ ID NO: 61010 - RNA, 41 nt, Homo sapiens
gcccgaccccgcccccgcagcggggacccagaccccaccac

SEQ ID NO: 61011 - RNA, 78 nt, Homo sapiens
gggaccaaggccgagagccggaacaaacgagggcccgggaggaccgacgcagccaggaccgaggaccggaagaagcag

SEQ ID NO: 61012 - RNA, 80 nt, Homo sapiens
agaagcgaagcacagagaagcaacccagcagcagcagcccaagacaaaacaaggccagcggcaggccacgcagacagacc

SEQ ID NO: 61013 - RNA, 83 nt, Homo sapiens
cccccaagggccaaagcacagccaagccagcagccgggcaaggaggggaggcgagaacacgaggaggaaggcggaccccggca

SEQ ID NO: 61014 - RNA, 72 nt, Homo sapiens
ccggaagcacagaagaagacggaagaacaggagccagccagaacagacccaacagaggaagccgcaagaaac

SEQ ID NO: 61015 - RNA, 60 nt, Homo sapiens
cagagcagaagaaaccaagacggcagagagggagcgaacaaggagcggggaggagaaaga

SEQ ID NO: 61016 - RNA, 72 nt, Homo sapiens
ggcgagccggaggagcacccaaccccgcggagcgagagaccaacgggcaagcaaccgaggagaaaagagcgg

SEQ ID NO: 61017 - RNA, 60 nt, Homo sapiens
cgggaggcgcaccgcgggggaaggccaaccgccccccagcagcaggcacgggcgaacccc

SEQ ID NO: 61018 - RNA, 74 nt, Homo sapiens
cgccccaagagcgcagacggccagccgaaaccacgaggcgcaggaagggcaacaccaaaccagaagaaggacga

SEQ ID NO: 61019 - RNA, 66 nt, Homo sapiens
ccaaaaacccgcaacagcccccgcccaaggcgcaagcaggggcaccgaggcacccggcaggagccc

SEQ ID NO: 61020 - RNA, 62 nt, Homo sapiens
ggcccgaggaggcagccaagccgagccgccacccggcaacgccaaaagacgaacacaaaggg

SEQ ID NO: 61021 - RNA, 67 nt, Homo sapiens
aaacaggaaaaaaaaacgcacaggagcggaaaccagacccaaggcccccagggcacaagaggaaacg

SEQ ID NO: 61022 - RNA, 75 nt, Homo sapiens
ggcagaaggcgaggcgggcggcggcagcgggccagacccaggaccgcgacacgccccggggcagaagagcggcgc

SEQ ID NO: 61023 - RNA, 41 nt, Homo sapiens
gagggcgggggcagcggcaggccaaaggcgagcagacccac

SEQ ID NO: 61024 - RNA, 78 nt, Homo sapiens
gggacagcaaaagcacacaggacgacaccccgaggggcaggaggggccgcagccaggacaaaccggcgaccacacacg

SEQ ID NO: 61025 - RNA, 52 nt, Homo sapiens
ccccggggaaagaccgccagcgaggcagacacacggccgggaacgggaaacg

SEQ ID NO: 61026 - RNA, 76 nt, Homo sapiens
ccacaaggcccagaccaggcacagcaaacaccccccaagaacccgacgaaccacaggaaaccccgcaaacacaaca

SEQ ID NO: 61027 - RNA, 67 nt, Homo sapiens
gcagaacacccacaccccccgaacaagcggaaccaacaggcaggaaacccaaggaccggagcgcggg

SEQ ID NO: 61028 - RNA, 71 nt, Homo sapiens
ggcgaggacccaagccaaaaaaacaccccgcacgagagagcagcacgcaggcacaggccgccccagacccc

SEQ ID NO: 61029 - RNA, 76 nt, Homo sapiens
gccgacaccaccgcgcgaccgcaaccggccagggcggaacccaccagaaggcgggggcgcaacacacagagggaga

SEQ ID NO: 61030 - RNA, 74 nt, Homo sapiens
ccggcagaacggacaagcgaggggcgggcaggaaacagaacagcagagacggagaggcgccaggacagcaccaa

SEQ ID NO: 61031 - RNA, 73 nt, Homo sapiens
agaggaaccccaggcacacgacggaccggggcgccggcagcgagcacccgcacagagagaagccaggaagaaa

SEQ ID NO: 61032 - RNA, 79 nt, Homo sapiens
agagaaacagccccccaacaaaccccaacgcaaaaacaagggaacggcacagggaggggacagaccaaccggcagccaa

SEQ ID NO: 61033 - RNA, 107 nt, Homo sapiens
gccgagcgcgagagcggccccagccggcggcggccggccgcccagcgggacccgccagaagcgcagaaccacagaagccggacaccacaaaggggcaagagaaggga

SEQ ID NO: 61034 - RNA, 76 nt, Homo sapiens
gagcacacgaaagccggcgagcgcaggagcccgggcacacaagacaccgggaagggcacgacaggaaaagacgacg

SEQ ID NO: 61035 - RNA, 69 nt, Homo sapiens
gagaccgcgaaacacgacggcggggagagaaaacccagcgccaaaggagaagaacagacgcggcacaac

SEQ ID NO: 61036 - RNA, 75 nt, Homo sapiens
gacgagaaagaaggaaacggaaccaagaacaagcacgcaggaaacggggacagaagaacgaagaacaaggacaag

SEQ ID NO: 61037 - RNA, 71 nt, Homo sapiens
ccaagagggcaaggaaggccccagcagccgagcggaacaacaagcccggaaggaaagaaaacaaagacaca

SEQ ID NO: 61038 - RNA, 68 nt, Homo sapiens
gacgaagaccagcgccagggaaagaagcgcggcacgaagacccgaagaaacacacgggcaggcggaaa

SEQ ID NO: 61039 - RNA, 73 nt, Homo sapiens
cggcccgcccgagaggccgcaaaggccggcagaaaagacaagcggagaaaggaccgagggcagcagacgaaga

SEQ ID NO: 61040 - RNA, 80 nt, Homo sapiens
aacgggagaaagcacgggaggagagagagggcagagcgaacccccccacgcagagggacaggaggaggaagaagaagcgg

SEQ ID NO: 61041 - RNA, 38 nt, Homo sapiens
accaagaggcagaagacggggggcgaagaggagaggaa

SEQ ID NO: 61042 - RNA, 57 nt, Homo sapiens
acggacacggaacaccagccgggagaagaggcacaaggacaggcacagagaacagaa

SEQ ID NO: 61043 - RNA, 80 nt, Homo sapiens
agaacgcccagccaaagaaacaagccgggaaagggacaagaagggcaaagccgaaacacggccacacgccagcacggagc

SEQ ID NO: 61044 - RNA, 76 nt, Homo sapiens
caaccgcagggaccacagcaccgaaaacaccaggaaagacaggagaccaaaaagacccgaaggaagagggaacgaa

SEQ ID NO: 61045 - RNA, 49 nt, Homo sapiens
gcgcagcggcaggccgggaggaaaagggggccaggaagcaaaaagacca

SEQ ID NO: 61046 - RNA, 71 nt, Homo sapiens
agcaaaaccgccggccggaccagaccggggggaaaggcgcagcgcgcagacaggacaaccagcggaggcac

SEQ ID NO: 61047 - RNA, 78 nt, Homo sapiens
ggggggcggagcgcgcgggcaggcagcgcccggaccacaggccaagcgacacaagggcaccccacggcgacgcgcaac

SEQ ID NO: 61048 - RNA, 75 nt, Homo sapiens
ccggggccggagaagggcagaaaaacaggggcggggacccaacacaccaagacccaaaacgagaaccagaacaac

SEQ ID NO: 61049 - RNA, 87 nt, Homo sapiens
gcagcaccacgccggggcggcggggacgagcgggcaaaggcgacgcccacccagaaaccgcccccaaagccagagcccaagccaaaa

SEQ ID NO: 61050 - RNA, 75 nt, Homo sapiens
gaccgaaggcgccggccaaaagagggaaagggagcagcaccggccacacccacagcacgaccggaacccagcgac

SEQ ID NO: 61051 - RNA, 69 nt, Homo sapiens
gggacgaaggagaccgcgcaggacgcaacacagcaaccaaccccaggcaaaagaccggacagcgagcaa

SEQ ID NO: 61052 - RNA, 62 nt, Homo sapiens
agaggaccaggcaccaccggccccggaagaccaacagaaccacaggacacggaccaggccgc

SEQ ID NO: 61053 - RNA, 82 nt, Homo sapiens
agagcaccgaaccgagcacagccacccaagcagagcagcaagaggacggagacaaagggacacgagccccgggcaagacgca

SEQ ID NO: 61054 - RNA, 74 nt, Homo sapiens
aaggagaaggccgcaagaacaagaagcaaccaagggagcggagagacgaggagcagagaaggagacaccgaagg

SEQ ID NO: 61055 - RNA, 78 nt, Homo sapiens
ccggccgcgcccacaagaggagcgcacgggaacacaccgcccagccacgcggaaaacccggcaaccaagaagcacaaa

SEQ ID NO: 61056 - RNA, 75 nt, Homo sapiens
gcgcccccagccagccacgcgggccgcccgacggcggccaccgcgcccaacaggggaaccgcgcccacgaaggcc

SEQ ID NO: 61057 - RNA, 74 nt, Homo sapiens
caaaaacaggagcagaaaaggacaacgaagaaaggagcacaaaagaacaaacacacgagccaaaagcacaaaca

SEQ ID NO: 61058 - RNA, 80 nt, Homo sapiens
ccaagcgcgggcccggccagcggaagccccgcgcccgcgccaggaaaggaaaaggcgaaaccagcaggagggagccagcc

SEQ ID NO: 61059 - RNA, 85 nt, Homo sapiens
gcccaagccgcacagccgcggcggcagcagcaggagagcgggaggcgggcggcggggcggcacggcggccgccacacaggggagc

SEQ ID NO: 61060 - RNA, 68 nt, Homo sapiens
gcaaccccgcggaaacccaaaaacacagacagcaggcaaagcccccgacaggggacaggccgcgcaag

SEQ ID NO: 61061 - RNA, 73 nt, Homo sapiens
gcgggagagccgggaccggccgggaagcggccaccgacacgcagcagcggccaggcagaaaaaccacagaaac

SEQ ID NO: 61062 - RNA, 74 nt, Homo sapiens
cgaccaccaaaaaaacggaaacgaaaagagacagcagggcaaaacgggccacacacagggcaaaaagaacgggc

SEQ ID NO: 61063 - RNA, 82 nt, Homo sapiens
cggcggggccgcagcagcagagccgcgcagccaggccccaacaagcaaaaggaccaaccccgaacgcaggagcagcgaagac

SEQ ID NO: 61064 - RNA, 84 nt, Homo sapiens
gggcaccccgagcgcaaggacagcgcgaggccgcgcagcccagcgcagccagcaaaagcagaccggaaaacccaccggcaagac

SEQ ID NO: 61065 - RNA, 74 nt, Homo sapiens
acagaccagcccagggagggcaccgagcaccgagaaaaagaaggagacaaagaaaccaccgcggaagcgcaaga

SEQ ID NO: 61066 - RNA, 68 nt, Homo sapiens
gacagaggaagcccaacccggcgcgaaacaggagcaaaagggagcggaggagcccacaggcgcaaaga

SEQ ID NO: 61067 - RNA, 84 nt, Homo sapiens
ccggccgaacgcggggccacgcacgcaggggcgcgcggggcggcgcgccgccgcgcggggcagagccagaggacagaaagcaga

SEQ ID NO: 61068 - RNA, 73 nt, Homo sapiens
accaccaaacgggaccagccggcaaaaacacccccaaacgaaggaggcccaaccacaaaaggagccgacggaa

SEQ ID NO: 61069 - RNA, 81 nt, Homo sapiens
ccgaaccaccacacacaaaagcaccagagccagccccaggccgcgagccggacaacacaccacaagaaccgcagcacagac

SEQ ID NO: 61070 - RNA, 74 nt, Homo sapiens
gaagcacgggccagcccaaggggaaaaagaaaagggcgaagacccgaagcagcgcaggaacagaagagaagacc

SEQ ID NO: 61071 - RNA, 88 nt, Homo sapiens
cgggacagcccagaaaccgccaaagacggaaccgccacagcaccaaagcccaaacgagaaggaagccgcggaggaccgagcgcacaga

SEQ ID NO: 61072 - RNA, 97 nt, Homo sapiens
gggaacaaaggggcagcagccccccaggcgccccgagacccacccgggaacccacgagaaaggaggagacccgccaacggagcgcggaagcaccggc

SEQ ID NO: 61073 - RNA, 56 nt, Homo sapiens
cgggagacaagcccaggccggaagaggaaaagaagccgggcggaacgacgccagcg

SEQ ID NO: 61074 - RNA, 65 nt, Homo sapiens
aagcccagagcacccaaggaccacccccacaggccccaggaaccacaggcgcgggacaaccaaca

SEQ ID NO: 61075 - RNA, 70 nt, Homo sapiens
gaaccgccacccccaagagcgacccacgcagaggcgaagacggggagccacgaggacacacagcaacgaa

SEQ ID NO: 61076 - RNA, 74 nt, Homo sapiens
aaagggaggcccagaccacaacacaaaaccaccaccggacggcagccgggaccacgcggagcgcggaggcccgg

SEQ ID NO: 61077 - RNA, 87 nt, Homo sapiens
ggcccagcagaggagaaagaccccgccaggcagcaaaaacaagcaggagggccgcaagaacgagagcgcgccaagggaaagcgaagg

SEQ ID NO: 61078 - RNA, 72 nt, Homo sapiens
ccgcaccaagaaaaaaaggacagagcaaagaaagcccccccgaaacagggacgaccacgaaaaaagagggac

SEQ ID NO: 61079 - RNA, 52 nt, Homo sapiens
ggaaaaaaaccgcagggcggagagaccagagccagacccagaagacggcccc

SEQ ID NO: 61080 - RNA, 79 nt, Homo sapiens
cgcccacgcagcacccggcacgccccgccagaccacgggagaacaaaccaagaagcacaggccgggaacggcagacgca

SEQ ID NO: 61081 - RNA, 36 nt, Homo sapiens
agcgcggcggagaagccagagcaaacaaaggcacac

SEQ ID NO: 61082 - RNA, 80 nt, Homo sapiens
gccggggccaggagagcgcgccggcgagaagcggccgagccagcagcaggacccaaggacccaagaagaaagaaaaacca

SEQ ID NO: 61083 - RNA, 89 nt, Homo sapiens
cgcgggccggggcgcggaccgcggagcggccagaccaggaccggagagcccagcggagaggaggaccaaagccacaccccaggccagga

SEQ ID NO: 61084 - RNA, 57 nt, Homo sapiens
caagcagagaggagaacaagagagagaggaaagaaagggagggaagccgggcgccaa

SEQ ID NO: 61085 - RNA, 75 nt, Homo sapiens
gcgggacgcgcgcaaaacccaacacagaagggaacaagcggacagaaaaagagaacaagccccggccagaaagac

SEQ ID NO: 61086 - RNA, 40 nt, Homo sapiens
gaacaaaaaagggacaggccccaccaaagccaccaagcca

SEQ ID NO: 61087 - RNA, 82 nt, Homo sapiens
gcgggaccacaagacaacgcggagcggcgaagagcaaccagccgcggcgagccgcacagggcaacacacgcaccgcacggcc

SEQ ID NO: 61088 - RNA, 71 nt, Homo sapiens
ccacacaaacccgggacgggccgagagcccaagaaaagaggaggaggagagggaaccagagcgccgggaag

SEQ ID NO: 61089 - RNA, 77 nt, Homo sapiens
caaagaggagagggagacgaaaagccagggaaaaaagccagaaaaaacgaaaaagagaagcgaaagggagcggcaag

SEQ ID NO: 61090 - RNA, 70 nt, Homo sapiens
gaggcaaaagcgggagggcaaaagacggagcagcacggaggaggaccaggccaaggggaacaaggaccaa

SEQ ID NO: 61091 - RNA, 54 nt, Homo sapiens
agagcgccccaggagaaacaagacaaaggccgagaaccgagaaaggacagacac

SEQ ID NO: 61092 - RNA, 37 nt, Homo sapiens
aaaagcgacgaggagcaaccagagcgccgcaaggcac

SEQ ID NO: 61093 - RNA, 75 nt, Homo sapiens
gaccgagaggcgcgccacaaagaaggagacccaacaccccggccagacgggccaccaggccggcgccccacgccc

SEQ ID NO: 61094 - RNA, 93 nt, Homo sapiens
caggacgagggcggcgcgggagcagcacccacagccaaggcgggagccacgggggccgacgacgagccccgcgaggagcgcagcggagaggcc

SEQ ID NO: 61095 - RNA, 51 nt, Homo sapiens
gcagcccgaaaaagacgcgagaagccacacgaaacagacgcacgccgaaaa

SEQ ID NO: 61096 - RNA, 71 nt, Homo sapiens
agagccgaagccacacggggacagagcgaagaaccccccaagaagacgaaacccccgggccacaagaaggg

SEQ ID NO: 61097 - RNA, 78 nt, Homo sapiens
acagcaggacgaggaagaagaacagccgagagagcaacaagccagcccgggaccgaggccaaacacacaggaacgcca

SEQ ID NO: 61098 - RNA, 61 nt, Homo sapiens
caagcacgggcggcagccgcagagcgaaaccaccaaggggaggcgcaccccacggcccccc

SEQ ID NO: 61099 - RNA, 53 nt, Homo sapiens
gccgcgggagagaggacccccccccccccccaagcacgagccagggagccgcc

SEQ ID NO: 61100 - RNA, 78 nt, Homo sapiens
gccacagaacaggggaggcagccagcccagagcgacgggcggaaacccaaaccccaaggaggccggcgcagggggaac

SEQ ID NO: 61101 - RNA, 81 nt, Homo sapiens
gggccccgggccccgaggccccgaccgcggcggagcccgacccacccaaggcacaaccccgggggccaagggccgggggcg

SEQ ID NO: 61102 - RNA, 76 nt, Homo sapiens
caaagacaaacgacaagcccaaggagcccagggccagccagcaggcaacaggcccagaccaggcccaaagagccca

SEQ ID NO: 61103 - RNA, 71 nt, Homo sapiens
gacacgaagggaggcgagaagaaaagaggcagcaacacagagaccagaagaccacagcgacagcggcagag

SEQ ID NO: 61104 - RNA, 59 nt, Homo sapiens
ggaacccccccacgccagccaggagaagaagcgagcccagagaaacaagccaccgacgg

SEQ ID NO: 61105 - RNA, 82 nt, Homo sapiens
agcaacagcaagaagaagagcccagcagcacccgccccccagccagggggcgccgacccaccaaaggacccggagcaggaac

SEQ ID NO: 61106 - RNA, 63 nt, Homo sapiens
cgcaaggggagcacggggccggaccagccccgaaacacgggggcaaagagcaagacaagcgaa

SEQ ID NO: 61107 - RNA, 77 nt, Homo sapiens
caccccggggcgaaaaacagggcaaagacgaaggcccaccaccacgagcgcggccaccaaccccggcagaccagagc

SEQ ID NO: 61108 - RNA, 78 nt, Homo sapiens
cggggacaaacagcgacagacccgggccaccccaaaaaacacaaggggacaggcagagggggagagacaaccagagcg

SEQ ID NO: 61109 - RNA, 69 nt, Homo sapiens
gacgggggggacgagcggagcccgggacaggagagcaccacggccaccaggccagcacggaagccccaa

SEQ ID NO: 61110 - RNA, 72 nt, Homo sapiens
caaagcacgcagaggagacaggaaaaggccaaagcagaagcgcaacagggcaccgaaggagggaaagcccag

SEQ ID NO: 61111 - RNA, 77 nt, Homo sapiens
gccggcagggggcacccgcggccggcccggggccccgggaccggcgcccccccggcgccggaccgaaggcgcgacca

SEQ ID NO: 61112 - RNA, 36 nt, Homo sapiens
cagagacaaaggaccaaagccgacgaagacagccac

SEQ ID NO: 61113 - RNA, 63 nt, Homo sapiens
gaaaccagagaaccaacagcaagcacaggcgcaccaaggccaacaggaggggagaagcggcgg

SEQ ID NO: 61114 - RNA, 78 nt, Homo sapiens
ggcggcggacgaccggagagccgaacccagaggacagagccaaaagaccaggcccagcgacaggaaaaggaaaccggg

SEQ ID NO: 61115 - RNA, 73 nt, Homo sapiens
ccggcagggcccacgaaggccacaccgagccgcagagacagaacccgcgagcaggcaggaggcagagaacaag

SEQ ID NO: 61116 - RNA, 68 nt, Homo sapiens
gaacggaaaaagaacccgagagccgcccgagcaacaaacaggcagagcccagcacccgaagcccagcc

SEQ ID NO: 61117 - RNA, 64 nt, Homo sapiens
aacgcgcagaccggggagggaaagaaagcagggaggggaaccaggggccgaaggcgacacacga

SEQ ID NO: 61118 - RNA, 79 nt, Homo sapiens
agagcgaggcagagggggcccagagccgggcgccacccgaggacaagggaaaagccgggccacagaagcaccaccacaa

SEQ ID NO: 61119 - RNA, 74 nt, Homo sapiens
gccccgaaagcggaaacagaagcgccggcccacgagacgagggcgaggccccgcaagacccggccagccaaccg

SEQ ID NO: 61120 - RNA, 80 nt, Homo sapiens
accccacaggacgccccagagaaagcccgccgcaccagcaagcgcggggaccgacaagacggaaaccgggagggggaaaa

SEQ ID NO: 61121 - RNA, 78 nt, Homo sapiens
gggcgcccccccgccaaggcccggcgaggacgaagagcccgggcccgccacagaggggaacgaaccagcagaacaacc

SEQ ID NO: 61122 - RNA, 57 nt, Homo sapiens
acacacaggacgcggggcaaagggaccacggcaccgccccagcccagggcaccaggc

SEQ ID NO: 61123 - RNA, 81 nt, Homo sapiens
caacacaagaagaggcagaacccgagagacgcagcagcacaagcgaagagggaaagggagcagcaccggccacacccacag

SEQ ID NO: 61124 - RNA, 91 nt, Homo sapiens
cagcagcggggcggggcgaagaagcagcacaaggcgagccagacccaacagaggaagccgcaagaaacgggacgacaggaaggccagagaa

SEQ ID NO: 61125 - RNA, 83 nt, Homo sapiens
ccgagagccgcccgggccagcggccgcgcacccccggccggaggcaccagccgccccgcagaggaggacacccagagacagag

SEQ ID NO: 61126 - RNA, 72 nt, Homo sapiens
ggagcaaacgagacccggcgaccaacccggggaaaagagacgcaaaccacgaggacagagaagagagaagcc

SEQ ID NO: 61127 - RNA, 81 nt, Homo sapiens
acgaccagagacccagagaaaacagcagaacgccagcgcaggaccccagcagaagggcaccgagcacaggcggggagacaa

SEQ ID NO: 61128 - RNA, 53 nt, Homo sapiens
gaaggcggggcacgccaacgcaccaccacgggagcgagcacaaacgacacacg

SEQ ID NO: 61129 - RNA, 74 nt, Homo sapiens
cgggggacggagaacacgcgcagcggaggagaaagcaccaacagcagcggcagccaagggcgggaaaccagacc

SEQ ID NO: 61130 - RNA, 88 nt, Homo sapiens
caggccggagcgaggagaacgacgggcgccgcccagcaaagcgaagggaggcgaggacaacgggcagcccccacaccaaaggaaccgg

SEQ ID NO: 61131 - RNA, 79 nt, Homo sapiens
gaggggcagcaagggccaacgcacgggaccgccgccccagcggggggggcccaaacgcccggaaacccccagcagcgcg

SEQ ID NO: 61132 - RNA, 81 nt, Homo sapiens
cccccccgggagagcaagccgggcggccgccccgccggagcagcacacaaggaaaacgaaaaacgggcagggacaaggcgc

SEQ ID NO: 61133 - RNA, 66 nt, Homo sapiens
cgcagggcgcccccgcagaagaccaacccgagagaaaggacacaacccacccagcgcacagagacg

SEQ ID NO: 61134 - RNA, 79 nt, Homo sapiens
gggaaggaggccgagccgggaccaggcccgggggcggcggccacgccaaggacgggacaaaccggcgaccacacacggg

SEQ ID NO: 61135 - RNA, 56 nt, Homo sapiens
aggacaggcgccaaccggaacagcaaacggaacaagaggaggcagcagcagcgagc

SEQ ID NO: 61136 - RNA, 62 nt, Homo sapiens
acgaggaccggaaaaagaacacggcggaccggaaggcaacgggcgagagcagcaggaaaagg

SEQ ID NO: 61137 - RNA, 65 nt, Homo sapiens
ggacggcccggaaagacgccaaaaacagggaaagggccagcacaggagaggggccccaaccgacc

SEQ ID NO: 61138 - RNA, 83 nt, Homo sapiens
ccgccgcgccggcgccgcgcgaggggaccagcgcggggcgcagacgaaaggcgccgccagcgaaagacgaagaacggaagcgc

SEQ ID NO: 61139 - RNA, 68 nt, Homo sapiens
ggaaccggggacaagaggaaaggagagcaagcacagccgaaaagacagaggcgccgcgacccaaccga

SEQ ID NO: 61140 - RNA, 68 nt, Homo sapiens
gagaaggaccaagaaccaggaaacaaccacagaccacgcgggcgcggagacccagcggggcacggaca

SEQ ID NO: 61141 - RNA, 83 nt, Homo sapiens
gcaccacaggacgggccgggaagccgccagcagggacagccgggagagaccagggaccagagaagaggaaaaccccaagacac

SEQ ID NO: 61142 - RNA, 75 nt, Homo sapiens
aaaaagcagaaggaagggccagcaggcagcaaagagcaagaaaggagcaggcagagcaaggaaacaagagggcga

SEQ ID NO: 61143 - RNA, 84 nt, Homo sapiens
ggaggagcgccacgcagcagcacaaggcccggcaggaggcagagcgccagccggggcggcgcaggcgcggggccgggggcaggg

SEQ ID NO: 61144 - RNA, 71 nt, Homo sapiens
cagggagaagacaccgaaacagcagacaaaggagcggaggaagacaccccaaaaacggcccaggggggcgg

SEQ ID NO: 61145 - RNA, 78 nt, Homo sapiens
ccgaaggccaggagacccgaccccaagaccgccgggcgaagggggggcagagccgggccccagccaggggggacaagc

SEQ ID NO: 61146 - RNA, 78 nt, Homo sapiens
cgaaacccccgaaggaccgcggacccgccccgggacagcgaggagcgagggacccgcagcggccgccggcaccggaga

SEQ ID NO: 61147 - RNA, 66 nt, Homo sapiens
gccacacaacccccggaccggaggagagggaaaaggccagacgaggacgcgcacaggaaaggacgc

SEQ ID NO: 61148 - RNA, 58 nt, Homo sapiens
ggaaggaaacgcacgagcacaaggacggcagcaccagcgaggcccacagaggaccccc

SEQ ID NO: 61149 - RNA, 74 nt, Homo sapiens
aggccaagggagcaagaagccgcggacacaagaacaacagaggccggagagacacagggccgccagaagcgaca

SEQ ID NO: 61150 - RNA, 56 nt, Homo sapiens
caggcggcaaaaaggacgagaacacacaccacagccgccgaagcccggaacgcagg

SEQ ID NO: 61151 - RNA, 81 nt, Homo sapiens
ggaaaggacgaaaaggggcggaagaaaaacaaacacacgcaaaggagaaaggaaccgacaggagaaagcgaaagaagcaag

SEQ ID NO: 61152 - RNA, 76 nt, Homo sapiens
cacacccgcccggcgcgacaagggccagccccgaggcggagaacggaaaagcaccaggaagcagagaggaccgcag

SEQ ID NO: 61153 - RNA, 81 nt, Homo sapiens
cgcccacggacaagaacaacaggcggaaaaacaggagaaagcaggggagacagacgagccacccagcagaagaagagccag

SEQ ID NO: 61154 - RNA, 75 nt, Homo sapiens
cgagcagaggagcgaggcgccgcccgccgccacaaagggaccggagggccggaagcgggccgggacaacgggcag

SEQ ID NO: 61155 - RNA, 92 nt, Homo sapiens
ggggaacgcgcgcgcgcggacgcggcgccccgggccaacaggccagaaggaagaccgaggaagccaggaagaaggcacgaagcggggccaaa

SEQ ID NO: 61156 - RNA, 42 nt, Homo sapiens
acgaccccagccaccgaaaggagggcccgccccaggagagcc

SEQ ID NO: 61157 - RNA, 80 nt, Homo sapiens
cccacagaggcaccccagacacaaaaggggagcaagaagaaagagcagggaggagggagcgacaggaagaaagaaacccc

SEQ ID NO: 61158 - RNA, 70 nt, Homo sapiens
cccaccgagagagaggacacgaaacagagaggggaaggagcccagcgacaacacgagcggggagcgggcg

SEQ ID NO: 61159 - RNA, 81 nt, Homo sapiens
caaaaccaacacaaaagacacacgaaacagaaacagggaccaaaacagggaaggaagaaccaggagggaaaaccccagcgg

SEQ ID NO: 61160 - RNA, 69 nt, Homo sapiens
ggcgccgcgcccacggccagacccaggcaacaccgggcgcgcacagaagggacaacggaggaaaccaag

SEQ ID NO: 61161 - RNA, 116 nt, Homo sapiens
aagaagaaaacagaggagaacacgaacaccagaccgcccacaagaggaagagggaagccagacagccgaaacaacaccagccgggagccgcccgcccccacacgccagcgcacacc

SEQ ID NO: 61162 - RNA, 61 nt, Homo sapiens
gcagggcgccaaagcgagagagggaagcgcccggccacagggacgagaaacggaaaacacc

SEQ ID NO: 61163 - RNA, 64 nt, Homo sapiens
ggcggaggcgggaggaggccaggaagcccagggacagccaggcagggcggagaacggaaaagca

SEQ ID NO: 61164 - RNA, 90 nt, Homo sapiens
gcaggacacgcaaggagacaaggaaaggcccaccgaaccacacccagagaagccccagaggggaagaaaccgaaaagagaaagaaacaaa

SEQ ID NO: 61165 - RNA, 77 nt, Homo sapiens
acaagacacaggcaaggacagaagcaggagaggacaaggagaggagcgaaaaaagacacaggccaacagagggcaag

SEQ ID NO: 61166 - RNA, 73 nt, Homo sapiens
aagaagaaagaaaccgggaccacagaaccgcggcggagaaaccaccacaaacacgaggccagcaacgaccaac

SEQ ID NO: 61167 - RNA, 76 nt, Homo sapiens
aagcagcggccgaagcaaaagcaccggacaaagaaaacacagaggagcggagcgaagacgcacaaaggacagaaag

SEQ ID NO: 61168 - RNA, 78 nt, Homo sapiens
cagacagggagacaggccacgcaggcgcaacgcaaagaccagccacgagggacaaaaaggcaagaacgagagaagccg

SEQ ID NO: 61169 - RNA, 66 nt, Homo sapiens
gagcaaaagcgccaccgggacggaagaagaggcgaaggcccaaggacaaaaacccgaagagcaaac

SEQ ID NO: 61170 - RNA, 83 nt, Homo sapiens
gacgacggggcggcaccgaccagcggggcaccagagggaacacaagacccccggcggaaggaagaacggacaagaaaggagga

SEQ ID NO: 61171 - RNA, 53 nt, Homo sapiens
acagacgacacgaacagcacgaaagcccaggaacacagaccaccaggagccag

SEQ ID NO: 61172 - RNA, 83 nt, Homo sapiens
agaaagcaggcaaagaacaaacgagcagaccgcagccaaggagcgaggacacacaggagggacaaaggggaagacaagaaacg

SEQ ID NO: 61173 - RNA, 112 nt, Homo sapiens
gggggacccgcccccggacacaacacccacgcaggccagagagagccggaagaagaggaaagcaaagaagccaagaagcgaagaaccaagaacggaagaagccgggacccaa

SEQ ID NO: 61174 - RNA, 77 nt, Homo sapiens
ccggcgggggcccgccaggcgggccgcggcggcccggacaggggccccagagaccgacacagacaacgacgaacgac

SEQ ID NO: 61175 - RNA, 70 nt, Homo sapiens
ccgcgcgagcacgggcggagcgaacggcgcacggggcaggcgggcagcgagccaaggccggacagcgcaa

SEQ ID NO: 61176 - RNA, 56 nt, Homo sapiens
ggaagaacaggagccagccagaacagccgccagcacccaacaaacgaaggaccagg

SEQ ID NO: 61177 - RNA, 82 nt, Homo sapiens
aacaccagcccaagccaagcggagaaccagaacaggccgaaggcggggagacaacaccgagggaggaggccacggcccccac

SEQ ID NO: 61178 - RNA, 59 nt, Homo sapiens
gaaagagacccagggcgccaaaaacagaggaagaggaccccaaagcaacaccagagaca

SEQ ID NO: 61179 - RNA, 75 nt, Homo sapiens
agcgaggccacagaaggcgcgacgccggggaagaaggaagggcggaacagaacgacaggagaacagaccagagcg

SEQ ID NO: 61180 - RNA, 64 nt, Homo sapiens
gaaagacccacacaaaaccaggacaccaggagcaaaggaccgccaaggcgaacaccccaacaca

SEQ ID NO: 61181 - RNA, 66 nt, Homo sapiens
aacggcaggaaaggaacagccccacccaagggacagaccagcgggagccgaaggcccaccggccgg

SEQ ID NO: 61182 - RNA, 81 nt, Homo sapiens
cggggcacgccaacgcaccaccacggcccccccagcagcccacacacaggaccagagaacacccgcgagggcccaggccga

SEQ ID NO: 61183 - RNA, 98 nt, Homo sapiens
cgaacgagcaaaggcacgggcagccggaaggacaccaagagcggaccgggccccgagccacacaaccacaaccccaaaagagccacgcgcggaacaca

SEQ ID NO: 61184 - RNA, 43 nt, Homo sapiens
gcggaggcgaaagcggaacgagggaacgcgggggccccaagcc

SEQ ID NO: 61185 - RNA, 48 nt, Homo sapiens
ccagcgccagcccagggagaagcggagagaggagaagagaagaaaagg

SEQ ID NO: 61186 - RNA, 81 nt, Homo sapiens
ccccagcagagggacccccgcggacagcacagagaaacggccagcccgggcgaaggcagaaagcaacagaagcagaagaaa

SEQ ID NO: 61187 - RNA, 93 nt, Homo sapiens
acaacagcacgggagaaagcgcccacgcacgaaagcccaggccaaaaagagagaaagcaagacgccacaagggaaaagcaccccccagccaaa

SEQ ID NO: 61188 - RNA, 84 nt, Homo sapiens
agcagagagaggggccagagaacagaaacggcaaagggccggggacaccaggagggaaacaaaagcagcagggcagagaaccgc

SEQ ID NO: 61189 - RNA, 51 nt, Homo sapiens
caagcagcaaggaaggccacagccagcaccaccggaaggagcacaacaggc

SEQ ID NO: 61190 - RNA, 69 nt, Homo sapiens
gccacgaacagccacaaccaggccaggaccagagggagaccacccaggagcagacccacgcagggacac

SEQ ID NO: 61191 - RNA, 82 nt, Homo sapiens
caaccggcagccccacccaccggcccacccacaagcgcacaggaccgggggccggggagagcggaccggaagggagaagggg

SEQ ID NO: 61192 - RNA, 56 nt, Homo sapiens
ccaacccgccgagccaggggaacccaaggaccgcaaagaaaacccagagaacacca

SEQ ID NO: 61193 - RNA, 54 nt, Homo sapiens
gggccacagcacccacagccaaacacaccgacaagagaggacagagacgaggcg

SEQ ID NO: 61194 - RNA, 58 nt, Homo sapiens
cgcgacaggcccgaaaaaaacccaggcggcccaggccggccacacacggcacaaggga

SEQ ID NO: 61195 - RNA, 77 nt, Homo sapiens
gaccggacaaagacgcaacggcgaggaagagacgacagcaaggcgggccaccaaaccacagcgggcaaagcaggaca

SEQ ID NO: 61196 - RNA, 58 nt, Homo sapiens
gagcggcgagccgaaaagcgagcgcgaggaaaaggcggcgggaggaccgacagccccc

SEQ ID NO: 61197 - RNA, 73 nt, Homo sapiens
gcagcggacccgccacagccccaccagcacgaagccaccccaagcaagcacaacaaagagagcagggagagaa

SEQ ID NO: 61198 - RNA, 86 nt, Homo sapiens
cgagaccacccgaacgacgcgggcgagcggggcggacgccggggagacgcaggcgaggggagcgacagaaaagcagcacaaccccc

SEQ ID NO: 61199 - RNA, 83 nt, Homo sapiens
cgcgccgagccacccgcccgcccaaggcccgcgggcgggagaacggaaaaccccaacccggagcaaccaccagacggcaggaa

SEQ ID NO: 61200 - RNA, 71 nt, Homo sapiens
gccccggacaggacgggagaccccagcacagcggcagggccaggaaaccgacggcgcacaggacgaaaaaa

SEQ ID NO: 61201 - RNA, 77 nt, Homo sapiens
gcggagcagcccccccgcgcccccgcccgcccgggacccgcggccccgccgcgggacaaacagcaggggccaagaaa

SEQ ID NO: 61202 - RNA, 53 nt, Homo sapiens
gggaggccaaagaagaccacgcagggcaggaaggaggggggaccccgcccagg

SEQ ID NO: 61203 - RNA, 77 nt, Homo sapiens
agcaggggccacggagcccccacccccccgccaggccccagagacaccagaggccagcccaagcggccaggcgaggg

SEQ ID NO: 61204 - RNA, 57 nt, Homo sapiens
gcgaccacaggcagaaggagccgaagagaagacaaggcgcaggccacacggagaccc

SEQ ID NO: 61205 - RNA, 72 nt, Homo sapiens
ccccaccacgaaaaccggagaggaggaagcaaggcagccgccaggagaagcggcaggacaaagagagggcac

SEQ ID NO: 61206 - RNA, 70 nt, Homo sapiens
ccgggggcgagcacaaacggggcggggccggggaacacacagggccggccaacaaaagcccgggcggacg

SEQ ID NO: 61207 - RNA, 73 nt, Homo sapiens
aagaaagcaccgaggaccgccaacaaaaagagaaacagagcccacccagaggaagcagagaggagagcaggcg

SEQ ID NO: 61208 - RNA, 70 nt, Homo sapiens
gccacgcgcccgggagacgcccgcgccgccggggacgaagggaacccgccgggcggcccggcacccagcc

SEQ ID NO: 61209 - RNA, 53 nt, Homo sapiens
acccgacaaagcgaaagcacaccaaggaagaccgcccccgacaaagaagacgc

SEQ ID NO: 61210 - RNA, 72 nt, Homo sapiens
ggcacagccaagccagccgggaaccagaggcaccgcaagcgggacagaaaccaagggagggaaccgggaacg

SEQ ID NO: 61211 - RNA, 86 nt, Homo sapiens
cgccagggcgcaggcacagcccgagaaaccgcagcacacacgagaggccaaagagaagccaccgaaacgagggagagggaggccgc

SEQ ID NO: 61212 - RNA, 73 nt, Homo sapiens
caggcagagaaagggaacaccagcgggacaccccaccgagacgcgccacacagggaggcgcgaggcggaaacc

SEQ ID NO: 61213 - RNA, 68 nt, Homo sapiens
gcagcccaccgcgcaggccacgaaaccccggaacggggacccacagcccggcgaccacggggaaccga

SEQ ID NO: 61214 - RNA, 56 nt, Homo sapiens
gaagcaacaccaacgaacgaacaggaagccaaaaagggagagaagcaaaacaagca

SEQ ID NO: 61215 - RNA, 71 nt, Homo sapiens
gggagccggggaaaagccaaaaccaagaccagcacggcggggaaaccacaggccgcagaacagcccgcaca

SEQ ID NO: 61216 - RNA, 79 nt, Homo sapiens
gaacaccccaccgaaagaggccgggaagaaggagggacacagcagcgcggagagcggcccgggacgagagagaaacgcc

SEQ ID NO: 61217 - RNA, 79 nt, Homo sapiens
aagcggcggcgacgccggcggcgccggggcggcgaggcgcgaggagcaggaaaaaagcagagagaacacaagccaagcc

SEQ ID NO: 61218 - RNA, 51 nt, Homo sapiens
acgcgacacaaaggagacggggagaaaacgcaggccacaaagacaggacca

SEQ ID NO: 61219 - RNA, 76 nt, Homo sapiens
gacacggcaaagcccacaaaccggaaaaaaaagaaggacagaaaacgggccccagacacaagccccaccaagagga

SEQ ID NO: 61220 - RNA, 64 nt, Homo sapiens
aggaccaagaaccaggcaaggccccagcccaagcgggccgacgagaggaaagcacaaagggagc

SEQ ID NO: 61221 - RNA, 52 nt, Homo sapiens
accacgccaggagccaaagcggggacggaggaagcccagcaccacgaaggaa

SEQ ID NO: 61222 - RNA, 62 nt, Homo sapiens
cgcggaaaaccgacacaacaggccacaaaaccgaggggaaagagaccgggccgacgggcggg

SEQ ID NO: 61223 - RNA, 73 nt, Homo sapiens
cgagagcgggcaccccccaaacgacgcagccacggagagcaacgaagggggaacagaaaaggcaagaaggaac

SEQ ID NO: 61224 - RNA, 69 nt, Homo sapiens
acgggcccaggagaaaaccacccccgaagagggcaaaggcagccgagcaccacgacggagcaagacaga

SEQ ID NO: 61225 - RNA, 65 nt, Homo sapiens
ccacgcccagccaggagcaccgccgaggacccagcacaccgaggccgcgagcaagggaagacacg

SEQ ID NO: 61226 - RNA, 78 nt, Homo sapiens
gaagaagcagaagagcacagcacgaacagacagaaagcaccacagaaagggagcaacagaggggcagagccagcccaa

SEQ ID NO: 61227 - RNA, 79 nt, Homo sapiens
gccacccccgacgccaaccaacagcgagcacagcgaagaaagccagaaaaaaggaacccccagcacacgccggaaagca

SEQ ID NO: 61228 - RNA, 65 nt, Homo sapiens
ccacgcggaacacaggcaaaagggaaaggacagccagcacaaaaaaacaaaacgagaacacggaa

SEQ ID NO: 61229 - RNA, 68 nt, Homo sapiens
ggcccggaaaccagcaccaaggacagccaagcaccaacaccagaacgaaggggaccagagcagaaaca

SEQ ID NO: 61230 - RNA, 74 nt, Homo sapiens
agacggggcgccccacagaggggcgacggccggaaaggaaaaacaccagaacggaaacagaaggacacaccaga

SEQ ID NO: 61231 - RNA, 41 nt, Homo sapiens
gggcagaagagcagaggagcggggacggagccaccgcgccc

SEQ ID NO: 61232 - RNA, 76 nt, Homo sapiens
cgccggagggagcccccggcgggggcaaggaaccagaaagagacaagaagggaccggcgcgggggacccaccaccc

SEQ ID NO: 61233 - RNA, 85 nt, Homo sapiens
ccagcccccacgcccaaccccggcccccgaaccacccacgccaaccccagcccagagcagagcaggacccacccagccaacaaac

SEQ ID NO: 61234 - RNA, 69 nt, Homo sapiens
ccgaaacacacgaggaaaccgcgggccggcccccagggacgccaagcaccgcaacccaagacccagcaa

SEQ ID NO: 61235 - RNA, 81 nt, Homo sapiens
ccggcccggaggaggccagcgggacaagcgcccgccgacacagccaccaagaaggcacaagcagaacgggaaaaggggcgg

SEQ ID NO: 61236 - RNA, 42 nt, Homo sapiens
aaccaagcagaccgaagagaaaggaacgcaagcacaggacca

SEQ ID NO: 61237 - RNA, 79 nt, Homo sapiens
ggggggagaggacaagcagccgcaacgaaggagcgaaaagacagcaaagagagaagaagaacgcaaaagaagagagcag

SEQ ID NO: 61238 - RNA, 61 nt, Homo sapiens
gagaggagggcacacaggaccggggcccaagaggggaccccagacgagcacaaaacgccgg

SEQ ID NO: 61239 - RNA, 49 nt, Homo sapiens
ccagcaaggggagggggcggggaaagccggaacgcgcgccacccggcag

SEQ ID NO: 61240 - RNA, 73 nt, Homo sapiens
gaagccgcagaaaaccaggacgaaacaaacgagaagagccggaggcaaaagaaagagacgcgggcaagacaag

SEQ ID NO: 61241 - RNA, 72 nt, Homo sapiens
gagaaaggaaggaaaaccgacgagaccggacaaacaccacggggggggccaggcagccggggccaaaaaagc

SEQ ID NO: 61242 - RNA, 77 nt, Homo sapiens
gcgagcgcccaggacccgccaccaaaccgcccgagggaccagaaccccccacggaaaggacgaaagaaagaagcagc

SEQ ID NO: 61243 - RNA, 77 nt, Homo sapiens
aaaacacaaaccaggcaacaggcagaaaaagaaccagaaacaccaagaagcaggcgcagggggcaaaagggaaaacc

SEQ ID NO: 61244 - RNA, 89 nt, Homo sapiens
gacgagaaaaacaaggagcggacacgagccgagggaggggaaaggcgcagggacagcccagagcaagcacacggaggcccgggagccag

SEQ ID NO: 61245 - RNA, 75 nt, Homo sapiens
gcagcgaggccaggaacccggggagaccccgacgggaggccgaggcgacccccgccccggaccccgggccgcacc

SEQ ID NO: 61246 - RNA, 76 nt, Homo sapiens
ccggacccaggagaagaggggagagggaccacacagaaacggagccagggcagaaacccccaccaggcgggcgcca

SEQ ID NO: 61247 - RNA, 82 nt, Homo sapiens
gcgaaacgaggaggagaaacgcggccgggccggcaaaaacaaccaggcagagagacaagcaggagcgaagcaggacaacaag

SEQ ID NO: 61248 - RNA, 80 nt, Homo sapiens
gcccggagagaagccgagcgccggcagccgggcacccgcgcggagcagacggaaggaaagacgaagcggcggagaggggg

SEQ ID NO: 61249 - RNA, 81 nt, Homo sapiens
cccgagaaggcgaggaggcggcccgaaaaccccccaggccagggccagcggagcggccaaccaggccgaaacgcagagcca

SEQ ID NO: 61250 - RNA, 82 nt, Homo sapiens
ccaacggaagccagagaaaggaagaagcgggcggagaaccggaggacccgcggcgacgggccagagacccggggacaagcac

SEQ ID NO: 61251 - RNA, 82 nt, Homo sapiens
caaagccgaagaccccggagccccagccagggaaccacggagcacgagaaaacggcggggcccccacagagagcacacaaac

SEQ ID NO: 61252 - RNA, 50 nt, Homo sapiens
ccccacgcgaagcaccgagccaggagcgagagaagaacgggagcaagccc

SEQ ID NO: 61253 - RNA, 76 nt, Homo sapiens
cagagacacgccaagcagccagcccaggagaggcaggaagagaacacagaagaagaggagaggaaccagcaagggc

SEQ ID NO: 61254 - RNA, 70 nt, Homo sapiens
caacacggccgcacggcccgccccggcgggcagagaccagcaccggagaagggcgagaaaaagcggagaa

SEQ ID NO: 61255 - RNA, 44 nt, Homo sapiens
gaggcccccagccagggaacaagagagaccacaagcaacgaaga

SEQ ID NO: 61256 - RNA, 71 nt, Homo sapiens
ggaggggaaaaccgcgggggggagaggaccagggaaccgaaggagaagcaaaacacagaggaaaagggaaa

SEQ ID NO: 61257 - RNA, 75 nt, Homo sapiens
gaaccccaggcacacgacggacagggccaaagcggcaggagaaggaagggaccggaaacgacaaggcaacccaca

SEQ ID NO: 61258 - RNA, 79 nt, Homo sapiens
aggcagacccggcgacacacggaagaagaaagagcaacccaagacccggggccggagagcccgccgggagccagaaaaa

SEQ ID NO: 61259 - RNA, 51 nt, Homo sapiens
cggaagaggaagagccagcacagacccgaggagccaggcagcgagcgggag

SEQ ID NO: 61260 - RNA, 48 nt, Homo sapiens
gcggagcccgacccacccaagggccaagaacagggcacagccaaaaga

SEQ ID NO: 61261 - RNA, 77 nt, Homo sapiens
aagcaggcagcggcagagagggaagggcaggcaggcgcgagaaggacgcgcagccaccccaggaaagcaggaaaacg

SEQ ID NO: 61262 - RNA, 71 nt, Homo sapiens
accaaacaaagggaaggagaaagaaccaacgggacccaacagccaggccagacaaacaaacgcgagccgga

SEQ ID NO: 61263 - RNA, 62 nt, Homo sapiens
cggccacccacgccggaggccggggagccgacgccggagaggaaaaaccacccacaaacggg

SEQ ID NO: 61264 - RNA, 80 nt, Homo sapiens
gcgcaccggaagcaccagcgaggaagcaacacagcacccggcggcaaaccaaacaaaaccagagcacggggaaaagaacc

SEQ ID NO: 61265 - RNA, 62 nt, Homo sapiens
aggaaaggcacaagcgcaggggggcgaaccacagaggagccgcggcaacggggacagaccga

SEQ ID NO: 61266 - RNA, 70 nt, Homo sapiens
aagcaaacggaccagaccgaccaccaaaaggccaccacagaagcaagaggcgaaccaaaccaggaagcaa

SEQ ID NO: 61267 - RNA, 74 nt, Homo sapiens
ggcaaccaccagcagaaaacagcacgggaaaacgcaacccaacaggaaccaaagagaaagcagcaccacaagcc

SEQ ID NO: 61268 - RNA, 37 nt, Homo sapiens
gcccggacccagcagccaacaagcaaggagggcagcg

SEQ ID NO: 61269 - RNA, 77 nt, Homo sapiens
ccggcgagcgcaggagcccgggcacacaagaccaggaaacaggccgacagcggaaaagaacgaccgaaacagcccag

SEQ ID NO: 61270 - RNA, 62 nt, Homo sapiens
gcgaaggcaaagcagaggaagaacagaggaacagacagccccgggaacacccgaaggacggg

SEQ ID NO: 61271 - RNA, 73 nt, Homo sapiens
ccccccgagaagaaacaggaaacaaaggcaagggcaccccacaaaagggggagccaccacacaagaggaaaaa

SEQ ID NO: 61272 - RNA, 83 nt, Homo sapiens
ccgggggccgcgggaccagaggcaggcgagcacgggggaagaccgagacgggccgggcgaccccccacagccaggcggccacc

SEQ ID NO: 61273 - RNA, 81 nt, Homo sapiens
cagcaagaacaacagcaggccaagcccgccggaggggaaagccggcaaaaagacccaaaaaggaggcacggcaagacggaa

SEQ ID NO: 61274 - RNA, 59 nt, Homo sapiens
acacgcgcagggcccacgacgagacaacagccgccgagcaccggggccccaagccccga

SEQ ID NO: 61275 - RNA, 74 nt, Homo sapiens
agagcgaccagccacaagaacaggccccagaccagccgcaagagaacccacggggagagaaagagcgacaggaa

SEQ ID NO: 61276 - RNA, 78 nt, Homo sapiens
ggcaaccagacggaccaccacaggagccggcgggaggcaggaggaaggcaaacagggggcaccgacccgcacgcaaga

SEQ ID NO: 61277 - RNA, 70 nt, Homo sapiens
cccggcccaccacagaggacaaacaccacgggagaacagaggccagacacacggccccgaaccgaaacac

SEQ ID NO: 61278 - RNA, 67 nt, Homo sapiens
gccgcgcgcgcacaaggcggccgaagagggcgcgcgcagcgaaccaccagggaaagaaccccgggag

SEQ ID NO: 61279 - RNA, 75 nt, Homo sapiens
aagacagccagaggaagggaaagaaggaagccagggcccccaggccccacaccgcacagacacagagccacagca

SEQ ID NO: 61280 - RNA, 70 nt, Homo sapiens
cagccgcacggaggcgaaacacaaagggcaaaacaagcacgacagggaagacccagaaaagaaacacaaa

SEQ ID NO: 61281 - RNA, 68 nt, Homo sapiens
agacacacaaacggcgcggcagaaaaaccagcccggcgcagggggcccaggcaacaggggacggagcg

SEQ ID NO: 61282 - RNA, 78 nt, Homo sapiens
ggaagcgcccccagagcgccaggaaaaaccgaagaagggaaaaggaagcacggagaaaaggaggcccagaaaacccac

SEQ ID NO: 61283 - RNA, 67 nt, Homo sapiens
ccgaggaaaaacgcgagcacaagagagcacgcaaacaaggagcagaaccacgcggacaacagaaaga

SEQ ID NO: 61284 - RNA, 77 nt, Homo sapiens
cggagcccagcacggcagaaacagccaaggggagaaccgccagcgacgggaaggcaggacccacgcacgagcaacga

SEQ ID NO: 61285 - RNA, 74 nt, Homo sapiens
agacaccgccacaggagagagcaaggacggaccgggccaaccggggccgcaacagcccaggacccgacgaggag

SEQ ID NO: 61286 - RNA, 70 nt, Homo sapiens
gccggaaacggacaaacaggcgaaagacaccagcacccgaggccagcaacaacaccgccagcaagcacaa

SEQ ID NO: 61287 - RNA, 77 nt, Homo sapiens
gagcggacgggcaccgggccagggggaaggcggaggaccgggagcggcggggccacgaccacggggcgggaacagga

SEQ ID NO: 61288 - RNA, 77 nt, Homo sapiens
acagcccgcgccccacagaaagaaagcgaagccagccgagagcaagagcaaggccaagaggaaggggacaagacccc

SEQ ID NO: 61289 - RNA, 77 nt, Homo sapiens
cacagcagcaaggaggagcggagaaaggcacagccagccaaggacggcgaagagccaagagcagagaaaagaagacc

SEQ ID NO: 61290 - RNA, 61 nt, Homo sapiens
gccaaacccaacaaaagagaacgagacgcccgagcagaagcagcagggaagagcacgcaag

SEQ ID NO: 61291 - RNA, 80 nt, Homo sapiens
cgcccaaacccggaccagaggggaggcaagcaaagaacggaagaagcaccaggaggacaaaacgagaacgaaaaggcaag

SEQ ID NO: 61292 - RNA, 71 nt, Homo sapiens
gaaaggcaaacaagggcaaagaggccgaaacacaagcaaggaacacaaagaagaaagaaaggaacggaagg

SEQ ID NO: 61293 - RNA, 128 nt, Homo sapiens
gcggcagggcaccgcgcgaagcggccaaagccgcccagacggccaccggcgggaggaacaaaagacaggaagggaaggggcggagacgggcggaacgcaggaggccagaggacagagagaggagaaga

SEQ ID NO: 61294 - RNA, 78 nt, Homo sapiens
aacagagacccgagcggaagagaagccaaggaacaagagccaggcggaacccacacagggacccgcagggaaaagaaa

SEQ ID NO: 61295 - RNA, 70 nt, Homo sapiens
gcgccggaaaccggagcgcgcagcagacaggaagggaaggggcggagacgggcggaacgcaggaggccag

SEQ ID NO: 61296 - RNA, 70 nt, Homo sapiens
ggccaacagaagagaccgccgacaaaggacagaaacacacccgcagaaacggcccggaccagaacagaca

SEQ ID NO: 61297 - RNA, 54 nt, Homo sapiens
ccgagggaaagcacgcggaaaggccaagaaaaaacagaacaacaagagaaaaag

SEQ ID NO: 61298 - RNA, 74 nt, Homo sapiens
ccgccgaaagcccgaaaaagcaaagagagagagagaaagagcaaaccgaaggaacccaaagggcgccggaaccc

SEQ ID NO: 61299 - RNA, 85 nt, Homo sapiens
ggggcgcggcggggccgcagcagcagagccgcgcagccaggccccaacaagggcgcggagagccagaggcggcagcgacaggaag

SEQ ID NO: 61300 - RNA, 59 nt, Homo sapiens
aaaggagagagagacagaaccacagacaaggggagagaaggcaaaaagcgcccgcgaga

SEQ ID NO: 61301 - RNA, 83 nt, Homo sapiens
gagacacacagcagaaggagaaagggccagggagcggagagcagagaggcagagcaagacgccggacacccacaaggagcagc

SEQ ID NO: 61302 - RNA, 73 nt, Homo sapiens
cgaacacacgaacaggggcaaaacaaacggagagaggagggagaaacaaaggccaaagacgcaggagggacag

SEQ ID NO: 61303 - RNA, 38 nt, Homo sapiens
gaacacccgggcgcgccgaggacccgcgcaggaagaca

SEQ ID NO: 61304 - RNA, 115 nt, Homo sapiens
gagccacgggccgcgccgggcacagccggaaagcaggaccgcgacggcagcagagcagcaggcccccggaaggaagaggccggacaccaaaggaggaaggcgccagaacgaacag

SEQ ID NO: 61305 - RNA, 72 nt, Homo sapiens
gcgacgccccaggggaaaacccccgggaccagaaaagagcaccggccagcagaaccagccggggccggcaag

SEQ ID NO: 61306 - RNA, 71 nt, Homo sapiens
cacaacgcccaccaagccgcacgacgcgcagccccaacgggagaagcccacaccagcaaggcaagcggaac

SEQ ID NO: 61307 - RNA, 62 nt, Homo sapiens
cacacaccagaaacagcgcaccacccgcagcccgagaaaagcacagcacccgcaggccaaca

SEQ ID NO: 61308 - RNA, 74 nt, Homo sapiens
cccagcgcgcagcccggaccagccaagccccaacggcccccgcgccgggcgcagcggccggacacggcagcggc

SEQ ID NO: 61309 - RNA, 51 nt, Homo sapiens
gccaacagcaaagccaggaaagacggagcggaaccgccagaccacaagaaa

SEQ ID NO: 61310 - RNA, 79 nt, Homo sapiens
ggcccccacccaccccacaaccaaaggagagagagcggagacaaggccacagcaggccacggcgggggcagccagccag

SEQ ID NO: 61311 - RNA, 74 nt, Homo sapiens
gacaaaaagagacagacagcgcacccaggacgcgccagggggacacagacacaacagcccggaggacacaaacc

SEQ ID NO: 61312 - RNA, 76 nt, Homo sapiens
ggagcgcccgcgacagaggagggaggaaaacaaccgagggcagagaggcgcagcccccaagacgggcccccccacg

SEQ ID NO: 61313 - RNA, 77 nt, Homo sapiens
ggagcgggccccaacccaccaaaagcacaggcagacgagaaggacgaaagaccagaaggagaggccccgggagcaac

SEQ ID NO: 61314 - RNA, 79 nt, Homo sapiens
aaaacacgcggaaaacgcgagacagacgaggcccagacccaaagggccgagccccgccacgaggaccggccggagacca

SEQ ID NO: 61315 - RNA, 84 nt, Homo sapiens
ccaggagcggccaccggccgcggcacggcccggggccgggagcgcccgaggaacacgccgcagcgagacgcgacgaagcaaccc

SEQ ID NO: 61316 - RNA, 91 nt, Homo sapiens
ccaagcgccagaagacgagccggacgcccaaggcacgagaggacgagcacccgcggcgccaggccacgcggccccgcaagcgccgaggagc

SEQ ID NO: 61317 - RNA, 63 nt, Homo sapiens
ggagggggcgcacaaacgagaaaaaagccggagcaggagcggccagccccaccggacagagga

SEQ ID NO: 61318 - RNA, 73 nt, Homo sapiens
cggggaccgcacacccaagcaacggggcggcacacaaggagcgaagggcagggagaacgccaggcacagcacg

SEQ ID NO: 61319 - RNA, 85 nt, Homo sapiens
ggcgacagccacaaaggaaagggaggaggcggcgggacgagaagaagcaacggggacggggcagcccgacggagagccaaccagc

SEQ ID NO: 61320 - RNA, 68 nt, Homo sapiens
cagccgagcggggccggccacagggacagcaaaggaagcaacaacagaaacggccagcgagaagggga

SEQ ID NO: 61321 - RNA, 74 nt, Homo sapiens
gaccgggccggaacgagacgcacgaaaagcagcgcaccagaggacgccggcccgcgaagcccacagaaaaaggc

SEQ ID NO: 61322 - RNA, 76 nt, Homo sapiens
caggaaaccaagacaaggacagagcagaagggcgaaagaccgggccgcagaagaggccccaacccgggccagacaa

SEQ ID NO: 61323 - RNA, 99 nt, Homo sapiens
ggcgccccggacggccgcgccccggccgcgccggggccgcgcggccccgcggagccagggcagaggccaagaccggcccaagaaggagaaaagaagcga

SEQ ID NO: 61324 - RNA, 65 nt, Homo sapiens
agcgccacccgggacacagcgccaccccgagcagcggggaagcgagccgcggcccgcggcccacc

SEQ ID NO: 61325 - RNA, 76 nt, Homo sapiens
cagaacccagcaggagggaggggagacccacaggagccccggaccaccgagcacccagcagcgcgcagacaggaca

SEQ ID NO: 61326 - RNA, 78 nt, Homo sapiens
ggagcgcaaggcgccaaccccgaacggggggagacgccacggaacgcaggcagagaaggggccccaaaaggacaaaca

SEQ ID NO: 61327 - RNA, 78 nt, Homo sapiens
aaaagggacgagagcacggagggaaggagggcagccaaaaagagacacagggaaaggaggcgcaccgaggaaggagga

SEQ ID NO: 61328 - RNA, 84 nt, Homo sapiens
gaaaagcaagaagacgaggagcaggcgcaaaaaaggggagaggacacagaggagacacccaccgcggggaagaaaccgaagaaa

SEQ ID NO: 61329 - RNA, 51 nt, Homo sapiens
gaagaaccgcagccgagcggggccggccacaggacccaaagacaggaccac

SEQ ID NO: 61330 - RNA, 75 nt, Homo sapiens
ggcggccccgagcggaacggagaaagcgagggaccgacggaccccaccacccaccgccccccggccaagccgcga

SEQ ID NO: 61331 - RNA, 58 nt, Homo sapiens
ccccaccagccccaaaaggcggcaacagggacacggccaacacgggaaggaaaagcgg

SEQ ID NO: 61332 - RNA, 92 nt, Homo sapiens
gccggagggcgggaggaacagacacgcggaggacaagcaggccacgccgcaagcgaggagaggggaggggacaccgaccccccgcggaccaa

SEQ ID NO: 61333 - RNA, 77 nt, Homo sapiens
cccggccaccggcgggcccgaggagagcgcggagccgcgcccccggaacacgccacacaacagggaaaagaaaaaga

SEQ ID NO: 61334 - RNA, 83 nt, Homo sapiens
gcgccccagcaggccgggcccccggcagggcgcgggaacaggacgacacgagccgaccacaccgcaagaaaaggccccggcgc

SEQ ID NO: 61335 - RNA, 77 nt, Homo sapiens
ccagcagagaaggacaccgaagcagaggagcagcaggaccaggcgccaagcccacgggcgcaccaacggagagccag

SEQ ID NO: 61336 - RNA, 54 nt, Homo sapiens
acaagaaacgaaaacagggggagaccggaagacaggcagaaggaacgagggagc

SEQ ID NO: 61337 - RNA, 59 nt, Homo sapiens
ggagaaagaacagcgacccacagagagagggagaaggaaaaaaaggaacggaaccgaac

SEQ ID NO: 61338 - RNA, 73 nt, Homo sapiens
gacacagaccaagcgcgaggaaacagaagcgcccagaggaccgcccgagcagaccccgaaagccccaccggac

SEQ ID NO: 61339 - RNA, 73 nt, Homo sapiens
aaaaaaaagaaaaggaaggagagaagagagagacggagcgcaggcccaggcggcgaaccccacccaagcgacc

SEQ ID NO: 61340 - RNA, 69 nt, Homo sapiens
cggagccacgccccacgaccgccagaacagcagaccagaggcccaggccccgcacggcagccgccagcc

SEQ ID NO: 61341 - RNA, 76 nt, Homo sapiens
gacggaccgagaccggaccgagagcggaccgagagcgcgaaacgcacgagaagcaccggacggggaaacagaacga

SEQ ID NO: 61342 - RNA, 70 nt, Homo sapiens
gaagaaccaaggacacagccgagagacccacaagcagcccgccccagaacaagacagaggggggaaacca

SEQ ID NO: 61343 - RNA, 75 nt, Homo sapiens
gggggaggccgccccggggcacacagccaccaccacgccagcagggcagccagcggcaccaaaccaaaccccagg

SEQ ID NO: 61344 - RNA, 51 nt, Homo sapiens
gcacgcacgaacgcgagcgacaacagggcaccccccagaggaagcacaggg

SEQ ID NO: 61345 - RNA, 35 nt, Homo sapiens
cgagggaagagaaaccaagggcaggccacgaggac

SEQ ID NO: 61346 - RNA, 75 nt, Homo sapiens
gacccaaaagaaaagcagcgggaaagaaaggccaagccaggaccccagacgagcagacaagcggagaacaaaccc

SEQ ID NO: 61347 - RNA, 67 nt, Homo sapiens
cgcgcagcgccggcgcccgggagacccaggaggagcccgcaggaagcccggggcggcgacggagcac

SEQ ID NO: 61348 - RNA, 73 nt, Homo sapiens
gggagcccacccacggaaaaaaacacgggaccaaggaaaaggccaccgggaacaagccaggggaggcagccaa

SEQ ID NO: 61349 - RNA, 88 nt, Homo sapiens
cccgaaaaaacgaacagccacaaaggcacaaacaggcgggccgccaccaccaggccaggggagcgcgaagcccaggcacagacaggag

SEQ ID NO: 61350 - RNA, 58 nt, Homo sapiens
ggacgagacgggccgggcgcaaccacacgaccaaaacacgcgacgagagcaggacacc

SEQ ID NO: 61351 - RNA, 62 nt, Homo sapiens
agggggagcggccagcgagagccagggcccaaagaaccgagagcgccgccgcggcccccggg

SEQ ID NO: 61352 - RNA, 92 nt, Homo sapiens
ggaagaaaaccaacacgacagcaaccaacggcgcggaaggaggaaaagcgggcgcagcgcgcggacagcgaccgcgaggaaccgcagagggc

SEQ ID NO: 61353 - RNA, 77 nt, Homo sapiens
gcacgaggaagagacaacaccagagggccccagggagaagaaccaacaacggaaaaccagcgggacaaggcaccaag

SEQ ID NO: 61354 - RNA, 69 nt, Homo sapiens
gaaggagaaaggggccacagaggccacgaggcaagagggagaagacagcgaccagggaggcaacaacaa

SEQ ID NO: 61355 - RNA, 65 nt, Homo sapiens
acagacgcagggcgcccccgagggaaggggaacaggaccggccacagacagccccccaggggccg

SEQ ID NO: 61356 - RNA, 72 nt, Homo sapiens
gaagcaggaagccccaccgccaggaacggggggccgacaaccggcaacagagcccagaggggggaaacaggc

SEQ ID NO: 61357 - RNA, 89 nt, Homo sapiens
gagcgaggggaggcaggcgcggcagacggcgacagggcggcggcgccaggcagggcgcagcccaaaggggcacaaaacgccccgggaga

SEQ ID NO: 61358 - RNA, 70 nt, Homo sapiens
cgcagcccaggggggaggcgccccagggacgagaggaagaccgaaggacaagggcccaaaaaagggaacc

SEQ ID NO: 61359 - RNA, 79 nt, Homo sapiens
ggagacaacacgaccggggccgcggagaggaggacagcaaacggaccaaggcagagaagccaggaggggaacagaaagc

SEQ ID NO: 61360 - RNA, 72 nt, Homo sapiens
agcggccacggaggggaaggaaaacacccggcagggaaggaaggaacgcaaccgaagacgcagaggaaaaga

SEQ ID NO: 61361 - RNA, 74 nt, Homo sapiens
aaaaggagcgagagacacccggacaacaagaccgaaacaaggaccccccgggagaagaaaagcgggacgaggaa

SEQ ID NO: 61362 - RNA, 73 nt, Homo sapiens
acggaaagcacggcagccggggagccacccaggggcaacccacaccaaggccaggcaggagacagcgcacacg

SEQ ID NO: 61363 - RNA, 82 nt, Homo sapiens
cggcggggaggagccgaggcggcggcgggggggcccgcgcgcggggccgggacaaagacaccaccagccgggacgaggggag

SEQ ID NO: 61364 - RNA, 81 nt, Homo sapiens
cggcggcagcccgcggcagcacggaggccggaggcggagccaggagcaggggcgcggcagaggcgcggacgagcagcgcag

SEQ ID NO: 61365 - RNA, 88 nt, Homo sapiens
gcagggggcagaacccagaggcgggaggggccgggaggcagaggggcagggcaaagagagcaggagaaggacagaccagcagcccacg

SEQ ID NO: 61366 - RNA, 33 nt, Homo sapiens
acaggaacaggcgcgggccacaaacgagacgag

SEQ ID NO: 61367 - RNA, 88 nt, Homo sapiens
acgggaaccgggcccccaccaagggcccagcagggacccagaccagaaaggcaaggcaacacccccagacaaaaggagccaacaccca

SEQ ID NO: 61368 - RNA, 86 nt, Homo sapiens
cggaagcacccagacaagcaccgaaaaccccaaagcgccaggaacggaggccggaaagagaccgcgcaggcacccagcagagacag

SEQ ID NO: 61369 - RNA, 76 nt, Homo sapiens
aaaggagcagcccgggcaccacagaaaaggccagagaaggacaagaagccaagccgaaaggacagccagccaccca

SEQ ID NO: 61370 - RNA, 66 nt, Homo sapiens
gaagcaccgggggaaagcccacagagaggaccggagcaggcaaggaacaacggagaagaaaaaggg

SEQ ID NO: 61371 - RNA, 108 nt, Homo sapiens
gaaggggccgcgggcgcgaacaagcccgggaggggccccaaaggaaggccgggaccaggaggcagcacggcaggagacgaggagaggacagcaggacacccggacccc

SEQ ID NO: 61372 - RNA, 79 nt, Homo sapiens
ggaaggacacgccaaaccgcaaacaagaacaaggccagaggcaagaaggaggccagagcccaggccgaggcgaaaggag

SEQ ID NO: 61373 - RNA, 76 nt, Homo sapiens
gagggcccaccgaggggcggagggcggcccggacacgacgggaggaacggacgggagacacaggaagagcgggcca

SEQ ID NO: 61374 - RNA, 49 nt, Homo sapiens
cgcagggcgcccccgcaaaggcgaaggcaacaccaggagaagcgggggg

SEQ ID NO: 61375 - RNA, 69 nt, Homo sapiens
gagacaccgcccggcgcccagcaccagaagacaaggagaaggaccgccccacgaggggacccggcccgg

SEQ ID NO: 61376 - RNA, 70 nt, Homo sapiens
ccagccaggccacggacagcccccagagccacgcccggaaacgaccgccaccgcgcccccgccccggacc

SEQ ID NO: 61377 - RNA, 73 nt, Homo sapiens
agcacgccccaagagagagagaaacacaaggaggcccaagggaagagcaacccaaccacagcagccaaacgga

SEQ ID NO: 61378 - RNA, 73 nt, Homo sapiens
gccaccacagaaacaaaagcaacaaagaggggcgcaagcagagaagaaccaccgaaccccaccagaggaggcg

SEQ ID NO: 61379 - RNA, 74 nt, Homo sapiens
gaccaggggaaggagacaaggccaaagcgcccagaggcggaagaaccgagccagaccccagacgaaccccaacc

SEQ ID NO: 61380 - RNA, 75 nt, Homo sapiens
caccgcccagcccgagcaggccaacccaggccagggagcgcgaaggacggaggcccagaagggagaaagccggcc

SEQ ID NO: 61381 - RNA, 70 nt, Homo sapiens
aagaggcgacggcagaggaccccggagagcaaggaagaaagcagcccaggacccaggagaaggaccagac

SEQ ID NO: 61382 - RNA, 69 nt, Homo sapiens
agagcagcgagccgcgaagaagcagaaaaaggcaccggaaaagccgagcaaagcccacaaaagaggcag

SEQ ID NO: 61383 - RNA, 68 nt, Homo sapiens
acaaacccccaagagagggaacgggaagaagcggaggacgcagcacaacaccgggcagcacccacggc

SEQ ID NO: 61384 - RNA, 68 nt, Homo sapiens
cccggccagcgacgcaccgagaaaggaaggaaaaccgacgaagccaaagcagacccccaagcgagcgg

SEQ ID NO: 61385 - RNA, 73 nt, Homo sapiens
caacaaaacgaggacgggacaagccgggccagaacaggcgaaaaaaggggggagaacaagcaaacgcagcaaa

SEQ ID NO: 61386 - RNA, 70 nt, Homo sapiens
cacacagaaagaggagcaacgcagaacgggccagaaaaaggaagccggacaagggcccaggcccagggcc

SEQ ID NO: 61387 - RNA, 63 nt, Homo sapiens
gacacaaggagggggcagagcgagggcaaacaggcggacgggccccgaagcccaaggggagac

SEQ ID NO: 61388 - RNA, 77 nt, Homo sapiens
aaagcagaccacaggggagggagcagagccgcaagggccaaagcccaagaacgagggagacccaaaggagaaaggag

SEQ ID NO: 61389 - RNA, 71 nt, Homo sapiens
cgcacgcggggcagcccgaggcgcaccaggcagacccgcagaccaacgaaaaccacggcgccacgaagagg

SEQ ID NO: 61390 - RNA, 76 nt, Homo sapiens
acacaggggcgagggaaggacaacggaaacacgcaccgccggccaggaggagagcgcaccaccaaaaaggcaaaca

SEQ ID NO: 61391 - RNA, 75 nt, Homo sapiens
cccagcacaggcaacaagacacgaaacaggccagagaaggaagccagccacggcagggagccacgcacacacgcc

SEQ ID NO: 61392 - RNA, 72 nt, Homo sapiens
cggggcgagagcgccaaagacccccggggccgccccgggggcccagacaacgaccgaagaaagaagagaacc

SEQ ID NO: 61393 - RNA, 75 nt, Homo sapiens
cccagcccccaagagcgggaacaggagacaaacgggagccgagccacaggagaacaccagagcccgagccggcgg

SEQ ID NO: 61394 - RNA, 75 nt, Homo sapiens
gggggccaggaggggagaggaggcaggcccgcgccgaagcgcccaacagccaaacggaacgcgacgcggccaggc

SEQ ID NO: 61395 - RNA, 55 nt, Homo sapiens
gggccgacacaagcccgcagggcggagaacggaaaagcaccaggaagcagagagg

SEQ ID NO: 61396 - RNA, 66 nt, Homo sapiens
cagagcaccagaggaacagcagggcaagaccagccacaggaaagcaggggcgggaagaagcccgcc

SEQ ID NO: 61397 - RNA, 96 nt, Homo sapiens
ggcaggacgcgcggaggaaacacccaggacacggccacaacaccaagagaggaccacccgcacccaggggacgcacggcccaaccccgagcaagga

SEQ ID NO: 61398 - RNA, 55 nt, Homo sapiens
agaggggcaccagagccaggaggccaacccgaccggacgcccgccggcccccaaa

SEQ ID NO: 61399 - RNA, 81 nt, Homo sapiens
cgccgcgcaccgcccgccccgcaccgacaagccgagaccaccaggagcagagcggaggcaaccagccaaaacaacggaaaa

SEQ ID NO: 61400 - RNA, 79 nt, Homo sapiens
cccccgccaaggcgacccccaccgagacgaagcgggcggcgaagagaaggacgaaccagaagcaaaccgcagccagacc

SEQ ID NO: 61401 - RNA, 72 nt, Homo sapiens
agcccagcaaacccacgcaccccgggcgagagcaagacacagaaagaacgaggaaccccagagaggacagaa

SEQ ID NO: 61402 - RNA, 81 nt, Homo sapiens
aggcaggaaaagacaggaacagcaagccaccaaagcaaggccccgccccagacgccgaccaggcgagaacagggacacgaa

SEQ ID NO: 61403 - RNA, 80 nt, Homo sapiens
cggaaagggaacccgacaagaccaagacacccaaggagaaagacagcaaagaaaaggagaagaaaggaaaaaaacaaccc

SEQ ID NO: 61404 - RNA, 85 nt, Homo sapiens
ggagacagagcgaacgcaccacacaccgggaacgggaggggagaacgaaggaccagacccgcgcaaggacccacgaacagcagca

SEQ ID NO: 61405 - RNA, 63 nt, Homo sapiens
aaagaccaaagccacagccaagagcccacggacaccacccaacgggaccgacagcaagaaaag

SEQ ID NO: 61406 - RNA, 72 nt, Homo sapiens
caggcagagacagagaagaaacgcccgggccaaggaaagcggagggagccccagaggacggccacagccaga

SEQ ID NO: 61407 - RNA, 73 nt, Homo sapiens
cccgaagcagaccaccgacagcaccccagcacccgaggaggccgcgaggcacagaagaccgggagacgcagga

SEQ ID NO: 61408 - RNA, 81 nt, Homo sapiens
gggccaaaggccggccagaagacgcgagagcaccgaagacggcaagcacggccacgccaagccccgcgggacaacagagac

SEQ ID NO: 61409 - RNA, 79 nt, Homo sapiens
cccgaggcggcgagagaggcaggcggagccgaccgggccagacgcaggaagcaggagcacaacacaggcagcccgaagc

SEQ ID NO: 61410 - RNA, 50 nt, Homo sapiens
agggagaggagcagaggaagcaaaagcagcgcaagacaaacccaagagag

SEQ ID NO: 61411 - RNA, 75 nt, Homo sapiens
gagaagcaaagacagggacaggacagcgagcgaggacgaggaacggcgaagacgaccccgacgcaggccaggagc

SEQ ID NO: 61412 - RNA, 54 nt, Homo sapiens
cgcggccccagccacaccaagcaggcgcagaaagaagcacaaaacagggcacaa

SEQ ID NO: 61413 - RNA, 74 nt, Homo sapiens
cagcggccaacagcaccacagcaacccggacagccagaagaaagagagaccagaggagaagagaagggcggccg

SEQ ID NO: 61414 - RNA, 86 nt, Homo sapiens
cagacaaggagccaggaccccggaccagcagcccgagcgggaagaagccgcagcaagccgcagcggcgcgcaccgggcggcccagg

SEQ ID NO: 61415 - RNA, 79 nt, Homo sapiens
cggcgaccgcgccaggccggccacacggaggcgggccagggccagcgcgggggacgaccaggcccggccaacgcaacag

SEQ ID NO: 61416 - RNA, 67 nt, Homo sapiens
gcgggcagaggcagcgcgagagaaggcacggagcaagggggggcgagccgacggggcaagccaccag

SEQ ID NO: 61417 - RNA, 76 nt, Homo sapiens
agaggaagggacggaagccccaaggacaggacaacagaaaaacacacacagggggaagaacgagaaaaacaaggga

SEQ ID NO: 61418 - RNA, 71 nt, Homo sapiens
acacgaggaaaaaaggacacggagagaagccgaaggaagccaagggccaagccgcccgccaaccggcagcg

SEQ ID NO: 61419 - RNA, 78 nt, Homo sapiens
gccgccccggccaggacgcgggagcgccgcgggaagggcggggagcggagccaggccccgaggggcgcacccaacgcg

SEQ ID NO: 61420 - RNA, 78 nt, Homo sapiens
agcgggacagcgcggcggggagcgacgaaaaaagaggcgaccgagcggaagcagaggaaacccgcccagcccgcagcc

SEQ ID NO: 61421 - RNA, 60 nt, Homo sapiens
aagaagaagagcaaagggcccgcagggcggaccgaggagggcggacacacccaggaggag

SEQ ID NO: 61422 - RNA, 76 nt, Homo sapiens
gcaaacggcccaccgccccgggggagagcgggaagaacaacgcaccccgaaagcgccacgaaaaggaaaggaacag

SEQ ID NO: 61423 - RNA, 78 nt, Homo sapiens
ccagccaaacccagcacggaggcgaggcgggcagacacgagacaggagcgagaccagccgaaccagaggcagcagacc

SEQ ID NO: 61424 - RNA, 52 nt, Homo sapiens
accaagaaccaggcaagagagagaagaagccggcagcccggcccaggccgag

SEQ ID NO: 61425 - RNA, 61 nt, Homo sapiens
aaagccacgccacaaccggacaggcagcaagacaacaggcacaaagagagaaggaacaccc

SEQ ID NO: 61426 - RNA, 83 nt, Homo sapiens
ggcggagggcggcaaccggaacaacgacacagaagagacgcaggccgggggcagcgccacacggaggaggaccaggccaaggg

SEQ ID NO: 61427 - RNA, 68 nt, Homo sapiens
gaggagaccaacgcccaaacccaagagaaaagcaaaagcgaggaaaggccgcgggaacgggaccaaaa

SEQ ID NO: 61428 - RNA, 75 nt, Homo sapiens
ggaagaagccacgccagagcgaaggccgcacacagcaacgaaaaggggagggcagggaggccaccagggcggagg

SEQ ID NO: 61429 - RNA, 80 nt, Homo sapiens
aaagcccgggccggcagcccggccggcccgccgcggccacagccccccgcaaagcagaggcaaaagcagaccggaaaacc

SEQ ID NO: 61430 - RNA, 72 nt, Homo sapiens
ccgcaccacaggcgaaacagacagaaaagccaagaaaacggagcgcaaaaagggaacgcgaagggaagaaaa

SEQ ID NO: 61431 - RNA, 86 nt, Homo sapiens
ccagcggccgcgcacccccggccggaggcaccagcgcccgagagagaaagggaaagaaggagcggagcagaacaaggacccccagc

SEQ ID NO: 61432 - RNA, 54 nt, Homo sapiens
cccacacgacagggacgcccagcccgccgggaagaccacgcagcggagcaggcc

SEQ ID NO: 61433 - RNA, 103 nt, Homo sapiens
gagcggccgacaagaggcggacggggagcgaacgggacagcccacacccggcgcggagggggccagaagagaccaagaggaccccagaccaagaaggaaaccg

SEQ ID NO: 61434 - RNA, 73 nt, Homo sapiens
cacccaagaggagccccggggaacccgcagcacaccagggggcaggcccgggcgcccaggaaagccaagcagg

SEQ ID NO: 61435 - RNA, 78 nt, Homo sapiens
cggcaggaaccaccaggacagacacggagcccagggagagcgacgccagggccaagacacagaggcggagacccccaa

SEQ ID NO: 61436 - RNA, 70 nt, Homo sapiens
cgaaagcggcgccaagggaaagcccgaaaaggaccagcgaagcaagcacagggaggaaacaggccaaaga

SEQ ID NO: 61437 - RNA, 84 nt, Homo sapiens
gcagccgcaccggccaaggcgagaggcccggccagagaccgccgggggagcaaggcgaccgggcgcgcccgaaggggccgccgc

SEQ ID NO: 61438 - RNA, 85 nt, Homo sapiens
aaacagggaacccaagccgggggaaaggaggagaaccccgcgaaacgagaggaggagcggcgcagagagagagagaagagaggag

SEQ ID NO: 61439 - RNA, 75 nt, Homo sapiens
gcacgcacagacagcgcgaccagagacggaggagaagacagaggagccagaccaagagacagcacaggcgagcga

SEQ ID NO: 61440 - RNA, 77 nt, Homo sapiens
agagcgccgggacagggggaggaaagcaccgaggcacaacaggcggagcaggagcaaaggagcaagaaaccagaccc

SEQ ID NO: 61441 - RNA, 75 nt, Homo sapiens
gcggcgagaggacacgaaacagagacccggaagcggcagcggggaggacaggaaccgcgggacggagagccgggg

SEQ ID NO: 61442 - RNA, 80 nt, Homo sapiens
gaagagcagcaggccgggaccacaaaaggcacgaagagagaaagaaggcggagcagacacgcaaggaagagacagaggag

SEQ ID NO: 61443 - RNA, 77 nt, Homo sapiens
ccgagagcaagacacaggagccgccaggccggccgggagaaggcaagcccgcgaaggaggcagcggcggggcccggg

SEQ ID NO: 61444 - RNA, 69 nt, Homo sapiens
gcaaggcacaagagcccgagcgaagagaggaaggacaggacaagccaaggcgccagagcccgaagaaga

SEQ ID NO: 61445 - RNA, 57 nt, Homo sapiens
ggaggcgaaagcggaacgaggaccaaggggcgaggcggccacgaggcaagagacgcc

SEQ ID NO: 61446 - RNA, 76 nt, Homo sapiens
gccgccacccaggccacggccggagccggcccgcgccggcaggcgcgggacaacgggcgcgaaccccggagcccga

SEQ ID NO: 61447 - RNA, 67 nt, Homo sapiens
ggaagccagagggccagggaagagggcaaaaggagcccgaaggacgacaaaacagaaaggccaccga

SEQ ID NO: 61448 - RNA, 74 nt, Homo sapiens
acagccgccacacaaagagccagaagaccagcaaggaaaagcgaaacggccagagaaagacaagcacgagaccc

SEQ ID NO: 61449 - RNA, 73 nt, Homo sapiens
agcgcccaggaaggagccaaagcacaagaagaagacgagaccacccaacacacaacggcccagccaaacaagc

SEQ ID NO: 61450 - RNA, 58 nt, Homo sapiens
gaaagaaccaagaacagagcccggggaccaaaggaaggggaaagaaccagacgacagg

SEQ ID NO: 61451 - RNA, 52 nt, Homo sapiens
ccacaagcagggaggcggcgcaaacagaagaacagaagaacccacagcgccg

SEQ ID NO: 61452 - RNA, 75 nt, Homo sapiens
cgagaggcacacccgacgcccgaccaccacggcacgcggcccaacagaaggcaccacggagggacccaccgagaa

SEQ ID NO: 61453 - RNA, 62 nt, Homo sapiens
gagcaagcgaccgaggcaccgaagcccgccccagcacgcgagcgaagaaacacaaacggaaa

SEQ ID NO: 61454 - RNA, 74 nt, Homo sapiens
gggcaacacccgacaaagggacagaaaccaagcaaaaaaggcccgaacccagaaccgaagacaaggccaaaaga

SEQ ID NO: 61455 - RNA, 76 nt, Homo sapiens
ggaaagccaccccgagccgacaagaaggacaaagagacaagccgagagaaagcaagcaaagcgcccgaagagcgga

SEQ ID NO: 61456 - RNA, 42 nt, Homo sapiens
gccggcacacacaaaaggagggagcaccaggcccacgagccc

SEQ ID NO: 61457 - RNA, 71 nt, Homo sapiens
acaaggcacaccccagcgccaaagcagcccaacacgaagaccgccagaacaggcagcaagacaccaaaaag

SEQ ID NO: 61458 - RNA, 77 nt, Homo sapiens
cggcacgagcccgaccaggagccggcacaaaccgagccggcagagaccaggaggagaaagccacagcggagacagag

SEQ ID NO: 61459 - RNA, 81 nt, Homo sapiens
ccaggagacgggcgcggcaagcacggccccgggcgggagacggaacccacagcagagagaccgaaaggcccaaccgacagc

SEQ ID NO: 61460 - RNA, 56 nt, Homo sapiens
agaggagggaggaaaacaaccgagggcagaggcaagcaaaaaggccagcccaggcc

SEQ ID NO: 61461 - RNA, 82 nt, Homo sapiens
gcagaagccgggccggggcagcggcacaacccgggagagagacacgaaaacccaacggggaaggacaccacacagaaaccag

SEQ ID NO: 61462 - RNA, 57 nt, Homo sapiens
ggcgaaggcgcaccaagagaaggagcggcagcaacagagaggccaagagacgaaccc

SEQ ID NO: 61463 - RNA, 81 nt, Homo sapiens
ggaagcggagagcaacagcgcgccgccccgcccggaggaccagccagcacccccagccccggcacacccccagacgagcgg

SEQ ID NO: 61464 - RNA, 69 nt, Homo sapiens
gggaggaggaagaggcggcgggggcgagaggcacacccagaagccacaggagaagcaagaggcggcccc

SEQ ID NO: 61465 - RNA, 91 nt, Homo sapiens
ggggcagcagacaagcggcagaaggagcgacagagacggagcggagaacacgagcgggcaccgggaaccgcgaacgcgcagagaaaggaca

SEQ ID NO: 61466 - RNA, 78 nt, Homo sapiens
gaacgcacgagaagcacaccacgagaggaggggaaggaaccagcacacgcccgccccacgacggaggcaggcccgcca

SEQ ID NO: 61467 - RNA, 110 nt, Homo sapiens
aaggcgaagacacagcaacccaaaacacagggacgcaaaagaaagcccagagggcgcgggagagcagccggacccagaccagggagcccaggaggaggaaggaacccgag

SEQ ID NO: 61468 - RNA, 61 nt, Homo sapiens
cagcccacccacaccccagaacaccccgcagaaaggccggcacagcaagacagccgaccag

SEQ ID NO: 61469 - RNA, 81 nt, Homo sapiens
cgcggcgagggcagcgccggccgcggcaagagcgcaaaacggacccccacaaaacgggagggacaggagaacaggcacgac

SEQ ID NO: 61470 - RNA, 70 nt, Homo sapiens
aaaagccggcagagaacggccccgaagggcaaaaaaacagcacagcagagaacggagcagccgacaaaga

SEQ ID NO: 61471 - RNA, 81 nt, Homo sapiens
cgcgccgcggagcggcgccgacaaggaacccgagcgcagaggggaagcagaggacccaggcgaacagcaaggaggggacaa

SEQ ID NO: 61472 - RNA, 72 nt, Homo sapiens
ggggcgcggcccacgaggcaggggcgaccgcccgccccacccccaaaaagcacaaggaccgaggaaccacgc

SEQ ID NO: 61473 - RNA, 76 nt, Homo sapiens
agcagcagagagccgcccccccggagccgagagaggccggcccccacccaagaacaccaaaccccccggaaagaag

SEQ ID NO: 61474 - RNA, 76 nt, Homo sapiens
acaaccaaaccgggcagccacccgaggaaaccagaaacaaaacgagcagcccacacacgagggcccaaaacacgga

SEQ ID NO: 61475 - RNA, 79 nt, Homo sapiens
gaccagaaaaacaggcccgacccgaccccaaaagagacggacgcacaggaaggaaaaaggaaaggaccaacgggccagg

SEQ ID NO: 61476 - RNA, 71 nt, Homo sapiens
ccagccgcagcgcgccgcccgagaaggacgaagagaaaaaccaccgcacagcgcgagaagagggggcgaag

SEQ ID NO: 61477 - RNA, 70 nt, Homo sapiens
gcacggacggcacagcccgccgaacccgaaaggagaaaaggcgacggcggagacagaagagaggagagcc

SEQ ID NO: 61478 - RNA, 95 nt, Homo sapiens
gaccgagagcgcgaaacgcacgagaaggaccgaggagacgagcccgccgcagaccccggaacacggcaccgcgaggaaaacaacggaaaggaaag

SEQ ID NO: 61479 - RNA, 57 nt, Homo sapiens
gccggaccaagcccagccccagccgccagcggacaccggagaccgaagaacggaagc

SEQ ID NO: 61480 - RNA, 52 nt, Homo sapiens
agcggaggcggacgcgcaggcgcgaggacgcagaaggacccacagaagccca

SEQ ID NO: 61481 - RNA, 71 nt, Homo sapiens
cgaagacgcgggggccgccccccgcccccgaaggagaacacacagcagagccacgggacccacaccgcgga

SEQ ID NO: 61482 - RNA, 81 nt, Homo sapiens
acggcagagcaaagccaagaaagaaggcaggcaggaagagaaagacagcaaagaaaaggagaagaaaggaaaaaaacaacc

SEQ ID NO: 61483 - RNA, 75 nt, Homo sapiens
ggagcggagccggccgacgcgggcgcgagggcagaaccggaccccgggcacagaaaaggggaacgaggagaggcg

SEQ ID NO: 61484 - RNA, 75 nt, Homo sapiens
gagaccagcagagaaacaggcccagaacaccacaggcgcagggccacgccaggcggggccagggggcgacggcga

SEQ ID NO: 61485 - RNA, 73 nt, Homo sapiens
aagaaaagcggagcaggaaagaggcgaacacaaagaaaggcggaacccaggcaggcccgccgcaacgccccaa

SEQ ID NO: 61486 - RNA, 87 nt, Homo sapiens
aagagcgagccagcgcccggagcaagcggagccccccaagagccggaaaggcgacaccccaagagggccgccaccacgaggagcaac

SEQ ID NO: 61487 - RNA, 74 nt, Homo sapiens
aaccagagaccacagaaggacgggagaacaccccacagggaagaggaaccaagacaggcgcccagggcacaaag

SEQ ID NO: 61488 - RNA, 81 nt, Homo sapiens
agaagagcccaaaaccaacgaaccaaaagcaaccgcgaagagcagccagaacaccaacgccacacacgggaccaccacacg

SEQ ID NO: 61489 - RNA, 79 nt, Homo sapiens
aaagagagcgggggcagcgacagagccaaaacagagcggaaccgaggagagagggagcggaaccccacgcggcgcagca

SEQ ID NO: 61490 - RNA, 54 nt, Homo sapiens
gcaacaccaaaaacaaaacgaaccaggacggcaaagcagaagaaaaggaaagaa

SEQ ID NO: 61491 - RNA, 79 nt, Homo sapiens
gagagagcaggccggaccccagccccgacaagggaccgggcgggccccgcaggaaacccccaccggcccacacagacgc

SEQ ID NO: 61492 - RNA, 69 nt, Homo sapiens
cggccgaaacagaaaacaagagaccacagaaggccggagcgcgaagacgcagggaaagcggcacacgaa

SEQ ID NO: 61493 - RNA, 75 nt, Homo sapiens
gaccagagacacgccaagcagccagcccaggagaggcaggaaaaggaagagcaaaaacaaaaacccagcagacaa

SEQ ID NO: 61494 - RNA, 66 nt, Homo sapiens
gcacgggggcggagcccaccaaagacaacagaccggcacgcgccggcccgagccgccggcgagaga

SEQ ID NO: 61495 - RNA, 62 nt, Homo sapiens
cgggaaaagggcacgaggccggaaccgcccagccccgggcaccaagaggcccagcccggcca

SEQ ID NO: 61496 - RNA, 79 nt, Homo sapiens
gaggggggcccgggcggcccgggccccggaacgacgcgcgcaggaggagccaagcgggaaaaggggcaccgacgcacca

SEQ ID NO: 61497 - RNA, 66 nt, Homo sapiens
cggaagaaggaaccccgaagaggccacgaacgacgcacggaggccacaacaccacaccacacaaga

SEQ ID NO: 61498 - RNA, 73 nt, Homo sapiens
gaaaaggccaagaaggcagggcaggagaaacccagcgggcccagagacgcagcgggaaaaccaaggcaagcca

SEQ ID NO: 61499 - RNA, 78 nt, Homo sapiens
cgcgggccggcccggcacaggggcaccgagaagacgccaaagcgccgccaccgcaacaccgcccagcgccaggagaca

SEQ ID NO: 61500 - RNA, 85 nt, Homo sapiens
gaacagcaacagagaaccaaaccaaaaccacaggcacaaagacagggcacggggagaaggcgagcagaccacggaaccgacacag

SEQ ID NO: 61501 - RNA, 74 nt, Homo sapiens
ggccaccgccacgggccgagacacgcagcggcggccagggaccagagagagacgacagggagaggagaagagag

SEQ ID NO: 61502 - RNA, 59 nt, Homo sapiens
ggaagccggaagaagacaaagcgccgcgaaacacaacgggcaaggggagcgcagcaagc

SEQ ID NO: 61503 - RNA, 94 nt, Homo sapiens
gcccccaaagaaggcagggagccccccagaagcacaaaagaccggcaagcaggcgccccggcaaggccaccgcagaagccacaggagaccggag

SEQ ID NO: 61504 - RNA, 73 nt, Homo sapiens
gcccagcacaggacccggcccagcccaagcgaaagggaccagaggcccacagcggggagagcaggcccaagac

SEQ ID NO: 61505 - RNA, 90 nt, Homo sapiens
ggccaggcgacgcgaggaaggaacaagggaaccgagcgagcagagcaaacgagacggaagaaaaaaccgacggcccgaaccacagccaac

SEQ ID NO: 61506 - RNA, 79 nt, Homo sapiens
gacgcaacggcggcgggagcagaacgccccccagcccgagcgcgcccgagggcgagaaacccacagcggggccgggccc

SEQ ID NO: 61507 - RNA, 78 nt, Homo sapiens
cggaagaaggagaggcagagaacacaaagggaagagacccccgacgacagagaagagccgcagggacagagcggacac

SEQ ID NO: 61508 - RNA, 64 nt, Homo sapiens
ccgaaaacccccaccaacccgccgagccagggaaaaaccaccagaccccaaccccggggccccg

SEQ ID NO: 61509 - RNA, 73 nt, Homo sapiens
gcgcgagaccgcccggacggcgaagcgcgcgggcgggaaggggaagcaggccaacccagaacacaccccagcg

SEQ ID NO: 61510 - RNA, 61 nt, Homo sapiens
cccccaggaccccccaggcgagccgcaggccccggagagcgcagcgagcggcccgggaggg

SEQ ID NO: 61511 - RNA, 75 nt, Homo sapiens
agcggccaccacacggacagggaggccgcacagaggaggagcaccaaaccgagggagggcagccacaccacaaca

SEQ ID NO: 61512 - RNA, 58 nt, Homo sapiens
aaaacagagcggaggaaaagaaggcacggaagaagcaggagaagcaagaagaaggacc

SEQ ID NO: 61513 - RNA, 64 nt, Homo sapiens
cccggaaggacggcgagggcaacacccgaaaaacgggaagagagagggcgaacaacacagaagc

SEQ ID NO: 61514 - RNA, 72 nt, Homo sapiens
gagcagggggggggggaagccgcagcggaaagcaggagcacagaacagaaagccgagggaacaaaacccagc

SEQ ID NO: 61515 - RNA, 69 nt, Homo sapiens
cccgagagcggcagggggaggccagggacgcaaggccacaccaccacaggaggcaagaaccgcacccac

SEQ ID NO: 61516 - RNA, 77 nt, Homo sapiens
ggaacgagccggccggagcccccgcccaaggagaagcgcccaagcggacgcggccaagaagaaaaagcgggaagaac

SEQ ID NO: 61517 - RNA, 122 nt, Homo sapiens
aggaagacccccgccaaaaggaaagcacagcagaaacacaaagcagcccaaccaaagggggaagcagcagagcgcgacaggggaagagccccagaggcaaagggcgagaacaccgaggccaa

SEQ ID NO: 61518 - RNA, 74 nt, Homo sapiens
ggcggcagcgggccagacccaggaccgcgacacgaagcaagaccagagagcaaagggagaggaaaaacaaagaa

SEQ ID NO: 61519 - RNA, 50 nt, Homo sapiens
acgcaaacaacagcgggcgagaggacagccgacggaccagagcgagcgcc

SEQ ID NO: 61520 - RNA, 70 nt, Homo sapiens
ccgaagcaaaagcacaaccgagaagacggaaccaaagccgaccccgaaacagggagcacaacagagacgg

SEQ ID NO: 61521 - RNA, 76 nt, Homo sapiens
aagaagaccgccacgccggagccaccggagccacggagagccgccgaggagcggcacagggcacacgacggaccca

SEQ ID NO: 61522 - RNA, 75 nt, Homo sapiens
agcagcaaaaagaacacaaaggacagacagagagagcccagaagaacaggcggcgggcagagcgaggcagaaaga

SEQ ID NO: 61523 - RNA, 75 nt, Homo sapiens
gaagaggccgccaacacacgcaaagcagagaaagaaacaacgaacgagcaaggaagggccaaggcagaccccaca

SEQ ID NO: 61524 - RNA, 66 nt, Homo sapiens
gggaagaagccggagccgccgcaagccacacgacacgcagcggccgaggcaggggaagagagcggc

SEQ ID NO: 61525 - RNA, 43 nt, Homo sapiens
cggggaggcgccgacggaggggccagggaagagaccgggagcc

SEQ ID NO: 61526 - RNA, 74 nt, Homo sapiens
agcgcagcagcacaggcgagcccccgggccgggccccacacaccgcccagggagcaaagcagacagcgacaaga

SEQ ID NO: 61527 - RNA, 59 nt, Homo sapiens
ggacaagaacagaagacgccaagacgcgcgcagagagcgggagcagaaagaccagcgac

SEQ ID NO: 61528 - RNA, 78 nt, Homo sapiens
ggacagcaaaaaccagggcccacagaggagagggccccaggcgcccgaccccaggaggggaccccacgccgaccaccc

SEQ ID NO: 61529 - RNA, 79 nt, Homo sapiens
gccgagagccgggggagcggggccccacacccccccgggggggacacccaaaggacggcgggaagagggggcagaagga

SEQ ID NO: 61530 - RNA, 82 nt, Homo sapiens
cccagccccagcgacaaacgaccccaaggggccgggccagggccccgcaaaacaccccacgcccgccccacccccaagggac

SEQ ID NO: 61531 - RNA, 78 nt, Homo sapiens
aaagaaccaagagacaagaggcacgccagccagggacaggaacgcaggcaccgagacgccacacacggagcggcacag

SEQ ID NO: 61532 - RNA, 56 nt, Homo sapiens
cggcagcgacgcacaaacgcccccggaaaagggacgaagccacgacagcagagagg

SEQ ID NO: 61533 - RNA, 56 nt, Homo sapiens
aaacaggaaaacagacagaggagacaggcaagacaacgaacgaaggagacacacaa

SEQ ID NO: 61534 - RNA, 86 nt, Homo sapiens
gccaagccaggaacagccaacagcccgcgcacccacgacgcgcacaaagcaggagcaccgaggccaaggagaacgacgacaggcgg

SEQ ID NO: 61535 - RNA, 87 nt, Homo sapiens
cccgggccagcccgcgcagcagcagcgccgggccgcgcgcaggcacccgccggcccaccaccccagaggcgaaggggagcaagggag

SEQ ID NO: 61536 - RNA, 69 nt, Homo sapiens
gacccgaagggagcaagaagccaggaggcaacggcaaagaacggaaggggcagcaaacaacagccaacc

SEQ ID NO: 61537 - RNA, 75 nt, Homo sapiens
accaggcgggcaagagcaccgggacccacgcgaccccggggccacccaagaaagcaaggcaaaccagggggccac

SEQ ID NO: 61538 - RNA, 78 nt, Homo sapiens
agagaacagggcagaggaaaagcaagaagacgaggagcaggcgcaaaaaagagaaggaagaccaaagaaaaacacaaa

SEQ ID NO: 61539 - RNA, 71 nt, Homo sapiens
acagcaaacacagaccagagagaagacagcaaaacgccccagacaaagagagaagcggggaagaaagcaaa

SEQ ID NO: 61540 - RNA, 42 nt, Homo sapiens
cgacgagcgaagagcaagggcccggccaggccccaccgccac

SEQ ID NO: 61541 - RNA, 68 nt, Homo sapiens
caaagaaaccccggacgcaaaggcagcccccccacccaccacaggacccaccgcggcgagggccgccc

SEQ ID NO: 61542 - RNA, 59 nt, Homo sapiens
gagagggaaaaaaaaaccaagaccccagaggagccagggcagcgccgcagcacacaccc

SEQ ID NO: 61543 - RNA, 61 nt, Homo sapiens
gcgcagcggcgcccgcagccgcagcccccgcccggaggcgggcaggaggcacaggaggaag

SEQ ID NO: 61544 - RNA, 76 nt, Homo sapiens
cgaggacgaaggggagcgggaggagcgggggccgccggcggcccggccagggcgccacccccgcgaaaaggcgagg

SEQ ID NO: 61545 - RNA, 75 nt, Homo sapiens
ccgcggccggcggcggcggcgggccgggcgcggcaccccggacacggcaagggcagaaaaagaagcaacagaagg

SEQ ID NO: 61546 - RNA, 74 nt, Homo sapiens
ggagggcacggggaccaaacgcggaacgacaaccggccgaacccagggcagaccgccaaccagcaccaggaccg

SEQ ID NO: 61547 - RNA, 49 nt, Homo sapiens
gccggaagaaccgcagccgagcggggccggccacaggcaacggcgaagc

SEQ ID NO: 61548 - RNA, 77 nt, Homo sapiens
gagcccgggagcgacccgcgcaaacaaacagcgccgaacaaagcaagaagcgccgggggagaccaagggaaaaagca

SEQ ID NO: 61549 - RNA, 64 nt, Homo sapiens
gaaaaaaggaaagagacaggggcagcaggggacacacaggaagacgaacacggaacgggcgaga

SEQ ID NO: 61550 - RNA, 78 nt, Homo sapiens
gccccggggcgcggcggagggcgaggcggcgcggccaggccaccccggggagccaaccaggagaggaaccgcacccaa

SEQ ID NO: 61551 - RNA, 76 nt, Homo sapiens
gcccgagcagacgaaaggaaacaaaacgccggaagaaggaccggacagcagagcagcacaggcagagaccgggaga

SEQ ID NO: 61552 - RNA, 74 nt, Homo sapiens
cccgagaacaccaggagacacaaggcagcagagggaaaccggacaaaagagcggacacccagaaagaagcgaga

SEQ ID NO: 61553 - RNA, 76 nt, Homo sapiens
aaccggcacggcccggccccgcccggcgccgaggacccccgacaagcagaccggaagaccgacggaagaccacacc

SEQ ID NO: 61554 - RNA, 80 nt, Homo sapiens
ccgggggcaccgccccgggcgccacgagccacaggcaggaagagaaccgagagcaccaacagaaagaagcagaaaggagc

SEQ ID NO: 61555 - RNA, 78 nt, Homo sapiens
ccaccaaccccagcggggaaaacaaaggccaaacacacaggaacgccagaccccagccgagggaggcaacagcaaagg

SEQ ID NO: 61556 - RNA, 79 nt, Homo sapiens
cgcagggccgaggagacaggagaaggaggagaggagacacaggacagacaggcccaagagcgagaaagaggcaacacaa

SEQ ID NO: 61557 - RNA, 90 nt, Homo sapiens
cgcagcccgcacccccccgcccgaccgcgagcgccgcccgggcagcgaagccgcccccccgggcgaaggggagcaagggagaaaagcaaa

SEQ ID NO: 61558 - RNA, 74 nt, Homo sapiens
acgacaccaaggaaaggcgcaccaaggaacacgacgccgccgacggcccgcacagggagggcacagcaagccca

SEQ ID NO: 61559 - RNA, 71 nt, Homo sapiens
ggccggaaacaggcggaggcgggaccaaacacaaggaagcgaaagggggcagacagaagagagacgagcaa

SEQ ID NO: 61560 - RNA, 75 nt, Homo sapiens
gccggggacgcccgggagaggccgcggcggccaggccccagacacagacgagcaggggaagagcgcaggcccagg

SEQ ID NO: 61561 - RNA, 81 nt, Homo sapiens
cgcagacccagcagccaagagggaagcagacgagagcaaggcggcaaagacgcaacaacagcgagcaagagaggaacgcga

SEQ ID NO: 61562 - RNA, 73 nt, Homo sapiens
aaggcagaccacagcgcaagacgaaaaaccacaaaagagaccaggcacaggaggagcacaaagcaaggaggag

SEQ ID NO: 61563 - RNA, 76 nt, Homo sapiens
ggaccggacgggcgccggggcaagagagaaggagcacgagcagggagaacacaaaacaggccaaaagggcagaaaa

SEQ ID NO: 61564 - RNA, 76 nt, Homo sapiens
cagaagacaaggcgcacacacaagaaaggcaacaaaaccacgcagcgcagaaccggccgaaaagcacaaacagcaa

SEQ ID NO: 61565 - RNA, 75 nt, Homo sapiens
aaaaagaagacgggacacacagaaaaaaacccaagagcaagaaaggaagagaggaaagaggagagaacagaacag

SEQ ID NO: 61566 - RNA, 38 nt, Homo sapiens
aaggaggaaacagaaacagagaacacccgcagggggac

SEQ ID NO: 61567 - RNA, 71 nt, Homo sapiens
ccggcgggagagagagcgcccagaaagccagaaggaagaggccacagggaaggccgacgagacagaagggc

SEQ ID NO: 61568 - RNA, 69 nt, Homo sapiens
aagggacaggaaacagaagagggacaacgcgggcccaacgaaagaaccagaagaaaaagaccggcgcaa

SEQ ID NO: 61569 - RNA, 96 nt, Homo sapiens
gagaaggaggggagagccacacaccccgaccacgcggccgagagaagacgaccccgacgcaggccaggagccgcggacagaagccgagcacggccg

SEQ ID NO: 61570 - RNA, 80 nt, Homo sapiens
cggcgccccggcccccgccccagcccgccggcggcggcgggacagaccacacgcggacaccaaggcgccaggcgagggga

SEQ ID NO: 61571 - RNA, 71 nt, Homo sapiens
gagcacagagcgagaccaggaaagaagggggcagaagagggaaaacaccgggaaaggcccaaaccggcgaa

SEQ ID NO: 61572 - RNA, 35 nt, Homo sapiens
ccccgagagcgggacacagcacagggaccagcagc

SEQ ID NO: 61573 - RNA, 41 nt, Homo sapiens
gcccccagcgcagcggccgcggacaggggaacccaccagcc

SEQ ID NO: 61574 - RNA, 83 nt, Homo sapiens
cgagggagaagaccaccacaacaagagacaacaccgcgcggaccacaaaccgcgccagaaaagaaagaggaggaggaagaaag

SEQ ID NO: 61575 - RNA, 62 nt, Homo sapiens
caccgagggggccaccacacccagcgacgagggcaacccgagagcagaaaaaccccccaccg

SEQ ID NO: 61576 - RNA, 77 nt, Homo sapiens
gggcgcccgccgggacgccgaccgccgggacgagaagggcacggcagaacgacgagaccccagggggcacggcaacc

SEQ ID NO: 61577 - RNA, 59 nt, Homo sapiens
cgccaggcacacgcggccgcccggccgggaaccaagaagcagaccccacgagcgaaagg

SEQ ID NO: 61578 - RNA, 63 nt, Homo sapiens
gaaggaccaagaaccaggagaacggaaaaagcccagaaaacgcacaaaaaaaagaagccacgc

SEQ ID NO: 61579 - RNA, 44 nt, Homo sapiens
gacacggccacaacaccaagagagacagggcagggcagcagcac

SEQ ID NO: 61580 - RNA, 65 nt, Homo sapiens
agcaccgacccaaggcaagacagaaaagcaccaaggaccggaagagggcagaggaagaagccaaa

SEQ ID NO: 61581 - RNA, 73 nt, Homo sapiens
cgacgcaggaaaggcaaacggcgggcacggccgagggcagggagcaggagccacggcagaagcggcccacgcc

SEQ ID NO: 61582 - RNA, 70 nt, Homo sapiens
cggaaaccgcaacaaaaacagacacaagcgagaccacacaggagcagacagccagagagggagaagaaac

SEQ ID NO: 61583 - RNA, 71 nt, Homo sapiens
ccacccagcccagcaacgaacagaaggaggagggccaggaaagacgcgcaacaagcagggggggaaaaaag

SEQ ID NO: 61584 - RNA, 69 nt, Homo sapiens
ggaacggaaaaaacaggacagcagaccacagcccggcaggcccaaaaacccaaagggacagaagcaccc

SEQ ID NO: 61585 - RNA, 64 nt, Homo sapiens
acccgagccaggcaacagacagagaagcagacggaaggagggaaaagaaggggggcagaaagaa

SEQ ID NO: 61586 - RNA, 73 nt, Homo sapiens
ggacgaacaaaacgaaggggcaccaccacgaggcgaggggccaaccaaggaggcgaggggccccccgacaacc

SEQ ID NO: 61587 - RNA, 72 nt, Homo sapiens
gccgagccgagaggcaagacaacacacccagaagggacagacaggacgagaggacagaacgaggcaaccagg

SEQ ID NO: 61588 - RNA, 40 nt, Homo sapiens
gaagggagagcgccagagaaggcgaagcaggaggggaagg

SEQ ID NO: 61589 - RNA, 88 nt, Homo sapiens
ccgagcggagcgccgcggcgcagccaggcagcgaaaccaccccagagcaagcacacgggaccaaggagcaaggaccagccacggccca

SEQ ID NO: 61590 - RNA, 65 nt, Homo sapiens
gggcccggaacgggcagcaccgaaagacacaacagcgcaagccgaaaaagaacaggacagggagg

SEQ ID NO: 61591 - RNA, 72 nt, Homo sapiens
gagcacgggagcagcggcccggggacgcaggccggcaggcggcaccaggacgaggagacacagcgaccgacc

SEQ ID NO: 61592 - RNA, 82 nt, Homo sapiens
cagagccaacacgccaacacacgacagcccaacacgagaagaggaggcggggagaccaagcagagccaggagaggagcagcc

SEQ ID NO: 61593 - RNA, 69 nt, Homo sapiens
gggcggaaagggacggcgggagagccagggaacgagcccacgggagccggccccgaaccccggaccaac

SEQ ID NO: 61594 - RNA, 73 nt, Homo sapiens
gcgcggaaggggacccggggacgcggcgagacaggagcagggaaaacggagaccacaagccgccagaacccaa

SEQ ID NO: 61595 - RNA, 78 nt, Homo sapiens
cgggagaccgcaagagaagccacgagagaagaaagaaaaagaaaccgccagcccagagacacgaaagggacagagagg

SEQ ID NO: 61596 - RNA, 57 nt, Homo sapiens
gcagggcgccaaagcgagagagggaagcgcccggccgacagagagccgagcggggca

SEQ ID NO: 61597 - RNA, 65 nt, Homo sapiens
aaaagcaagaaaaagaccagggaaaagacagggccaaacagaagaggagaagcaagaagccccag

SEQ ID NO: 61598 - RNA, 77 nt, Homo sapiens
aggacaaccaccccaggacaggagcagaggagaaccggggcaagagacggcagacaaacacagccgagagaaggcag

SEQ ID NO: 61599 - RNA, 79 nt, Homo sapiens
gcgcccccccgcgccggagagacgagagcgagcgacccagcccgcgagcgagggagcacaacaacagcacgaagcaaag

SEQ ID NO: 61600 - RNA, 92 nt, Homo sapiens
ggaagaaacaaaagagaagccagaaacggaaacagaacaacgcaaaggaagcaaccagcggccccaaaggccacacacaggagacaggaagg

SEQ ID NO: 61601 - RNA, 75 nt, Homo sapiens
ccgcgaccgcagccaaagggacacgcccgagcgccgacgcaggaagccacccagagacacaggagccaggaacac

SEQ ID NO: 61602 - RNA, 74 nt, Homo sapiens
aaacggaaacagagcacccaagagaagagcgagccgcagccgacaaaggaaggagacccaggaagaaagggcga

SEQ ID NO: 61603 - RNA, 71 nt, Homo sapiens
gcaagacggacacaacaaggacagaaaagaagacacggacaacacacaacaggaaggcagcaacgaggccc

SEQ ID NO: 61604 - RNA, 70 nt, Homo sapiens
ggacggaagcgagggcacgggcggcagcccgagaccgcagcaggccacgaacgacgcacggaggccacaa

SEQ ID NO: 61605 - RNA, 78 nt, Homo sapiens
accaaaaggggggcaagcacgcagagacaggccaccccagagaagaggacgagagacaagacaaccaaaagggaaacc

SEQ ID NO: 61606 - RNA, 59 nt, Homo sapiens
cgggcgaagcgacgagccgcgaggaggcgggaaaaccgccacaaagcccccaagccaca

SEQ ID NO: 61607 - RNA, 82 nt, Homo sapiens
aagagacccaaggacaacgcaagggggaagagagagaaacaaaagcgccagagccaagaacgcgaggacgagacagaagagg

SEQ ID NO: 61608 - RNA, 78 nt, Homo sapiens
cgcccgcgggccaccgcagagccccaagaccgggcgagcaggagcgccccccgcagccccggagagcggaggagcgga

SEQ ID NO: 61609 - RNA, 71 nt, Homo sapiens
aacagcaacacaaaaaggacgagacacggggccgcaacgacagaggaggaagaacagaacagaggagacag

SEQ ID NO: 61610 - RNA, 86 nt, Homo sapiens
caacaaccgggcaaccacaacagaccaaaagccccaacagcggcaagaccagcacacagaggccagagcacccagcgcagcagcgg

SEQ ID NO: 61611 - RNA, 75 nt, Homo sapiens
gcgggaacacagcgccgcccccggccaaaggaaccagggccaccgcagaaaggccgagcggagccggagcgaggc

SEQ ID NO: 61612 - RNA, 70 nt, Homo sapiens
cgggagacgggacaaaagcagaagagaagcccagacacgaagaagagagccagagcacaagaaagacacc

SEQ ID NO: 61613 - RNA, 79 nt, Homo sapiens
cagaagcaggagaaccggagaagccccaagacagggagacgcggcggcagcggagacgaaccagcggacaggacgccac

SEQ ID NO: 61614 - RNA, 86 nt, Homo sapiens
ggggcacgcgacgcacagaggaacacgccggggcccaaccacaagacgaccaaaggaggaaggaagaagacaagaggccccagaaa

SEQ ID NO: 61615 - RNA, 81 nt, Homo sapiens
aaaacaggagaccgcggccgaccagagaacagcgggagaaccaccacagacgacgagcagaagagagcggagagcgggaag

SEQ ID NO: 61616 - RNA, 84 nt, Homo sapiens
gcgcagaagacacaggagaggcggagcccgagagacaagggggcccaggcagcacgcccaagacacagccccagcagcccccag

SEQ ID NO: 61617 - RNA, 85 nt, Homo sapiens
ccaggacgaagcaaaaaacaaacccagacccgacagaggaacacgacacggaagaaagacaccccgggcaggccagcagcaccac

SEQ ID NO: 61618 - RNA, 83 nt, Homo sapiens
caaaaagcaaaaagcagacccccagcccccaaagaggcagagacccacggagacaacaagaaacaggagaagggaggccgaaa

SEQ ID NO: 61619 - RNA, 33 nt, Homo sapiens
gccaaccacgcaccgggagcccggagggaaaag

SEQ ID NO: 61620 - RNA, 40 nt, Homo sapiens
aacagccaacaaagagagacagcaccaggcccgaagcaga

SEQ ID NO: 61621 - RNA, 81 nt, Homo sapiens
cggagcacccgacgggggccgggacacaccacacaggcacgagaagagaagcccagagcaaaacaccccaaaccagaccac

SEQ ID NO: 61622 - RNA, 72 nt, Homo sapiens
caaaacagacggacaggaaagaacaggaagaggcacaggaacccccgaacgcaaagccaccgacggacaaga

SEQ ID NO: 61623 - RNA, 65 nt, Homo sapiens
ggaccagcgaccgggcaggagcagaaacgggagaaaggaaagaagaaggcaacaagcaaggaaga

SEQ ID NO: 61624 - RNA, 44 nt, Homo sapiens
aaaaaaaagccgccacagaaaccggagaacggaaaaaacaaagc

SEQ ID NO: 61625 - RNA, 75 nt, Homo sapiens
acagaagacgggcaaaagagcggaagaaccaacgacagaagacggagccgaggggcggagcagccaccacggagc

SEQ ID NO: 61626 - RNA, 88 nt, Homo sapiens
ggcgccgagcgcagggaacggcgcccagcggggagagcagccagcgggacagaaggaggaagagggagcaccacggaccccaaggaag

SEQ ID NO: 61627 - RNA, 79 nt, Homo sapiens
aagacggccgcgaagagcacaagaagaaagccgaagcggcgcgcaagcccagcccgcagaggcccgggcaggcccgagg

SEQ ID NO: 61628 - RNA, 80 nt, Homo sapiens
cggccccccgggccgcggcccacgcccgcggagcagccggcccagaagcggggaaggcagagagaccaaggagagcagga

SEQ ID NO: 61629 - RNA, 78 nt, Homo sapiens
cacggaggcagaggggaggaggaccggagcgacagcgcgcaccacccgcaggaggggaagggacccaagagccggggc

SEQ ID NO: 61630 - RNA, 81 nt, Homo sapiens
cccgggacaagaaagaccgcaaggggaagggagggcccccggacccgggagcggacccggggcgggaagcccgaggcggca

SEQ ID NO: 61631 - RNA, 76 nt, Homo sapiens
acacgaaacgagacgacgaacggggcggaggggagcgaccgcgagaccacaagaggggaagcgacagagaaccaca

SEQ ID NO: 61632 - RNA, 76 nt, Homo sapiens
cacccacacccaccaacaacaccacaaaaccacagccaagacgggaacaaaggagaaagggcacgaagagagagga

SEQ ID NO: 61633 - RNA, 78 nt, Homo sapiens
cgcaaccaagccgacgagacggagaggaggcacacaccaacgaaccaggccgggagaccaccgaggaacacggaggac

SEQ ID NO: 61634 - RNA, 35 nt, Homo sapiens
ccccaagagcgggagcaggggagagacagaggaca

SEQ ID NO: 61635 - RNA, 59 nt, Homo sapiens
ggaaaacaaggcgcagcgggggacggacccgggcacccacagaacagggcaagaaccag

SEQ ID NO: 61636 - RNA, 70 nt, Homo sapiens
caaccacacacgcccaagacacagagggagaaccggggaccccagagccagacagaccaaggacgcgagc

SEQ ID NO: 61637 - RNA, 64 nt, Homo sapiens
ggagaaggaccaagaaccagcagcgcgcagacaggacaaccagcggaggcacgacgccaaacca

SEQ ID NO: 61638 - RNA, 75 nt, Homo sapiens
gcgaggccgcccgcacgagacccgggagcagccaaggacacccagacagaaaaggaacacgcgggaggacagagg

SEQ ID NO: 61639 - RNA, 67 nt, Homo sapiens
cggcacaacgcaaaacgggaccagaggagcaacacacaagcaccaccaaaaaaccaaggacgacggg

SEQ ID NO: 61640 - RNA, 89 nt, Homo sapiens
gaagcccaaaccacaagccacaaaaggaccagaggagcgagagcagcaagaaccacacccagcagcaagcagcggaagggaaacccaga

SEQ ID NO: 61641 - RNA, 63 nt, Homo sapiens
gacaaacaccaaaagaagggccaaagaagacgggaaaagaggacccaagaagaccagccgaag

SEQ ID NO: 61642 - RNA, 71 nt, Homo sapiens
cagggggagccaccccgcggcaaccgggcggcgagaggggcgaagggagacgggacccacgcgcaacacag

SEQ ID NO: 61643 - RNA, 65 nt, Homo sapiens
ccagccccggcagagggacggacacgcggacgcagcggaggcccgaccgggggagacggcagggg

SEQ ID NO: 61644 - RNA, 74 nt, Homo sapiens
cacaaccaacccgaacaagagagcacaagagacgcaaccccaccgaagggacaacggagggaaacaacaagcag

SEQ ID NO: 61645 - RNA, 75 nt, Homo sapiens
gacagaaaagacaggcgccaggagcacagaagagcgaggagggccagggcaagcacgggaggaacaaaacgacgg

SEQ ID NO: 61646 - RNA, 60 nt, Homo sapiens
gcaccgccgaggacccagcacaccgagggaggcccacaagcggcacccaccaagacaaac

SEQ ID NO: 61647 - RNA, 78 nt, Homo sapiens
cagccggggggaggaggcccgaagcaggagagcaaaaccacaagacaaggagaaagagggaggccgaaggacagacca

SEQ ID NO: 61648 - RNA, 81 nt, Homo sapiens
cggcgcagggggcgccccggccgggacgcgggcgcgcggccccgcgagcgccggagcagacaagcagaccggaagaccgac

SEQ ID NO: 61649 - RNA, 74 nt, Homo sapiens
aggcggcgcggacggggcgggaggggccacggggccggggagccaccaggagacagcccagacaagcaggggag

SEQ ID NO: 61650 - RNA, 77 nt, Homo sapiens
ccggaccgcagacgggggacgcagggaggagcgggacaccccggaagcgggaaagcccggaggaacaaccggaccaa

SEQ ID NO: 61651 - RNA, 75 nt, Homo sapiens
gggaaccaacagaagaaggaacaagaggaagccgagcccgggcccccaagcgcacgccagcacggcccaaggaga

SEQ ID NO: 61652 - RNA, 73 nt, Homo sapiens
ggggacacaagcccccaagaagaccgcgcgcggggaagacaccacacaaggagaagacacaacggaccgccag

SEQ ID NO: 61653 - RNA, 76 nt, Homo sapiens
aaggaaagccagcaaaggcaggaaaccgggggacacagccagggcgcaggcagcgcccaacaacacgggaaagaag

SEQ ID NO: 61654 - RNA, 74 nt, Homo sapiens
cggcccgcgcccccgccgcgcccgggagacgccccgccgcccacccagcgcaagccccggggcagagacacagg

SEQ ID NO: 61655 - RNA, 76 nt, Homo sapiens
agcagcacgggacccagcccaggccgcacggacggggggggaaggaccacgggaggcagaccccgacgacacagga

SEQ ID NO: 61656 - RNA, 79 nt, Homo sapiens
caaaggcggacaaggggagaagaagagaagcgaaggacgacagccaggggaggacaccacggcaccggagcacgaagag

SEQ ID NO: 61657 - RNA, 40 nt, Homo sapiens
ggccaagagggacccacccggcggcccccacccaagagcc

SEQ ID NO: 61658 - RNA, 74 nt, Homo sapiens
gccggcaggagcgccgaccgcagggcccacggaggggagcgaaaacaaggcacaaggccgacccagagaaaccc

SEQ ID NO: 61659 - RNA, 54 nt, Homo sapiens
agaagaaaaccaggaaacaagaagggaccgcaagagaagggcccaaaggaccaa

SEQ ID NO: 61660 - RNA, 75 nt, Homo sapiens
acccagcaacaaaaagaccacagacagaacaccgcaaagaccgcacagggagcacaaagccccaagaacagccag

SEQ ID NO: 61661 - RNA, 77 nt, Homo sapiens
gccaaaacaccaacaagagagaggggaaaaaccgaagaaaaaacaccagcagcccagcaaccaaaaagaagaccgca

SEQ ID NO: 61662 - RNA, 75 nt, Homo sapiens
gaagagcgcccagaaggagagaacaagcacacacccaagaaagaagccaaagagaaggcaaagcaggcggagaga

SEQ ID NO: 61663 - RNA, 59 nt, Homo sapiens
gaagacagaagacccccgccagagagaaacagcagccaaggaaaagccgagaacacagg

SEQ ID NO: 61664 - RNA, 85 nt, Homo sapiens
ggcagagaaaaaggccaccgagggcgggccccggccagggcccaggcagccggggcggaacccccagacagcacgcgacaaagaa

SEQ ID NO: 61665 - RNA, 55 nt, Homo sapiens
cgacccggagagagacacggccagggggaacacccgcccagccgccggacccaga

SEQ ID NO: 61666 - RNA, 36 nt, Homo sapiens
agccaacaacagccagggaccaccgaaaaggggacc

SEQ ID NO: 61667 - RNA, 71 nt, Homo sapiens
cccccagacgcaagccaagggcgaagagagaacacgcacggaaggaaggagaccacgagaaagaaaaaaca

SEQ ID NO: 61668 - RNA, 72 nt, Homo sapiens
ccgccacgggccgagacacgcagcggcggccagggaccagagcggagcgcaagaagaaggccgggggcacgc

SEQ ID NO: 61669 - RNA, 75 nt, Homo sapiens
agaacaaggcaaaggcaggagccacccaggagagggcagccccgaagcgggagcacgaaaaagggaacagcgaac

SEQ ID NO: 61670 - RNA, 68 nt, Homo sapiens
aaagcgaaaccacaggcccagaaaggaaggagccagggaacaaaagcacaccaggcccaggaaagccg

SEQ ID NO: 61671 - RNA, 73 nt, Homo sapiens
gaaaacggaccacggccaggacacgaaaacgcaaagccaggaacccaggacaagggccaggggccgacgacag

SEQ ID NO: 61672 - RNA, 62 nt, Homo sapiens
cagccacacggaagagcaccccaaggggccagagaggggaggacaaaagacacaaacggaag

SEQ ID NO: 61673 - RNA, 88 nt, Homo sapiens
gaccgcccaaccccaaaagagccaaaccagccgcccggccggcgaagacagcacaggaaaaccaacggcccggaggaccacagcccag

SEQ ID NO: 61674 - RNA, 101 nt, Homo sapiens
caagggggggaaggaagcggaaaacagcacaaaacccagcaacagaacaagagaacaagagagaggacgggaaagccaagacaacccaaacacaaaccaac

SEQ ID NO: 61675 - RNA, 81 nt, Homo sapiens
agggaggagcgcagggcgagccggagagccggccgagcgaggcggcgcggccagaaggagaaaaaggcagccccggagacg

SEQ ID NO: 61676 - RNA, 77 nt, Homo sapiens
ccgagcggacccggaccggggagcagagaaagggggaggcggacccggcaacacgaaccggaaagccaaggaagagc

SEQ ID NO: 61677 - RNA, 72 nt, Homo sapiens
agagcagcaccccacaggacaacccgaggagccaccagcgggaccagcaccgccgaagggaacagccgggcg

SEQ ID NO: 61678 - RNA, 86 nt, Homo sapiens
cggggaccgagccgggaggccggccgggccagcacccggccgagacggcggcagcagcggcacagggcgggccgaggagaacggga

SEQ ID NO: 61679 - RNA, 63 nt, Homo sapiens
acaccccagcccacagagagcaaaacacaagagagcagggaggagcggccaccagcgccacgg

SEQ ID NO: 61680 - RNA, 63 nt, Homo sapiens
agagggggggggggcccgccaacgaaccacaggcgagaccgagacaagaagccgagaaacaag

SEQ ID NO: 61681 - RNA, 83 nt, Homo sapiens
gccagggcccaaagaaccgaccagagccacgcgcccaggcgcaggcaggggccacacgcgcacgcaacccgcccccggacaag

SEQ ID NO: 61682 - RNA, 74 nt, Homo sapiens
aacacgcgaacagaaagccgccgagggagccgagagggcggagaacggaaaagcaccaggaagcagagaggacc

SEQ ID NO: 61683 - RNA, 77 nt, Homo sapiens
aagaaagggagagcaagacgacggagacagcaacgcgggaaaggagccgggaccagcgacacggcgggcgggaagcc

SEQ ID NO: 61684 - RNA, 79 nt, Homo sapiens
gccacagaaccagccgcacagcagaacagaaggagaagcaggaccaaaggagacccagccaaaaaacagagccacagca

SEQ ID NO: 61685 - RNA, 67 nt, Homo sapiens
ccccgacccagacagccagaaacggcggcgggccggacccggcagagcgccgcaccaggggaggcag

SEQ ID NO: 61686 - RNA, 62 nt, Homo sapiens
ccgagacagacagccagaggagcccgaaggccggacgccccacccgcagggaccgcaaaacc

SEQ ID NO: 61687 - RNA, 76 nt, Homo sapiens
aaggcgccccaggggaccaccaacgccccaccgcaggaccgccgaaacaacgcaggcggaaaccaagagaagcacc

SEQ ID NO: 61688 - RNA, 70 nt, Homo sapiens
agagggaaggggaagaggggcccgaagcggaaggccaaagacagacgggcccagcacacagggacaacgc

SEQ ID NO: 61689 - RNA, 71 nt, Homo sapiens
gaacagaaggacaggacagccagggccaggcagcgaagaagacaaagaagaaaacaaagccagccagaaga

SEQ ID NO: 61690 - RNA, 76 nt, Homo sapiens
cgcagacaggacaccaaacaccgccgccggccccgggggcgccgagggcacaagggcaacgacagaagggcgaagc

SEQ ID NO: 61691 - RNA, 74 nt, Homo sapiens
aggcgggacagccgaaggacagagagaagcagggagagacccagagcagcgggcaagcggcccacgcaggggga

SEQ ID NO: 61692 - RNA, 80 nt, Homo sapiens
gcagccgagacaccagcccgaaacaccaccaagacccgcagcacgagccaccagcacagaagaagacagaagcggaagcc

SEQ ID NO: 61693 - RNA, 65 nt, Homo sapiens
gacacgaccaagaaaggcgagaacgcggacaagcaaacaaagaggaaaaagagggcaacagcgaa

SEQ ID NO: 61694 - RNA, 82 nt, Homo sapiens
aggcggagcacgacgaagacacgcacacacagggagcggacggccaaggaggaggagcgcagcacccagggaaggcagagac

SEQ ID NO: 61695 - RNA, 78 nt, Homo sapiens
gacagagaccccaagacacaccagggaccggcggcaggggagaccgcaacgagaagggcaaggccagagaaggcggga

SEQ ID NO: 61696 - RNA, 83 nt, Homo sapiens
ccacgcaggggcccggaacgcccgaccgcacacggccacccgagcccacagaacccagcccgggggggacggagaaaggaacg

SEQ ID NO: 61697 - RNA, 55 nt, Homo sapiens
cccacagggacgggaaaacggccagagggagaagaaaaagcagaaaggaacagaa

SEQ ID NO: 61698 - RNA, 77 nt, Homo sapiens
cacagcaccccagcacccaggccaggaggggaggagggagggccacggcaagggaagcacaaaaagagccgcagagg

SEQ ID NO: 61699 - RNA, 79 nt, Homo sapiens
cccaggcccggaccgccaaacagcggccaggcggccggccccacagggcccacaagacccccaaaccccggcaccggag

SEQ ID NO: 61700 - RNA, 81 nt, Homo sapiens
caaggggagccggcaggacggaaggggaagaggcccacccggagaaccccacggagaaccagaggaccagggcccgaggag

SEQ ID NO: 61701 - RNA, 80 nt, Homo sapiens
gcgcacgcgagacgcagccccggccaaacggccagacgccgacgcgaccagcagagacgggaagacagaaggaagcaaag

SEQ ID NO: 61702 - RNA, 81 nt, Homo sapiens
ggacccaggcgcccgggaaaggcaccgggaacccaggggcagggccagaagggaccgcccgcagaccgagaccggcccgcg

SEQ ID NO: 61703 - RNA, 74 nt, Homo sapiens
cggcggacaacggagacgccccagcaaggagggcgacagaccagagaaagagaagggccaaacaagggcacaag

SEQ ID NO: 61704 - RNA, 70 nt, Homo sapiens
caagacacagcagggacacgagacggcagacccagcgccggaaggagcgagggacaaaacaaagaggaaa

SEQ ID NO: 61705 - RNA, 55 nt, Homo sapiens
ccgaacgcagcaggaggcgcagcagcacaagcagcggaccagcagacaacaggac

SEQ ID NO: 61706 - RNA, 67 nt, Homo sapiens
ccggcacaaagaaccagccgccaagcaaggaacacgccggagcacagagaggagacagaaaacacga

SEQ ID NO: 61707 - RNA, 83 nt, Homo sapiens
ccggacggccgcgccccggccgcgccggggccgcgcggccccgcggagccagagccaggacaaaaccaggcagaaccaacacg

SEQ ID NO: 61708 - RNA, 76 nt, Homo sapiens
cccggcggagaccacgcaaggccacaggagaggcggaccgcggcgaagccgcaccagccggggggcacaaagaaga

SEQ ID NO: 61709 - RNA, 74 nt, Homo sapiens
gacaccagaaaaggaaacgccacaacggaggcagccgccgccccaggcagagcccgcccgcacggagggccccc

SEQ ID NO: 61710 - RNA, 60 nt, Homo sapiens
gcggcggagacgccggcgcccccccccccgccggaaacaggaacacgaaagaggaaaaac

SEQ ID NO: 61711 - RNA, 44 nt, Homo sapiens
ggggaccgaggacagacaaggagcgagaacccgagcagcgccag

SEQ ID NO: 61712 - RNA, 86 nt, Homo sapiens
gcagcaccagggggcacgcccccggcggagaaggccccaggcaaggcacgcacgaccgagaaagccagggagcggaaaacaccgca

SEQ ID NO: 61713 - RNA, 65 nt, Homo sapiens
gaggacgaggccgacagcacgccgagaaggggacgacaccggagaaggcagcgacgacagcgaca

SEQ ID NO: 61714 - RNA, 83 nt, Homo sapiens
cggcccggggcacccgcacgggaagcaggcccgccacagcaaggccagcagagcccaagggcgccagccaccacccagacgac

SEQ ID NO: 61715 - RNA, 80 nt, Homo sapiens
gacagaacacagaaggacaaagaaccaagcagacagccaacaaaaggacccccgaccggcgggggcccacaaccggggcc

SEQ ID NO: 61716 - RNA, 60 nt, Homo sapiens
ggacaggacagcgagcgaggacgaggaacggcgagcgccacagcagccaaacggggacgc

SEQ ID NO: 61717 - RNA, 77 nt, Homo sapiens
ggcgggcgggccggcgagcgcagcgcgaccgggaggcccagagaccaggcgagcccagggaaagacaaacgaagaag

SEQ ID NO: 61718 - RNA, 63 nt, Homo sapiens
gacgaccacagcggaccgccccccacgccaggcgacccaaaagcaaaacaacagcccacagga

SEQ ID NO: 61719 - RNA, 64 nt, Homo sapiens
aggaaggagccggggcgggggaaaccacaccacccgccacagacagggaggaggacagccgaaa

SEQ ID NO: 61720 - RNA, 79 nt, Homo sapiens
ggccgaagccaggggcggggaccacggccgggacaccagggcaggaagggccgggccggggcacgggcccacggccccc

SEQ ID NO: 61721 - RNA, 53 nt, Homo sapiens
cgacagcgaggagcaaaaagacacagcagagaacggcaacgaaaagagacacg

SEQ ID NO: 61722 - RNA, 79 nt, Homo sapiens
cgcggggcggcgcgccgccgaaggcgggcgcagcggcggagcggagcggagcccggaggggcaacagcaggcgggacac

SEQ ID NO: 61723 - RNA, 76 nt, Homo sapiens
agacggacagacccacaacaccaggcgccagggccgcccaacaacaacggagcgggccacgaggccgagcgccggc

SEQ ID NO: 61724 - RNA, 76 nt, Homo sapiens
agccgcgagcgcgggaagacgccgcgaaagcagcgggagagaacacaaggaacgaaaggaagggaagaagcagaac

SEQ ID NO: 61725 - RNA, 80 nt, Homo sapiens
gcccggccgagggcggccggacccccccccggcgcccaagcggaaggaaccacggaaggagggggcgacacacaagcagg

SEQ ID NO: 61726 - RNA, 73 nt, Homo sapiens
ccccaccaaacgacacaggaccccaaaggacaagaaagcagagaggcagccagaagccagcgaagaagcaccg

SEQ ID NO: 61727 - RNA, 72 nt, Homo sapiens
gcccgcccagcagcccaaccgggcgcagaccggccagccgccacgccacgcaaagccaccgggccaagcaca

SEQ ID NO: 61728 - RNA, 50 nt, Homo sapiens
acgcagggcgcccccgcacacccacagaggcagaccgaaaacacccagca

SEQ ID NO: 61729 - RNA, 54 nt, Homo sapiens
agagacaacaagacaggccaggcgccggcaggagcgaacacacacgaacaacga

SEQ ID NO: 61730 - RNA, 89 nt, Homo sapiens
ccgaggcagcaggagaggggccgggccccgcagcggaaccggacccagcccgagccgccccacacccacaggacggggggcccgggcga

SEQ ID NO: 61731 - RNA, 66 nt, Homo sapiens
ccgaggcgagaccaccggaggaagcggcgcgagcgccccgccacgcccgagagaggagcgagagga

SEQ ID NO: 61732 - RNA, 87 nt, Homo sapiens
ccgcccgcgcaggcacccccggcgccagccgcccaggacaggcgcgggaggagcgcaggacgaggacagaggccaggggcccagggc

SEQ ID NO: 61733 - RNA, 85 nt, Homo sapiens
cccgcggacacaagaacacggcgggccaagacacccaaggagcaggcaggagaagggcaccggggaggaccgcgcgacgcgccgg

SEQ ID NO: 61734 - RNA, 53 nt, Homo sapiens
ggacgaggcggacgggcgaaggcagcagcccaggaagaagccggagagaggca

SEQ ID NO: 61735 - RNA, 74 nt, Homo sapiens
acacgcagcccaagacgcaggccagccaggggaggagcaggagaggaagcgcccagaaggggaagacccccagc

SEQ ID NO: 61736 - RNA, 78 nt, Homo sapiens
aggcgcccccagggaccgaccgaacgcagcaggaggcgcagcagcacaagcaggagggccaaacaggggcaacccgaa

SEQ ID NO: 61737 - RNA, 68 nt, Homo sapiens
acccaccgggcacgacagaccgcggaggcccaaggcaaagcaaagaaggcagcgagaaggaagaaggg

SEQ ID NO: 61738 - RNA, 55 nt, Homo sapiens
cccgaagaggaaggagcgggcccaagaaaaggccagcgccgggagggggcggcca

SEQ ID NO: 61739 - RNA, 51 nt, Homo sapiens
cagcccggacagcgcagaaccaaggaagacaacagaagccggccaaagacg

SEQ ID NO: 61740 - RNA, 53 nt, Homo sapiens
cgaaccagagaaaaccaaggaacaggaaaagggaggcaaagacaaccagaaac

SEQ ID NO: 61741 - RNA, 77 nt, Homo sapiens
gagacaaccaccgggggccaccaccgaggagccccaaaagaagaagggcaaggcgagcgaagagaaacaaaagcggc

SEQ ID NO: 61742 - RNA, 82 nt, Homo sapiens
cggcacggagaaaacgggcaaagacaccgcgagagggacgggcaccaaaaaaggcaccacgaccaacgccacgccaccacca

SEQ ID NO: 61743 - RNA, 73 nt, Homo sapiens
gacggcagacacccagcagacaggaagcggcggcagaacgcacaaccagaggaaaaaagaaagagaaaaggaa

SEQ ID NO: 61744 - RNA, 69 nt, Homo sapiens
ccacaggaaaggagggaagccagaggccaaaggcaggaggaggaccccccaaggacagcagcacaccga

SEQ ID NO: 61745 - RNA, 66 nt, Homo sapiens
gggagccgaccagccaacaaaagaaaaaaaaaccaaaagagagagggcgcagcagaggcaccaaga

SEQ ID NO: 61746 - RNA, 61 nt, Homo sapiens
agaaaggaacagggaaagaggcacaagcagggggagagagggggcacgaggaaaaagagcc

SEQ ID NO: 61747 - RNA, 58 nt, Homo sapiens
ccaccaagggcaccaggagaccaccagaaaacgaaggaaggaggacccgaggagagag

SEQ ID NO: 61748 - RNA, 68 nt, Homo sapiens
gccgcccacgggccacggccaggcccaggagagaggaaacgaggccagagaaggaagcccaaggcaca

SEQ ID NO: 61749 - RNA, 91 nt, Homo sapiens
cggcggggcggcgggccggcgggcggggcgcagagccaggcagcgcagcaaaccagccagcacgggggcccagccagccagcagcgagggg

SEQ ID NO: 61750 - RNA, 76 nt, Homo sapiens
accagagaaagcccagcagcaggaacaagacaacagacacagacccagaagaacagaggaccccgggaccaagaac

SEQ ID NO: 61751 - RNA, 67 nt, Homo sapiens
gaagaccaacaagaacacacgagagaaggaaagcgaggggaaggaggacacagcaccagagaaccgg

SEQ ID NO: 61752 - RNA, 52 nt, Homo sapiens
gaagcgaaggacgacagcagccagaagggccggaagaaggcgcggaccaggg

SEQ ID NO: 61753 - RNA, 53 nt, Homo sapiens
gccacggccacacgcccagcgagcgccccacacagggaccaggcagacgacca

SEQ ID NO: 61754 - RNA, 74 nt, Homo sapiens
cgaagcaagggaacgagagacaaacgggggccgcaaggccaggcgcgcagaggcacccaacggcacagacccca

SEQ ID NO: 61755 - RNA, 80 nt, Homo sapiens
gaaaaggcgacccggggaaagacagcccacagccaggccgagccccgacggggcaagaaagcccacgcaggccaccagga

SEQ ID NO: 61756 - RNA, 75 nt, Homo sapiens
ggggacccgggacacaccacaagggggaaaggcagcaaggaacgaccagaagccacgagaaaacaggaggaacag

SEQ ID NO: 61757 - RNA, 74 nt, Homo sapiens
cgaggagcgcggccaccccccggagggagaagcagaccgcaccaggcgggaccccgaaaaagcccaaacagaca

SEQ ID NO: 61758 - RNA, 60 nt, Homo sapiens
ggacggcacagcccgccgaacccgaaaggagaaagcaaggcaaaccagggggccacacag

SEQ ID NO: 61759 - RNA, 86 nt, Homo sapiens
cggcggcgccaacggccgcgccgcagccgcgagggcggcacaccgcgaggccgaggaccacgggagccggaggcgcccacgacgcc

SEQ ID NO: 61760 - RNA, 79 nt, Homo sapiens
accccagaagagagaggaaagccagccgcccagccgccaagggccccagcagccaacacacggagcacagagagaccca

SEQ ID NO: 61761 - RNA, 78 nt, Homo sapiens
ccccaaaggcgggacgcaggcacgacaaggaggccccagggaaaggaccgaggcaggaaagaggccagacgcagggac

SEQ ID NO: 61762 - RNA, 75 nt, Homo sapiens
agggccaaagaagggagagaggaaggaggccaaggaccgagccgccgccacccggcaaaggaagaccgaccacgg

SEQ ID NO: 61763 - RNA, 69 nt, Homo sapiens
aggagaccggagcgacggaccgcgcggccggggccaccagcagaaggcgcacaaagagcagggaaaccg

SEQ ID NO: 61764 - RNA, 77 nt, Homo sapiens
caccgccgcggacggccgaaacgaggaaagaaccaaggaagacacccgccgacacaccaaacaaaaaagacgaaaaa

SEQ ID NO: 61765 - RNA, 63 nt, Homo sapiens
aacacggaacaaagggacccacccccaccccacccagagaccaggcccccacaccggaaaccc

SEQ ID NO: 61766 - RNA, 75 nt, Homo sapiens
cccggaggggaggagccaagaggagggaggaaggaggaaacgaccagggagcagagcgaggcagggccccagaga

SEQ ID NO: 61767 - RNA, 54 nt, Homo sapiens
agaaaaggggagccggagcaccagggaagagcgcggagccagcgcccggcaagg

SEQ ID NO: 61768 - RNA, 64 nt, Homo sapiens
cgcgcgcggaacagacaagcagagccggcaccacaggaagccgagcagcccccgcaagaaaagg

SEQ ID NO: 61769 - RNA, 76 nt, Homo sapiens
cggagaggagcagaaggagcaaaaggcggacaggcaggaaaagcgcagagaagaaaccagcaccagaggagaggaa

SEQ ID NO: 61770 - RNA, 77 nt, Homo sapiens
cgcagggcgcccccgagagcagcaccagcagaagagggcccgaccacggcaacccagaggcgaagcaggacacccgc

SEQ ID NO: 61771 - RNA, 84 nt, Homo sapiens
ggaccggccgagaggaagacgagccgggaggaacggcccggaaacaggaggacgcgccagcagaaccggcggggagccgcagaa

SEQ ID NO: 61772 - RNA, 72 nt, Homo sapiens
gaagggcggacacaccgaggaaggccaggaacgcagaagaccgcaggggaaaaccaaagaccgacaagaccc

SEQ ID NO: 61773 - RNA, 78 nt, Homo sapiens
gacggccagccgggagcacgaccacccacagccggagcgagaaaggagcgccaacgcaagcacagcgcggagcaacac

SEQ ID NO: 61774 - RNA, 71 nt, Homo sapiens
ccgcgaagaagcacagggacagccggagaaacggccgggaaacagaagggcaaaacgaagcagcagagaga

SEQ ID NO: 61775 - RNA, 79 nt, Homo sapiens
gcagcaacacgacggcgcccgccgaaccgagagaagacaagcgaaagcgagagagaaaaaccgcccaaggaaacgcaca

SEQ ID NO: 61776 - RNA, 65 nt, Homo sapiens
aaccacggcacgcgagaccacagagaaccggggaacagaccggaggaaccgagcggaacaccagg

SEQ ID NO: 61777 - RNA, 75 nt, Homo sapiens
acaccccggaagcgggaaagaccaaaagaaggggagcccagaagcgagaggaaaaggcaaacgacgcagacagag

SEQ ID NO: 61778 - RNA, 42 nt, Homo sapiens
cgcggccgcggaggagcgccgggcagagagggggccgggccc

SEQ ID NO: 61779 - RNA, 77 nt, Homo sapiens
gaaacaacacagagagagccaaaggagcgcagagacccaagggccggaccacggagcggccgagaaacgagccacag

SEQ ID NO: 61780 - RNA, 84 nt, Homo sapiens
ccaggcggcgcggacggggcggcgaggaccaggaggagaccaggaagcagccgcacggcagccgccggggccgcggagcgggga

SEQ ID NO: 61781 - RNA, 35 nt, Homo sapiens
cccgccgcagccgcagagaagaaggaggagaaaca

SEQ ID NO: 61782 - RNA, 76 nt, Homo sapiens
aaaaccgcaacagcaaagggaaccaaggaggacagggacaagcgcacagcggagaaagcagcgcggccaggaggcg

SEQ ID NO: 61783 - RNA, 77 nt, Homo sapiens
caacacaagccaccgccaggaagggacaaagggccagggaaggaggcagcaccccagcgaacccggagcgagcacac

SEQ ID NO: 61784 - RNA, 64 nt, Homo sapiens
ccaccggcacaccgaggagagacaagagagacaccccaaccgacaaagagcaccagacagccgg

SEQ ID NO: 61785 - RNA, 58 nt, Homo sapiens
gccgggacgcagcccggcggcagcagaggcagcgagaagaaaaagaagagagagacac

SEQ ID NO: 61786 - RNA, 83 nt, Homo sapiens
cgggcccaggcccgcgaccgccgccagcgcccgagacccacccagggaacccccccaccccccgacggggcgaggcccaggcg

SEQ ID NO: 61787 - RNA, 89 nt, Homo sapiens
cggcagcgacggcagcggcggcggcggacaaacaggcaccgcagcccgggcgcgccaggcacagccaagagcggaccggcagcggccag

SEQ ID NO: 61788 - RNA, 71 nt, Homo sapiens
ccagccccagcagcggagggggaggacgcaggacgcacaggagagcaacgaccccaaacccaagaacacga

SEQ ID NO: 61789 - RNA, 72 nt, Homo sapiens
aagaaaaaaaccgcacagagacgcaaacaaagacccggacccgaaagaaggaggaaaaacaggggccgaaag

SEQ ID NO: 61790 - RNA, 74 nt, Homo sapiens
gcggcacaagccgggcggggcaaggagcggcggcgcgaaagaaggggacaaccgaaagagccaaccaacgcaca

SEQ ID NO: 61791 - RNA, 75 nt, Homo sapiens
accccccaccgaggaagagcgggagaaaggggccaaaaccacaccaaaaccaagggacagaaacagccaagcccg

SEQ ID NO: 61792 - RNA, 56 nt, Homo sapiens
aggagacgcagagcacagcacacgcgaggaagggaagcggccgagcacccaaccgg

SEQ ID NO: 61793 - RNA, 63 nt, Homo sapiens
acaacggcccaagacaggcccacccagcccccggagaaacaggaaaggaagccagaaccgaaa

SEQ ID NO: 61794 - RNA, 80 nt, Homo sapiens
cgcagccggacaagccgccaccggcccccacccggaccggccagaaggcccgccgcaagcgcgcccgcacgggacccgcg

SEQ ID NO: 61795 - RNA, 55 nt, Homo sapiens
aaggagagccacgagcagccgagggacaagagcgagcaagccgccgcagcaagcc

SEQ ID NO: 61796 - RNA, 72 nt, Homo sapiens
ggcaggacgcgaccagagacggggacaagccccgagcgcggcccggacaacagcaccaagccagacacggga

SEQ ID NO: 61797 - RNA, 71 nt, Homo sapiens
caacccagaagagcgaaggacccagcgaggaggaaggcggccacgaagaaggaaaaacagcacaaaaagag

SEQ ID NO: 61798 - RNA, 54 nt, Homo sapiens
gggaagggaccggcccaggccccccgccccgcgcagcagagggaggcggagcgg

SEQ ID NO: 61799 - RNA, 81 nt, Homo sapiens
gccccgagagcgggaacagacccgccccgccacgagaacacacccccaggcggagaaaaaagagaagccaggaaagagagc

SEQ ID NO: 61800 - RNA, 85 nt, Homo sapiens
acgccagcgggacgaggaccgagaccgcggccgggaccgaggagaggaggcagagagccccgcgacgagagagacagagagacca

SEQ ID NO: 61801 - RNA, 86 nt, Homo sapiens
agcgaagccacccagcgccgagggaaggcgccgcgccaggccgggcgggcgaccacgccggggacacaggccgccaaaggagggaa

SEQ ID NO: 61802 - RNA, 77 nt, Homo sapiens
cggggccggagcggcgcagccggagggggccggagacaacccagaacccgagaccgcaacaagccaacagagcgccc

SEQ ID NO: 61803 - RNA, 74 nt, Homo sapiens
acaacaagaaggacagcaaaggagcagggaccgacaagacggaaaccgggagggggaaaagcgagaaaaagacc

SEQ ID NO: 61804 - RNA, 84 nt, Homo sapiens
cgacaccaccgacaacacccaaggggcgacagagcgaaagaaacgagccaggccaagacgggaaagcacccacaaggggcgcga

SEQ ID NO: 61805 - RNA, 94 nt, Homo sapiens
ccagggcagacggagcaaagcccccacgcccagccaggagcaccgccgaggacccagcacaccgaggagcccacgcaggagacgggaggagcga

SEQ ID NO: 61806 - RNA, 80 nt, Homo sapiens
cccgccccgggcaccaacgcggcagagaggccccgagacccagaacgcaaaaccaaggcccggcagccacccacccccgg

SEQ ID NO: 61807 - RNA, 82 nt, Homo sapiens
aagaaaacacccgaaggcacaaggaaaaaagcccgaacaagaaaaggcacaagcccgcaaagaaaaggaaaagcaaacgacc

SEQ ID NO: 61808 - RNA, 79 nt, Homo sapiens
cggaggcggagcggcgccgagaacagggaaagacaaggagccgggccgagaaaccgaaccagagaccagagaagaaacg

SEQ ID NO: 61809 - RNA, 50 nt, Homo sapiens
cagggcgcccccgacgcggacagaagaaaagcccccccggacagaaacac

SEQ ID NO: 61810 - RNA, 41 nt, Homo sapiens
acaaccgaggcgaaggcacgagacgacgagaacggcaggag

SEQ ID NO: 61811 - RNA, 68 nt, Homo sapiens
cccagcggaaagcaacaaaagcgccaaggggcgaagaccaagacacacagccagcgaccgaacaagaa

SEQ ID NO: 61812 - RNA, 82 nt, Homo sapiens
ggacgaggggcccgggcccagagcggaagacaagacggccggcaagaagccaacggagaaccaaggccaagaccagaaccag

SEQ ID NO: 61813 - RNA, 77 nt, Homo sapiens
acaaaacgggcagaaccagggaaaccacaaacaggaagcagaaacaaggagggaacaggcaagcggaaacaacccag

SEQ ID NO: 61814 - RNA, 70 nt, Homo sapiens
cggccgacacgcagcgggccaaacccagagccagaggaaggaccagaaggaaagggcggaaacagggagg

SEQ ID NO: 61815 - RNA, 96 nt, Homo sapiens
cgaagaacccaacggagggcgcggagacggagcgccgcgcccccaccagacaagcagaccggaagaccgacggaagaccacaccccgagggagccc

SEQ ID NO: 61816 - RNA, 54 nt, Homo sapiens
gggaaccccggagaaaaggccaagaaggcagaacccccggcccgaaaacagcac

SEQ ID NO: 61817 - RNA, 35 nt, Homo sapiens
cagcccagaaacgggaagcacggacaagccacaac

SEQ ID NO: 61818 - RNA, 61 nt, Homo sapiens
acgcggccgcccggccgggaaccaagaggggaaagaaccagacgacaggaaggcacagaac

SEQ ID NO: 61819 - RNA, 77 nt, Homo sapiens
gacccgaacccacgacacggccgagcccgggccgcccagcaaaagaagaccagcaaacccagagaaggaagacgggc

SEQ ID NO: 61820 - RNA, 128 nt, Homo sapiens
gagccgacccacaacgggaggggccaccggaccccccaacaccccacgaaggcggcaccaaggcagagagggcagcgcccgagggcggagcgcgcgcccacggcgcggagcccaacgcgccgaccccg

SEQ ID NO: 61821 - RNA, 81 nt, Homo sapiens
cgagcagccaacagcgcgggaagagagcagccaggggcggacgaaaccacggagacccacaagcgacagggccagcccccc

SEQ ID NO: 61822 - RNA, 75 nt, Homo sapiens
agaagggaggaaaaccaacaagcggcggagaaaccaccacaaacacgaggccagcaacgaccaacaagacagacc

SEQ ID NO: 61823 - RNA, 66 nt, Homo sapiens
agcgccccacgagagaacggcacacgcgagcgaccaccacaacccgcaacgccacagcgagaacag

SEQ ID NO: 61824 - RNA, 76 nt, Homo sapiens
ccgggaccgcggagcggagccggccgacgcgggcgcgagggcagaaccgggagcgaggagcaagagaacccagaac

SEQ ID NO: 61825 - RNA, 94 nt, Homo sapiens
cacgggacgccccgccagaccgcgaccgcacgccagcccaagccgacagaccggccagaaagccacgagagagacggaaggcgccagagaaacc

SEQ ID NO: 61826 - RNA, 77 nt, Homo sapiens
cgcgccgccgaccccccggcgccgcgccggcggcggaaagagaagggagggcgacgagagccgaagcagaggccaag

SEQ ID NO: 61827 - RNA, 66 nt, Homo sapiens
ccccagcgaaggacagaggcggagaacgcgagacgagcagcccgacggccaggaggcgaagagacg

SEQ ID NO: 61828 - RNA, 57 nt, Homo sapiens
gccgaaccaggaccggacccggacccaaaggccagcaaggcccgacccgaaaagcgc

SEQ ID NO: 61829 - RNA, 54 nt, Homo sapiens
aagcaagcagcagcacgcgaaaggagacgaagaggccaaagggaccgaacagcc

SEQ ID NO: 61830 - RNA, 82 nt, Homo sapiens
gacagccgaaggagggcaagacagcgagggacgaaggagaccgcgcaggccggggggggcacagagccccggaagacagccc

SEQ ID NO: 61831 - RNA, 70 nt, Homo sapiens
acccaaaaagacggacagcccacgggaacaagaggggacagaaaggccagaggcacggacgaccccggag

SEQ ID NO: 61832 - RNA, 74 nt, Homo sapiens
acaacaccgcccccaccgagaagaacccgaacaagggaggggccaacaagaaaagcaggaccaaagacagagga

SEQ ID NO: 61833 - RNA, 52 nt, Homo sapiens
gaagcagaaaagggcacaggcagaagagacaacacagaaaccagggcggagg

SEQ ID NO: 61834 - RNA, 81 nt, Homo sapiens
ggccccacacccccccgggggggcaacccgacccggagaacgagcccacggagagccccgcagaggaccagcagggcagcc

SEQ ID NO: 61835 - RNA, 74 nt, Homo sapiens
aaaggggaaagccgaagaaaccagggacccagacacgaagcgagaggcgagaagaagcaggaaaaagcgacgga

SEQ ID NO: 61836 - RNA, 80 nt, Homo sapiens
ggcccgcccggacaccgagagcacgaccgcacaggcaaaggaaggcgaacacaaagagaaggaccggagcccgggagcag

SEQ ID NO: 61837 - RNA, 110 nt, Homo sapiens
gggcaaccgggagacagagaaacaccagcagcacaagaaaacgcagacccaaccgcggcaccggcccagagagcagggacacacgagggccggaaccaaacgaaaggcca

SEQ ID NO: 61838 - RNA, 69 nt, Homo sapiens
gaagagcaacgagcagaccgaggccgaagacgaaaaccacagggcccaccggaccgggccacagaggca

SEQ ID NO: 61839 - RNA, 61 nt, Homo sapiens
ggacagcacagcaccccagaaccaacaagcagcccaagacgagcccaggagccaaaaaaac

SEQ ID NO: 61840 - RNA, 95 nt, Homo sapiens
caccagcgggggcccaggaccgcggacccccgagcccccggagcgaaggagcagagcgggacgccgggcagccagggcacccccgagaggacaac

SEQ ID NO: 61841 - RNA, 78 nt, Homo sapiens
aacacagacgggggcgagcggacccgcagccccaaagccggggggggcacagagccccggaagacagcccccagcgac

SEQ ID NO: 61842 - RNA, 78 nt, Homo sapiens
gcggcggcgaggaggggaaccggccccacccgggaggggggagcggcgggaggccaccgccagagcccaagagaacga

SEQ ID NO: 61843 - RNA, 76 nt, Homo sapiens
cccgccccaaaccgggcccagcagaagaggaacccgaaaaccccaggcaagcaaagacagaagcccgggggcaaaa

SEQ ID NO: 61844 - RNA, 75 nt, Homo sapiens
ggaccgaaacagaaacggaacaccaaggcgaggaaacgagaccccgcccagaaggcggaggacgagagagaaaag

SEQ ID NO: 61845 - RNA, 70 nt, Homo sapiens
gcgagcccgacgggacaggcccaccggaccgcagaaacgagggcgggggggggcacccccaaaggaaggg

SEQ ID NO: 61846 - RNA, 79 nt, Homo sapiens
acccgggaaagacaggccgacagcggacaggcaaggagccaggccaaggagcagaagagacaaagcaagaaagaagaaa

SEQ ID NO: 61847 - RNA, 42 nt, Homo sapiens
ccaacccaggaggaaaaacgcgacaccagccacaggaacgac

SEQ ID NO: 61848 - RNA, 74 nt, Homo sapiens
cccgcccccccccagagcaagagcccaaaaggcagagcgaggagagaagaaggagggaaagccaaacaacggac

SEQ ID NO: 61849 - RNA, 75 nt, Homo sapiens
gccccaagccacggaccagagacacgccaagcagccagcccaggagagacccacccagccaacaaacacccgaag

SEQ ID NO: 61850 - RNA, 70 nt, Homo sapiens
gcgccagcagccgcacagggaaaaacccccacagaacggagcaccggggggaaggggaaggacaggagca

SEQ ID NO: 61851 - RNA, 74 nt, Homo sapiens
aggaagcgccggcagcccgcggcacggagacagcagcaggcgagaggcagaacccggaaagaaggaagggacca

SEQ ID NO: 61852 - RNA, 75 nt, Homo sapiens
agccgcccgaacaccagggcggaaaacaccccaaaagccaaaagggaaaggaaaagaccaacaacagcgcaggac

SEQ ID NO: 61853 - RNA, 82 nt, Homo sapiens
gggggaagaaggacaagaggccagggcaggaaacgcaaccgaccagcccccccggaaaggagcagcacaggcccagaaccac

SEQ ID NO: 61854 - RNA, 73 nt, Homo sapiens
aaggaccaagaaccaggggcgggcacaagggaagacagcgcccgggacccaacggaagaggcccaagaagccc

SEQ ID NO: 61855 - RNA, 75 nt, Homo sapiens
agacacggggaaagagaaggacccgaaaggcacccaggggaggcaagcaggggggcaaaggaaagaaggcagaaa

SEQ ID NO: 61856 - RNA, 55 nt, Homo sapiens
caaagaaccccaccggacccggaagcagcgcaaccgaacgcacacgaaggaagac

SEQ ID NO: 61857 - RNA, 69 nt, Homo sapiens
ccccagacacaggagaagaaccacagccacagacaaaggacagaggaccaaggaggcgagacagacaca

SEQ ID NO: 61858 - RNA, 70 nt, Homo sapiens
aggcgcccccagggaccgaccgaacgcagcaggaggcgcagcagcacaagcagggagcggcgacagacac

SEQ ID NO: 61859 - RNA, 50 nt, Homo sapiens
cgaccccccggcgccgcgccggcggcgacaccacgccacccaagagagag

SEQ ID NO: 61860 - RNA, 63 nt, Homo sapiens
aagccaccgcaaagccagccagagcaacagcagcaaggaaacggggacagccagacagaagag

SEQ ID NO: 61861 - RNA, 52 nt, Homo sapiens
gaacaaggagaggaaggggaaaggccaacaaaggaacgagcagcaacggcca

SEQ ID NO: 61862 - RNA, 77 nt, Homo sapiens
cagacgcccacaggacaagggcagagcgagcccaacggaaaagaaacacagagaacaggacaacgcagcgaagacgc

SEQ ID NO: 61863 - RNA, 46 nt, Homo sapiens
agccaccaggagcccgagagagaaggcggaggagcggacaacccag

SEQ ID NO: 61864 - RNA, 75 nt, Homo sapiens
ggccacccccggcgggcccgaggcggcgagagaggcaggcggagccgaccgggccagcacgggagggcagaaaag

SEQ ID NO: 61865 - RNA, 75 nt, Homo sapiens
cgacccacaggccccgcccgccgcccaacccaaaggcccgggacagccggaggaccccagggccaagacggggcg

SEQ ID NO: 61866 - RNA, 63 nt, Homo sapiens
gacacgccggacagccaggcgacaggcgccacccgacaaaagacaaacgggacagagggccgc

SEQ ID NO: 61867 - RNA, 71 nt, Homo sapiens
gccgaagcgggagaccggaggggggcgacagcggccccccggcgcgcgacaaagggagaggccgcgacgaa

SEQ ID NO: 61868 - RNA, 83 nt, Homo sapiens
cagccggagccgcggggagcgcggcgagcggcgacccgggacccggcaaagagagaggcacacgccgccgaaggccaggagca

SEQ ID NO: 61869 - RNA, 79 nt, Homo sapiens
accaggacagcgcgaggcgagggcagagccgcggggcaagacggaaccaagaccaggacaaagaagacccggagagaca

SEQ ID NO: 61870 - RNA, 55 nt, Homo sapiens
gaaggccagaagcacaaagcgcccgagagagaaccccacccaagagacaaagacc

SEQ ID NO: 61871 - RNA, 73 nt, Homo sapiens
agcacaagagggcagacgaggcacacagcaagagacaggcgaagaaacaaggagaaacgaagaaaacacccac

SEQ ID NO: 61872 - RNA, 67 nt, Homo sapiens
cccagaagacagagggcgagagagccaccaaagaagaccagacaggggaaggagagacagagaggga

SEQ ID NO: 61873 - RNA, 60 nt, Homo sapiens
gggcccagaccgccgggcaagcaccagagaggcccgagacacgagccccaaggggaagca

SEQ ID NO: 61874 - RNA, 75 nt, Homo sapiens
cggggccgcgcgagggcgcccagcgaacgggcgaaaaacgaagaaggaagacgcgaccgaacaaacagccaaaac

SEQ ID NO: 61875 - RNA, 54 nt, Homo sapiens
gcaggaggcgcacaacacccaggccccaccacagccacacaacaacagaccaag

SEQ ID NO: 61876 - RNA, 69 nt, Homo sapiens
ccaccaacccacaggagacgagccaggaacagcaggcgggccacggcccccaggagccagcgaaacgga

SEQ ID NO: 61877 - RNA, 76 nt, Homo sapiens
ggaacccccaggggccgaaccccccccccaagcgagagcagccacacagcgaaccaagccaacggaaaggcaccga

SEQ ID NO: 61878 - RNA, 53 nt, Homo sapiens
agagaggccaaggagcgcagagagccacgggccacaagagcgccacagcagcc

SEQ ID NO: 61879 - RNA, 77 nt, Homo sapiens
acaagacagaagaacggaaacagcaacacaaaggaaaccggaagagaaggaccaagagaagcaaagggagaaacaac

SEQ ID NO: 61880 - RNA, 79 nt, Homo sapiens
gcccagggcccaaaaaaagggcaggaaccacgaaggacagaagacaccacagaggacaaacagagaagagggcagacga

SEQ ID NO: 61881 - RNA, 79 nt, Homo sapiens
cagcaacgagaaggggaggccaaagagacacagcccaagaccaccggggaaccggcccggaagcagccaccccagagca

SEQ ID NO: 61882 - RNA, 62 nt, Homo sapiens
cacagcacaacacccaccagcaaaagccgaacaggaccagcggggccaggacacacgagcaa

SEQ ID NO: 61883 - RNA, 83 nt, Homo sapiens
gcaccacgaacaaacagaaagcgcgaagaggggaagcaaagcaagaccgcacaggacgagcgaagacagggaaaagaaaaggg

SEQ ID NO: 61884 - RNA, 83 nt, Homo sapiens
cagaaggaggagcggcgccgcgggaggaggggaacggcacagggaggggacagaccaaccggcagccaaccgcacaaaagcca

SEQ ID NO: 61885 - RNA, 71 nt, Homo sapiens
cccagggcccccgacacagacagaagcaggggcaaaagaaaagggccgcggagacaagagaagaaaagcaa

SEQ ID NO: 61886 - RNA, 81 nt, Homo sapiens
agccagcgcccgcagccagggcgggggggaggcgcccccgacccaccgagggacggcccggggacaccagaggaccagaac

SEQ ID NO: 61887 - RNA, 59 nt, Homo sapiens
ccagcgggcccacagcccaggaaaagcaccaaagcagcaacaaagcacacagcgcgcca

SEQ ID NO: 61888 - RNA, 54 nt, Homo sapiens
gaccgagcagagaaaggagcagaccagaaggcgcagagagggaccagcgggaca

SEQ ID NO: 61889 - RNA, 78 nt, Homo sapiens
ggcccgaccggccgcgacagcgaacagcgcggccgcagacagaagcgaaggggacagggggagaaccgccagggaaac

SEQ ID NO: 61890 - RNA, 86 nt, Homo sapiens
gccccacaggaggggaggcgaccaggccgacggccagcggaagccgccaccccaggcggaccaccacaacaagaagccgcgccacg

SEQ ID NO: 61891 - RNA, 70 nt, Homo sapiens
cggagaagcgcggagagacgccccacaaccgcccgggcgcggacggggcccggcgaaccccggcgcggca

SEQ ID NO: 61892 - RNA, 78 nt, Homo sapiens
ggaagcaaagcgggcacacagccacacaaacagaacaagcagcacggcgaccaacacaaacacggacaaagcgacgag

SEQ ID NO: 61893 - RNA, 58 nt, Homo sapiens
aacccgacccgacgacaccgccggccaggaggagagcgcaccaccaaaaaggcaaaca

SEQ ID NO: 61894 - RNA, 52 nt, Homo sapiens
cagagcgaggaacaaaccgagaccgggacaacaagacaccggcgagaggacc

SEQ ID NO: 61895 - RNA, 42 nt, Homo sapiens
aagaagcagggggcaaaaagagcccacgagagcagcgagcca

SEQ ID NO: 61896 - RNA, 65 nt, Homo sapiens
acagcggaccagggaagaacgaagaggaagggagcccaaaacaggagcgcagcaagcaccgaaca

SEQ ID NO: 61897 - RNA, 87 nt, Homo sapiens
gcggcggagcagaacggagcaggggcgcggaggcgcggggcgccccgaggagcggggaggccggggggggccgcgagcgcccgggcc

SEQ ID NO: 61898 - RNA, 67 nt, Homo sapiens
gggccaagagacagcgcccacgggacacaaaaaacccacgccgagcggcacccaggggcgccacagc

SEQ ID NO: 61899 - RNA, 79 nt, Homo sapiens
ccgggcgccgggagcgggacagaggagccgcccgcacccaggcggaggcaaggcggaccggcgcaccaacccgccccca

SEQ ID NO: 61900 - RNA, 89 nt, Homo sapiens
gaggaggaacgaccacgaggcagagaagaagagcgggcagaagcaccgaaggacggaccacagagacacgggacgcgcagcggcccaac

SEQ ID NO: 61901 - RNA, 75 nt, Homo sapiens
agcggcccccaccggcgcgcgacagggacggacgcagcgaggcagcgagaggaggaggcaacagaacgaaacaga

SEQ ID NO: 61902 - RNA, 77 nt, Homo sapiens
gggggcagcgacaaaaggaccgggcaaagacaacggacaaccagaagagcagcagccagaaagacccagagaagcga

SEQ ID NO: 61903 - RNA, 79 nt, Homo sapiens
gcggacggaggagcaggcgagaagagaagcacgagaagcccgccaacggggaaagcagaccaacacgccaaggaaaacc

SEQ ID NO: 61904 - RNA, 72 nt, Homo sapiens
cgggggacgaagcggaaagaaaaccagaaggcaccgacaggaaaggaaaaggagaaccaggcacccgggggc

SEQ ID NO: 61905 - RNA, 84 nt, Homo sapiens
gggggcgggagccccggcgggccgcgccgggacggcccaccagccaccccaccgcgcagggagagcgagaaaagggccagaccg

SEQ ID NO: 61906 - RNA, 39 nt, Homo sapiens
gaggcggagaaaacgcagcgccgaaaagcgaaaagaaac

SEQ ID NO: 61907 - RNA, 82 nt, Homo sapiens
gcgacggggcccagcagacagccgaggggagcgcggggcccggcagaaagggacccggcaaagagagaggcacacgccgccg

SEQ ID NO: 61908 - RNA, 70 nt, Homo sapiens
agacggccgcgcggcccgcagggacggcacaagcaggaaggggagacaaaccggacggcgaggacagcac

SEQ ID NO: 61909 - RNA, 57 nt, Homo sapiens
ggacgagcaagagaagggcgggcagccgagcccaggaggaacacgacagagaggaag

SEQ ID NO: 61910 - RNA, 71 nt, Homo sapiens
gggcggcagaaaccgcggagaagaggcgccacgccggcagaagcagggcgagcagcggagcccgggacacc

SEQ ID NO: 61911 - RNA, 68 nt, Homo sapiens
agaagaccgaagggaacacacacaaaaaagacagaaaggaagccgaggaagaagagagggcgaaggag

SEQ ID NO: 61912 - RNA, 74 nt, Homo sapiens
gacccccgagggccgagcaacaggagggcgaccacaagcaaacagacgccagcaacccagagggggaaagacca

SEQ ID NO: 61913 - RNA, 78 nt, Homo sapiens
cgaagaagaggaagaacgaccagagcgacccgagcagcgcagaccccagcacagccccaggcacaacacaagaaaagc

SEQ ID NO: 61914 - RNA, 73 nt, Homo sapiens
cgacgccagggaccccacgccgcgagccgcaaaagaagaagcacgaaccgaaggaacaaaaaaaccgcaaaaa

SEQ ID NO: 61915 - RNA, 78 nt, Homo sapiens
ggaacaaaccgaagaacagcgggaaagaaggcaaaacacgggaggccacgcgcagccccggaagagccacccagaccc

SEQ ID NO: 61916 - RNA, 83 nt, Homo sapiens
ccacccagcgacggagcacaacccgaagcggccggaccggaacagggcggggggccgcacaggagacagcaccagccaagcga

SEQ ID NO: 61917 - RNA, 83 nt, Homo sapiens
ggccggagcccagcagcggggagccccgagaacgccccagcggggagacacagaaggcagggagcaagccgaggggaaagaag

SEQ ID NO: 61918 - RNA, 83 nt, Homo sapiens
ccccggagggggcagcccgggagaaccgcggcggccggagcgggcgcacagggacgaagaaccaccaaacggaaacacagacg

SEQ ID NO: 61919 - RNA, 81 nt, Homo sapiens
gcgcgggcgaagcacgcacaccgggcagggccgagaggacgccagcggcgcgcagaacgggcccccgccggcggagggcgg

SEQ ID NO: 61920 - RNA, 72 nt, Homo sapiens
ggcagcaggaagcacggcgggcgaaacaggagaaaaaggcacaggaggacaaaaagcgggaagaaacaaaga

SEQ ID NO: 61921 - RNA, 90 nt, Homo sapiens
aaccacaaccgaaccagcagcaggagaagcagagacaagagggggagaacgcggccaacacgccagcgagcggcccgacacacccggggc

SEQ ID NO: 61922 - RNA, 78 nt, Homo sapiens
cgaaggccaagacacgcgacgcggacccacggcgccgacaaaggggaaaaagaaaagggcgaagacccgaagcagcgc

SEQ ID NO: 61923 - RNA, 65 nt, Homo sapiens
caaggcggcccggcgggcgacggacggccggacagaagacgaccccgacgcaggccaggagccgc

SEQ ID NO: 61924 - RNA, 82 nt, Homo sapiens
ccaggcgagggcgccgcacccacaccgcgcgcgcaggcgcccagcgcgaagggaccagggcaagcccggaacagcgcaacca

SEQ ID NO: 61925 - RNA, 73 nt, Homo sapiens
acgggcaccccgcaaccccccaccagcgaggaagcaaagcacggacgggccaacgcacggcccggcagagcca

SEQ ID NO: 61926 - RNA, 80 nt, Homo sapiens
cggcccgcagggagcagcgacgggggacaggaggcgcgcaggaacagaaacccccagcacacgaagaggccaaggcaccc

SEQ ID NO: 61927 - RNA, 78 nt, Homo sapiens
aaaaagagagggggggaccgaccgcaacagaacggacccgggcccagaaaaggccacggaaacgcaaggaagaagacg

SEQ ID NO: 61928 - RNA, 63 nt, Homo sapiens
caccaccgcccaaccccaggaagggaaaaggccgaggcacagcgggaagaccgcaaagacgac

SEQ ID NO: 61929 - RNA, 74 nt, Homo sapiens
acgggccccaagaggccagccccccgagggcaacgagaaagagacggcaaaggaacagagcacacagaccacaa

SEQ ID NO: 61930 - RNA, 83 nt, Homo sapiens
aaagcagagagagaggaaaccgcaagagcggagaccgccaccccccgcgggggggagaggccccagggcaaaagagacggaca

SEQ ID NO: 61931 - RNA, 72 nt, Homo sapiens
ccgcaggcgggcccccgaccggagagaaaacagacagaaaagaaccagaaccggccaaaagcgaaaaggcgg

SEQ ID NO: 61932 - RNA, 113 nt, Homo sapiens
cgccccgccaaccgcaaccagacgccagcgggacgaggaccgagaccgcggccgggaccgaggaacagccagcaaagacaagagcagaccagcagccgcagcgcgacagccaa

SEQ ID NO: 61933 - RNA, 81 nt, Homo sapiens
gccggccgccgccccgccgagaacaggagagggaaggcaaaacaacccgcagggcacacgcaccgcaggagaacagaagaa

SEQ ID NO: 61934 - RNA, 66 nt, Homo sapiens
gccagcgcccgaaaagagaagcaggccgggaacagccgacagaaagagaaaccacaaccccagaac

SEQ ID NO: 61935 - RNA, 80 nt, Homo sapiens
aagaacagaagaagaaagcagggggacgcaaaggccaaggggcggcaaaaaggagccgcccagcaaaacccaacgggaac

SEQ ID NO: 61936 - RNA, 83 nt, Homo sapiens
caggaccacccaccagccaccagggaaccacgaaaagaccagcagggaggggggacgcccaggcaccagcaaggcgcaacgcc

SEQ ID NO: 61937 - RNA, 77 nt, Homo sapiens
cgcccgggcccccgggagccaaggaccaggggacgggcagaggcccggaaacgaaacagcgcagccaggaacaggac

SEQ ID NO: 61938 - RNA, 79 nt, Homo sapiens
cacaccccagcgcggcgcacccagcgaaggaaccccagaaacccaaagcacagaaaccaacccgggaccggcagagggc

SEQ ID NO: 61939 - RNA, 49 nt, Homo sapiens
ggcaagaccgccgccaggcgccacgaggacaagcagaaaccaagcggac

SEQ ID NO: 61940 - RNA, 85 nt, Homo sapiens
cggcgagccgcccgccggaggccccacaggaggcccggggacgcgcgcaccggacaggcgcgggaggagcgcaggacgaggacag

SEQ ID NO: 61941 - RNA, 73 nt, Homo sapiens
ggagaaggacagaggaaacaggaaacagacacgcgagccaaggaaaagacagagccaaacagcaaagaagcca

SEQ ID NO: 61942 - RNA, 83 nt, Homo sapiens
cgccgccgccggcccggacaggccgccaacagacagggcggagggggggccccagcccggccgaacgggcgcacgacacaaac

SEQ ID NO: 61943 - RNA, 82 nt, Homo sapiens
gcccaaccaaaaccggaagggcggaggaggagagccggcagaggggaagggacccaagagccggggcggacaagcgaaggcg

SEQ ID NO: 61944 - RNA, 70 nt, Homo sapiens
gaaggaccaagaaccaggagcacagcaagcgggagcaggcagaccaaaggaacagaagccagggccggaa

SEQ ID NO: 61945 - RNA, 67 nt, Homo sapiens
caacaccgagcaagaacacccgcaccaacgagaagggaagcagaggaaccagacccacagcccaaca

SEQ ID NO: 61946 - RNA, 74 nt, Homo sapiens
gcagcagagaagaccaggaaagacaggaggccacccccaaagaaaaggcccaaccccccgaagagagaaaacag

SEQ ID NO: 61947 - RNA, 70 nt, Homo sapiens
ccgagcgcgcacgcacgccgggcaagcacccccgggagcccggacaaagcagagggaggcaaccccaaag

SEQ ID NO: 61948 - RNA, 84 nt, Homo sapiens
acaaccccaaaaaaggaagggaaccaccagcgcggaaaaggaacagaagaggaaccgaaacccaagaaaaaccacccagcaaag

SEQ ID NO: 61949 - RNA, 72 nt, Homo sapiens
agcaaagccagcgacagaagccaggaaccagcagcagaagagaaggacggaaaacgcgaccaaccagaggca

SEQ ID NO: 61950 - RNA, 59 nt, Homo sapiens
agaaggaggccagaggcagggcgcgggcagcggagggcagcccaaccacgaagaagaag

SEQ ID NO: 61951 - RNA, 66 nt, Homo sapiens
ggggggccggaacagcccgccagcggggggcgaaacaggaagagagcacagagagggaacaaggga

SEQ ID NO: 61952 - RNA, 75 nt, Homo sapiens
caggagcgccacgcgcggaaggcagcgcccagcagcgcagcccaccaagaaaacacagggagcgcaacagagaca

SEQ ID NO: 61953 - RNA, 81 nt, Homo sapiens
ggagaaggcgcaacgcggcgcccacaggccggcacccgggaagagacaagaagaaagaagaaagaggaagaccaggaccag

SEQ ID NO: 61954 - RNA, 73 nt, Homo sapiens
accaacagcagcggcagccaagggagcgggagccaaaaagcccgaccaccggaacaaaacaggaggagaaaca

SEQ ID NO: 61955 - RNA, 76 nt, Homo sapiens
cgggaaaggcaaaacacaacaagagggagccaggccagaaaacggggaaagaagcgaagccaggagggagaaggga

SEQ ID NO: 61956 - RNA, 70 nt, Homo sapiens
ggcacacacgcacgcaaggagaggccaaacacacaggaacgccagaccccagccgagggaggcaacagca

SEQ ID NO: 61957 - RNA, 58 nt, Homo sapiens
gaacaaaagaacaagcaggccgaaggaaacacaacagaacaaagaacaccaaaaacca

SEQ ID NO: 61958 - RNA, 45 nt, Homo sapiens
ggacgggcacgggcgaccggcccgcgaggcagacaggcccacccc

SEQ ID NO: 61959 - RNA, 58 nt, Homo sapiens
caccaccaccagcgacccgagagaaaccacaaaggaccggaagcgcaagaaagcacag

SEQ ID NO: 61960 - RNA, 75 nt, Homo sapiens
aaagaagcacagacaaggggggggaagacaacccggagaacacccaggggacgcccagaccaaacaacaaacagc

SEQ ID NO: 61961 - RNA, 78 nt, Homo sapiens
gaagacacccgaccgacaaaagggacgcggcgcacggcgcggaggggccgagggcaggggggccgccacggcggccaa

SEQ ID NO: 61962 - RNA, 107 nt, Homo sapiens
ccaagcgccagacgagcaggccagcgaacgacaagaccaagagaggcaaagcacaaagcccggaccgacaggaaagaaggagcccacaaagaaaagaacaccgccag

SEQ ID NO: 61963 - RNA, 52 nt, Homo sapiens
ccacaaaaaggcacaccggggcaagccagccaccaaaccagagcagggacca

SEQ ID NO: 61964 - RNA, 68 nt, Homo sapiens
cgagcaacccccgggaagccaagccgcagcggcgggagaggaaggaaaggaaacaaagagcaagcaac

SEQ ID NO: 61965 - RNA, 70 nt, Homo sapiens
aaaagaagacgacacaggcaggagacagacccagcacggaccccccccccagccgggcgaggccccgaaa

SEQ ID NO: 61966 - RNA, 62 nt, Homo sapiens
caaacacaagcccccccagaccagggagcccaagcaacaagagcaccggaaagggagcccca

SEQ ID NO: 61967 - RNA, 64 nt, Homo sapiens
aacccaggagcgcaaagagaaagaacaagaacacgcagcacggaaggggaggagcacagaacgc

SEQ ID NO: 61968 - RNA, 69 nt, Homo sapiens
cagggccccacgacacaaggaaggacaacccgggggacgccgccacgaagaagagacgccacaaacccc

SEQ ID NO: 61969 - RNA, 34 nt, Homo sapiens
gacgaaggccaccaaggaaaggcccgagccaaaa

SEQ ID NO: 61970 - RNA, 79 nt, Homo sapiens
cagggagggcggagcagcccggcggcggcggccgaaccaaccgagcggaccgacccaaaaccacaacggggcggcacac

SEQ ID NO: 61971 - RNA, 67 nt, Homo sapiens
gggccaagcagagaacacaggagagagaaggaggaacccaggaggaacaaagggcgcgggggcggac

SEQ ID NO: 61972 - RNA, 61 nt, Homo sapiens
caagcaaaaagcccacagaagccaacggacaagccaacagcagacgagcgaccgccagcgg

SEQ ID NO: 61973 - RNA, 69 nt, Homo sapiens
cagggccggccccagcccggcgcgccaagggcgcagcgagcaccgggcacgggccaccgggaaacgacc

SEQ ID NO: 61974 - RNA, 63 nt, Homo sapiens
cacagcaagacaccgggaccccggaagccaaaaaggcaacgaaagcaaaccgagagcaggcga

SEQ ID NO: 61975 - RNA, 80 nt, Homo sapiens
gccggggagcagcgggccggcgcgaggcgcccggcacaacgaccccagcaggaacccaggagaaacgagagggacagcaa

SEQ ID NO: 61976 - RNA, 75 nt, Homo sapiens
acggggcagagacgggacacaagcagacaacagggagacaaaaggaaaggggaaggaagacccgcagaacgaaaa

SEQ ID NO: 61977 - RNA, 82 nt, Homo sapiens
cggcgccaaacagaacacaggaggggcagcaaggcgcgggaacaccacgggccaccaaaggcacgacgcagcagacgggcca

SEQ ID NO: 61978 - RNA, 68 nt, Homo sapiens
ggccaggagaagcagcccacaaaccaaacaaagagaagaaaccaaggacacggggagaagcagaccgc

SEQ ID NO: 61979 - RNA, 82 nt, Homo sapiens
gaagccaccgacaggcccgagggcccgagagcaccgcgccagacagggagaaggaggagcagaacacaggggacagggaaga

SEQ ID NO: 61980 - RNA, 75 nt, Homo sapiens
caggaagcccaagcagcaaccaaaagagccaaggacccaaaaaccaggccccccgggaagacacaaacgcaccac

SEQ ID NO: 61981 - RNA, 83 nt, Homo sapiens
gggagcacagcacgacccagacagaccaggcccggaggacacgcagacgcccggagacgcgccgcccccgggagagccagaaa

SEQ ID NO: 61982 - RNA, 77 nt, Homo sapiens
cagaagaacagacggcagaaaacggaaggaggccagacaaagaaggaagggaacacggacgacgagacacgaccaac

SEQ ID NO: 61983 - RNA, 77 nt, Homo sapiens
ccgcggccagcacacgccgggagaggagggcaagcgagggcgcacggccagcccaccccaagccccaggcacgcgga

SEQ ID NO: 61984 - RNA, 55 nt, Homo sapiens
aggagaaaagccagagcggcccaacaaccgccggggaagaaaagcagcagcaaga

SEQ ID NO: 61985 - RNA, 83 nt, Homo sapiens
aaaacaggccggcaaggcaaggaaaggcggccgggagaacaagagccaccaccaagaccaagggaggcagcgaccagacagag

SEQ ID NO: 61986 - RNA, 77 nt, Homo sapiens
gcaaaaaaacagcagggacgcccgccacggcccgccagaacgggcgggcccgcacagcccagaagaacggcacacgc

SEQ ID NO: 61987 - RNA, 79 nt, Homo sapiens
agaaaaggcccggggcccgggacgagggaagccccgggaggccggcacaccccgagagcacggccacacccacggacca

SEQ ID NO: 61988 - RNA, 79 nt, Homo sapiens
gagcaccgggggaccgcgcagcggggacgcgaggacccgggcgggccccacccgggggcggggagcggaccccgggccg

SEQ ID NO: 61989 - RNA, 70 nt, Homo sapiens
cgaagaaccagggcgccggaacgaagagcaggcaccagacgcagaacgaaaaaggaacacgaaggaaaac

SEQ ID NO: 61990 - RNA, 74 nt, Homo sapiens
acagcgccagggacaagaacaggagaaaggaggacccgggaagacagagacgggcaacggaaagcgaacaccaa

SEQ ID NO: 61991 - RNA, 52 nt, Homo sapiens
aggggaagcagcgcacgccagccggcaccaccccagaggcaccacgaagacc

SEQ ID NO: 61992 - RNA, 89 nt, Homo sapiens
acagagagacaccacaaacagacaggggccaggaccacgaaaggcgccacgggggcaggaccgccagaacgcgcgggccaggaacacca

SEQ ID NO: 61993 - RNA, 83 nt, Homo sapiens
gaaagccagacaccacccggcaggggaaaggaagggagcagcgaagccagggaggagccgaaacaaaaggaaaggagagaaag

SEQ ID NO: 61994 - RNA, 84 nt, Homo sapiens
cacggagcaagggaaggaaccgggaggggagagaaagagcacagggcacggcagagccagccccaggccgcgagccggacaaca

SEQ ID NO: 61995 - RNA, 55 nt, Homo sapiens
cagaaccaacagcacggggcaaagacgcaagcaaggcagcaccccgacgacaaga

SEQ ID NO: 61996 - RNA, 79 nt, Homo sapiens
gagcggggcgcgggccgggaagaagcgccgcgcacggaccggcagaggagaaggaagcgccggccaaacgagcacagca

SEQ ID NO: 61997 - RNA, 70 nt, Homo sapiens
gaacacccacagagggagcgcaggggaagggaccaagagggggcaccaggaggaacgggcgcacagaaac

SEQ ID NO: 61998 - RNA, 82 nt, Homo sapiens
aagccgagcagacggacgaggagcgcgggaggagaccacaagccgagaaggaccggacggggcgcaggagcacagcagcccg

SEQ ID NO: 61999 - RNA, 69 nt, Homo sapiens
gcagaaggccggagacaccagcaggccaagcaccagaaggccaacacaaccaaggggaaacagcaaaac

SEQ ID NO: 62000 - RNA, 117 nt, Homo sapiens
gcagcagacgccaaggggggcaagggcggccggcccccgacagccaggcccgcgagaaccggaaccaaaaagaagccccagagccggggccaggagccccaagcgccccagcagcaa

SEQ ID NO: 62001 - RNA, 73 nt, Homo sapiens
cagagccgaccccaggccagcccgacccgaccaagacgcggaagagaagaggaggccacggaggcgccgacca

SEQ ID NO: 62002 - RNA, 60 nt, Homo sapiens
gaccaggccgaaaaacgaagagaggcagggcagcaccagagcaaaccaagaccccccccc

SEQ ID NO: 62003 - RNA, 53 nt, Homo sapiens
agccccacgcaagcacgagcgcggacggaaggacacagacaaaagaccaggag

SEQ ID NO: 62004 - RNA, 64 nt, Homo sapiens
gcagcaaacacgggacaaaaaccagaccagcacacaaaagagggacaacacaagccacagcgcc

SEQ ID NO: 62005 - RNA, 68 nt, Homo sapiens
gcggggaggggggcagacggcggcgcccaacgaagcaggaacgaacaggcccaaggcgccagggacga

SEQ ID NO: 62006 - RNA, 69 nt, Homo sapiens
aggggcaaagaaacgaaacgccccagacccgaacagacaggcacacagagaaaaaaagggaacaaaaca

SEQ ID NO: 62007 - RNA, 82 nt, Homo sapiens
gagcgaccagccacaagaacagggagccggcggcgggacggaggaggaacacccagaagggcacggagagagcagcccaggg

SEQ ID NO: 62008 - RNA, 53 nt, Homo sapiens
aggacccaacaccagaagacacacaggaacagagagaagggcgggagaaacca

SEQ ID NO: 62009 - RNA, 77 nt, Homo sapiens
ccgggggagcagacagaccaccccaaccgaagacggaaggccagcagcaacgagaaacagaacaaaggcacacaagg

SEQ ID NO: 62010 - RNA, 82 nt, Homo sapiens
cccccggcaggcccccccaccgcaccgaagaccagcgaggaccgagccacagaggacgcccccacaggcccaaaaaacagca

SEQ ID NO: 62011 - RNA, 72 nt, Homo sapiens
cagaggagcagaccgagcgaaggaggcagcagagaaaagaggagaccaggagaacacagcgaaaaagggcgg

SEQ ID NO: 62012 - RNA, 74 nt, Homo sapiens
agagaaagagcccaccgccacacagccaaaagaagggaacgccgacaaaaaggcggcgcccagcggccacacgc

SEQ ID NO: 62013 - RNA, 67 nt, Homo sapiens
gcagcacaaccggaggaaaggccaggaaccagcaccaacaagacgcaaaaccagcaggccgcgaaga

SEQ ID NO: 62014 - RNA, 54 nt, Homo sapiens
ccggggacagacagggaggaaaaggaggccaccgcaagagagaaaggaaaggca

SEQ ID NO: 62015 - RNA, 71 nt, Homo sapiens
aagagccaccgcaccggacccgccagaggggagagcggagcgaagcgaacaaaaagcagcaaaccggacca

SEQ ID NO: 62016 - RNA, 76 nt, Homo sapiens
ccgaaccccaggggagacaacaagacagcaggggaaacagggacggagacaacaggcacaaagagagaaggaacac

SEQ ID NO: 62017 - RNA, 66 nt, Homo sapiens
cgagaacggggccagcacagagaggcgacagcggagaagggaaggcggaggcagggcgcgaccggc

SEQ ID NO: 62018 - RNA, 74 nt, Homo sapiens
ccgagaagcggggcaccacgaaggaccgaagagggcgaaaccaagaggagggaagcaggcagacgcgaggccgg

SEQ ID NO: 62019 - RNA, 81 nt, Homo sapiens
ggcgcccaggccaaccacgaaagcacaagaccgaaacagaaccgagcgaagcgccaggaacacaagaaaaaagcgagccgg

SEQ ID NO: 62020 - RNA, 65 nt, Homo sapiens
cggaaaagaagcacagaaccaaacaggggggccagagcagagcgggagaggaaagaaaccaagaa

SEQ ID NO: 62021 - RNA, 74 nt, Homo sapiens
gagccacgagcccaacgagacaccaagaccgcagagaagaacaaacagcgcaaacgagggccaacgggccccgg

SEQ ID NO: 62022 - RNA, 74 nt, Homo sapiens
gaggaagcgggcccacagaaaagcagcccaacgaaaaccgcgagggacaaggcacacgcgggacggagcccgga

SEQ ID NO: 62023 - RNA, 90 nt, Homo sapiens
cccagaagaggggcacaggaggaagcgaggccagacagcaagagcacccgacccacaggccagagagacaacccagaaaagaaaaggcca

SEQ ID NO: 62024 - RNA, 61 nt, Homo sapiens
cagcgccagaaccacggcaaaaggaaacggagggagcggccggaacccaagccaggcgcca

SEQ ID NO: 62025 - RNA, 75 nt, Homo sapiens
ggagagggaagcaaagaaacacaccacccaggcaaacgaccaaagacaagaaggacccggcgccacaagaccaag

SEQ ID NO: 62026 - RNA, 77 nt, Homo sapiens
caaggcgcgacggccaccgcaaccccacccccagaccaaaggcagagcggaaagcagcgcccacaaagagaaggacc

SEQ ID NO: 62027 - RNA, 78 nt, Homo sapiens
accgacagaaccacaggagaaccccgcccaggaggcaaaaaggcacgagcaaggaagcacaaacaaacagcggagcag

SEQ ID NO: 62028 - RNA, 73 nt, Homo sapiens
acgcgaggggacgaggaagacagggcaaggggggccacaccgaaccagcacgggaggcgaggcagaagaacac

SEQ ID NO: 62029 - RNA, 80 nt, Homo sapiens
gcaggaggacggagcccaaccgcaacccgcgccgcgccgcgccgcgccgagagcagcaacagacgaggcaggcagaaaga

SEQ ID NO: 62030 - RNA, 54 nt, Homo sapiens
cagaggacacagagcaggaggagaagaaaccccaagaccagagggcagcccaga

SEQ ID NO: 62031 - RNA, 73 nt, Homo sapiens
gaagacaccaaaaagcaaacggaccagaccgaccaccaaaaagagacaagagagacaccccaaccgacaaaga

SEQ ID NO: 62032 - RNA, 79 nt, Homo sapiens
gcacgaggagcgcggaaccggggcgagaaaacccgggaggccgacagagggcgggcggccaggccagaccaagaagcca

SEQ ID NO: 62033 - RNA, 86 nt, Homo sapiens
gccccccgccgccgccgccgcgcgccaaagcgcgccgccccgggcaaaagcaaccagcagcaaaacgaaagcggacaggaaagaaa

SEQ ID NO: 62034 - RNA, 83 nt, Homo sapiens
cccccaagcgcagccaggcggagagaggcgccccgcagcccccaagcaggagccaaccaaccccagggaggcaaacagaaaag

SEQ ID NO: 62035 - RNA, 84 nt, Homo sapiens
ccccacccggaggcccgccggccccggacgacaggacgccgccaccccaggagccacgagccggcggggagacaccagcggcgc

SEQ ID NO: 62036 - RNA, 76 nt, Homo sapiens
cgcgggcgcgagggcagaaccggaacgaaaccagaacagaaagggacgggacagcaaaaggcgaccaggacacaag

SEQ ID NO: 62037 - RNA, 75 nt, Homo sapiens
gccacaaaaccagagcggagacacccaggaggcagaagccaggaagaaaacgccagagaagcagagcagcccgga

SEQ ID NO: 62038 - RNA, 82 nt, Homo sapiens
aaaagagcgaaaaagacacgccggggagagaagaccaagaggcggagaagaggagaaaagggcagaggccaaaaggagaaag

SEQ ID NO: 62039 - RNA, 73 nt, Homo sapiens
acagaacaggaggggagagggcaggaaccaccgcccaaagagcccaaaaggcagagcgaggagagaagaagga

SEQ ID NO: 62040 - RNA, 81 nt, Homo sapiens
gccggaaacccgggccccggccccaagggcaccgggacagaagacaaagcagagcccacagacaaggccaaaggcaaagcg

SEQ ID NO: 62041 - RNA, 81 nt, Homo sapiens
gccaccggaggggcagcggcgcgggagcagaggagcgaggaaaccaccccacccaacccccgacacagaagaggagaaaac

SEQ ID NO: 62042 - RNA, 68 nt, Homo sapiens
caaaaagcaccaccgccagcgaagcaccgagagcccgagaaaagacgccgcgcccaaccccacccacc

SEQ ID NO: 62043 - RNA, 75 nt, Homo sapiens
gaaagacaccccagggacagcggagccgggaccgcagccaaagccgcaaaagaaaaaaccccacaagaagaaaga

SEQ ID NO: 62044 - RNA, 76 nt, Homo sapiens
ccggagcggagcgcaggcgccgagacgacaacgcggcccacaggggggccagagcacagcacgagaacaaaaagcg

SEQ ID NO: 62045 - RNA, 77 nt, Homo sapiens
acaagagcccgagcgccacggaacgaggggcaaaggagcagagaacgacaagccacacgaggacagcccgcaacacc

SEQ ID NO: 62046 - RNA, 80 nt, Homo sapiens
gcagcgaccacccacacaaacccgggacgggccgagagagacgccaaggccccaaaggacaaagcacagacagcagaagc

SEQ ID NO: 62047 - RNA, 61 nt, Homo sapiens
aagacccacaggcaaagaggaggacgacccggagacgcggaggcaggcaccgaagcgcagc

SEQ ID NO: 62048 - RNA, 69 nt, Homo sapiens
aggaggggacaaaaccccgaaaaaggcgcgaaacaaaggaaacacacaggagaccaaagccagaccggg

SEQ ID NO: 62049 - RNA, 85 nt, Homo sapiens
ccgaacgagcggaggccaacaaagaagcgccgcggagccacaacagcaagcagccaccaccggagaaaaccggcccaaacagagg

SEQ ID NO: 62050 - RNA, 97 nt, Homo sapiens
ccggagaaccacccggaggagacggggcagacaacggagcccggggccgagggagcaacaagagcagaaaggaagaaccacccgcccaggagaaaaa

SEQ ID NO: 62051 - RNA, 64 nt, Homo sapiens
ccggcccagcccgccacacacccgaccgcacgcccaggaaaaccagagacccagacacgcgaag

SEQ ID NO: 62052 - RNA, 81 nt, Homo sapiens
cagaccaagcgaagaagagcaaaaggcggagcgagccacgagcagcaaggcagcacgcggcccccgaaccccgccgccggc

SEQ ID NO: 62053 - RNA, 72 nt, Homo sapiens
gcggaccgcacaagcagggagccacgccccaggggagccaacgccagcagccgcaccagggccagggaccgc

SEQ ID NO: 62054 - RNA, 78 nt, Homo sapiens
ccggaggaccacaggcccagacgagcggaggaggcacagggcgcggaccgcacgagcgcgccgaccagacagaggacc

SEQ ID NO: 62055 - RNA, 45 nt, Homo sapiens
accgacaagcagcccgcaggcagggcaagaaggagagacacagcg

SEQ ID NO: 62056 - RNA, 53 nt, Homo sapiens
acacagggcagaacagcacaaacgcgaggaggcccggagaacggcaagcgcag

SEQ ID NO: 62057 - RNA, 82 nt, Homo sapiens
gacaaggcaccaacagaacggccccaaaggaggaagaaacacggccggcaacgggaagcgcaagccagccggggaggagggg

SEQ ID NO: 62058 - RNA, 58 nt, Homo sapiens
gaagcacaaaagagagacgcccagggagagagcccaccaaggaaccacgaaaccaccg

SEQ ID NO: 62059 - RNA, 48 nt, Homo sapiens
cgaggaccgaagagagccccgacgcagaaggacccacagaagcccaag

SEQ ID NO: 62060 - RNA, 73 nt, Homo sapiens
agcaggcgagaagagaagcgcaaacagagacaccgagagccagcacccaacaggcgacaagaaggaagcaagg

SEQ ID NO: 62061 - RNA, 81 nt, Homo sapiens
agacacgagcacaaacgaaagagccgcagacgcacagcaaccaccggacccgaaggccaccacccagaggggccgcccgac

SEQ ID NO: 62062 - RNA, 68 nt, Homo sapiens
aaaccgacaaaaaacaagagaaccaagcgcaagggcggggaacagaccagggaaggggaggagaagag

SEQ ID NO: 62063 - RNA, 69 nt, Homo sapiens
gcaggaccaaaagggaaaagcaccggggagaccacgagcgcaaggccagagaagaagacaaaacacgaa

SEQ ID NO: 62064 - RNA, 85 nt, Homo sapiens
aacagacagaagggaggcaaagaaaaggagaaaagaagccaaagggacacgagcagccagacacagcccaacgccaccaaagccc

SEQ ID NO: 62065 - RNA, 79 nt, Homo sapiens
aggacacgaggcaggagccaaagcgaccgccggagcgaggaccagggcgaacaccggccgcggaagaccagcgggagcc

SEQ ID NO: 62066 - RNA, 76 nt, Homo sapiens
gcaagaaacccaggacgagaacagcaacagaccgaagaccgaccacgaggcgggggcggaagaggcgagggggccg

SEQ ID NO: 62067 - RNA, 72 nt, Homo sapiens
caggagagcaggccgaccacagaaaaccccgggacagaccggagcggggaggagcgccggccgaaacgagcg

SEQ ID NO: 62068 - RNA, 77 nt, Homo sapiens
gcgacggacacgaggagcagaagcaggcccgggcccgccggccacaccacacgcccccgccgcccacaacgccggag

SEQ ID NO: 62069 - RNA, 78 nt, Homo sapiens
gcccccgcgacccggaccaccgggcgcggcgccccagccggcgcaaggaagaagagacgccgcgcggcagacaaggcc

SEQ ID NO: 62070 - RNA, 77 nt, Homo sapiens
ccagccacagcacccacggccaccaggaagaagagcaccggcgacaaaggacagccaccccgacacccgacaaaggg

SEQ ID NO: 62071 - RNA, 68 nt, Homo sapiens
accaggagcgaagagcgccgacaaggcgggcccgggagaaggggcggaaaacacaaccaagagaacag

SEQ ID NO: 62072 - RNA, 67 nt, Homo sapiens
gcagcccgggccgccggaacccgggcaccccgacaacccagaaacaggacacaccggacaaaaggca

SEQ ID NO: 62073 - RNA, 60 nt, Homo sapiens
gcccgcccggagggaaaggccgcaaggagaacgcaggacaccaggggggaaaaaccacac

SEQ ID NO: 62074 - RNA, 70 nt, Homo sapiens
gaaaggaccccaccccgcacccaccaaccgccccacccaccggaagaagcggaggcccaggcaaccaacc

SEQ ID NO: 62075 - RNA, 66 nt, Homo sapiens
gaagacgcagaggaaacggcagcagaacgaacgacccaggagggagaaaagaaacccagagaagcg

SEQ ID NO: 62076 - RNA, 79 nt, Homo sapiens
ccccgcaacgcccccggcccgcagcccccgccggccgcccaacaccgaacaccagccggcaagggaggaaagcacccga

SEQ ID NO: 62077 - RNA, 91 nt, Homo sapiens
gggacgaaagagaaacccggagggcgccgggagagcagcaccagcagaagagggcccgaccacggcaacccagaggcgaagcaggacaccc

SEQ ID NO: 62078 - RNA, 76 nt, Homo sapiens
gacgcacacggccgagcccacggggccacaccacgcagaacgccagaacaaacagcgagaaaaccgacccgcccag

SEQ ID NO: 62079 - RNA, 77 nt, Homo sapiens
gaaagcggaggacaaagaaaaaaggaaaggcagcagcaccaagcccagaaggggaagacccccagcgaacagagacc

SEQ ID NO: 62080 - RNA, 81 nt, Homo sapiens
caaggcaaaaacaagcaccagaggcccgagcagccagcacggagcccgggaccgggagcccgggaccgggagccggggggc

SEQ ID NO: 62081 - RNA, 73 nt, Homo sapiens
cagcgcaccacaggggcccaaaccaagaagcagagaggggccagcacacagggggcagcacgccgaaggagag

SEQ ID NO: 62082 - RNA, 79 nt, Homo sapiens
gggggaaaacaaagaccaaagagcgccaaggggccaagggagagcggggccccccccaaggcaccccccggcggaacga

SEQ ID NO: 62083 - RNA, 71 nt, Homo sapiens
cagcccccgggaggagcccgacccccagaccccggggaaggagggggggcgggcccaggcggcagggaagc

SEQ ID NO: 62084 - RNA, 62 nt, Homo sapiens
ggcgcccggccaccgcacccagggaaccagcggggaaacgaggccggggggagcgcaggagg

SEQ ID NO: 62085 - RNA, 73 nt, Homo sapiens
ccgcgaccggggcccggggaaggcccgccgcccgccccaggaaagaccacagcaagaccacgcccccagccgg

SEQ ID NO: 62086 - RNA, 67 nt, Homo sapiens
aaacccagcacaccgaagaggagaaagggagccccaggcccaaagacccaggaagccggaaagaaca

SEQ ID NO: 62087 - RNA, 75 nt, Homo sapiens
gccacaaggaggacagaggcacagcgccagagcaaagaggaggcgacagaaaacgccaagacaggagggaaccca

SEQ ID NO: 62088 - RNA, 73 nt, Homo sapiens
caacccgcgcggcaagaagacggcgcggcaaccggggagcccgccagcaccgaaaggaacaacgacagcggca

SEQ ID NO: 62089 - RNA, 72 nt, Homo sapiens
gagcggaagcaggagaaagaagagcccgcgaaggagaaagaaaagcccaaggacaagagcgggagcacacaa

SEQ ID NO: 62090 - RNA, 99 nt, Homo sapiens
gaaaggcgccagccagcgcgaggcgccaaggcaggaccaaggacgaagcggagggcagaacacccaaggagacaaagaaaaggcacagaagacgaagag

SEQ ID NO: 62091 - RNA, 86 nt, Homo sapiens
ccgccgccgcgccggcccccgcggagagggcgcccgcgccggcagaggaggcgagcacccgccagggagaggaacccccgcgcacc

SEQ ID NO: 62092 - RNA, 79 nt, Homo sapiens
gcaggaccggaacgcgcgcggagggggcggcgcggcaggagcgcggagggacgcggcggccggggcagcgccgcgagcc

SEQ ID NO: 62093 - RNA, 70 nt, Homo sapiens
agcaaggcagaagaggccacagacaaggcaggacaggaagccacggcagagaagcgaggggccccacaga

SEQ ID NO: 62094 - RNA, 78 nt, Homo sapiens
caggccaccaccgcgcacgccagcagcaagccccagccaacccgaaaaccccccagcggccacagagagcacaaagag

SEQ ID NO: 62095 - RNA, 78 nt, Homo sapiens
agcgaacccgggaggcagagggccacgagcagggaaggggggagacgagaaaacagaagcagcggagcacggaaaaac

SEQ ID NO: 62096 - RNA, 82 nt, Homo sapiens
ggccagacccacgcggcgccagcccggcgggaaggaaaaccgcgcagagagaagccccaggccacccccgacgcagccggag

SEQ ID NO: 62097 - RNA, 85 nt, Homo sapiens
gacacaccaccaagaagccagcaagcggccaggcgacggggacgaccagcgggagccggcgcgcgcgacgggcacgcagcgagca

SEQ ID NO: 62098 - RNA, 76 nt, Homo sapiens
ggaggccccagcggaccgaacagggcccacgggggacagaagaccgggagcgggccaagaacgcgagaacccagaa

SEQ ID NO: 62099 - RNA, 54 nt, Homo sapiens
gaagcagcggcggaagcgagcagaacagaacaacacggaggaaaccaccgagcc

SEQ ID NO: 62100 - RNA, 82 nt, Homo sapiens
cgccgaccggggcccaggcccgacgacggcagaagccgggcggaagcccacgcacaggcgccggggcggcagaacggaggac

SEQ ID NO: 62101 - RNA, 60 nt, Homo sapiens
gacagagaaggaaagggacacgcccaacccaccagaagcgaaaccacaacacccaaaagc

SEQ ID NO: 62102 - RNA, 32 nt, Homo sapiens
gaacaaggcaaaagggggaacaacgagagcgc

SEQ ID NO: 62103 - RNA, 102 nt, Homo sapiens
caccagcaaaacagcccagagcaagacgaaagggggagaacaaggaggcgcggaacagcacaggaagggaagggcaggccagcagccgcgcccagacgccac

SEQ ID NO: 62104 - RNA, 65 nt, Homo sapiens
ccgcacgcgcacggacggcacagcccgccgaacccgaaaggagaaccgagccaccaacagaagca

SEQ ID NO: 62105 - RNA, 82 nt, Homo sapiens
aaaagggcgaggaacgcgccgccccccgcgcagccagcccgacgagcggcccggaccgggcggagaacggaaaagcaccagg

SEQ ID NO: 62106 - RNA, 79 nt, Homo sapiens
gcaaacacgcagaacagcccgaggcaagagaagaaagagcccagcaaaaagaggagaagcacccccccagaagaaaaga

SEQ ID NO: 62107 - RNA, 74 nt, Homo sapiens
gaaaaaaagggacagaaccaaagcgccaaaaaagaacagggaaacgacacacaagcgacagggacgagcaacgc

SEQ ID NO: 62108 - RNA, 73 nt, Homo sapiens
agggaagaagaaaaacaaggcacgaccccaaaggaagccagcaaggagggcgaaagagagaagaaaccagagg

SEQ ID NO: 62109 - RNA, 81 nt, Homo sapiens
gcgggacccgggaaagagccggcccgagccaggcggggccggcaggaaggcagaaagcagagagcgagcccaaaaagagaa

SEQ ID NO: 62110 - RNA, 69 nt, Homo sapiens
agcggaacacaccagcaggaagacacccacgaggacaaccccacagagcaagagacgaagaagccagac

SEQ ID NO: 62111 - RNA, 68 nt, Homo sapiens
gcagcccaggccgagacgaaaggcagccaacgccaagaaccaagaaagacgacgcggaacgagaggac

SEQ ID NO: 62112 - RNA, 72 nt, Homo sapiens
cgcaacacaagggagccggggcccccagcaagaacgggaacaaaaccgcgcaagcaaggagcgaaaccaggg

SEQ ID NO: 62113 - RNA, 81 nt, Homo sapiens
gcagggcccggccccgaccccgcggccggacgacccaagcccgcgagcaggagaggggccacccccaaccaggaccaaaga

SEQ ID NO: 62114 - RNA, 70 nt, Homo sapiens
agcggccaccaccaaaggaggaccgcagaccgagagaaccgcagggaggagacgacgaacgcccgcacgg

SEQ ID NO: 62115 - RNA, 72 nt, Homo sapiens
ggccggcgagcgcagcgcgaccgggaggcccagcaagagaacaacggagagagacgaggagcgggaagaaga

SEQ ID NO: 62116 - RNA, 63 nt, Homo sapiens
aagaacacaaggacacagacaaagaaccaccaaccacagccgacggcccagacgccagaggaa

SEQ ID NO: 62117 - RNA, 38 nt, Homo sapiens
gaaggccgcagccgcaacaaggaagaacgccgaacagc

SEQ ID NO: 62118 - RNA, 70 nt, Homo sapiens
gagagaaggaaaccaaaaacggccgacaccaaaagcaaaccgccagaccaccagaggagaccaagcaggc

SEQ ID NO: 62119 - RNA, 75 nt, Homo sapiens
caagaggagcccgaggcagagcacacggggaagccaagggacaccaccccggcacgagaccggcggaccccggag

SEQ ID NO: 62120 - RNA, 76 nt, Homo sapiens
gggacacgcaggacgagcggccgaagcagcgcgcagccacagagaagacccagacgccacaacccagacacacaaa

SEQ ID NO: 62121 - RNA, 65 nt, Homo sapiens
cgcaaaccgagacaagcaccccgaagcgccgacagggaaagcggaaccaccaaaaggaggagaca

SEQ ID NO: 62122 - RNA, 71 nt, Homo sapiens
ggaccccgaaggaggaaaacccaaccccaagaaacagaagcaaaaaaggcgccaaaaaaagagaacacaga

SEQ ID NO: 62123 - RNA, 73 nt, Homo sapiens
gggggccagagcgcccaaggcccaggcgcccggagcaccgaaacgccgaaaacgagccggacagagacggaga

SEQ ID NO: 62124 - RNA, 77 nt, Homo sapiens
caaaacgccccaaccacgccaaagggaccaggagcagcagaggcacacagcagcgcaccccccgcccgcacacggcc

SEQ ID NO: 62125 - RNA, 77 nt, Homo sapiens
cggggaccccgccgaagaggccacagacaagagagccccaggccaaccacggacgcaggaccccagcgacacgccag

SEQ ID NO: 62126 - RNA, 85 nt, Homo sapiens
gcaagaagggccgggggcgagccggagcgaccccggcagggcccaagcacgggggaagcgggcggcaccgagaacaagaggcgcc

SEQ ID NO: 62127 - RNA, 66 nt, Homo sapiens
gggacgccacaggcgggaaggaacaccaagcagcaagagaagagcgacgcggcagcgagagagaga

SEQ ID NO: 62128 - RNA, 98 nt, Homo sapiens
gaccccaccagagggaaccggggcgccccaacagcgccaaggagccagcgaccaggacgggaagacaaccagccagaggccggaggagagagggaaag

SEQ ID NO: 62129 - RNA, 77 nt, Homo sapiens
cgcgccgccgggcgggcccgcagagacaggggagagccaccgacccaagagccaccccaaaccaaacaacagcacag

SEQ ID NO: 62130 - RNA, 58 nt, Homo sapiens
gcgacgcgcacgcgcggcggcccaaaaagagagaggaagccaccacgcaaccagaccc

SEQ ID NO: 62131 - RNA, 57 nt, Homo sapiens
aggacagggggacagggccgccgcaccccaggcacaacggggccacagagagcagcc

SEQ ID NO: 62132 - RNA, 72 nt, Homo sapiens
agacacaaggcagacaaagaagcacggaacagacacacaacggacacgccaaccgcgccgaaacaaagaaaa

SEQ ID NO: 62133 - RNA, 73 nt, Homo sapiens
aaccaaggccggggcccaagggaggggaacggaaacccaggaaaaaccaaaccagacgaagacggaacccaga

SEQ ID NO: 62134 - RNA, 79 nt, Homo sapiens
agaaacacacaacaggaaccaggggcaccaccaacagacaaggccagagaaggcaggggaacagaaaccccaagaaccc

SEQ ID NO: 62135 - RNA, 82 nt, Homo sapiens
aagcagcgggcccgggaggggccaaggcacagacgggagcagccgcggggcccccccaaggcccgcgagacccaaggagggc

SEQ ID NO: 62136 - RNA, 112 nt, Homo sapiens
cccacgaccagcaggaagaacaaacgagaaggcagagaggggaagaccaagagcacagagccagcgggccggcaccggcacgaggagcgcacacccgcccagccaagaccgc

SEQ ID NO: 62137 - RNA, 84 nt, Homo sapiens
gcgacccggagacagcccaaaacccggaagagcgccccaggagaaacaagcacccccgaaggccaccgcacacaccaacaggca

SEQ ID NO: 62138 - RNA, 71 nt, Homo sapiens
cgccggccgacggccggcgggcgggggccccgcgccgcggccgagcagcgggagggaccagaggcgccccg

SEQ ID NO: 62139 - RNA, 80 nt, Homo sapiens
cgccccagacaacaagcacgacgcaaagaaggggggggcccagggggacgacaaagagaggccacaaggacaccagcaac

SEQ ID NO: 62140 - RNA, 85 nt, Homo sapiens
ccggacgaggccagaaggcagaagaacagacggcccaggaggccagaaggaaaacgcccaggaaggacggccccacagagcagca

SEQ ID NO: 62141 - RNA, 61 nt, Homo sapiens
ggagaacaaggcacacagagacagacaaagcagccagcgcgcagggccagccacaaggcaa

SEQ ID NO: 62142 - RNA, 72 nt, Homo sapiens
cacaaagaacagaagaacggacaccgcccaccaaccagagagccaaggacccaaagacaggaccacgcacca

SEQ ID NO: 62143 - RNA, 82 nt, Homo sapiens
ccaaggagcacggggcgagaggaaaccacggaggcacaagccagggaggccagaaagacagacgagaaaggggaagggcaga

SEQ ID NO: 62144 - RNA, 54 nt, Homo sapiens
gccgggaacgcccgaagccgcaggggggcaagagcagacggcggcagacaacac

SEQ ID NO: 62145 - RNA, 72 nt, Homo sapiens
caggggggcgcgccacggcgacgccccagcccgcccaaagaaagaaggagacaaggccgacgcgcacgaaca

SEQ ID NO: 62146 - RNA, 71 nt, Homo sapiens
cccgggccggccaacgagagagaagggaccagcgcaaacggagaacagagcgacaaaggaaaacagaccag

SEQ ID NO: 62147 - RNA, 69 nt, Homo sapiens
caccggcgggaggaacaaaaggagccccaccccaccacccgcgcggcacccgggcccggaggggcgggg

SEQ ID NO: 62148 - RNA, 58 nt, Homo sapiens
ccggccacgcgggggagggccggccgcaggcccaagccaggaccacgcaccgggaggg

SEQ ID NO: 62149 - RNA, 76 nt, Homo sapiens
gcaggcggcgcggagagggggcgcgagcggggggcggcacccaccccccgagcccgcccgccggccccagccccca

SEQ ID NO: 62150 - RNA, 74 nt, Homo sapiens
cacccccgaacagcacccccagcagccaccagcagacaacgaagagaggaaagaagcggaaaggagggagcaca

SEQ ID NO: 62151 - RNA, 82 nt, Homo sapiens
ccccagcggccaccgcgggagaacacaaggccagcaccgccacgggagaaggcacgccagccagccgggcaggagggcccgc

SEQ ID NO: 62152 - RNA, 85 nt, Homo sapiens
ggccaccggaaacccgggggcagcgggccgaccaacccgaaaacagcaggcaagagaagccgagccaggccgcggagagccgccc

SEQ ID NO: 62153 - RNA, 78 nt, Homo sapiens
caccaccaggaccagaggccgccacaaccgccagacaaccggagccacgccccacgaccgccaggcaagaggccaacg

SEQ ID NO: 62154 - RNA, 69 nt, Homo sapiens
accaagaaccaggaccagacagcaggaaaagacaagaaaaggcgccaacaacccccagagccgagaaaa

SEQ ID NO: 62155 - RNA, 40 nt, Homo sapiens
ggcaaagggcaaaacggcaccgaaagcgaaggaagcccgc

SEQ ID NO: 62156 - RNA, 56 nt, Homo sapiens
ccaggcaagcccagaccggccccaacagaagaagccacacacagaagacccaaaga

SEQ ID NO: 62157 - RNA, 80 nt, Homo sapiens
cagaaccagcaaagaggagcgaagcggagcgcagcagaagaggcggccacccacgagccgacggcaaacgccagggagcc

SEQ ID NO: 62158 - RNA, 75 nt, Homo sapiens
cccgcaccaaacagagcagcagcagcagagagaaacagcaggaagaaggagaaagacaaagccccgagaaagacc

SEQ ID NO: 62159 - RNA, 60 nt, Homo sapiens
gagcgcccgcgacagaggagggaggaaaacaaccgagggcagaagcaagcaagaagacgg

SEQ ID NO: 62160 - RNA, 80 nt, Homo sapiens
gcccgcccccaaagcgaccgacccggacgagaaacgcaagagggggcccggaggggcgcccaggccgagcacccaggcgc

SEQ ID NO: 62161 - RNA, 55 nt, Homo sapiens
ggccacccaggcccggaggcagcgcagcgaggggcacagaggcaggcacaaaacc

SEQ ID NO: 62162 - RNA, 75 nt, Homo sapiens
ccggggggagcaggccccaccagcccaaccgcgaacagcaagccccacaaaggagcccccgggacagaggaggga

SEQ ID NO: 62163 - RNA, 74 nt, Homo sapiens
caagaggagaagacgagcaggcagacgacagagccacacaagacggggcccggagcagagacgagcggaagaga

SEQ ID NO: 62164 - RNA, 61 nt, Homo sapiens
ggaggccgcggaagaccgacaaagcacacggcaggaaaagagaaggcagaaacaaaaaagg

SEQ ID NO: 62165 - RNA, 75 nt, Homo sapiens
cggcgacggaccacagcaggggggcgggagaccagagagcggccagccggagaaagaggaggggacaagcgcggg

SEQ ID NO: 62166 - RNA, 53 nt, Homo sapiens
ggacgcaacacggaacagacgcagcggagcgaccggccgggccgaccacggcg

SEQ ID NO: 62167 - RNA, 74 nt, Homo sapiens
aaagaaacggaagcaaacgcagacaaagaacaaggaaaagagcacggaggccgaaagagcaagaaaaagcgaaa

SEQ ID NO: 62168 - RNA, 74 nt, Homo sapiens
cccacaccagaacccagggagagaacagcacacagaggcgcaaggggaagagaaaagacagaagcaccaaacag

SEQ ID NO: 62169 - RNA, 75 nt, Homo sapiens
cgccgggggccggcaaggaaacccaaccccagcaccgcaccaacgaccgaagcaccaggcacacccacaagccga

SEQ ID NO: 62170 - RNA, 39 nt, Homo sapiens
cccccaagagcgggacaggcaggagaacgcgagcccggg

SEQ ID NO: 62171 - RNA, 78 nt, Homo sapiens
cgccagcgcacgccccacggaacaccccgcgccgccaacccgcccccagcgacagccgcgggccccacggccgccagc

SEQ ID NO: 62172 - RNA, 84 nt, Homo sapiens
gcacgggcacccccagaggcgcggaaggaccggccacccagcaagaggagccaggagcacggggggaacaagaccgccgggacg

SEQ ID NO: 62173 - RNA, 54 nt, Homo sapiens
gccgccaaagacgccacgcccaccacagagcaagaagcccgaacgccaacccgg

SEQ ID NO: 62174 - RNA, 75 nt, Homo sapiens
gcacgagggcagggcggaagacacgcacagaacccaaagcccaagagggccccagggacccaccccccccggagc

SEQ ID NO: 62175 - RNA, 47 nt, Homo sapiens
gagcaccagaacccagaacaagcagggaggcgcccccaacgccgaac

SEQ ID NO: 62176 - RNA, 70 nt, Homo sapiens
cgacaggaggagacaggcgagagaggaggacacgaccgaacaaggagcgcaagagaacgacaacccacgg

SEQ ID NO: 62177 - RNA, 74 nt, Homo sapiens
gaggccacaaacgcaacgagaaaaaggaagaaacaccaagaacaagagcagccagcggaagagggaagaaaaca

SEQ ID NO: 62178 - RNA, 52 nt, Homo sapiens
ggaggggaagccaacaagccgaccagacgagaccgacggggaaggaagccac

SEQ ID NO: 62179 - RNA, 59 nt, Homo sapiens
ccgaccagggcaacaccaaaaacaaaacgaaccaggacggcaagacaaagcggcgcacg

SEQ ID NO: 62180 - RNA, 75 nt, Homo sapiens
cgcccggcccgggaccgcgggagggcggagaacggaaaagcaccaggaagcagagaggaccgcagaagggaagga

SEQ ID NO: 62181 - RNA, 73 nt, Homo sapiens
aacaggcaagacgggggggccaaacacgggacaggagaagggcccagacggccacgaggacgggccaggagaa

SEQ ID NO: 62182 - RNA, 61 nt, Homo sapiens
cccacagaggaaacacgcaacgcccgcgcggcggcggccgcagggggcggagagggcaaga

SEQ ID NO: 62183 - RNA, 83 nt, Homo sapiens
gcggccgcagcgacccgaccccacccgacaggccagaggaggaggagcagcgcggaggaggaagccccccggccagaacaccg

SEQ ID NO: 62184 - RNA, 86 nt, Homo sapiens
gggaccgccggcccgaaaacccaacaggggcacagggcccaaagcgaggaaacgccgaacaagaaccaccgggaccccccagaagc

SEQ ID NO: 62185 - RNA, 46 nt, Homo sapiens
ccacaggcagagggaaacgggagggacggaaaaggcgcacacgacc

SEQ ID NO: 62186 - RNA, 86 nt, Homo sapiens
agcggaggaggaaccgaaccaggaccaggccccaagcccgaggcccagaggaggaggcgggcagggcgggcagcggccgagccagc

SEQ ID NO: 62187 - RNA, 79 nt, Homo sapiens
cggcgcccgcgggccgcagcggggggggcgcccgcaacgaggaccagaccgaggaccggaagaagcagaggagccagac

SEQ ID NO: 62188 - RNA, 76 nt, Homo sapiens
cgcacgagcaccagccagagccaggggggccacgggccccgaccgcccacaagcgcacgggggcacccaacaccga

SEQ ID NO: 62189 - RNA, 70 nt, Homo sapiens
gacagccgaaggagggcaagacagcgagggacgaaggagaccgcgcaggcgaggagccccggagggacgg

SEQ ID NO: 62190 - RNA, 59 nt, Homo sapiens
agacgcgaaacgaccccaacaaaaaagcgaagagcgcgccggagcaaagggagacggcg

SEQ ID NO: 62191 - RNA, 83 nt, Homo sapiens
aacgcccaagccccaccgcgagagaagcaaagcggcacaaggaacccgcacacgacacggcgccggcggggaccagagacacg

SEQ ID NO: 62192 - RNA, 82 nt, Homo sapiens
ccagggaacggaggagcgagccacggcgcagccggcccagcccaccccaggcccccccagcccagcaccaccagcagaaaac

SEQ ID NO: 62193 - RNA, 59 nt, Homo sapiens
ccagggcagcaccgggcagcgagacgaaaaacaagccagaggacaacagagcaaccagc

SEQ ID NO: 62194 - RNA, 68 nt, Homo sapiens
gagaaaccgccgcccagaagacagcaccacaagccaacaaaccgaaaaaagagacgaagacggaccag

SEQ ID NO: 62195 - RNA, 83 nt, Homo sapiens
ccaggacagcacagcagcccgcgcccggcccacgcccgaaggcccacaggacagagcccacagcacccccagcccgcagccac

SEQ ID NO: 62196 - RNA, 64 nt, Homo sapiens
aaccgggaaacacaaagaaacacaggcaacgagccacacgaaagcaggaaaacggcgcaaacgg

SEQ ID NO: 62197 - RNA, 82 nt, Homo sapiens
ggcggagggcacggccaaggaggaaacgagccacagggccagacaaccacgccgggcgcccaggcgggaagaaagaaaagag

SEQ ID NO: 62198 - RNA, 69 nt, Homo sapiens
gggggcggggcaggcaaaagaaagacgagacgaacaggcaggaacggaaggaagccgaggagacagccc

SEQ ID NO: 62199 - RNA, 68 nt, Homo sapiens
aggccccggggacgggcgacaccggccgcacgacagcaagccaaggagacaccaggaaacgagaagga

SEQ ID NO: 62200 - RNA, 94 nt, Homo sapiens
ggaaaaaggaaggccgccggacagcgcagagccaagacggagaaacaaaccagcaccagacagcgaaaaagaggacccaaaaaagagagaaaag

SEQ ID NO: 62201 - RNA, 68 nt, Homo sapiens
caaacaaagccaaggaacaaagaaggcggcagccaagaaaaaggcagaaaaccgcgcgggagggggca

SEQ ID NO: 62202 - RNA, 92 nt, Homo sapiens
cgagccagcaagcggaagcgccccaccgcgggcgccaaggggagcagaaggaccggacacagaaagccaacaggcagaccagagacagcgcc

SEQ ID NO: 62203 - RNA, 73 nt, Homo sapiens
caccgccaagacaacaccgaggcggaggcccggaggcaagacaacaaaggacggaccacagagacacgggacg

SEQ ID NO: 62204 - RNA, 80 nt, Homo sapiens
gcaggcccggcgacacgcacccacccggcgcgcgcgcccccagccccaagaaagcggagaagcggaggagaccaaggagg

SEQ ID NO: 62205 - RNA, 63 nt, Homo sapiens
cggaggaccgacaggagagaacacaacagagaggagagcaaccagaagggagggaccggaaag

SEQ ID NO: 62206 - RNA, 73 nt, Homo sapiens
cacaacccccagacgcaagccaagggaaagggcaaaaaggaagaaacacacgaaggacaacacacgacaccac

SEQ ID NO: 62207 - RNA, 76 nt, Homo sapiens
acaccggcggcggccagcccgacacagccaacgggacaggaaaaccagcccacagcgcaagaagacgcagcgcgcc

SEQ ID NO: 62208 - RNA, 66 nt, Homo sapiens
gcacgggccacagcacacgcccacacgcgccaggccacgagagcagcccgccccccggagaaagcg

SEQ ID NO: 62209 - RNA, 69 nt, Homo sapiens
accggccagcccccccaaaaaggaaagacaccggcgggccaggacagacacaccccccggcaagcgccg

SEQ ID NO: 62210 - RNA, 72 nt, Homo sapiens
aagggcgcacccagccgccagacaccagaggccccacgaccaggaggaagcggagggcaccacggggaggaa

SEQ ID NO: 62211 - RNA, 40 nt, Homo sapiens
gcacacgagcggaggcgaaggccaggcgaggcacgcgggg

SEQ ID NO: 62212 - RNA, 86 nt, Homo sapiens
cagacacgagacagaaaggaaccggcggccggggggacgcagaggacgagaaaagaaggaggaccaccaaaacaagcccaggacgg

SEQ ID NO: 62213 - RNA, 72 nt, Homo sapiens
gccagagaggaggccacccaggaaaggggaagcgcggcacggcaagccagcgcaggaaacccgcgaggccca

SEQ ID NO: 62214 - RNA, 70 nt, Homo sapiens
gcacacaacccccgaaagcgaaacggcgcccacagaggaaagcgccaagaggaagagcagacggagggga

SEQ ID NO: 62215 - RNA, 57 nt, Homo sapiens
gcgcccaggcggagcgcaaggccgacggagaccgccccagggccaaccgggcaggcc

SEQ ID NO: 62216 - RNA, 58 nt, Homo sapiens
ggaggcggccgcccaagccgggaagaaggaaaggaggacgagcagacaggaaacacag

SEQ ID NO: 62217 - RNA, 58 nt, Homo sapiens
cagcccgaagaaaagggaaaacgcgcgggccaagagaacaccaggccaccagggcccc

SEQ ID NO: 62218 - RNA, 80 nt, Homo sapiens
cgagccacggaggcggagagagcagaaaaagccaccggagcgaagcgaaggaagcgaggacaacaccgggagagcgaggc

SEQ ID NO: 62219 - RNA, 115 nt, Homo sapiens
ggacgggaagccccggcccggcgaacaacggagcacggagcgcagccgggggccgggaccccgacagaaacagcccgccagcaagaaaccccaaaagagccaggaaagaagagaa

SEQ ID NO: 62220 - RNA, 82 nt, Homo sapiens
ccgccccaaaggagcccaaacaaagccccagaccgaggaggagaaggggcggcccggaggccgagaggagcggagagacaag

SEQ ID NO: 62221 - RNA, 50 nt, Homo sapiens
gaccaccagaacagccacagaacagcacggcggggaacgccggaacagac

SEQ ID NO: 62222 - RNA, 81 nt, Homo sapiens
gaagaggcggcgccgccacccccccccagcagccgcgccaggcccagacacgcagaggagacccgaaccggcaacagcacc

SEQ ID NO: 62223 - RNA, 77 nt, Homo sapiens
gccaaccgcccaaaaacccagagcagcagcaagaagagaagacagcagaaagcagagagcccagaagaaaccaaagc

SEQ ID NO: 62224 - RNA, 66 nt, Homo sapiens
gaaggcaccagcgcaacagccaaccaacaaaaacaggaccaaaacccaggggcggaggcagggagg

SEQ ID NO: 62225 - RNA, 81 nt, Homo sapiens
cagagccagacggaagggggcccacggacagaaggggacggagaggcccaggcccaggcccaaggccaaggagagagccca

SEQ ID NO: 62226 - RNA, 79 nt, Homo sapiens
gccgggacccggccccggcccacaggggggggcaaacccgagagaacggggccagaaacacagggacaagcacggaggg

SEQ ID NO: 62227 - RNA, 42 nt, Homo sapiens
gccccagcagaaagccaccggggcagcggaacgcgccgacgc

SEQ ID NO: 62228 - RNA, 74 nt, Homo sapiens
gcgacagcacagccgacacccccgaacagccaggccgccgcggcagcgagaaagaccagcccgccaacacccag

SEQ ID NO: 62229 - RNA, 73 nt, Homo sapiens
cgcaacaggaacggaggcgggcggccaggccgggaacggcagacgcagcagagagaccaccagcgagcgcagg

SEQ ID NO: 62230 - RNA, 78 nt, Homo sapiens
aggccgaaccgggcgacaagaggccgggcgccccgcaggacacaagaggcggcagaagcacacaagaagacaccgcag

SEQ ID NO: 62231 - RNA, 71 nt, Homo sapiens
agcaaccaaggagacggagaagaagaggcgcggaagaaagacagcgggagccaagaggccgaaaggaacag

SEQ ID NO: 62232 - RNA, 72 nt, Homo sapiens
acagaggcggcggccagaaacgaccacccagaccgacaccaagcgagacaggagcccagcccggcaaaggac

SEQ ID NO: 62233 - RNA, 76 nt, Homo sapiens
gcggggcagcagcagacagcccagccgaggagcagcgaggcgggcaagcgcagcagccgggcaccgaagcgcccag

SEQ ID NO: 62234 - RNA, 76 nt, Homo sapiens
cacggaaacagaagaaggcccggagcaaggaggaaacgggaagcgaagggaaagaacgaagaaacggaaaaagaga

SEQ ID NO: 62235 - RNA, 67 nt, Homo sapiens
agggcagaaaacccagccccgcaaccaaaaacacaaaagcgccgggagaggagaaggcagacccaac

SEQ ID NO: 62236 - RNA, 68 nt, Homo sapiens
gacacgccccacgaagggacacacccacaaacgaaccccaagaaaggcacagggcggagggggaggac

SEQ ID NO: 62237 - RNA, 76 nt, Homo sapiens
aaaacacgggaacccccagaggacagaaccccaacaagccgaagcacaaggcagccagaaccgcacggaacaggag

SEQ ID NO: 62238 - RNA, 77 nt, Homo sapiens
ccccgccgccccgggggccggacgggaacacagaggagcacgaagagcagcaaagccagaagaagcggcaccaagca

SEQ ID NO: 62239 - RNA, 85 nt, Homo sapiens
agcccaaacaggagcggagcagccaaagagaggcgggaggcggcagaagcagccagaggagggcacaggcggcgcggagcgcgcc

SEQ ID NO: 62240 - RNA, 83 nt, Homo sapiens
ccgacaacacaggaccgagcaaccacgacggcagagacaggagaggagagccacgcccacagacccgggcgagccccacccag

SEQ ID NO: 62241 - RNA, 70 nt, Homo sapiens
ggagcgaaccaagagcagccaaccaaaaacaacgacgaaagacccacagaagcgcgccgggcgcagagga

SEQ ID NO: 62242 - RNA, 80 nt, Homo sapiens
ccagcacgaggaggcgcgaggagagaacagaacgggggaaggacggggaaacagcgaacagccaccccagaagcgcggcc

SEQ ID NO: 62243 - RNA, 50 nt, Homo sapiens
aaaggggaaggagacccaaggaaagggagacgcagcagaccaaaaaaccg

SEQ ID NO: 62244 - RNA, 55 nt, Homo sapiens
cagagcaaaaacccaaaccccccaccagcgccaagaggaacaagacaacacacac

SEQ ID NO: 62245 - RNA, 73 nt, Homo sapiens
cccagagaagccgggcaccagagcaagggggagagacaaccagagcggaaagggagaaaagcccccagaaagg

SEQ ID NO: 62246 - RNA, 84 nt, Homo sapiens
gcaacaaggacaacaagagacgggacaagacagggcaaaggacagaccaggagcgggggccccccccgggcacggggccagaca

SEQ ID NO: 62247 - RNA, 74 nt, Homo sapiens
gccacgcagacggaaacaaggcaacagaaagagcaacagcagggcaacaggcccgaaccccggaaagaagacca

SEQ ID NO: 62248 - RNA, 63 nt, Homo sapiens
ggcgacggcccaggcagggcacacaacgagcagaagacaaccgagcacaaaaaaggcacccgg

SEQ ID NO: 62249 - RNA, 73 nt, Homo sapiens
agcgagggggggcgcgccggaaaccggagcgcgcagcaggccgcccccagcccagggccagaggaagcccgcg

SEQ ID NO: 62250 - RNA, 81 nt, Homo sapiens
aggagccccgccccgggaggggaacgggacaccaagcagaaccacgccagacaagacccagacggcgaacagacagaagga

SEQ ID NO: 62251 - RNA, 65 nt, Homo sapiens
gcaggaggcagcagccccgaagagaaacacacggacaacaaacggcagaagagacaacacagaaa

SEQ ID NO: 62252 - RNA, 74 nt, Homo sapiens
gaaccggaggccagaaaaggaaacgaccccggccgagcgaggagagccggagaaagcgggaacagcacaaggag

SEQ ID NO: 62253 - RNA, 79 nt, Homo sapiens
agaagagagaacagaagaacagacgcgaggcaccaccgagaacgagcaggacggaggaaacagcgccaaagcaagggac

SEQ ID NO: 62254 - RNA, 61 nt, Homo sapiens
cccaggccgcaacccggagaagcaaggaggcagcacggcaggagacgaggagaggacagca

SEQ ID NO: 62255 - RNA, 78 nt, Homo sapiens
accgaagcacaagccagaccgcgacacgagcagcgcagggaagcaagagcaagagcggccgccaccccagccgcagag

SEQ ID NO: 62256 - RNA, 95 nt, Homo sapiens
ccccggccgagagggaagaccagggggagccgagaccgaaaaacaaagccagaaaaccggaggacaacgaagccgggacaaaaacagaggccgaa

SEQ ID NO: 62257 - RNA, 85 nt, Homo sapiens
gacggaaaaaaacagagccgagaaaggaagggcgggaccaacagggagccagcaccaggagacaaagccacaaaaacaccagaaa

SEQ ID NO: 62258 - RNA, 83 nt, Homo sapiens
ggggagcaggggaacaggcggaaacccaaccaagaaggcccagggaccaagaaaggcccagggaccaaagcccggacaaggcc

SEQ ID NO: 62259 - RNA, 71 nt, Homo sapiens
ccgagacagaccagaaaaggaaagagaagagccggcgagaagaccaagacccagccccaacgcgcaaacac

SEQ ID NO: 62260 - RNA, 65 nt, Homo sapiens
ccggcccaggggccggcgaaacagaggcgaacaagaggcgccagcgggcgcgccggaagaacagc

SEQ ID NO: 62261 - RNA, 84 nt, Homo sapiens
caaaaacaagcaccagaggcccgagcagccagcacggaggaaaccccccaggcaagaggcgcaggaccgggaagaccaacaaac

SEQ ID NO: 62262 - RNA, 83 nt, Homo sapiens
ggacaggcagggaagcaacgcagagaaaacaccccgaggggcccacaggaagagagaaaacacagcagccacaagagaaagag

SEQ ID NO: 62263 - RNA, 77 nt, Homo sapiens
cgcgcggccgcccgggagggcaagacccaggggggacaagacaggggccggcaggaggagagcggcgacacacgggg

SEQ ID NO: 62264 - RNA, 61 nt, Homo sapiens
caggagaagagacgggacgaggaggcgaaggaccgccccgccagggaggagggacacacga

SEQ ID NO: 62265 - RNA, 60 nt, Homo sapiens
aaacaaacacacgcaaaggagaaaggaaccgacagcccgaaaccgagagagcccggaacg

SEQ ID NO: 62266 - RNA, 71 nt, Homo sapiens
aggaagacaaccgccccagaaagcgaaagcgaaaggaagcgaaagggggcagacagaagagagacgagcaa

SEQ ID NO: 62267 - RNA, 71 nt, Homo sapiens
caaggccagcaccccacgggggccggcgaacggcccgaggcggcaaccggaaacaagaccgcgcacgggag

SEQ ID NO: 62268 - RNA, 79 nt, Homo sapiens
gagaaagcacgaggcacccccggaccagaacggcacggccacgggcgggcaggcaagcaacagggagcgccaccaccgg

SEQ ID NO: 62269 - RNA, 87 nt, Homo sapiens
gcgggagccgcgcacaccaccacacgaacaaccaagcggagggcagaagaagacagccagaacagcaagcgaggaccaccgcccgac

SEQ ID NO: 62270 - RNA, 39 nt, Homo sapiens
agcgagagcaggaagacgggcccagggccaggcagacaa

SEQ ID NO: 62271 - RNA, 77 nt, Homo sapiens
gcgggcggagacaggaccgcggcgagcaaggggccccacagacagagcccgaaagagggaacggcaccacgacccca

SEQ ID NO: 62272 - RNA, 77 nt, Homo sapiens
cgcgaaacgcacgagaagacgcaaaacaaaaggggccaaggacgcacacaccagagaaggcagaccaagggcgaggc

SEQ ID NO: 62273 - RNA, 55 nt, Homo sapiens
ccggacccaaaggccagcaaagcccgaagacaaggggaacacccaaaaaggacca

SEQ ID NO: 62274 - RNA, 53 nt, Homo sapiens
gacgcagggcagggccccgcccggcggggaagcagggaagacacacccaggac

SEQ ID NO: 62275 - RNA, 62 nt, Homo sapiens
gaggccgcaccaacccaaacaacaggcgcaaggacaccagcagccgcaacggcacacacgcc

SEQ ID NO: 62276 - RNA, 69 nt, Homo sapiens
gcggagcacagaaaaaccgacaagggcagcccaaggacacaaggaaagacacagaggagccaccggccc

SEQ ID NO: 62277 - RNA, 82 nt, Homo sapiens
gcgggccgaggagagcggaggaggggagcagacgagaagacgcggcgaaaggaagaaacgcacagagcaaaaagccgaacgc

SEQ ID NO: 62278 - RNA, 69 nt, Homo sapiens
cggagggcaccaggcggagcaggcagggaaagccccccacccggcgccccgggccagcgggacaccagc

SEQ ID NO: 62279 - RNA, 66 nt, Homo sapiens
aggggcagcgcggcccgggccggagaggagcaggaagaagaccacgcccccagaaggcaaaaccag

SEQ ID NO: 62280 - RNA, 35 nt, Homo sapiens
gccggaggcaaaaaaacaggaagggagcggagacc

SEQ ID NO: 62281 - RNA, 77 nt, Homo sapiens
gccagaagaaacaaccgccaccggggagcgaacacagggaagaaaacgccagagaagcagagcagcccggagcgagg

SEQ ID NO: 62282 - RNA, 53 nt, Homo sapiens
acaaacacgcggacagaggccaagcccagccacaggcaacgaaaacaacgagc

SEQ ID NO: 62283 - RNA, 77 nt, Homo sapiens
aggaagccccagccccaggcccggcagcacacagcacgaccaccacgggacggaccggacccagacacggccacccc

SEQ ID NO: 62284 - RNA, 76 nt, Homo sapiens
cgcaaaaacaagacggggcgccccacagaggggcgacgcaccgccggccaggaggagagcgcaccaccaaaaaggc

SEQ ID NO: 62285 - RNA, 68 nt, Homo sapiens
acacgaaggccaaagaagaacgaggaaccccagagaggacagaagccaaccaggcagcagaggacccg

SEQ ID NO: 62286 - RNA, 111 nt, Homo sapiens
agggaagagaccccgaagcgcaaggggccgacgacaccaccagcaaaggaagcggacacaggaaaacgagaagaggcaggcaagcaaagagcagagcaccggaacgggacc

SEQ ID NO: 62287 - RNA, 72 nt, Homo sapiens
ggccgagaaggcagaggcgaaagagcggcgccaccccgggagaaggcgaccgagacgcaagcaacggcaccc

SEQ ID NO: 62288 - RNA, 72 nt, Homo sapiens
gagcgccggcgggcccgccaccgagaagaggcaaaggcgggaaaaccgccacaaagcccccaagccacaagc

SEQ ID NO: 62289 - RNA, 65 nt, Homo sapiens
gggagacccaagaaaggggaagaaggaagaaaagggaccaggcagaggacgggaacacagggaaa

SEQ ID NO: 62290 - RNA, 39 nt, Homo sapiens
ccagccacgcggaggcaaggacgaagagcccgggcccgc

SEQ ID NO: 62291 - RNA, 76 nt, Homo sapiens
gcgaccgaggggacgccgcccgccgcccgccgcaggccacccgggaacggaggagggacggagcgcgccccaccgc

SEQ ID NO: 62292 - RNA, 66 nt, Homo sapiens
gccccagaaacagcagggagaagagggacacaccagaaaacgacggcggggcgcagcccacggcgg

SEQ ID NO: 62293 - RNA, 67 nt, Homo sapiens
caccggagccaagaagaccaaagaagaacaaacgggaagagaacgcgaggagcgcaagacacagggc

SEQ ID NO: 62294 - RNA, 73 nt, Homo sapiens
gaacgcgacgcgagagaaggacccacggcgcgcgaagaacggcagcgcggagggggccgcacggaggacacgc

SEQ ID NO: 62295 - RNA, 75 nt, Homo sapiens
cccgcaggacaacgagcccaccgagccaaaaacaggcggcagacgcagacaaacaaaacaagaagccgaagaaga

SEQ ID NO: 62296 - RNA, 72 nt, Homo sapiens
aaaaaaagaaggaaccgacgaagaagaacacgagaggaacagcgagcccacaccaccccaacgccggaagaa

SEQ ID NO: 62297 - RNA, 82 nt, Homo sapiens
ggagacaggccaacacgcgggcagcgaacaagcgggagcaaggagggcgaagagcgaggaggcgagaacgcggacaagcaaa

SEQ ID NO: 62298 - RNA, 78 nt, Homo sapiens
gccccccgcccggggcaagaccacacccaagaagcgaccgcacccaacggaggcgccccacaaaagagcacgaccgca

SEQ ID NO: 62299 - RNA, 77 nt, Homo sapiens
caacaggcccgggaaagccgcgaaggcagccgagcccccagccgaacggcgagacaaggaaccaaagaggggaaagg

SEQ ID NO: 62300 - RNA, 80 nt, Homo sapiens
gaagacagcccggacaccgacagcacagacagaacccgcaccacggcccgaaggacccgcaacaggcacgcagcagcaca

SEQ ID NO: 62301 - RNA, 58 nt, Homo sapiens
ccggacggcgccccgaacgagggggcgcgaggaaggcccgccgaaggagaagggcagg

SEQ ID NO: 62302 - RNA, 90 nt, Homo sapiens
ccagaaccgcggaccgagcggagagcgggacaagagcgcggggcaagggccggaacacagccggggccaaagcgaccaaccccccaccgc

SEQ ID NO: 62303 - RNA, 62 nt, Homo sapiens
cgccggccccgccgccaagaggagcgagcggacccgcgagggacgacgaacagaacaaccca

SEQ ID NO: 62304 - RNA, 72 nt, Homo sapiens
agaaacaaagccccaacgaaggggaaaaggggcaccagaaaggagagaaaaagacaccaagagcagcgcaag

SEQ ID NO: 62305 - RNA, 90 nt, Homo sapiens
cgggaccggagaggaagcggagagccaggccccggggccccagcggcaccagcggagaccacgggagccgcgccggagccagcggaaggg

SEQ ID NO: 62306 - RNA, 54 nt, Homo sapiens
cggagccagacagcagccaagggagcagaggaagaagacagccaggcagcggac

SEQ ID NO: 62307 - RNA, 78 nt, Homo sapiens
gaggccccccagccagaccggggccccacccccacagacagagccacaaggacgcacccgagaccccggacccagcgg

SEQ ID NO: 62308 - RNA, 76 nt, Homo sapiens
ggcaaaaagcacagaagagagcgggacaccggaagaaagcagccaccagacacagaacacgaccagggagcggacc

SEQ ID NO: 62309 - RNA, 76 nt, Homo sapiens
gacaccaggaaacccacgcaagaggaacaagacagagaccccgaggaagacaacggaaaaccaacaaggaaaaccg

SEQ ID NO: 62310 - RNA, 76 nt, Homo sapiens
gggcgaagaggacaggaaacaagaacaaacccagcagccggccacccggggacgggcagagcccgagaagaagcca

SEQ ID NO: 62311 - RNA, 82 nt, Homo sapiens
gcgaccccggaggccggcggacaggccgcacaaaaaggccgcaggagggaagcgcacggaaaccgccccgggaggcacagag

SEQ ID NO: 62312 - RNA, 57 nt, Homo sapiens
acgcagaagaggccgccaacacacgcaaagcagagaaagagaacacaagacgacaga

SEQ ID NO: 62313 - RNA, 54 nt, Homo sapiens
cgacccggagccgagcaaccaggggccgggagaggaaggccccaagcagccagc

SEQ ID NO: 62314 - RNA, 74 nt, Homo sapiens
caggccaagcgcccacgccggaccgggcaggacaaaccggcgaccacacacggggacgacggggaagccggaca

SEQ ID NO: 62315 - RNA, 73 nt, Homo sapiens
aacacagagaaccgggaaacccaagaaagggggggacaaggaggaaggaagaaaagaaagacagagacagagc

SEQ ID NO: 62316 - RNA, 53 nt, Homo sapiens
ccgcccggggccgggcagcgagcccacacagcaagcggaaaaggaaaccagaa

SEQ ID NO: 62317 - RNA, 78 nt, Homo sapiens
acaggacaccagacgaaaacagacacagccagccagccacacggcagaaaaagaggggcccgggaagaacggacaggg

SEQ ID NO: 62318 - RNA, 72 nt, Homo sapiens
caacaaagaaagaacacaaacgacacaggcagacagaacaagaaagggacaccaaggcccccaagggggcaa

SEQ ID NO: 62319 - RNA, 78 nt, Homo sapiens
ccaccagacggagacagcggacaccaggaaggcgccgaaaaccgaccgacccgggaggccaccacgccgggacgccac

SEQ ID NO: 62320 - RNA, 69 nt, Homo sapiens
gcacagggaggagggaaaacagccaccgacgggccacgcccagaacagcacaggaagggaccaggaaaa

SEQ ID NO: 62321 - RNA, 76 nt, Homo sapiens
cggaggccggggcacccgcaggccaacccccggcgggcccgaggccccggccaggagagagagcggagacaaggcc

SEQ ID NO: 62322 - RNA, 58 nt, Homo sapiens
agcggaccgagagcgcgaaacgcacgagaagggccgcgagggcccggaacaggggcac

SEQ ID NO: 62323 - RNA, 75 nt, Homo sapiens
cagaaggaacgcagaaacacaggaccccccccaacgagaaacagggaagcgaggcaaaagcccacggagaacagc

SEQ ID NO: 62324 - RNA, 86 nt, Homo sapiens
cgggccagaggacaggcacaggaagagccaggacaaaaccaggcagaaccaacacgaacccaagcacaaacaagaaaacgagcagg

SEQ ID NO: 62325 - RNA, 71 nt, Homo sapiens
gacaccagcgcgaagcgagccaaggggcaccgacgaggcagagccaaggaggcagcagaccggcaagccag

SEQ ID NO: 62326 - RNA, 80 nt, Homo sapiens
ggggaccaccccaggaagaagacaacagcaacagcgaagaagaggcagcaaaccccgagccgagaagcccggcccccccc

SEQ ID NO: 62327 - RNA, 79 nt, Homo sapiens
gggacgaccggccaagcgcgggcgaaaagccccagcccgaggcagcacagcaacggagggcacgggaagccagggcggg

SEQ ID NO: 62328 - RNA, 70 nt, Homo sapiens
aaggaccaagaaccaggggaggagcacagcaaaagaagcggaccacacggaaaacaaaggagaagaaccc

SEQ ID NO: 62329 - RNA, 76 nt, Homo sapiens
gcgccacccagcaccggaaggacaccggacccaaaacaggcgaacccaggcacccagagacggagcggaaaccaag

SEQ ID NO: 62330 - RNA, 83 nt, Homo sapiens
ggccggaacagaaagaaccaaagcaggcaaaacaggcacaggaggaagccgcggaacaggccagagagacaggccagcacgac

SEQ ID NO: 62331 - RNA, 74 nt, Homo sapiens
acagaaccaagggaagagaacacacggaccgagagagaaaagccgcagagaaaaagaagccaaagccacgagac

SEQ ID NO: 62332 - RNA, 76 nt, Homo sapiens
gaggacgcgcgaaccagcagcaggcccagggaaaggggggacccaccccagaacagagggaaaaaacgggccacaa

SEQ ID NO: 62333 - RNA, 77 nt, Homo sapiens
gacgggcccccaagaaaccaagaaaaagacgcgaaaaagggagaaacaaaggcagcgcgccccgggggagcaggccc

SEQ ID NO: 62334 - RNA, 85 nt, Homo sapiens
agacggcgcccagcaacacagaagccgacaaggcgcaagcgaaaacagaccgcgagcccagaggaccaacggaggccgcagaaga

SEQ ID NO: 62335 - RNA, 56 nt, Homo sapiens
gccaggaaccccggaagccagaaagacacggggacccggcaaaccgaagagcaacg

SEQ ID NO: 62336 - RNA, 76 nt, Homo sapiens
cccccccggacaaccccccggccgacggacgacccaccggaaaaaagcccgcccgaccggagacaccacccgcaca

SEQ ID NO: 62337 - RNA, 71 nt, Homo sapiens
ggccccacgacacaaggggacccaagaagacccggacgcccggcggcccggcagcaccgcacaacagcaga

SEQ ID NO: 62338 - RNA, 68 nt, Homo sapiens
gaaagggcagacagagacccagaagggcacccaggcagggaaagccaagggcgaggcggccccgggcg

SEQ ID NO: 62339 - RNA, 82 nt, Homo sapiens
aggcaacaagacaagcggcggggccccggaggagaaggagaaacggaggacgcccccacacaagccaacacgggcgccggag

SEQ ID NO: 62340 - RNA, 74 nt, Homo sapiens
cgagagcccacaggcccccacagggagaacggcagaaccaagggaccaaagcgggacggcaggccacgaccacc

SEQ ID NO: 62341 - RNA, 71 nt, Homo sapiens
ggcccgcccagccgcagaaagcacaccaaccagaggacgacacgggcagaaacgaaaccaggcaggggcca

SEQ ID NO: 62342 - RNA, 78 nt, Homo sapiens
acgcaaaggagaaaggaaccgacagagccgagggccagggagcgcggaaggaccacggagccggcagacggcaacgga

SEQ ID NO: 62343 - RNA, 71 nt, Homo sapiens
acagaagcacggaacaaaagagagagcgagacacaggagaacgacgagaagaacaaagacagacgaacgca

SEQ ID NO: 62344 - RNA, 70 nt, Homo sapiens
gcgaggagcgagcagaggacccgagcggggaccgagaaagacccccgaggaaccacgcagaggacagaca

SEQ ID NO: 62345 - RNA, 84 nt, Homo sapiens
gccaaagccgcccagacggccaccggcgggaggaacaaaaggacgcagagagaaaaaacgcagagaaaccagcaacacagcagg

SEQ ID NO: 62346 - RNA, 80 nt, Homo sapiens
gggccccaacacccagagacgaaagggccgcgaagagccagaagagaggaagaagaagccacagaggaaacagacacacc

SEQ ID NO: 62347 - RNA, 76 nt, Homo sapiens
ggagcaacagaggcagacggggagagcagcaaaagcgagaggcagaagacaagcccggcggggaggaggccaggca

SEQ ID NO: 62348 - RNA, 86 nt, Homo sapiens
caccggggagccaccgcccagcccaaaccaggagagcgagggagcgagcgggcagcgcgagcgaagaaaccagccccaaggaaaca

SEQ ID NO: 62349 - RNA, 65 nt, Homo sapiens
cacaggggagcaggcggaggcaaggaacaccagcaggaaaaaagagcggcagaaggccaaacggc

SEQ ID NO: 62350 - RNA, 75 nt, Homo sapiens
gggaacgcgaagcgccaaagccagacaaacccagagcgcgccaaggggcccgcagcgcccccgggcaaaagcggc

SEQ ID NO: 62351 - RNA, 71 nt, Homo sapiens
cggggcccggggaggccccaagaacacgacccccgaggagacaagggcgggcccccggcagggacaaaggc

SEQ ID NO: 62352 - RNA, 61 nt, Homo sapiens
agggccggagccaggaagcgaagggaagaaggaggggccggcgcaggacgcagcgagaccg

SEQ ID NO: 62353 - RNA, 81 nt, Homo sapiens
ggcgcccgcggccagccgcaagacccgccacaagcaacgcgggaagagaagcaagggaagacagcaagaaaaaacgagaag

SEQ ID NO: 62354 - RNA, 59 nt, Homo sapiens
gcgcccgcccagcgccgcagcacgcggaccaggaacaaggcgcgccagggcacagggag

SEQ ID NO: 62355 - RNA, 80 nt, Homo sapiens
acgcggcagcccgggagcggcgagggaaaagcgaggcaaggcaggcgggcgcgggccccggggccgcggcgaaaggacgg

SEQ ID NO: 62356 - RNA, 68 nt, Homo sapiens
gagcccaggagcgccacgcgcggaaggcagcgcccagcagcgcaggcgcgggacaaccaacacaacca

SEQ ID NO: 62357 - RNA, 71 nt, Homo sapiens
agggaacagaccgacgagggaagaggaacagaaaaagggccaaaaacgaccaagagaacgaagaaaacgaa

SEQ ID NO: 62358 - RNA, 69 nt, Homo sapiens
cccaaaagagcgcaccaacccccacgagagcagccagcggaagggcccggaccgaccagcagggggcga

SEQ ID NO: 62359 - RNA, 71 nt, Homo sapiens
caagccccaaggagcccggccccacaccggcacacagcggcccaacgcgcaggccacgggccggcggggaa

SEQ ID NO: 62360 - RNA, 81 nt, Homo sapiens
cggcaaaagcgcacaaacgcccaaggggccgcgaggaccgagcaggcagcgcagaagcccacagggacggccagcaccagc

SEQ ID NO: 62361 - RNA, 53 nt, Homo sapiens
cgccagaaggaagcaacagacgggaccgaaagacaaaacagaaacgccggaga

SEQ ID NO: 62362 - RNA, 74 nt, Homo sapiens
caaccgaaggacacaaagaaccaaccagccacagaacaaggaggggggaaagcaggggagaaaagaaaagaaag

SEQ ID NO: 62363 - RNA, 78 nt, Homo sapiens
ggagcggccagagcagcagccccacaccacaaggcccagccgcacagcccaggagggaggaccaggccgcgcgacacc

SEQ ID NO: 62364 - RNA, 82 nt, Homo sapiens
agaacaaagaaaacgcgaggacagagccacggccaagaagaggaaaccagaacacggcaagagcagccaccaccaaacccag

SEQ ID NO: 62365 - RNA, 78 nt, Homo sapiens
ccaagaaagcccgaaaaccaagcccaccgcgaggagaacggcggcgcggcagggcccacgcgccaaggagccgcaagc

SEQ ID NO: 62366 - RNA, 78 nt, Homo sapiens
gaggagaccccgcgcaggcgccaacgccccggggagaagcgagaaaccccgaaccaaacagagcccaaggagcggcaa

SEQ ID NO: 62367 - RNA, 86 nt, Homo sapiens
gccagcgaaggacccgcagggccccgggccagggcaccagcagcggagggcgcagccaggaggggaagcagggcagcgcagcggcc

SEQ ID NO: 62368 - RNA, 79 nt, Homo sapiens
aaccggaagacccggacccaccacaccgagcacaggcccccggagggagggaacacgggccacagaacagagcaaccca

SEQ ID NO: 62369 - RNA, 80 nt, Homo sapiens
cggcggcgcccgacaaagaaacgaccagggacgcggcgcgcacgcaacgggaggggagcccaaagagagaaaaggaggag

SEQ ID NO: 62370 - RNA, 81 nt, Homo sapiens
cgaaacagagaggggaaggagcccagcgacagcacagaccagcagacaggacagaaaaccagaagcaccgcagggacgccc

SEQ ID NO: 62371 - RNA, 67 nt, Homo sapiens
ccagaacggccaggagacgcaacggcacaccgcccgcagcggggaagaacgcccaaggcaaagacca

SEQ ID NO: 62372 - RNA, 54 nt, Homo sapiens
cggcggggcccgcgcgcagccggagacccggagaaaggacaaggcgagggaaac

SEQ ID NO: 62373 - RNA, 78 nt, Homo sapiens
ccgaaaccagaccaagaggccgcgcagccaaccaacaagcaagccagacaacaggccaaagccagggagggccagccc

SEQ ID NO: 62374 - RNA, 73 nt, Homo sapiens
caggaaaacagagaaccaagcggcaaagcaccgaacgggccaaccagaagacggagcaggcaaaggagaaaag

SEQ ID NO: 62375 - RNA, 77 nt, Homo sapiens
aagcgacccagaccaggccacagcaggaaaggagcaggaaccaaagcagccgcgaggcgacacgaaggaggaaaaaa

SEQ ID NO: 62376 - RNA, 57 nt, Homo sapiens
gaccgcaggcgcaaggccaggcgacccgacgggccaccgagccagacacaccaacgg

SEQ ID NO: 62377 - RNA, 67 nt, Homo sapiens
gggcacacggcgcgccgcaccgcgcccgggccggccccaccgccgcacccacaaaagcgaaaagcca

SEQ ID NO: 62378 - RNA, 61 nt, Homo sapiens
ggaagaacaaagacagaccggccgcaggagggaagcgcacggaaaccgccccgggaggcac

SEQ ID NO: 62379 - RNA, 69 nt, Homo sapiens
gaccgacacccaagacaagacagcgcaaggcagggggacccacaaagcagaagaagaggaaagacagaa

SEQ ID NO: 62380 - RNA, 77 nt, Homo sapiens
gcggcgccgggacgcaccgcaccgagggcgagcccagggccgacgccgggcaagccaagccagccgcccgggaaggc

SEQ ID NO: 62381 - RNA, 79 nt, Homo sapiens
gcaccgagccagcccaggaaaaggagagaccaagggaacggaagccccagcccgcgcgagccaggcgcccacaggagaa

SEQ ID NO: 62382 - RNA, 55 nt, Homo sapiens
ccacagcaagaggccaacacgaaggccaccgaggccgaaggcaggcaccagaacg

SEQ ID NO: 62383 - RNA, 50 nt, Homo sapiens
caaaccgcccgcccaacaccgacgggcacgccaggcgggaaaacggcaca

SEQ ID NO: 62384 - RNA, 66 nt, Homo sapiens
caggagaacggcgccacaagaaagagcaggacaagagaaagccgagaccgacccgcccgcccgcgg

SEQ ID NO: 62385 - RNA, 60 nt, Homo sapiens
aggaagaaggggcggcaaggggaggaaggcccgaacaagacaggaacgccggcccggacg

SEQ ID NO: 62386 - RNA, 74 nt, Homo sapiens
accccagacgccaccacaacccccagacgcaagccaagaccgcaacccaccaaggagcacaggacgaagaggaa

SEQ ID NO: 62387 - RNA, 78 nt, Homo sapiens
aagggaggcccaagacccacaacaaaagccagccagcaggaggccagaaacaaagaaaagcgcaagcgcaggaaagga

SEQ ID NO: 62388 - RNA, 70 nt, Homo sapiens
gagcccaggagcgccacgcgcggaaggcagcgcccagcagcgcagcaccaaccgcgccgccaagggcgaa

SEQ ID NO: 62389 - RNA, 76 nt, Homo sapiens
aagccccgccccaaagcccccacgcaacaaaagcaccggacaagagcagagaaagagacgaggaggggaccccaaa

SEQ ID NO: 62390 - RNA, 110 nt, Homo sapiens
gcggacgggacagcggccgggacagcggcgagacgcgcggggagcgcgccggaccaagcgggcccagaagcggaggccagaccggcccgggccgggccaggaggacacgc

SEQ ID NO: 62391 - RNA, 76 nt, Homo sapiens
cagccagagaacgccccaacgggggacccaccgacgagcaaggcagcagacgacaggacggcagagccccaagaaa

SEQ ID NO: 62392 - RNA, 93 nt, Homo sapiens
aaggcgaacccgccacgcagcaggagcaggggacgaagaaggccggggcagaaagaaaaaagagggcccggggccgaggcaggaggacacaga

SEQ ID NO: 62393 - RNA, 66 nt, Homo sapiens
gggcgccgcccccccggcccccgggacggcccaaggccagcccgcaggaagagccccacaacacgc

SEQ ID NO: 62394 - RNA, 84 nt, Homo sapiens
gcgccgcacggaggcgcccggggacggggccgcagggagaaggagaggacggggaggagcgcgccacccgggcgggccaggacc

SEQ ID NO: 62395 - RNA, 81 nt, Homo sapiens
gaacacgagaagacacaagggaaaagggggaggaagagaagacaacgcacaacagcccacggcagacacagcaggccaacc

SEQ ID NO: 62396 - RNA, 97 nt, Homo sapiens
cccgcccaccaccccccgccgcccgccggcagcccaaccagggaggccgcgcccgggcggagaacggaaaagcaccaggaagcagagaggaccgcag

SEQ ID NO: 62397 - RNA, 92 nt, Homo sapiens
cgcccggccggcccggagcaccgagccgcggcacggaggagccggaaccaaaaagaagccccagagccggggccaggagccccaagcgcccc

SEQ ID NO: 62398 - RNA, 65 nt, Homo sapiens
cgcggccgaggccggaggaggcccacgcagggcgaaccgaggcgggaggagcaggcagggacgac

SEQ ID NO: 62399 - RNA, 86 nt, Homo sapiens
cgagcaggaagagcgcagggccgccgacgccgcgcagaaagggaaagcaggcaggagggagagcgccgaagaaccaccccccgccc

SEQ ID NO: 62400 - RNA, 78 nt, Homo sapiens
ggcaaaagccccgcccagaggccaacgcgcggcggcggggagacgcaggcgccagggcggagaacggaaaagcaccag

SEQ ID NO: 62401 - RNA, 71 nt, Homo sapiens
gcaggacccgcaggccagaccccgggagcccagccaccacagacagggcagcgaaccgggagaggaaccgg

SEQ ID NO: 62402 - RNA, 79 nt, Homo sapiens
ccgcgagagcccaccaggagccccaaagcccaggagcgggggcgacgagcagggggaacggcggaggcgagagcgccgg

SEQ ID NO: 62403 - RNA, 36 nt, Homo sapiens
accgagcaacacacgcagggccaacggccgccacca

SEQ ID NO: 62404 - RNA, 80 nt, Homo sapiens
cacgagcgcggagcgcgggaggagccgggcgcagaaccagaccgggagcacgcacgccacgaaggaagagcacgggacag

SEQ ID NO: 62405 - RNA, 53 nt, Homo sapiens
gccagcggccgcgcacccccggccggaggcaccagcagcaaaaagcggaacca

SEQ ID NO: 62406 - RNA, 74 nt, Homo sapiens
aaacagaacggcaaaccggaaaaaaacggcggcgccgacaccggaacagcgcccggaacagaaagaaaggccac

SEQ ID NO: 62407 - RNA, 40 nt, Homo sapiens
gaggagaaggagcagccggccaagaaggagggccccggag

SEQ ID NO: 62408 - RNA, 62 nt, Homo sapiens
gccgggaccaggcccgggggcggcggccacgccaaggacggacaagcagaccggaagaccga

SEQ ID NO: 62409 - RNA, 55 nt, Homo sapiens
gaccccgaccccgaggcgagacggaaaggaagcccggggcggcgacggagcacga

SEQ ID NO: 62410 - RNA, 78 nt, Homo sapiens
cccacccaggaacccgccaccagaaagcaagaacgaggccaaggaggagggacacagagacagcgaagaaagaacgcc

SEQ ID NO: 62411 - RNA, 57 nt, Homo sapiens
cccggggccgacagccccccagggcggagaacggaaaagcaccaggaagcagagagg

SEQ ID NO: 62412 - RNA, 117 nt, Homo sapiens
cagcgcaacaaccgcaccccagccacaaccgcggaggcaaccgcgcccccagagcccaggaggagccgaggaaggcgccaccacgaccgccgaaccggaaggcaacccgcccggaac

SEQ ID NO: 62413 - RNA, 59 nt, Homo sapiens
ggggacccgcagggacagaagggagcgccgaggcaagagaaggcgcagaagggacccag

SEQ ID NO: 62414 - RNA, 56 nt, Homo sapiens
ccccggggcacgcgcccacaggcggaacacaaaaagggcacagaaaaaacaaagac

SEQ ID NO: 62415 - RNA, 86 nt, Homo sapiens
ccgccacagcaggaaacacccaccccgcgaggcccccgggcccgggaaaacacacggccaggcccaggcccaggcccaaggccaag

SEQ ID NO: 62416 - RNA, 73 nt, Homo sapiens
accacagcaccgagagcggcccgcagaacgccagcagaagaggaacggcacggccgaggcagacaggcaaacg

SEQ ID NO: 62417 - RNA, 71 nt, Homo sapiens
ccagaaaaagacaacagaaacgcggccacagagaaaccgacccagaggcagaaaagaagcagagaaaacac

SEQ ID NO: 62418 - RNA, 122 nt, Homo sapiens
caggacggggcggcaggcgcccgcggaccgagccgacggagccggaggcgggagccgcggcggccgggggaaacgaaaggcgacacgaaaccacggaagcccggggccagagacacacagga

SEQ ID NO: 62419 - RNA, 54 nt, Homo sapiens
gaacaacgccgaaccaggcaggccgcggagcgggacccagaacgcgaggcagag

SEQ ID NO: 62420 - RNA, 77 nt, Homo sapiens
aagaagaaacccaagcccacccgggaaaaaccagaagagaaaaaacaaaggggagaggcaccccgcgggacgaccgg

SEQ ID NO: 62421 - RNA, 59 nt, Homo sapiens
cgggaccaggcgaagcggccgagcaggcgagcgaacgacggcaccgcgcgccgcgcccc

SEQ ID NO: 62422 - RNA, 77 nt, Homo sapiens
ggggccccgaacaccgaaccaagaaggagcgagggaggagcagcgagacagcaagagacgaccacagagccacagac

SEQ ID NO: 62423 - RNA, 77 nt, Homo sapiens
ggcccaggagcagcggggggagagcagacaaagacggaagagccgcagcggcacccaggaccccacacaacgccccg

SEQ ID NO: 62424 - RNA, 80 nt, Homo sapiens
aaaacccggaagagcgccccaggagaaacaagaacccaaggaccgcaaagaaaacccagagaacaccacccgaagagaca

SEQ ID NO: 62425 - RNA, 97 nt, Homo sapiens
ccaccggcggcgggcacacagacacgcacggagggcccaacccacagcgccccagacaacggcaagcggagaagagcaaggccgaaccgagaggaag

SEQ ID NO: 62426 - RNA, 65 nt, Homo sapiens
ggaagagcgcaagacagcagccacacccagggagccaaaagggaacgcggaaggacaggaagaaa

SEQ ID NO: 62427 - RNA, 74 nt, Homo sapiens
agaaacgacgggaagcccgaccaggggaaaagaaacacggacacagagaaggcagaaacaaaaaagggagagaa

SEQ ID NO: 62428 - RNA, 69 nt, Homo sapiens
ggcagggagacaacaacgaacggaacacggaagaaccagacgaagcgcagaaggaacaagggacagggg

SEQ ID NO: 62429 - RNA, 77 nt, Homo sapiens
gacagaaagccaaaaaggagaaagaacagagaacgaggaagaaaaggaaacccaaaaagacaaggccaagcagcaaa

SEQ ID NO: 62430 - RNA, 64 nt, Homo sapiens
gagagcgagcgggaagagaacaggacagagggcacaacggcaaagacaggaagggaaggggcgg

SEQ ID NO: 62431 - RNA, 80 nt, Homo sapiens
accacacaacggcacgaagaggcaagaaggacaagacaggagagcaggcccgcagccagcggccaaggcaacagagcaga

SEQ ID NO: 62432 - RNA, 80 nt, Homo sapiens
cgacaagccgcggcagccgcggaccaccgccgccaggcaaaacaaacggagagaggagggagaaacaaaggccaaagacg

SEQ ID NO: 62433 - RNA, 73 nt, Homo sapiens
gccgaggcacagagaaccgaccagaacgcagcaacaaaggggaaaaagaaaagggcgaagacccgaagcagcg

SEQ ID NO: 62434 - RNA, 91 nt, Homo sapiens
caccccggcccgaccccgacccggcccggcaggccccaaccaggaggacgccgagcagcgacaggaaggcaagcgccacgaccccgaacaa

SEQ ID NO: 62435 - RNA, 78 nt, Homo sapiens
gaggcccccaagccggacacaccgcacgagagccaggggcaggggaagaaccggagcggaaaaagccccaccagccca

SEQ ID NO: 62436 - RNA, 71 nt, Homo sapiens
cacagagaaccgaccagaacgcagcaacaaaggcaggacgccgccacacaacgcaagggaggcagaaagcc

SEQ ID NO: 62437 - RNA, 75 nt, Homo sapiens
gaccaaagaccgggaaaagacaaaccaagagcaggagggaacggcccagcaagcaggcggcaaagagcacaagca

SEQ ID NO: 62438 - RNA, 68 nt, Homo sapiens
gcgccggccgcccgcacgccgccgagcccaaacgagaaggaagccgcggaggaccgagcgcacagaca

SEQ ID NO: 62439 - RNA, 85 nt, Homo sapiens
acacgaccggcgacagcagccaggagcagagcgacagcggcgagcagaacacggcgagcggggaggagggacacacgacaggccc

SEQ ID NO: 62440 - RNA, 63 nt, Homo sapiens
caccgccacaccacaagcccacccgcaggccaacggcagcggcgaaggagaccgcccaaacca

SEQ ID NO: 62441 - RNA, 39 nt, Homo sapiens
cgcacacagcaagcacgagaagccaagaagagcagaaga

SEQ ID NO: 62442 - RNA, 82 nt, Homo sapiens
gagggagagccgagcagccccggccgggcacggacagggcgaaagccgaccacccggcgaagcgagcgggcggacaccagaa

SEQ ID NO: 62443 - RNA, 70 nt, Homo sapiens
aaaaagcaaaggccagacggagccaaacagccacagaagggcagccgccagccacccgcaagaccccagg

SEQ ID NO: 62444 - RNA, 71 nt, Homo sapiens
gcacagaggaaaccgagggagggaagcgagaaacagagagacaggccaaagccccaaggccagagaagcgg

SEQ ID NO: 62445 - RNA, 69 nt, Homo sapiens
ccggcgcagggcggaaggacaacagcccgacaaccaggggcaccccccgggaagaagccccccagcaaa

SEQ ID NO: 62446 - RNA, 52 nt, Homo sapiens
ggcgcgccgcggccggccacgcggaaacaggaacacgaaagaggaaaaacgc

SEQ ID NO: 62447 - RNA, 74 nt, Homo sapiens
ggagaggcaggcggaagacaggagcgcgagcggaagcccaaaggaggggcagaaaggacacgagaccccaaaaa

SEQ ID NO: 62448 - RNA, 58 nt, Homo sapiens
ggcccggacaccgaggggggaagaacaaaagcgcagagagccgcccccagccggaggc

SEQ ID NO: 62449 - RNA, 77 nt, Homo sapiens
gcccccaccgccagcccggccgcgagcgcggccgcaggaggagaagacagaggagccagaccaagagacagcacagg

SEQ ID NO: 62450 - RNA, 38 nt, Homo sapiens
gccggccgccccccgcagagagggccaaccagaagacg

SEQ ID NO: 62451 - RNA, 63 nt, Homo sapiens
ggagcccccagacccaagaagacagcgaaccagacggaagaaagcaacaccaaaacgacccca

SEQ ID NO: 62452 - RNA, 74 nt, Homo sapiens
gcggcaagcagcggaagaggacgacgcgacacaaacaaaagaccaaaccaggcaagaacgcagaacccagaaca

SEQ ID NO: 62453 - RNA, 76 nt, Homo sapiens
ggcggagccgaccgggccaggagggagcgggaccgagaaggcgaagcgcagagcggcaaaagcggaggggcaaaca

SEQ ID NO: 62454 - RNA, 85 nt, Homo sapiens
caaagaacaggcccaaaaacaagacccagggccaggaacaccaggcaacaaagacgcggccgaccagcagcccaaaaaccacacc

SEQ ID NO: 62455 - RNA, 52 nt, Homo sapiens
cacgccgccaaagagcgaacacggacagaagcaggcacacgacgcacgccga

SEQ ID NO: 62456 - RNA, 85 nt, Homo sapiens
ggcgaagcggccgagcaggcgagcgaacgacggacagcccagagcaagcacacggaggcccgggagccagaccgggagcccgccc

SEQ ID NO: 62457 - RNA, 72 nt, Homo sapiens
ggaccaagagagaaggcaaacaaaccagccgaagggaccccagagagagagaaaccgaagaaggcccacaca

SEQ ID NO: 62458 - RNA, 70 nt, Homo sapiens
aggaggcggaggcggagggagagacacccccggaccagaaaccggggcgcagcgaggccgggggccgagc

SEQ ID NO: 62459 - RNA, 84 nt, Homo sapiens
cgcggagcggcgagggacccgcagggagccaccgagaggaagaagccagagccacgaggagggagcccaaagaggcgaagagag

SEQ ID NO: 62460 - RNA, 68 nt, Homo sapiens
cccaaaccaccacagacacaggaggaagacagcggcggaccacagagggaaaagaggacgaggcgcga

SEQ ID NO: 62461 - RNA, 76 nt, Homo sapiens
gcgagggagcgagcgggcagcgcgggccacccccaaccaggaccaaagacgaccaccaaagccagcccccagaaca

SEQ ID NO: 62462 - RNA, 74 nt, Homo sapiens
aaagaggacaggagaacaaggcaaccgcgaaccaggccaccgaagaaccagacaccagggaccgaagcccaagg

SEQ ID NO: 62463 - RNA, 82 nt, Homo sapiens
aaacaaggcaacagaaagagcaacagcagggcaacaggacaacccgaaacaccaaagaaagggccccaaaagaagagaggcg

SEQ ID NO: 62464 - RNA, 74 nt, Homo sapiens
gcagggcgcccccgagagcagcacgaggcagcacaagggcggggcgcagcgcgggggagagcgccagggaagaa

SEQ ID NO: 62465 - RNA, 74 nt, Homo sapiens
gagacagagccaggcccagggcccccccagagcccggcacggaccagcgaaggaagagccaggaaagcaaaagg

SEQ ID NO: 62466 - RNA, 81 nt, Homo sapiens
gaaggacccggccgaggcgggcgcaagagaaggcaccaagagaaaggggagcaagaagaaagagcagggaggagggagcga

SEQ ID NO: 62467 - RNA, 79 nt, Homo sapiens
gcccaagccaccagagcggcccccagcaccacagcccgcagccccgccagccacccccagggcaaacccgacgcggacc

SEQ ID NO: 62468 - RNA, 77 nt, Homo sapiens
aacccaaccacggggaaaaggcaaaaacccacaccgcaacccagcgagagaaaggaggaagccagcccgagcaggcc

SEQ ID NO: 62469 - RNA, 72 nt, Homo sapiens
gaaagaaggaacggagaaggcaaagaagccaaaagaagcaagggaaagaccaggagccagaaaccaaccaaa

SEQ ID NO: 62470 - RNA, 84 nt, Homo sapiens
ggcgccccgccggagaacccccccagggggaacgacacaacaagccggaagggaagcaggaaagggagaagaggacagaaaaag

SEQ ID NO: 62471 - RNA, 86 nt, Homo sapiens
ggcggcagaagaagacgaagaagcagaagcgcgccagggcagcaggagagaggaacacagcacccacccacacccacacccgcgac

SEQ ID NO: 62472 - RNA, 54 nt, Homo sapiens
gccgcgggcagcgcgcggcccgggcagcagggggcaaggcggcccggcacgcac

SEQ ID NO: 62473 - RNA, 81 nt, Homo sapiens
gcaaaggcgagccaaagccacaggagccagaaaagaccccgagggggggcccggcgcgcccagcagcccagccagcgcccc

SEQ ID NO: 62474 - RNA, 72 nt, Homo sapiens
agggccacgacccaggaaacaggacggcacccagcagaaaccgaaaccagcccccaaggggaaccagccaga

SEQ ID NO: 62475 - RNA, 58 nt, Homo sapiens
caaacaacagaggggaacgaaggcggcgcagaaccggccgaaaagcacaaacagcaag

SEQ ID NO: 62476 - RNA, 82 nt, Homo sapiens
aaacccaagagggaaccacccccaacaaccagggcaaggaagaaggagaaagggccaaccccgaagaagcaaacagaaacga

SEQ ID NO: 62477 - RNA, 79 nt, Homo sapiens
ggcggccccggcagcagacacagccacgcacgaccggggcggagaacggaaaagcaccaggaagcagagaggaccgcag

SEQ ID NO: 62478 - RNA, 82 nt, Homo sapiens
gcccgaggcgcgcggacccagcgccaagcgggagccgagagcgggcccgagcaggaagaaaacacaacgcaacaaaaacccg

SEQ ID NO: 62479 - RNA, 64 nt, Homo sapiens
gagggaagcagaagacgccagaaagacaggggcacgagagaaaacggaccagacgacgcaagcc

SEQ ID NO: 62480 - RNA, 69 nt, Homo sapiens
acagcacaagaaaaaccaaagcaaccggacgcacaagcagagacagcaggagcacgcaacagaaaagaa

SEQ ID NO: 62481 - RNA, 86 nt, Homo sapiens
ggagggcagaaagccaggaccaagagacaggcagccaccagggggacaaacgccagagaggcagccggcagacgggggcaacaacc

SEQ ID NO: 62482 - RNA, 77 nt, Homo sapiens
ccagaacgcccagccaaagaaacaagccgggaaagggacaagaagggcaaagccgaaccggaaacgaaacagcgcag

SEQ ID NO: 62483 - RNA, 78 nt, Homo sapiens
gagccaccggccacaaggcccgagggcaccaagaaggcggagaggaaagagagggaccaccgaaaaaccccaaaccca

SEQ ID NO: 62484 - RNA, 70 nt, Homo sapiens
caacgagaagaagccaccaaggagcaggaaaacgccaaagaacacggcagaagcccccaagggaaaaagg

SEQ ID NO: 62485 - RNA, 78 nt, Homo sapiens
gcaccagcgcgggagcagcgccccgcacccagggggagacgcagcggcaccacaaggaccaacaggggaaccaaagga

SEQ ID NO: 62486 - RNA, 49 nt, Homo sapiens
cggggcggaaacaggaacagcccaaggagcggagcaggagcaaaggagc

SEQ ID NO: 62487 - RNA, 75 nt, Homo sapiens
acacaacacgccacagacacaaagggccacagacgcagcgcccacgaaaccaaaggaagcgaacgaacaggccaa

SEQ ID NO: 62488 - RNA, 68 nt, Homo sapiens
ggaagagcccaagccacaggaagccagaaagcgcccaagaagaaccgaagagacagcccgcacggacc

SEQ ID NO: 62489 - RNA, 56 nt, Homo sapiens
cccaggaccacaacaagggccggaccacccagccgacgaccccagcccgggggcgg

SEQ ID NO: 62490 - RNA, 79 nt, Homo sapiens
aaggaccaagaaccaggacacgcaggagaaagaaggacgccgagagagcgaagaggcaaagcaaaggccaaaacccaag

SEQ ID NO: 62491 - RNA, 69 nt, Homo sapiens
cacaaccgacaaggcgccccaacagacaacacacggggacgagaagaaggagcccaggcgaggaagaga

SEQ ID NO: 62492 - RNA, 76 nt, Homo sapiens
ggacggccgcgggcgcccaccccccagcaccagaggaagccaccagggggaaggggcccaccacgccaggcggggg

SEQ ID NO: 62493 - RNA, 50 nt, Homo sapiens
gaggcagcaagaggcagacggagaacaggacacaaggacgacacccacac

SEQ ID NO: 62494 - RNA, 75 nt, Homo sapiens
cgccggccggagcagcagcccgagcccgaagggccgaggacaagcagcgggaggaacaaccgcaaggacgcaggc

SEQ ID NO: 62495 - RNA, 83 nt, Homo sapiens
gcggccgggaggcagagcgaggcaccggcgccacaaggcaacacgcccacccgccaacgcaagcgaccaccgagacaagccgg

SEQ ID NO: 62496 - RNA, 81 nt, Homo sapiens
ccgcgccgcgccgccgcccacaagcggcgccgcgccccggccgcacggcccaaggagaggcacacaggacaggacccccga

SEQ ID NO: 62497 - RNA, 67 nt, Homo sapiens
aagcacgagacagaagccaaggaggaaccaccaccagaaagaagccacaagacacacacaccccaag

SEQ ID NO: 62498 - RNA, 71 nt, Homo sapiens
ccccaaggggcccaagagagcggaacaaaaggagagaagccacaagcaccgcccaacagagacacgcaaaa

SEQ ID NO: 62499 - RNA, 79 nt, Homo sapiens
agaagcaggccgacagaaagaaggaggacaaagaagggcaggaaaggaccccaagcagaaacgccccgggggaccgggc

SEQ ID NO: 62500 - RNA, 103 nt, Homo sapiens
cggagcggccgaccaccggcagagaagccggcagaaggccccaccacgaggccggacgacggggccagcacaggcccccccagaaccagggaaaaagagggac

SEQ ID NO: 62501 - RNA, 75 nt, Homo sapiens
aggagcaccggaaagaaccgaccggacagaagacagaccgacagacgccaaaccacccgagagaagcgaaacaaa

SEQ ID NO: 62502 - RNA, 45 nt, Homo sapiens
ggagaaaccggacgcgacggggggaaaagggagaccaaagagcag

SEQ ID NO: 62503 - RNA, 88 nt, Homo sapiens
aaagagaagagcaaaagaaaacacacaaaagggaaagcacaacaagacaccgccaggggacagaaccacgagggacggcaacgagggc

SEQ ID NO: 62504 - RNA, 74 nt, Homo sapiens
agggggaaagccaaggaaaaacggagagccacaaaaaaggaagcgaaagcagaggcagcgacagagaaaacccc

SEQ ID NO: 62505 - RNA, 79 nt, Homo sapiens
aggacaaaaccaggagcagcccacgggacccgcaccgagcccacgagaaaaggaagaccggcggcagcagaggagcccg

SEQ ID NO: 62506 - RNA, 69 nt, Homo sapiens
ccgcacgacaggcacagcccgcagggaaggagcaagacgagggaaacacaagcagaagccaggaagaac

SEQ ID NO: 62507 - RNA, 78 nt, Homo sapiens
gacaagaccgccacagcccaacagcgggcccaggccaggagggcaagaacacgcagaagacccgaccaagacacgccc

SEQ ID NO: 62508 - RNA, 64 nt, Homo sapiens
aaggaccaagaaccaggaaaccgcaagaagcaagcgaacagaagcgcccgggggcaggggacgc

SEQ ID NO: 62509 - RNA, 56 nt, Homo sapiens
cggaaccggcggagcagacgagccgaccaaaggggcagaaaggcggccaaaccaga

SEQ ID NO: 62510 - RNA, 73 nt, Homo sapiens
cagccgccaggcggcgcagggccgaaggagaagacacccggccccaaaaaggcagcagaggcacgcaagcagg

SEQ ID NO: 62511 - RNA, 77 nt, Homo sapiens
aaccggggggagaaggaacaaccacaagagacgaagacacccggggggaaaggggcggcgcccgaaagccagggccc

SEQ ID NO: 62512 - RNA, 72 nt, Homo sapiens
gaacaagaacggcgacagacaagaggcgaagggcaaagacacagaagcaacaaagaaagaggaacaacggga

SEQ ID NO: 62513 - RNA, 76 nt, Homo sapiens
agggaaaacggaccacaccaacaaggcacacacaagacggaaagaacaggccaagaaaagccaaagaaagcaaaac

SEQ ID NO: 62514 - RNA, 80 nt, Homo sapiens
gcgcagaccgcagaaggacaccgcaggaccggagagccccagacgccagcgccaagagggaagcgggaaccgaccaaggc

SEQ ID NO: 62515 - RNA, 78 nt, Homo sapiens
cgccaaaggaccggacccagagaagaggaaaaccaccgggcagcagagccaacaaccaaacacagagacagaaaaaaa

SEQ ID NO: 62516 - RNA, 74 nt, Homo sapiens
aaccgaccaaggggaccccaggcccgccacccaaagcaccaccgcgccggagcgcaccagccgaaacagaggca

SEQ ID NO: 62517 - RNA, 82 nt, Homo sapiens
gccgggcccgggcaggggcggggcaacgcggaaggggcgaagaccacaacgcaccccggaggggaggcaccccggcgcagcc

SEQ ID NO: 62518 - RNA, 81 nt, Homo sapiens
cgccagcccccgggagagacgcaggcggggcggccgaccagggggcggacaacacagcccgaaccggagccacagaccgcc

SEQ ID NO: 62519 - RNA, 77 nt, Homo sapiens
aagcgagcccggacagaccaaccgcaggcgcaaggggagaccacaccacacagcgggccagcaaaccccaaaccgac

SEQ ID NO: 62520 - RNA, 62 nt, Homo sapiens
caacccagcaagacgagaagagggacgggagcagcggaaggcccagaccgagcggcgccccg

SEQ ID NO: 62521 - RNA, 61 nt, Homo sapiens
ggccagacacacagacgcagaagcagaacgcggcaaaaaagaaaagaagaagcgaaaccgg

SEQ ID NO: 62522 - RNA, 61 nt, Homo sapiens
gaagccaacagcgaggccagcggaaccacccaccgagggaccagcgaacacgccaagacaa

SEQ ID NO: 62523 - RNA, 65 nt, Homo sapiens
cgcgcccgcccccggccgggcggacgagagaagaagaaggaggccgcggccagaaacccaagaaa

SEQ ID NO: 62524 - RNA, 76 nt, Homo sapiens
cgcaagcagcgggaggagcaacgcgggaaaaccgccacaaagcccccaagccacaagcaacgcgcaggccggaaga

SEQ ID NO: 62525 - RNA, 74 nt, Homo sapiens
gagaagaaggaagggaagcgacagggcaggcaccgaggaagcggaacagagacagacccgggggcccccaagga

SEQ ID NO: 62526 - RNA, 86 nt, Homo sapiens
cgacccgacccagagcagaccagaagccagccagcaccgcaccaccccagagcagaggccaggaggggcccagcccggccaggagg

SEQ ID NO: 62527 - RNA, 105 nt, Homo sapiens
agacaagggcagagggaacaggcagcaggaagcacggcgggcgaaacagaacacgaagcaaaggggaacaaaagagaagaaggaaaaggaaaacacaaggacacg

SEQ ID NO: 62528 - RNA, 84 nt, Homo sapiens
ccaagagaagcgcaagagcaacaccccaccccaaggaaagaagggacgaggagggagaagacgaggagagcggaaaaaccccaa

SEQ ID NO: 62529 - RNA, 63 nt, Homo sapiens
agaaacgcaccggaaaggccaccagggcgacaggagccaagggaaaacacaccaaacggaacc

SEQ ID NO: 62530 - RNA, 54 nt, Homo sapiens
ggacaaggccagagagacgagggcggggagaagagggggcggcgaggaaaaagg

SEQ ID NO: 62531 - RNA, 53 nt, Homo sapiens
aggggaaggagaccacaaaggcagcagggcggccaggacgagcccggaaaacc

SEQ ID NO: 62532 - RNA, 56 nt, Homo sapiens
cccaaacgggagacaacccccgaaggagggggacaagagaagaccaagaggagacg

SEQ ID NO: 62533 - RNA, 75 nt, Homo sapiens
ggaccagcccagcagagcagacccaggcacggcccaggccagccagccggccaaggggcccgggaccgacggaag

SEQ ID NO: 62534 - RNA, 76 nt, Homo sapiens
cggccgaaagaaacgagacagagcagcacagaaagagaagggccagaagaacagccgaaacgaacaaaaggaacga

SEQ ID NO: 62535 - RNA, 77 nt, Homo sapiens
aaggaacccgagcagcccccggcccgggaggaaggcgaaaaaacgagaaagaaagcaggagaccaagaaggaaaaag

SEQ ID NO: 62536 - RNA, 72 nt, Homo sapiens
ggccaaagaacggacagcagcccacgcccgagacagggcaggggagcggcgacaaggagcccacacagacaa

SEQ ID NO: 62537 - RNA, 63 nt, Homo sapiens
aagaaaggggcagacaacgacaccaaagagcggcacgcagaggggagcgaagaagggagccac

SEQ ID NO: 62538 - RNA, 60 nt, Homo sapiens
ggaaccagcaacaagccagagcgaacaaaggccaggcaaaagcccagagagacaacgcgg

SEQ ID NO: 62539 - RNA, 57 nt, Homo sapiens
aaagagagaaccggagagcacccaacaaagagacacaaaaggccccagaggcaacag

SEQ ID NO: 62540 - RNA, 74 nt, Homo sapiens
cacagagggggaaagccaaggaaaaacggagagccacaaaaaaggaagcgaaaacaacagggcggacccgaccg

SEQ ID NO: 62541 - RNA, 78 nt, Homo sapiens
gagagcgagcgagggggggcgcgccggaaaccggagcgcgcagcagccaaacccaccaagggacgaagcgcaccacgc

SEQ ID NO: 62542 - RNA, 73 nt, Homo sapiens
gcggaaagcacgcgcacagagggacagagcgaagaaccccccaagaagacgaaacccccgggccacaagaagg

SEQ ID NO: 62543 - RNA, 81 nt, Homo sapiens
gggagaagggggccggagcgagaccgggcggccacagccgcagggagaacccgaggcgggaggcaaggaggccacggggcc

SEQ ID NO: 62544 - RNA, 85 nt, Homo sapiens
gaggagacggcaagcggccgggcaagcgcggcagggccgccgggagccagccccaccagccaaggaagagccaggaccacggagc

SEQ ID NO: 62545 - RNA, 72 nt, Homo sapiens
ggggagacaccggcccagggacaaaggccacagaaagaggcagcaaaaaacccagggaaaaacagagaaacg

SEQ ID NO: 62546 - RNA, 76 nt, Homo sapiens
cgcccaagaaaccaagaagaacacacaacaccaaaacggcgggagcgccccgcaggggaacagaaccacaaacgaa

SEQ ID NO: 62547 - RNA, 88 nt, Homo sapiens
gagggaagagcggagcgcggggacgggccgggcggggcgcgcggccacggaagaacccaaggacgcagcaaagccaaaaagcggggaa

SEQ ID NO: 62548 - RNA, 70 nt, Homo sapiens
aaagcagaccagaaaaaacagcacaccaggaagcaagggacaaaccggcgaccacacacggggacgacgg

SEQ ID NO: 62549 - RNA, 78 nt, Homo sapiens
gagcgaccagggacaaaagaaacagccaacccgcaacaacggcagaagaaaagcccggaaaacggaaaaaaaacagga

SEQ ID NO: 62550 - RNA, 77 nt, Homo sapiens
cgggagcacgggagaaggagccggaggcggggagaccccgcaccaggacagcgagaagaacaggcgagccagaaaaa

SEQ ID NO: 62551 - RNA, 84 nt, Homo sapiens
gcaaggggagggccggcaacaccggaagagagaacgcagggcacagagagcagacggagacagccgccagaagaaacacgcaag

SEQ ID NO: 62552 - RNA, 57 nt, Homo sapiens
gagagccccggaccacaaggcagggagagaaggagacccaacaccccggccagacgg

SEQ ID NO: 62553 - RNA, 77 nt, Homo sapiens
aggaccggccaccccacacggcgcaccagggggcggcggggccccccgccagcgggacgaaagcaacgcagaagcaa

SEQ ID NO: 62554 - RNA, 75 nt, Homo sapiens
ccaccccagcgcgacgcggcgagcccaaaaagcccgcaggggcgagggaggcagggcagcccaggcccggcccca

SEQ ID NO: 62555 - RNA, 82 nt, Homo sapiens
gcacggaagacgggcaggcaggggagcaaagagaagcggccgaggagaacagacaggccaaggaccagaagaaccggagccg

SEQ ID NO: 62556 - RNA, 77 nt, Homo sapiens
cggccccgacgacagcgggccgggaaaagggcacgaggccggaaccgcccagccccgggacgccagaggggaagccg

SEQ ID NO: 62557 - RNA, 54 nt, Homo sapiens
acccgccggaggaacgaaaacgaacggccgaaccgcccagccacggggccaggg

SEQ ID NO: 62558 - RNA, 82 nt, Homo sapiens
acgcagaaggaccggccacgacccgccagcgccgccagcgcccggcccggcccgaggaggacccaggagacccgcgggaccc

SEQ ID NO: 62559 - RNA, 106 nt, Homo sapiens
agagcacacccaaaggccaacacaagacaagccagcagccgccagacaagaggagaaccggggcaagagacggcagacaaacacagccgagagaaggcaggcgacg

SEQ ID NO: 62560 - RNA, 67 nt, Homo sapiens
gacagcggacgccccagcacccccagcgggcagggcagagccagaaggagagccaagcgccagagaa

SEQ ID NO: 62561 - RNA, 57 nt, Homo sapiens
accagaggagggaaaacgccgaagaagggccagcagaagggaagcaccaaaaaaaga

SEQ ID NO: 62562 - RNA, 103 nt, Homo sapiens
caagcaagcaaacggaaaaaggaaaggcgagccccaaaaggcacccagggacccacgaccccagcgggccagccagaacgcaagaagaacccagacggacaaa

SEQ ID NO: 62563 - RNA, 80 nt, Homo sapiens
aagacagaaccagccaacaaaagggggacgacaaggaggaacaaagaaacgagacaaaggaagggcaagccacagaagaa

SEQ ID NO: 62564 - RNA, 73 nt, Homo sapiens
cccgccgagacaccgcccgcccgagaacaccaggagacacaagcccagaaccgggacaacccagcaaacaggc

SEQ ID NO: 62565 - RNA, 76 nt, Homo sapiens
gaagccaaccaacacacaccccggagccgcagggcgcgggacaacacacggcggcggccgccaaggggagagaccg

SEQ ID NO: 62566 - RNA, 57 nt, Homo sapiens
ccagaacaccagagcaaccacacgccagaccagaagaacaaggagcgcaagagaacg

SEQ ID NO: 62567 - RNA, 70 nt, Homo sapiens
gaggacgcccccacacaagccaacacgggcgccggagagggaagcaccaccccgacagccgccagaccga

SEQ ID NO: 62568 - RNA, 63 nt, Homo sapiens
ggcccgggaccaggaaagacaggacaccgggaagcgagcccaaaaggcagagcgaggagagaa

SEQ ID NO: 62569 - RNA, 69 nt, Homo sapiens
cgcagggcgcccccggcccggcagcgggcccccacaggccggaaggcaccagccacagggccacagaac

SEQ ID NO: 62570 - RNA, 72 nt, Homo sapiens
gccaaagcgcagggccacgcaagcaaaagaacacgccaggagccgagaccaagaccacgcccaaggccaggc

SEQ ID NO: 62571 - RNA, 74 nt, Homo sapiens
gcgccggcggggcgccgcggaccaacagcccaggaggccgagcgcgggaaagcagcgcacggggggcaaaagac

SEQ ID NO: 62572 - RNA, 78 nt, Homo sapiens
aagacacgacgcgcccacggggcggggggcccccggcgggagcgcgaggcccgggagcgcgaaaaggccgacgaggag

SEQ ID NO: 62573 - RNA, 69 nt, Homo sapiens
caaccggagccacgccccacgaccgccagagagaaaaggaacagccgaagccaggggcaagcgaaacca

SEQ ID NO: 62574 - RNA, 77 nt, Homo sapiens
aaacaagccgcgaaggagagcgggcaaacagcacagaagaaggcaaagaaagaacgcagaacagcagcaaaggaaac

SEQ ID NO: 62575 - RNA, 53 nt, Homo sapiens
aggcagacaaaagggccaaagaagggagagagacaaagccacggccagacaga

SEQ ID NO: 62576 - RNA, 64 nt, Homo sapiens
aaagcccgggccaagcgggaggcgccacgaagagagaaaggcagggcaccccaccacagcgaca

SEQ ID NO: 62577 - RNA, 123 nt, Homo sapiens
ggagccccgggaggccaaaaaggcccggaggggaggagccaaccagaggacgaggcccccaagccgagacagacaaaccggaccgagagagccagacacaaagccacagacgcgagccaccac

SEQ ID NO: 62578 - RNA, 65 nt, Homo sapiens
accccggagcccagaagacagagggcgagaagcaagcgcccaaggggggaagaaaaaaaggaaga

SEQ ID NO: 62579 - RNA, 79 nt, Homo sapiens
acaacaggaggacacggaagagggaagaaagaagcagcgccagggaaagggagcagcaccggccacacccacagcacga

SEQ ID NO: 62580 - RNA, 62 nt, Homo sapiens
ccgcacccaggagcgccagcccagacccgccgaagaccccgggacaaggcaacgagagccac

SEQ ID NO: 62581 - RNA, 57 nt, Homo sapiens
gagacagccccaagacaaccccaccagcaccacagcgagcaccaaggggcaccgaac

SEQ ID NO: 62582 - RNA, 73 nt, Homo sapiens
agcagagagagagagcagaagagcgacgccgacaaaggaggaaaagaagagaccagcgcagcagacaaacagg

SEQ ID NO: 62583 - RNA, 78 nt, Homo sapiens
aaaaacgaggggaaagaaccaacgacccagagacccgaccgagcagcgcacacgagcacgcccagcccagcccgaagc

SEQ ID NO: 62584 - RNA, 72 nt, Homo sapiens
agaaggaccaagaaccagaaaaaggcacaaacccagcacagagaagacggcgacaagcaaaagacgacgcag

SEQ ID NO: 62585 - RNA, 71 nt, Homo sapiens
acagaccaacaaccgcgaaaaagggccgaccaggcagggaacaaccacagggcagacggcagcccagccac

SEQ ID NO: 62586 - RNA, 40 nt, Homo sapiens
ggcggcccacggcagcgaggccccgagccccggccccaaa

SEQ ID NO: 62587 - RNA, 77 nt, Homo sapiens
acagcccgccccccagaggcaggcccagcaaaagcagaccggaaaacccaccggcaagaccacacccgaggggagcc

SEQ ID NO: 62588 - RNA, 84 nt, Homo sapiens
gacgaggcacagaggaaggggagggccagcccgcgaaccggccggaggccggacagacgacacagccagaagacccggaccaac

SEQ ID NO: 62589 - RNA, 74 nt, Homo sapiens
aacaagcagccaagcccagacaagccccagggaagccacagcaccccagcacccagccaacagcaggcaggggc

SEQ ID NO: 62590 - RNA, 68 nt, Homo sapiens
gggacagcacggccaagcagagcaagcccaccacagcggagaagagaacccgaccgaagaaggaacag

SEQ ID NO: 62591 - RNA, 38 nt, Homo sapiens
gcccgggaaaccaccaacagaacccacagaccaaggag

SEQ ID NO: 62592 - RNA, 82 nt, Homo sapiens
gacgccgccgggcccaacggcgggccccggcgaggcagcgcggccgcagcagcccggacgcaccaaagaagacagacacgca

SEQ ID NO: 62593 - RNA, 71 nt, Homo sapiens
cccccccagccgggccaccgcagagagccaccaacaggaccacacgcccgccaacgcaaagagaagaaaag

SEQ ID NO: 62594 - RNA, 68 nt, Homo sapiens
acaagacagggacaagaggacaacgcagaaagaacacacacacccgaacgccggcccagaaggcacgg

SEQ ID NO: 62595 - RNA, 39 nt, Homo sapiens
cagagcggggcaccgagccgggccaccccgcgagcaaca

SEQ ID NO: 62596 - RNA, 55 nt, Homo sapiens
ccaggaggccagggggcgccagagcacgacgaagaaccagaaaacggggcggagg

SEQ ID NO: 62597 - RNA, 47 nt, Homo sapiens
caggacggcgaggcgaaacgaagagacaggaccgagccgcaagggca

SEQ ID NO: 62598 - RNA, 72 nt, Homo sapiens
ccggcggggccaggacgcggcaacacccaaggaaaaagcccagaggaacaggcagaagaaggacagagacca

SEQ ID NO: 62599 - RNA, 48 nt, Homo sapiens
ggaacaacggaaccagggggggcgcaagccagcgcccagggagggcag

SEQ ID NO: 62600 - RNA, 88 nt, Homo sapiens
gaggagagcacgacggaccaagacgagcccagcgcaaccccaagcgcccaaagcaggaggcaaagggaccccaagaaaccaaagggca

SEQ ID NO: 62601 - RNA, 79 nt, Homo sapiens
cgggcgccagaaggaagaggcggacggaggagcaggcgagaagagaagggccaaccgccccccagcagcaggcacgggc

SEQ ID NO: 62602 - RNA, 65 nt, Homo sapiens
acgcaaacgccgagacgccagccgcacgaggagagaaaagccaagggagagcggaaccgcagggg

SEQ ID NO: 62603 - RNA, 76 nt, Homo sapiens
cagcgagccagcagcgccccccagaagcgaggaacagacgaaaagagagagacagagaagacaagaaagcagaaga

SEQ ID NO: 62604 - RNA, 78 nt, Homo sapiens
caggagccgccgccgccaagcccggcccggcccgacaccgcgggccgccagacgggaaggaagccgggcggaagccca

SEQ ID NO: 62605 - RNA, 50 nt, Homo sapiens
gagaacgggaggcgcagaaagaggaaaaacgaggcaaagaggaacgggaa

SEQ ID NO: 62606 - RNA, 84 nt, Homo sapiens
ggagagccgccagacagagccacaggagggacgggggcggacccagagccaccaaggacaaccaccaccagcgagcaaaagaac

SEQ ID NO: 62607 - RNA, 82 nt, Homo sapiens
ccgacgcgggcgcgagggcagaaccgggaacacagcacccacccacacccacacccgcgacgggagggaggagccggccagc

SEQ ID NO: 62608 - RNA, 71 nt, Homo sapiens
caggccacaagaaacgcagcagggacggaagaagaaacacagccaacacgaggccagggaggcaggggcag

SEQ ID NO: 62609 - RNA, 80 nt, Homo sapiens
agcgggggcgcgcccgccgacccgcgcccgccccccagcaccgggcggacgggggaaagcccaccgacacccagaacggg

SEQ ID NO: 62610 - RNA, 72 nt, Homo sapiens
gcgccgggcgagcccaggggcagccaccgccaggaccccagaaagaaaaaggaacgacggagaaagaagggc

SEQ ID NO: 62611 - RNA, 84 nt, Homo sapiens
ggaaaggaccccaaagccagaccaacacggccaaaagaagacccagacaagaaagaggaagacgaagccagaaaccaaagggac

SEQ ID NO: 62612 - RNA, 70 nt, Homo sapiens
cgccccacgaaggaaaaaggggaagaaagagaaagcaggaagccagccagagcagagaaaagccagcgac

SEQ ID NO: 62613 - RNA, 59 nt, Homo sapiens
cacagacccccaccaagcagagagagcaggcagcccccagaccacaaccgagagcaaga

SEQ ID NO: 62614 - RNA, 65 nt, Homo sapiens
aggaggaaaacgcacaggacaaagcacagccacagaaggggagccaggacaggagaggaaaacca

SEQ ID NO: 62615 - RNA, 77 nt, Homo sapiens
gccagggccgagcccccagcaggacagaggagagaagaagaagggggaggccccgggccccgccgaaggacagaggc

SEQ ID NO: 62616 - RNA, 70 nt, Homo sapiens
accgcaggggggcgaacggcagccggaaacgagagcaggaccagaccgcagagccgcgggacggcagccc

SEQ ID NO: 62617 - RNA, 55 nt, Homo sapiens
aaaggaagcacaccagaggggcgacaaaagcggcccgcaagcccgagaggccacc

SEQ ID NO: 62618 - RNA, 76 nt, Homo sapiens
aggcggaggccaggcagcgaggcacgcaaaaaaccacgacaagcaacacgacaaaacacccacgaacggacgcgca

SEQ ID NO: 62619 - RNA, 81 nt, Homo sapiens
ccccgcgcgccggggcccgaggccccagccgagaggacgcggcggaaacgaagagccccagcccccagcagccgacaggag

SEQ ID NO: 62620 - RNA, 72 nt, Homo sapiens
acagagaacgacgggggaagcagcagccaggaagcagcagcggagaaacagcaaagaccagcaaggcaccaa

SEQ ID NO: 62621 - RNA, 79 nt, Homo sapiens
gggcgagagaaacaaaggacggaaacgccgaggaacccggcgaggcggcaggaccgcacaggcgcaggcgcaaggggcc

SEQ ID NO: 62622 - RNA, 71 nt, Homo sapiens
cgggaaagcggcgcgagacaacgccgcaagcgcaccagggcgagggaacggcaggagacagacacggaaac

SEQ ID NO: 62623 - RNA, 83 nt, Homo sapiens
accacaccacccacccgagagcaaccagggcaccgacaaccaggaagacgaaccccagaaacccagaaaacagggaaaacgcg

SEQ ID NO: 62624 - RNA, 75 nt, Homo sapiens
agaaccggggagcgacagaagacaaacagcaaggggcaaagggggccaaacgaaagcagaaggccagaacgaggc

SEQ ID NO: 62625 - RNA, 70 nt, Homo sapiens
agccgaggacgggaggaccagaagcaccggagaaacgaccgggacgggaagccccgacacagaagaagcc

SEQ ID NO: 62626 - RNA, 75 nt, Homo sapiens
ggggagggggggaccacgaaaggagcaagagcaagacaccggacaccgagggcccccaaaaggacgccgccagcc

SEQ ID NO: 62627 - RNA, 80 nt, Homo sapiens
ccccggccacagccagggccggcggggggcccgggagcaccagcaagcaccccaaggacgcagagcggcccccccgccag

SEQ ID NO: 62628 - RNA, 76 nt, Homo sapiens
ggcccaaggggcccccgggcaccccggaccgcgcagccaccgcggcccccgcggccaaagaccacgggggccaaac

SEQ ID NO: 62629 - RNA, 45 nt, Homo sapiens
cgacggacagaccaacgggacaagaaggaccgcgcagacgcgcag

SEQ ID NO: 62630 - RNA, 72 nt, Homo sapiens
cggcacggcacgccccgcaagaaacgggggaagcagagcgcacaaagggaaaggaggcagcagcgaccagaa

SEQ ID NO: 62631 - RNA, 53 nt, Homo sapiens
agcagggcggagcccccagcccccgcgaagggcaacagcgcagcccggaaaga

SEQ ID NO: 62632 - RNA, 78 nt, Homo sapiens
cgcggggcgccaggcacgcgaggcccccagaggaaaggcaagggcagaaaagaggggaaaaggccagccgcacgcagg

SEQ ID NO: 62633 - RNA, 72 nt, Homo sapiens
aaaaggcagccccaacaaaaccgggaagccacgaaacggcacgccggagccaagaaagaaaagcccccgcaa

SEQ ID NO: 62634 - RNA, 80 nt, Homo sapiens
cggcaacgagagcgcaccccgaaccgcggccgagagcgcgggcaacccgggcaggcggcgcagcggcaccaccaggcacc

SEQ ID NO: 62635 - RNA, 75 nt, Homo sapiens
gggcggccgccccgccggagcagcacacaagaccagaaaacgaccacaagaaggcacacggaaagagcgccccag

SEQ ID NO: 62636 - RNA, 76 nt, Homo sapiens
aggaacccacggagcacccagaccggggaaagggaaccagcacagcgacacccaaagcaaagacaggggagaagag

SEQ ID NO: 62637 - RNA, 76 nt, Homo sapiens
cccacgaggcgcgaccagaagaggaggcccccgaggacgcgcaggcaccaacaggaaaagacagacggggaaaaaa

SEQ ID NO: 62638 - RNA, 78 nt, Homo sapiens
cacgggcgccaggaacgcggaacagaaccaaaggcaggacagccagcagggcccgccgaaacccacaaagaaaccaag

SEQ ID NO: 62639 - RNA, 74 nt, Homo sapiens
aaaacccaaggccagggcgaagacagaggcaggagaggaaagaaggagcaaagcccagggaaaaggacgggagc

SEQ ID NO: 62640 - RNA, 78 nt, Homo sapiens
cgagagcggaccgagagcgcgaaacgcacgagaagacggagaagacagccaccgggagaacaaaagagggcagaacgg

SEQ ID NO: 62641 - RNA, 76 nt, Homo sapiens
ccccgacaccagaccagaaggaccacgggagaagcagggccccgaaccccccagcagaggaagaagagcaaagagg

SEQ ID NO: 62642 - RNA, 69 nt, Homo sapiens
gaccaggagagccaagagaacagacgaaaacgcaaacagaagacaggacaagacagcaaacgcgcgaaa

SEQ ID NO: 62643 - RNA, 57 nt, Homo sapiens
ccaccgagagacagaagaaagcgccacacggagagccagggacacccaggcgcgagc

SEQ ID NO: 62644 - RNA, 75 nt, Homo sapiens
acaggacagcgccggccacccaaagcacgggggcaacagagaaaccgcagcaccagaacgagaaagcaaccggca

SEQ ID NO: 62645 - RNA, 55 nt, Homo sapiens
cacgcgagcccaaagagaccgaaaggaaaggagcagcagaacgaaggaagaaggg

SEQ ID NO: 62646 - RNA, 81 nt, Homo sapiens
cggagaccaggagaccccacggagcgggcgacgagcgacccgggagacacgacgaaagcaccgggaggaaagagagccaca

SEQ ID NO: 62647 - RNA, 79 nt, Homo sapiens
gcacgaccggacgggggaaacgcaccgggacccggccacaagggaacccagggcacaagcgcgcaacccagaccgcccc

SEQ ID NO: 62648 - RNA, 72 nt, Homo sapiens
acacgaaaagagagcagaaggagggaggaaggccccacaggccggccgcccccaggggccaagccccaccgg

SEQ ID NO: 62649 - RNA, 73 nt, Homo sapiens
gcagacccacaaggaaaaacggccaaccggcgggccgcgcgaaaaccagagaagacccggggcaggcgcagga

SEQ ID NO: 62650 - RNA, 73 nt, Homo sapiens
gcggcgggagcagaacgccccccagcccgagcgcgcccgagggcgagaaggcggggacagagagcaccagcac

SEQ ID NO: 62651 - RNA, 80 nt, Homo sapiens
cacgcagaccaggaagagcaggcgggccagcagggcaagaggccccggaaggccaggggccgcaccaggccagccccccc

SEQ ID NO: 62652 - RNA, 81 nt, Homo sapiens
ccggcaacacggacacccacagcggggcggcggcggcggcggcgcggcccaaaaggaaacccaccagagaaggcgcggcca

SEQ ID NO: 62653 - RNA, 46 nt, Homo sapiens
cacacaacacacaggggcacgaacggcggccaaagcgccagacaag

SEQ ID NO: 62654 - RNA, 57 nt, Homo sapiens
caccgacaagcaagccgaagagaaaggcaagcaacccgcccagccccgagagcggga

SEQ ID NO: 62655 - RNA, 55 nt, Homo sapiens
gaccaagaaccaggagaccgggcgcaaagcagaacgcgaagaaggaagacggaaa

SEQ ID NO: 62656 - RNA, 82 nt, Homo sapiens
aagggcgagaagaagcagaaacacagaccacacaagggaccaagaaaggcccagggaccaaagcccggacaaggcccgagca

SEQ ID NO: 62657 - RNA, 67 nt, Homo sapiens
aggcaagaaaagccaggccgaccagaaaaacagagcaggacccacacgacacaagggagaccaggaa

SEQ ID NO: 62658 - RNA, 74 nt, Homo sapiens
cgcgcccgggccccgcgacccaggaggcagcacggcaggagacgaggagaggacagcaggacacccggacccca

SEQ ID NO: 62659 - RNA, 82 nt, Homo sapiens
gaaagaaagaaaacaaagaaaaacaacccagaaccaaagaacagaaaaaccagaagagaaaaaacaaaggggagaggcaccc

SEQ ID NO: 62660 - RNA, 47 nt, Homo sapiens
cagcaaagagggaacaggagagggaagcggcagggcccccccccagg

SEQ ID NO: 62661 - RNA, 76 nt, Homo sapiens
ggcggacaagagaagccgccagcaaaaccccggacaagaaagccagagaaacgacaccagggccgccgcacaagac

SEQ ID NO: 62662 - RNA, 82 nt, Homo sapiens
caaagccaaagccccaccaagacacggaccacgaggacggaagagcacaaagcagccgagcggaaaaggaagacgagcaaag

SEQ ID NO: 62663 - RNA, 76 nt, Homo sapiens
caggagagagcgccaaggaccggcaagggccgggagaagcacggaaagcaggggaggcaacggcagggaggggacc

SEQ ID NO: 62664 - RNA, 77 nt, Homo sapiens
cacaccgcccggggccgggcagcgagcccacacagacaacccagccagacccagccaggcacaggcgggccagcgac

SEQ ID NO: 62665 - RNA, 68 nt, Homo sapiens
caaagcggaccagagacaggcggagcgaccgaagaagggacgggcacccagcccaccgagaggaccgc

SEQ ID NO: 62666 - RNA, 73 nt, Homo sapiens
gcgcgcgcgcgcgccgaggcggagcgccgagcgagcagcgacccccaggaaagcacggcggcgagcagcacac

SEQ ID NO: 62667 - RNA, 77 nt, Homo sapiens
acagcaaggaagacccacggagagaaggggaaccacaaagaagagaaggcgggccaagaccgacaacgccaacaaag

SEQ ID NO: 62668 - RNA, 80 nt, Homo sapiens
gaggcgcccccggagccgccccggaggagaagccagagacgcgcacgaaacgacgaagaggcccgaggacagaggagcaa

SEQ ID NO: 62669 - RNA, 50 nt, Homo sapiens
ccaccaccaagaaggagggcgcagaacagcgggaaaaggcagcaagaaac

SEQ ID NO: 62670 - RNA, 72 nt, Homo sapiens
cgggccaacagaccaggaagggcagaagggcaagcccggcggcagaacccccggggcgcgcgagaagagaaa

SEQ ID NO: 62671 - RNA, 65 nt, Homo sapiens
caagaacgccgccgccgcacaagcggacgacagcagacgacccgaagggcccggggcaaagcaca

SEQ ID NO: 62672 - RNA, 56 nt, Homo sapiens
gagcccccagaccgagaagaggagggacaccaagcagagggccccacccagaaggg

SEQ ID NO: 62673 - RNA, 72 nt, Homo sapiens
caggaacacgagaaagacacgcaacaacaggacaaaccccccccccgggcggaccccccacagcaggagcca

SEQ ID NO: 62674 - RNA, 55 nt, Homo sapiens
gagacaaggagagaagaaccaaagaagcaaaacacgagcggcagccggcaagccc

SEQ ID NO: 62675 - RNA, 113 nt, Homo sapiens
ggcagagcccagcgaaagacaaccgcccccagcgaagaccggagagaggaaggagaccagagccggggcacgagggagccagcgccgcacggaaccggacaaggagggaagag

SEQ ID NO: 62676 - RNA, 57 nt, Homo sapiens
gacaggacaaggaaaaggagaagaggacgaggcagacgagggaccgaacagacgaac

SEQ ID NO: 62677 - RNA, 67 nt, Homo sapiens
aacgccccccgggcggcggggagggagggccggccaacaaaagcccgggcggacgcaaggccacggg

SEQ ID NO: 62678 - RNA, 73 nt, Homo sapiens
agaggaaggagacagagagagcaaagaaaccagacgagggacacgaccgagaacccccaaaccgagacaggaa

SEQ ID NO: 62679 - RNA, 72 nt, Homo sapiens
ggcgaacacggaagggaaagcacagcccacgggcaggggacaaaggaaaaagaggaggaaaacagcagggac

SEQ ID NO: 62680 - RNA, 80 nt, Homo sapiens
aaacagacgcccagccaaacaaaaaggaaaggagacaagcagagacgaaccaggcaaagcggaaggccaaagacagacgg

SEQ ID NO: 62681 - RNA, 96 nt, Homo sapiens
accggaacgggcacaagccgacgcaccgccgccccgggccagcagaagaggaccagacgcccgggggggcggcggcccacagaccgccaccagccg

SEQ ID NO: 62682 - RNA, 76 nt, Homo sapiens
aacccaaggcacagccaggccgcagagggacgacgcagccagagcagcaagaggccaaggggacgacggccacggg

SEQ ID NO: 62683 - RNA, 69 nt, Homo sapiens
gggaagggagaagaccaaagggaagagaaacgcaaccgaaggccggcccacagcccaaaaagaaacagg

SEQ ID NO: 62684 - RNA, 85 nt, Homo sapiens
gccgcacgaccccgccaagacaccacacccccaggcaagagcgaaggagaaaggcaacaaggcccgagcggggaacacgagagcc

SEQ ID NO: 62685 - RNA, 70 nt, Homo sapiens
acgccgcgcccgcaagaacggccaagaaagcccgaaaaccaaaacggccaacagcccagcacaagacgcc

SEQ ID NO: 62686 - RNA, 102 nt, Homo sapiens
gaggagccgggcgcagaaccagaccgggagcacgcacgccacgaaggcccacgaagaggacgccagggccggggcagaccaccaggacggcccgaccacggc

SEQ ID NO: 62687 - RNA, 38 nt, Homo sapiens
ccagccccaccgacagggacgccaggggaccgcggacc

SEQ ID NO: 62688 - RNA, 88 nt, Homo sapiens
gcgccggaccgggcgagcgcggcgcccagggacccgcgggaggagaagagagcggacccacaccagggaagacaggggagagggggca

SEQ ID NO: 62689 - RNA, 39 nt, Homo sapiens
ccccagacccgaacagacaggccccacccacccggccac

SEQ ID NO: 62690 - RNA, 72 nt, Homo sapiens
ggccccaaacgggccagaaggcgcgaggcgggaacacgaagacagcaacggcaggagggggccgaggagacg

SEQ ID NO: 62691 - RNA, 77 nt, Homo sapiens
cagggaaggagggcgccgagcaacaaccgccgagcggacaaggcacgaggcgcggcgaccaccacagcagagcccgg

SEQ ID NO: 62692 - RNA, 46 nt, Homo sapiens
gcccggcggcgcaccgggcggcagaaagacgcgagacgccgcacaa

SEQ ID NO: 62693 - RNA, 84 nt, Homo sapiens
aacagcgggcagcaagcaggaaacgaagagcagcgaaagaaaagccagcgaggagagacgacggggggaccaacaagaggaaag

SEQ ID NO: 62694 - RNA, 74 nt, Homo sapiens
cgccaggcccaaccacaccaggcaaggacaagcaaagggacagcaaaggcgcagcaccagcacccaaccaagaa

SEQ ID NO: 62695 - RNA, 76 nt, Homo sapiens
gggccacgaggaaaggaagacgggcggagcgccacagccaggagacacgaaggaaccccggagcagcccacccgcg

SEQ ID NO: 62696 - RNA, 81 nt, Homo sapiens
aaggaccagcaacgcagcgcagcaaaccagcaaggcagcagcaggaagccggcgagcaaggggaagcccagccgcagaccg

SEQ ID NO: 62697 - RNA, 77 nt, Homo sapiens
gcaggaggccgaggaggccgcagacccggaggggcagcaaagaggagacccaggacacaaaggacaaagagaaacaa

SEQ ID NO: 62698 - RNA, 75 nt, Homo sapiens
aaagagaagccaagcagaaaaaccaaagcacccgaaagaaagaacaacaagaaggagaaagacacaacgacagaa

SEQ ID NO: 62699 - RNA, 78 nt, Homo sapiens
ggcagaaaaacgcagacggacgccgagaagccagaagaaagaaaaccgggcacaggaccaaagcaaacacagaccccc

SEQ ID NO: 62700 - RNA, 68 nt, Homo sapiens
aacaacgcacccaccaccaaagaagcgagcggcgagagacgacaacaacgaagagaggaaagaagcgg

SEQ ID NO: 62701 - RNA, 72 nt, Homo sapiens
cagcccgcccaggaagggacccgagcacggccaggccgccccacccaccccagggcccagggcccaggcggg

SEQ ID NO: 62702 - RNA, 72 nt, Homo sapiens
acccgaagcgggcgcgcgcacggcaggacggagaaaaccagaaggcaccgacaggaaaggaaaaggagaacc

SEQ ID NO: 62703 - RNA, 35 nt, Homo sapiens
ccagggcgagaaagagagaaaaggaacagccgaag

SEQ ID NO: 62704 - RNA, 52 nt, Homo sapiens
gacacgacccaacaacagcacccaaggccccaccaccacaacagcagggcga

SEQ ID NO: 62705 - RNA, 72 nt, Homo sapiens
aagaccccggggaaaaggaacgaaccccagcagaaccagccgccagacgggcgccagccacgggacaaccaa

SEQ ID NO: 62706 - RNA, 64 nt, Homo sapiens
gggaggacgcacccggggaaccagcaaacaaggaggagccaggaggagagaacaagaaaagcgc

SEQ ID NO: 62707 - RNA, 81 nt, Homo sapiens
ccaagagcccaacaccacccgagagccccaagagaagggaagcaaggagaaggagaagcagagacggcacagcagccacga

SEQ ID NO: 62708 - RNA, 78 nt, Homo sapiens
cggacagacaggagagggagcacagcggccaggagaaccaccggaggaacccggaagaaaaaaaaaacaagagggcga

SEQ ID NO: 62709 - RNA, 53 nt, Homo sapiens
accagggcggcggccagcgccacgcgcccggcagggcagagacacccaagaca

SEQ ID NO: 62710 - RNA, 78 nt, Homo sapiens
gcaaggccccaggaacaccacaggagcgaccgggaggaaagcaaacacgaagaccggagccagcagcgaacagagagc

SEQ ID NO: 62711 - RNA, 74 nt, Homo sapiens
ccgcaccagcgacaaggggcagcgcggccaccggaaacaaaagggagccgccaccaaaagcagacggaaaaccc

SEQ ID NO: 62712 - RNA, 77 nt, Homo sapiens
ccaagaaacaagaaccaacaccaggaacgcgccacgccaggacacagaccagcccaagacaagcccccagacggcac

SEQ ID NO: 62713 - RNA, 35 nt, Homo sapiens
aagagacaggaccccacaaagcaccagcacacagg

SEQ ID NO: 62714 - RNA, 80 nt, Homo sapiens
gagaagggggaccccggagaggaccaccgagagggaacaggcaacagagacccgagcggaagagaagccaaggaacaaga

SEQ ID NO: 62715 - RNA, 74 nt, Homo sapiens
cccagagcagggaagcaggacccagagcaacaaacagacagagaccgagagaggcgacagccacccacagcccc

SEQ ID NO: 62716 - RNA, 74 nt, Homo sapiens
cccgccgcgagccgccggggagccgccagccgaacccagagaaccccacaccagaaccgaccgaaccggagcac

SEQ ID NO: 62717 - RNA, 88 nt, Homo sapiens
aagcggccaagaaagacaaagacccaggaacaaaccgggggcaaggccaaaaagaagacaagcagagacgaagcgaagggagcacacc

SEQ ID NO: 62718 - RNA, 76 nt, Homo sapiens
ggccggagccaccgcaccccagcagcggggcggccagacacgaccaaacaagagaaagacagcaaagaaaaggaga

SEQ ID NO: 62719 - RNA, 74 nt, Homo sapiens
gcccagcaggccagcacagagaggaaagggcggaggagacgcggagcagagaaaacagaacgagggaagccaca

SEQ ID NO: 62720 - RNA, 78 nt, Homo sapiens
gccaggcaacgcacgcccgcgcgcacggcccccagcgcccagaacccccacgaggaagaaaggccccggagagggagg

SEQ ID NO: 62721 - RNA, 72 nt, Homo sapiens
aacccagcccaccccacagcagggcggagaacggaaaagcaccaggaagcagagaggaccgcagaagggaag

SEQ ID NO: 62722 - RNA, 78 nt, Homo sapiens
aaaagcggcccgggagcccgcgcccccccggggacgaggggcccagcggagaagagcccaggcccggaagagaggaaa

SEQ ID NO: 62723 - RNA, 87 nt, Homo sapiens
aaccgccggcgccggcccagcagcgcagccgcagccgggcggcagggccccgagccggcccgggcgaggaggcacggcacaaaggcc

SEQ ID NO: 62724 - RNA, 76 nt, Homo sapiens
gcgggcagcaggagacggaggaccagaacacggcagaccaggagaacacagcgaaaaagggcggggaaaaaagaag

SEQ ID NO: 62725 - RNA, 71 nt, Homo sapiens
cggcaacccgccgcccaggccgccccaccagccccgcgcccggcccgcggcccccagcgcacccacagaag

SEQ ID NO: 62726 - RNA, 52 nt, Homo sapiens
ccggcgggacgaaaggcaaggcaacggccccagaggaagacaaaaaggacca

SEQ ID NO: 62727 - RNA, 52 nt, Homo sapiens
acaacagagggagggccccacagagcaagacaaggggcgaggaagagacagg

SEQ ID NO: 62728 - RNA, 73 nt, Homo sapiens
ccaagaacggaaagacgggaagagacagaggcaagaagaaccgcaaggagaggaagaaacggaagggaagaaa

SEQ ID NO: 62729 - RNA, 54 nt, Homo sapiens
ggcgaagaacaccaaggagaacacacccaggcgcgagacgccggagcaaaagcc

SEQ ID NO: 62730 - RNA, 82 nt, Homo sapiens
cccgggcgggacccgaccccgcccgaggcccccacaagaagcagcggacgcgcccccaagaaagacagagcgccgccaccgc

SEQ ID NO: 62731 - RNA, 57 nt, Homo sapiens
ccagaacaagcagacaccagaaagcgagaagggcggccagaaggacgagggacagaa

SEQ ID NO: 62732 - RNA, 68 nt, Homo sapiens
cccagggaaaggagacaaggaccgaaacagaaacggaacaccaaggcagaagaggaacggggaagggg

SEQ ID NO: 62733 - RNA, 75 nt, Homo sapiens
ggggaggacaaggaagccgggcgcagcaggcacagcagacaaggccagcgacgacagagacccaggaaaccaaag

SEQ ID NO: 62734 - RNA, 69 nt, Homo sapiens
ccgagcccgcgggacaggggccagcggcacgccacaagccagccgcaccccagccaacagcacaaaaac

SEQ ID NO: 62735 - RNA, 62 nt, Homo sapiens
ccccccacccacggcggcaagagcgccaacagggcacacgggccacagaggaccagcaagga

SEQ ID NO: 62736 - RNA, 86 nt, Homo sapiens
aaaccaagaccaccccgccgggaccggaggagacacggcccgcaggcgccgaagaagggagggaggccgcaggcgggccgggccgg

SEQ ID NO: 62737 - RNA, 76 nt, Homo sapiens
cggaagccacccaccccacaggacacacccaagaggaacgggcagagagcaagaggcgaagcacggcacaagcacc

SEQ ID NO: 62738 - RNA, 40 nt, Homo sapiens
aagggggagcacagccacccgacggaggcagccggggagg

SEQ ID NO: 62739 - RNA, 55 nt, Homo sapiens
gaaggagggccccaggaaaggacaaacccgaggcgagaaccaagacaacaggcga

SEQ ID NO: 62740 - RNA, 65 nt, Homo sapiens
gcgacaccagccccccagcaccacgaagaggcagaaaaccgcgcgggagggggcaagccaccagg

SEQ ID NO: 62741 - RNA, 74 nt, Homo sapiens
aggaagacagccgccaggcgccacacggcaagcccgggagagcagccagacagagcccagaggcccggaaggcg

SEQ ID NO: 62742 - RNA, 38 nt, Homo sapiens
gaagggccagcagccgaggagcgagcgacaggcagagg

SEQ ID NO: 62743 - RNA, 73 nt, Homo sapiens
gacggcgccccaagaccaggccgcggacacgcgggcccgccgagcgcgagccccgggcccgcggcgcaccggc

SEQ ID NO: 62744 - RNA, 78 nt, Homo sapiens
ccagaaaaacaacaccacagacaagcaggagccggggaaacgcaggagggccgcagaacacaccgcccacagaacccc

SEQ ID NO: 62745 - RNA, 68 nt, Homo sapiens
gaggaaaaacacaccacacaagggggcagggaaccaacgagacagaaaggaaccaccggacaaacacc

SEQ ID NO: 62746 - RNA, 71 nt, Homo sapiens
cggacagcggggcccgcggaaaacagagagaaagccaagaacacaagaagaagaaaggagcaaggcaggga

SEQ ID NO: 62747 - RNA, 70 nt, Homo sapiens
agacacgggacaaagcagaccgaaacagaagaggcaggagggaagcggaaagcagcagggcacacaaggg

SEQ ID NO: 62748 - RNA, 56 nt, Homo sapiens
ggaaaaggcaaggcgccagaaaacaaagccacggaaaaacgcccggggaaaagcag

SEQ ID NO: 62749 - RNA, 73 nt, Homo sapiens
ccacggggaggacaaccgcaggacccagcagcgcagcagccaaggagacaccccagcggaaccacagaagaag

SEQ ID NO: 62750 - RNA, 80 nt, Homo sapiens
accaggagcccgagagagaaggagcacacgggcccaggaagacaacagaacgcacaaaaccaaagagaggaacgagcagg

SEQ ID NO: 62751 - RNA, 86 nt, Homo sapiens
gcacgccccccaccgccccccacaccccaaggagggacaggcaagaaggaagaaggcagaggcgcagccagggggaccgcggagga

SEQ ID NO: 62752 - RNA, 69 nt, Homo sapiens
ggccaccacagaaacaaaagcaacaaagagggaagcacgagcaggccacaacaccgaaaaaagccgcac

SEQ ID NO: 62753 - RNA, 69 nt, Homo sapiens
ccgccgagcaggggcgaggagcgaaaacacacaggcagagggcaccacagacaagaaagcccccacgga

SEQ ID NO: 62754 - RNA, 80 nt, Homo sapiens
cccggcgccgcgccggcggcggaacgcacaccagcaccagcccaccaaaccagcacgaccccggagcagaagaaggagcg

SEQ ID NO: 62755 - RNA, 86 nt, Homo sapiens
ggagcccaagaaacgggcagccaggcccccacagcccgcaggaacgaagacacacacgaaaggccaaaaggagaaggaagggaaga

SEQ ID NO: 62756 - RNA, 72 nt, Homo sapiens
ccaacagacgagccacccaaggaacaccgccagaaagggagaggaccgacaaaagagaaagccgaggaagga

SEQ ID NO: 62757 - RNA, 81 nt, Homo sapiens
ggggaccggcaggacgcagaaggccagacgcagcacgaaagcagagcgggcaacacaacaaggcgcggacacccagacaag

SEQ ID NO: 62758 - RNA, 68 nt, Homo sapiens
aacgagcggcagaacgccgcccacagggagaccggaaaccgagagaaacgaagacgaagaaacagccg

SEQ ID NO: 62759 - RNA, 71 nt, Homo sapiens
gaaaccaaacaagccgaaagagcaaggcaggcacagccgagagcagccgggccgaaggacgccaggaaacc

SEQ ID NO: 62760 - RNA, 77 nt, Homo sapiens
ccaggagacaggaggccgcggggagacgcgggggacggggcaggaccacagggacgaaccaaagcaaaccacgggac

SEQ ID NO: 62761 - RNA, 55 nt, Homo sapiens
gaggaaagaggcccaggccagccacccaaagaagggagcacccgccgcaagacga

SEQ ID NO: 62762 - RNA, 81 nt, Homo sapiens
ggcgggggcgccccaggagccggacagagcccggaagcaggaagaggagggcaggcacgcagccagcagcagcgcagggaa

SEQ ID NO: 62763 - RNA, 54 nt, Homo sapiens
gccagagaaaggacgagcagcaagcagggagcaaggcccagcagaagacgggac

SEQ ID NO: 62764 - RNA, 56 nt, Homo sapiens
aagggaggcccaagacccacaacaaaagagagggaaagggcgggggcaagacccag

SEQ ID NO: 62765 - RNA, 74 nt, Homo sapiens
gggccccgagagcagcagcggaaaagcagacaagagaacagggggacgccaggagcgcgaagcaccggacaaaa

SEQ ID NO: 62766 - RNA, 78 nt, Homo sapiens
ccaaagcacggcaccggacaggcccagaagaggccacaaggaagaagcagcagcgccaaggacccgcaagcgcaccaa

SEQ ID NO: 62767 - RNA, 73 nt, Homo sapiens
agaaccggcccgcgggccggccccgggcggaggagcaagggaacaagagacaaggcagagcagccgacccagg

SEQ ID NO: 62768 - RNA, 72 nt, Homo sapiens
caagaagaagccgcagaccccgcgcgagccagcagcaccggaacaccaagagaagacacccaccgggacacc

SEQ ID NO: 62769 - RNA, 74 nt, Homo sapiens
cggacccggagacaccccgcagcacagccgcgaccaaggagagagaaccacgagagcccgggggcaaaaaagcc

SEQ ID NO: 62770 - RNA, 59 nt, Homo sapiens
ggggaagcggagggaacgagagaaagggggaccagaggaggagcgaaaagaccaacaac

SEQ ID NO: 62771 - RNA, 85 nt, Homo sapiens
ggacgcccggccgggcccccgcgccccccaggagcagaccgggccgccgccagagacggggcaagcggacgggaccgcagcacac

SEQ ID NO: 62772 - RNA, 74 nt, Homo sapiens
agagaaaagagaaggcagggggagaaggcagacacacaggaaaaacaggcaaaacaggaagccaggaaaagaaa

SEQ ID NO: 62773 - RNA, 58 nt, Homo sapiens
gccgcacgagaagagagccagaggggggacgaacccacaggcaaagacaaacgccgca

SEQ ID NO: 62774 - RNA, 72 nt, Homo sapiens
ggccagcccgccgcaagaccacgaacacagggaaagacaaggagccgggccgagaaaccgaaccagagacca

SEQ ID NO: 62775 - RNA, 79 nt, Homo sapiens
ggccaccaaccccaacccggagagcggcgagggaaaagcacagggccaggaagcagagggacagccaggccagaaacag

SEQ ID NO: 62776 - RNA, 101 nt, Homo sapiens
cacccgcgcgcgcccgggaggaaggaacgaggcaaggagcaaagcagcggcgcagcccggggaggcagcacggcaggagacgaggagaggacagcaggaca

SEQ ID NO: 62777 - RNA, 72 nt, Homo sapiens
agcagaagcgcgcagcaacggcgggaagagccgcccgggagacgcaccagagcgcaagcccccccaccacgc

SEQ ID NO: 62778 - RNA, 75 nt, Homo sapiens
ccaccgcaagggccacgcgggcagaccgacagaagaaaagccgcaacaacgggaacgacaagacaagcaaagagg

SEQ ID NO: 62779 - RNA, 98 nt, Homo sapiens
cgcaagacggggcgggagccggcagccgacggcaaagggcgggggcaaagcggagaccgcgcaccgacaagacagccaacacacccccccaagcgacg

SEQ ID NO: 62780 - RNA, 74 nt, Homo sapiens
ccagcaacaccgggcaccgaacgggggggagcgggcgagagggcagcgacggcagcgagccggcccaccggggc

SEQ ID NO: 62781 - RNA, 73 nt, Homo sapiens
cgcggggagccccacgacggagaccgcgccggacagagcaccagagggaaaggagcgcgccaaagcaacgaca

SEQ ID NO: 62782 - RNA, 63 nt, Homo sapiens
aagggcgcgccgcacgagcccagaagcggcacaaccagagccgggcagacccgaaaagcggac

SEQ ID NO: 62783 - RNA, 128 nt, Homo sapiens
aggaaaggccagagcggagaccagcacccagaagagagaccgcaacgagaacaaagggccgggagcgaggaggggcgagcccgggaggggggcggacccagaaaccaaccgaccagcaacagcagcca

SEQ ID NO: 62784 - RNA, 75 nt, Homo sapiens
agcgggaaagaaagcagccggcgcccgaaggaggagccgcaacaaggggggaggagagggccacggacccaaccg

SEQ ID NO: 62785 - RNA, 62 nt, Homo sapiens
ccccaccccggagccaggcgccggggcgagccaccacaccaagaacccaggagggggaccag

SEQ ID NO: 62786 - RNA, 79 nt, Homo sapiens
gcacgccaacaacaggggaccaacaagcaccacacgccccacccaagcaggcgaaacccaaggcaacgggagggcaggc

SEQ ID NO: 62787 - RNA, 72 nt, Homo sapiens
gaagacacaaggggaagaacacgagagcgcaagcagaacaaggggagagcccgacgcagaacagcggagccc

SEQ ID NO: 62788 - RNA, 70 nt, Homo sapiens
gaacaaaaacaaacaggagccgcggggcccgcccagaacagaagagccaccaaaaccggcaaaggccgcg

SEQ ID NO: 62789 - RNA, 79 nt, Homo sapiens
ccggcgggccccgcgaaagaccggcagcccacggggcccgcgaagcacgcgagaaggggagggggagaaagaagaggaa

SEQ ID NO: 62790 - RNA, 89 nt, Homo sapiens
ccaaaacggccgggaaagaaccacaagcccacgggacacgcggcaggaacggaagaaggaaccagcaaagcgccacgaagcacaagcaa

SEQ ID NO: 62791 - RNA, 82 nt, Homo sapiens
gcaccagagcgcccggcccacgacacaggaagaagacaggcaaaagcagaccggaaaacccaccggcaagaccacacccgag

SEQ ID NO: 62792 - RNA, 89 nt, Homo sapiens
agcagagaccccagacgccaccacaacccccagacgcaagccaaggaaacagaaccgaagccggaccggggcccagcaaagccaaagga

SEQ ID NO: 62793 - RNA, 72 nt, Homo sapiens
gggaaaaaagcagagcccaggagaaaccggacgcgacgggcaccgggagaggcgggaagaagaagggagcca

SEQ ID NO: 62794 - RNA, 35 nt, Homo sapiens
gagagagacacggagccaaagaaagaacgagcacg

SEQ ID NO: 62795 - RNA, 65 nt, Homo sapiens
agagaagagaggagaacagcaagcaagccaaagccagaagggaagaaggagaaagggccaacccc

SEQ ID NO: 62796 - RNA, 71 nt, Homo sapiens
ccggcgcgagacccgccggaggaacggacggcgagggggcggacggcacgaacaacgcgggcccgcccaga

SEQ ID NO: 62797 - RNA, 89 nt, Homo sapiens
caacgcccgccggggagccaagaggcaggcccgagggccccccggggccccccgggcaaggcgaaagagaggacacaggcagagaacac

SEQ ID NO: 62798 - RNA, 74 nt, Homo sapiens
ccggcccagagccaaaggagccccacaaaaggaggcagggcgagacaccgcaggacgagccaaaacgaagaacg

SEQ ID NO: 62799 - RNA, 72 nt, Homo sapiens
acagccccaacccagaaagcagaggccagagcggagacagacggaaggccgcggacccccccccccccaccc

SEQ ID NO: 62800 - RNA, 80 nt, Homo sapiens
cagaaaggcacgaagaaaagagaaggaaaaacagaacggcaaaccggaaaaaaacggccagaaggcagaagagaccaagg

SEQ ID NO: 62801 - RNA, 57 nt, Homo sapiens
cggaacaagaggacggggggggaggacgcaccgcgggcggccacggaccccagcccg

SEQ ID NO: 62802 - RNA, 73 nt, Homo sapiens
cacacggaggcggagacgggaggaagagagaccaggagagggcccaggaccagacccacaaccacagaagcag

SEQ ID NO: 62803 - RNA, 77 nt, Homo sapiens
cgaaggaccagcgcaacggcaaggacccgcccccaagggcgagcaccaaagccaaggaagcccagaagaaagagcac

SEQ ID NO: 62804 - RNA, 70 nt, Homo sapiens
ggaacgcacgaaaaggaaccaggcgccccaggagaaggaccgaagcccacagaggaacacaaaaaacagg

SEQ ID NO: 62805 - RNA, 72 nt, Homo sapiens
ccggcaggaaggggaccgggcggcggagcggcggaagaagcggaacaacccgacacgagaaaaccaaaggag

SEQ ID NO: 62806 - RNA, 72 nt, Homo sapiens
cgaccaaacaggcacgagaaagagacaagcgggcgacacgagagggaagccccagagcggggccggcgccca

SEQ ID NO: 62807 - RNA, 40 nt, Homo sapiens
cgcccgaggcggaaggcgcagaaaagagcgagaagaagag

SEQ ID NO: 62808 - RNA, 84 nt, Homo sapiens
cccggcgagggcgcgcggcgggccgccccgcccgaaaggacgagaacccccgcgaaccagaggaacccagcgagcgagagcgga

SEQ ID NO: 62809 - RNA, 91 nt, Homo sapiens
gcgaagaagcgcagccgcaccggccaaggccccggaaggaagggaggacgaccaaagaacagcggagaccaggaagcaggcgagaaggacc

SEQ ID NO: 62810 - RNA, 58 nt, Homo sapiens
ccaggacaccgagccccaggcaggcaggagaagggcaccggggaggaccgcgcgacgc

SEQ ID NO: 62811 - RNA, 55 nt, Homo sapiens
ggccagcgcagcggacccagacacagcaccaggacacagagcgaagaacgaaccc

SEQ ID NO: 62812 - RNA, 56 nt, Homo sapiens
agggcgcccccgaaagaggcagcagcacgcgaaaagccggaacccagaagcaagag

SEQ ID NO: 62813 - RNA, 68 nt, Homo sapiens
gagcacacccccccacgccggacaggcaaagggggggggaaggggcggcaccaggacgccgaaaagcg

SEQ ID NO: 62814 - RNA, 82 nt, Homo sapiens
ccagaccaagacccgacacaaggcagccccacagcaggggacagcacaggacaagagaaggcacagaaacccacaagaaaaa

SEQ ID NO: 62815 - RNA, 84 nt, Homo sapiens
acagcccaccaggccaccacgcggcgggccgggcccaaacccccggacaaacgccgcccgggcgccagagcccccagagaccag

SEQ ID NO: 62816 - RNA, 76 nt, Homo sapiens
ggcaaggcccgaaccagaaacaggcacagaagggccccgcccagagcaccacccgagacacaggagcccacggggc

SEQ ID NO: 62817 - RNA, 80 nt, Homo sapiens
agggcccagaaagccggaaaccacgggcaaaacagaagcagacgagaacggcagccaagggcgaccaggccgcgggaagc

SEQ ID NO: 62818 - RNA, 71 nt, Homo sapiens
ccagacggacgaggcggcggagaacaagcggcagggcaggacccgaggcgccagcagcagcaagaccgggg

SEQ ID NO: 62819 - RNA, 76 nt, Homo sapiens
gcaacgcggaacccaagaaggcggagagaggaaggcagggaggagaaagagccaagaaaaagaaaggaaagcgccg

SEQ ID NO: 62820 - RNA, 76 nt, Homo sapiens
aggaagccgccggcccgccgcgccccaccgcaaccggaggcaagcaccaagggagaagaaccaacaacggaaaacc

SEQ ID NO: 62821 - RNA, 83 nt, Homo sapiens
gcaccccggggcccaggaagggcggcccagacaggaaaagcgagaaacaaacacaagaggggccagacaagaaaaacagaaga

SEQ ID NO: 62822 - RNA, 77 nt, Homo sapiens
gggcccagcagcaaccagccacccgcccccaagaaggaagcacagggccggccggaacagcaacaaacaagcgcacg

SEQ ID NO: 62823 - RNA, 83 nt, Homo sapiens
cccacagacccaaacaaagagaaacccacacaaggccagcgaaccagcagccgggcagcccaacacaagaagcgagagccggc

SEQ ID NO: 62824 - RNA, 79 nt, Homo sapiens
gaggagggcaacgagacgggggcgaacaaaggcacacggggagaggaacacgaggagaggagaacccaagaagacaccc

SEQ ID NO: 62825 - RNA, 71 nt, Homo sapiens
ccgcgcagcgcggcagagacaggagggaccgggcagaagaacgggggacgaaagccagccgaaggagcaag

SEQ ID NO: 62826 - RNA, 79 nt, Homo sapiens
ggacaagccccaggccgaggagcccacagaagaagaaccccaccgagggccaaacagcagagggggaagcaggagcccc

SEQ ID NO: 62827 - RNA, 76 nt, Homo sapiens
agcgaacacggcgagacgcacaccgagccaaagccaaacggccgacaccaagaacgaaggaagaagagagggcgaa

SEQ ID NO: 62828 - RNA, 116 nt, Homo sapiens
acagggaagggcgcagcagaaagcaaaccagcaggcaccaaggaaagcagaagacaaggagagagaaagagcgcagaaggcaccaccacaggcaacacaaggaggcacagaagccc

SEQ ID NO: 62829 - RNA, 78 nt, Homo sapiens
cacacagggccgcaaccgccggggacccagggagccccggaacagagacagagacacggcacaccgcaggaggaaccc

SEQ ID NO: 62830 - RNA, 85 nt, Homo sapiens
ggaaagaccaacaacgcgcaggcacaagcggaccggcgaacacaagggaagacaaaacaaagcagggcacaggaaagcagaccgg

SEQ ID NO: 62831 - RNA, 77 nt, Homo sapiens
ccgggcacggcgcgcgggaggccagaaccgcccaaacgagcagaagcgggaagaaacaggagaccccagcaaaacaa

SEQ ID NO: 62832 - RNA, 82 nt, Homo sapiens
cgccgcgagccgcgcggagccgcgcagccccggagcacgggaggccaacagacccaacccagaaggcaccaaacggaggggg

SEQ ID NO: 62833 - RNA, 87 nt, Homo sapiens
gccgggacccggccccggcccacaggggggggcaaacccgagagaacgggagacacacaaggagaggagaacaaagagcagacagcc

SEQ ID NO: 62834 - RNA, 77 nt, Homo sapiens
cagaggaagccgaggccccagcaacgcggaagccgcagaacggacaaagccggaggcagaagcaggaaaccagaggg

SEQ ID NO: 62835 - RNA, 97 nt, Homo sapiens
cccaacagggagcagggacaaaggaaacacagggccgacggggaaacagcaggaccaggcgagggaagcaaaagcagcaagccacagaaaagcagag

SEQ ID NO: 62836 - RNA, 73 nt, Homo sapiens
ggcagggacacacagcaggagaaacccgcaagcaccaccacgagaaacaggacaagacccccgagaccacggg

SEQ ID NO: 62837 - RNA, 61 nt, Homo sapiens
cagcccaccggaggaggagcccccgccccaaggccccgagggccagacggcccccaccgag

SEQ ID NO: 62838 - RNA, 75 nt, Homo sapiens
ccggagcccaacagaccaggggacaacgccacagggaaagccggccagccaaaagaagcaagggaaagaccagga

SEQ ID NO: 62839 - RNA, 76 nt, Homo sapiens
ccaacccaaccacgacggggccgacgagacccagggccgcgagggcccggaacaggggcacgcacgaggcggaacc

SEQ ID NO: 62840 - RNA, 68 nt, Homo sapiens
ccgcggcccggcagggggaacgggaggggggagcaaccaccagacggcaggaagcaaaagccagacca

SEQ ID NO: 62841 - RNA, 81 nt, Homo sapiens
cgcccaagccgcacagccgcggcggcagcagcaggagagaggcgagggcgccggcaccagggcgcaaccggaaagggaagg

SEQ ID NO: 62842 - RNA, 83 nt, Homo sapiens
gggagagaagcacaccccaacccgaccccacgcccgggaacccccgcaacagggcacgagcagcaggccccagagagacagaa

SEQ ID NO: 62843 - RNA, 79 nt, Homo sapiens
gccaggaggaaccgcgcaaaccacccaggaaggaccgagaccccacaagacgcaccaacgcaagggcaagaaaaggccc

SEQ ID NO: 62844 - RNA, 56 nt, Homo sapiens
agcagcagcggaggacagaaacggggcaaggaggggcaggagcacacccccacagg

SEQ ID NO: 62845 - RNA, 78 nt, Homo sapiens
aacaggccaaccaaacaagccccaccgcggaaccgcgcagggccgacaaaaagaccgccagagcggaacgaccccaga

SEQ ID NO: 62846 - RNA, 63 nt, Homo sapiens
caagaggccacacccaggagaagccggccacacgccgcaggaaagagagcagaagacagcagc

SEQ ID NO: 62847 - RNA, 76 nt, Homo sapiens
gaagaacagacgggcacaagagccacccacagcaccccgggcaacccccaagagggagagacaccaggcggcaaag

SEQ ID NO: 62848 - RNA, 42 nt, Homo sapiens
acgcccgcaacccgacacgagaaagccacagaggccccgcag

SEQ ID NO: 62849 - RNA, 74 nt, Homo sapiens
aagaagaagaccacaaaaaagagacccacagccagcaacaccggggggccgcccgcccaaggcaggaagagggg

SEQ ID NO: 62850 - RNA, 67 nt, Homo sapiens
ccgccgccgccggaccacagcaacacaccgacagaacaacggcccagccccacaggacaaagagaaa

SEQ ID NO: 62851 - RNA, 55 nt, Homo sapiens
gccccgggccccaagacccggccggcgccgcggccgcggagggaggcggagcggg

SEQ ID NO: 62852 - RNA, 81 nt, Homo sapiens
gcccgggaacggcccaggccccgcccgcaggcccgggcagaccagaagaccgacaccaaacccggcaagggaaccggcaaa

SEQ ID NO: 62853 - RNA, 69 nt, Homo sapiens
ccgaggcccaaccgggaccgcaaccacaaaggaagcagaaggagcagcagaaagaaccaaacaaaaaca

SEQ ID NO: 62854 - RNA, 67 nt, Homo sapiens
aaaacgaccgcaagaccagggggaacacaagcccaaacccagaacgcccccgaacggagaagagcga

SEQ ID NO: 62855 - RNA, 80 nt, Homo sapiens
ggggccaggggcgggggcccacacgccaggagcccgacccccggaccaagacgacccacggcacaagcaagcacacgggg

SEQ ID NO: 62856 - RNA, 81 nt, Homo sapiens
cagccgggagccggagcgggcgcggacgccgaggcaccgaggcaccagaggagacagaagcgaaggggacagggggagaac

SEQ ID NO: 62857 - RNA, 41 nt, Homo sapiens
agcacaccaccccagccagcaccaggacacacgaccgaaag

SEQ ID NO: 62858 - RNA, 79 nt, Homo sapiens
ccccagaaggaacggagacaaaaacggcccggagaggaggggcccggaagggaccaacgcaaggaggcaccacccacca

SEQ ID NO: 62859 - RNA, 83 nt, Homo sapiens
ggagggaggggggggggcagccccccgcccggccagccgccccgccgggagagccgccggccgacgagacacgccggaggaaa

SEQ ID NO: 62860 - RNA, 63 nt, Homo sapiens
gccagacagacaggacaggcaacaccaaggaggcaccagacaagcccgagaaaagacgccgcg

SEQ ID NO: 62861 - RNA, 76 nt, Homo sapiens
ccgacccaaagggaaaacagaaacagggcgacccagcaacgcggccggccaggggcaagcgagcacggagggagcc

SEQ ID NO: 62862 - RNA, 55 nt, Homo sapiens
acgagggaggcgccagcccggggggaggggcacgacaggcagaaggacgcaacaa

SEQ ID NO: 62863 - RNA, 82 nt, Homo sapiens
gggacccgcccgcccgcgggagcacacagaagaagcagagaagggagagagaccggccaaagagaagggcagaacgggagac

SEQ ID NO: 62864 - RNA, 61 nt, Homo sapiens
cccagacgcggggagccgccggagcgagaagcccccaaaacacaagaggacggagaagcga

SEQ ID NO: 62865 - RNA, 73 nt, Homo sapiens
aggaacaaagcaaaaaagagcgacacgacacacggccgaaacacgaccccccgagagcacccgcgcaaaagaa

SEQ ID NO: 62866 - RNA, 40 nt, Homo sapiens
cgaccaaagccgacggggcaagaaaaccgagacacccccg

SEQ ID NO: 62867 - RNA, 80 nt, Homo sapiens
ggacgacgccaagaaaggagagaagagaaagccggaggagaaaacaaagagggaaaacggagaaaagcccccccaggcca

SEQ ID NO: 62868 - RNA, 69 nt, Homo sapiens
gagccgaaccaggccaacccagaaaggcccgagacaccccgcaacccagccgggaaagacaaggagccg

SEQ ID NO: 62869 - RNA, 87 nt, Homo sapiens
agcagggacgaaacggggggagagaacaagaaaagaagaagaagagaagaaagagaaaccgagccccgaggaagaaacaagcgagag

SEQ ID NO: 62870 - RNA, 75 nt, Homo sapiens
aaagaaacaaaaacgggaaagccggcaagagggagaaggacaccaggcagaggcaaggcgaagagacgacgcggg

SEQ ID NO: 62871 - RNA, 59 nt, Homo sapiens
acaccaccaaaaacagaccaagacacccaggagaaagacagcggggaaaagaaaaagga

SEQ ID NO: 62872 - RNA, 74 nt, Homo sapiens
gaaccgaccgccaagcagagggaagaggagcgaaaccggccacggaaaacgaagcccgaacgggaggcagccag

SEQ ID NO: 62873 - RNA, 73 nt, Homo sapiens
ccggaaccacgacaacacagcaaggcaggcaaagccaccaaacacggggacaccagagggaaaagcaaccagc

SEQ ID NO: 62874 - RNA, 80 nt, Homo sapiens
ggcagggcggaccagaagcgagggaggggcagagcaaacacgaagcgggccaccaaggagagagccagagaaaggacgag

SEQ ID NO: 62875 - RNA, 74 nt, Homo sapiens
gggagcagggcgcacgaaaaaagcccgggcaaggggacgcgcagcgagaggaagagggacccaaacaagacaag

SEQ ID NO: 62876 - RNA, 80 nt, Homo sapiens
gaacggccccacagccgggcggggggaaaggagaacggaagaggacaagagacgacacgcaagcaggcaaccgaaacagg

SEQ ID NO: 62877 - RNA, 75 nt, Homo sapiens
cagcccccgagagcgagaacaggagggaagaacaagagacagagaaaacaaaaccaccaccccccccaaggcaca

SEQ ID NO: 62878 - RNA, 77 nt, Homo sapiens
acccggcggggaaaagggaaggaaaagagacgcaggccacgagggcacagaacgagcggccacgcccgaaccagcag

SEQ ID NO: 62879 - RNA, 74 nt, Homo sapiens
gccagggagaacagggccagccccaagaaaggaccgcgaccggcggcgcgggcacggccgacacgagaagccaa

SEQ ID NO: 62880 - RNA, 66 nt, Homo sapiens
cacaaggcagccagcagcagcaggacaccgggaagacaggaaccaaaacagggacgaagcggcacc

SEQ ID NO: 62881 - RNA, 74 nt, Homo sapiens
ggcagacaagaaagccaaacgaggagaggaaccgcagcccccggggaccagaacacaggaaaagaagaaagaga

SEQ ID NO: 62882 - RNA, 77 nt, Homo sapiens
cggccccgaggccggcaacggagacccaagcggagaccacggcaaccagaaaccaaaacggagagaaggagggcccc

SEQ ID NO: 62883 - RNA, 72 nt, Homo sapiens
gcagagagagcagcagcgagcgaaagcaaggaagcgaccccacggaagaaccaaacagcgcacaccaggaca

SEQ ID NO: 62884 - RNA, 86 nt, Homo sapiens
agaagccgaaaccgccaaagccaggacaagaacccaagaaacaggaaaaaacccaaaacaccaaaaggaccagcgagaagacaaaa

SEQ ID NO: 62885 - RNA, 71 nt, Homo sapiens
ggccaccaccaaggaagcaaaggaaccaagccaggggaaagagggagagaccgcgacccccaggcggagga

SEQ ID NO: 62886 - RNA, 65 nt, Homo sapiens
cgcagccaagggacacaccaccgaacacaagaggacagcgaagccccgccgagcggaagaagggg

SEQ ID NO: 62887 - RNA, 83 nt, Homo sapiens
caagacaccacggacgagagacaaacgccgaagaccgaagccaggacagcacagccgagcacccagaccagccaacgcaggac

SEQ ID NO: 62888 - RNA, 53 nt, Homo sapiens
cagagcggagaagccccagaccagagacagcagggaggaaacaacaaggacca

SEQ ID NO: 62889 - RNA, 77 nt, Homo sapiens
aagagcgacagaaaggagagagaaggcagaggggcgggcaaaggagaggcacaggaagcagaggcaagaaacgaagg

SEQ ID NO: 62890 - RNA, 113 nt, Homo sapiens
ggccacaggaaagcaggcacgacaggaaaacgcagagaggaacaaacagaggcccaaggaacgggggcacaccaggacagagcaaacagaaggggacccagaagccagcccaa

SEQ ID NO: 62891 - RNA, 87 nt, Homo sapiens
accaccacagaaggaagaagagaaaggacagggacaggaaagaaagaaaaagaaaagaaaaacagaaagggcaaagacaaggaaaag

SEQ ID NO: 62892 - RNA, 74 nt, Homo sapiens
aacacaaaacagaggcaagagagacaacaaggaagggcggagaacggaaaagcaccaggaagcagagaggaccg

SEQ ID NO: 62893 - RNA, 76 nt, Homo sapiens
cacccaaggccgcagacaaggcacagcaagcaacccggccgaggggggcaccccgggaggaagcaacgggccaccg

SEQ ID NO: 62894 - RNA, 80 nt, Homo sapiens
ccgcgacagcgaacagcgcggccgcagccacaagggcgcagaagccggcagagcccaagagacaacaagccgaaaagaga

SEQ ID NO: 62895 - RNA, 75 nt, Homo sapiens
gcgagacaaggaccgagacggagaaggagcggacaggcagaacagaggccaaaagaagaagaccacagggaaccg

SEQ ID NO: 62896 - RNA, 75 nt, Homo sapiens
caggccgcccgacccaaagggaaaacagaaacagggcggagaacggaaaagcaccaggaagcagagaggaccgca

SEQ ID NO: 62897 - RNA, 75 nt, Homo sapiens
gaccgagagcgcgaaacgcacgagaaggcgcgcccccacccggggccgagaaccacaccgcgggagaaggccacg

SEQ ID NO: 62898 - RNA, 78 nt, Homo sapiens
gggcacggccccggccgccccaacgggggcacgaagggggacacaggcgagagaagaacgaggaaagcacagcgacaa

SEQ ID NO: 62899 - RNA, 66 nt, Homo sapiens
cgagggccgacagccggacacgcccaacaggcgaagcaaagagcccgggaagggcgcggagcaggc

SEQ ID NO: 62900 - RNA, 50 nt, Homo sapiens
cgcccagcgcgaagggaccagaccgggaaacacagagcggcggcggaagg

SEQ ID NO: 62901 - RNA, 50 nt, Homo sapiens
aacggaaaccccgagaccagaaggcaacagaccccaagggcgaaagagcc

SEQ ID NO: 62902 - RNA, 82 nt, Homo sapiens
gaggcccagcagcggacgagggagggccgccgcgcccaggagggcgggaagaagcgagagccaacccagggccggaaggagg

SEQ ID NO: 62903 - RNA, 56 nt, Homo sapiens
gggcaggaaggcagcgcacgacagcaaaaggaacgaagcagagcccaacaggggag

SEQ ID NO: 62904 - RNA, 60 nt, Homo sapiens
ggcagcgaagcagccggcacccaagcacaggcacgacagaaaaacacaacagcaacggca

SEQ ID NO: 62905 - RNA, 73 nt, Homo sapiens
ggcgcgggagaaaaccaggcgcagaacagccgggcacacagaaaaagcccaaagaggggagaaaggaaaagga

SEQ ID NO: 62906 - RNA, 41 nt, Homo sapiens
gacaccacaagaagggcgccagacaacccagaaaagaaaag

SEQ ID NO: 62907 - RNA, 67 nt, Homo sapiens
acgaaccggaacccgcgggagccagcgaaacggagaaagagcgagggcagcagccccacgggcaacc

SEQ ID NO: 62908 - RNA, 72 nt, Homo sapiens
gcccgggaacaagaaacccagagggcagccaaagcgcaaagcacagaaaaggaagaggcacgaacaaagacg

SEQ ID NO: 62909 - RNA, 81 nt, Homo sapiens
aagcgccggcccgcccgcagcggcagggaaacaacagggacaacgaggcagacccgggacacaaagaaaaagcgggccgcc

SEQ ID NO: 62910 - RNA, 81 nt, Homo sapiens
ggccccagcagcccccgaaggcccacaggacaggagagaaagacggaaggaagggaacacggacgacgagacacgaccaac

SEQ ID NO: 62911 - RNA, 62 nt, Homo sapiens
cggcggcggggccgcagcccaaggaagcgggaggaagagcagagcagaagagaagaggagga

SEQ ID NO: 62912 - RNA, 72 nt, Homo sapiens
ccaccccagagaagaaaaaggcaaaaacccggagagcaaacaacacgacggaagaagaagcgcacaaggagc

SEQ ID NO: 62913 - RNA, 81 nt, Homo sapiens
aagaaacccaggacgagaacagcaacaggcgagcaacacaacagcagagccacaggcaaccaaaaagcccaaaacaggacc

SEQ ID NO: 62914 - RNA, 81 nt, Homo sapiens
aaggaaaggcgaccgagaacaagaaaacccagacaaagaaccaaacccagccacggcagggccggcacgcggacacagcca

SEQ ID NO: 62915 - RNA, 75 nt, Homo sapiens
gggaacgggccgccagacaccaacgccaagagccaagaccggacgagccgccaacaagaacaggccgcgagcaag

SEQ ID NO: 62916 - RNA, 37 nt, Homo sapiens
aaaccgcccgagggaccagaggcgaaaggagaacccc

SEQ ID NO: 62917 - RNA, 68 nt, Homo sapiens
gggcgaaggggccacgcgagcaacacaggcaccagccaaaccaaccaccacaaagaaccaaaaaccag

SEQ ID NO: 62918 - RNA, 72 nt, Homo sapiens
gcgggccccccggcaacgcggcaagccaaagcgccacagaaacgaaggccagaagaggagaaaagaaaagaa

SEQ ID NO: 62919 - RNA, 71 nt, Homo sapiens
caaagaagaggcgggcggagggcacaccagagggggaaagacaaggagccgggccgagaaaccgaaccaga

SEQ ID NO: 62920 - RNA, 75 nt, Homo sapiens
ccaggccaccggaaacccgggggcagcgggccgaccaacccgaaaacagcaggacccaaagacaggaccacgcac

SEQ ID NO: 62921 - RNA, 77 nt, Homo sapiens
gcagggccccggcaaggacccgcccagcagcagggggcgcccaacccccgaccggaacagggaccaagcggggggaa

SEQ ID NO: 62922 - RNA, 114 nt, Homo sapiens
ggaccgcagagccgggagaaccggaggaggaggccacacagaaggacggcccgacggaagggcggcgacggcggcgcgaggaccgaccgggcccgcggacgaagaaggcacccc

SEQ ID NO: 62923 - RNA, 72 nt, Homo sapiens
ccacccaccgagccaagcacaacgaagagaagcgcccaacgacggagaaagcaaaaacgcaaaggcagagcc

SEQ ID NO: 62924 - RNA, 85 nt, Homo sapiens
agcggcgcaggcccgcccaagcgcacgcgggacggccgggcggggccggggggaaggggaggcgccaggcaagcggcaaccgaca

SEQ ID NO: 62925 - RNA, 80 nt, Homo sapiens
accgccagcaagccagacagagcgaggacacgcaaggaacagaggggaacagaaaaggcaggaaaaggaagagcaaaaac

SEQ ID NO: 62926 - RNA, 75 nt, Homo sapiens
gaagagaacaccggagaaggacacacaccggaaagagggagccaccaggacccgagccccaaagacagaaaagcc

SEQ ID NO: 62927 - RNA, 81 nt, Homo sapiens
gggacagaaggagacggaacgcacagaggaacgagcgagcggcagagcggaaagcacgaagggagcccagcgacacaccag

SEQ ID NO: 62928 - RNA, 102 nt, Homo sapiens
aaaaccgaagggaaagcgaacaaggcagccaaaagacaacaggaggcacaaagacagaaaggccaaagaaaccaccacgcagacagaccgggaaggaagcac

SEQ ID NO: 62929 - RNA, 56 nt, Homo sapiens
gaagaacccggcccagagccaaaggagccccacaaaaggaccacgagaggagaaga

SEQ ID NO: 62930 - RNA, 82 nt, Homo sapiens
gccgacaccaccgcgcgcacaccggaccccggcgccggcccccaaggggcacaacaggggcggagacagaacagacagaaaa

SEQ ID NO: 62931 - RNA, 85 nt, Homo sapiens
gggaaaggcggagacggccccaccggcaccgagaaagacaaacaccacgccacccaagagagagcaaaaaccgagaaccagaggc

SEQ ID NO: 62932 - RNA, 82 nt, Homo sapiens
aggagagaccaccgggccccagagacgcgaggagccaggccacgacgaaccacagccaccacgggcaagccgggaggaaacc

SEQ ID NO: 62933 - RNA, 82 nt, Homo sapiens
gacaaccccaaaaaaggcaaaggaagccccagagacaacccagaccagaccagggagagaagaagagccagcagaggaggac

SEQ ID NO: 62934 - RNA, 66 nt, Homo sapiens
acccggggacaggacacaccaggaccggaaaacaccgggaaaggcccaaaccggcgaaaacccccg

SEQ ID NO: 62935 - RNA, 109 nt, Homo sapiens
acgacggccccaacggaccaggcgcccagaggcggagagagcagggggcgcggcgaagggggcacggaccacaacaggaaacacgcaacggcgcgggagggcggggccg

SEQ ID NO: 62936 - RNA, 71 nt, Homo sapiens
agaggagacaacgagaaagccacagggccaccagaggaccaagccagacgacgagaacaagacggaaagac

SEQ ID NO: 62937 - RNA, 81 nt, Homo sapiens
aaggcaacagaaagagcaacagcagggcaacaggccagacgagcaggcacgcaggagcccgacccacagcagcgagccacc

SEQ ID NO: 62938 - RNA, 68 nt, Homo sapiens
ccaccaggaaacgcgcaagacgcccaagagaagaggcgagcggaccggaacaagggaggggggagcag

SEQ ID NO: 62939 - RNA, 53 nt, Homo sapiens
ccacaaacccgagagcaaccagacagaccagcgaagaaagccagaacagcaaa

SEQ ID NO: 62940 - RNA, 81 nt, Homo sapiens
acaggaaggacagaaccggaccacaggccacccagaccacccggagaaaaaccagggagcagcaggagagaagaggggacg

SEQ ID NO: 62941 - RNA, 74 nt, Homo sapiens
cccacgggggaccggacacaagcccccagagggcccgcaccagaaaacaccaacagcacgagcagcggagaaga

SEQ ID NO: 62942 - RNA, 78 nt, Homo sapiens
cgcggaaggcagcgcccagcagcgcagcgcaaggcggcggccgcggcggagcagcaacagcaccgcccgggaaaccgc

SEQ ID NO: 62943 - RNA, 74 nt, Homo sapiens
ggaacccaggaaagccaccaggggagcagagcccgaaagaacagcaaggagaagaaacagaaagcaggagagga

SEQ ID NO: 62944 - RNA, 50 nt, Homo sapiens
aacggagaaaagaagacgacacaggcagaagaagaacagaaggaggcaga

SEQ ID NO: 62945 - RNA, 70 nt, Homo sapiens
ccccccggagccaccggaaaacgacagaagaccgccaccggcggacgaccccagggacagggcggcgaag

SEQ ID NO: 62946 - RNA, 76 nt, Homo sapiens
accgggagagacaaaggggcaagaccaggccggccacaaggaaaaacacacgcaggcaaaagaagcgaggaacagg

SEQ ID NO: 62947 - RNA, 68 nt, Homo sapiens
cgccggcgcgcccgagcccgcggggcagcaccgccgacaagggaggcgaggacggacaaaaggaaacg

SEQ ID NO: 62948 - RNA, 80 nt, Homo sapiens
gcggccgccgagaaggaccgcgcgcgggagcgaggcccgcggagcgccgccgcgcggacggaaggcgaccacaccacccc

SEQ ID NO: 62949 - RNA, 74 nt, Homo sapiens
caggcggccacaacccagccaaagagggggagccacagccggcaggagagcgcgcgccgcgcgcccgcacaaac

SEQ ID NO: 62950 - RNA, 81 nt, Homo sapiens
gcgggagggcacaaaccgcggagacagcgcccagacggagaagccaccccggcacacaccagggcggaggcagggcgcgac

SEQ ID NO: 62951 - RNA, 90 nt, Homo sapiens
aaaggcacgaagagagaaagaaggcggagcagccccaacggacccaggcaaaaggagggcaccccgccaggacccaggcaagccccggca

SEQ ID NO: 62952 - RNA, 81 nt, Homo sapiens
cgagccggagaagcaggggggccaggaggggagaggaggcaggcccgcgaaaaccagaaggcaccgacaggaaaggaaaag

SEQ ID NO: 62953 - RNA, 80 nt, Homo sapiens
cccagcgggccgccaagcccgcaagaacagccacaggaagagggaacaaagaaggaaacaggagaagcgggagaagaagc

SEQ ID NO: 62954 - RNA, 75 nt, Homo sapiens
gcccaggagaacacccggggaagggagagaccacaaggacgcgcgcacgaggaggccagcagagccagagcgcgg

SEQ ID NO: 62955 - RNA, 66 nt, Homo sapiens
cggcacggcgacacgcgccccagcagacgcccccgccaccccacaccggagggaagggggccagac

SEQ ID NO: 62956 - RNA, 69 nt, Homo sapiens
aaacccgacccaaccagccaaggacccacggggcagggaccccggcccaagagaacacccagaaggaaa

SEQ ID NO: 62957 - RNA, 117 nt, Homo sapiens
gcgaccgcggggacgaggggacacaagacggcgaggagaagacacaaggggcccgcgagcaccgagccgggcccagacccggccggccgcgcgccgggagagagcacaggcagcacc

SEQ ID NO: 62958 - RNA, 78 nt, Homo sapiens
cacggccgcggcgccgacggaagccggggaacccgagcgcagaggggaagcagaggacccaggcgaacagcaaggagg

SEQ ID NO: 62959 - RNA, 88 nt, Homo sapiens
cgcaggcaggccacgccacgggggagccacccggcgggaacccaaaacccgaaagaggaaggagagccacgccaagaaagagggccga

SEQ ID NO: 62960 - RNA, 59 nt, Homo sapiens
ggggcggggacggcgccgagaggggagaaccgccagcgacgggaaggcaggacccacgc

SEQ ID NO: 62961 - RNA, 58 nt, Homo sapiens
cgacgaccgcgcccagaagcgaagggagagcgccagagaagggaaacgaaaagagaca

SEQ ID NO: 62962 - RNA, 54 nt, Homo sapiens
gaccaagaaccagcggcagaaccaagaaagaccaacagcaacagcaagggacga

SEQ ID NO: 62963 - RNA, 70 nt, Homo sapiens
ggaagaaccgcagccgagcggggccggccacaggaagaacgaagcgcgcagaaaacacagaaggcaaaag

SEQ ID NO: 62964 - RNA, 65 nt, Homo sapiens
gccgggcaccagccagcaaaccagagagcgcaacagaaccgcggacgcccccacccaccccagca

SEQ ID NO: 62965 - RNA, 79 nt, Homo sapiens
cccacgacaggacggacccggagaaagacgaccgccaaccagggagaacacagagaaaaaccgcaagaaaccaggcggg

SEQ ID NO: 62966 - RNA, 88 nt, Homo sapiens
accgcgcccacggccgggccacccacaggccgcaaagacaggaagggaaggggcggagacgggcggaacgcaggaggccagaggacag

SEQ ID NO: 62967 - RNA, 78 nt, Homo sapiens
gcagccggcgggagaaagcgagggagaagcggagaaccagacccggagcagaccagaaaaccgaggagacgcggaggc

SEQ ID NO: 62968 - RNA, 99 nt, Homo sapiens
acaaaggcccacacaggacagcgccggccacccaaagcacgggggcaacagagaacagcagcacaggcaggggccagaaagccccacagaagcccacag

SEQ ID NO: 62969 - RNA, 77 nt, Homo sapiens
ccgagagccgcccgggccagcggccgcgcacccccggccggaggcaccagcccaggcgccaggacgccaggacccag

SEQ ID NO: 62970 - RNA, 78 nt, Homo sapiens
caccaacaacgaacacacaaaaaggcgaccaccaagaaaagggaaaaagaccaacccgggaggagagaaaacacagca

SEQ ID NO: 62971 - RNA, 82 nt, Homo sapiens
gcggcgaggggacaaacaggggccagaaggcggcgagaccccccgaagcagcagcgaaggaccgcaggcggaggcgcagaag

SEQ ID NO: 62972 - RNA, 75 nt, Homo sapiens
gaccagagccgcacgaagaaacacccccgggaacaggaggaccggagcacggacggcgcaaccagcgggcgccaa

SEQ ID NO: 62973 - RNA, 69 nt, Homo sapiens
ccgagaaggcagaggcggcgaaccgagaggaagggcagcgcaaggcggagaacagcgggacgacccggg

SEQ ID NO: 62974 - RNA, 55 nt, Homo sapiens
aagggcggaccaaccacggcaaaccaacaaggccaggcagcgaacaaagcacaaa

SEQ ID NO: 62975 - RNA, 58 nt, Homo sapiens
aagcaccccaacaaccaggagaaaaggggaggagagcacagaaaaaccaggacagacg

SEQ ID NO: 62976 - RNA, 80 nt, Homo sapiens
gagaaagaagagaggaccagagacacgacaaaagacagcaggcggacaccgaccgcaggaaggaggaggaggagggagcc

SEQ ID NO: 62977 - RNA, 77 nt, Homo sapiens
agaggcgcggagcgggcagccgccgccaccccgcggccgcacccccgccccagagcccaacagagaggaaacgaggc

SEQ ID NO: 62978 - RNA, 78 nt, Homo sapiens
aagaggaaccacaagaaaacaaaagaaacgcccacagaacaccgagggggagcgggaagacccggacaacggaccgga

SEQ ID NO: 62979 - RNA, 83 nt, Homo sapiens
ggaggcgggcgcggggagcccggcagagggaacggccagcgggagcccccgaccccaggagggcaagaccaagccacagcgac

SEQ ID NO: 62980 - RNA, 87 nt, Homo sapiens
ccggcacaagcagacggcaaaggcaagagaacagcagcgccgcccgccgacagccaggcccgggagaaaacgccaaaagacgaacac

SEQ ID NO: 62981 - RNA, 60 nt, Homo sapiens
aggggagcacggaagacgggcaggcaggggagcaaaaagcagaagaaggaaaaaaacgag

SEQ ID NO: 62982 - RNA, 67 nt, Homo sapiens
gaagaggaggacacgacccagggcgcggggaaggcagagggaaccaaaaaaaacagacaagaaggaa

SEQ ID NO: 62983 - RNA, 75 nt, Homo sapiens
acccgaggagccgcccccggcaaagagagggggacaagggaggggcggccacggcaaagccaggcaagcgcaaag

SEQ ID NO: 62984 - RNA, 76 nt, Homo sapiens
cccagcccaggcggcgcggacggggcggagacacagaagagcgcgaacacaaggggaaggaaaacaacagagaaag

SEQ ID NO: 62985 - RNA, 81 nt, Homo sapiens
gcccggagcccccagcgcagcggccgcggggccggaggacgcggggaaccagaccgggccagaccccacgggacagacccc

SEQ ID NO: 62986 - RNA, 76 nt, Homo sapiens
gcgacccgggagacacgacgagacacgagaccagaagccaagaaacgaggagagccaccaccaaggagacacccgg

SEQ ID NO: 62987 - RNA, 65 nt, Homo sapiens
gggcggggcggcagcgaggaacaggagagcggccgcagacaaggaacaacgagagcgccccaagg

SEQ ID NO: 62988 - RNA, 53 nt, Homo sapiens
agggcgcccccgccacagaaagcccgccccagacagggccccggcccgcccgg

SEQ ID NO: 62989 - RNA, 75 nt, Homo sapiens
ggcaagaacgggaccgaggacagaagggcaagaggaagacagaacgaccgcgagaccacaaacagagacagcgca

SEQ ID NO: 62990 - RNA, 70 nt, Homo sapiens
gagaccaacacagagcagcggaaccagacaggcaggaaaagacagaccccgcacgagagcggagagccac

SEQ ID NO: 62991 - RNA, 75 nt, Homo sapiens
aagaagaaaaagaaggcccgagcaaagaagagcccgaacaaacaaacacccagaaacaagagagcaccgaaccca

SEQ ID NO: 62992 - RNA, 35 nt, Homo sapiens
ccgaggcggaaaggggaaacgggcgggccaccacc

SEQ ID NO: 62993 - RNA, 70 nt, Homo sapiens
aagcggggccacgacccagcggacggaaccagcagggaaggagacagcgcacgaaacacacaaagaacca

SEQ ID NO: 62994 - RNA, 74 nt, Homo sapiens
ccagccagaagacccaacagagggagccacaacgaccgagcggacaggagacagccagcgcacgaggacaggag

SEQ ID NO: 62995 - RNA, 77 nt, Homo sapiens
ccagcagagcgggccacaccccacaacacccaaagaacccaagacacagcaaaaaaggaacaaaaagagacaaagaa

SEQ ID NO: 62996 - RNA, 54 nt, Homo sapiens
gcaggagcaggggagcagaaacagacaacaaacccagaccgaccacaggaccac

SEQ ID NO: 62997 - RNA, 74 nt, Homo sapiens
ccacggagcaagggaaagagccgcaggcaagggacgaccaggaggagggcccagaaagggagagaacggaggga

SEQ ID NO: 62998 - RNA, 68 nt, Homo sapiens
aacccccacggacgccagcgcccgcgcacagaggaaaagggaaacagcccaggccagacaaccgggag

SEQ ID NO: 62999 - RNA, 76 nt, Homo sapiens
gagcacggagaggaaacgaggccggagaggaaagagacccgcagagccacagggcagaaagagggggaggcccaag

SEQ ID NO: 63000 - RNA, 83 nt, Homo sapiens
cggcgacagcagccaggagcagagcgacagcggcgagcagaacacggcgagcgggagcagggacggggggaaaagcgcacccg

SEQ ID NO: 63001 - RNA, 76 nt, Homo sapiens
cggaacaggacgccccgagcagcaggaaggagggccacacaccaaagagacggcagccccacagccgcccaggccg

SEQ ID NO: 63002 - RNA, 59 nt, Homo sapiens
cacccagaggagaaaagcccaaagcgagccaaagggccggagcccccacaaaaaaccag

SEQ ID NO: 63003 - RNA, 66 nt, Homo sapiens
ggccacccaccaggacaccaccccagaggcgcgccagaggacaccagacccaaggcgcaagaaaag

SEQ ID NO: 63004 - RNA, 78 nt, Homo sapiens
gaagcagggccggacagcgagcggcggcgacgccagaaggccaagggaggaaaaagcggcacagaggaagaggcccac

SEQ ID NO: 63005 - RNA, 78 nt, Homo sapiens
aaggcaccggagacagaggcggaaccaaaagcagggaaaccgagacacccgaccgcacagccgcaggggaacgaggaa

SEQ ID NO: 63006 - RNA, 52 nt, Homo sapiens
cgggcggcccgcaggaccggaccgggggagaacaaggaaacacgcagaagga

SEQ ID NO: 63007 - RNA, 88 nt, Homo sapiens
acacaggggaacaccaaggggcaacgggccagagagggaaggaaacaagccagagagggcagaaggcaggaccaagcagggggcacag

SEQ ID NO: 63008 - RNA, 59 nt, Homo sapiens
gccccagccgcggccagggccaggagggggaaccagccaaaccaacgccgacgcccaag

SEQ ID NO: 63009 - RNA, 71 nt, Homo sapiens
agaaagacccccacccaacaccaggacacgcaggggagaaccggaggaagcagagcaaggcaaggccaggg

SEQ ID NO: 63010 - RNA, 111 nt, Homo sapiens
ggagaggcgcagggacggcacgggaccacccgcaaggacccggaaggccggggggccgagaaagaaacccgaagacaacacacagagacacccgccaaaacgagaggagac

SEQ ID NO: 63011 - RNA, 77 nt, Homo sapiens
gaaaacccccgggaccaggacagagcgggagccaccagcgccaaagggaagccaggagcccgggggcacggggagaa

SEQ ID NO: 63012 - RNA, 78 nt, Homo sapiens
ccgaggacccggggccgaggagcgggaagaggcgggggaggccaacagacccaacccagaaggcaccaaacggagggg

SEQ ID NO: 63013 - RNA, 72 nt, Homo sapiens
ccggagcaccgaaacgccgaaaacgagccggggaagaagcgaggacacaggcgcacccagggagacggggcc

SEQ ID NO: 63014 - RNA, 71 nt, Homo sapiens
ggagcggacacgaaacgggcggcaggagaccgaagcccagacacccccacgaccccaaaaggaacccaggc

SEQ ID NO: 63015 - RNA, 76 nt, Homo sapiens
caaaaacagcaacgacaacagcaaacccgggaaggcgagacaagagaaggacaaacagccagaaaagcaaccgagg

SEQ ID NO: 63016 - RNA, 73 nt, Homo sapiens
gcaagggacacagagaccaacacggggccagcaaacaaagccaggacagggcccaaaaaggcaacaaacggag

SEQ ID NO: 63017 - RNA, 85 nt, Homo sapiens
gacaagagggcagaagaagaacgcgggcacgagcagccgggggaagcagcggcagaaccacagcacagaagaccagcaggccgca

SEQ ID NO: 63018 - RNA, 53 nt, Homo sapiens
ggcaggagcaacgaggcccggggggcaaaagaccgcaggcgccacaagagaaa

SEQ ID NO: 63019 - RNA, 74 nt, Homo sapiens
gccggcgagagcccccccgcgagcgccagaccagcgaagcgacaagaaccacggacagacggaacagagaaacc

SEQ ID NO: 63020 - RNA, 79 nt, Homo sapiens
agacacggagaggagcggggagacagccgccaggaagcaacgcagcgcggaaaggcacaaccaaggacacgcagcaaac

SEQ ID NO: 63021 - RNA, 77 nt, Homo sapiens
aaaaagaaacgacagagacccagaaaagggcaccaacacagccccaacagccaaggacgaggagaagcggcccacga

SEQ ID NO: 63022 - RNA, 76 nt, Homo sapiens
caggggagaaccgaacgggagcgaccagcaggccgacgaccccagcccgggggcggcgaggaggagcgggggagac

SEQ ID NO: 63023 - RNA, 80 nt, Homo sapiens
aaaaagaagaaacaccaagacaaaaacaaaggccgggccgagaacgaacagagcaagcccccaacaccagcaaccccggg

SEQ ID NO: 63024 - RNA, 52 nt, Homo sapiens
gaccccaggccccccacagaaaaggaaaggaaagcgcacccaacaagaagga

SEQ ID NO: 63025 - RNA, 84 nt, Homo sapiens
aaagagcccgcaagaagaacagagacagcagccaaacccccagggggacgacaaggaggaacaaagaaacgagacaaaggaagg

SEQ ID NO: 63026 - RNA, 71 nt, Homo sapiens
gcgcagagaacggcaaacggagcagagaagggacagcacagggcccgcaagggacgcccaagaggacccac

SEQ ID NO: 63027 - RNA, 74 nt, Homo sapiens
ccaagcaaaaaaaaaacagaggaggcggagagaaggagccccaggaggggccgggcagaccggcaagaagcacg

SEQ ID NO: 63028 - RNA, 53 nt, Homo sapiens
aggagccaggggaccaaccggagaaagcccaaaaggcaacaccgggcgcgcac

SEQ ID NO: 63029 - RNA, 85 nt, Homo sapiens
cagccccaaaagcacgcacgaaaccggcaagccagcggaggggaggaccaagaagaacggaacgccaccaagaacaggcaccacc

SEQ ID NO: 63030 - RNA, 64 nt, Homo sapiens
ggcggaccaggagaacaaagcagagggaccggagacagcagcagaagcagaaaaaggcaaacga

SEQ ID NO: 63031 - RNA, 49 nt, Homo sapiens
aaaaccagacagccccaagaagagggggcgaggaagagacaggcggggg

SEQ ID NO: 63032 - RNA, 58 nt, Homo sapiens
agagagccaagcaagccagggaacaaagagcagaggccagcagccaccgacagcccgc

SEQ ID NO: 63033 - RNA, 58 nt, Homo sapiens
gggacgcaagaaacccaggacgagaacagcaacaggaccgccagggcaaggagggcca

SEQ ID NO: 63034 - RNA, 60 nt, Homo sapiens
ggagaccaccgcggcgcggcagcgcgcccgagggggggccccagcccggccgaacgggcg

SEQ ID NO: 63035 - RNA, 83 nt, Homo sapiens
gcacccgggcccgcaagcggcagagaggcgagacacggaacggcgaagaagcgcacgggcccggcgccaccacccgccgacgg

SEQ ID NO: 63036 - RNA, 72 nt, Homo sapiens
gcgcaggccacgaaaaacagaacccccacgaggaagaaaggccccggagagggaggcaccgggcacgcgccg

SEQ ID NO: 63037 - RNA, 97 nt, Homo sapiens
aaaaaaggaaccccggagaggcagcaggcccgaagcagccggcaagaagacccccggaacaaaccgcgggcagacacagcggagcgcaggccaaaca

SEQ ID NO: 63038 - RNA, 74 nt, Homo sapiens
cagaagagccaaccagggaccgaggggaggaaaaaccaaggcgggaaggaagggcacaagccagcggcagcgaa

SEQ ID NO: 63039 - RNA, 79 nt, Homo sapiens
ggcaccggccgagccacggagcaaggggccagagcaaagcaggaagaagggccacagcagacaaaggaaaacgaccagg

SEQ ID NO: 63040 - RNA, 83 nt, Homo sapiens
accgcgccggcagcgccgcgaaggcgggccgggccagcccccgccgcccgggaggaggaggcccggggaccagaagaggaggg

SEQ ID NO: 63041 - RNA, 78 nt, Homo sapiens
aaggcgcagaaaaggaaagaaaggcaaaggcacggagacaaacccacagacgaacaagaaacacggggaaaaaaaaga

SEQ ID NO: 63042 - RNA, 76 nt, Homo sapiens
caagacccacaacaaaagggaaggggcacgaagaccaaccggccaaagaagagaacccagaaagacacacagcgaa

SEQ ID NO: 63043 - RNA, 50 nt, Homo sapiens
cgcagccaagcgccgccgggcgcaaaaaccagacaccccacaccaccacc

SEQ ID NO: 63044 - RNA, 87 nt, Homo sapiens
accaggcagccacaaacccagcaagaacagcagaccaggcagcagccgcagcaggcaggccaagaagcccaggaggacagagacgag

SEQ ID NO: 63045 - RNA, 74 nt, Homo sapiens
aagagaaacgcaaccgcccgagaacacgaaacaaggaagaaagaagcaagaaaaacagaccgggggaaaaagcc

SEQ ID NO: 63046 - RNA, 81 nt, Homo sapiens
cgcacgggagaaccccgcggcccacaacgacgcagccagagcagcaagaggccaaggggacgacggccacgggcccgggaa

SEQ ID NO: 63047 - RNA, 62 nt, Homo sapiens
acaaaaacgccacggcacggacccccaaggcaccgcgcaggcgagacagagggaaagaacca

SEQ ID NO: 63048 - RNA, 77 nt, Homo sapiens
ccaggggcgagagcgggcaccccccaaacgacgcagccacggagagaaagaccacacagggaaacgaccagggagag

SEQ ID NO: 63049 - RNA, 64 nt, Homo sapiens
cccaggacagcagaggaagcccagaccaagaacaggcccacccagagacacccaggaaacccca

SEQ ID NO: 63050 - RNA, 85 nt, Homo sapiens
ggcgagcgcaagaggacaacagccgagggcccccggacccgggagcggacccggggcgggaagcccgaggcggcaacggcggccg

SEQ ID NO: 63051 - RNA, 75 nt, Homo sapiens
ggcgaccaggaaccgggcgagcagcggcgggggcccgaggggaacggaacgaggggcggagaccgcggaacgcga

SEQ ID NO: 63052 - RNA, 74 nt, Homo sapiens
agggaccccgccccagaaaagaacaacagaagccccgcaggacaacgagggaaaagaaggacggcgccagagaa

SEQ ID NO: 63053 - RNA, 61 nt, Homo sapiens
ggcaccaaggggggcaaacaggccaggaaaagccacagccccggagccggcacaccaccgc

SEQ ID NO: 63054 - RNA, 55 nt, Homo sapiens
aagagcccgaggaccacaggcggaaagggggacaggcaagaaagaacacaagaaa

SEQ ID NO: 63055 - RNA, 101 nt, Homo sapiens
ccggccgcccacgagccacagagcagaacagaaacaaacagaggcaccgccccaaggccagcagagcccaagggcgccagccaccacccagacgaccagac

SEQ ID NO: 63056 - RNA, 72 nt, Homo sapiens
aacaagcccccggacaccaagccccagcagcagaaagaaacgagccgacaaaaaaaagggaagaacaaccgg

SEQ ID NO: 63057 - RNA, 56 nt, Homo sapiens
cagacccaagaagacagcgaaccaggagaccagagagcggccagccggagaaagag

SEQ ID NO: 63058 - RNA, 73 nt, Homo sapiens
gcgcccccagcagcaggaggacgacgacaaggcagaaaacacggggaagagacagaaggagaagaggaccaag

SEQ ID NO: 63059 - RNA, 67 nt, Homo sapiens
gaaggaccaagaaccagggggaaaggaccggacgccagccccccgacgagccaacacaagcccggcc

SEQ ID NO: 63060 - RNA, 83 nt, Homo sapiens
ccgggagcccacgcgcagagagcccggagaggacgacagagacggcaagcaggaaacggaggacggggaaaaaggaccacaag

SEQ ID NO: 63061 - RNA, 78 nt, Homo sapiens
gcccgggggaaaacaggcgcgcccggagcagcggaacaggccgacagcccagccaaggcgccggcgaaagcaacgaag

SEQ ID NO: 63062 - RNA, 75 nt, Homo sapiens
caggggcggacgcccaccccgccgagccaaaaaggcaggaccgccccccgagccagcaggagaagacagaggagc

SEQ ID NO: 63063 - RNA, 79 nt, Homo sapiens
gacccgcgcggcccggaaccagggacaacaccgggacacccgcgaggccggaaaagagcgggccgcacgggggaaaggg

SEQ ID NO: 63064 - RNA, 70 nt, Homo sapiens
cgccgccagcagggccgaccagggagcaagagaagaagggcaggacccccggaacggaaggccacaaaaa

SEQ ID NO: 63065 - RNA, 74 nt, Homo sapiens
cgcgcgagccggacccgcccgccacgccagcgcgcacacccacaaggcaaaacagcaaggggaaagaccaggag

SEQ ID NO: 63066 - RNA, 70 nt, Homo sapiens
aaccaaacaggagaaaaagggggaaaagcccaaaggaacccaaacaggccacaaagcaaccgaacccagc

SEQ ID NO: 63067 - RNA, 67 nt, Homo sapiens
agacacgagaccccaacaggaccaagagagcgaacagaaacgggaggaggcacgagaccaggacgag

SEQ ID NO: 63068 - RNA, 77 nt, Homo sapiens
gccgaagaagcacgaaagccccacccgccgcagcaagcagaggccagacccaggaccgggcgagcagagcagcgagg

SEQ ID NO: 63069 - RNA, 73 nt, Homo sapiens
ggccgaaagcaccccgcacccacccccgcgccccagccaacgcggcacacagagcccgcccccccgagacacc

SEQ ID NO: 63070 - RNA, 74 nt, Homo sapiens
cagggaacgggagaccaccgaaagcggagagaggaccagaaccagaccggaaagcaccaggcaaagaaaaaaac

SEQ ID NO: 63071 - RNA, 81 nt, Homo sapiens
agcggaggcgcccggcggagcagaggaaccacacgcgacagagaccgaaggagcagacgaggcacgagcgccagcgcgaga

SEQ ID NO: 63072 - RNA, 73 nt, Homo sapiens
gcggcgggaggagccgccccgaggagcaccacgaagaaacgcccagaggagccagaaacagccaaacaacaga

SEQ ID NO: 63073 - RNA, 84 nt, Homo sapiens
cagagccggagcgcgaaggccgggacccggccccggcccacaggggggggcaaacccgagagaacgggccaaagccgacagaaa

SEQ ID NO: 63074 - RNA, 58 nt, Homo sapiens
acccggggagaccccgacgggaggccgagagagcccacccagcacggaacaccccaac

SEQ ID NO: 63075 - RNA, 80 nt, Homo sapiens
ccagaagcggagcgcaggagaccaagggaggaacggggacacgccagccagcccaacccagggaacaaagagcagaggcc

SEQ ID NO: 63076 - RNA, 74 nt, Homo sapiens
ggcaggggcaggaagaacccacgggcagcacacacgaaagagaagccccggagcgcgaaaggggcggagaacaa

SEQ ID NO: 63077 - RNA, 76 nt, Homo sapiens
ccgcgccgccgaccccccggcgccgcgccggcggcgacgcaaacagcagacggaagaccccacggcaaaaccacac

SEQ ID NO: 63078 - RNA, 78 nt, Homo sapiens
cggggcgcaccccccgcccgcgagccaaggcagcaccccggaacacgggcgagaggaggaaaaaggcaacgaagaaac

SEQ ID NO: 63079 - RNA, 76 nt, Homo sapiens
gaacgcacgagggcagggcggaaggaagggggagcaacagacaagcccgaaaggaacagcagcaggaacgaaaccc

SEQ ID NO: 63080 - RNA, 75 nt, Homo sapiens
ggccggaggagcccccaggccgaaaggaaggcaaagccagccccgcaccacaaaggccccccaagggccgggcgg

SEQ ID NO: 63081 - RNA, 75 nt, Homo sapiens
gaagcagccaaagcaggggcaacccagaacccccaggcaccaagccacaaaacaggccagaccgggcacagacac

SEQ ID NO: 63082 - RNA, 60 nt, Homo sapiens
cggggggcgaagaagagcgccagacccacagggaaaagaagaccccggagcaggcccgaa

SEQ ID NO: 63083 - RNA, 81 nt, Homo sapiens
gcgcaacgcggccccggcacgcaccacggccacccggccggccgaggccagcagggccccaagccacgcgggagcgccaga

SEQ ID NO: 63084 - RNA, 73 nt, Homo sapiens
aaaggaacaaaccaggccccaaggaaaagaccaaccaggcccgacccacagggaaaaacccgaccgaaggaca

SEQ ID NO: 63085 - RNA, 64 nt, Homo sapiens
gcgccccagcgggcggcccgggcacgcgcccgcagcccagaagaacggccgagcgaccaggaga

SEQ ID NO: 63086 - RNA, 53 nt, Homo sapiens
ggcggacagcggggcccgcggaaaacaggaaacaccccccagaggagcgaggc

SEQ ID NO: 63087 - RNA, 71 nt, Homo sapiens
caaaagaaaacgacggaccagaggcccacgaaacgccacgggacagccaacaccagaccgagcccacgcgc

SEQ ID NO: 63088 - RNA, 72 nt, Homo sapiens
agccccccccgaccacacaccagaaccggaggaggaccgcggagggaacaccgaaaccccccaggcaagagg

SEQ ID NO: 63089 - RNA, 72 nt, Homo sapiens
gcaccgcaaggaacaacgcaccccagcaccgcccagacgcagaccacaacgaagagaggaaagaagcggaaa

SEQ ID NO: 63090 - RNA, 80 nt, Homo sapiens
cgggaggcgccacccagcccccccgcgaacgcccaaggaaaccggagaagacacaccacagagcacccagagcgacgccg

SEQ ID NO: 63091 - RNA, 71 nt, Homo sapiens
ccgccacaaacagagaaggcagcccaggcggccccaccacagcgaaaagccagccgcacagagcagagaag

SEQ ID NO: 63092 - RNA, 42 nt, Homo sapiens
cggggagggcgggccgagacaggccggaggaccccaccagcc

SEQ ID NO: 63093 - RNA, 72 nt, Homo sapiens
agacggaagcaaggaacaaaccgaagaacagcgggaaagaaggcaaaacacggagagacggggcacccgagc

SEQ ID NO: 63094 - RNA, 79 nt, Homo sapiens
caaagaaaccgcaggaaacgagccggacaccgggaagcccacgggaccccaggcgggcaggagaacgacggcacaggac

SEQ ID NO: 63095 - RNA, 36 nt, Homo sapiens
gcaacaccacacaccaaaaaaggacaagccacacaa

SEQ ID NO: 63096 - RNA, 37 nt, Homo sapiens
gagccagagaagaggaacccagaagaccaggccgacc

SEQ ID NO: 63097 - RNA, 78 nt, Homo sapiens
gaagcaagaaacagacagaagggaggcaaagaaaaggagaaaagaagccaaagggacacggcaacagcaagagaaaag

SEQ ID NO: 63098 - RNA, 77 nt, Homo sapiens
ggcacccccagcacagggggggccacaccagccgggccaggcagaggggacgggggaggacaggagacaggaagaga

SEQ ID NO: 63099 - RNA, 55 nt, Homo sapiens
cccggccgagacggcggcagcagcggcacagggacgcagagcgcaacccagcacc

SEQ ID NO: 63100 - RNA, 76 nt, Homo sapiens
ccccccccagcaaacacgacccgcagcacaccgccacgagaccaccaagcagaaaaggacccaagggggcaaaggc

SEQ ID NO: 63101 - RNA, 79 nt, Homo sapiens
agagacgacacgcaagcaggcaaccgaaacagaaaaaggaacagagcgggaaaagaagaaggcgaagcgagaaaaaaga

SEQ ID NO: 63102 - RNA, 55 nt, Homo sapiens
aggcgggggcgcggaaaacagaggcgggcgccccgcccccggccccccaccagcg

SEQ ID NO: 63103 - RNA, 78 nt, Homo sapiens
acagagaaccaccggaagaggcgaggcagcagaggacgggcaccaaagaaagaccacacagggaaacgaccagggaga

SEQ ID NO: 63104 - RNA, 69 nt, Homo sapiens
cgggcgccccaggcgcaaaacccgagaaagggcaaccgggaaaaccaaaagaggccgaacaacgggcaa

SEQ ID NO: 63105 - RNA, 116 nt, Homo sapiens
cgcccgcggcgcagcggggcggcagcgaggcggaggcgacgaggaggcggacccccggcgcagcccgggcgcgccaggcacagccaagagcggaccggcagcggccagcgcagcgg

SEQ ID NO: 63106 - RNA, 56 nt, Homo sapiens
aggcggccaggccaaccgaagacaaaaccacgaggaaagaaagccgaagcagcaag

SEQ ID NO: 63107 - RNA, 82 nt, Homo sapiens
gcggcgggagagcgaggcacggcaaggggccggagggccggcccagaacgcagggagacaacagccacacaaagcagcaaca

SEQ ID NO: 63108 - RNA, 60 nt, Homo sapiens
gcggcggaacgggggaaagagaagcacggcccgacacccaaggggccgcaaggccaggcg

SEQ ID NO: 63109 - RNA, 74 nt, Homo sapiens
agcgaacaaaagcaaagcaacaggcaagaaagaaaaaggcacacaccggaccaacggaaaagagcaaagcagca

SEQ ID NO: 63110 - RNA, 76 nt, Homo sapiens
gcaaggaggccccagcggaccgaacagccccagcacacagaccagaggcggacacaggaaagagaaagcagagccc

SEQ ID NO: 63111 - RNA, 68 nt, Homo sapiens
ggaaagaggaacccaagaaggaggggcaagacgccaagagaaaaggcgagagcacaaagcaccaagag

SEQ ID NO: 63112 - RNA, 77 nt, Homo sapiens
gagggaaacccaaaacggcaaagggcaaggggaaaaagacgcgcaacggacaggaagagcacccaagcgcaagcaaa

SEQ ID NO: 63113 - RNA, 79 nt, Homo sapiens
cccccccaccaccaccacccacacccaccaacaacaccacaaaaccacagccaagggaggacaggacaggagacaaggg

SEQ ID NO: 63114 - RNA, 76 nt, Homo sapiens
gcgaaaaccggagagggacaccggccaggacaccaggcagaaagagcccacaagacaaaaaagcagacggaaacag

SEQ ID NO: 63115 - RNA, 70 nt, Homo sapiens
cccacccccgccgggagaccagaaagcgggcaacaccaaccgagacgcgagagcacaaaacacaacaaac

SEQ ID NO: 63116 - RNA, 56 nt, Homo sapiens
caagcgacagaagcagaagaaggccaccacaaggcacaagagggaaagcaggagcc

SEQ ID NO: 63117 - RNA, 70 nt, Homo sapiens
cgaacacggaaagaagccgccggacacagcaacacgaaccaccagagagggggcgcccccaggaacgaaa

SEQ ID NO: 63118 - RNA, 71 nt, Homo sapiens
acagagagcaacacgagcgcaaagggcaggaaaaggaggacgagccacgggagaccaggagagggagccgc

SEQ ID NO: 63119 - RNA, 67 nt, Homo sapiens
gccaccaggcacgcacgagaccggcagaagccaggagagcagagacccacacgcacgccaccgaacc

SEQ ID NO: 63120 - RNA, 70 nt, Homo sapiens
gaggcggagccacaagcacgcggaagagccagaagggcaggcgaaaaaaacgagacaagacaaaaagaaa

SEQ ID NO: 63121 - RNA, 77 nt, Homo sapiens
caggccccaggcccaggccagcacaggggccgagggccgccccgaccgcacgccacagggccccgccccagcgagac

SEQ ID NO: 63122 - RNA, 52 nt, Homo sapiens
gcgcgccggaaaccggagcgcgcagcagaaaaggggaagaaggccaaccggg

SEQ ID NO: 63123 - RNA, 73 nt, Homo sapiens
gcaccagcggcccgggagacacacagcaggggaggcgcggcagaggaagaagaaggcgcaaagcgccgaaggg

SEQ ID NO: 63124 - RNA, 85 nt, Homo sapiens
gcgagaacaaaggagagaggaccacccagaggagcaacgggagaagcagaccgcaccaggcgggaccccgaaaaagcccaaacag

SEQ ID NO: 63125 - RNA, 66 nt, Homo sapiens
ggcccacggaggaagagccgggcagcccggagcgggccagccggcacagccacaccgagaagaccg

SEQ ID NO: 63126 - RNA, 90 nt, Homo sapiens
aaaacaaaagagagcgcacgaccgcaggcaacgagggaagagaagaaaccgaggaaaagcaaacgaagaaagaaagaagaacgaaacaag

SEQ ID NO: 63127 - RNA, 76 nt, Homo sapiens
gaccagaccgcaaaacaaggacagggggaaaggcaagggagccagagccacagggggcggccacagaccagagacg

SEQ ID NO: 63128 - RNA, 71 nt, Homo sapiens
cacagggacgcccggaaagagcagccagcaagggaagcaaggagcacaaagggccaacaaacacgacaccc

SEQ ID NO: 63129 - RNA, 58 nt, Homo sapiens
gggacgcaggcgcaggccagaggcgcaaaacaaggaccggacagagcacgcacagaag

SEQ ID NO: 63130 - RNA, 55 nt, Homo sapiens
ccacgcggccagcgaaaacgcccaggaagcaaaaccgaccaaaaaccaggcacaa

SEQ ID NO: 63131 - RNA, 79 nt, Homo sapiens
gcaagaagacaccggacaccacaggacaggcggcccgcagacggccccaagaccggagcgggaagccgcggccacaggc

SEQ ID NO: 63132 - RNA, 71 nt, Homo sapiens
gaagagaagcagaaaaccagaagcacaaggacagagcacccaccacaggagggggacccacaaagcagaag

SEQ ID NO: 63133 - RNA, 57 nt, Homo sapiens
gggaagaacgccaaaggagaccaaggcgccaccagcaaaaccagagaaacaggcaga

SEQ ID NO: 63134 - RNA, 75 nt, Homo sapiens
ccacaaggaaggcaagccgccgccgcacgacagaagccgccagcgagccccacacagggccccaaaagagggaag

SEQ ID NO: 63135 - RNA, 57 nt, Homo sapiens
agcacggcaccgacaaaccagccggagaggaagcgcaagaaagcacagagagccaaa

SEQ ID NO: 63136 - RNA, 35 nt, Homo sapiens
ccagaggagcgaaagagagagaaccaacggcccgg

SEQ ID NO: 63137 - RNA, 79 nt, Homo sapiens
ccgcgggaaccgagcccgaggagagccgccaccccccacggaaggcccagaagcagcccagaacaaccaggggaggaag

SEQ ID NO: 63138 - RNA, 83 nt, Homo sapiens
caaaccccaaaacccgcagccggccggcggccgggggagagcacaaggcgaacaagcccccaggcgagagcaaagcggaaagc

SEQ ID NO: 63139 - RNA, 61 nt, Homo sapiens
acacaagaagaccgccagccgaagccaacaggaaagcagacagaccccaaacagacaagcg

SEQ ID NO: 63140 - RNA, 95 nt, Homo sapiens
cgaaggcggcccagcaaaacggccaagggcagaagccaggaccccaccaacggacagagaaggagggaagccacgccccaaggacacgggggaag

SEQ ID NO: 63141 - RNA, 84 nt, Homo sapiens
gcccaggccgcacggacggggggggggcccccaccaccggagccagagaaggggcacacgccacccccggcccgcagagacccc

SEQ ID NO: 63142 - RNA, 77 nt, Homo sapiens
aaacagaaacgagggaaacaggcagaaaccacaaacagcccgcagggcaacggaagcagacaaaaaagggcagcaaa

SEQ ID NO: 63143 - RNA, 83 nt, Homo sapiens
gcagaagaaggcgcagaaagagagagcacagcaccagagcagagcggggaaccgaacagaaagacagcgacacccagcaacca

SEQ ID NO: 63144 - RNA, 66 nt, Homo sapiens
cgcgacgaacgcaccgggcgaagaaaccacacagcggacgcccaggaggccgccggcaaacaagag

SEQ ID NO: 63145 - RNA, 65 nt, Homo sapiens
aaccgaacaacccgggacagaccagaacaaacgggaaaaagaacgaccaggacacagagcggccc

SEQ ID NO: 63146 - RNA, 80 nt, Homo sapiens
caagcaacgaagaaacacagaggccacacacgaggggaccgaaagagcgccggagaagggaggaagaaagcccgccggaa

SEQ ID NO: 63147 - RNA, 81 nt, Homo sapiens
gcgaggcggcccggcggcggcggcaccagccaagacaagcaaacccaggaacacccggccggcccggcgccccggggcccg

SEQ ID NO: 63148 - RNA, 84 nt, Homo sapiens
gaggaccagaacacggcaagcagaggccaggaggggcccagcccggccaggaggcggcggaaaaaggacagaagaggcccaccc

SEQ ID NO: 63149 - RNA, 78 nt, Homo sapiens
aaagccagaccagcggccgggggcagaccccagcccacaacccacgcgcaccggggcggagaacggaaaagcaccagg

SEQ ID NO: 63150 - RNA, 72 nt, Homo sapiens
aaggaaacagcgaaggaacagccggcacaccgaccccgcagaaagcaacaaagcgagagcacaagaaaacag

SEQ ID NO: 63151 - RNA, 84 nt, Homo sapiens
ccacgcagacggaaacaaggcaacagaaagagcaacagcagggcaacaggccaccaaaagaaggcggaagaaaggaagaaaaag

SEQ ID NO: 63152 - RNA, 87 nt, Homo sapiens
agccgggccagagccaggggccgggagggcgccagcccggccccagcaccaacagcccggggaggccacagcccggaagaagggggc

SEQ ID NO: 63153 - RNA, 73 nt, Homo sapiens
ccgagaaaaaaggacaaccgcgcgggacccaaacggaaggaacggaggcgacaagcaaacaacggaaaggagg

SEQ ID NO: 63154 - RNA, 77 nt, Homo sapiens
aagagagcagagaaacggagaagggcgagcaccgcgggagaaggcacagggcagagcaccagcagaacagcaacaga

SEQ ID NO: 63155 - RNA, 75 nt, Homo sapiens
acggagaccgacaacgacgcaccgcgcggccgccggggaggagaagagagaggcgacaagccggcgagaaacaac

SEQ ID NO: 63156 - RNA, 64 nt, Homo sapiens
ccggcaagagaagagacaggcggaagccaggccagggcgaagcaggccaccgacagaaccggca

SEQ ID NO: 63157 - RNA, 74 nt, Homo sapiens
accggaggagagcgacacagacaaggggcgcagagcccggccgcccgacaccggacggccaccgcccgagaaga

SEQ ID NO: 63158 - RNA, 107 nt, Homo sapiens
gaccaaccacaaggccgggcggacgcagggcaccccgaagagaagagcagcagcggggaggcggaagacccgaccaaggaagacagccccacagcgggccccacccc

SEQ ID NO: 63159 - RNA, 77 nt, Homo sapiens
gaacaggagaccagcccggaaacggaaacggccagaagcaggacaaagcagagaacaacccggggacccccagcaga

SEQ ID NO: 63160 - RNA, 72 nt, Homo sapiens
gcccaaacgggagacaacccccgaaggaggcaacccaagacccagcaagaaagccgccaagaggcacaagcc

SEQ ID NO: 63161 - RNA, 78 nt, Homo sapiens
agcacgacacagaaggggaggggagggaaaggcccaggaaaaaggcgccaagcccacgggcgcaccaacggagagcca

SEQ ID NO: 63162 - RNA, 51 nt, Homo sapiens
cccgccgccacacgcgcaaagcccgagccaaaaggagaagcgaacaaaaaa

SEQ ID NO: 63163 - RNA, 80 nt, Homo sapiens
gagacgacaccgaggccagccagggaccgggaaaggggaaaggacgcgcagcggagccgcagacgaacaaagaaagggaa

SEQ ID NO: 63164 - RNA, 53 nt, Homo sapiens
aggagggagcccaccgcacgcccagaagaagaggaggagcaccgcacagcacg

SEQ ID NO: 63165 - RNA, 77 nt, Homo sapiens
gcccacaggggggggcaaacccgagagaacggaacacgaagcaaaggggaacaaaagagaagaaggaaaaggaaaac

SEQ ID NO: 63166 - RNA, 37 nt, Homo sapiens
cacagaaaccggccccgggcacacaggaaaagaacca

SEQ ID NO: 63167 - RNA, 79 nt, Homo sapiens
gaagcggcggaacagacacaccggagcaagaccggccaccccgaccaagcaggagaaggaaacagcgaccagacaccag

SEQ ID NO: 63168 - RNA, 72 nt, Homo sapiens
caaaggaagcgaggagggcacggaggaagggaaggggcacaaaacagacaacaaagacaaagcagaggccaa

SEQ ID NO: 63169 - RNA, 55 nt, Homo sapiens
cgccacgccgccggcagcccgaggccgacggcgaccggagagcagcgagcacgag

SEQ ID NO: 63170 - RNA, 82 nt, Homo sapiens
aagagccggccggccaagggggacgggagcggggccggcggccaccggaaccgcaacgaccagcaacaaggcagagcgaacc

SEQ ID NO: 63171 - RNA, 95 nt, Homo sapiens
aaaaacagagccgagaaaggaagggcgggaccaacagggagccagggaaagagacgaaaaaaaaccaacacgacggcgcaggaaaaacagaagca

SEQ ID NO: 63172 - RNA, 55 nt, Homo sapiens
agcccacggaaaaaaagacgagagccaacggaccacaacagagaaccaaggacgg

SEQ ID NO: 63173 - RNA, 71 nt, Homo sapiens
aaaagggacccccccgaagagccacggcgcgagacaaacgggggagaggaccgcgagacgcagacggaggg

SEQ ID NO: 63174 - RNA, 74 nt, Homo sapiens
aaacgccgcaacgacaggaacccggacgcacaaggagcaaagaccgcaggagggcagccacccagagaagcccc

SEQ ID NO: 63175 - RNA, 69 nt, Homo sapiens
gcaaaggagagaaggcagcaggaggagccggaaccaaagagcaaggcgagaaccaggagaagcagccga

SEQ ID NO: 63176 - RNA, 35 nt, Homo sapiens
gccgaacgagcacggaaagagaagcgacagcccgg

SEQ ID NO: 63177 - RNA, 53 nt, Homo sapiens
ggagggccggacaagggaagcacaagcacagaaagaaccgggccccccgggcg

SEQ ID NO: 63178 - RNA, 77 nt, Homo sapiens
ggccaggggggaccccaccccgccgcagaggagcccgcgggaaagagaggaacccagaaacggcaccaccggagacc

SEQ ID NO: 63179 - RNA, 81 nt, Homo sapiens
gagcaacacgagcgcaaagcccgcacggcaaagcaaagaagagccgcgcagaacagaaggacagacagcacacccaaagca

SEQ ID NO: 63180 - RNA, 79 nt, Homo sapiens
gccggcgaggaggcgcccggagcggccgccccagccaccgcggaggcagccgcccggagcgggagcgcggaggaacgcg

SEQ ID NO: 63181 - RNA, 83 nt, Homo sapiens
cgagcccagccgaaggagaaggggggccccagaggaggagaaaacaccgcggcagggccacaccaaccaagaaccaaaaacca

SEQ ID NO: 63182 - RNA, 82 nt, Homo sapiens
cggaagcaccccgaggcagggcgacagcggcggcgagaggagaacaacaagcgacgcgacagaacgaccgcccggccagccc

SEQ ID NO: 63183 - RNA, 67 nt, Homo sapiens
gggaagcgaagaggcaccagccgccgggaggcaccagcgccgcagaggggccccggcgcggagcggc

SEQ ID NO: 63184 - RNA, 71 nt, Homo sapiens
aagcccccaaagagagaaccggagagcacccaacaagggggcgggcggacccagccccccgcggaggccaa

SEQ ID NO: 63185 - RNA, 58 nt, Homo sapiens
agagcaaaaaaaggcaggagcacagcaagcgggagcaggcagaccaaaggaacagaag

SEQ ID NO: 63186 - RNA, 79 nt, Homo sapiens
caagagcaccgcgcagagcaccgagccaaggcccggggaccccgcccgcacccgaggaggagccggaccgcccccaaac

SEQ ID NO: 63187 - RNA, 45 nt, Homo sapiens
ggaagcggcccccgcagacgccggcagcggagaaaccaagacacc

SEQ ID NO: 63188 - RNA, 65 nt, Homo sapiens
aagaagggcaagcgccgcggaaggaggaggccaaacgaccaagaaagcgggacgcggaaaacggg

SEQ ID NO: 63189 - RNA, 67 nt, Homo sapiens
gaggagaaacagcagaaacgcaccaggccaaagaaagagaagagaccggaaacgagagaaacgaaga

SEQ ID NO: 63190 - RNA, 81 nt, Homo sapiens
ggagaccccgcgccgacggcgccaaacacaggccacccgcgagcggcccgcacgccacgcccggccggcgggcccgccgca

SEQ ID NO: 63191 - RNA, 79 nt, Homo sapiens
cgcagaggccaggagggcacggaaagggaagaggcccagccagagaggagggaagaacaagagacagagaaaacaaaac

SEQ ID NO: 63192 - RNA, 63 nt, Homo sapiens
cggagggcaagggcaaacgaccggggagagcggcgagaacaggcaccgaaagggggaaaggca

SEQ ID NO: 63193 - RNA, 78 nt, Homo sapiens
ggcgcggagcggcacgagcccggggcggcagcgcggacccgcccggagagagacaagcagaccggaagaccgacggaa

SEQ ID NO: 63194 - RNA, 73 nt, Homo sapiens
ggcaccaggcaaagaacaacgaggaaaggaaaaagccagccacagccagcaaagacccgcaggcaacgcgacc

SEQ ID NO: 63195 - RNA, 41 nt, Homo sapiens
gaccagacacggcccacggccagccagaagacagcgccaga

SEQ ID NO: 63196 - RNA, 76 nt, Homo sapiens
ggagcccagaggcaagaaggggagaccggagaagcggagcaagaggcacggagcccaggcgccggaacccggacca

SEQ ID NO: 63197 - RNA, 75 nt, Homo sapiens
gaccagcaaagcaccgcaacagaccgaaagagcccgagcagcgaggggagacgcaagccacccggacgcgaagac

SEQ ID NO: 63198 - RNA, 85 nt, Homo sapiens
ggggaccagcagcgcgccgccgcccaggcggggccccgggagacgggcgggagagagcaccaacccgagaacagcgagccaagac

SEQ ID NO: 63199 - RNA, 86 nt, Homo sapiens
cggcggcgcggcgccggcaacggccagggaggcggcaggggcggcgggagccgcaggcggagagagaccagacagaggccagccca

SEQ ID NO: 63200 - RNA, 70 nt, Homo sapiens
ggacagcgggaacgggggaggcccaaacccgggaaggacgaggggaaccacgacccaacaaaaaacggaa

SEQ ID NO: 63201 - RNA, 73 nt, Homo sapiens
cccggccgaaggggaagagagaaggggagaagaggaaagccaaacgggacacggaggggcagcagcaggacag

SEQ ID NO: 63202 - RNA, 86 nt, Homo sapiens
gccaccaccacgccagccgcaccagccgcccaagccgcacagccgcggcggcagcagcaggagagggccggcggcagagaccacgc

SEQ ID NO: 63203 - RNA, 63 nt, Homo sapiens
gaaaaacaaacacacgcaaaggagaaaggaaccgacagccccagaggacgacacaaagggggg

SEQ ID NO: 63204 - RNA, 86 nt, Homo sapiens
cgagcgaaaggcagacgaccggagacgaggggggagaaccagccgacggagcaggcagcagcccaggaggagaaccaggaccaaag

SEQ ID NO: 63205 - RNA, 84 nt, Homo sapiens
gggcgagcggggcggacgccggggagacgcaggcgaggggcaaaggaaaggggcaggcacccccaacaagaaggaagagaaaga

SEQ ID NO: 63206 - RNA, 75 nt, Homo sapiens
cggcgccaagccccagaaagcggcccggagaccggaggaaagaccgaaaacacggagaaggagccggggagcccg

SEQ ID NO: 63207 - RNA, 60 nt, Homo sapiens
cgcaggcggccaacgagaggaacggccacgcgccagggggcaacaggaaaacaacccaga

SEQ ID NO: 63208 - RNA, 70 nt, Homo sapiens
gaagaccccaaaacagcgagcgggacaaaacacaagaaggcagaaggaaagaaaggcagccggccaagca

SEQ ID NO: 63209 - RNA, 49 nt, Homo sapiens
cgcaagcccgggagcacgcgggccagggaggcggagggccgagagacac

SEQ ID NO: 63210 - RNA, 73 nt, Homo sapiens
ccccaagaagccagaacccaggcacaacgcccggggaaagagccaggacaaaaccaggcagaaccaacacgaa

SEQ ID NO: 63211 - RNA, 76 nt, Homo sapiens
caaccaagagaggcccaaacgaaaaagcggagagagagcagcacaaaccaacagaggagcaagggggaacacgaca

SEQ ID NO: 63212 - RNA, 72 nt, Homo sapiens
caagagggagagggcccaaacgacaccccaaggcccggaaacgaaacagcgcagccaggaacaggacgaaga

SEQ ID NO: 63213 - RNA, 37 nt, Homo sapiens
ggaggacccaaaacgcagacaaagaaacagccggaaa

SEQ ID NO: 63214 - RNA, 75 nt, Homo sapiens
aaccagaagcacaaggacagagcacccaccacaggaggcagaaaaaaccagcaggccaggaacacaacccaccga

SEQ ID NO: 63215 - RNA, 75 nt, Homo sapiens
cggaaagacgccaaaaacagggaaagggccagcacaggagaggacgagaagccacggacccaggacccccggaag

SEQ ID NO: 63216 - RNA, 76 nt, Homo sapiens
ccccacaccaccgcacgcgcgcccgccgcccgaggagccccgcgcgcagaccgaaaagggcggaaaaggaccaagg

SEQ ID NO: 63217 - RNA, 67 nt, Homo sapiens
gagcggaccgaaagaaggcagcagcaccagcacaacaaggaccaaacccgacgacagggacaccacc

SEQ ID NO: 63218 - RNA, 66 nt, Homo sapiens
acgaagaaggcaaaaccaagaggaaaagagaaggaaagcggaccagacaaaggaaaggaggaacgc

SEQ ID NO: 63219 - RNA, 56 nt, Homo sapiens
cagcccacgccagacgaccccacccgcgccgcgacccggaaaggcaacgcaccgga

SEQ ID NO: 63220 - RNA, 58 nt, Homo sapiens
acagaaggaccagcgaccgggagaagcggagagaggagaagagaagaaaaggcaccgc

SEQ ID NO: 63221 - RNA, 83 nt, Homo sapiens
caagagacgagagccccgccaaccagccgaaagaagaaaacccgagcagagaaaacaacaaagcgcccagcacacagcccgac

SEQ ID NO: 63222 - RNA, 77 nt, Homo sapiens
gacgacggacagagagacacaggcagagaccacaagaaccaggagagacccagagccagcgcaggggaagccgcaag

SEQ ID NO: 63223 - RNA, 74 nt, Homo sapiens
ggcccgggcaagaaccggaaaaggagccaagagcagggggagacagaacgccagcgggccgacggagcccagga

SEQ ID NO: 63224 - RNA, 88 nt, Homo sapiens
cgaggggccaaccagcgaagagcgacaagccgcggcagccgcggaccaccgccgccaggggcagaggccaagaccggcccaagaagga

SEQ ID NO: 63225 - RNA, 73 nt, Homo sapiens
ccgacaccagcggccgacaccaacccccgcggacccagggagaaaccccccagaagcagaaacccaagaaccg

SEQ ID NO: 63226 - RNA, 71 nt, Homo sapiens
aaacagcagcaccaaaacgaggacagccaccaagaagacagaggagaagaccagagaccacccacaagaaa

SEQ ID NO: 63227 - RNA, 40 nt, Homo sapiens
accgaagaggcccgggaaggagcggggacagagcacgaaa

SEQ ID NO: 63228 - RNA, 79 nt, Homo sapiens
gaaaaacacaaggagcagagacaaaaccaagccaaacacaagcagaaggagcgaagaagaggaagcgaaagggggcaga

SEQ ID NO: 63229 - RNA, 42 nt, Homo sapiens
agacaagcaccccgaagcgccggagaaagaaggggcaagagg

SEQ ID NO: 63230 - RNA, 79 nt, Homo sapiens
cccgacggcagcgcgggaaacgcaaaccgagccaaaagccggaaaagagcaggagaggagccgggagagggagcaggaa

SEQ ID NO: 63231 - RNA, 80 nt, Homo sapiens
gccgccaggccaccacagcccggggagcccacagcgccacgccggaacaaggaccgcacccgaaccacagggagacaccc

SEQ ID NO: 63232 - RNA, 79 nt, Homo sapiens
ggcccacccaccccggccaagcccacaggaaagaccacagcaagaccacgcccccagccgggggaccaggccgaacgac

SEQ ID NO: 63233 - RNA, 72 nt, Homo sapiens
gccggcgccggcgccgcgcccgccccggccacccggccagcgagcaggacccgagaagacaggccaagaggg

SEQ ID NO: 63234 - RNA, 76 nt, Homo sapiens
gacgggagagccccacacgcgacgacgggaggcaagcaggggggcaaaggaaagaaggcagaaagggaggccagga

SEQ ID NO: 63235 - RNA, 71 nt, Homo sapiens
gcccccgagagcggggcacagaaaaccgcagggggcaaaggacagcacgggaggaccgcccgccgaccggg

SEQ ID NO: 63236 - RNA, 77 nt, Homo sapiens
gaaccgagaaaagcccacccaagaagaggaagagagagagggcccaaaccaccagaaccgaagaagagaaaacaaag

SEQ ID NO: 63237 - RNA, 83 nt, Homo sapiens
gaagaagcagcgaagacggaggcagcccacacggaacaaaaccacacagaagcagcaggcgcacggcaaagcaaaagaacaga

SEQ ID NO: 63238 - RNA, 77 nt, Homo sapiens
ggcacacggggcacccggaccggagaggaggggaggcacccgcgggcgaggcccccgcacagcacgcgcagaacaaa

SEQ ID NO: 63239 - RNA, 78 nt, Homo sapiens
gggcagcggacgagcggagaaggccacaccacgcagaacgcaacaccaaggcacaccaccccaggcccgggggagagc

SEQ ID NO: 63240 - RNA, 78 nt, Homo sapiens
ccaggaagcccccgaagcccccgccgccgcgagaagcacccagccacaccccaccgcccagagaagggaagagaggag

SEQ ID NO: 63241 - RNA, 76 nt, Homo sapiens
gggccccaacccgcgcggcaagaagacggcgcggcaaccggggagcccgccaggggcagcggcgccgcaagcacgc

SEQ ID NO: 63242 - RNA, 70 nt, Homo sapiens
gacccaaaaaagagagaaaaggccaaagagagggcgaacaagcaagcccccccagcccaccccaaacgga

SEQ ID NO: 63243 - RNA, 79 nt, Homo sapiens
caagggaacgaggagaagaaccaggacaaggaagagaaaggcacagcgaacgccagaggagccaccgcgcccaggcgga

SEQ ID NO: 63244 - RNA, 85 nt, Homo sapiens
ccaaacggaccacagccaagcccaagcaaaagccaacagagcagcagcacgggcagcagaacacacaggcggccagcccaacgga

SEQ ID NO: 63245 - RNA, 78 nt, Homo sapiens
gacccggaggaccagaaacgaggaggaagaggggccaaccggaccgcccccaacaaccacggaaggaccgggggccaa

SEQ ID NO: 63246 - RNA, 78 nt, Homo sapiens
cgacaaggcagcacacaacccgaaggcgaacacagaggaaaccgcaccgcccggagagccgcccacccacgcaaccca

SEQ ID NO: 63247 - RNA, 71 nt, Homo sapiens
gggacccggccagaggaaagaacccgaggaaaaaccagaagagaaaaaacaaaggggagaggcaccccgcg

SEQ ID NO: 63248 - RNA, 62 nt, Homo sapiens
gcgcgagcgaggccagacaggggggcgccacggacggaaagaaagccaagcacacacgaaga

SEQ ID NO: 63249 - RNA, 116 nt, Homo sapiens
gggccgcaagacccaagaagaagaaggcgaaggaccccaacggggaggccaacggaagaagggaaggagaagccgggcaccgaacaaaacaggagaccaggcaccggacacgagag

SEQ ID NO: 63250 - RNA, 59 nt, Homo sapiens
acgagagaggcccccgccgagcacggaaggaagaagagcgagcccagaacaggacaaag

SEQ ID NO: 63251 - RNA, 71 nt, Homo sapiens
aaggaagcaaagcaccaaagacgagaaagaaacagcaggacgcagccgcaagcacaacaaccagagcgaga

SEQ ID NO: 63252 - RNA, 79 nt, Homo sapiens
ggcagcgacacaagcggacagaacagacgggacccccagccaaaggcaaagagggccgcgggggaagagcccggcccgg

SEQ ID NO: 63253 - RNA, 74 nt, Homo sapiens
aaaagccagggagccacccagcccgcagagagggacggcaacgcaaagagacccgggaagacggaccacaccag

SEQ ID NO: 63254 - RNA, 53 nt, Homo sapiens
gcccagcggggaacgggcccaggaaccccgacagcagagacgacgcggcaagc

SEQ ID NO: 63255 - RNA, 76 nt, Homo sapiens
aggagggccaaaacgcccggcggaccacggccgcagcacggcagccacaaaccgcgggacccggcaggaacagacc

SEQ ID NO: 63256 - RNA, 80 nt, Homo sapiens
cgggaccaagaggcgacggcgaggaagaaaacaccggagcccaagacaccaaaacagacgcaggcaagaggcagaaggac

SEQ ID NO: 63257 - RNA, 67 nt, Homo sapiens
agagcccacgaacggacacaccagcgcgcccagaaaaagcgagcccacccccacaccaacccccgga

SEQ ID NO: 63258 - RNA, 73 nt, Homo sapiens
gaaggaacgcgacggcggcgcccgcaggacacgggacccaggccacgggccggggcccccaccggaagcagag

SEQ ID NO: 63259 - RNA, 78 nt, Homo sapiens
ggaccagcgacccaagcgccgcggaaccacgccgccacgacccccagacggaaggaaaaggacaggaggacccagacc

SEQ ID NO: 63260 - RNA, 67 nt, Homo sapiens
gcccgaaaaaaacccaggcggcccagggaacagaaagacaacggacaaggcaggaagaaaacccaca

SEQ ID NO: 63261 - RNA, 70 nt, Homo sapiens
gagagaggagccccaccgggcgaggcgaggggaggagggcagggacagggcccgagggcaggacagcagg

SEQ ID NO: 63262 - RNA, 58 nt, Homo sapiens
ccagaagaggagggcccagaagaaaaaggcagagcccccgccaggcccccaaaccaac

SEQ ID NO: 63263 - RNA, 73 nt, Homo sapiens
aaaggaggagacaagaagcggcgaacaacaagaagacgaagccagaaaggacagcgagagaaagccaaaaaga

SEQ ID NO: 63264 - RNA, 76 nt, Homo sapiens
aacgccacgcagcgccggaaacgccacggaaagacaaggagccgggccgagaaaccgaaccagagaccagagaaga

SEQ ID NO: 63265 - RNA, 74 nt, Homo sapiens
gcaaagccggcgacccgcacagccgcaccccaacccccagggcagagcggcgggaaaccaccaacaacaccccc

SEQ ID NO: 63266 - RNA, 102 nt, Homo sapiens
aacagaaggggaaggggagccgcacaagagggggaaacggggaaaaggcaagcaggaaaaagccgccccaccgagcggaccagggagcagccccagaaaaac

SEQ ID NO: 63267 - RNA, 82 nt, Homo sapiens
cccggcccgggggccgccccggcgagccgcgacggcgccgcccacggcgaggcaacagggacgagaaccacacccaagcccc

SEQ ID NO: 63268 - RNA, 108 nt, Homo sapiens
cagccaggaggggagacggacggagaacgggaagccgcccggcagagggaaggcagcccaagagaacgaaagcaaaaagcgccgaccagccgcaaaaaacaaaaagaa

SEQ ID NO: 63269 - RNA, 77 nt, Homo sapiens
gcgcggcggcgcgcggagaaggcggcggagcggcgccgcaagcaggcaaaccgaccaacggcggagagggcgagcga

SEQ ID NO: 63270 - RNA, 81 nt, Homo sapiens
agcaacgcgggaagagaaggagacagggaaacgaaaaccaccgggcaccacgagcccacgagagaggacagccccaggaag

SEQ ID NO: 63271 - RNA, 84 nt, Homo sapiens
caacagacaaccaccaaaggggaaacagaaacaaggaagcgacccggaaccgggaaaccaggcaagaagcaacgaagagaacag

SEQ ID NO: 63272 - RNA, 65 nt, Homo sapiens
cggggagccagcaggcagggcccaaaacgacagacgcgaaaggggacgacgaagaggaacagaga

SEQ ID NO: 63273 - RNA, 63 nt, Homo sapiens
aaagacccaggagaagccgcccaaagaacgcccgccaaggaacccgcggggcagaccacacca

SEQ ID NO: 63274 - RNA, 67 nt, Homo sapiens
gggccaggaaggcccaaaggacagccaccaggccgggggcaacgccccagacgccgccccagcaccg

SEQ ID NO: 63275 - RNA, 85 nt, Homo sapiens
ggaaccccgcggcgggagcgcggcggggccgcagagggcagaagccaaaccgaccacagacacaaggacaaggagacaaacccca

SEQ ID NO: 63276 - RNA, 79 nt, Homo sapiens
cggggaccggcgcagcggcggaggacgcacaaggaccggcacggcagaagccgccacgccgcaggcagaaaccacgggg

SEQ ID NO: 63277 - RNA, 77 nt, Homo sapiens
aacagcgaccaccgaggagacaagcggagcgagcggaagaacggcgcacggcaagagcgcccaggccacagagaaca

SEQ ID NO: 63278 - RNA, 70 nt, Homo sapiens
gacccccgcccacgcaaacccaaagaccccgccggagacgagagggaacgaagcccaaaaggcagagacg

SEQ ID NO: 63279 - RNA, 75 nt, Homo sapiens
cgcagaccccggcaacaacaagcgccaggccagggaggcgagagccagcaggaggcccagcgccccaggcccagc

SEQ ID NO: 63280 - RNA, 82 nt, Homo sapiens
aaggccacgaaggaaagaggccgggagcgcccccacccgcccgagccgggagcacagcagaagcaaaagagcaacgccacaa

SEQ ID NO: 63281 - RNA, 84 nt, Homo sapiens
gaggagcaagaggacccgcggacacgcaaagggcggcgacggcggcgcgaggaccgaccgggcccgcggacgaagaaggcaccc

SEQ ID NO: 63282 - RNA, 78 nt, Homo sapiens
ccaacggcgcagcacccaacaacaagaaggagaaagacacaacgacagaagaaaaaacacaagaaaagacaagcagaa

SEQ ID NO: 63283 - RNA, 76 nt, Homo sapiens
cccagacccgaagaaacggaccccgaaaacgaacagggagaagagacaggggagacagggggagcgggaggcaccg

SEQ ID NO: 63284 - RNA, 72 nt, Homo sapiens
gggggagccccgggagccgcacgaacaccggcagagagagagacacaccagacgagaaagcgacggagcgga

SEQ ID NO: 63285 - RNA, 52 nt, Homo sapiens
gaaggccgagacagaggaaccaacgcagagccccagaacaaaagaacacaga

SEQ ID NO: 63286 - RNA, 78 nt, Homo sapiens
aggcggggagccaagcccggcgagagcagagccggggcggacaaggacagcaggagagagaaacacacgccaggagcg

SEQ ID NO: 63287 - RNA, 69 nt, Homo sapiens
cgcccccccggcccccgggacggcccaaggccagcccgcagcacacgacggcgcccaaaacgagagagg

SEQ ID NO: 63288 - RNA, 78 nt, Homo sapiens
cacagaagccgacaaggcgcaagcgaaaacagaccgcgagcccagagaagccaaaacacccgagcaccaccggccaga

SEQ ID NO: 63289 - RNA, 63 nt, Homo sapiens
aaaccgaaggaagcggcccaagggggaccccagaagggccccgagggaggagaaagacccgca

SEQ ID NO: 63290 - RNA, 79 nt, Homo sapiens
gggcgagcggcgagccgaaaagcgagcgcgaggaaaaggcggcgggaggccaagacaaggccgagaccgcgggaagaag

SEQ ID NO: 63291 - RNA, 58 nt, Homo sapiens
ccggcaacccgaagagccaacagacacgagccccgaaacagaccgacggcagggcaaa

SEQ ID NO: 63292 - RNA, 70 nt, Homo sapiens
acgagggagcaaggacaccaccagggagccaggagagggaccgaaggaaacaaaagaaagggcagaagaa

SEQ ID NO: 63293 - RNA, 103 nt, Homo sapiens
gcgccccgcccccccgagcccgggccgcggcggagcgagcgagcggccggcagggggaggagcggccgaagaaggccagggcagcaggaaagccccccaagaa

SEQ ID NO: 63294 - RNA, 75 nt, Homo sapiens
gcacacaccaccacacacgaggcccggggagaccggggaccgcggcgcaccacggcagaacgagcacccgggcgc

SEQ ID NO: 63295 - RNA, 66 nt, Homo sapiens
gccaaggcggaaaagcccaagaaacaaacagaagcacaaacaccagcccgaacgagacgagaaacc

SEQ ID NO: 63296 - RNA, 77 nt, Homo sapiens
agaaggaccaagaaccagaccacacgaaggggcagaagagcacaagacggaagagaggagcgaccagacggcaggag

SEQ ID NO: 63297 - RNA, 83 nt, Homo sapiens
ggagcagcggcggcggggggcagccgccgcccggacccccagagcaccggccgagaaggagggccaaagagccaaagcaccgg

SEQ ID NO: 63298 - RNA, 84 nt, Homo sapiens
caagaaggggagcagaagcagggcagacaagacccggagggcgagccggcaccagggcccaggcgacagcgaccgaagaacaga

SEQ ID NO: 63299 - RNA, 83 nt, Homo sapiens
cacaccgacgcaggaagccaccgagacggcgaccgggcgccgagacaccagagccacaaggacgacaggccagcccacagggc

SEQ ID NO: 63300 - RNA, 72 nt, Homo sapiens
ccccggaaagaagaccgaagcgaaggaaacaacgaagcaaggaagccaagaacaacaacccccagccacaac

SEQ ID NO: 63301 - RNA, 74 nt, Homo sapiens
cgcagaagccgggccggggcagcggcacaacccgggagagagacacggcaccccgccaggaagaggcggcggcg

SEQ ID NO: 63302 - RNA, 84 nt, Homo sapiens
gccgcgcagccaccgccgccgccgccgcccccagcgccgccagacgaccgcgccacccgcagggcgcgcaggccgaacacaccg

SEQ ID NO: 63303 - RNA, 76 nt, Homo sapiens
acgaggaccgagaccgcggccgggaccgagggaagaccgaggagcagggagcaaccacaaggaaaggaaaccaccg

SEQ ID NO: 63304 - RNA, 76 nt, Homo sapiens
aaagagggcagcaggcccagaaacgcacacaagaaggaaacgaaggaacaaggaacgcaccgaagagaagaagaac

SEQ ID NO: 63305 - RNA, 39 nt, Homo sapiens
ccggaagagcgcggccgaaggaccagagaagacacacaa

SEQ ID NO: 63306 - RNA, 68 nt, Homo sapiens
cccacggcgaagccagcggacgggcagggcccagacaacagcagcgagagagaaaagaaggaaggcag

SEQ ID NO: 63307 - RNA, 73 nt, Homo sapiens
aaagaacggcgagggacagaagaagggagcacggaacagacaagccaggaccccagaagggccccgagggagg

SEQ ID NO: 63308 - RNA, 76 nt, Homo sapiens
ccaccagccccggcacaaacgagcagaacgacagcccgccaggagcacaacgccgagaaagccagcgacgcccaaa

SEQ ID NO: 63309 - RNA, 64 nt, Homo sapiens
caggaggcccgcgcacgggaaagacccgcacgggaccgaaaaacacggagaggagccaagccca

SEQ ID NO: 63310 - RNA, 63 nt, Homo sapiens
aacccggcccaaaggggaggccggccggacacaaaaaggcaccaaaagccgcacaggggcagg

SEQ ID NO: 63311 - RNA, 79 nt, Homo sapiens
gacgcgccgcccggcgcgcacaggcgagcaggccggcggacggcggcgaagaagaccggagacccgaaagaggaagagc

SEQ ID NO: 63312 - RNA, 76 nt, Homo sapiens
cggaccgagagcgcgaaacgcacgagaagggcgaagccgagcaacccagggggagcccacgacccaaagaaaggac

SEQ ID NO: 63313 - RNA, 73 nt, Homo sapiens
gaccagcacggcagccaggaacggggaaggagaccggaggcccaacagcaggccgaggccgaggccggccccc

SEQ ID NO: 63314 - RNA, 63 nt, Homo sapiens
cccaaggcaggcccgggcaggcgagaaaagcaggggcccccggaaacaaacagccccccagag

SEQ ID NO: 63315 - RNA, 79 nt, Homo sapiens
gaagaaaaagcagaagaggccgagcagacccagaaggccagaagccaaacgggacaaaggacaggcaaagagccaaggg

SEQ ID NO: 63316 - RNA, 77 nt, Homo sapiens
cgggggcccgagaagccgacggggccccaaggagccccaaaggcccagcgacacccgaaacacagagcgcgggaggg

SEQ ID NO: 63317 - RNA, 63 nt, Homo sapiens
cagcgagagcaaccaccaacaaggaacaaacaaaacgaaagccggcaagagagagccccggcc

SEQ ID NO: 63318 - RNA, 77 nt, Homo sapiens
accgcaagggcaccaccccgagagaggacgaagaacaaggagaggggagaaacagcaggagcacgagggcagggcgc

SEQ ID NO: 63319 - RNA, 69 nt, Homo sapiens
ggaaaaacggagagccacaaaaaaggaagcgaaagagacgaaaacacaccagcgccggagccgggccga

SEQ ID NO: 63320 - RNA, 78 nt, Homo sapiens
cccaggagggcagccccggagaagcgcagccagcacaggaggcgcagaaaccagggcagcaggaggggggaagcagga

SEQ ID NO: 63321 - RNA, 54 nt, Homo sapiens
aaagccggagaggaggagaagacaagagcggggacgggaaagagggcagaagca

SEQ ID NO: 63322 - RNA, 86 nt, Homo sapiens
gcgcagagcgggaccacccgggcacagcaggcacggagggaaagggagcagcaccggccacacccacagcacgaccggaacccagc

SEQ ID NO: 63323 - RNA, 76 nt, Homo sapiens
acacgccagggggggcgccaggaaagaccggccggcagccgcagccggacccgggccggccggccggcccgaaacc

SEQ ID NO: 63324 - RNA, 63 nt, Homo sapiens
cggaacagccaacaaagagagaggcgcggccagcgaagaagacgcagccagacccggcgacca

SEQ ID NO: 63325 - RNA, 72 nt, Homo sapiens
agaaggccagcgggccaggaagcgcaccaggagggagagaaacagaagacagcaaaagaccagcagcagcac

SEQ ID NO: 63326 - RNA, 84 nt, Homo sapiens
gcgggaaccacaagcagaccggaggccaagaggcggaaggagccaggcacgaccggcagcgacaagccgggaagacaagcagac

SEQ ID NO: 63327 - RNA, 82 nt, Homo sapiens
cgcagccagccccgaaacggacacgagcaagaccggaccggcaccaccaggaaccacaggagcacccacgggaacagcccag

SEQ ID NO: 63328 - RNA, 69 nt, Homo sapiens
gcaacaacagacacccacagcgagggaagacagacagggacgaaaaggggagccgccaccaaaagcaga

SEQ ID NO: 63329 - RNA, 71 nt, Homo sapiens
ggggaagacagaggacagaacccccggcacagaggagagggggacgaggaccgagaggacaagacagggac

SEQ ID NO: 63330 - RNA, 73 nt, Homo sapiens
agccacgagagacgagcaacccccgggaagccaagccgcaggccccgagccccggccccaaagacccaaaaca

SEQ ID NO: 63331 - RNA, 59 nt, Homo sapiens
gccggacccagcgagcgggcggcacgcacgcagagaggagcgggaaggccccgcacccg

SEQ ID NO: 63332 - RNA, 60 nt, Homo sapiens
cagcgggacggacaggcagggaagcaacgcagaggccagaacaggacgagcagaacaggc

SEQ ID NO: 63333 - RNA, 86 nt, Homo sapiens
ggacggaccgagaccggaccgagagcggaccgagagcgcgaaacgcacgagaagggaaacccaacagcccaagagggaaacccagc

SEQ ID NO: 63334 - RNA, 58 nt, Homo sapiens
cggccgaggaaggaacggcccccccccagcccgccccaaaaggagaaccggggcaaga

SEQ ID NO: 63335 - RNA, 51 nt, Homo sapiens
cacacgccggcggccaaggccccgaagagcgaaagcgccaccggaggccga

SEQ ID NO: 63336 - RNA, 75 nt, Homo sapiens
gcgagggggcggccggaaggcagcacacaccccgcaccgccccaggacaccacagccgggcagcgccggccccag

SEQ ID NO: 63337 - RNA, 75 nt, Homo sapiens
caaagcccaagagaggcaggcagcgacagccacacaacggacagggcaacggggaggcagcccggccgcgcacca

SEQ ID NO: 63338 - RNA, 48 nt, Homo sapiens
gaagaggaagagaagacaacagaacggcaacgaaaagagacacgacgc

SEQ ID NO: 63339 - RNA, 74 nt, Homo sapiens
gaagggcgcagcagaaagcaaaccagcaggcaccaaggaaagcagaagacaagcgaagccgacgagcccgaaca

SEQ ID NO: 63340 - RNA, 78 nt, Homo sapiens
gccagcgcaagaggagccaagcaaacagaagcgcggccaagcccgccggagcggaagagagcgcgcccagcgggcgac

SEQ ID NO: 63341 - RNA, 69 nt, Homo sapiens
caccgcggaggggaacccgccaacggggaccgcgacgagaggaggaacagggggaacgggggcaccgcg

SEQ ID NO: 63342 - RNA, 81 nt, Homo sapiens
caacaggaaggagacaagagaaaaagagaacaggaaaaacaggaggcaggaaaagacagagagagccaggacccgaaaagc

SEQ ID NO: 63343 - RNA, 63 nt, Homo sapiens
caccgaccgcggagcccgcagccagagggaacagccaaagggagaagagcccggaaggagggc

SEQ ID NO: 63344 - RNA, 65 nt, Homo sapiens
ggaggccccccaaccacaggaaccagcagcccgggagcgaagcaagcacgcagcaaccccaagag

SEQ ID NO: 63345 - RNA, 51 nt, Homo sapiens
aaggacaacagcccgacaaccagcgggccacacccaaaaccggacaggcag

SEQ ID NO: 63346 - RNA, 83 nt, Homo sapiens
gagccggaggccgaccagcaccccgccaccacggccgaccagcgccacccccggcccaggaggcccaaggaacagcacagcag

SEQ ID NO: 63347 - RNA, 72 nt, Homo sapiens
ccgacacaagaacagaacaggcccaggggcaaccaggcagacccgaccccagcgccacaagaaggagagacg

SEQ ID NO: 63348 - RNA, 86 nt, Homo sapiens
gaaacccaacccaagccaccgcccggaggccggaccggggcacaagaagacccggggcaggcgcaggaggcacccaaggggaggaa

SEQ ID NO: 63349 - RNA, 69 nt, Homo sapiens
cccacagaggaacggacacaacgagagcagcgaagcaccacgaaaggagccccgggcagaggagccaaa

SEQ ID NO: 63350 - RNA, 77 nt, Homo sapiens
gcgcaagcccccaaagacgggaacacaaccgaccaaaagcagaggcaaagaaacgggcaaccacaccaagagccaga

SEQ ID NO: 63351 - RNA, 81 nt, Homo sapiens
ccacaaccagaaaggcgaaaagggcaggaagaggcagaggaagaggaagaggaagaggacgggccgggcagaggaagaggg

SEQ ID NO: 63352 - RNA, 51 nt, Homo sapiens
gaccgaccaccaaaaacgagaacacacaagaaaaacccggggaaggcaaga

SEQ ID NO: 63353 - RNA, 79 nt, Homo sapiens
acacaggagagccaggacagccacaccccaagagacccagcaggcgaagaagcagcagcccaagagcagacaggcaggg

SEQ ID NO: 63354 - RNA, 38 nt, Homo sapiens
gcgcggccaagccacgccaacggccggagagacacagg

SEQ ID NO: 63355 - RNA, 78 nt, Homo sapiens
cccgaaaccaccgccacagagacagccaggaagcaacggacggcagccacccgcgggaagggacaaccaggacccccc

SEQ ID NO: 63356 - RNA, 106 nt, Homo sapiens
agaccccagaagggagggcaagaagaagaaccgagcccagcaagacccccagcgccgcaccacccccccaacaccccacagagcagaaacccggaggagcggccgc

SEQ ID NO: 63357 - RNA, 50 nt, Homo sapiens
cccgccgacgggcagcacacccaccgagccgagagggccggacacaagag

SEQ ID NO: 63358 - RNA, 90 nt, Homo sapiens
ccccggcagaaaacaagcgggcccgcagcccggcacgagggggaaccagaccaggggaggcagaggggaggaaaccaaagaggaccagag

SEQ ID NO: 63359 - RNA, 68 nt, Homo sapiens
gcggccaggcggcgacacgccaaccccggaccggagcagggcaaagagcaagacaaagaacagagaaa

SEQ ID NO: 63360 - RNA, 73 nt, Homo sapiens
gaagaacaggcggaggcccagccagccacagagagcggcacaccccaggcgagaaaacaccagcacggaaaaa

SEQ ID NO: 63361 - RNA, 71 nt, Homo sapiens
acgggcgcgccaagggcacagagggagagacgggagcacccgggacgccagaaagccagcagggccgacgg

SEQ ID NO: 63362 - RNA, 76 nt, Homo sapiens
aggcaccaggccaccacagaaacaaaagcaacaaagaggggcaaaccagacagaaccgacggggaaaggaaagcag

SEQ ID NO: 63363 - RNA, 79 nt, Homo sapiens
gaaagagaggccaacagagaagaaacagaaggggggaggaagcaccaagggaccgagcagagaaccaacggagaacagc

SEQ ID NO: 63364 - RNA, 68 nt, Homo sapiens
ggcccaggccaaaagagagagcgcaaccaacccacgaccgcaacgcaagcagaaaggaggaaaacgac

SEQ ID NO: 63365 - RNA, 63 nt, Homo sapiens
accgcagggcacaacggagaaaccggcacaaccacgaaggaagaagggaagacagccagcaag

SEQ ID NO: 63366 - RNA, 58 nt, Homo sapiens
gcagccagccaagagcccggcaaaaagcggcacaccacgccccaggggccaaaagcag

SEQ ID NO: 63367 - RNA, 80 nt, Homo sapiens
ggcggccgacggcgacgaccgcgaccccacgcgggccaagacgaacccgcaagaggacgcaggccacaaaagacaagaca

SEQ ID NO: 63368 - RNA, 81 nt, Homo sapiens
caccggaagcgggaaagaggccccgcaaagaagggggcgagaagaaaaagggccgcgccacaacgaagggaacccgagaaa

SEQ ID NO: 63369 - RNA, 73 nt, Homo sapiens
ggaccggcacccggacaggaggagccagggcccggcccgaaaggagagccgcaggggcgccaaaagaccaaca

SEQ ID NO: 63370 - RNA, 89 nt, Homo sapiens
gcaggagcgaggagcccggcgagaagaggagaggggaaggccaaagagcacagggacagaaaaacagcgcagacgagccgcaaggacaa

SEQ ID NO: 63371 - RNA, 148 nt, Homo sapiens
ggccgaaggcggaaacacgccaagcgccggccagaccgcaagagccccaccgaaccaacaaacccaacacacaaagcacaacagcccagcggcagcacaccccgccaaaccaaccgccaaggccgaaagccaacaacgcgaggccgca

SEQ ID NO: 63372 - RNA, 78 nt, Homo sapiens
aaaccgaaggcgacagagacaggcccgaccccgaacccaccggaggcaagcacggagccgcgcggagaacaccaacgc

SEQ ID NO: 63373 - RNA, 66 nt, Homo sapiens
cacgacgagcgcggaggaccgggaggccccgggcgcgggccggggccaaagcgaccaaccccccac

SEQ ID NO: 63374 - RNA, 56 nt, Homo sapiens
caggcggcgcaaaacacagagaggaggccgggcccgggaggagcaggggcagaggg

SEQ ID NO: 63375 - RNA, 73 nt, Homo sapiens
aaagagggcagcaggcccagaaacgcacacaagaagggggcaggagaaacggcaaaacagagagccgcagagc

SEQ ID NO: 63376 - RNA, 66 nt, Homo sapiens
accggcggcagggcaagcggcgacggaccccaagaacgccaaaagacgaacacaaagggaaagagg

SEQ ID NO: 63377 - RNA, 78 nt, Homo sapiens
agaccacgcaaccagggcagaccgccagcaaccaggacagcccccacgagaaagagggaaaaccccacacacagacgc

SEQ ID NO: 63378 - RNA, 79 nt, Homo sapiens
cgcccccccccccacgcaaccccagaccaacacacacaagccaggcggcagacaaacggaaccaaccaaagcaaaacag

SEQ ID NO: 63379 - RNA, 75 nt, Homo sapiens
cccccccagggccaggcgccgccagaacgagcccgacaaggccaccacacaagccgccgcccgcaccaggaaacc

SEQ ID NO: 63380 - RNA, 69 nt, Homo sapiens
gaagacggcgggccagccgggaggggagagccccgcaccccccccagaaacaggaaacacacgaacgcc

SEQ ID NO: 63381 - RNA, 78 nt, Homo sapiens
cggagaaacacaggaggaggaggagagacccaaggaaagacagagaaacagagacggacagaaccaagggggaacccc

SEQ ID NO: 63382 - RNA, 80 nt, Homo sapiens
caggagcgagcccgaggacaggagaggaagagggaaaacgggaacacaagccaggacagcccagcaagcggagggcagcc

SEQ ID NO: 63383 - RNA, 81 nt, Homo sapiens
cagaaagagggagcaacacccgggaaaggaagcgcacaggaagccggaaacggccaacagagcacaggcaaggcaccgagg

SEQ ID NO: 63384 - RNA, 80 nt, Homo sapiens
accacaggcccagacgagcggaggaggcacagggcgcggaccgcacgagcgcggggcgggaggacagccagagacaagca

SEQ ID NO: 63385 - RNA, 73 nt, Homo sapiens
acaggagcagaggaaggagacaagaggcaggagccagaagccaggagccacgagaggagcagcacaaaacacc

SEQ ID NO: 63386 - RNA, 79 nt, Homo sapiens
caaggccggcaaccagcgaagcgaggacacaccagggggggcagaaccccaagaaccagcggcaaggaacagcccagca

SEQ ID NO: 63387 - RNA, 73 nt, Homo sapiens
ccccacccccccagcggccgcagggccgacaagcggaccaagccagacccaaggcagagaagaagccggcccg

SEQ ID NO: 63388 - RNA, 86 nt, Homo sapiens
gccggaggacgcggagcccaagaaacgggcagccaggcccccacagcccgcaggagaaggccggaacaacgaaggggaggcaccaa

SEQ ID NO: 63389 - RNA, 77 nt, Homo sapiens
caaagacaagccagcaaacacgacaggccaacagaacaccagcaccaccacgggaaaggaagcagacaccaagccaa

SEQ ID NO: 63390 - RNA, 77 nt, Homo sapiens
aagcaccacaaaggaacgccacacgcgaaaaacgggggaagaaaccaagaaagaggaaccgaagaagagaaggaagg

SEQ ID NO: 63391 - RNA, 73 nt, Homo sapiens
aagggcaaccgcccaggggccagggagccccgaggcgcaccggggaagagcaggaggacaccggggacggggc

SEQ ID NO: 63392 - RNA, 77 nt, Homo sapiens
ccggacggaagaggaggagaccaagcgcacagccaggagaaacacaaacggagccaaccccaccacaaaacagcaag

SEQ ID NO: 63393 - RNA, 89 nt, Homo sapiens
agcggacgaaggaggcccgcccaaaccgggcggggcccacagccagccgcaagaggccggagcgcccagggcaccgcgacccgaggaca

SEQ ID NO: 63394 - RNA, 52 nt, Homo sapiens
ggagaaacagcggggaaaggggaccacggggcgggaacaggaacgggcagcc

SEQ ID NO: 63395 - RNA, 75 nt, Homo sapiens
aacgcgcgcgagggaaaacccgaaggaagcgcaggcgcagcaacgccaaaaagaaaccgaagaagagaagaacac

SEQ ID NO: 63396 - RNA, 61 nt, Homo sapiens
gcggggcgcgacgaccgaaggacggccagcagaagcaggcgagccccccgagaaaaagaag

SEQ ID NO: 63397 - RNA, 77 nt, Homo sapiens
agacacgcagaccccccgggaccagcagagagaacgccagacaaggcccaagggaaagcgcgagaacaaacacaaag

SEQ ID NO: 63398 - RNA, 80 nt, Homo sapiens
gcaaagccaaaagaaggcccgggaaagcacaaagcaagagacagcgaggacagaaggaaggggcaacgaggaacaggcca

SEQ ID NO: 63399 - RNA, 78 nt, Homo sapiens
gagcggaccgagagcgcgaaacgcacgagaagggaaaaggccagggcggcagaaaggcggccagggagaaggagaacc

SEQ ID NO: 63400 - RNA, 40 nt, Homo sapiens
aacgcggacagagacagaaaagccgcaccgcgaggaaccc

SEQ ID NO: 63401 - RNA, 33 nt, Homo sapiens
cggcaggggcaggaaaggagacacacagaagac

SEQ ID NO: 63402 - RNA, 83 nt, Homo sapiens
gacccgggcacccaacgcgcaggagcgagaacccgagcagcgccagagcaacacaccgcgccccagcacgcaggccgggcccc

SEQ ID NO: 63403 - RNA, 73 nt, Homo sapiens
acaccggccagcggccagagcgagcagcccccaagccacaaaacggggaaggaaaagaagaaaaccgcccaaa

SEQ ID NO: 63404 - RNA, 89 nt, Homo sapiens
caccgaccacgggccgacggaccccacacagccaggcccacgcacccaggccggggcccaacaagggccacaaaggaccaagaacggag

SEQ ID NO: 63405 - RNA, 61 nt, Homo sapiens
aaagcggaacaagcacacgccaccacacccggcgaggaaccgggcaaccagcagagaccgc

SEQ ID NO: 63406 - RNA, 75 nt, Homo sapiens
cgccagcaccaccgcccaaccccaggcaagacacgaagacgccaccggagagagaaaagcaaccgaaggggaaaa

SEQ ID NO: 63407 - RNA, 81 nt, Homo sapiens
ggacacgggagcaagaggcgaccgggcaggcaaacaaaccaggggagggaaacgagaaaaacgacgccagcggcggcaagc

SEQ ID NO: 63408 - RNA, 84 nt, Homo sapiens
cgggacggccacgccccgggcccgggcccagagcgcgggccacacgcgggaagagagggagaaccgaagaacaggaggccagca

SEQ ID NO: 63409 - RNA, 81 nt, Homo sapiens
aggaaacaccagagggccaggccagaagagccgaccacaaggggaggacaaccgcccgggaccaggaaggagccaacgcgc

SEQ ID NO: 63410 - RNA, 74 nt, Homo sapiens
ggcaggaaacagaagaaggccagcgaggaagcgaggggcacagaggcaggcacaaaaccacaagcgacaacaga

SEQ ID NO: 63411 - RNA, 79 nt, Homo sapiens
ccagagagcgcggcgggagcgaggccgccgcgcaagaaagaccaaaggacaagaacacacgcagcagaacacccggcag

SEQ ID NO: 63412 - RNA, 82 nt, Homo sapiens
ggagacggccaccgccggccgggccagacaacaagcccggcccggaagagaaggaaggcccagcgcccaccagggcccgaca

SEQ ID NO: 63413 - RNA, 70 nt, Homo sapiens
cgggagccagaccggcaccgaagacccacaacagaagggcaaagacagcccaagacagcagcccgacgca

SEQ ID NO: 63414 - RNA, 79 nt, Homo sapiens
caaggaggcgcggagagcgcaaacgccccgacaagggaccgggcgggccccgcaggaaacccccaccggcccacacaga

SEQ ID NO: 63415 - RNA, 79 nt, Homo sapiens
gcacgaaaccggcaagccagcggaggggagccaggggcggacccaggcaacgggccgggacgaaggcacggacaacccc

SEQ ID NO: 63416 - RNA, 78 nt, Homo sapiens
gagcgacccggaaacgagaagcagaagaagaagccaaaagcgagaggagacggagaaaacgacaaaccaagagcagga

SEQ ID NO: 63417 - RNA, 82 nt, Homo sapiens
cagaaaagggaccaaccggccacccaggaaagaaccgaggggcgaagccggggaagcccaaagcagaagggcgagcagagac

SEQ ID NO: 63418 - RNA, 67 nt, Homo sapiens
cgccgagaggaaggacacaaggcaagaagcagacaaggcgccaagcccacgggcgcaccaacggaga

SEQ ID NO: 63419 - RNA, 81 nt, Homo sapiens
acagggaaggcacacagcagacaagcagaccggaagaccgacggaagaccacaccccgagggagcccaggacaccacgaga

SEQ ID NO: 63420 - RNA, 83 nt, Homo sapiens
accgaagaacagcgggaaagaaggcaaaacacgggggaccaaaagaacccagccaacccgcagagggaggggaggggcgagcg

SEQ ID NO: 63421 - RNA, 49 nt, Homo sapiens
caaggaccgggggacgccgggcgcccagaaacgagacgacgggaccgaa

SEQ ID NO: 63422 - RNA, 53 nt, Homo sapiens
ggacagcgcacacagcaagcacgagaaagccacaggacagggagaaaagaagg

SEQ ID NO: 63423 - RNA, 71 nt, Homo sapiens
ggaggcccgggacaggagcaaggaagaggcagcagcggagcccagcagggcacggcccacagcccaacaag

SEQ ID NO: 63424 - RNA, 60 nt, Homo sapiens
accaaaagccaacagcaacacccaggcaggcgagaacgaaaccaagaggcaaagagagaa

SEQ ID NO: 63425 - RNA, 86 nt, Homo sapiens
gaaagaccgcccaggagagaaaggccggcggaaagccccaagcggcagagaaaaccgaaggagcaagagcggcggccacaaaaccc

SEQ ID NO: 63426 - RNA, 77 nt, Homo sapiens
agagaacaaaaaacaccacagacacgcacaggagaagggcccggagaagacacgagaccagaagccaagaaacgagg

SEQ ID NO: 63427 - RNA, 75 nt, Homo sapiens
aggcaccgaagaggaaaggaagcagggggaagccgggggaaaggaagcagaaaggaagacgagcaggagacgaaa

SEQ ID NO: 63428 - RNA, 58 nt, Homo sapiens
gacacggggggccaagggaccacacgagacacacacgcggaccagacaccgagcgccg

SEQ ID NO: 63429 - RNA, 53 nt, Homo sapiens
gccaccgacaggcccgacagccggaagggggaccaacaggaggaacgggccag

SEQ ID NO: 63430 - RNA, 79 nt, Homo sapiens
ggaccgcaccccgaagcacccagggcgaaaaacacgaccagaaacgaaggaggcccaaccacaaaaggagccgacggaa

SEQ ID NO: 63431 - RNA, 78 nt, Homo sapiens
gaagagcgacaagccgcggcagccgcggaccaccgccgccaggggcaagacggacgagacgcgcgggcagaggcagaa

SEQ ID NO: 63432 - RNA, 87 nt, Homo sapiens
cgcggacggacacggagaccgggcggagccggacgagcgcgggcagcagcacagggccaggaaaaagaaaaaccacagcaaccgagg

SEQ ID NO: 63433 - RNA, 85 nt, Homo sapiens
ccagcccgaagaaaagggaaaacgcgcgggccaagcaacaggccaacgcccggccagcgccacgcgagcgcgcaagggcggcgcg

SEQ ID NO: 63434 - RNA, 85 nt, Homo sapiens
ccacgccgcccgaagccgaagaagccacgcaccgccgggccgggcgggccgggacacaggacaaggagccaccggagaggaagcg

SEQ ID NO: 63435 - RNA, 75 nt, Homo sapiens
aacaccaggcgcggcggcccagccccgacacagagccggggagcccgggaccagggccagggacgcccgcgaccc

SEQ ID NO: 63436 - RNA, 81 nt, Homo sapiens
acgcaggccagcaaccccagccaagcaagaacagacacggaacacgggaaggagaggcgggcgggagaacgaggggccagg

SEQ ID NO: 63437 - RNA, 73 nt, Homo sapiens
acggacaagaaagcgccaaaaacaacaccaaaaagccgcaggggagaaacccaaaccaagcagcagcgcagag

SEQ ID NO: 63438 - RNA, 80 nt, Homo sapiens
ggcgacagccggaaaaggagcaccccaggcgagcagcaggcacaccgcagcaagggggaggaacaggagcaccacgagag

SEQ ID NO: 63439 - RNA, 65 nt, Homo sapiens
cagagaccaaggcgcgcccggcgggccggaccaagaacgccaacggcaagaaagggaaggccgca

SEQ ID NO: 63440 - RNA, 78 nt, Homo sapiens
gaaccagcaaccagagaacaacagaaaaccaaaaaccacgggcgggagcaaccgaaggaggccacggagaagaggaca

SEQ ID NO: 63441 - RNA, 66 nt, Homo sapiens
gaccgacaagaagagcagacgggaaaagaacacaagggagcagacagaccagcgcggccgaagaag

SEQ ID NO: 63442 - RNA, 83 nt, Homo sapiens
gaggacggagcgcgcggggccggaggcgggcgaggaagagccacgaccaggcggaagcagggcggacccagccacgcaacccc

SEQ ID NO: 63443 - RNA, 73 nt, Homo sapiens
cccaagaaccggggagcgacagaagacaaacagcaaggggcaaaggcggaggcaagggcgaccggccacgcaa

SEQ ID NO: 63444 - RNA, 89 nt, Homo sapiens
caggcgccgccgccggacgcggcaacggagaagcggcagagaggcgagacacggaacggcgaagaagcgcacgggcccggcgccaccac

SEQ ID NO: 63445 - RNA, 36 nt, Homo sapiens
gggggcagggggcccgggacaggaaagacgagaagg

SEQ ID NO: 63446 - RNA, 48 nt, Homo sapiens
acccaggacccagaacacaacacgagagggcaggcagaagggcacgga

SEQ ID NO: 63447 - RNA, 88 nt, Homo sapiens
ccggcgacggacgcggcgcgcgaccgacacgaagagaagcaccaaggcacaggggcggcacagcagagccggggcacgaggagggagc

SEQ ID NO: 63448 - RNA, 77 nt, Homo sapiens
accaccaagccgggccgcgagcgcgaggggcaggcaagcaaagacagaagcccgggggcaaaacacgggagaaaagg

SEQ ID NO: 63449 - RNA, 68 nt, Homo sapiens
accgacagcgacgacaggccgaggaagcaccacagcaggagaaaaggaagaaaggcgcaaaagcaaag

SEQ ID NO: 63450 - RNA, 74 nt, Homo sapiens
agaaggacgcccacgagcaaccaagagaggcagcacggcaggagacgaggagaggacagcaggacacccggacc

SEQ ID NO: 63451 - RNA, 78 nt, Homo sapiens
ccaccacggccacagccgccgcagacccagcagccaagagggaagcagacgagagcaagggaggagaacagaagaccg

SEQ ID NO: 63452 - RNA, 72 nt, Homo sapiens
caaaacacaggaaccaagcgcagaaaaagccggacacgaccaagaaaggcgaagagagaggaagacgcccag

SEQ ID NO: 63453 - RNA, 81 nt, Homo sapiens
acacagagccaagcgccaaacaggaaagggggaggaaaaggggcagacagacagacaagacaaaggcccggcgggacacca

SEQ ID NO: 63454 - RNA, 71 nt, Homo sapiens
gccaaacggggggcacacacagcgcccaagccgccagaagcccgggagccagcggaccagaggaaagccca

SEQ ID NO: 63455 - RNA, 85 nt, Homo sapiens
acagagcggcgggacagcccaagggccagcaccgcgcccaggcagagccagaccaggagcaagaggggggggcccccccgaagaa

SEQ ID NO: 63456 - RNA, 74 nt, Homo sapiens
gcccgcgcggcgcggggaccgcggcccgggcccggccacaggaggggcgccaggccgggccccccgccccgggc

SEQ ID NO: 63457 - RNA, 61 nt, Homo sapiens
gaggccgaccaaaaccgggaccagggcagcagacgcaaggaggccagagcacccagcaccg

SEQ ID NO: 63458 - RNA, 81 nt, Homo sapiens
ccacccaccccaaaagcggaaagaccacagcaagaccacgcccccagccgggggaccaggccgaacgacccggacacaaag

SEQ ID NO: 63459 - RNA, 80 nt, Homo sapiens
gagcaggcgagcgaacgacggaacccagccccaggggagcgaagcgacggccccccaaacacaagcaccaaagaaccaga

SEQ ID NO: 63460 - RNA, 77 nt, Homo sapiens
gcgaaacgcagcaagaaaggagaaccgagcgaaagaggcgacgaaagcagagaggaagaagacacggaccgacggac

SEQ ID NO: 63461 - RNA, 89 nt, Homo sapiens
aaggaggagcaccaggccgagacgccccacagcagagcacaggagggaaggagaggcgcggggaaagacgagacaaacggggggggagc

SEQ ID NO: 63462 - RNA, 68 nt, Homo sapiens
ccgcccgcccacccagggccggaaaagccaacgccggcgaaggcccaccgaggggaaaaccaccagcc

SEQ ID NO: 63463 - RNA, 93 nt, Homo sapiens
cgacccgcgagaacgggaagcgagccaggaggcccgagggagagccacccgcccaagggcgagggacaggccgagcggagcccaaccagacgg

SEQ ID NO: 63464 - RNA, 64 nt, Homo sapiens
aaccaccaccaaagaggcgagcagagaagagggccggagcgagggagagcaggaacacagagag

SEQ ID NO: 63465 - RNA, 70 nt, Homo sapiens
agagcagcaaaggaagagaggaacgcagacccccaaaggagacagaccccacagagaaacacgagcacaa

SEQ ID NO: 63466 - RNA, 83 nt, Homo sapiens
aggcaccgggacggaccgagaccggaccgagagcggaccgagagcgcgaaacgcacgagaaggagccaaagaagaccagaaag

SEQ ID NO: 63467 - RNA, 37 nt, Homo sapiens
gagaaggaacagaccccggaggaggggaaagaaaagg

SEQ ID NO: 63468 - RNA, 77 nt, Homo sapiens
gagaaaacagggagcagagaggcacccagcggccacacccgccacccacaggaccagaacaggagggccaaccgggg

SEQ ID NO: 63469 - RNA, 60 nt, Homo sapiens
caagaaacaagagccaacaagcacgaaggcagagccagaaggagagccaagcgccagaga

SEQ ID NO: 63470 - RNA, 39 nt, Homo sapiens
caacaccagaacaaaaggcagaaagcgaaccgcacaagg

SEQ ID NO: 63471 - RNA, 74 nt, Homo sapiens
agaaacaccaacacaaaaaaaaccaacagccccccagcacagcaggaacgagcaaggcagacaaaagagagacg

SEQ ID NO: 63472 - RNA, 40 nt, Homo sapiens
gcggggacggcgacccaggagagacgggccaccagagaac

SEQ ID NO: 63473 - RNA, 41 nt, Homo sapiens
ggacacgccacgggaagcggggaaacaaagcccagccgcag

SEQ ID NO: 63474 - RNA, 113 nt, Homo sapiens
cagaccaaagacaaggacaaccagcgacaaccacggccccgaaaaaacaaacagcagcagaacgagagcccagacagagaaagcagacacgaacaagccgagcgaccacccag

SEQ ID NO: 63475 - RNA, 81 nt, Homo sapiens
agagagaggggacagacgagagaacgagggacccaaccagagccggccgggagccaggaggccaccacaaagccgggaggc

SEQ ID NO: 63476 - RNA, 86 nt, Homo sapiens
cggcccgaggaggcagaaggaccgagccgacgcgggccgcgcggagagaacccgaagccccagaggagggcaccgccgagggcacc

SEQ ID NO: 63477 - RNA, 77 nt, Homo sapiens
gcggagcccacaagggagagggcagagcggcgggaaaccaccaacaacacccccaaaccaaaacagccggaagcggg

SEQ ID NO: 63478 - RNA, 86 nt, Homo sapiens
cggcccggcggcgaggaaagcaggaggaggggcggcggcgggaagaaccacaggagcagcaacccagccccggaaccacgccaggg

SEQ ID NO: 63479 - RNA, 79 nt, Homo sapiens
cggggaaccagcaaacaaggacaagacgacagaaaccgccgaaagagagaaggaaagacgcaaccaggaagcccaccaa

SEQ ID NO: 63480 - RNA, 77 nt, Homo sapiens
cgcagccccagcccacaggaaaggcgacagcgaggacaacgaagaaaggagcacaaaagaacaaacacacgagccaa

SEQ ID NO: 63481 - RNA, 41 nt, Homo sapiens
cggaaccacccaccgagggaccagcggcagcggagagccgc

SEQ ID NO: 63482 - RNA, 109 nt, Homo sapiens
cgagagccgcccgggccagcggccgcgcacccccggccggaggcaccagcgcaaaagcagaccggaaaacccaccggcaagaccacacccgaggggagcccaggacacc

SEQ ID NO: 63483 - RNA, 62 nt, Homo sapiens
caagaaaccacagcaacagaacagaggaggggacacaaaggaagaggcagccagacagcacc

SEQ ID NO: 63484 - RNA, 72 nt, Homo sapiens
ggaggaaaccaagacagcccaaacgccccacgaccaggaggcagcacggcaggagacgaggagaggacagca

SEQ ID NO: 63485 - RNA, 85 nt, Homo sapiens
gaggaggcccagaaacgccggagcgcacgagagacaagaggaaaaagcgaagagcgagaagcaccgggcagcaaacgcacgaacc

SEQ ID NO: 63486 - RNA, 71 nt, Homo sapiens
gccaggccgccgccgagccgagaaaaaccagacaccaaaggaagcaggaaaagccgaacaaacgagcccgc

SEQ ID NO: 63487 - RNA, 57 nt, Homo sapiens
agcgagacccgccaggagcaaagcggacaggccacacgcaccaggcagcaaaaaccg

SEQ ID NO: 63488 - RNA, 75 nt, Homo sapiens
accccacaccagaacccagcggacaccagaaagacggaaccaggaagagagacgacgggcaacagacaggacaaa

SEQ ID NO: 63489 - RNA, 66 nt, Homo sapiens
gcgagggcaggacgagaggagcaccgaggcccagagcaagagaggcacccacccgaagaccccacg

SEQ ID NO: 63490 - RNA, 67 nt, Homo sapiens
cggagcccgcggccgggcccgcgaccagaggggaacaggccgagagcagccagaagacaaagagggg

SEQ ID NO: 63491 - RNA, 76 nt, Homo sapiens
ccgggggaggaaggcacaaccaaaagacaacacccaacagcgacccaagaaggagaagccccgcagccggagcagg

SEQ ID NO: 63492 - RNA, 76 nt, Homo sapiens
ccgccccggcggcggccggcgggaccaaagggcaaccaaaaaccccccccaaaaaaacaaggaccgggagagggga

SEQ ID NO: 63493 - RNA, 74 nt, Homo sapiens
gccaaggcagaagaaacggagaagggcaaaggacaaaccggcgaccacacacggggacgacggggaagccggac

SEQ ID NO: 63494 - RNA, 110 nt, Homo sapiens
cagaccccaagagagcacggaccgcaagaaagaagaggcgaaccaagagaaggggaaaagccgcggaaacccacaggaagccgaaaaagcagggcagcacggaggggcaa

SEQ ID NO: 63495 - RNA, 78 nt, Homo sapiens
cggagaagggcagggcgagcgcccccgccagggccgaccaggagcgagggaggagacaggcgccaagcagagaagagc

SEQ ID NO: 63496 - RNA, 79 nt, Homo sapiens
agccggacggacgaaccgcccgcaggcccgcgcagcccaaagcaacaccaacacaaggggcaaacacgaaaagagacaa

SEQ ID NO: 63497 - RNA, 78 nt, Homo sapiens
caggccggggagcgccaggcacggagcgcggacgcccaggagcgggcgccggcggagcgccgcccccagggccccggg

SEQ ID NO: 63498 - RNA, 62 nt, Homo sapiens
ccgagacagagggagaccagcagcggcggacagaaccgggggaaacacaaccgccccgggag

SEQ ID NO: 63499 - RNA, 78 nt, Homo sapiens
gacacaacacgaggggcgccgcgggacgcagaggagaggagccaagggacggaccgcaaggacccagacccgcagcac

SEQ ID NO: 63500 - RNA, 81 nt, Homo sapiens
cagccaaacagcaggaccagaacccgcgaaagagggaagcggcaaaccaaaagagcaacggagaagagaaaccgacccaca

SEQ ID NO: 63501 - RNA, 73 nt, Homo sapiens
gaaaacgagagggcaacggcaacaaacagaagaagaagcaaccaagggccaaaagagaaacaggcacgacaac

SEQ ID NO: 63502 - RNA, 77 nt, Homo sapiens
gaaggcagcgcacgacagcaaaaggcagaggggcgggcaaaggagaggcacaggaagcagaggcaagaaacgaaggc

SEQ ID NO: 63503 - RNA, 80 nt, Homo sapiens
agggcgccccccgccagaagccgaggaaagcggaagcggccggcaggggaaggacgaggcacccaaaggccccacgggac

SEQ ID NO: 63504 - RNA, 94 nt, Homo sapiens
aaaaggcagaccaccaaggcaccaaggaaaggaacagccaaggagaccgggagagagacgaaggacgcgcaggggcagcagacacggaaacgaa

SEQ ID NO: 63505 - RNA, 71 nt, Homo sapiens
aacccacagacgcccagaggacaaaaggggccgggcaccacaaggcgaaggggcgccgaaccgagcccgaa

SEQ ID NO: 63506 - RNA, 84 nt, Homo sapiens
agagcgcccgcgcgcacgacgcgacccggggcccaggagcccccgccacgcccggggaagggacccagggccggcacgggcagc

SEQ ID NO: 63507 - RNA, 79 nt, Homo sapiens
aaaggggaagggcacgacccagggaggaaggcgcaggagcccggccaccacacccagccgggcggaggcagggcacgac

SEQ ID NO: 63508 - RNA, 41 nt, Homo sapiens
caagagaccagagcccaaggccgcggcccacgcgcccaccc

SEQ ID NO: 63509 - RNA, 93 nt, Homo sapiens
ggagcacccaggcgcgaccgaggccccccgaaccccaaggccaacagagagaagagaccagggagaagccggagacccagggcccccggacac

SEQ ID NO: 63510 - RNA, 76 nt, Homo sapiens
ggagagcggcagagaaccgcgaagggagcggccccgagacgcgccggcgcggaagcgcacaccacaacagcacagg

SEQ ID NO: 63511 - RNA, 66 nt, Homo sapiens
cacacagcacacaaaaagggcagagaaagcaagagacgcaaccgaacgcagagcggagaacggcgg

SEQ ID NO: 63512 - RNA, 82 nt, Homo sapiens
aacaaccgggcgccgacgagacgggcgagaaccacgccgacaacggcggaagaggaacgggaacggggaagaagagcggcgc

SEQ ID NO: 63513 - RNA, 88 nt, Homo sapiens
ccaaaggagagaaagcaccgacagcacaaccgccggaaacaggaggaggagcaaccgaaagaacgacaagcagaaaagaagcacccag

SEQ ID NO: 63514 - RNA, 56 nt, Homo sapiens
gcagaaggccggagacaccagcagcaccagccaggaagcaccgcccacccggcaag

SEQ ID NO: 63515 - RNA, 74 nt, Homo sapiens
agagaaaggcacagcgaacgccagccagaagaagccacacccgaaaaaaacgcccaagagcccaagcaaggcca

SEQ ID NO: 63516 - RNA, 76 nt, Homo sapiens
ccagggggcccagccagcacggcgggcaagcagccaagcccagccaaggccccccccaccaaagggcagaagagca

SEQ ID NO: 63517 - RNA, 78 nt, Homo sapiens
cacgacccaggccaaccccggggcacgcgcccacaggcacagcacccaagaaaacccaggccgcgaaggagaagaccg

SEQ ID NO: 63518 - RNA, 85 nt, Homo sapiens
gagagccgagcagccccggccgggcacggacagggcgaaagccgaccacccggcgaaggacagaagagcagaagacagagaagga

SEQ ID NO: 63519 - RNA, 75 nt, Homo sapiens
cgagcagccccagcccacgcacggaccggggacagaagaacaaggaaaaaaagcaaagaagaggaagaggaacaa

SEQ ID NO: 63520 - RNA, 75 nt, Homo sapiens
acacccaccccgggaggccagccacccaaagccccaaggagaagaacggagacgacagcgaacccacccaacacg

SEQ ID NO: 63521 - RNA, 70 nt, Homo sapiens
caaggccaaggacccccgccaccgcccaagaggacgcagcaaccaggaaccccggcagcaagacgcccgg

SEQ ID NO: 63522 - RNA, 74 nt, Homo sapiens
gcgggccaagcgccggcgcggcgcggcgcggccaaggcggccccgggggcgccgagggcacaagggcaacgaca

SEQ ID NO: 63523 - RNA, 63 nt, Homo sapiens
cacgcgcggaaggcagcgcccagcagcgcagggcagaacccgacaacgacaaccagagagccc

SEQ ID NO: 63524 - RNA, 72 nt, Homo sapiens
cagcacgccggacggaccaggccccaaggcccgccgcacacccggagagagaggggaggaccaccgcacaga

SEQ ID NO: 63525 - RNA, 55 nt, Homo sapiens
cccgaaccgcgggagaggggaagagacaagaccagaggcaggaagagggcgacag

SEQ ID NO: 63526 - RNA, 85 nt, Homo sapiens
gaaaagcgcagcgagcggagccgccggagggcaccaagggcaggagaagggccagaccggagccgcaaagcagggggcacggggc

SEQ ID NO: 63527 - RNA, 72 nt, Homo sapiens
acacaagcccaggaacgggagaacgcgcaacacccacccaggccagacaggccgacaagggaggcgaggacg

SEQ ID NO: 63528 - RNA, 79 nt, Homo sapiens
gagcaaaccaaacagaagcccagacggcacaccaggacggagaacacaaggaacgaaaggaagggaagaagcagaacca

SEQ ID NO: 63529 - RNA, 46 nt, Homo sapiens
gcgccagccagaaaagagcagcaggcgcaaaaacgaacccacaacc

SEQ ID NO: 63530 - RNA, 58 nt, Homo sapiens
cagaaaggcaaggcgaccgaagcacgggaggagcagccccagagcgcacaccagggaa

SEQ ID NO: 63531 - RNA, 39 nt, Homo sapiens
cagggcccaccgcgaccgggggggccacgggccccgacc

SEQ ID NO: 63532 - RNA, 65 nt, Homo sapiens
cgggaggaaaccaggacgcagagggagcagccaaggacccaggagggggcacgggaggaccaggc

SEQ ID NO: 63533 - RNA, 79 nt, Homo sapiens
gaagcggagaaacggcaagaagaggacagagcgggagccaccagcgccaaagggaagccaggagcccgggggcacgggg

SEQ ID NO: 63534 - RNA, 58 nt, Homo sapiens
acgggccgggagcgggacggaagaacagccagggccccgaaggagcacccaacccacg

SEQ ID NO: 63535 - RNA, 61 nt, Homo sapiens
gggaggcgggagaaggcgcaacgcggcgcgaacaaaacaggaagcggaaaacagaaccaca

SEQ ID NO: 63536 - RNA, 62 nt, Homo sapiens
gaggaggaacgcacccgcccagcgacccgccgccgggaaccccaagagcaccaaagaagcgg

SEQ ID NO: 63537 - RNA, 59 nt, Homo sapiens
gccgcagccaagagcaacaggaaagaacacagcaggaagaaaaaagcgggcacgggcag

SEQ ID NO: 63538 - RNA, 61 nt, Homo sapiens
gaagcaggcgacgcaggagaggaggaagggaaggaagacaagaaccagcagagagaccaaa

SEQ ID NO: 63539 - RNA, 81 nt, Homo sapiens
cacagccgggaaggggagccaccagcccccgagccgagagcgccggaggaccacacccggccacagccgcaggaacaagag

SEQ ID NO: 63540 - RNA, 41 nt, Homo sapiens
aagcagccaaagacaccggccaggaagagagaaggccacgc

SEQ ID NO: 63541 - RNA, 81 nt, Homo sapiens
ccgccgccgccgcgggcgccagaaggaagaggcggacggaggagcaggcgagaagagaaggaccaaagggaggggaaacaa

SEQ ID NO: 63542 - RNA, 83 nt, Homo sapiens
agaacagacagccacgcagacggaaacaaggcaacagaaagagcaacagcagggcaacagggcaccggacgagacggaaccgc

SEQ ID NO: 63543 - RNA, 85 nt, Homo sapiens
ccccgccgcccaacccccaagcacgaacccaggagccgggcagccgcgacacagcagcaggggcgcagagcagcgaagacacaac

SEQ ID NO: 63544 - RNA, 82 nt, Homo sapiens
aacagacccaggaaagaggggagaacgcagaccgcgcgagaccaaacaagcacagcgccaggaggaccgccaagaagaagag

SEQ ID NO: 63545 - RNA, 43 nt, Homo sapiens
gacacacgggccgcaaaaaggcagagggggcgagggaggaaag

SEQ ID NO: 63546 - RNA, 72 nt, Homo sapiens
agcggaccagaaggaccgcagggccagggcgcagacgccggaacggaaaacagccccaaagcagcagaccga

SEQ ID NO: 63547 - RNA, 78 nt, Homo sapiens
ggcacggcgaaccacgcgaggggcgggagccgcgcacaccaccacacaaacagcaccaggggcgcacggcccacagaa

SEQ ID NO: 63548 - RNA, 77 nt, Homo sapiens
acaaccacgaccacaaaccggcggagccacaggagacacgagcccacccgagaccacgccggacccgccccgccaca

SEQ ID NO: 63549 - RNA, 84 nt, Homo sapiens
ccgcccgggggcgccgcccaccgcgcccgccgagaggcgagggagccgaccacagcgaagcagaaggccccccggaggagggga

SEQ ID NO: 63550 - RNA, 85 nt, Homo sapiens
cgaaggcccacaggacaggagagaaagacgcggagccccgcagaggggggaccacaggccacccaccgggggccccaagcaggac

SEQ ID NO: 63551 - RNA, 74 nt, Homo sapiens
ggacaccaaaaaacacagagagcaacacgagcgcaaaggcgggacaacacaagggaaccaaggagggcgccgcg

SEQ ID NO: 63552 - RNA, 79 nt, Homo sapiens
ggagaaaacagcaggcacccaagcgggcggcaggggcgaagaagaaccggacaggggcccaccggaaccgggaaacccg

SEQ ID NO: 63553 - RNA, 78 nt, Homo sapiens
ccagccagcggacgagggcaaggcgcacaccgagacgcagaaaacagacacacagcggagacaagcagggccggcagg

SEQ ID NO: 63554 - RNA, 78 nt, Homo sapiens
gcggccccggcacgcaccacggccacccggccggccgaggccagcaggagacccaaaaaaaagccgaagcaacaacac

SEQ ID NO: 63555 - RNA, 85 nt, Homo sapiens
ccgcgcgcgccagcaagaagaccgcgcccgagcccagccacgaaccgacggggaccccaagaggaaggaaccggagacgcagcca

SEQ ID NO: 63556 - RNA, 46 nt, Homo sapiens
cacagcccgccgaacccgaaaggaggcacggaaacagaagagacaa

SEQ ID NO: 63557 - RNA, 65 nt, Homo sapiens
cgcaaagccagcgacccaaaggggccgcagagagaaacacggaaacagcccggggggaccgggaa

SEQ ID NO: 63558 - RNA, 60 nt, Homo sapiens
aggaaaggggacacaggcaaagccagaagaaaccagagcgccgagcagaaagacgaaacc

SEQ ID NO: 63559 - RNA, 72 nt, Homo sapiens
aaggaagccagaaacagaaaaacagggagggcagcccagggacccgaaggacagaagacaggagccgacgca

SEQ ID NO: 63560 - RNA, 70 nt, Homo sapiens
agagcgagaagcacgagaaagacgaacggagaaggaaggccgcaagcaagaggcagaccgacacaggaga

SEQ ID NO: 63561 - RNA, 82 nt, Homo sapiens
agcggacgacggcgggcgccgcgccgaggcaccaccgggcgccgagccggcggccgcacggccaaggaaaagaaggaaacaa

SEQ ID NO: 63562 - RNA, 68 nt, Homo sapiens
cgggccccaacacccagagacgaaaggacgaaaccccgacccccgagacacgcgcaagacgaggcgcc

SEQ ID NO: 63563 - RNA, 73 nt, Homo sapiens
gagccccgaccccaggccccccacagaaaaggaaagggacagagcagaagggcgaaagaccgggccgcagaag

SEQ ID NO: 63564 - RNA, 57 nt, Homo sapiens
ccgggcaccacagaaaagggacaaagaggaggacaagaacccacccgcgcccaaccg

SEQ ID NO: 63565 - RNA, 78 nt, Homo sapiens
cgccaaggacgggccaccaccccaagagagaaaaggaacagccgaagccaggggcaagcgaaaccacagaagaaagga

SEQ ID NO: 63566 - RNA, 69 nt, Homo sapiens
caagccgaaagaaagaagagaaacccacgggaggagagaaagaacccacgcaggacgacagaagaggcc

SEQ ID NO: 63567 - RNA, 68 nt, Homo sapiens
acaggggccagggaaaggagcagagagagagagcagaaggaccccacgccccgaagccacccacaaaa

SEQ ID NO: 63568 - RNA, 77 nt, Homo sapiens
gcagaggcggagcccgcagaccgcagaaggccggagacaccagcaggcacagcaaggccacggacagacaacgaagg

SEQ ID NO: 63569 - RNA, 40 nt, Homo sapiens
acagcacagccggcgacggcgcggacccaaagaaagggaa

SEQ ID NO: 63570 - RNA, 77 nt, Homo sapiens
acaccccgaccggaaacaaccgccagggccgggaacaagcgaggaagaagaagcgcacaaggagcacaacagggagc

SEQ ID NO: 63571 - RNA, 79 nt, Homo sapiens
gggagacccacggacaccaaggagaagcaagacaccacccaccaggaagacaaggcgagggaaaccaacacaagacggc

SEQ ID NO: 63572 - RNA, 84 nt, Homo sapiens
caggcgaaccgggcaaggggaaaggggggccggcgcagacggccaaaggacgggacaaagaaggaaggcagagcccacaaaccc

SEQ ID NO: 63573 - RNA, 76 nt, Homo sapiens
gggggagcggcgcggcagagcgggcaggagaggccggcgccgccgaccgggagccgccagggagaaaagacgagga

SEQ ID NO: 63574 - RNA, 73 nt, Homo sapiens
ggcagagagcaaagaacccccaagcaggaaggggaagaaagaaagacagagaagacagcaagacacaagcaag

SEQ ID NO: 63575 - RNA, 81 nt, Homo sapiens
ggggaaaaaagaccacgaggagcagggcaggaaggagggccccggagcagccacaccaccgaggccccacccagcacgagc

SEQ ID NO: 63576 - RNA, 55 nt, Homo sapiens
aggaacggggcaacgcgagcagaacagcccagccgagaaagacagcaaagaaaag

SEQ ID NO: 63577 - RNA, 72 nt, Homo sapiens
acaaagcacgcagaggagacaggaaaaggccaaaggagcgaaaagacaagcggcagggaaacagcacacggg

SEQ ID NO: 63578 - RNA, 37 nt, Homo sapiens
caccacaccacccacccggcgcccgggcagccagaag

SEQ ID NO: 63579 - RNA, 72 nt, Homo sapiens
gaacaggaaacaaaacgggagagagcagaacaacagacagcgccagcaacaccaggcggaggcacggcagac

SEQ ID NO: 63580 - RNA, 70 nt, Homo sapiens
cggggccgcgcgcccacccaacccgagagaagaggaacggacaacccagggaccgcgcacgaccaccaga

SEQ ID NO: 63581 - RNA, 76 nt, Homo sapiens
ggaccaagacacccgcgagagagccaaggaccgaaaagacgcggccccaaaggaaacacccgaagaacacagcgcc

SEQ ID NO: 63582 - RNA, 70 nt, Homo sapiens
gagggccacgagcgcgaaagggcgggaaaggcagggagaagaggaagcggaagggacagccaagcccgaa

SEQ ID NO: 63583 - RNA, 78 nt, Homo sapiens
ccgcccagcgaaaacaggggaggaacgagccggggccggacgagaaagccgaaggagacgacggaggagaccggcaga

SEQ ID NO: 63584 - RNA, 77 nt, Homo sapiens
aggcccccacgccaggcgagcagaaaaaggcagccgagcagaacgaagagggaagaacagcggcaggggacagagcc

SEQ ID NO: 63585 - RNA, 70 nt, Homo sapiens
acggaccccaccaccaggcagagaagcagaccaaagccagcccaccgggaggagaagaaagaagaggaag

SEQ ID NO: 63586 - RNA, 70 nt, Homo sapiens
cagacggggcagagacgcaaggaagacggcgcagaagcaaaagagaggaagcagcggcccggaacgcaca

SEQ ID NO: 63587 - RNA, 81 nt, Homo sapiens
aaaaggcggacgggaaggcgggagacgagaagccgaaaagcgcagcgagcggagccgccggagaggagcaccggcccaggc

SEQ ID NO: 63588 - RNA, 78 nt, Homo sapiens
ggagacccaggcgggacagagggagccaggcagaggcacacagagaaaaaaagggaacaaaacacagcaagcagacaa

SEQ ID NO: 63589 - RNA, 56 nt, Homo sapiens
cccgaacagagccagaagccgaggccgccagcgccaagaaaaaaacaaggccaaag

SEQ ID NO: 63590 - RNA, 84 nt, Homo sapiens
aaccggccccagacacgccccggaaacgaagaccagccgacagcgaccaaggccagagcgaaaggccacggccagccgccggca

SEQ ID NO: 63591 - RNA, 83 nt, Homo sapiens
ccagccccgagagcgggacacagcccccccgccggacggaagcccgggcaaaggaggcggcacccagcgccccccgggaggcg

SEQ ID NO: 63592 - RNA, 89 nt, Homo sapiens
aagcagggaaggaggccgagccgggaccaggcccgggggcggcggccacgccaaggacggggaagaggaagaacgcgagaaaaaaacga

SEQ ID NO: 63593 - RNA, 85 nt, Homo sapiens
ggcgccgcgggcccgcgcccggccggacccgggcccgaggacccgagcggggaccgagaaagacccccgaggaaccacgcagagg

SEQ ID NO: 63594 - RNA, 54 nt, Homo sapiens
gcagccgacgccacacaccccagaacagggcgaaaagagagggcggggacacag

SEQ ID NO: 63595 - RNA, 83 nt, Homo sapiens
agacaagaggcagccaggcagaccacagggcccgcgacccaaaaggcccagaccacaacagggaacacacggagaagaaaaac

SEQ ID NO: 63596 - RNA, 73 nt, Homo sapiens
agcagagccagcgcacgcaggggaccagggcgcgacccgcggagcccaggaggccgaggcggacagcccacga

SEQ ID NO: 63597 - RNA, 82 nt, Homo sapiens
aggccacccaagaacggcccgccaccggagacaacgagaggaggggcagggaagccgggagggcccaggcaggaacacaagg

SEQ ID NO: 63598 - RNA, 55 nt, Homo sapiens
gaggcagagaggaagagacccacgaggcacacagccggggaaaagaaacaaacaa

SEQ ID NO: 63599 - RNA, 79 nt, Homo sapiens
gcgaccgcaaggaggagcaccgccggaacagccagaccagcaagcagacaccccccccgagggccaccgcgcccaggcg

SEQ ID NO: 63600 - RNA, 73 nt, Homo sapiens
cggagaaccggagcggccaacggcaggaggcagccggaacaggaaaccgcaggcaggccagacacagaagaag

SEQ ID NO: 63601 - RNA, 77 nt, Homo sapiens
caaggccggcgcacagaggcgcagcgggccagcaggacgcagcagagcgcagggagaagaaacgaacggaacgagga

SEQ ID NO: 63602 - RNA, 66 nt, Homo sapiens
aaacacgcaaagaccaccagggaaacccagacgacaaggaaggccaagggacccacgaccaaccaa

SEQ ID NO: 63603 - RNA, 82 nt, Homo sapiens
agaaggaagaggggaaaaggagacaggaagcaccggacccagaacgccccaacccgagaccaccaggcacaaagacggagaa

SEQ ID NO: 63604 - RNA, 86 nt, Homo sapiens
gaaaggaagcaagcagcagaagagccaaggaaaaacagcaagaacccaaaagggccacaggaacgcgccgaaacacgcaccaccac

SEQ ID NO: 63605 - RNA, 73 nt, Homo sapiens
cacacccaggcccggagccaagacgcaacagcgccgaaaagcgaaaagaaacaagccgcggcaacagcgaccc

SEQ ID NO: 63606 - RNA, 74 nt, Homo sapiens
cgccaggagcacagaagagcgaggaggagggagaagaacccagaaaaaaaaaagagaagcacccagagggaagg

SEQ ID NO: 63607 - RNA, 60 nt, Homo sapiens
acggggagcgaacgggacagcccacacccggcgcggaggagaggacggggacgggcccca

SEQ ID NO: 63608 - RNA, 86 nt, Homo sapiens
aacaacgcgagcggcgcgcgggacgaaggaaagagacggcggaggccggcagcagccagaggaagaggcgggccgggcgacggagc

SEQ ID NO: 63609 - RNA, 54 nt, Homo sapiens
ccagacaccaaggacagcccgcaagggcgacaagagaaaaagaaagaaacccca

SEQ ID NO: 63610 - RNA, 74 nt, Homo sapiens
acggccccgcacggggcgcacagaggaggcggacggcagcggaaacgaccaagagacggaccgccccacgacgc

SEQ ID NO: 63611 - RNA, 57 nt, Homo sapiens
gcaccgacccgacgcgccggcccacgcgcggccaagggaaagggagcagcaccggcc

SEQ ID NO: 63612 - RNA, 69 nt, Homo sapiens
aagccaccaccagcccggagccaccgcaagcagggcggccagaaggccagagacaccaaagcgcccacc

SEQ ID NO: 63613 - RNA, 71 nt, Homo sapiens
aaaaacggagagccacaaaaaaggaagcgaaaggcccaggacagaaggcgggcaaggagcgccccccgagc

SEQ ID NO: 63614 - RNA, 46 nt, Homo sapiens
cccagaaggcaacgcgccgcaaaacagaacgcgaccacaggaagag

SEQ ID NO: 63615 - RNA, 75 nt, Homo sapiens
gccaaaggcgaaccggcaaggcagggaaccaaccgggacccaggcaaaacaacaccccccacgggccagaaggcg

SEQ ID NO: 63616 - RNA, 73 nt, Homo sapiens
aacgcggacgccggcgcgcagggaagagaaggaccgccccacacagcccacaagggggccccgcccgagcccc

SEQ ID NO: 63617 - RNA, 101 nt, Homo sapiens
cagccggaagacagagagagaaaagagggacgccaaacacccaaagagggggacagacaacagagcaacgcaacagggcacaagacagggcgaaaggcaga

SEQ ID NO: 63618 - RNA, 72 nt, Homo sapiens
ccaagaaaagcagaaggagacgcaaaaaaggccaggaggaccagaaaacagcagaaagaccagcaagaccag

SEQ ID NO: 63619 - RNA, 70 nt, Homo sapiens
cagcgccgcagcacgcggaccagaagaaaagagacagcccggggacccgagacaccagaagaaaaggaaa

SEQ ID NO: 63620 - RNA, 81 nt, Homo sapiens
cagccgcgggagcagagggcagggcggggccccaaaggagggggccggcagagacgcaacggcggggaccgagccacagca

SEQ ID NO: 63621 - RNA, 76 nt, Homo sapiens
gcgccgcagccagcggaccaaaggacgcaagggagaccggccgagcgagcccccccggaccccggcaacccccggg

SEQ ID NO: 63622 - RNA, 63 nt, Homo sapiens
gaagagaggccgaaacccaagcggccgcgcagacgacaagaagccaaagacgggagagagaag

SEQ ID NO: 63623 - RNA, 70 nt, Homo sapiens
gagaaggaccaagaaccagggacgagagcagacgggagccagcccagcgcacaaccaagccgggggcaca

SEQ ID NO: 63624 - RNA, 106 nt, Homo sapiens
acccgcaggaggacgagcggcgggccgcccaggacacccaggcacagcacccggggagggccagaccgcaacgcccaccggcccgaggacacagcccgccgcggga

SEQ ID NO: 63625 - RNA, 70 nt, Homo sapiens
gagaaacagccccaagaagaaggcccggccaaagaaccgacaaccaagggccccgcggaccaaggaagaa

SEQ ID NO: 63626 - RNA, 73 nt, Homo sapiens
aaccaccaacaacgaggcacccaaaagggcacgagacacgcaccagcgaccacccccgggggacagaggggag

SEQ ID NO: 63627 - RNA, 75 nt, Homo sapiens
gaaacggccgcaggagccagcagaggccaaggcagcagcgaagaagaaagggagcgacagcaaaacaaggacgca

SEQ ID NO: 63628 - RNA, 61 nt, Homo sapiens
cgggacccccaagagcacaggcagaaggcacaaggggagaagcccgagcacaacccggcaa

SEQ ID NO: 63629 - RNA, 79 nt, Homo sapiens
gggccacgggccggcagcagcagagaagagaagcggcagaggggcgggcaaaggagaggcacaggaagcagaggcaaga

SEQ ID NO: 63630 - RNA, 67 nt, Homo sapiens
acaacacagggaagcaggacagagcagcagcaaccgggaagcaggggacggcacgagcgcgaaagac

SEQ ID NO: 63631 - RNA, 76 nt, Homo sapiens
acccaggcaaagcagacccaaaaggcgcgcacagacaaacaagggcaggacccgggggcagacagagacgaccaaa

SEQ ID NO: 63632 - RNA, 75 nt, Homo sapiens
ggcagcagcagcaccaccggacggggcccgggcagagggaaagcagaggacggaacaacccgggggaccgcgggg

SEQ ID NO: 63633 - RNA, 70 nt, Homo sapiens
aaaccccgcgggacgggacaaccagcagaggcccaggccaaggccaccaagcacaaccggggaggccgca

SEQ ID NO: 63634 - RNA, 86 nt, Homo sapiens
agccaggccgacacaagacgggcaccgccaagaacgccagaagcgaccaaccgcgcgcaggaaaaggccgacgcagcagggcccag

SEQ ID NO: 63635 - RNA, 78 nt, Homo sapiens
cgcggggcgggcgggggccgggcgggccaccgcaaggccaacacacgccccggcgccgaccagagagacaggcaccag

SEQ ID NO: 63636 - RNA, 58 nt, Homo sapiens
cgcgaaacgcacgagaaggcaaagaccagcaaggcaccaacagaaaaacaacgccgga

SEQ ID NO: 63637 - RNA, 72 nt, Homo sapiens
acaccgcccgaacacacaccgacggaggaccagcaaacgggaaaggcgaaaccagaaaggcggaaacagaag

SEQ ID NO: 63638 - RNA, 89 nt, Homo sapiens
cagcgcccggcccccgcggcggccggcccccccccagggccaggcgccgccagaacgaaaccccgaaccaaacagagcccaaggagcgg

SEQ ID NO: 63639 - RNA, 69 nt, Homo sapiens
aaaaacccgaccccccaagcaggccacgaacgacgcacggaggccacaacaccacaccacacaagacaa

SEQ ID NO: 63640 - RNA, 41 nt, Homo sapiens
aaacaaagaaagagccaagagccgggaacgacggccccagc

SEQ ID NO: 63641 - RNA, 66 nt, Homo sapiens
gaggccccgcagcgacgacggacagcaaggaaccccgggaaacccagacgacaaggaaggccaagg

SEQ ID NO: 63642 - RNA, 57 nt, Homo sapiens
gccaggggagagcacggggcaggaccggaagaagcaaccccaaaagcccagaaacgg

SEQ ID NO: 63643 - RNA, 64 nt, Homo sapiens
gcacagcccagaagcccgagaggaggaagaggcaaagaacccggccggaaacacacaggaagag

SEQ ID NO: 63644 - RNA, 72 nt, Homo sapiens
ggacagcgcaagagggagggaagagaggccaggaagaaccacccaacacacaacggcccagccaaacaagca

SEQ ID NO: 63645 - RNA, 41 nt, Homo sapiens
gccggagccagccaacgagcgaccccgcggccccgcccgcg

SEQ ID NO: 63646 - RNA, 64 nt, Homo sapiens
gccacagcaaccacgggaagggggcagaaacgggacgggagcgccacggggggaagagagggcg

SEQ ID NO: 63647 - RNA, 79 nt, Homo sapiens
ggaggagcagcgcgcccgcgccagcacacgacaccgagccgccgccgaccgagaggcgggaagcgcgggagaaggggcc

SEQ ID NO: 63648 - RNA, 41 nt, Homo sapiens
gacaagcccgcgggccggcggggcccagcagcccgggagcg

SEQ ID NO: 63649 - RNA, 73 nt, Homo sapiens
gaggaggggcgcccgagaaggggacggcgggcgagggaggggaccgccgcggagaggggcaacggacacagga

SEQ ID NO: 63650 - RNA, 78 nt, Homo sapiens
cgacacgagccagaagacaacggaacagggaggaaagggggacggcggggggagacccagggcggagaaaaaagagga

SEQ ID NO: 63651 - RNA, 75 nt, Homo sapiens
cacccccacaacccagagcaagaagaccgaaagggagaaagaaggccagaaaaaggaaaacccgagaagcgccag

SEQ ID NO: 63652 - RNA, 78 nt, Homo sapiens
ggcgggacaagcggcaagcgccggccggagcaaccccccacgcaaaagcaggaccgccggagcacgcccaacgccacc

SEQ ID NO: 63653 - RNA, 88 nt, Homo sapiens
agccacccagaagggggaagccagacaaggaaccaggacgccccggcaggcccggagcagcgacggacccagagccagggcggccccg

SEQ ID NO: 63654 - RNA, 82 nt, Homo sapiens
gggcaagggcaaccgcggggaagcggggcggcaccggacaccaagacggaggacagcggaagcacgggccagacccgcggac

SEQ ID NO: 63655 - RNA, 74 nt, Homo sapiens
agacgcagggcgcccccgccgccaggaagaaccagagaagaccagagaaaaaggaaggagaaggacgaagaggc

SEQ ID NO: 63656 - RNA, 81 nt, Homo sapiens
gagacggcgcaaggcaaaagaaggggcacggccaagaagcccggcaaaacgcgccggcgaggaggccaagacaacaaaaaa

SEQ ID NO: 63657 - RNA, 78 nt, Homo sapiens
cagccccgcggcacgcagagacgggcaacccggggggcgggcagaacccaggccgagcagagacaccgggagagacac

SEQ ID NO: 63658 - RNA, 74 nt, Homo sapiens
gcaaaacagaaggacagcaaaacgcagaggggagcaggcaacacagggccgccagggaccagggacaagagcaa

SEQ ID NO: 63659 - RNA, 75 nt, Homo sapiens
agcacacagccaggcacagcaggacggaggggagcaggcccgacccaggagcacacacagccagcaacagggaag

SEQ ID NO: 63660 - RNA, 110 nt, Homo sapiens
ccccagccccgagaccccacagaggcggagcccgggaacggccaccccggcggaacaggcaacccgaaaccgccggagaaaaaaaaagacagccccaccaaaaccgaaag

SEQ ID NO: 63661 - RNA, 72 nt, Homo sapiens
aagacaagccaaagcaacagaccaaaaacaggcccggcgagccccgcagcaaaggaaggaaccgaagaaaga

SEQ ID NO: 63662 - RNA, 78 nt, Homo sapiens
gccggggcgcgcgcgcggcacgcgccgcgggacccgaggcgagccaagcagagaagagcgcccgcacccagagaaaac

SEQ ID NO: 63663 - RNA, 86 nt, Homo sapiens
cgggcacccccgggacaggggcagccagggcggaagcagcacaggccagcgggagcccccgaccccaggagggcaagaccaagcca

SEQ ID NO: 63664 - RNA, 80 nt, Homo sapiens
gcacccagagcccacgggcccaaggggcggggccaggaccacacaggaccagagccacgcacacagaaacagcgagacgg

SEQ ID NO: 63665 - RNA, 65 nt, Homo sapiens
ggagagaaaagccccgaaaacggagaggacagccccaaaaaggaaccaccggacaaacaccggaa

SEQ ID NO: 63666 - RNA, 78 nt, Homo sapiens
ccgcggcccgagggacggccagccgcgcgggcagacgcagccgccggagggcgcggagcggggaccgcacaccgcccg

SEQ ID NO: 63667 - RNA, 85 nt, Homo sapiens
cccgaaggcggccgcgagagggcccaggaaccacccagggaagacgaggggcgaggaggagaagccacagaaagcggccgcggga

SEQ ID NO: 63668 - RNA, 65 nt, Homo sapiens
ccgggaccccgcccggcagccgccgaggaaaggagacaccaaggaaaaagcccagccggacgagc

SEQ ID NO: 63669 - RNA, 78 nt, Homo sapiens
gaggcgcgcccgggaccagaagacacccacagcacccacaaaagcgaaaagccagacaggaacaccagacagaagaac

SEQ ID NO: 63670 - RNA, 78 nt, Homo sapiens
ccagggggaaggaggaggaggacgacaggcaagagaccgcaaggcaggggacgagggcagccgggacccaacgggacc

SEQ ID NO: 63671 - RNA, 81 nt, Homo sapiens
gcaggcggggggcgccggcggggaccgcggagccgcgggcggcaggaccagccaccagccgaagcaaagaccccagaagcc

SEQ ID NO: 63672 - RNA, 72 nt, Homo sapiens
ggaagaagaaagagggcgccaggaaagaccacagcaagaccacgcccccagccgggggaccaggccgaacga

SEQ ID NO: 63673 - RNA, 75 nt, Homo sapiens
cgcccaggggcagggcaagcccggaggaccaccgcccgcagggaaaaagggaccaagaaaggcccagggaccaaa

SEQ ID NO: 63674 - RNA, 42 nt, Homo sapiens
gcgcgcaggagccagcccccagagcaggagcagggaaaaggc

SEQ ID NO: 63675 - RNA, 85 nt, Homo sapiens
ccacacaccagcggcgcaggacgggcacagcagagaccaaaggcagggcaaggaaacggccacaaggagagggaaccagcccagg

SEQ ID NO: 63676 - RNA, 57 nt, Homo sapiens
caccagacggagcacggcgcaggggcaggaggagcgccagccagcggcacgccacaa

SEQ ID NO: 63677 - RNA, 54 nt, Homo sapiens
cccagcgggaacaggcaccgggcgcaccacagacagagaaacggaggccaccgc

SEQ ID NO: 63678 - RNA, 74 nt, Homo sapiens
ggagaacacaagaaccaaacaggagcgcagcgggagcaggaacgggcccccgccagcccacacccaagccacgg

SEQ ID NO: 63679 - RNA, 62 nt, Homo sapiens
aagaagaggcgcagaaagcaaacggccaagagaagaaggagacagaaacagcggcgaagagg

SEQ ID NO: 63680 - RNA, 73 nt, Homo sapiens
acccaaccaagggcggccagacacaaagacccagaaaagcggacagaagagagagacaccacaaggccagaag

SEQ ID NO: 63681 - RNA, 49 nt, Homo sapiens
cgggcggggccgccgcggcccggccagaacgcggcagaacggaggcagg

SEQ ID NO: 63682 - RNA, 81 nt, Homo sapiens
gacaaacgggaaaaagcacaggggaccagcagcagccgcgaggggaaggaacaaagcagagaaaccaaaaggccagacgaa

SEQ ID NO: 63683 - RNA, 37 nt, Homo sapiens
agagaaggacaacaccacaggcacacgcccccggccc

SEQ ID NO: 63684 - RNA, 54 nt, Homo sapiens
caacccccgcggacccagggagaaaccccccaggcccaagggccagcgcgccgc

SEQ ID NO: 63685 - RNA, 82 nt, Homo sapiens
aggaaaagcacccggaggaggaagaagaaggaagccaaagaaggcagggaaaggaggacaaaaggaaaaaaaaaaagggaag

SEQ ID NO: 63686 - RNA, 99 nt, Homo sapiens
agaacacagcggacagaggggaaagagcaggcaacagcggaccacaccggacccaacgggaaaggaaggaggaaagagaaaaacagagccggacccggg

SEQ ID NO: 63687 - RNA, 82 nt, Homo sapiens
ggcaaaagcacaaggaccgcggacagagacaacaccgagagagaaaagaagaagcgaagccggaaaaaacgaggaaaaagac

SEQ ID NO: 63688 - RNA, 58 nt, Homo sapiens
ccgccgcgacacccccgcaccggggccgggaagggccgggccggggcacgggcccacg

SEQ ID NO: 63689 - RNA, 37 nt, Homo sapiens
cagacaagagacccagagaaggaggggacacagacaa

SEQ ID NO: 63690 - RNA, 75 nt, Homo sapiens
cagagcgacccgagcagcgcagaccccggagaaagaagagagaccagaaacgagaggagaagaaaccagccagac

SEQ ID NO: 63691 - RNA, 39 nt, Homo sapiens
agcccccgagagcggaacacaggagggaacgccggcgca

SEQ ID NO: 63692 - RNA, 78 nt, Homo sapiens
caccgacaacaggcaaccacagccagagaggacggcgggcccggaaggaacgcccggaaggccgcggaaaccgacgcc

SEQ ID NO: 63693 - RNA, 61 nt, Homo sapiens
gcggaacccggggccgggacgcagcccggcggcagcagaggaggagagcaggcccccacga

SEQ ID NO: 63694 - RNA, 87 nt, Homo sapiens
cgcgaggaggcgcgggagggcgagaacgaccccgagacggaaggacgcccagagaccggcagcgcaaacacccggggaggaagccca

SEQ ID NO: 63695 - RNA, 63 nt, Homo sapiens
ccaccagcccggccacccagggcccacagcgggcacaccagggcggagaacggaaaagcacca

SEQ ID NO: 63696 - RNA, 83 nt, Homo sapiens
aaaccgaaaccgcccacgggagaagaaagcgaggacccagggccacacgaacgccccgaccgcacgggccagcacagcaacaa

SEQ ID NO: 63697 - RNA, 85 nt, Homo sapiens
acaacagccagccgagaacacgcaggcgccgcccacagcaggcgcccgccagggaacagccggcagcccgaaaagagcgaacaag

SEQ ID NO: 63698 - RNA, 76 nt, Homo sapiens
gagaggggaacagacgcagggcagggccccgcccggcggggaaggacccaaagacaggaccacgcaccagcagaga

SEQ ID NO: 63699 - RNA, 58 nt, Homo sapiens
cacagaaccaccaggagagcaagaaagcaaggcacacggacgagagaaagaagaagca

SEQ ID NO: 63700 - RNA, 77 nt, Homo sapiens
cgggccgcaccaagcgacaagaggcgagaggacgcaacaacacagagaaggcgaagaacggacaaacaggaggaacg

SEQ ID NO: 63701 - RNA, 73 nt, Homo sapiens
cggcgaccgagaggcgcggagccggggacgcggaaaaaacagcgggccacacaaagccgggagcccacaggac

SEQ ID NO: 63702 - RNA, 72 nt, Homo sapiens
ccgggccgaccgagcaccaggcgcaccagggcgagggaacggcaggagacagacacggaaacacagcccaaa

SEQ ID NO: 63703 - RNA, 78 nt, Homo sapiens
acggcaagagccagaagcccggcggaaggcgaacaagaaaaacgaccgacagaccagcaacaagcaaacaggaacacg

SEQ ID NO: 63704 - RNA, 68 nt, Homo sapiens
aaccagaacaggacggacagaggagcacgccaacccaaccggacggggcgcacaagcagaggaaggcg

SEQ ID NO: 63705 - RNA, 80 nt, Homo sapiens
ggggacccgagaaaaggaagggacagaacgagagccagacagggcagaggacgcggcgacacaacgggcgggaaggaaag

SEQ ID NO: 63706 - RNA, 86 nt, Homo sapiens
gaagaaccgcaaaagccagagggaacaagaggcagaaacaacagcaagaaagaggcccgaaaaagacaccagcagcagaaggcaga

SEQ ID NO: 63707 - RNA, 69 nt, Homo sapiens
gagcagaaaggaaaagcacgaggggaaagggaacacaacaccacaagagaaggacaaaagaaacggcga

SEQ ID NO: 63708 - RNA, 51 nt, Homo sapiens
ggcgcggcaagggccccagcccccgcagggagcagagcaagagaaaagaac

SEQ ID NO: 63709 - RNA, 67 nt, Homo sapiens
cgccaggcgggcgggccaaggaaaggagaaaagaagaacaggcacaacaaagaaacggagaagaaaa

SEQ ID NO: 63710 - RNA, 80 nt, Homo sapiens
gcacccgagaaaggggacggaaaccagagaaacccaggccagcaaagacacacccacaagccacagaaaacaacagcgcg

SEQ ID NO: 63711 - RNA, 77 nt, Homo sapiens
cggcggaagaggcggccggcgaaaggagcgggccggcaagggagggaaagaaccaccagccgcccccccaaaaaagg

SEQ ID NO: 63712 - RNA, 76 nt, Homo sapiens
gagaagcacaccacgagaggaggggaagggagacccgaccaccggaagccacggcccggacccccgccacgcaaga

SEQ ID NO: 63713 - RNA, 88 nt, Homo sapiens
ccacgccgcccgacccaggggagccgggcccccccgcccagcgcgaggacaggacacccagcaacagaccgagaagacagcggcaaaa

SEQ ID NO: 63714 - RNA, 71 nt, Homo sapiens
ccggaggccagaggcggaggagaaaggcaagaggggccccaggacgcggagaaaggcccgaagcaaacaac

SEQ ID NO: 63715 - RNA, 70 nt, Homo sapiens
ggaaaagacacgccgacgaagggcagaggaacaggccgaacaaagcagcgaaaaagcgacggccggccca

SEQ ID NO: 63716 - RNA, 68 nt, Homo sapiens
ggagccccgaccccaggccccccacagaaaaggaaaggaacacagcacccacccacacccacacccgc

SEQ ID NO: 63717 - RNA, 83 nt, Homo sapiens
cgggggcgcgacgccgcggacagcgcagccaccggagacccaccgcagagcaccaagggcccaccaacaggacccagggaaag

SEQ ID NO: 63718 - RNA, 90 nt, Homo sapiens
gagcagacagagccgagccaggacaggccagccagccaggagcgagaacccgagcagcgccagagcaacacaccgcgccccagcacgcag

SEQ ID NO: 63719 - RNA, 61 nt, Homo sapiens
ggacgcccagaaggaacgcagagcccaagacgaaagggagcaacgggagcgccaaaagggc

SEQ ID NO: 63720 - RNA, 64 nt, Homo sapiens
gacaccgcacgcgcacggacggcacagcccgccgaacccgaaaggagagaaaagccaggaaaga

SEQ ID NO: 63721 - RNA, 70 nt, Homo sapiens
acaagcagagacgcgacaaagaggggggggagaccggagcgaaacagaaggcgagagacagaaagcagac

SEQ ID NO: 63722 - RNA, 86 nt, Homo sapiens
gaggaaaagcaggaagcggaaaggaaggacgcaccacgaaaagggaaacaaagcgaagaggcaggagcacacgagagagcggggac

SEQ ID NO: 63723 - RNA, 81 nt, Homo sapiens
ccgaaaaaagaaaggaaacgaacagccagaagaaacccccaacacgaaaccaagggaaggccccgggaccaaggacacgca

SEQ ID NO: 63724 - RNA, 77 nt, Homo sapiens
cgcggacgaaggagacgaagacaacaggcacaaagagagaaggaacacccacagggcagacagagaaagaacacaaa

SEQ ID NO: 63725 - RNA, 63 nt, Homo sapiens
gggagcgagggaggacgccgggacaccggaagccgagaaagggccaccgcacacaggcggacg

SEQ ID NO: 63726 - RNA, 83 nt, Homo sapiens
ccaagagccaaccgagggcgccgagaagccagcacgccgggagcggacacagcccaggcacagggcagagcccgccagagggc

SEQ ID NO: 63727 - RNA, 67 nt, Homo sapiens
aagagcacagaaccaagggaagagaacacacggaccgagagaggagggacaaaacaagagaagcaca

SEQ ID NO: 63728 - RNA, 86 nt, Homo sapiens
gggccgccgccagccgcgcgccggggaggcgccggagcgccgcggggcccggagcagcagccgagacaagacccaccaagaaacgg

SEQ ID NO: 63729 - RNA, 39 nt, Homo sapiens
gacaaaccccagaaaaggacccaccaacaaccgaaaaca

SEQ ID NO: 63730 - RNA, 74 nt, Homo sapiens
cgccacacagggaaggcacacagcaggaaaggaagccagaaccgaaaacccaccgacaccagccacgccaccaa

SEQ ID NO: 63731 - RNA, 78 nt, Homo sapiens
caggacaacccggaggggcaaccccccacaacacaaaagcgaagaccaacgcagcagcgaggagaggggcccacagaa

SEQ ID NO: 63732 - RNA, 79 nt, Homo sapiens
gacaggccacccagcggggagcacggcgagcagccaggccaggagaggacccgggacagaggacgccggacgagagaag

SEQ ID NO: 63733 - RNA, 82 nt, Homo sapiens
gccccaacggggcggccgcgacccccggcaacccggagaaggcacagagcggccgcgccagcgagcgccgcgcccggggaga

SEQ ID NO: 63734 - RNA, 106 nt, Homo sapiens
ccaccgccgccgccgccgccgccgcgccgcgccgcgccgcaccccgagcgaccggccggaagaaacgcggaccgcggagggccggagagcgggacccagagcggaa

SEQ ID NO: 63735 - RNA, 81 nt, Homo sapiens
cacacagaggaacagaaaaagaggaacccgcgacccgggcacccagagcagggagggccaaaacagaagaggcaaagccca

SEQ ID NO: 63736 - RNA, 79 nt, Homo sapiens
gcccgcccagagcggagagcccaggagccagccccgacagcgaagacccgaaacaggccccgaccagggagaccccacc

SEQ ID NO: 63737 - RNA, 69 nt, Homo sapiens
ggggccggaggaggaggagaggagaggaccgagaagacagggacacgggccaaggaaagcggagggagc

SEQ ID NO: 63738 - RNA, 78 nt, Homo sapiens
ggccacggggaaacacagcagaacacagaaaaaggagcagcacgccaaacaagaggaacaagaagaggaagagaaacc

SEQ ID NO: 63739 - RNA, 75 nt, Homo sapiens
agggacacggaggggccggaagagacaagaccgggggcccagaaagacacggccagacacaacaggccggggccc

SEQ ID NO: 63740 - RNA, 75 nt, Homo sapiens
agaagaaacagacggacaaccaaggcgcgaaacaggaacagcgggacggcacgaggaggcgggagggaggcccac

SEQ ID NO: 63741 - RNA, 83 nt, Homo sapiens
gccagcccggcgacacaaggacggccaggcacgaaagagcccagggccagccggcccgaaagagcccagcaggagcgggccac

SEQ ID NO: 63742 - RNA, 71 nt, Homo sapiens
caccgagaaaggaaggaaaaccgacgagaagagcccgagcccgggaccacaagagcccccaggcgaaccgc

SEQ ID NO: 63743 - RNA, 108 nt, Homo sapiens
gccgcgaggacacgggcgcaaccgcagcacacagcgaccgggagaacaagacggggcccgccacgggagagcgaaggcacgagcgcccagaagaggaacccagaccca

SEQ ID NO: 63744 - RNA, 78 nt, Homo sapiens
ccacaagaccccgcgccaccaaagggagggcggccaaccgcacagacgaccagcccccgccgaggaagcggaacacag

SEQ ID NO: 63745 - RNA, 75 nt, Homo sapiens
gagcacagagaaaaagccaaccccaggccccacagccggaacccccagacccaagcaaggagcggagaagaagac

SEQ ID NO: 63746 - RNA, 75 nt, Homo sapiens
caacacaccgccaccgaagacgggccccaacacccagagacgaaagggcgagcaaggcaaccagcaagaacaggc

SEQ ID NO: 63747 - RNA, 86 nt, Homo sapiens
agagcacgacggaccaagacgagcccagcgcaaccccaagcgcccaaaggcagaagccccagaggagcccgaaacccccaggcggg

SEQ ID NO: 63748 - RNA, 56 nt, Homo sapiens
cgcagggcgcccccgagcagcgccacgcggagagcagaacaagcggcccgcaggaa

SEQ ID NO: 63749 - RNA, 72 nt, Homo sapiens
aaaacaaaagaacaagagaacagcaaggcaccaaacagggcagacacaaggaacagccagccaggagaaaaa

SEQ ID NO: 63750 - RNA, 85 nt, Homo sapiens
acgcaccacgacggcgccacaccgagcgcgaggcgcggagagcaacgccgggacagcgcaagggccggcggcagagaccacgccc

SEQ ID NO: 63751 - RNA, 39 nt, Homo sapiens
ggaccaagcggaggccgggagagaaggcgcgcaggagag

SEQ ID NO: 63752 - RNA, 76 nt, Homo sapiens
cggagaaaagaacaacaacgggcaaaagaagacaaggaacagaacagccgaggaaggcgggggaggagacagcggg

SEQ ID NO: 63753 - RNA, 66 nt, Homo sapiens
gcggcgagacacacacaggcaacaggagaggaggcgaagaaccaaaaccagaccaggagacccgcc

SEQ ID NO: 63754 - RNA, 75 nt, Homo sapiens
ccaaccaccccggaggccagacccccgccccaacaagaggccaacggccaagaccgcccggcagcgggggaccac

SEQ ID NO: 63755 - RNA, 81 nt, Homo sapiens
cggagaaaaacaggggaaaggaaaccagcaacagcaacccgagcccagagacccagaacccgaggaaaggaggccaacaga

SEQ ID NO: 63756 - RNA, 75 nt, Homo sapiens
gcaaggcggggcgggaagcggggcggcgccggacgccggccccgcgggagcaccaaaacagccccggacagcccc

SEQ ID NO: 63757 - RNA, 67 nt, Homo sapiens
aagaaaagaagacagccaggaaacacagacccagaccagaagacgaaacccgccaagacccaagagc

SEQ ID NO: 63758 - RNA, 62 nt, Homo sapiens
cgcagacagagcaccagcaccagcagaggagaggagccaagcccaacgggacgggaaaacgg

SEQ ID NO: 63759 - RNA, 79 nt, Homo sapiens
cgggagggcgaccgagccggaggcagaagcccccggggagagacagacagagggacacagagaggaagaaaggaggccc

SEQ ID NO: 63760 - RNA, 123 nt, Homo sapiens
gaccagccccagggagccgcaggaccccagcaccccacccgaaccgaagagccccggccaaggacacgagaacgccacaagcacagccaggccacgagcgaaccccagcaagccacacaggca

SEQ ID NO: 63761 - RNA, 59 nt, Homo sapiens
gaggagacggagcacgccaaagggagacgccgcacccaggcggaggcagggggaccggc

SEQ ID NO: 63762 - RNA, 77 nt, Homo sapiens
gaggggccgacgggagcagaggaagccgaggaccaccacagaaggaagaagccccgccccggcggggagggcacgca

SEQ ID NO: 63763 - RNA, 83 nt, Homo sapiens
aacacgccccaccccggcaaagaacaaaaacaggccgccgagaccagggcagagaaacagcccagaagagaaaagaagccaag

SEQ ID NO: 63764 - RNA, 87 nt, Homo sapiens
aagaggcggcggcgaaaggaacggcgaaggcccacgggagaaaaccgggcgcaaggaacacaggagagcacgggaaaccagcaaagg

SEQ ID NO: 63765 - RNA, 75 nt, Homo sapiens
caagcccacacccaacggaagaggccggaggagccggagagggagcgccgccggagcgagcgcaggagaggagga

SEQ ID NO: 63766 - RNA, 88 nt, Homo sapiens
ggaaggaaaaagacaaagcacccggcggccaaaggccaggacaccaacgggaccagaaggaaacaaacagaagcgcacgagaacccag

SEQ ID NO: 63767 - RNA, 74 nt, Homo sapiens
ccaccaaacccagagggcccacaccaccggacacaggccggaaaacaaggaaaggacaacaccacagccgaaaa

SEQ ID NO: 63768 - RNA, 81 nt, Homo sapiens
ccaacccaagggccccagcccgggcccccaacgaggggcaccagcgggcacaccaagaagcgccccgcaagacccaccgag

SEQ ID NO: 63769 - RNA, 71 nt, Homo sapiens
aaaaaaccccggacccccgccccagccaagggccgcgaggaccagaagacacggaaaaggagccacgcgcc

SEQ ID NO: 63770 - RNA, 72 nt, Homo sapiens
gaggccaacacaagcccaaaagaaccccacacacagcaagaagcagcaagaaggaacgacaaggcgcccaga

SEQ ID NO: 63771 - RNA, 88 nt, Homo sapiens
ccaggcggaaacagagcaacccccggcagacaagcgggcggccgagcccgggggaggccccggagcgcagccgggcccagcccacccc

SEQ ID NO: 63772 - RNA, 60 nt, Homo sapiens
accacaccgccaacggccgcagccccggcaccaggggagaagacggcacgagcgccaagc

SEQ ID NO: 63773 - RNA, 73 nt, Homo sapiens
aggaacacagggacgccacgaaccgcaaaacaaacggagagaggagggagaaacaaaggccaaagacgcagga

SEQ ID NO: 63774 - RNA, 36 nt, Homo sapiens
ccacacgcgaaaaacgggcagaggaaggagcagagg

SEQ ID NO: 63775 - RNA, 80 nt, Homo sapiens
ggcggggccacgggcgccgggagggggacacgccagcggcgcagccgacggaagaccgggagacaaaacaacagcaggaa

SEQ ID NO: 63776 - RNA, 75 nt, Homo sapiens
aagcagaggacaggaggccccgagacaggcaacacccgacacccccaaggaaaccagagaccagaagaggagaac

SEQ ID NO: 63777 - RNA, 51 nt, Homo sapiens
cacgccggaagagaaggacggcagagaacgccggagcacgaagacaaagaa

SEQ ID NO: 63778 - RNA, 55 nt, Homo sapiens
aaaaagcaagagagacaacacagggaagcagggagaagagggcaagaacaaagag

SEQ ID NO: 63779 - RNA, 71 nt, Homo sapiens
cacaaaaaaaagaagccacgccaaaagacgaaagggggcgaccacagaaagaacaagacccgaagagaagc

SEQ ID NO: 63780 - RNA, 77 nt, Homo sapiens
ccacggcaagggcaaccgcggggcaagcgggccacgcacccgcaccaaggccaagagcccaaaaggcagagcgagga

SEQ ID NO: 63781 - RNA, 117 nt, Homo sapiens
agaaacgcaggaggcacaaacaggagccagcccacaccaggcagaaggagacgacaaaggcgccccggcaaggccaccgcagaagccacaggagaccggaggccaacggcagaagcc

SEQ ID NO: 63782 - RNA, 81 nt, Homo sapiens
cggcaggcagcacaagcagcagaaccgggggaaggaccaacgcagcgggcaacaagaggagcgcgaaagcagcaagaagag

SEQ ID NO: 63783 - RNA, 77 nt, Homo sapiens
ggcagcagccagaagaggacgagccaagaaagggagggggaaacagccaaggccgaggagagaagaaaaaggcagca

SEQ ID NO: 63784 - RNA, 64 nt, Homo sapiens
ggcgaggacagggcagccgcggcgcgcccaccccccgcgccgaaggccggcccacagcccaaaa

SEQ ID NO: 63785 - RNA, 71 nt, Homo sapiens
ggcgaggcagaggggcaaccaggcagaaagagacaaggcaggcccgagcagacagagcaaggcagggcccc

SEQ ID NO: 63786 - RNA, 76 nt, Homo sapiens
ccgagagccgcccgggccagcggccgcgcacccccggccggaggcaccagcaaaccccaaggcgcagacaccgacg

SEQ ID NO: 63787 - RNA, 81 nt, Homo sapiens
gcacacccgacacagcggagcgcccagaggcgagcccggggaggaagaggccaccacacacgagcccgacgacagaacccc

SEQ ID NO: 63788 - RNA, 84 nt, Homo sapiens
cggcacagggagaaaccgcccgaaaacggagaagcaggcggaggcaggagaaaccggccagaggggacgcgggacaagagacgg

SEQ ID NO: 63789 - RNA, 72 nt, Homo sapiens
caccgccgacccggaagaccgccgccgacccccagccagcggaggcgccaacggacggagaaagcggagcga

SEQ ID NO: 63790 - RNA, 37 nt, Homo sapiens
accggacgagccgccaacaagacgacggagcccccgg

SEQ ID NO: 63791 - RNA, 71 nt, Homo sapiens
caagaaagaaagccagagaacacaagaacagagggacgaccagaaacacagcacaacacgaaaggagaaga

SEQ ID NO: 63792 - RNA, 71 nt, Homo sapiens
cagagggggaaagccaaggaaaaacggagagccacaaaaaaggaagcgaaaaagccaaagaaacgccaacc

SEQ ID NO: 63793 - RNA, 62 nt, Homo sapiens
gaacgcggaggacacagaaggaaaccccccaggcaagaggcgcaggaccgggaagaccaaca

SEQ ID NO: 63794 - RNA, 77 nt, Homo sapiens
ggccgaagcccagcaggccccagcagaggaccaaggggagcaacaaccaaagccgagggcaggaccagagcgggggg

SEQ ID NO: 63795 - RNA, 73 nt, Homo sapiens
gcaagccggacccacgacggcaggaaaggaggccaggacggagagggagaagggaaagggagcagcaccggcc

SEQ ID NO: 63796 - RNA, 38 nt, Homo sapiens
gccaacagaccgaacaaagccccagcagccgaccgagg

SEQ ID NO: 63797 - RNA, 55 nt, Homo sapiens
gccccagacggcggaccgaggcaaaagcagaccggaaaacccaccggcaagacca

SEQ ID NO: 63798 - RNA, 65 nt, Homo sapiens
gcccaagacacgcgagcaagcacaccgaaagccacagcaagaagaccgagagacgaggcacgacc

SEQ ID NO: 63799 - RNA, 90 nt, Homo sapiens
aggaaaaaaaaaagaaagacaaagaagaggcgccacagaaggcaaccaagcaacaccaggcaggaggagagcgacacgcgggaggcaaag

SEQ ID NO: 63800 - RNA, 73 nt, Homo sapiens
gacaaccgacccggcgaccggcagacccaggggcaagacagaccggggagggcccgaagacaccccgccaaaa

SEQ ID NO: 63801 - RNA, 80 nt, Homo sapiens
gcgccgccacccccccccagcaggcgcggggaggcccagcccgccgcagggccaccccgcggcccaccgccgccgccccg

SEQ ID NO: 63802 - RNA, 62 nt, Homo sapiens
ggcaccaaagccagcacagaccccgggcccacaggccaggaaggaaacccccaaagagaaag

SEQ ID NO: 63803 - RNA, 75 nt, Homo sapiens
gagacaagccgagagaaagcaagcaaaggaaggaggcagaaagggagccccaagagagagggccaagccaaccgg

SEQ ID NO: 63804 - RNA, 75 nt, Homo sapiens
ccccagccagggaaccacggagcacgagaaaacggcggggacacacagcaacgaagcaggggaggagggaagacc

SEQ ID NO: 63805 - RNA, 61 nt, Homo sapiens
ccgggggaaacggggaagaggaaacaggccaggaggcagggaggaaggggggagggggagg

SEQ ID NO: 63806 - RNA, 77 nt, Homo sapiens
gccgcggccgccaccgacaacgagccaccccgcacacccaccacgggggagaggcaccagcaacagaccaaccgcag

SEQ ID NO: 63807 - RNA, 82 nt, Homo sapiens
aagcaaggcgacgccagaggaggaaaggaagacaaggcccgggaggagcggggacacgaggaccccccaaaggccccaacca

SEQ ID NO: 63808 - RNA, 83 nt, Homo sapiens
agcagaaggagcaaaaggcggacaggcagggaaacagcgcccccgaaccacgggaggcacggccgagagacacgaagacagga

SEQ ID NO: 63809 - RNA, 55 nt, Homo sapiens
acgcagaacacccaccaaagacccggcaccaacaggagcaaacagcaagagggaa

SEQ ID NO: 63810 - RNA, 61 nt, Homo sapiens
gcgccacaagaaagagcaggacaagagaaaggggaaccgcccaaaagcccgccagaagaag

SEQ ID NO: 63811 - RNA, 120 nt, Homo sapiens
accaagggacaccggaaccccgcggacggaaacagagcggagaagcaacacgagaagaagacacgggccggagacgaccgggagagggagagcagggaaacggagaagcccagaacgccg

SEQ ID NO: 63812 - RNA, 72 nt, Homo sapiens
agcccgccaagaggcgagcaagcggccaagagggcgaacaaacgacagggagaaaaagcaaagaagacagca

SEQ ID NO: 63813 - RNA, 78 nt, Homo sapiens
agcacaccaggagcagagcggaccaaggaacacccggggcacaacagacaggagaaagacagcaaagaaaaggagaag

SEQ ID NO: 63814 - RNA, 79 nt, Homo sapiens
cgggccggagaagcggccgcggccagggaacggggcacgcggccaacggaaggcccggcgggggcaacgagaaggacag

SEQ ID NO: 63815 - RNA, 80 nt, Homo sapiens
aaggaccaccacgggaggacggagacagcacgcccgaagagaccggcacggcacgcaccggcgccgcaagacgcccaccg

SEQ ID NO: 63816 - RNA, 58 nt, Homo sapiens
cgcgagggcccggcgcggaaagagaaggacaagagacagcccagacagggaaagcaca

SEQ ID NO: 63817 - RNA, 73 nt, Homo sapiens
cagccggaacgccccaaaaaagggaagaggccaggcggcagcaggggcgcagggaacggaagaaaaggcccga

SEQ ID NO: 63818 - RNA, 80 nt, Homo sapiens
caccagagcacaagacgcccacgcagccagaaccagcaggggcccaggacggcaccagaaaagagagacggggcgccgca

SEQ ID NO: 63819 - RNA, 70 nt, Homo sapiens
cccacccgccgcgcccaagccccgcggggaagaacggcacgcgggcgccgcggcccacggaagaaggaca

SEQ ID NO: 63820 - RNA, 50 nt, Homo sapiens
acccgacaacacacccggcaggggacagagacgggacccccgcacaccca

SEQ ID NO: 63821 - RNA, 73 nt, Homo sapiens
ggacgacgaagagacaaaggcaccggaaagccaggaaaaacacacggggggccccagcccggccgaacgggcg

SEQ ID NO: 63822 - RNA, 77 nt, Homo sapiens
acgggggcccaagggaccacaaaacggaggagagaggggggaccgcgcgacacgaggggcaaggagggcgaggcgac

SEQ ID NO: 63823 - RNA, 83 nt, Homo sapiens
ggggcagccaggacaggacagcaggaggagcgacagcgggccaagaacaccagcaggaaaaaagagcggcagaaggccaaacg

SEQ ID NO: 63824 - RNA, 80 nt, Homo sapiens
cgggaaacaagccggagcgggagagacagggccggcagggcagccgggggacagcgaggaaggcaaaccgacaccagcga

SEQ ID NO: 63825 - RNA, 78 nt, Homo sapiens
caccagggaggacgccccgggcagcgcacccagacaccggggcccaaggaggggacacgccagaaagggagaagcgag

SEQ ID NO: 63826 - RNA, 71 nt, Homo sapiens
gggggggcaccgggccagcacgaggaagaaacgagcccccaagccaaagaggcgcccggcccgccccccgg

SEQ ID NO: 63827 - RNA, 78 nt, Homo sapiens
ccaggacgcaccgccaccgcggaccgaggaccagccaaggaagcaacacagcagcgagagaagcagaaaaagcagaag

SEQ ID NO: 63828 - RNA, 59 nt, Homo sapiens
agcagaccgaaaagcggcacgacaacaaaaccacagagagcacacagcacagcacgcgc

SEQ ID NO: 63829 - RNA, 100 nt, Homo sapiens
ccgcagaagaaaaggcggcgcaggagcccggacagccagcacgacgaaggagggcgaccccacaggacaccgcgcaccagccacacacaacacagcgccg

SEQ ID NO: 63830 - RNA, 94 nt, Homo sapiens
gcggcgcccccggcccgagccgacacccagggaaccccaggaggaagagaaagggaaggaaagaggacaggccggcagagagcagcgcgccggc

SEQ ID NO: 63831 - RNA, 77 nt, Homo sapiens
ccgcgcgacggcgacgcgggaggccagggggagggcgcagcccagagccgaccccagaccggagacccaagaagcag

SEQ ID NO: 63832 - RNA, 74 nt, Homo sapiens
cgacagcgaacagcgcggccgcaggaccagaacacacggggaaaccgggaaccccaagaggacggcccaggaac

SEQ ID NO: 63833 - RNA, 79 nt, Homo sapiens
cgggccagcccgccgccagcgggccgcaggagagacgagcacggcagccaccgacagaaggaaggcaccggggccgggc

SEQ ID NO: 63834 - RNA, 74 nt, Homo sapiens
cacccagcgcccagcacacaaaacagcagccccagccaacccgaaaaccccccagcggccacagagagcacaaa

SEQ ID NO: 63835 - RNA, 72 nt, Homo sapiens
agcccggccgccagaccacagcacagccgggaaggggagccaccagcccccggaaagaccacagcaagacca

SEQ ID NO: 63836 - RNA, 61 nt, Homo sapiens
ggcccaggcgcacacggaaggggcaccggaccaaagagagcccccgcgagaagagccagcc

SEQ ID NO: 63837 - RNA, 78 nt, Homo sapiens
ggcggagagaacaccaagaaggagggcacacaaaacagagagcagaggcgcggcccgagagggggcaccccagacagg

SEQ ID NO: 63838 - RNA, 74 nt, Homo sapiens
gaggaggaacgcaccaagaccgggcaaccggaccgacaccggcccaaggggagcggccaccagacgcagagcag

SEQ ID NO: 63839 - RNA, 81 nt, Homo sapiens
acgggccggagaaggacagcagagaaaagcggacaccaaaacccgacgggggcaggaacaaaggaccggacccgacgcaca

SEQ ID NO: 63840 - RNA, 79 nt, Homo sapiens
cccaccccaccagggaagcaccacagccaccacaccaagacaccaggggagaccgaggagagaaagaacccacgcagga

SEQ ID NO: 63841 - RNA, 79 nt, Homo sapiens
aacgccaccccaccccagagaacgaggaacgggaaccacagagcacgcccagcacacaggaccacaagacgaggcgagg

SEQ ID NO: 63842 - RNA, 68 nt, Homo sapiens
cagcgcagcaaaccggagcaacagaagagcagagggaccaccccagaacccgcccggccccgggcccg

SEQ ID NO: 63843 - RNA, 55 nt, Homo sapiens
ggaacccgaagaagaaaggacgacagccagagagaaaggcggccacagagaacca

SEQ ID NO: 63844 - RNA, 82 nt, Homo sapiens
cgggccagacccaggaccgcgacaccccccaggcccgccgccagagggacaggagccaggccagaaaaggacggggcgggcc

SEQ ID NO: 63845 - RNA, 53 nt, Homo sapiens
gacgaaggccgacggaccagcccaggcccacaggggcccccccacgaaaaaga

SEQ ID NO: 63846 - RNA, 67 nt, Homo sapiens
agcggcgcagaccgagacccggacagggcaggaaacagaacccaagaaggcagaagccagccccgca

SEQ ID NO: 63847 - RNA, 83 nt, Homo sapiens
cagccacggcaccccgcccgcacagcaaccgcgaccagcaagcaggcaagaaggaggcagcgaaaaggaacaggagcgcaaga

SEQ ID NO: 63848 - RNA, 81 nt, Homo sapiens
cccaccccaccgccagcggaacccggggacacgacgccccaaaccgccaggagaaaaaaggaggcaacccacacacgacca

SEQ ID NO: 63849 - RNA, 90 nt, Homo sapiens
gcccgggagacccaggaggagcccgcagcacccaggccacagaggaggaaagagaggggaaagaagcagccaagccccaaggaaccacag

SEQ ID NO: 63850 - RNA, 82 nt, Homo sapiens
caacccaggcgcggcgccagaaagcacccaaagaccccgccagcgcagcccgccccgagccccgagagccaggagcgggaag

SEQ ID NO: 63851 - RNA, 115 nt, Homo sapiens
aaacgccgagggaaaaaccccggaagggcggacaccccacacgccgccacccccaccggaggaaacccccaaagagaaagaagaagaaaacgagacccaaaagggagaaagaaga

SEQ ID NO: 63852 - RNA, 69 nt, Homo sapiens
cgcaaaaaggaacaacagacacaaaggggaacccgcaagggcccaggaaaagaggaggcccggcccagg

SEQ ID NO: 63853 - RNA, 78 nt, Homo sapiens
cccgccgagcaaaaaaagagcccggaaggaagagacagagacagagcaaaaccaggagccaggagcaggggcgcggca

SEQ ID NO: 63854 - RNA, 79 nt, Homo sapiens
ccggcgggcgcgcggcaacggaggggccgaacaagccgagacggggccggccgagcaagaccccgcggacgaggacgaa

SEQ ID NO: 63855 - RNA, 70 nt, Homo sapiens
ccgagcgcggacggccaggccccgggccaggacccagaaacacagaagaaggggagccagaaggaggcgg

SEQ ID NO: 63856 - RNA, 75 nt, Homo sapiens
ggcaaagcgggccgcggagacgcaccacagcagcgccgcccggcagccagggcgcagggcgccaaccagaggagg

SEQ ID NO: 63857 - RNA, 69 nt, Homo sapiens
ggagcccaagaggcacgcaccccacaaaaaaaaagcccggcaggcacccagagagcaagcacgcacacc

SEQ ID NO: 63858 - RNA, 81 nt, Homo sapiens
ggcgcgggcggcggggcccacggacccagcccacaagaacccgacagccccggcagccggggcccaggcaacccaagaaca

SEQ ID NO: 63859 - RNA, 38 nt, Homo sapiens
gaaacacccccagaagagaaccaagaggccaccggcac

SEQ ID NO: 63860 - RNA, 69 nt, Homo sapiens
gaaccggagcgccaaacgcccgaaagaagcggacggagaggcgagggcgccggcaccagggcgcaaccg

SEQ ID NO: 63861 - RNA, 81 nt, Homo sapiens
ccgcgccaccgcaccgccaccggcccgacccaggaggaggaaacaggaaccaaaaggacacaaagaagaacagagaagaag

SEQ ID NO: 63862 - RNA, 72 nt, Homo sapiens
acgaggggccagggaaagaaccccagcggcaccaggacgccgaaaagcgaccggacgcaggcacagggacac

SEQ ID NO: 63863 - RNA, 92 nt, Homo sapiens
gcgcgcgaggccgggccggccgcccagacgcgcccgcgggcccggccacggcggagccaagggcgggacgaccccacaacccgagcgcccaa

SEQ ID NO: 63864 - RNA, 82 nt, Homo sapiens
ccacgggacgcgacgcgccccgcccccccgccggcccccccacggaaggggcgagcacacagagaggggaagggcagcagca

SEQ ID NO: 63865 - RNA, 50 nt, Homo sapiens
gggaacaagcacccacgcggaaacacgggagcagggaacgagaagacccg

SEQ ID NO: 63866 - RNA, 75 nt, Homo sapiens
cggggaacgggagcggagaggagccgaccccacggcacaggccggacgccccacaaggggagacccaacgagaac

SEQ ID NO: 63867 - RNA, 69 nt, Homo sapiens
caagaaaccgaaggaccagaggaacacgaaaagggaagacgcacgcaagaaaaaagagaaggaaaagca

SEQ ID NO: 63868 - RNA, 72 nt, Homo sapiens
ggggaaggggccggagggcagggggcagggcggcagaggggacggaccccggcacccaaacgcgacaccaag

SEQ ID NO: 63869 - RNA, 76 nt, Homo sapiens
ggccacaccggaacaagcggagggccgcaggaagagagagaaaacccaaaacggagagaagaacggaaagaaacaa

SEQ ID NO: 63870 - RNA, 68 nt, Homo sapiens
gccaacagaagcagcacacaaccgagaaggcaaagaaaagcaggacccaccaacaaccgaaaacaggg

SEQ ID NO: 63871 - RNA, 93 nt, Homo sapiens
cgcgggccgggaggggacggccgccggagccgcgaggccaaagaccgaaggagcagacgaggcacgagcgccagcgcgagacagacggggcgc

SEQ ID NO: 63872 - RNA, 36 nt, Homo sapiens
aggagaaggaggacaggccccagagacagcccgcaa

SEQ ID NO: 63873 - RNA, 76 nt, Homo sapiens
cccgagagcaggaacagggaccaaagcagaggggcgcgaaaggggagacgggagaccccgacacagaaaccaacca

SEQ ID NO: 63874 - RNA, 82 nt, Homo sapiens
caaacccgcgcacggcggcacaccccgacgccagggccggggcccggggcccacgcggcgggcccccgcggggaggcagagc

SEQ ID NO: 63875 - RNA, 66 nt, Homo sapiens
aaagaggagcagagacgggaagaaggaggagccaggaggagagaacaagaaaagcgcggaaacgca

SEQ ID NO: 63876 - RNA, 73 nt, Homo sapiens
cgccccagccaggggccggcgccggcgccgcgcccgccccggccacccggccagcgagccagcaggacaggca

SEQ ID NO: 63877 - RNA, 75 nt, Homo sapiens
acgggggacacgcccgaggaaaaggggccggacagacagcaaggaggaaaccacgagcggggagaaacagcaagg

SEQ ID NO: 63878 - RNA, 82 nt, Homo sapiens
accgaggggcaccgaccgcacgggccacccaaaacagccacaagaacggaagcagaagcacgcaagcagagacagagaggaa

SEQ ID NO: 63879 - RNA, 56 nt, Homo sapiens
gcagaacacaagaccaacccgccaaaagcacaaacggcagaacgaagcccccggca

SEQ ID NO: 63880 - RNA, 99 nt, Homo sapiens
gaggacaggcggaggccccagggaagcgcagaaagcaggcgaacccgcggcgcaaaacgaaaaaggacggcagcaacacaaacaaggaaggaggcagca

SEQ ID NO: 63881 - RNA, 71 nt, Homo sapiens
aagaggacgcaccgcccgggacgccagcggcgcagggggcagcacgccgaaggagagaccagacaacaggc

SEQ ID NO: 63882 - RNA, 69 nt, Homo sapiens
cgaagacaaaaacaacagacgcaccagcaggaaacgacggggcggcgcccagcaaaacaagggaccgca

SEQ ID NO: 63883 - RNA, 55 nt, Homo sapiens
ccggggcggcccgcgcaccgggggcccgggaggggaccgaaaaagggcgagccgc

SEQ ID NO: 63884 - RNA, 86 nt, Homo sapiens
cgcgccgggccccggacgccgcgcggaaaaggagcccaaagggcacgcaaaaagaacagaggaacccaaggaagcgccgaagccga

SEQ ID NO: 63885 - RNA, 80 nt, Homo sapiens
agaaggaaccggcaaagcgcaggaacgggaacgcaggagcgaccaggaaaaaaacagggggaagagagaaagacacaagg

SEQ ID NO: 63886 - RNA, 76 nt, Homo sapiens
gggcgccaaagcgagagagggaagcgcccggccggaggcaggggaaaggacccagcagccagcgaagccccaagga

SEQ ID NO: 63887 - RNA, 68 nt, Homo sapiens
ccacacaaagaacccccacaaaacagggaagcaaggaccagaagcgccaacgcaagcagaaagaagga

SEQ ID NO: 63888 - RNA, 67 nt, Homo sapiens
caccagaacagacagcacaccgacagccaaagggaccccggaggaaaagcggaagcggcagcggcga

SEQ ID NO: 63889 - RNA, 97 nt, Homo sapiens
ggagcccgcgcccgccgcgggagagaggacccccccccccccccaagagcccaaaaggcagagcgaggagagaagaaggagggaaagccaaacaacg

SEQ ID NO: 63890 - RNA, 53 nt, Homo sapiens
caaaagaaaaagaaaacagaaagcaacaaagcaccccagcaagccaagcaacg

SEQ ID NO: 63891 - RNA, 76 nt, Homo sapiens
acgcgaacaggcggagagcgggaaacagagacggagccccccgaagagaggaaagggccgagaaagaagagaggaa

SEQ ID NO: 63892 - RNA, 70 nt, Homo sapiens
cgaagaccggaccgggggcaccggaccgaggcggcgaaggcgggcaggcccagggccccccaccgcgccc

SEQ ID NO: 63893 - RNA, 62 nt, Homo sapiens
gacaaagggccgccgcagacagcagaccacagcccggcaggcccaaaaacccaaagggacag

SEQ ID NO: 63894 - RNA, 76 nt, Homo sapiens
aggcaccagggacggcagcccacgccgcaacccgccccagagccggagaaaaaggcagccccggagacgaaaagac

SEQ ID NO: 63895 - RNA, 69 nt, Homo sapiens
cggagccgccaaaaggcgaaaagggccaaggacaggcggggccgcaccgagccacccccccagaggagc

SEQ ID NO: 63896 - RNA, 70 nt, Homo sapiens
ccaagagaaacccgcagcggaggcagaacgaggaggaaaaagaaacacaccagacacaggagccaaaccg

SEQ ID NO: 63897 - RNA, 78 nt, Homo sapiens
cggaagacggggagagccaggacagggaaacacaaagaagacaccagaagggccagcaccacgacaacacggcgacag

SEQ ID NO: 63898 - RNA, 81 nt, Homo sapiens
cgggcggcagcagcggggcggggcgaagaagcagcacaaggcgagccagggacccccccgcggcaggaacgcacccggcgg

SEQ ID NO: 63899 - RNA, 74 nt, Homo sapiens
cagaaggccaggcacgaaaagcacaagaccaagcgaggacgccagaaagcccaacggaggcccaggggaaaagg

SEQ ID NO: 63900 - RNA, 65 nt, Homo sapiens
agaaccgcagagcgcaccaaggcgcacccaaagaaacgaaaagagacagcagggcaaaacgggcc

SEQ ID NO: 63901 - RNA, 106 nt, Homo sapiens
ggccggcagggggcacccgcggccggcccggggccccgggaccggcgcccccccggcaaagcgaaggcggagcaggagaaagcggcacagaccccagaggaaaaac

SEQ ID NO: 63902 - RNA, 57 nt, Homo sapiens
ggcaaaaagcgaccacagaaaagcccaccaggagcaggggagggcagaacaacagca

SEQ ID NO: 63903 - RNA, 78 nt, Homo sapiens
cggagggccgagggagggccgagccagccgcggccggaggagcccccaggccgaggaaagagccaaccagacagccag

SEQ ID NO: 63904 - RNA, 83 nt, Homo sapiens
agcagcccgacagcggccagcaagaggagcccaagggggcacaagaccacaagggacgccagcgcagcaggaggagaacacac

SEQ ID NO: 63905 - RNA, 70 nt, Homo sapiens
aagaaaccggccagaaacagccagagaagcgagacgacgggaccgaaggaccccgccagagacaaccgag

SEQ ID NO: 63906 - RNA, 78 nt, Homo sapiens
accgcggacagagcagacagaacagacaaggggacacgccaggacaaaagaagggagaaccgcgaggaaaaaaccacc

SEQ ID NO: 63907 - RNA, 55 nt, Homo sapiens
agacacgagggaggacagcaaaaaccagggcccacagaggagcacgaagcaaaac

SEQ ID NO: 63908 - RNA, 75 nt, Homo sapiens
cgaagaagaaaccggcggccaaaaaaaaaaaaggaagcacaccaaggcggaaccacgcaaagaacaaacacaaaa

SEQ ID NO: 63909 - RNA, 77 nt, Homo sapiens
cggggcaccacgaaggaccgaagaggcaccaggagaacaagagaccccccggaggaggggccagccgcagccggcga

SEQ ID NO: 63910 - RNA, 82 nt, Homo sapiens
cagcgaccccaagggcgggccggggccgggacggggcggccgccgaccgaagcggagcagccggaggacggagaagcggggg

SEQ ID NO: 63911 - RNA, 97 nt, Homo sapiens
gccgaacgagggcacgcggcgaaggacggggcagaggaccaagagccgcaaaggcagcgggcggaggacggggcaccagagaacccaccggaagaac

SEQ ID NO: 63912 - RNA, 39 nt, Homo sapiens
ccccccagccagggaacgacggccaggccagagcgggag

SEQ ID NO: 63913 - RNA, 59 nt, Homo sapiens
aggaccggaggccgggaagccaacgaccacacgcaacggagcgcgccccaccgcggccg

SEQ ID NO: 63914 - RNA, 69 nt, Homo sapiens
cccggccgacagggcagagcccagggaccacacgcaacggaccgccaggccagcaagacagaaccgcca

SEQ ID NO: 63915 - RNA, 59 nt, Homo sapiens
ccagcagccaccaggagcccgagagagaaggcggaagccgcagaaggaccggccagaag

SEQ ID NO: 63916 - RNA, 74 nt, Homo sapiens
agagacacaagcacacgaccgggagcgaggagccccgagaagcaagagccccaagaaagacaccaaagaagacc

SEQ ID NO: 63917 - RNA, 87 nt, Homo sapiens
ccgcgagcgcccggccgaacccgcgaggaaaagcccagcggcccgccaggcccgggccgcaagcagggggaacacccgcccagccgc

SEQ ID NO: 63918 - RNA, 79 nt, Homo sapiens
ccgggcagaagaacaccggcggcggccagcccgacacagaaccgggccgaggagggcggaaccacccaggaggaggggc

SEQ ID NO: 63919 - RNA, 72 nt, Homo sapiens
cggcgcggagagggggcgcgagcggggcgagcaggagcacgaaggggagaaaagggaaggccccaagccaag

SEQ ID NO: 63920 - RNA, 77 nt, Homo sapiens
ggccccggcagcagcccgacgcaaaccaaggacggggaccgcacacccaaggaaagggggaacccacccgagaaaca

SEQ ID NO: 63921 - RNA, 73 nt, Homo sapiens
ggggaaaggcaccaggacaagcaaagagcaagcaagaagacgggaaagaaaaaaggaagaacaacaagagccc

SEQ ID NO: 63922 - RNA, 44 nt, Homo sapiens
gacacccgcgagagagccaaggaagccaccgacaagagcacagg

SEQ ID NO: 63923 - RNA, 73 nt, Homo sapiens
cggaggacgaacacagaaggaaggaaaacacccggcagggaaggaaggaacgcaaccgaagacgcagaggaaa

SEQ ID NO: 63924 - RNA, 70 nt, Homo sapiens
acagacacgcacaggagaagggcccggagaggacgggaccggaaggacgagaccggggcagaggagggag

SEQ ID NO: 63925 - RNA, 67 nt, Homo sapiens
ggagagacaacaagggccacggacggagacaagccaaacgcaccagacgaacccaaaggcgccacag

SEQ ID NO: 63926 - RNA, 108 nt, Homo sapiens
gcggccgcaccggcgccccacccgcccccgcgggcgccgggccaggacgggcccagcccccggacacgggcggccggaaggcgaggccccgccagcccgccggcccca

SEQ ID NO: 63927 - RNA, 77 nt, Homo sapiens
gcggggcggcggcggcggcggcgcggcccaaaaggaggcagcacggcaggagacgaggagaggacagcaggacaccc

SEQ ID NO: 63928 - RNA, 57 nt, Homo sapiens
cgcccgggcacagaggcacaacgggcgacaggaggacgggacaccgagacaagaggc

SEQ ID NO: 63929 - RNA, 74 nt, Homo sapiens
acaccaaaaacaaaacgaaccaggacggcaaaacagaagaccaggacccaaaaagccccgaaggacgcgaaagg

SEQ ID NO: 63930 - RNA, 65 nt, Homo sapiens
cgaaaacggaaacacaagagaccagaggagaacagggagaagaggaaaggcaccaagagaacaga

SEQ ID NO: 63931 - RNA, 81 nt, Homo sapiens
cgccaaaggcccgcaaggacaaggacaggcgacacaacagggaagaccgggagaccagacaagaaaagaagcggaggggga

SEQ ID NO: 63932 - RNA, 69 nt, Homo sapiens
acaaacgagcccgcagaaggaaagaagaccagacggaagacggaggggaggaggaccagacaagcggag

SEQ ID NO: 63933 - RNA, 66 nt, Homo sapiens
gaaggaccaagaaccaggacacaccaaagagaccggagcccaccagccaacaaggcgccccacggc

SEQ ID NO: 63934 - RNA, 77 nt, Homo sapiens
ggcggagcggcggaagaagaaccagaggaccggcaacaacccgaggacgaaccaccccgcgccagcagcacagcacg

SEQ ID NO: 63935 - RNA, 74 nt, Homo sapiens
accagaaagcaccccacaggggggcagaggacacggccacccgcagacacaaggaagccgagaccccgccaagg

SEQ ID NO: 63936 - RNA, 94 nt, Homo sapiens
cggaagcgacaagccaagcgaccaagaagccaaagaacggcaggcaaaaagcaagggaaacccaccgggacagacacgacggaacagaacacca

SEQ ID NO: 63937 - RNA, 76 nt, Homo sapiens
cacccaggcccaagagcccagagggagaccggcgaagcgacacggggaccggagcagggcacacaccccgcggggg

SEQ ID NO: 63938 - RNA, 41 nt, Homo sapiens
ccggaagggccaccgaagagaaggcaccggccaaagggggc

SEQ ID NO: 63939 - RNA, 61 nt, Homo sapiens
gcaacggcggagcggaggcacccgaagcgcccggggagggaacggaaacacaaagcggaag

SEQ ID NO: 63940 - RNA, 70 nt, Homo sapiens
acgacgccgcagacaacaaaacacagaacccggacaagcaaaagcggacggcgcgccaccggccacgcaa

SEQ ID NO: 63941 - RNA, 61 nt, Homo sapiens
acgccagaagacaaagagccaagaaacccaacaccgcccagccaagggggagggcagcgcc

SEQ ID NO: 63942 - RNA, 74 nt, Homo sapiens
cccggccagaggaaagaacccgaggaccacccaggacgcccgacaggccggagaagggaagaccggccagaaaa

SEQ ID NO: 63943 - RNA, 68 nt, Homo sapiens
agcccagagaggcccacaaccaagccacaaaagacacgccacaaccgagaccggaaggccggccggga

SEQ ID NO: 63944 - RNA, 78 nt, Homo sapiens
ggggcaacaacccaccggcacccgcaagaagcaccagcaagggccccagggcaccccgcgacaggagcgcgaaagggg

SEQ ID NO: 63945 - RNA, 78 nt, Homo sapiens
ccgggcagaagcgaagcgggacagaacagccaccaaaacagaagcgacaccagccacaggaacgacgaacagcagaca

SEQ ID NO: 63946 - RNA, 56 nt, Homo sapiens
aggcggaccaggcccacacagaagagcaagaccaggccaggacaaacgcaggaacg

SEQ ID NO: 63947 - RNA, 68 nt, Homo sapiens
gcgcgggggcgggcccgggacgcgaggcggacacgagcgaaccgaaaagagacacggaggggaaacca

SEQ ID NO: 63948 - RNA, 72 nt, Homo sapiens
cagcccgcgcggacgcaaaccgagccccgcgccgcaggcgggacaacacaagggaaccaaggagggcgccgc

SEQ ID NO: 63949 - RNA, 63 nt, Homo sapiens
agccaacaagccgaccagacgagaccgacaggccggcgaggagagacacgacaagacaccgag

SEQ ID NO: 63950 - RNA, 80 nt, Homo sapiens
agaacggggagagagagggcgcagcagaggacagcagggagagagagaaaaggaagaaacaagcccaggacgaagaaaac

SEQ ID NO: 63951 - RNA, 52 nt, Homo sapiens
gacgcgaaggaacggcaaagcgcaagccccggggcagagacacaggacaccc

SEQ ID NO: 63952 - RNA, 62 nt, Homo sapiens
agaccccgaaaacggaagcgcagggagaaggaagaggggaaaaggagcaaaggcagaggcca

SEQ ID NO: 63953 - RNA, 78 nt, Homo sapiens
ggagccccggaggggggcggcgcccacgggggagcgagccggagacaggcaccccgcgacgaaaggaaaccgacgaaa

SEQ ID NO: 63954 - RNA, 61 nt, Homo sapiens
ggcagaacgccgaacaggagcaacagcaaacacccggaagacagcaaaaggcaggagccag

SEQ ID NO: 63955 - RNA, 68 nt, Homo sapiens
gcagaaggcaaagcgaaggaaggagccaaaaagcacagccaggagaagcgagaaaaagccaggaaaga

SEQ ID NO: 63956 - RNA, 72 nt, Homo sapiens
gcaggccgcccacgcggagccgccagagggcaccggcgcacccgggacgaacgccaggacgagccccagaag

SEQ ID NO: 63957 - RNA, 74 nt, Homo sapiens
acagaaacaaaagcaacaaagaggggggcccccaaagggaagccaaacacaaaggaagaagcccggagacgacc

SEQ ID NO: 63958 - RNA, 77 nt, Homo sapiens
ggcaggccgccggccgaaggcccgagcgcccgaggcgcgggaggggggaccggcggccgcgcggggcgcaggcgccc

SEQ ID NO: 63959 - RNA, 58 nt, Homo sapiens
gcaaagaagcaacacaaagaagccaccgacaagagcacagggaaggggaagacgcagc

SEQ ID NO: 63960 - RNA, 82 nt, Homo sapiens
gcccccacggagcggacccgggagcggaagccgggaagccaagcccgcgggaccgccagccgcgacgggagagcccgccaga

SEQ ID NO: 63961 - RNA, 81 nt, Homo sapiens
aacagaagccgccaagcaaaagagccaaagcagcagccccgacagccacggaacaggccccagggaaaggaccgaggcagg

SEQ ID NO: 63962 - RNA, 59 nt, Homo sapiens
cgagaaggacgcgcagccaccccaggagggccccaaggcggcagccccgaccgacgggg

SEQ ID NO: 63963 - RNA, 77 nt, Homo sapiens
cggggaacccgcagcacaccagggggcaggcccggccgcagccaagccggaacaggagcggcgagcccaaacgcaag

SEQ ID NO: 63964 - RNA, 69 nt, Homo sapiens
ccgaaggagacagcccagaagaacgagggggaaaagagaagaacacgaaaagaagaacccaacagcccc

SEQ ID NO: 63965 - RNA, 61 nt, Homo sapiens
cgagacccggggcgaggacccccgagccaggcgggaaagaggaaagaagacacgcaagaga

SEQ ID NO: 63966 - RNA, 76 nt, Homo sapiens
gcccaccggggaggagaggaaggaagagaaaccagagacgaccacaagaacccacaggacaaggggggaaagaagg

SEQ ID NO: 63967 - RNA, 40 nt, Homo sapiens
gagagaaggacaacaccacagcaggacccaaggggccggc

SEQ ID NO: 63968 - RNA, 61 nt, Homo sapiens
ggcggcgcccggggagcaggcagaccagccagccccaagcagccgcacgacaaagaacgaa

SEQ ID NO: 63969 - RNA, 69 nt, Homo sapiens
agcaggaaaggagggcaccaaccacaaagcgcgagaagaagcagaagaaacgaggagacaaaggagaga

SEQ ID NO: 63970 - RNA, 59 nt, Homo sapiens
gacacgcccccggcagcagagcggggacgggaaagagggcagaagcagcaagaaaaggc

SEQ ID NO: 63971 - RNA, 72 nt, Homo sapiens
gaaggaaagagaggccggggaaagccggcacagaaaggggaggccacacaggaagaaaagaagcgcaagagg

SEQ ID NO: 63972 - RNA, 93 nt, Homo sapiens
gaaagcaagacggaaccacagacaaaaacccaaagcagaacaagcagaaagcacgaacaacgagaacaagacacgagcaaaccccaccgaggg

SEQ ID NO: 63973 - RNA, 71 nt, Homo sapiens
acaagccagagcggagaccaggggcagccaccagggaccaaccaccccggacccaccacagagcaaaaaaa

SEQ ID NO: 63974 - RNA, 80 nt, Homo sapiens
gcacaaacggggcggggccggggaacacacagcaaaggagagccagagcgaacccaagacggggcacgccgggagaaaca

SEQ ID NO: 63975 - RNA, 40 nt, Homo sapiens
aagcgcgaggccgcagcaggcaaagggcccgagggagaac

SEQ ID NO: 63976 - RNA, 66 nt, Homo sapiens
caaggccaagcaagggcgcggagcgggaaagacacggagcaggccggaggagaccgggcaggacca

SEQ ID NO: 63977 - RNA, 72 nt, Homo sapiens
gccagaagagaagagaaaacagcccacccgcaaacgaacacaagagacagggaacaccagaccggagcagga

SEQ ID NO: 63978 - RNA, 77 nt, Homo sapiens
gccacaagaaggggaaagaggcaaacgaaacccagcaagaccagcaggccggcaaagcaccaggcacagcaagcgcc

SEQ ID NO: 63979 - RNA, 63 nt, Homo sapiens
ccccggcccacaggggggggcaaacccgagagaacggaaggggggcggcgcaggacgagagcc

SEQ ID NO: 63980 - RNA, 75 nt, Homo sapiens
gcccagcccccgagaagcgggaacaggccaaagaaaaacgaaaagaccccagcgcgcacaggccgcacggacgag

SEQ ID NO: 63981 - RNA, 73 nt, Homo sapiens
ccacccgggacgggaggggggagaagccgacggaccaaaacagaccaggaccgcccccaacggcccccgagag

SEQ ID NO: 63982 - RNA, 41 nt, Homo sapiens
cccgcggaggggggccgccgccgaccgaggcagccggggcc

SEQ ID NO: 63983 - RNA, 79 nt, Homo sapiens
cacccaccacaagccaggaaggagacacggccccccaaggaaaacaggggaggcaagcaggggggcaaaggaaagaagg

SEQ ID NO: 63984 - RNA, 74 nt, Homo sapiens
caagcacagcgacacacaggagggggccacggagcgaaagccgcagccagagaagaccgcggaccgaaagcgcc

SEQ ID NO: 63985 - RNA, 78 nt, Homo sapiens
cgaacacgggcaacgcgcgagcacgccggagccaacacgccaaggccccgagccccggccccaaagacccaaaacaga

SEQ ID NO: 63986 - RNA, 40 nt, Homo sapiens
cagacagggccagacaaaagaggagcgccgcggccaggcg

SEQ ID NO: 63987 - RNA, 80 nt, Homo sapiens
aggaaggagggcagaaccaccacacgaagcgggaccaagaaaggcccagggaccaaagcccggacaaggcccgagcacca

SEQ ID NO: 63988 - RNA, 103 nt, Homo sapiens
cgaggacgaccaaaaccgaacaccaccgagggccccgcaggaggacacaggcacagcgaaacgcccagaggacaaggcggaaaaggggaacacgaacgcagag

SEQ ID NO: 63989 - RNA, 77 nt, Homo sapiens
ggagacgaaaacggaaacagagcccagcccagaaaagggggcccagagagggccgaaccggaggacaagccaggcca

SEQ ID NO: 63990 - RNA, 92 nt, Homo sapiens
acaggagccccagcgccaccgccgaccgaagccgcaaaagcagaagcccccggggagagacagacagagggacacagagaggaagaaaggag

SEQ ID NO: 63991 - RNA, 76 nt, Homo sapiens
accgaccaagggacccaaaggacaagaagcgaaacccacccacacaagaggaagcaggagaagcaagaagaaggac

SEQ ID NO: 63992 - RNA, 75 nt, Homo sapiens
gaaagcagcccaccagcaggcgggacccgcaccggaaggccacgccaaggcccccacagagagcacacaaacaaa

SEQ ID NO: 63993 - RNA, 76 nt, Homo sapiens
ggcgggggcgccggcagaggaccaggcaccaccggccccggaaggcgaccccgcacacacacccaccagccacggc

SEQ ID NO: 63994 - RNA, 69 nt, Homo sapiens
acgcggaggcccaaccgaagaaaacaaggagggccggaaaacaagaaaaagaagcaggagcccccaggg

SEQ ID NO: 63995 - RNA, 75 nt, Homo sapiens
aaggagagagaaaagacagccagcaagcacacgcaccaaagcagcagaaaggaagacgggcaaagggagaagaga

SEQ ID NO: 63996 - RNA, 71 nt, Homo sapiens
cgcgacccggcgcgggcacgcccaccggcccgcgccgcccaggccccgcagggaacaagagccaacaaggc

SEQ ID NO: 63997 - RNA, 69 nt, Homo sapiens
ggccaggacccacccgacccgagaaccaggggaccagcagagggggcgcaaggcgacaccgaaagaacc

SEQ ID NO: 63998 - RNA, 87 nt, Homo sapiens
cacaaaggaaagggaggaggcggcgggacgagaaggaggaacccaacccgaaaacagaacacggaccaggaaaggagcagaggaagc

SEQ ID NO: 63999 - RNA, 78 nt, Homo sapiens
gaccgaccgcaacagaacggacccgccagagacccagagcagcagcgaagagaaggcccagcccccccgccacccccc

SEQ ID NO: 64000 - RNA, 82 nt, Homo sapiens
gaccaggagggcacccccgggacggagcagaagcgccagcgcagaccagccaggaggccgggagaagaaggggagcgcacga

SEQ ID NO: 64001 - RNA, 70 nt, Homo sapiens
agggaagaggccgagagagagagaccgaagagagcccgagcgagagaaaggaaaggcacaaggaagaagc

SEQ ID NO: 64002 - RNA, 69 nt, Homo sapiens
ggagggaggcggaaccgagggggacccccgagcccaggagagagcccacacggaccaccgaaaaacacg

SEQ ID NO: 64003 - RNA, 71 nt, Homo sapiens
cagaaaagaaaagaaaacgaaacaaccgaaaagccacaaagggaaccaggaaaagggggacacagccaggg

SEQ ID NO: 64004 - RNA, 71 nt, Homo sapiens
ggccgacgcaccccacacccgcaccagacaggaccaccgagacaaggccgacgcgcacgaacacgggggca

SEQ ID NO: 64005 - RNA, 78 nt, Homo sapiens
ggccaggccaaccgggagacagagcagaaaagcagaccaaagccaaaaggaaagaagaaccaagccacagagacaacg

SEQ ID NO: 64006 - RNA, 90 nt, Homo sapiens
accacggacgaagacaggccgaggaagaagacagccacaggccagcgagacagcacgcacagaaaaaaaaaaagcaggaccaagcaagaa

SEQ ID NO: 64007 - RNA, 78 nt, Homo sapiens
ccgccgaccaccggagagccccgggagggaagacagggacaacaggcacaaagagagaaggaacacccacagggcaga

SEQ ID NO: 64008 - RNA, 57 nt, Homo sapiens
agggcaagacaaggagcggggagaagaaccaacaacggaaaaccagcgggacaaggc

SEQ ID NO: 64009 - RNA, 73 nt, Homo sapiens
ccaggccgacaccccccaagggagaccggacgcgggacacaagaaaaaacccggaacaaggaaccggaaggga

SEQ ID NO: 64010 - RNA, 80 nt, Homo sapiens
cagggagaaaaacaggcgggcagacagcagagccacaaaggagacagacccagcacggaccccccccccagccgggcgag

SEQ ID NO: 64011 - RNA, 84 nt, Homo sapiens
acagacaccgcgaaagcgaagcgcgaaaaccagcaaggcagcaaagaccagaaccgcccggaagcagaggagaacacagacacc

SEQ ID NO: 64012 - RNA, 69 nt, Homo sapiens
gcaggaaccaccaggacagaggggcagaaaaaacacagccgaaagaagaccgcaccagcggcagacgaa

SEQ ID NO: 64013 - RNA, 66 nt, Homo sapiens
cgggaccaccggcaccaccaaagaggcacccaggcggacacagcagcccccccaggagggcgagcg

SEQ ID NO: 64014 - RNA, 81 nt, Homo sapiens
acgggagcggccagcagcgagaggaccccaccaacaacgaacgcggcaggcgcacaaggaaggaaggggcaaggggaaccc

SEQ ID NO: 64015 - RNA, 71 nt, Homo sapiens
agagcggagacgggaagaaagcaaaagcaaaggacaacaaaggagcgcagaagcggaagggccagggaaac

SEQ ID NO: 64016 - RNA, 40 nt, Homo sapiens
cagcccaagccgcgcccgagaaaggacagggacaggaaag

SEQ ID NO: 64017 - RNA, 82 nt, Homo sapiens
gccagagaaaacaaaaaaaacccaaaacccaggccccagacagcaaggacaaccaagcaccacccaagccacacaacaccgg

SEQ ID NO: 64018 - RNA, 80 nt, Homo sapiens
ccggcgccgccccgagccgaccgcgccgcacgggagccagcgggggacgccaaaaagacagaaccaaggaaaagaaggac

SEQ ID NO: 64019 - RNA, 70 nt, Homo sapiens
cgcaagaccacacaccagccggacggcggggccgggcccccggccgcaagcagccacagaaagcccgccc

SEQ ID NO: 64020 - RNA, 78 nt, Homo sapiens
ccagccgcggagccgggggcaggggcgaagcgaaccgcgaccgcggcagcgcacaagagagcgagaagacgccggagc

SEQ ID NO: 64021 - RNA, 59 nt, Homo sapiens
gcaagcgccccacagagcaagacacaggggggccaccgaacacgcagaacgaagaagga

SEQ ID NO: 64022 - RNA, 82 nt, Homo sapiens
cccacacaagcgaaggcgcgcaccggaagcaccagcgaggaagggaaagaaaagcgcaacagaagaacaagccagaaaaaca

SEQ ID NO: 64023 - RNA, 74 nt, Homo sapiens
gggaaagaccgaggaagaaaggggaccacaggccaaggaaacagacaggggcaagcgggagcgccaagcacaga

SEQ ID NO: 64024 - RNA, 84 nt, Homo sapiens
ccaagaagcagaagaaagccccagcccgacagaggggcaaaggaggaccaaagccgaggccaccagagaagcccgagcaggaga

SEQ ID NO: 64025 - RNA, 38 nt, Homo sapiens
gcagcacaacgggcgcaccaagggagcgaggcggccag

SEQ ID NO: 64026 - RNA, 52 nt, Homo sapiens
aacaccacagacacgcacaggagaagggcccggagaggacgaacagcgggga

SEQ ID NO: 64027 - RNA, 78 nt, Homo sapiens
gcaaggccagggccaaggagagacagaagggccaagcccacgcagagcaaaggcacacgggggcaagggggcccgagc

SEQ ID NO: 64028 - RNA, 78 nt, Homo sapiens
ggcagcgcccccggcaggcgcggggcggggcgcgcagccagaaaggaagcacgcgcgcggacaagaccagaaagaaaa

SEQ ID NO: 64029 - RNA, 76 nt, Homo sapiens
gcccccgcggaggaaagcggcgcagcgcccgggaggacggcagcgagacggcacgccagccgggccacggagcaga

SEQ ID NO: 64030 - RNA, 68 nt, Homo sapiens
aaaacaggagaaaggcaggcaaacaggaagcacaccacaacgcgagccaccaagaacagggggagcgc

SEQ ID NO: 64031 - RNA, 84 nt, Homo sapiens
ggccccccgcgcccgcggcaggcgcggaggggccgcgggagcccgaaagcgagcaccaggacaaaagaagggcagcacaaagga

SEQ ID NO: 64032 - RNA, 89 nt, Homo sapiens
aaaaggacagggaaccaggcacgcccgaacaagacgacgacacagagaggccccccaacccagacgaagagcaggcaaccaggaccggg

SEQ ID NO: 64033 - RNA, 88 nt, Homo sapiens
ggagcaaggagggcgaagagcgaggaggaaaaagcagcaaagggagaaaagaaggccaaacagaagcaggcccagccgcaaaaacgga

SEQ ID NO: 64034 - RNA, 78 nt, Homo sapiens
cggaccgcggagacccccagcccagagcgcaaacgcacaagacacgaagagcaccccagagcgggacacagacagaaa

SEQ ID NO: 64035 - RNA, 80 nt, Homo sapiens
gggaagggaaaaaaagcagacaacgaggagaggacggggaccaaaggcacagagccagagccaaggaccagacgaaaaga

SEQ ID NO: 64036 - RNA, 81 nt, Homo sapiens
ggggacgacggcggccagagccgcggaagcgagcgggccgaaaggcaggaggccaggggcaaaagcagcgagagcaagcag

SEQ ID NO: 64037 - RNA, 74 nt, Homo sapiens
ggacacgacgaccagcaggggcaaccaccccaggcccccaacagacagccagaagaaaccacggaagccaacac

SEQ ID NO: 64038 - RNA, 72 nt, Homo sapiens
gcgaagcaaaggagcaagcggccgagccgagcccgcagacacaaaacgcacacgacagcccacccacaggga

SEQ ID NO: 64039 - RNA, 84 nt, Homo sapiens
cacgcgccggaaggggcccgaagcccccgcaggaaccacaacccaaccaggggccacgcaagaacaaagagcggagggaaagga

SEQ ID NO: 64040 - RNA, 55 nt, Homo sapiens
caaggcagcgccgaagggcgagcggggaaggaacaaagcagagaaaccaaaaggc

SEQ ID NO: 64041 - RNA, 69 nt, Homo sapiens
acaagcggacagaacagacgggacccccagccaaaggcaaagaaagcacgaggccaagggcggggaagg

SEQ ID NO: 64042 - RNA, 110 nt, Homo sapiens
aaacaaaacaggacagcacaggcacagaaggccaaaaaggcaaccacagagagagagagggagggcaccgccccggagccacagcaaagccacccaaggcaggcacagca

SEQ ID NO: 64043 - RNA, 70 nt, Homo sapiens
gggaccggcgaggagcgaagaacaaacacccgagcgcgaggggccagggcgcaacgggcaggccacaggg

SEQ ID NO: 64044 - RNA, 77 nt, Homo sapiens
agcgagaaagccacaccaccaaaacgaaacaaaggaccaaccaaggcaaacggcgaaaaaccgcaaacacacgcaac

SEQ ID NO: 64045 - RNA, 87 nt, Homo sapiens
gcagcgcccgcacaccggcagcaaaagagcgcaccacccggagcgagacgcgccgaaggggggagccaccgaacgagaagaagcggg

SEQ ID NO: 64046 - RNA, 85 nt, Homo sapiens
cacgcgcgggcgggcagccccgggccaggccgcggccggggcaggagcgcagaaaccagccaccggacaaagaggccggaaaacc

SEQ ID NO: 64047 - RNA, 67 nt, Homo sapiens
ccgccggcccgcaacacccccccaccaggcgcgccagacccccccaacaaaggaacgagcagcaacg

SEQ ID NO: 64048 - RNA, 91 nt, Homo sapiens
gaaacggccaggccacaaaggcagcacacaccagagcgaagcgagcccgagccccgggacgggagaaagaacagacaagccgcaagaaccg

SEQ ID NO: 64049 - RNA, 68 nt, Homo sapiens
cccacccagggagcgccagacgggaaccacccaggaaagaccagccacagcagaagggaacacccgca

SEQ ID NO: 64050 - RNA, 73 nt, Homo sapiens
acgcggaacgggacccggggacggcacccagaggaccaggcggcgacgaaaaagagccacgcccccacgagcg

SEQ ID NO: 64051 - RNA, 74 nt, Homo sapiens
gcacacaacaaacagaacgcaaaggccaagggaggaaaaagcggcacagaggaagaggcccaccccaggagaac

SEQ ID NO: 64052 - RNA, 35 nt, Homo sapiens
cgcccgccgccgcggagcagaggacacacaggacc

SEQ ID NO: 64053 - RNA, 80 nt, Homo sapiens
gcgcaacgccacgcaggcgcacgaggagcgacccaagaacaaagagacaacagccacaagggacaaaaggaagacaaggg

SEQ ID NO: 64054 - RNA, 63 nt, Homo sapiens
aggagggccaaaacgcccggcggaccacggccgcagcacgagagaggcggaaggaccaggaca

SEQ ID NO: 64055 - RNA, 77 nt, Homo sapiens
caaaagcagcggccggacagcgccacggcgggccgcgggaggacaccacccacaggacccagaagaaccacgcgcag

SEQ ID NO: 64056 - RNA, 79 nt, Homo sapiens
acaccgacaccagaccagaagccccccacacaccacgggacccagggcacaccgggccgagcggcgccacaccggagac

SEQ ID NO: 64057 - RNA, 76 nt, Homo sapiens
cccagaaagaagaggaaagacgagcccaggcgggagccaaggagacgaagaaaaccccaaagcaggaagaagaaca

SEQ ID NO: 64058 - RNA, 53 nt, Homo sapiens
ccagcacggaccaggaggcgagcaacaggaagaagagagggcgaaggaggcca

SEQ ID NO: 64059 - RNA, 57 nt, Homo sapiens
aaggcgaaaagacaccaaaacaaggaagaaaacagggccaggagggggccacaccga

SEQ ID NO: 64060 - RNA, 64 nt, Homo sapiens
ccgccgcgcaccgacccgacgcgccggcccacgcgcggccaagggagcccacccagaggcaggg

SEQ ID NO: 64061 - RNA, 78 nt, Homo sapiens
ccgggcgccgaagcccgaggcagaggaaccggccccagcggaagacccccggcccagcggacgggagcaggacccacc

SEQ ID NO: 64062 - RNA, 79 nt, Homo sapiens
cgggaagcgggcggccccggccgccccgcgagggcaccaggagggaagcagagcacagccccaggcacaacacaagaaa

SEQ ID NO: 64063 - RNA, 78 nt, Homo sapiens
aggcagagccgcggaagaggggaccggcgcggacccaggaggcaggagaaccacacacacaccggagaaacccacaaa

SEQ ID NO: 64064 - RNA, 56 nt, Homo sapiens
ggggccggaccagccccgaaacacgggcggagcggcggacaccagaagagaaaagg

SEQ ID NO: 64065 - RNA, 78 nt, Homo sapiens
ggcagagcgggccgacccgaaagccgacgcccgccgcggccggggaacaggccacagccaggagcgcacacaggagcc

SEQ ID NO: 64066 - RNA, 74 nt, Homo sapiens
cgaagaaagagacaccaccgagagggaacaacggaccggccagagagagacaagaacaaccaaacagaaacaag

SEQ ID NO: 64067 - RNA, 81 nt, Homo sapiens
ccagcgcgcggacaggaaccggacagcacaccagggccgggacacacgagaaagaacaagcaccggagagagagcaccagc

SEQ ID NO: 64068 - RNA, 65 nt, Homo sapiens
ggggcgagagcgggcaccccccaaacgacgcagccacggagagggagcagaaaagcgcccccaag

SEQ ID NO: 64069 - RNA, 71 nt, Homo sapiens
agcggaaaccaaggaagaaaagccacccaggcccaggcaaccaaaagcgcgcgagcgggacacacagccga

SEQ ID NO: 64070 - RNA, 65 nt, Homo sapiens
gagggggcccaggccagccaccacacgaccacagcagagacaggacaagagcccaaaaggcagag

SEQ ID NO: 64071 - RNA, 87 nt, Homo sapiens
caagacaacagggagccccgacaccaggagacaccccggaggaaaagaagccagggaagggaccaggaggaccacccccaagggccg

SEQ ID NO: 64072 - RNA, 60 nt, Homo sapiens
aaacgcccggggggaagaggaacagccaggggcccacggagggaacgcagcggcccggag

SEQ ID NO: 64073 - RNA, 70 nt, Homo sapiens
gccaggaagaaagagaggaaagaagaaaaccaagaaagccccacggggacaaacgccaggacgagacagg

SEQ ID NO: 64074 - RNA, 75 nt, Homo sapiens
gaacgaaaccggaaccagacagaaggggggaagcgaggcaggaagcccagcacgccgaaggccacgcgacccagg

SEQ ID NO: 64075 - RNA, 79 nt, Homo sapiens
ccgccgggaggaacaccgcaccgggaaaggggccagcagaggcgggccgggagaggacaaccggacgaccaccaggcag

SEQ ID NO: 64076 - RNA, 68 nt, Homo sapiens
caggacacacaacagacaggaagaggacacaacccaggaaggagggccaggaaccgggcgagaagccg

SEQ ID NO: 64077 - RNA, 62 nt, Homo sapiens
caaaaacacgcagggcgcagagccaaacacgacagccgaaggagaggaggcgacaagcacac

SEQ ID NO: 64078 - RNA, 79 nt, Homo sapiens
cagcccccaggaggaccagcaagggccgggcccaggagcgccggccccagcccggagagaggaggccgcagccgggcca

SEQ ID NO: 64079 - RNA, 81 nt, Homo sapiens
aagaagaccacacacgggaaacacaaaaccggacagaaggcacgggggcccgcacgagaaagacacggcagcgcaggcaga

SEQ ID NO: 64080 - RNA, 77 nt, Homo sapiens
gaggagcgaaacaagaggacagaacaagcagcagccagagaagggaggagaaagaagaaacaaagagggacccagcc

SEQ ID NO: 64081 - RNA, 79 nt, Homo sapiens
aaaaagcagggaggagaggcaaaaagaaggcccaggaccgcagcccagccacacaaccgggcccccagagcgcggcaga

SEQ ID NO: 64082 - RNA, 53 nt, Homo sapiens
cgccacgcgggccaccgcgcgccgccgaccaagaggggggagaccggaggacc

SEQ ID NO: 64083 - RNA, 53 nt, Homo sapiens
agagggaaaccagacccacaggaccgcccaggcaacacgacaggcacggaccc

SEQ ID NO: 64084 - RNA, 60 nt, Homo sapiens
agcaccccgccagcgccaccagacagagggacgaggcaggagaacaagccaggacaccca

SEQ ID NO: 64085 - RNA, 78 nt, Homo sapiens
ggggcgcgcgcgccgacggcccaccacaagggcaaagaaggccccaagaaacagagaagagaagaggaagaaacccag

SEQ ID NO: 64086 - RNA, 100 nt, Homo sapiens
cgcgcgcgggaccacccgacacgggaggggaggacccgggacaccgcacagccgggaaagggagaaaaaagggaagaacaagaaaagacgggaagacgca

SEQ ID NO: 64087 - RNA, 116 nt, Homo sapiens
caaggcaagaccgaacagaaggaacgacgcggaccagaagccagagcgaggacgccggcaggccgagaccccacaagccagcaggcagacccaccacgggccaagggcagaaagag

SEQ ID NO: 64088 - RNA, 71 nt, Homo sapiens
gcagccccccgcagcacccagccggccacgggaaacccagacgacaaggaaggccaagggacccacgacca

SEQ ID NO: 64089 - RNA, 75 nt, Homo sapiens
acccaagaagaggacccggcccaaaggggggagcgcgcgacaccaccaaagcaaggccccgggaccaaggacacg

SEQ ID NO: 64090 - RNA, 78 nt, Homo sapiens
gaccagccgcggggaaccaccaggacccagcaggccccagaaagaccaccaggagcacacaacaggaaacaggacagg

SEQ ID NO: 64091 - RNA, 74 nt, Homo sapiens
accgcccgcccgggcgcgacccgggggcagcccagccaacgcgcgcaccaggaaaaaacacagccgagcacgcg

SEQ ID NO: 64092 - RNA, 41 nt, Homo sapiens
gggcagacaacggagcccgggaaaacacggagcagggggcc

SEQ ID NO: 64093 - RNA, 80 nt, Homo sapiens
ccgcgcagcgagcccgagcggcagcgccggaggaagccaacccagagaccaggacagaggaagaaaggccgggaggacca

SEQ ID NO: 64094 - RNA, 121 nt, Homo sapiens
cgaaccgaacagaaaacccgcccccagcgggaggaaggacccggggaggccggccacgccccgcacggacccaaagacaggaccacgcaccagcagagaaggaaagcaaaccgaagcaggc

SEQ ID NO: 64095 - RNA, 82 nt, Homo sapiens
gggacccggccccggcccacaggggggggcaaacccgagagaacggaagccaaagaaacgccaaccgcccaaaaacccagag

SEQ ID NO: 64096 - RNA, 74 nt, Homo sapiens
ggccagggagccgaccagaggagcggagaccgacacaacccccggcccaccgaacccaccccacccccaaaaaa

SEQ ID NO: 64097 - RNA, 60 nt, Homo sapiens
cggggacgagaccggagaccggaggaaggcccgaacaagacaggaacgccggcccggacg

SEQ ID NO: 64098 - RNA, 66 nt, Homo sapiens
ggagccgggcagcggagggggaaagcgcggagaagccaggccccggggccccagcggcaccagcgg

SEQ ID NO: 64099 - RNA, 78 nt, Homo sapiens
gcggaaagcaggagcacagaggaaacacagcgaagaagcaacaggacaaggaacagacagaacagacccagcacaggc

SEQ ID NO: 64100 - RNA, 69 nt, Homo sapiens
aggccggggcgcccggcgccggccgagaaggcagaggcgccggggaggaccagagagcaaaagaaaaga

SEQ ID NO: 64101 - RNA, 73 nt, Homo sapiens
ccccacgcggccagcgaaaacgcccaggcacgagaagagaagcccagagcaaaacaccccaaaccagaccacc

SEQ ID NO: 64102 - RNA, 64 nt, Homo sapiens
gcaccgaaacccgccgacgggaggaaccaaggaaccacacagaaagaggagcagacaagggccc

SEQ ID NO: 64103 - RNA, 85 nt, Homo sapiens
ccggcaccgcggcgcggagccccggcggccaccccggggccgggcagaagggcccagggaaagaacgccggacaacagcggcgaa

SEQ ID NO: 64104 - RNA, 85 nt, Homo sapiens
ccacgagcccagccaacagcgccccggacgcaccagagccaggcgcaggggaaagcgcgagcgagcacccggagcagcagagcac

SEQ ID NO: 64105 - RNA, 83 nt, Homo sapiens
cggagcggaggggaggccggccaggcagggccggcggcggaaccgccaggccgagccggccgggggccgacgacgagccccgc

SEQ ID NO: 64106 - RNA, 53 nt, Homo sapiens
cagacggcaaggaggaaacaccgaagccacagggaagagggagaaccgcacgc

SEQ ID NO: 64107 - RNA, 79 nt, Homo sapiens
gagcggcggcgaagaaggaggcaggcacgggagccgaagccggccaggcgccgcacccacaggaacgccgcggagcaga

SEQ ID NO: 64108 - RNA, 86 nt, Homo sapiens
gcagccgcaccggccaaggggcgacacaacacgcaggccagcgacaacgcgcgccccacgaggccgcaagaagagcagaggagggg

SEQ ID NO: 64109 - RNA, 84 nt, Homo sapiens
cggcccagcgagggcggcccggggcacccgcacgggaagcaggcccgccacagagagcagagcgacacgaaaagacagaccgac

SEQ ID NO: 64110 - RNA, 69 nt, Homo sapiens
ccacgcaaagcccgggggaccagggaaaaagggaagcaaggaaagaccacgagaagcacaggccagccc

SEQ ID NO: 64111 - RNA, 87 nt, Homo sapiens
ccaggaccgggcagagacccaagacaagccagccgaggcaccaccagcggcaaacgaacaaccagaaacgccaagcaggaaaaccgg

SEQ ID NO: 64112 - RNA, 68 nt, Homo sapiens
gaagagggaccacaggcgggacgggagaaacgggcaagccagagaacacaaaaggggacgagacagca

SEQ ID NO: 64113 - RNA, 70 nt, Homo sapiens
ggacccggccgcccgcggcgcagcgcggcgaggcccggcgagcgaccgccgggggaacgcccgagcggag

SEQ ID NO: 64114 - RNA, 68 nt, Homo sapiens
cgggaccgggaccgccgccgccgccgccaccagggagcagcagccccgagaaggaagaggaggaagcg

SEQ ID NO: 64115 - RNA, 60 nt, Homo sapiens
cgcggccgaggggcggacaccagcgagcggagcgggcgacggagccgggggggcgagccc

SEQ ID NO: 64116 - RNA, 79 nt, Homo sapiens
ggagcgggaacgggcgcaaccagcgacacaggaagaacagggcgaggacgaggaccacaccaaggagaagaagacccgg

SEQ ID NO: 64117 - RNA, 77 nt, Homo sapiens
ccgcccagcccccgagagcgggaccagagcaaagaaggcaaaggagcaagcaagaaggaaggccaccaccgggcaga

SEQ ID NO: 64118 - RNA, 84 nt, Homo sapiens
cggagccagcggcgaggaggggccccagcagcccccgaaggcccacaggacaggagagaaagacgcaaagcccagacaagccag

SEQ ID NO: 64119 - RNA, 78 nt, Homo sapiens
ccaccaagcaaagaggcgcccagaaagcagaacaggccaccgggccaacgaaaggaaagggaacgaacaagagaggac

SEQ ID NO: 64120 - RNA, 73 nt, Homo sapiens
ggccaaaggcggcgcccagggcggggaacggaggagcgccgagccaggccaaagaaggaagaccaaggcgaag

SEQ ID NO: 64121 - RNA, 79 nt, Homo sapiens
ccccgcagccgccccccccccggaaaaggcccacgccgggcgagggggcaggggcgggaggggaggccgcccgccacgg

SEQ ID NO: 64122 - RNA, 68 nt, Homo sapiens
gaggcccaggccaaaagagggcgaaggagaaagaaacacccaaaacagcgccggggaaacagaagcag

SEQ ID NO: 64123 - RNA, 60 nt, Homo sapiens
cagccccagaccggccagcacccacagcacacacaggagcccaacaccccccgcacgcgg

SEQ ID NO: 64124 - RNA, 79 nt, Homo sapiens
cgaagggccggaacgcacccgaacgcaagaccaccgagacacaaagaggagcagagggcacccagagaaaacaaaggcc

SEQ ID NO: 64125 - RNA, 74 nt, Homo sapiens
caccccgccaacgcggcaccgcagaacgccacaaccagcggcacgagcaaaaaaaagccccgagcaacaaacca

SEQ ID NO: 64126 - RNA, 80 nt, Homo sapiens
cgcacccaccacgaaggaccggggagggcagcgccacccggcccgcccagagcagcagggccggaggaggcggaggccag

SEQ ID NO: 64127 - RNA, 52 nt, Homo sapiens
gggaccgagaacggaggacaacaccaagcaaggcaaagaaaccccaaagcca

SEQ ID NO: 64128 - RNA, 73 nt, Homo sapiens
gcacagagaaccgaccagaacgcagcaacaaagggacaaaggaaaaagaggaggaaaacagcagggacgaaca

SEQ ID NO: 64129 - RNA, 51 nt, Homo sapiens
ccggggcaccgggacagcaacacaccgaaaaaagggaagcggagaggagca

SEQ ID NO: 64130 - RNA, 57 nt, Homo sapiens
acgcagggcagggccccgcccggcggggaagaggcagcgagaagaaaaagaagagag

SEQ ID NO: 64131 - RNA, 63 nt, Homo sapiens
cccgaaacccggggcaaaaccaacagcacaggagccccggcaggggacccaagggagagaggg

SEQ ID NO: 64132 - RNA, 76 nt, Homo sapiens
aacagggggcaccaccaccgccccccgccccacaggaccggcagcgccaacccaggcaccagccacaggggagaac

SEQ ID NO: 64133 - RNA, 81 nt, Homo sapiens
cacaggcgccccgcacccaacaacccaccaggcacccgaccccgaggcccgccgcccgcgggcccacgaggccggggaggc

SEQ ID NO: 64134 - RNA, 70 nt, Homo sapiens
aggaggaaggagggaccggcccccagcaagccccagcccaagggaaacaaagaccaaagccggccagaac

SEQ ID NO: 64135 - RNA, 78 nt, Homo sapiens
ccagacgcagccgcgaagggaaccgcgggccgccaggagagaagacgcagggccggaaagagggcgggcccgcacgga

SEQ ID NO: 64136 - RNA, 81 nt, Homo sapiens
caaagacaacgaggagaaggaaccacagaggcgaggcagccagggagccaaggaccggagaacccagcccggacacaagcg

SEQ ID NO: 64137 - RNA, 70 nt, Homo sapiens
caggcccgcgccacagcacaccaggcaacacgcagggaaaaaaacaccgggacagcacacaaaacacaag

SEQ ID NO: 64138 - RNA, 73 nt, Homo sapiens
gagcccaccgccaccagaggagaagggcccagacggccacgaggacgggccaggagaaacagggaacgaagaa

SEQ ID NO: 64139 - RNA, 55 nt, Homo sapiens
ggaacccggggagaccccgacgggaggccgaggacagcgcccgcgccgaccccac

SEQ ID NO: 64140 - RNA, 127 nt, Homo sapiens
gaggccaacgaccggagaggggaacagacgcagggcagggccccgcccggcggggaagccggaaccaaaaagaagccccagagccggggccaggagccccaagcgccccagcagcaaacacagaagg

SEQ ID NO: 64141 - RNA, 78 nt, Homo sapiens
agaaccggcagcgaacaaggagaaagccacaacagggcggcaacaggggcgagaaagggccgaaacacaagcaaggaa

SEQ ID NO: 64142 - RNA, 80 nt, Homo sapiens
cacccagcggccacacccgccacccacaggaccagggccacaggagaaggagcgccggcaggaggaagaccaccccgggc

SEQ ID NO: 64143 - RNA, 57 nt, Homo sapiens
ccaagacaaaccaagggcgggggggcacaaggagcggaaggacggccaggagaccag

SEQ ID NO: 64144 - RNA, 79 nt, Homo sapiens
cgagcccggcccgccaacggcaccgacccggccaaccgccccccagcagcaggcacgggcgaaccccgagccccgcccc

SEQ ID NO: 64145 - RNA, 86 nt, Homo sapiens
ggagacgccaccaccgcagccgccgagggccaggacgccaaaccgagacccagcaggagcacaacagcagcaggcaagcagcccgc

SEQ ID NO: 64146 - RNA, 83 nt, Homo sapiens
gggcgccccacggacgaccaggacgaaggccggcggcaggagcacagaccagcgcgcgaccggagccccacagcggcacaggc

SEQ ID NO: 64147 - RNA, 81 nt, Homo sapiens
gggacagcaggagggggccacggccaagcaccaggaagaagaggcggaagaaacaacaagcgcaaggagcgcccaaaccac

SEQ ID NO: 64148 - RNA, 80 nt, Homo sapiens
aagggaccagcagccaaagcccacagccggggaggcgagagaaacccagccgaagcaaaaagcccacaggacacggccag

SEQ ID NO: 64149 - RNA, 76 nt, Homo sapiens
gcggcgccccggcgggaccgggcggcacgcacgcgggcagggaacaggcggagcggaaggaggacccaaagcaaac

SEQ ID NO: 64150 - RNA, 68 nt, Homo sapiens
ggggccgcgcggcacacggggcagccaggccgagccaacaaaagacgacacggagaccacgaggcgag

SEQ ID NO: 64151 - RNA, 70 nt, Homo sapiens
gcagacgcaacgcaaggaccgcagggccccaagaaaagcggaagaagaccgggagcgcccagaacaggga

SEQ ID NO: 64152 - RNA, 75 nt, Homo sapiens
ggccggcggcacccgcacccggggacaagcgcgggaacggcgcggaagggacagagagaggcagaagaaaaagca

SEQ ID NO: 64153 - RNA, 81 nt, Homo sapiens
ggagcggagcgggccagagccgcgaggagcggacaaaaaggaaagccgcaggaagacggagcagggccccagaagcgacag

SEQ ID NO: 64154 - RNA, 84 nt, Homo sapiens
gggccgacagcggaagaccaaagaggagagaaggacgacaagcccaccgagggggggcccccaaagagccgagcggcaaggagc

SEQ ID NO: 64155 - RNA, 74 nt, Homo sapiens
cgcgagagacccagagcgaaaagaagcgagagagagaacagaaggacggaccacgaaaaacacacaacacgacg

SEQ ID NO: 64156 - RNA, 71 nt, Homo sapiens
gccggcgggggaggaaaacggggacgcacaaaaagaccgaaagagccggcccaaaaggaaaaccgccagaa

SEQ ID NO: 64157 - RNA, 79 nt, Homo sapiens
gggacgcacgagcccggcgccggcaggccccgggccgagacccagcagaagacagcagcccagagaggcagcacagcag

SEQ ID NO: 64158 - RNA, 68 nt, Homo sapiens
ggcaggagaaaacaaacagcagagagaagagcaaaggaagcagacgggggagggcgaccgaaggggcg

SEQ ID NO: 64159 - RNA, 68 nt, Homo sapiens
ccaccagcaccgcgcaccccgaacacaaagaaccggaacagaggaaagcacagaccccagaacggacc

SEQ ID NO: 64160 - RNA, 68 nt, Homo sapiens
acaccgggggcgcccggaggagcccgaagacagccccgacgagcccaaaaggcagagcgaggagagaa

SEQ ID NO: 64161 - RNA, 57 nt, Homo sapiens
cccaagaaacaaagccggaagaacaaaaaggggggaacggagccaaaaggaaaagcg

SEQ ID NO: 64162 - RNA, 88 nt, Homo sapiens
ccgaccggacaggagcaggcagagggaaaggcgcagaggaccggaaggggaagggaacaagaagcagggaaggaacgaaagcggagag

SEQ ID NO: 64163 - RNA, 35 nt, Homo sapiens
gaccgcccccagccgacagggccaaccagaagacg

SEQ ID NO: 64164 - RNA, 79 nt, Homo sapiens
gaagaagaaaacaaaggagaacaggaggacgcaggccaaacaaaacggagagagaaggagagaagaggcagaggaggac

SEQ ID NO: 64165 - RNA, 76 nt, Homo sapiens
gaggcacagagaaccgaccagaacgcagcaacaaagaaggggaaacgaggcccaaggaaagagaccgcaaagcacc

SEQ ID NO: 64166 - RNA, 69 nt, Homo sapiens
acgccaccgccacaccacacaggacccaccaggcaagacgaggagcgccaggaaagaggcagagacgaa

SEQ ID NO: 64167 - RNA, 72 nt, Homo sapiens
gagcgggacaagaaacggagagccccacaagcggggagcaccccccgcaaacacggaaagacacacagcgac

SEQ ID NO: 64168 - RNA, 59 nt, Homo sapiens
aaaacgccaggcggaccagaaggccagcaaagccaaaagaagaacccggacccgaccga

SEQ ID NO: 64169 - RNA, 74 nt, Homo sapiens
cagacccagaagagacgaaaaagacggcagaagcccacaggacaaaaacacaaaaggccaccccagccaaccga

SEQ ID NO: 64170 - RNA, 72 nt, Homo sapiens
gaaacccggggaggacaagagagcaaaggaggacgaaccagaaccaaccaggaccaacaaaaccagacggca

SEQ ID NO: 64171 - RNA, 87 nt, Homo sapiens
cagccggcgccaaccaccgcgggcccccagccagccccgcggcggggcagccgcagggaaagggagcagcaccggccacacccacag

SEQ ID NO: 64172 - RNA, 78 nt, Homo sapiens
ccgccccggaccgcggaggcaccgagaacggacgcaagcggggaggggaaggcaggaaaaggaagagcaaaaacaaaa

SEQ ID NO: 64173 - RNA, 85 nt, Homo sapiens
gagagccaaccagaaggccaagagcacgaacccaggagccgggcagccgcgacacagcagcaggggcgcagagcagcgaagacac

SEQ ID NO: 64174 - RNA, 97 nt, Homo sapiens
cccgcgcagccgagagccgggggagcggggccccacacccccccggggggggcaagaacgccccggcaaggacggaggcaggcaccaccaacagcgg

SEQ ID NO: 64175 - RNA, 58 nt, Homo sapiens
cgaccgagaggcgcggagccggggacgcgaaaagcggccaggaccaccaggcggccac

SEQ ID NO: 64176 - RNA, 71 nt, Homo sapiens
ccccgagggcgggacacagggggagaaaaacagcgcgagaaggaggaacacaggaagaagacaaaacaaga

SEQ ID NO: 64177 - RNA, 70 nt, Homo sapiens
ggagcagcaggcacagcacgggcagagccaggagggcagcgggaacgaaacagagcagaagcaacgagca

SEQ ID NO: 64178 - RNA, 66 nt, Homo sapiens
accgacgcgcaccccggacaccccgggcacagggcaacaacacaggcggaggcggcggaaggcaga

SEQ ID NO: 64179 - RNA, 79 nt, Homo sapiens
acggcccaaagaggagggcgcacagcgcccgaggacagggaagaaaccccggagccagcaaaaacacaaacgagggagc

SEQ ID NO: 64180 - RNA, 76 nt, Homo sapiens
gccacggaagccaccgacaggcccgagggcccgagagcaccgcgccagacaggggggggcggaggacgccaccccg

SEQ ID NO: 64181 - RNA, 63 nt, Homo sapiens
aaaagagcccgcaagaagaacagagacagcagccaaacccccagccaagaaaaccaggggaaa

SEQ ID NO: 64182 - RNA, 66 nt, Homo sapiens
agccaacaagaggaagcaggaaaaacaaagaagacccagacaacaggcacaaagagagaaggaaca

SEQ ID NO: 64183 - RNA, 61 nt, Homo sapiens
gacaccggcacgccacagagccaagagagaagggcgcaggaacggggaggaacaaccccac

SEQ ID NO: 64184 - RNA, 80 nt, Homo sapiens
cgcggccggcaagaacggacgggcgccacaagccacacggaggcagcgggccccaggccggggcgagcgggcccgggagc

SEQ ID NO: 64185 - RNA, 98 nt, Homo sapiens
aacggacccagcagaaaagaagcgggcaacccagcgcaggagggcacggagggagccgcagaagcacacacgcacacacgacgcgaaagaggaaggac

SEQ ID NO: 64186 - RNA, 91 nt, Homo sapiens
gaggcccaggaacgggccaaagaccaggagagacgagcagcccagggagcgggagacaggcaaaacagaaccgcaagagaagaacaaggaa

SEQ ID NO: 64187 - RNA, 79 nt, Homo sapiens
gcagggaacagcgcgggccgccaaggcccccggccggccccgcccccggccgagcgacggcaaccaagaaaaagcacgc

SEQ ID NO: 64188 - RNA, 51 nt, Homo sapiens
gcccacgaccccagcaggggaagaacagacaacccagcaacagacggaaca

SEQ ID NO: 64189 - RNA, 59 nt, Homo sapiens
accggcccacccacaagcgcacaggaccggcacccacaaaagcgaaaagccagacagga

SEQ ID NO: 64190 - RNA, 72 nt, Homo sapiens
cacaggaaggccagaagccacgaacagggcggaaacagggagggccacagcccccgcccgggagacaaagcc

SEQ ID NO: 64191 - RNA, 64 nt, Homo sapiens
cccgcaacccggcagcagaagacaagaagaggagagaagaccgacaaagcgagccaagcaaaga

SEQ ID NO: 64192 - RNA, 73 nt, Homo sapiens
agacgaagaggggggacgagacgagggaccagagacccccgaagcccgcgagacccagcaacaaaacgcaagg

SEQ ID NO: 64193 - RNA, 36 nt, Homo sapiens
gggggcgaaggacgacaaggcgcacaagcgcgcgca

SEQ ID NO: 64194 - RNA, 75 nt, Homo sapiens
acagacgcagggcgcccccgggcacagagaagaagagaaacccagacaggcagaagaagaaaaagcagagaaagg

SEQ ID NO: 64195 - RNA, 75 nt, Homo sapiens
aagggaagagaggagaaaggcgcagccaacagccgccagaacccaggaacaacaaaaaacacagacacagacccc

SEQ ID NO: 64196 - RNA, 77 nt, Homo sapiens
ccgaagaacggaacacgagaaaggcaagcaaaggcggcccagggcagcagcacacaaacaaccacaaacaacagcca

SEQ ID NO: 64197 - RNA, 81 nt, Homo sapiens
aagaaaacaaaaacgagaccaagagaaggcagccgagcaccgagccagcccaggaaaaggagaggaacagaaagacaacgg

SEQ ID NO: 64198 - RNA, 71 nt, Homo sapiens
aacggagggcgacggagggaggaacccggcaccagccgggcaaaaacccaaaccaacagaaccgcaccgag

SEQ ID NO: 64199 - RNA, 78 nt, Homo sapiens
aaccagaagagaagcaagagagcacagcaaacagagccacaagagaacaaaaaaagagaaaagacaagacaaagggaa

SEQ ID NO: 64200 - RNA, 80 nt, Homo sapiens
cgggggaggcagcacggcacccagcccagggcgcccggacggggggggacagagcacccgacccaggcggaggacaagag

SEQ ID NO: 64201 - RNA, 41 nt, Homo sapiens
agggcgcggaccgcacgagcgcgaaaagaaacgaagccggg

SEQ ID NO: 64202 - RNA, 76 nt, Homo sapiens
acaccgcgacccacaccaaggccccgagccccggccccaaagacccaaaacagagacaccccccagcccccgcgcc

SEQ ID NO: 64203 - RNA, 77 nt, Homo sapiens
cacacagcgcccaggccagagaaggggaaggaggggcagcgcgacaaagacagacggaaaagaagagaaccgaggcc

SEQ ID NO: 64204 - RNA, 60 nt, Homo sapiens
gccggcgccccgcacgcccgggaagcgcgcaccgccaagcagagacacgcaagcaaagga

SEQ ID NO: 64205 - RNA, 92 nt, Homo sapiens
cgcaggcagccgaaagagcccaaagagcaggaagcgcaaagcaggcgccaaggccagaagccaaaccaaacgacaaaagcgaaaaaaggaag

SEQ ID NO: 64206 - RNA, 82 nt, Homo sapiens
caagaaggcccggacacagcaaaccgggccacagccccaacaggaaaacacaggccccccaccggcagaaaagagaaaacca

SEQ ID NO: 64207 - RNA, 63 nt, Homo sapiens
agaaggaaaggaaagacaggcacgccggacaaaacaaggccgggacggacgaggaggccaccg

SEQ ID NO: 64208 - RNA, 75 nt, Homo sapiens
cacacccagcacaaccaggagccgccggccaacacgaggacacgcggggagaaagaacccaagggccgggcgcgg

SEQ ID NO: 64209 - RNA, 52 nt, Homo sapiens
accgccgcgggccgccacggcggcaagacggagaacaccggaaagaaaacag

SEQ ID NO: 64210 - RNA, 80 nt, Homo sapiens
ccggaagcacagggcagaacgacaagacgaggcacgcagggacgcacaacgagagcagaccaagggcacaaacggggacc

SEQ ID NO: 64211 - RNA, 76 nt, Homo sapiens
cggagacccgccggaggaaaccaccgcacagacgcgcgcggcagaggcaggacccaggagaaggaccagacgacag

SEQ ID NO: 64212 - RNA, 77 nt, Homo sapiens
ggaaagagagggaccaccgaaaaaccccaaacccacaagacaggcagggaggaaagacaggaaagaagccaccacag

SEQ ID NO: 64213 - RNA, 77 nt, Homo sapiens
acaaggcgccacggcagcggaaacccaccagagaaggcgcggccacccaggacccgggggaggcagcgaagaaaaca

SEQ ID NO: 64214 - RNA, 72 nt, Homo sapiens
cggaaaggacaagcaggccggaagcgcacccgccgcacacaggaaacagcccacccaaacacaagagcagag

SEQ ID NO: 64215 - RNA, 105 nt, Homo sapiens
cgaaagcccgacggggaaggcgcgggccggagccggagacgccgagcggggccggggagcggcaggggaggcgaagaagagcccggacagaaagacgacaaaaaa

SEQ ID NO: 64216 - RNA, 110 nt, Homo sapiens
aggggaccaaaacagcagaaggagaaacgagcccagcaagagaaaaacccaacccgacccagaccccagagcacgaaaccgcgcacccgcgcaccggccccaacgccaac

SEQ ID NO: 64217 - RNA, 71 nt, Homo sapiens
gaagaagaaccaaacaaccagaagaagagagcagagaaacggagaagggcaaccccgggccaacggacacg

SEQ ID NO: 64218 - RNA, 77 nt, Homo sapiens
cagaaccaggcccgaaaagcaccccccaaagccggagcgggcaaagaaaaagccagccgaggacgggaaccagaccc

SEQ ID NO: 64219 - RNA, 54 nt, Homo sapiens
gcgggccaccagcacgcacagcacagaaccaggaagaaccccaacagccaacga

SEQ ID NO: 64220 - RNA, 84 nt, Homo sapiens
aaggagcggaacacacagcaagccgccgggacagccacgacgccagccaggacggaacccgcaccaccacacaaccaccacgac

SEQ ID NO: 64221 - RNA, 68 nt, Homo sapiens
gcccaaacgccccacgaccaggaggcccacaagcggcacccaccaagacaaaccagcaaggccgaggg

SEQ ID NO: 64222 - RNA, 72 nt, Homo sapiens
ccagcaaaaaccacccagacaaacgaaaagggggaaggggaaggacaggagcaccggaaccaggggggcagg

SEQ ID NO: 64223 - RNA, 57 nt, Homo sapiens
gaaccgagcaggacgaaaggaacccggccacagcacgagcgaggccgcccggaagca

SEQ ID NO: 64224 - RNA, 58 nt, Homo sapiens
aaacccgcgagcaggaaccccaggaaacggccaggacgccggacagacccgggcacag

SEQ ID NO: 64225 - RNA, 84 nt, Homo sapiens
gcaggaagaacccacgggcagcacacacgaaagagaagccccggaggggggaggcaaagaaagaagcccggaaacgggcggaag

SEQ ID NO: 64226 - RNA, 87 nt, Homo sapiens
acggacggacccagcacgaggaggcgcgaggagagagaaagcagggaaggcaaccacagaaccagagacaagccacagcgaaagaaa

SEQ ID NO: 64227 - RNA, 100 nt, Homo sapiens
cggaggcaaaggaggcgccgggccccgcccaggacccgacggggaagccaggagcagaacgcgccggaaagaaagacacgcagaggagaggagaaaggag

SEQ ID NO: 64228 - RNA, 70 nt, Homo sapiens
ccaggcccggcccggcggaaaaggagaggcagacccaagggagcggcaggggaggcgaagaagagcccgg

SEQ ID NO: 64229 - RNA, 91 nt, Homo sapiens
ccggagccggccagggccggcgcggcgagagaacaggccgaaagggccacaaacccaaggaccgaaggagaagaaggagaaggggaggaga

SEQ ID NO: 64230 - RNA, 95 nt, Homo sapiens
ccgccgcccccgccgccggggacagcaaccccggaggccggaggaacgggcccgcaagcgcgccgacagagggacgcaggcaggaaaacaagcca

SEQ ID NO: 64231 - RNA, 84 nt, Homo sapiens
ggagacaagccccgacagccgagaaaggcagacacaagagcaagcccgcacgggaaggcaccacgagcagacagacagcgaaca

SEQ ID NO: 64232 - RNA, 71 nt, Homo sapiens
aaacccacggacacccgccccgacccgggcgaagaggcccgaggccgaagaagcacccaggaacgaggccg

SEQ ID NO: 64233 - RNA, 40 nt, Homo sapiens
gagccgccgccgaccgaggccagcacagaggagcccagga

SEQ ID NO: 64234 - RNA, 75 nt, Homo sapiens
agagggagccaagggccagaagagggccggcagacccccacaggcacccagagcgccgcgccaggcggaggcagg

SEQ ID NO: 64235 - RNA, 71 nt, Homo sapiens
cgagccaccaaggagcagcccgggccaggaccggaaagcgaagccaacaaagaaaggaccggggcaaaacg

SEQ ID NO: 64236 - RNA, 62 nt, Homo sapiens
gacccaccacaccgagcccaagcggaaagcacgcgcacagaggacccaaagacaggaccacg

SEQ ID NO: 64237 - RNA, 87 nt, Homo sapiens
cgggggcgccaggcgaccggagcgaacgccacgccgggcccgggcgcgccaggcacagccaagagcggaccggcagcggccagcgca

SEQ ID NO: 64238 - RNA, 77 nt, Homo sapiens
gaagagcagagggggaccagagagcccaacgccgggccaagaccccgaggagggagaggcgcacacaggaaagacaa

SEQ ID NO: 64239 - RNA, 59 nt, Homo sapiens
gaaagaaaagccagcgaggggaccagaccgagagcccaaagacaggagacaaacaaaac

SEQ ID NO: 64240 - RNA, 65 nt, Homo sapiens
agccaaaggaagccaggccacgaaaggcacgcaaaaaaaccaagggaaaagagacaagaccgaga

SEQ ID NO: 64241 - RNA, 76 nt, Homo sapiens
gggcggccagaggagccgaggacagccaagcccaagaaccaagagaccacggcccaaagagccccccgaggagcag

SEQ ID NO: 64242 - RNA, 89 nt, Homo sapiens
ggcgggagacagagggaagcaccacacaccaccacagcccaggggggcggcaagacagaagaaggaggagaaaccccaaaccagaggag

SEQ ID NO: 64243 - RNA, 82 nt, Homo sapiens
gccagagcgaggacgccggcagaccgaggccaaaagaaaggaagaaaacccccaaaaagccaaaaggccaagacaagaagaa

SEQ ID NO: 64244 - RNA, 69 nt, Homo sapiens
agagaagaacaccagaaaaagaaccacgccgcaaggagacagagccgaacagccgcgacaacccaaggg

SEQ ID NO: 64245 - RNA, 57 nt, Homo sapiens
aggcgaaccacgggaagaagagccagggaagacaaaggcgcggcaagcggggaagca

SEQ ID NO: 64246 - RNA, 72 nt, Homo sapiens
agaaaggacaggacggcgggcaaaggcaggacaaagcggaggcgccagcacacggggcgcacaagaaaaaag

SEQ ID NO: 64247 - RNA, 51 nt, Homo sapiens
ggacacaggagagacagccagaaaacggcccaaggcgcgagggcgagagcg

SEQ ID NO: 64248 - RNA, 68 nt, Homo sapiens
ccagcgagccagagggccgaacgacaggaacagaagacgggacaggaaaggcaggagcaagggaaaac

SEQ ID NO: 64249 - RNA, 76 nt, Homo sapiens
ccggaccggaaccgaaccgcaccagggacgagacgaaccaagcccagcaagaccacgacacgagagcgccgccagc

SEQ ID NO: 64250 - RNA, 66 nt, Homo sapiens
ggaagacgggggacccacaggccagccaagaccgcaccgggacgggcgggccaagcccacgaccgc

SEQ ID NO: 64251 - RNA, 56 nt, Homo sapiens
gcaaaggcagaaacaagagaggaggcacaggaggaagaccacgcggcaagcaaaaa

SEQ ID NO: 64252 - RNA, 78 nt, Homo sapiens
ggaggcgcaaggacccccgcgccagccggcacagccacaccgagaagaccggcccaagaaccccaccgcccgaagaca

SEQ ID NO: 64253 - RNA, 57 nt, Homo sapiens
gccagcgccggaaaccaacaaccccgaaaagcacgcagggacggcccgggaccagcc

SEQ ID NO: 64254 - RNA, 60 nt, Homo sapiens
gaagacaagcaaaaagacgggaaacggcaaaggcgccccacggcgaaccgggaaaaggcg

SEQ ID NO: 64255 - RNA, 71 nt, Homo sapiens
ggcacaagcacaaccccaaaaaaggccagaggaggacagcacgagaggaaggaagacccacaagagaccac

SEQ ID NO: 64256 - RNA, 75 nt, Homo sapiens
cgcccgcgcgccccggagcgcgaaggagcgcgggaccgggagcagagccagcccaggcaacgggaaaccaggaga

SEQ ID NO: 64257 - RNA, 79 nt, Homo sapiens
ggggaccgaccaggacgacacgaaggaggaagaagagacgaagagacagcggagaaggagcggcgacagacacgggaag

SEQ ID NO: 64258 - RNA, 74 nt, Homo sapiens
aagacagcagaggcacaccaccacagccagaggagcagccgaagcccagaacgaaaagcccacaggcaagaaga

SEQ ID NO: 64259 - RNA, 61 nt, Homo sapiens
aaaggcaaagaccaagacaacggcaagagcagacaccacccaccaaccaagcacagaaaaa

SEQ ID NO: 64260 - RNA, 87 nt, Homo sapiens
cgcgccccaaggggggcggggggccaccgaacgcgcacgccggcagcgggcgacgcacgaggcacacaggaaggaggggagcaggga

SEQ ID NO: 64261 - RNA, 76 nt, Homo sapiens
acgcaccacgacggggaagagaggcccggccaggcacacgggaaagacgcgagccaccgagacggggagaagcggc

SEQ ID NO: 64262 - RNA, 75 nt, Homo sapiens
ggagacagacccaccgcaggagaaaaggacgacggaaccaccacgaaaaaaagcacacccaagacacagaggcac

SEQ ID NO: 64263 - RNA, 73 nt, Homo sapiens
caccgggcaccggcgcgcagcgggggccgggggccgaccggcaggccaagcaggccggaccagcggcaggagc

SEQ ID NO: 64264 - RNA, 77 nt, Homo sapiens
ccggcccaaccgcccgcgaccccccgcgccgcgccgccgccgcagcgccaaaaacgggaacggagccccccgcacag

SEQ ID NO: 64265 - RNA, 71 nt, Homo sapiens
gacacaggagagaacgagcgggagagcacgacaacacggcaggacgagccgaggaaacaggaacacgaaag

SEQ ID NO: 64266 - RNA, 63 nt, Homo sapiens
accccacccccaagaaccaacccccaaaggcgggacaggggaggagaagacaagcagacccac

SEQ ID NO: 64267 - RNA, 81 nt, Homo sapiens
gaggagacaccaaaaggccaaaacagaagaggcaaagcccagccacagcagcagcccagcagcaaacaaccaaagagaagg

SEQ ID NO: 64268 - RNA, 66 nt, Homo sapiens
ggacacgagacggcagacccagcgccgggaggagagaaagaacccacgcaggacgacagaagaggc

SEQ ID NO: 64269 - RNA, 96 nt, Homo sapiens
acgaggccccgagccagccccgacagcgggaaccgcagcaagaagggaaaacaaagcaagacaccagaagccaacccagagaaccgaagaccacag

SEQ ID NO: 64270 - RNA, 40 nt, Homo sapiens
gacgaaccggaaaagagccgagcggcaggcggggcagaag

SEQ ID NO: 64271 - RNA, 75 nt, Homo sapiens
cgggccccggcgcccggcgcggagccgcgccgcacgcgcgaccccgggccaccaaaagaaggcggaagaaaggaa

SEQ ID NO: 64272 - RNA, 107 nt, Homo sapiens
gccagcgacaaccagccgacccaccaccggcccaggaccccacccccaggcagaggggaggagacacgaagcgacgcagagccagaagggaggcagggaacacgcgg

SEQ ID NO: 64273 - RNA, 67 nt, Homo sapiens
cacgcaggaaaacagagaaccaagcggcaaagcaccgaacgcccacaacaagggaccggaacgaaca

SEQ ID NO: 64274 - RNA, 69 nt, Homo sapiens
aaagaagggggggccggagggggcagcaacgcaacaccgaaagaggaaccaagaacagagaccagcaca

SEQ ID NO: 64275 - RNA, 79 nt, Homo sapiens
ccgcccccaggacaggcgagagcgcaggggaccaaggaggcaaaacgacgacagaaacagccaaacaagaagaagagaa

SEQ ID NO: 64276 - RNA, 86 nt, Homo sapiens
caaagcagaaaagccccagcaaaccagccagcacgggggcccagccagccagcagcgaggggggacggaggcggcacggggccaga

SEQ ID NO: 64277 - RNA, 81 nt, Homo sapiens
accagacgggcgggaaagagaggcccggccgagaaacagacaacccacagaacaaagcggaccaaggcacccccagagcga

SEQ ID NO: 64278 - RNA, 75 nt, Homo sapiens
ccccgaccgggagaggagagcccccaggggagccggcggaacgccgagggcaggggggaccagagccagcggacc

SEQ ID NO: 64279 - RNA, 77 nt, Homo sapiens
caggaggcgacggcggagcggaggaggcgccagcagcccggagagcccaacagagaggaaacgaggcggcgcggcca

SEQ ID NO: 64280 - RNA, 70 nt, Homo sapiens
cgggagcgcgcagccagacaagcaggggaccaaaacaaccccggaagagaggacaaacaacaaaggccac

SEQ ID NO: 64281 - RNA, 44 nt, Homo sapiens
cagcacggcggaggcgcagagaccacagagaagcaggcgaccag

SEQ ID NO: 64282 - RNA, 65 nt, Homo sapiens
cggggacccccgacgccaggcagcgcccccaaacgaaaacaccgggaaaggcccaaaccggcgaa

SEQ ID NO: 64283 - RNA, 71 nt, Homo sapiens
aaaaagccacacgaagccacccgacaacaggaagaagaaagcccaacgcagaacaaaacggcgcaaaccag

SEQ ID NO: 64284 - RNA, 81 nt, Homo sapiens
cggaaaaccaaccagaagacgaacaaacagcaagaaagaccacaagaccagacaccaggcagaaagagcccacaagacaaa

SEQ ID NO: 64285 - RNA, 58 nt, Homo sapiens
acgcacaacaagacccaagggaacccagaaccgcggaccacagcaaaccaagcagaca

SEQ ID NO: 64286 - RNA, 54 nt, Homo sapiens
agcccaagccggaacagccaacaaagagagagccaggcagcgagcgggagcaga

SEQ ID NO: 64287 - RNA, 80 nt, Homo sapiens
gggggcggcggcgacagccaggcccggaagcgagggcggccgcgccggcccagggagagaacagcacacagaggcgcaag

SEQ ID NO: 64288 - RNA, 75 nt, Homo sapiens
gcagacaacgccaaaacgggcaccgaaagaccaaacaacgccggcgaaggaccaaaggagccggcgggccgagaa

SEQ ID NO: 64289 - RNA, 70 nt, Homo sapiens
gagcacgacagaacgaacgaaacaccaaagaacgggcgcaccacgccaccccgccacgagagcaggaaac

SEQ ID NO: 64290 - RNA, 79 nt, Homo sapiens
cagcgcggacccgcccggagagagcgccgagacggcgcgcgggggccaccaacggcacggacagagcacgcccaagaac

SEQ ID NO: 64291 - RNA, 74 nt, Homo sapiens
ggaagccaaaggagcaccacagcccaccacaacagcacaccacccccgacaggaccaagaaagcgcccccagcc

SEQ ID NO: 64292 - RNA, 68 nt, Homo sapiens
ggacccacccccgggggaaaagaacgagcagggaggcccccaggggagacgcgcccaaagcagcgcca

SEQ ID NO: 64293 - RNA, 77 nt, Homo sapiens
agcgcgccgacccgaggagaaccagcggagaggcaaccagccaagggaccgcagggagacggcaccaccaccggggg

SEQ ID NO: 64294 - RNA, 58 nt, Homo sapiens
gaacaacggcagcagcagccccccaagacgcagggacagagccacgggaaacaaggaa

SEQ ID NO: 64295 - RNA, 77 nt, Homo sapiens
gccagaccgccaaaccagagaaagaaacacccgaacagcgaggcaggaagaagaaaaacgaccagagcaggaaagcg

SEQ ID NO: 64296 - RNA, 76 nt, Homo sapiens
ccccagccgcccgcggccgggagcggagccccgggaagacgcacacgccagagcgcccaaccaggcagagcacaca

SEQ ID NO: 64297 - RNA, 55 nt, Homo sapiens
aaaggagaagaaggaaggggaagaggcccggacagcagaaagacaacgacgaacg

SEQ ID NO: 64298 - RNA, 89 nt, Homo sapiens
acccagggggccacacgccccccccccacgccacacacacgcgaacccacgagacggggagccgcgagaagcccgggcacccaccgcag

SEQ ID NO: 64299 - RNA, 70 nt, Homo sapiens
acgcaccaccagagcaaggggagcacaaggcgggggccccgcaaaccggggagcccccagaagagaggac

SEQ ID NO: 64300 - RNA, 70 nt, Homo sapiens
aggccaaggaccgcacaaccagaccagggcaaagcaccccagagcaaaaaacggggagaacaaagaacac

SEQ ID NO: 64301 - RNA, 83 nt, Homo sapiens
ccccccagagagccagaaagaacacaggaagccggagaaccgaaggaccgcggaccaggcggacagccccccgcagaccgcgc

SEQ ID NO: 64302 - RNA, 72 nt, Homo sapiens
ccgggcaaaggggcggccccagcgggggaaacagaaacggagggaaggcgccagacacagaaaagaaagaga

SEQ ID NO: 64303 - RNA, 84 nt, Homo sapiens
cagaaagcagaggccagagcggagacagacggcaaaagggaaagcaaggggaagggcccaagaagacaccccaccagaaaccga

SEQ ID NO: 64304 - RNA, 76 nt, Homo sapiens
gagaaccaaggggacacggccacagagagccagaggaccacaagcgccaggcacacgccacaggccaacaaagccc

SEQ ID NO: 64305 - RNA, 60 nt, Homo sapiens
gagagcacggagacacacagcgaagaaaagcaaacacgaggagccacagggcccaggggc

SEQ ID NO: 64306 - RNA, 77 nt, Homo sapiens
caacagaaaccccccacaggaaaggagggaagccagaggccaaaggcaggaggaagaggacaccagcccgggagaag

SEQ ID NO: 64307 - RNA, 74 nt, Homo sapiens
cggcccccaacgacaaaagaccccaggacaacaaggccccagcgggaggcaacagggccagacccaaacaacca

SEQ ID NO: 64308 - RNA, 83 nt, Homo sapiens
aagaagcaaaaaagggacgcaagaagaaccaccagaaacaaggcagacccggaaaccagacgacagaaaggacggcaaagcgg

SEQ ID NO: 64309 - RNA, 81 nt, Homo sapiens
cgaccaccccaagcgccacacggcgacagcgcgggaggccaccgccccaccagcaggcaacgccacagaccgccagcgcca

SEQ ID NO: 64310 - RNA, 97 nt, Homo sapiens
caggacgacgaggagcagggccgacgcgcaggccgcccccagcccagggccagaggaagcccgcggaagcccggcagaagccgagggccggcgcccc

SEQ ID NO: 64311 - RNA, 79 nt, Homo sapiens
cccgcagagccacagggcaggagcagagagggcgagccaaaaaggcagaagaaaaagacaaaagggaagcacaaaaaag

SEQ ID NO: 64312 - RNA, 85 nt, Homo sapiens
cgagaccgcggcgaggaccggccgaacgaggcggggggcccgagaccacaccacacccaccagggaggaccggagaagcaaagcc

SEQ ID NO: 64313 - RNA, 79 nt, Homo sapiens
aaagaaagcaggacaacaaaacaaaggagagagagccacggaccgccgagccaccagcaaagacgggcggcagagaaga

SEQ ID NO: 64314 - RNA, 71 nt, Homo sapiens
aggcggagacaacccacacgggagcagagacccagcgcccgggaagcacggcgagcaccacaccgccacgc

SEQ ID NO: 64315 - RNA, 78 nt, Homo sapiens
cgccgcgccgcgccgcgccgcaccccgagcgaccggaaacgccaagagcgagcggacgaggagcccggaagagaccag

SEQ ID NO: 64316 - RNA, 82 nt, Homo sapiens
aaaagagcggagagagaagcaaggacacaggaacgccacaagaaacaacagcaaggcgagggccacgaaacagaggagaaga

SEQ ID NO: 64317 - RNA, 70 nt, Homo sapiens
gcacagcggggaccacccacgacccgagcgaggaaaggacagaagccacaaaacacggcacgccagacac

SEQ ID NO: 64318 - RNA, 78 nt, Homo sapiens
cacaggggacgcaccaccggggacaggggagcaaaacgcccaccacggaggcaccgaggacgacgggggcggcaaggc

SEQ ID NO: 64319 - RNA, 72 nt, Homo sapiens
acagaggagggaggaaaacaaccgagggcagaacacaagacacccaagaagcccagcagacccaacgcccag

SEQ ID NO: 64320 - RNA, 84 nt, Homo sapiens
gcaagcacagccaacagcccacaaggccgaaccacaagcgaagcaagacagaaaccaaagaccgccagcaggcaggaaacacca

SEQ ID NO: 64321 - RNA, 39 nt, Homo sapiens
agcccgagcgacaacagggaaagaagaaggaaccccaca

SEQ ID NO: 64322 - RNA, 77 nt, Homo sapiens
ccggccaggcgagaaaggcagagaggagcgggaaggccccgcacccggagaccgggggaagacaagcacaagagagg

SEQ ID NO: 64323 - RNA, 86 nt, Homo sapiens
cagcgcagcaaaccggagcaacagaagagcagagggaccaccccagaacccgccaggggccagccaagcccccacccccaaggaag

SEQ ID NO: 64324 - RNA, 94 nt, Homo sapiens
ggccgcacagaaggaagaaaagccaggcaaggggacgcggaccaaaaccaaagacggccagaaggagacggcaaagagcagaaaaacgggcagc

SEQ ID NO: 64325 - RNA, 90 nt, Homo sapiens
gaaccgccccacgagaccaaacgccaacgaaccacgcccgacaagcagagaaaaacgcgaaaaccaccgcaagcagacaagggacagaca

SEQ ID NO: 64326 - RNA, 84 nt, Homo sapiens
gggccccaagacccaccggagagaagaagagaccagagggacaggagggcgagcggcacccccacgggaacccaaaaagacgcc

SEQ ID NO: 64327 - RNA, 75 nt, Homo sapiens
ggggagcgggacacgaacggggaggcacccgagcagagcacagaagaagcggcgggagaccaggagcaccgggag

SEQ ID NO: 64328 - RNA, 61 nt, Homo sapiens
ccaccaacaaccaggacaggggggcacaagccacggagcgagcccggggagccaggcagga

SEQ ID NO: 64329 - RNA, 116 nt, Homo sapiens
ggaccgcccagagcgaccccccgcccagagcgcacagcaggccgcagcggaagccaggaagagcccgcggcacagaccagagccccgaaggccccgaacagaggacccacgccggg

SEQ ID NO: 64330 - RNA, 71 nt, Homo sapiens
ccccggaaacgccccccgggggcagagggcagcaagaggcgcgcagagggcgcagggcagaacaaagaagc

SEQ ID NO: 64331 - RNA, 77 nt, Homo sapiens
ccccacaggcgggaggaaaggaggggacagagacggcacaggagagggccaaaacgaaggagaagcccagaagagag

SEQ ID NO: 64332 - RNA, 80 nt, Homo sapiens
ccgcagccgccgagggccaggacgccaagcggaggcaggggcaaccggcacgcaacccaccccgggcaagcgacaggccc

SEQ ID NO: 64333 - RNA, 76 nt, Homo sapiens
accagaagaccgacaggaggccccggaagacgggagggagcaacaacaaggagcaagcacagcgcgagccagcccg

SEQ ID NO: 64334 - RNA, 72 nt, Homo sapiens
cgcgcacccaccgggcccgcgggccgccccaccccacaggacccaaagacaggaccacgcaccagcagagaa

SEQ ID NO: 64335 - RNA, 70 nt, Homo sapiens
gcgaagccagcggacgggcagggcccagaagacaggccagaaacccagaaagaaagaaaagcaagaacaa

SEQ ID NO: 64336 - RNA, 70 nt, Homo sapiens
ccccgagagcgggacgcagggaagccgagaacgagcaaaaagcagaccccaccccggacccaggaccaag

SEQ ID NO: 64337 - RNA, 76 nt, Homo sapiens
aaggcggcaggcacagaggcaagaaaacgaaggaaggaggacccgaggagagagaagacggaaaggaaacacggaa

SEQ ID NO: 64338 - RNA, 62 nt, Homo sapiens
cccccgccagcagccgccggagccagccaacgagcggacggccggagcagcagaacaagagc

SEQ ID NO: 64339 - RNA, 76 nt, Homo sapiens
agccagacaaggcgaccaaccaacaaccacgggaagccgcggccccaagcaccagcccacgacaacaaccgacagc

SEQ ID NO: 64340 - RNA, 66 nt, Homo sapiens
agaaggaacccccacggcgaagccagcggacgggcagggcccaggggccagcacgaaagcagccag

SEQ ID NO: 64341 - RNA, 85 nt, Homo sapiens
aaccccgcacggacaccggcggccccaccagcagacgcagccgagacaccagcccgaaacaccaccaagcgcgccgggggcccgg

SEQ ID NO: 64342 - RNA, 76 nt, Homo sapiens
gggcccagaggcccagggaggcaggggcagaaacagagaaggaacagcgcgccaagccaaaccaacacgcagagcc

SEQ ID NO: 64343 - RNA, 76 nt, Homo sapiens
gcaggcggcgcggcggagcgccccgggggcgcaggcagacaccccagcgcaacaaaagagcggacagaccaagaaa

SEQ ID NO: 64344 - RNA, 71 nt, Homo sapiens
cggaagaaaaaacaggacaaacaagcagaccccccaaagaaggggggagccgcacgacccgaacgccagag

SEQ ID NO: 64345 - RNA, 73 nt, Homo sapiens
gcagacggaaggaacggaggccccggacggagaaaaagaggagccccaagccagaacgacaccgcggagcaag

SEQ ID NO: 64346 - RNA, 66 nt, Homo sapiens
ggcgccaaccgaacgcaacaaccaagaagcgacagcccggggcgagacacaagagagcgccgaaga

SEQ ID NO: 64347 - RNA, 77 nt, Homo sapiens
ggcgcgccaacagaacggaaagaaggaggccagaggcagggcgcgggcagcggagggcagcgaccagaaggccaaaa

SEQ ID NO: 64348 - RNA, 70 nt, Homo sapiens
gccaagagagccgaacccaccgagccagggaggggagcgaacgaagaaaggccaagagggagagacaagg

SEQ ID NO: 64349 - RNA, 103 nt, Homo sapiens
cccggcgacacggggcaaggggagcgggcgcgcgcgaccgcgccccggggaagagcgagacaagagccaaggacagggcccgccaccagaaggacccaagccc

SEQ ID NO: 64350 - RNA, 65 nt, Homo sapiens
gacagccgcggccgggcccgaggaaagaagacaaggcggaagaccagcaagccaccccccaaagc

SEQ ID NO: 64351 - RNA, 103 nt, Homo sapiens
ggggagcccgcgcccgccgcgggagagaggacccccccccccccccaaggcccgacaggcccccagagccgcccacaggaggccccgggcagcgcgggcgcga

SEQ ID NO: 64352 - RNA, 78 nt, Homo sapiens
gcaccaagacgaaaccggcagaaggcacgcgcccggacagacaggcagggccgacgccaccgccgagcccagaccgga

SEQ ID NO: 64353 - RNA, 75 nt, Homo sapiens
cgacccgcggcccccgaccgcccagagacaaggccaccgagcccaagcgaccgagcccgcgccaagcgacaccca

SEQ ID NO: 64354 - RNA, 72 nt, Homo sapiens
gcggcgccagcagccagccggcacgccaccgacaagcaagccgaagagaaaggcgagaggaaacagaccaaa

SEQ ID NO: 64355 - RNA, 74 nt, Homo sapiens
ggagggcaagaagaagaaccgagcccagcaagacccccagcgcccgcggggagaagaggcgcccagcaacgcca

SEQ ID NO: 64356 - RNA, 55 nt, Homo sapiens
gaaccagcaacaagccggcaaagcagagagcagaggccagccacgcaacggcccg

SEQ ID NO: 64357 - RNA, 72 nt, Homo sapiens
ggaaccacaagcaccagcacgccggcaacaccagaagaaaggagagagccgaaagagaaaagcgcgcgcaaa

SEQ ID NO: 64358 - RNA, 96 nt, Homo sapiens
gaaccccgaggaagcagcgcgcggccagagaaacggcagacgaacaccaaccagggcagaccgggaccacgccaggccgggaccacagggccagag

SEQ ID NO: 64359 - RNA, 79 nt, Homo sapiens
caacagcaaccgaggagcaaggccaaaaaaggacaagcaaacggcacccgagggagagcgcaccaccccacgcgccagg

SEQ ID NO: 64360 - RNA, 80 nt, Homo sapiens
gaaaaaagggccaagagaagcacccgggaagggcagacaccgccagcggagaacaacacgagaagacaagacaagacaca

SEQ ID NO: 64361 - RNA, 70 nt, Homo sapiens
cgccgaccccccggcgccgcgccggcggcggacaaggcacgaggcgcggcgaccaccacagcagagcccg

SEQ ID NO: 64362 - RNA, 81 nt, Homo sapiens
acagaggccagcaggaccaacaccagcaaccaaaagcccaaaggaggcacagaaagaaaggcacagagaagggccaggcca

SEQ ID NO: 64363 - RNA, 82 nt, Homo sapiens
acccgacacagcggagcgcccagaggcgagcccggggaggaagagaacgggcaccccgggcggaaaagagggaaggcgacac

SEQ ID NO: 64364 - RNA, 87 nt, Homo sapiens
gccgccccgcgagcacagagcccgccgccgaccgccgcccgccacacccgccgccagggcgcacccacgacgcgcacaccaccggca

SEQ ID NO: 64365 - RNA, 78 nt, Homo sapiens
acagaaccaaaggcaggacagccagcaggggacgcaccaaagaagacagacacgcagaaaaggagccggaccccaggg

SEQ ID NO: 64366 - RNA, 78 nt, Homo sapiens
ccgacaggcccggaggcagcagaagggggggcagaggaaaggaggaccgagggacaacccggcgaccggagagccaga

SEQ ID NO: 64367 - RNA, 77 nt, Homo sapiens
cccagagggccacagcaggacacgccgcgcgaaagaggggcagaaaggagcgaccggaccaccacaacccgcaacgc

SEQ ID NO: 64368 - RNA, 101 nt, Homo sapiens
gaaccggagaccccgaaaacggaagcgcagggagaaggaagaggggaaaagcaccaggacaaaagaagggcagcacaaaggaaagccccaaaccccggaac

SEQ ID NO: 64369 - RNA, 57 nt, Homo sapiens
aaaaaaaaagccaaaaagaaaaagcccggagaaccaggaaccaccacccaccgaagg

SEQ ID NO: 64370 - RNA, 76 nt, Homo sapiens
gaccggacgcagccgccaccgagacgagccgaagaagcacaggaaacaaaccagagaagacaaccacccgagacca

SEQ ID NO: 64371 - RNA, 68 nt, Homo sapiens
gaaagggggcagcgaccagaagaagagaacgagccaaaaggacaaaccagacgaagaaagccaacgaa

SEQ ID NO: 64372 - RNA, 75 nt, Homo sapiens
caaacaaagcaaagaaacaaccaagccaccggaaggccgcgggggaaggaggacgcagagagggcacacggggcg

SEQ ID NO: 64373 - RNA, 81 nt, Homo sapiens
aaagcaaggaggggaaaaaccgcgaagcaggggccgcgggaagccacccagagccacggccccacggacaaaccaggacac

SEQ ID NO: 64374 - RNA, 92 nt, Homo sapiens
gacgacaagcacacacaggcgcgaaacggaaaaagcggagaagcggaggagaccaaggaggccaccaccacagaaggagcggcacggagcgg

SEQ ID NO: 64375 - RNA, 75 nt, Homo sapiens
acccccgggcgcaccagccacccgcggcggggcaggagcccagcgggggggcaggagccgagcccaggccaggag

SEQ ID NO: 64376 - RNA, 68 nt, Homo sapiens
gcacggcgacgccccaggggaaaacccccgggaccagggcagagaacaagcggccccaagcaggacca

SEQ ID NO: 64377 - RNA, 76 nt, Homo sapiens
gacaggaacagaggaaagaacaaccccagcgagcacaaccaggccgaagaagagccaagagaaccgaacagaagaa

SEQ ID NO: 64378 - RNA, 62 nt, Homo sapiens
agaaagacagcaacaacaaccagcagcaacaaggaaacagggaccaagaaaggcccagggac

SEQ ID NO: 64379 - RNA, 56 nt, Homo sapiens
cggaaaccacggagggaacacggccagcagacccaaagacagggcagaccgccagc

SEQ ID NO: 64380 - RNA, 70 nt, Homo sapiens
ggaaagggaaggcagacccccaagaaggacaagccccgggacgaagcggggaacgcaccgaacacaagga

SEQ ID NO: 64381 - RNA, 76 nt, Homo sapiens
agaggcgcgcggcgaggacggcggacaaggcccagaacaagcacaacaagacccaaagcccgcagcgaccggcgcc

SEQ ID NO: 64382 - RNA, 83 nt, Homo sapiens
cccggacagggggccagcacgcgccaagaccccaccaccccacccacccgcacgggcccgaggagcccccgcgcccaggcgga

SEQ ID NO: 64383 - RNA, 86 nt, Homo sapiens
ggcgcgcggacccaggcgcggaggcgaggccagcagaaaaaggcacaaacccagcacagagaagacggcgacaagcaaaagacgac

SEQ ID NO: 64384 - RNA, 65 nt, Homo sapiens
ccacggcacaggaaaaaagaaggggaagcggggccaggacacacgagcaagaagaccccaagagc

SEQ ID NO: 64385 - RNA, 87 nt, Homo sapiens
gcaaagcaaaaggggaaaagcaggccaccaacggcggggggcgaggagcgagcaggagccgggcggcggccggggaggaaggccaca

SEQ ID NO: 64386 - RNA, 73 nt, Homo sapiens
ccgcccgggccagcggccgcgcacccccggccggaggcaccagcacaaacaacgcgagagaaggacccacaaa

SEQ ID NO: 64387 - RNA, 59 nt, Homo sapiens
gaaagacaggaggccacccccaaagaaaagaaggccaagagaggccaacagaggaacaa

SEQ ID NO: 64388 - RNA, 53 nt, Homo sapiens
gaggcaccgcggcagacgggaccacgaggcaacgccccagacagccaagcacc

SEQ ID NO: 64389 - RNA, 76 nt, Homo sapiens
aaagcacccagaggaaagaacaagaaggaggcggcccaaggcacaagaggaggaaggaccgagcgcaggaaccagg

SEQ ID NO: 64390 - RNA, 60 nt, Homo sapiens
ggggggccaagagacagggcacaccaaacccacggcaccagacccggaggagcagcaccc

SEQ ID NO: 64391 - RNA, 70 nt, Homo sapiens
gaaaggcagcaggcggaggccacagggaaagagcaccgaaaccaggcggaaacacggcaggcaacccacg

SEQ ID NO: 64392 - RNA, 70 nt, Homo sapiens
cccgaacccagccgcaccgccagaacgggaagaagagaagagaacaaccaagagaaaaccccgcccaccg

SEQ ID NO: 64393 - RNA, 74 nt, Homo sapiens
cgcgcgcgggccgaacgcagacaggcaaagaagaacaaccaagaggcaggcagcgaccgcgcacgacggaccaa

SEQ ID NO: 64394 - RNA, 78 nt, Homo sapiens
acgacgcagacggcagggggaaaagaccagccaagaccagccagaacgggcccacgaaggacacaagacagcaacccc

SEQ ID NO: 64395 - RNA, 77 nt, Homo sapiens
cagacaggagaacaggcgaagccgacgagcccgaacagacgcaccagcgggaggaagagggacggcccaggagcgcg

SEQ ID NO: 64396 - RNA, 45 nt, Homo sapiens
gcagggcgcccccgaagcggacaaacccaccaaggccagcacaag

SEQ ID NO: 64397 - RNA, 92 nt, Homo sapiens
aagaaaacgagcgcgagagggggaaaagcgagcgacgagcgagcgcgcgcgcgaaaacccgggcagaacaaggacaaccggaaccgcgagga

SEQ ID NO: 64398 - RNA, 87 nt, Homo sapiens
ccagcgcggggacggaaccgggacccgggcgcccgcgcccgccccaacccagccacaggccgggaacggcagacgcagcagagagac

SEQ ID NO: 64399 - RNA, 78 nt, Homo sapiens
ccgaggagagaagaaggcaagcgacggcccgaacgagcggaggccaacaaagggcaggcccagccccaggcccaggga

SEQ ID NO: 64400 - RNA, 93 nt, Homo sapiens
ccgggagaagcagggaaggaggccgagccgggaccaggcccgggggcggcggccacgccaaggacggcgaagacaacagagcgccaaggcggg

SEQ ID NO: 64401 - RNA, 79 nt, Homo sapiens
ccagaaggaagaggcggacggaggagcaggcgagaagagaaggacccagagaagacggcagccccgcgcgaggacgaga

SEQ ID NO: 64402 - RNA, 55 nt, Homo sapiens
ccgagaaggcagaggcggccaaagcggagaagcacccgagaaggccagaagcaaa

SEQ ID NO: 64403 - RNA, 48 nt, Homo sapiens
cccagcgagagcccgcgaaggaacgacgaagcgggacgggggcggccc

SEQ ID NO: 64404 - RNA, 88 nt, Homo sapiens
gcggcgggcgggggcggcacgacggaggcacaaggaggacgccggcgccgccaggcgcgagaacagacccagcccgaggaaggagaag

SEQ ID NO: 64405 - RNA, 89 nt, Homo sapiens
cccggagcagggaggcgacagaagggcgaagcggccaggcccgggcggacgcagagccagagcgccccagaggagcagagggccggaaa

SEQ ID NO: 64406 - RNA, 44 nt, Homo sapiens
cagaggggggacgaacccacagcaccgacccccgaagagcagaa

SEQ ID NO: 64407 - RNA, 65 nt, Homo sapiens
aaagaaccaaaggaaaggaccagcgaagccaccaaggaggacgaaccagaaccaaccaggaccaa

SEQ ID NO: 64408 - RNA, 85 nt, Homo sapiens
cgggacggggaggaagagcgccgggacccggagcaagcaaagcgccaaaccaagaggaacccagccagggaacgaagccagagga

SEQ ID NO: 64409 - RNA, 66 nt, Homo sapiens
ggaggccggaaaacgaaaacaggacccaccacagcccaaagagccgggcagacccgaaaagcggac

SEQ ID NO: 64410 - RNA, 64 nt, Homo sapiens
ggcggagaagaaccgccgggagcgaggccggccagcaaggaggaggcaaaacagacagaacgca

SEQ ID NO: 64411 - RNA, 79 nt, Homo sapiens
cggcagggaggagcgcagggcgagccggagagccggccgagcgaggcggcgcggccagaagcaaaaaggcagggagaac

SEQ ID NO: 64412 - RNA, 73 nt, Homo sapiens
ggacccgcgcaagcggcacaaaggaggaaacagaaacagcaaggcgccaccggaagaaacgggaggggaggag

SEQ ID NO: 64413 - RNA, 45 nt, Homo sapiens
gggaaggagacgcgcagcacgcggaccccccccaagacacaagac

SEQ ID NO: 64414 - RNA, 38 nt, Homo sapiens
gcagcaggccgggagagaacgcagacccaggggagccc

SEQ ID NO: 64415 - RNA, 71 nt, Homo sapiens
aaggcgccaacaggagcccaccacaacccgcgccaacagcagaaaacagcaaagcccgacaaaggaaaaag

SEQ ID NO: 64416 - RNA, 81 nt, Homo sapiens
cccggagacggggcgccgcagccgggaacgcagggggagaggcaccagcaacagaccaaccgcagcaagcacagagacagg

SEQ ID NO: 64417 - RNA, 74 nt, Homo sapiens
cccccaagcgagcccaaaggagacagcggcaacccaagcaggggcaaaaaaaaggggagaagaaaaaccggaaa

SEQ ID NO: 64418 - RNA, 77 nt, Homo sapiens
ggaggcggcggggagcagcagcccccgacgccgcagaggcacacgcccccgggggcacggccccgcggacgccaggc

SEQ ID NO: 64419 - RNA, 63 nt, Homo sapiens
cgcaccgcaggcagacaaaagggccaaagaagggagagagacgggccaccagagaacccagga

SEQ ID NO: 64420 - RNA, 67 nt, Homo sapiens
gccccccgcgcccgccaccggccgccgcccgggccgcaagagacaccacaaaaggacacccgagcgc

SEQ ID NO: 64421 - RNA, 75 nt, Homo sapiens
gcggaggacagagaagccccggccgggccggccagcgccggaaaccaacaacccagggcccacaacggcaggcca

SEQ ID NO: 64422 - RNA, 52 nt, Homo sapiens
acaggaaccaagggcaacaggaaggcgcaagacgaaggagaaaagaagccca

SEQ ID NO: 64423 - RNA, 73 nt, Homo sapiens
aagggcgcagcagaaagcaaaccagcaggcaccaaggaaagcagaagacaagcacagcacagaaaacccaggc

SEQ ID NO: 64424 - RNA, 68 nt, Homo sapiens
acggggaggaggaagacacacggacaacaacacaggaagggaaagcaagaaaaggggaaacgagagaa

SEQ ID NO: 64425 - RNA, 69 nt, Homo sapiens
caaaacaggcaggcagaggcccgcaagaagcccagcgcagcaagaccgccagccagagaacgcgagacc

SEQ ID NO: 64426 - RNA, 70 nt, Homo sapiens
cggcgcccgacccggcccaccaggggcggaaacgcggggacgccacaaggggagaggacagaaaccgaag

SEQ ID NO: 64427 - RNA, 70 nt, Homo sapiens
ggaaagcagaaaggaacagaggcagacagaacggacgccagaagcagcgaaaaagaacacaaaacggcag

SEQ ID NO: 64428 - RNA, 73 nt, Homo sapiens
caccagagggggaggggccccaggaccaggaaaaaacccgcacacgagaaagacagccaagcagagagaagaa

SEQ ID NO: 64429 - RNA, 56 nt, Homo sapiens
cacgggcaaaagacagaccagaagaagcccccaaaacacaagaggacggagaagcg

SEQ ID NO: 64430 - RNA, 79 nt, Homo sapiens
gcgccgcgcccggaccccagcgccgcgccaggacggcagccagacgagcagggccgcagcaggccgcagcgccaaagac

SEQ ID NO: 64431 - RNA, 47 nt, Homo sapiens
aaacacgcgcaggagaggcaggagcacggagaagagaacgacgaaca

SEQ ID NO: 64432 - RNA, 66 nt, Homo sapiens
accagaccagagaggagacagcagacgcaccaaagggacagaaccaaaggacacgggacccaggcc

SEQ ID NO: 64433 - RNA, 87 nt, Homo sapiens
gcccagagacgcggggacgggccggggcccccggaacgaggcccagacccagccggaccgcccggaaaagaagacccgagagagagc

SEQ ID NO: 64434 - RNA, 78 nt, Homo sapiens
ggaaccgccgggggccggggcaagcggcaccacgacaaccccacaccaacgagaggcaacgcgaggagggcaacgaga

SEQ ID NO: 64435 - RNA, 80 nt, Homo sapiens
cgagagcgcggagcgggcggagcggcgagagcccccacgggagagggcgaacccccccacggcaagcaacccagacaacc

SEQ ID NO: 64436 - RNA, 49 nt, Homo sapiens
cggagccgggggggcaccccacaccggaggccagcccagaacaaagcag

SEQ ID NO: 64437 - RNA, 61 nt, Homo sapiens
ccggcccacaggggggggcaaacccgagagaacgggaccgacaagacggaaaccgggaggg

SEQ ID NO: 64438 - RNA, 82 nt, Homo sapiens
ggcagggacgggaggggaggcaaagggaggaggaggaccggaggagagaagagacgaggaggaggggagaccgcggcaggac

SEQ ID NO: 64439 - RNA, 74 nt, Homo sapiens
cacgccggagccgccaggcagaacggagagacacaggcggggagagcgagacccagggggcccggggaggaggc

SEQ ID NO: 64440 - RNA, 53 nt, Homo sapiens
gggacccgcagacaggcgggagagaaccgcagcaccccaggacaaggcacgag

SEQ ID NO: 64441 - RNA, 52 nt, Homo sapiens
aacaccagccgggaccggaagcacacacagacagcacaggagcgcccagcag

SEQ ID NO: 64442 - RNA, 80 nt, Homo sapiens
ggcggagcagaacggagcaggagccccccaagagaacccagggggagccacgccggagcgggcaccggcgcggacccacc

SEQ ID NO: 64443 - RNA, 61 nt, Homo sapiens
ggcccgccccgcggcccaggcgccgcgaggccgcggccaggccgagcccgccaccaggcca

SEQ ID NO: 64444 - RNA, 56 nt, Homo sapiens
cagaggcgaggccccaacccgggcgaagcgaaagaggacgagcaacaaagaacgaa

SEQ ID NO: 64445 - RNA, 81 nt, Homo sapiens
gaccacaaaagggaagcacacggcaggccgaagagcacagaaagcccaaagaagaggccaagggagcagagaggaacagca

SEQ ID NO: 64446 - RNA, 88 nt, Homo sapiens
cggagacgcggccagcaccgagagccgcggaggagcgggccgggcggggggcccggaaggggcgggagcccgagccccacaccgccgg

SEQ ID NO: 64447 - RNA, 73 nt, Homo sapiens
ccacccagaacagggagaagcacaggagagggagaccaccaacacaccagccagacaggagagaagcagaaga

SEQ ID NO: 64448 - RNA, 74 nt, Homo sapiens
gaacccaccccacaaagaaaccccaccagggccccggaccccgagcccggcggggcagccccacacaagcgcgc

SEQ ID NO: 64449 - RNA, 91 nt, Homo sapiens
ccgccagaagaagcagcaaccgcagaagcagcggcaaccagaccggggcagggcagaagcaggcacggcagacccacaacagcacggagac

SEQ ID NO: 64450 - RNA, 72 nt, Homo sapiens
accaacaaggggagcgggggcgacagcgcccggcacaagcccagggggacaagccaacacgaacggagagga

SEQ ID NO: 64451 - RNA, 76 nt, Homo sapiens
aagcgaggccgggcagagggaccacggggagccccacgaggagagaagagacccacgcgagaaccaggcgcgaacg

SEQ ID NO: 64452 - RNA, 76 nt, Homo sapiens
cagggcagccgaaggagcagaagcgggcaccaacagacaaccagggcaagcagaggcaaaggcaagggcggaaaca

SEQ ID NO: 64453 - RNA, 32 nt, Homo sapiens
accggacgcgacgggacgcgcagaagaagccc

SEQ ID NO: 64454 - RNA, 80 nt, Homo sapiens
cagcagaggccgagaaacagagagaaaagagacggagcaagagaacgcaagagacgggagcagaaacgggagaaaggaaa

SEQ ID NO: 64455 - RNA, 73 nt, Homo sapiens
cggagcccagaagacagagggcgaggagcagcgacggacccagagccagggcggccccggccccaacccacga

SEQ ID NO: 64456 - RNA, 68 nt, Homo sapiens
ccaaacaacgccacaaagaaaagagggaaaagcagcgccccagaaaggacccaaagaaagggaagaaa

SEQ ID NO: 64457 - RNA, 79 nt, Homo sapiens
gcggcaaaagcaacacggagcacggggagcggaggaaaggacggaggggaggcccaccacagagccccaacgcagcagc

SEQ ID NO: 64458 - RNA, 124 nt, Homo sapiens
cgcgcaccgcccccgcccgccaggcccgggacacgaccaccccaagcgccacacggcgacagcgacaagcagaccggaagaccgacggaagaccacaccccgagggagcccaggacaccacgag

SEQ ID NO: 64459 - RNA, 58 nt, Homo sapiens
aaggaccaagaaccaggggccaccacagagcccgcagggacacagcagaacaagcaac

SEQ ID NO: 64460 - RNA, 57 nt, Homo sapiens
gccggaggaaaccaagacagcccaaacgccccacgaccaggcaccgcacgcaccggc

SEQ ID NO: 64461 - RNA, 68 nt, Homo sapiens
gagaccaagcaccaagaaaacgccaaggaacgggaaagcccaaggcggaacacgaccaggaacgaagc

SEQ ID NO: 64462 - RNA, 51 nt, Homo sapiens
cccgagacagcgcgacaaagaaaagacacggcaaaacaagcagacgcccgg

SEQ ID NO: 64463 - RNA, 57 nt, Homo sapiens
aagggacgacggaccgaaaaggggggaggggcacgacaggcagaaggacgcaacaag

SEQ ID NO: 64464 - RNA, 67 nt, Homo sapiens
cgccgagaggaaggacacaaggcaagaagcagacaaggaagcagaaaaaaggcacgaacgcagagga

SEQ ID NO: 64465 - RNA, 92 nt, Homo sapiens
cggcgccgggacgcaccgcaccgagggcgagcccagaaaaggacccaagggggcaaaggcggaaacagcagaggacaccaggagaggcggca

SEQ ID NO: 64466 - RNA, 83 nt, Homo sapiens
aagcccgagagccgcgagccccagggcgcccggagcgccccccagggaggagacgggaaacggagcaacgcgaaaaagccaac

SEQ ID NO: 64467 - RNA, 58 nt, Homo sapiens
ccaggccaccaccgcccagcaaaggggcggaaaaagccagcacaaggcacgaagcccc

SEQ ID NO: 64468 - RNA, 72 nt, Homo sapiens
cgaccacaccgcgagaagacaaggaccacagggcgcaaggggccaggaaaaccaggaaggcacaacaacacg

SEQ ID NO: 64469 - RNA, 80 nt, Homo sapiens
gccagagggaccacccggagaacagccccccagggagaggacagcagagaaaggacagggacaggaaagaaagaaaaaga

SEQ ID NO: 64470 - RNA, 56 nt, Homo sapiens
ggaggcacgggcggcccgcaggaccggaccgggggagaaacagaaagcccggccag

SEQ ID NO: 64471 - RNA, 73 nt, Homo sapiens
gccagggcgacagggcgccccacaaggccagcgagcgccgacacccaacaagaccagcccccagcagagagcg

SEQ ID NO: 64472 - RNA, 87 nt, Homo sapiens
gcggcagcgccagcccggcgccccccccagccccagcggggaccaaaagaacccagccaacccgcagagggaggggaggggcgagcg

SEQ ID NO: 64473 - RNA, 86 nt, Homo sapiens
caacaaggacaacaagagacgggacaagacagggcaaaggacagaccaggagcacagaccagcgcgcgaccggagccccacagcgg

SEQ ID NO: 64474 - RNA, 95 nt, Homo sapiens
aaaacccgaggcaccggacagaagggaggaagacccagcaggaggacgaagaggcccaacaggacacacgcgaaaccgccggagccgggacccgg

SEQ ID NO: 64475 - RNA, 40 nt, Homo sapiens
ggggggcaggccaccgggcaccggcacagacagaagcgcg

SEQ ID NO: 64476 - RNA, 123 nt, Homo sapiens
cccagggccagacacaagaagaaaaacgaaccacgagcggaagcacaacgggaagaaagcaacacagcacccggcggcaaaccaaacaaaaccagagcacggggaaaagaaccgggcccagga

SEQ ID NO: 64477 - RNA, 51 nt, Homo sapiens
cgaaaggaagggaggaacccagaagggcaaggaaccaaaccgaggaaggaa

SEQ ID NO: 64478 - RNA, 53 nt, Homo sapiens
gcacaggacgccagcacaacgcccaacacacacagaacagccaggccgccgcg

SEQ ID NO: 64479 - RNA, 66 nt, Homo sapiens
gggcgaccaaaagagagggacgaaagagaagaacacaagacaaaagccaggcagaaggaacagcaa

SEQ ID NO: 64480 - RNA, 83 nt, Homo sapiens
acacacacccgcagacaagaacggagaggcacagccagggcgaaagaagaccccgccaccggcccccacgcaccaccaaagcc

SEQ ID NO: 64481 - RNA, 76 nt, Homo sapiens
acagcaccgcagcagagcgaaagcacacgcggaggacaccgaacaggggccgcgcgagagcccaacggaccaggac

SEQ ID NO: 64482 - RNA, 76 nt, Homo sapiens
caaaacaggcagccgagaaaaggggaacagacaagagggacacaggcgaaacagagaggaagacaagccaagcgag

SEQ ID NO: 64483 - RNA, 63 nt, Homo sapiens
agacagcgacgagagacaccaaggcagcgcaaacgcaaacgccaaggcgccggggagcaggag

SEQ ID NO: 64484 - RNA, 118 nt, Homo sapiens
cgcaaccaaccaaaacagccagccgcagagaccccaaaccccggcccgacaggagcacaggagacgcgcagaagaaagggacaaacacgaacgcccgaacaccacaaacacgccaaag

SEQ ID NO: 64485 - RNA, 83 nt, Homo sapiens
cggagaagcggcaaaccgggccccggcagagaaccagcccggagaagagggaacacaaaaagggcacagaaaaaacaaagaca

SEQ ID NO: 64486 - RNA, 82 nt, Homo sapiens
agagaacagcagcgccgcccgccgacagccaggcccgggagaagcggacgaaagaaagaaggagcaccaacgcaaagaaaaa

SEQ ID NO: 64487 - RNA, 71 nt, Homo sapiens
cagccggccggggcaccagcgacaggaccaaggaacgggggccagggcggagaacggaaaagcaccaggaa

SEQ ID NO: 64488 - RNA, 76 nt, Homo sapiens
caaagcagcggcgcagcccgggaaagacgcccccccccagccacacggggcccccgggcggcgccgaaaaccagag

SEQ ID NO: 64489 - RNA, 58 nt, Homo sapiens
gccagcgccagacggacgaggcggcggagaacaagcggcagcccagagcggaagcaag

SEQ ID NO: 64490 - RNA, 78 nt, Homo sapiens
agaagaccgacaaggaaggaaacaccaagcagaaccggagaagcacaagggggccagcccaggagagggcccagcaag

SEQ ID NO: 64491 - RNA, 73 nt, Homo sapiens
caggagagacccaaagaacaaggaccaacaccaaggaccagccaccgaaccacacaccaaagaaaaaagaaac

SEQ ID NO: 64492 - RNA, 73 nt, Homo sapiens
agaagcggggacccgagacgcaagccccagcgaccccaagcaaaccgcacaacaaccaacagccgaaaaccca

SEQ ID NO: 64493 - RNA, 72 nt, Homo sapiens
acaaccggagcaggcaagcccagggcaccggcgggcacgcgagaagggaagaagacgaagagcagcagaaag

SEQ ID NO: 64494 - RNA, 61 nt, Homo sapiens
gagcagacggccacaaacagcgcacaggagaccacaccgcgccagaccccccaggagagcc

SEQ ID NO: 64495 - RNA, 80 nt, Homo sapiens
cagcggggcggggcagccagcagcaggaacagccgggagcggcaccggaaagcacgagccagcaggggccccgcgggagg

SEQ ID NO: 64496 - RNA, 70 nt, Homo sapiens
gcagaggcggccccagcggccgggcaggaaaggagggcgaaacacaagcaccacccccggaagcaccagg

SEQ ID NO: 64497 - RNA, 76 nt, Homo sapiens
gcagcccagacggcggaccgaaggaggccgggaccacccagccagcggaagaagacgccaagccagcacaaagggg

SEQ ID NO: 64498 - RNA, 82 nt, Homo sapiens
gacgagccagacacaagcacagcgagaccgcggcgcaggaggaggaggagaccaagagcccgcccccaggagccccccaggc

SEQ ID NO: 64499 - RNA, 63 nt, Homo sapiens
ggaagaggaggagggcgacgagacgggagcccggagcgcgggccaccagcccccgggccaaga

SEQ ID NO: 64500 - RNA, 74 nt, Homo sapiens
ccgaagcccgcggaaaagcgcagacagcaccagggcaagagcgcaagacaaggacggacgggcaggcgggggca

SEQ ID NO: 64501 - RNA, 50 nt, Homo sapiens
gccagggggcgagcacagcacagcgcagaaacgcaccgggagacgcaaca

SEQ ID NO: 64502 - RNA, 68 nt, Homo sapiens
ccagaaacagccgggacggacagccggccaggcccccgcgagaaacaggagaacgagaaggcggagcg

SEQ ID NO: 64503 - RNA, 69 nt, Homo sapiens
accacgaccccaggcagcagccgaacaaccaccaacaacaccagggacacaacagcaaggagcagaaac

SEQ ID NO: 64504 - RNA, 83 nt, Homo sapiens
gccggggcgggcaacggggcgcccccaccggcacaagaacggcggagggcggcgacggcggcgcgaggaccgaccgggcccgc

SEQ ID NO: 64505 - RNA, 77 nt, Homo sapiens
ccaccccggaccccaccaacagaacccccagccccaggagggaagacaagggccggccgccaagacacccccggccc

SEQ ID NO: 64506 - RNA, 72 nt, Homo sapiens
agggccccaggacaaaaagagagggggcaacaaggagaccgcgaaggcgacacccgggggcccaggagaaac

SEQ ID NO: 64507 - RNA, 68 nt, Homo sapiens
gaagaggcgaggagcaacccaaggagaacacagcaacagaagagaccaacccaagcgacccgccggga

SEQ ID NO: 64508 - RNA, 88 nt, Homo sapiens
ggcagaacgaggggaggaaagcagggaaaggcagcaaacgaaccccaaaacccacagagaaaagggaaggcagcagagggcccaaggg

SEQ ID NO: 64509 - RNA, 80 nt, Homo sapiens
aggcagccaagccgagccgccacccggcggaacgaagaaggacagaacggacaaggcagagcaaggaaaagacggccacc

SEQ ID NO: 64510 - RNA, 79 nt, Homo sapiens
ccacccagcaacagcccgcagcagaccgaggccccggggaagccaccccaccccccagagagacagggcaccggagcca

SEQ ID NO: 64511 - RNA, 73 nt, Homo sapiens
cgacgagagcagaggcgcagcagcgccagaccaaagccagcagaaaccagcacaggaacagagccagaaggag

SEQ ID NO: 64512 - RNA, 63 nt, Homo sapiens
gccaagggggcgccaaagccgcaacgaggccccagcccagagaccagcgcgggggcgcggagg

SEQ ID NO: 64513 - RNA, 75 nt, Homo sapiens
caaaccgcacacggcggaaaacagacccagagaagagggcgagggaagcagagacaggaacacgaggacccaaag

SEQ ID NO: 64514 - RNA, 78 nt, Homo sapiens
gcagaagggagcgagcagcacgggccccgaggaaagccaggccagaagaaggaaggccggggaggggacaggaaagac

SEQ ID NO: 64515 - RNA, 76 nt, Homo sapiens
ggacgagccccaccagccccaagagaagagggacaccccaaaacaggaggagcaaaaaggacagagcacagagcca

SEQ ID NO: 64516 - RNA, 54 nt, Homo sapiens
aagagacgcccaacacagaaaacacgaaaaagacaggcacaggaagcaaggaac

SEQ ID NO: 64517 - RNA, 72 nt, Homo sapiens
caccacgcgcaaaacgacaccagccgacccagcaagaacacacaaccgaaaagcgcagaaccggccgaaaag

SEQ ID NO: 64518 - RNA, 68 nt, Homo sapiens
ccccccggagacgcaaccaagggacacggacagaaacacggccaggcccggggaggcaagcaggaaca

SEQ ID NO: 64519 - RNA, 74 nt, Homo sapiens
cacaggaggagggagccggccccaggcaagcccagaaaggaagcagaaggacaagcccccacgaggaaaacccc

SEQ ID NO: 64520 - RNA, 58 nt, Homo sapiens
gggagaaacaaagaccacaccagcgcaaacgccaaggcgccggggagcaggagaagaa

SEQ ID NO: 64521 - RNA, 73 nt, Homo sapiens
acgaggcgggccccaaccggaccagccgagcggcgggcgaggggaaggagaggaagagcaggcccagccaaca

SEQ ID NO: 64522 - RNA, 76 nt, Homo sapiens
ccgccgggccgcccccacccgaaaccgacgacaccgagccggcagggaggccaagagaacacagagcagaaccggg

SEQ ID NO: 64523 - RNA, 57 nt, Homo sapiens
gcgggggaggagacccacccaaacaggggaaacaggaagagaacagaacggaagaaa

SEQ ID NO: 64524 - RNA, 59 nt, Homo sapiens
ggacaacagcagcacggcagacaccgaccgggaccaccaagagccggaagaagaggaaa

SEQ ID NO: 64525 - RNA, 69 nt, Homo sapiens
aagaccgacaccggcgcagccagcgaacccacggaagccaaaaagcagcggagggcacaaccggaaaaa

SEQ ID NO: 64526 - RNA, 62 nt, Homo sapiens
agggcccgggcaaggcccgacagaccccgggggcacggcacggcgaagggggcccagacgac

SEQ ID NO: 64527 - RNA, 70 nt, Homo sapiens
gaaggaccaagaaccaggacaggcgacacaacagggaagaccgggagaccagacaagaaaagaagcggag

SEQ ID NO: 64528 - RNA, 60 nt, Homo sapiens
caacgggacccaaccgagcacagaagaaagacaccagaagacaccaaggacagagaaaag

SEQ ID NO: 64529 - RNA, 56 nt, Homo sapiens
gcggcgccgccacccccccccagcaggaacacaacaccccgacgaagcgccaaggg

SEQ ID NO: 64530 - RNA, 59 nt, Homo sapiens
gggccgggcacccccccggcgccacggccgggcccacaagggaagaagggcaaacccag

SEQ ID NO: 64531 - RNA, 81 nt, Homo sapiens
ggagccgcagaggccccgggcggaccaggcccagaccgggaaaaccggaggccagcccacccagagaggccgaaaaccggc

SEQ ID NO: 64532 - RNA, 67 nt, Homo sapiens
gacaaggggagccaaaaacagggagaaggaaggagaccaaggaccggggaggaaaaaaaacaccggc

SEQ ID NO: 64533 - RNA, 85 nt, Homo sapiens
gaagaagcaacaacccccccgcccgccacagccggcagcgcgaagcagcaaccagggcggaaaacaccccaaaagccaaaaggga

SEQ ID NO: 64534 - RNA, 73 nt, Homo sapiens
acaccccccccaccaccccaccagaaagggaccaggaggcggggccccccggagcgggcgcagacagccacgc

SEQ ID NO: 64535 - RNA, 76 nt, Homo sapiens
aagggcagccgcacgggaaaaccagcgccccacaggaaagccccaagagacacgcaaagaagagacagggccaggc

SEQ ID NO: 64536 - RNA, 79 nt, Homo sapiens
cggaccgcacccgcccagaggccccagcaaagaggacaaaagagcggaggagcggcgaggcgagaagagagaagaggaa

SEQ ID NO: 64537 - RNA, 119 nt, Homo sapiens
ccgcggcgccgagggaccaggccgacccgcggagacagacaagacaagaccggcggggaagcggcagacccgcagaccaacgaaaaccacggcgccacgaagagggaaaaggacagcgc

SEQ ID NO: 64538 - RNA, 86 nt, Homo sapiens
ggaagagagggcgggcggcagagggacagagcgggagccaccagcgccaaagggaagccaggagcccgggggcacggggagaagac

SEQ ID NO: 64539 - RNA, 83 nt, Homo sapiens
ggaagccagccaagaccgccgccgccggcccggagaacacacaccgccgcaggcgcccccgggcaccaagaagagagaaagag

SEQ ID NO: 64540 - RNA, 45 nt, Homo sapiens
cggggaggccaacggaagaagaaccaaccgggagccccccaagag

SEQ ID NO: 64541 - RNA, 80 nt, Homo sapiens
ggaacagccacaggaccacagggcccgcggccgaggaaggacagaaagcaggacccgccagcggaggagaggcgcccaca

SEQ ID NO: 64542 - RNA, 71 nt, Homo sapiens
accacggccaccacaggccgaaggggcgggagaacagcgggagggaggcacgcaggagaaggaccacggga

SEQ ID NO: 64543 - RNA, 61 nt, Homo sapiens
aggaggccaggaggaccaggaaggggccagagggccccgggcgggcagagaggagcacagg

SEQ ID NO: 64544 - RNA, 60 nt, Homo sapiens
gagcgcaagcaggagcgccgcgcgaagagccaaggagaggaaaccccaaggagagcagcc

SEQ ID NO: 64545 - RNA, 81 nt, Homo sapiens
cggaggcggaggcagaggggaggcgcgaaagggagagaacagcacacagaggcgcaaggggaagagaaaagacagaagcac

SEQ ID NO: 64546 - RNA, 72 nt, Homo sapiens
acaaaaccccgaaaaaggcgagaagccccacccgccccaggagccagccggcaacacggagacccgcacaaa

SEQ ID NO: 64547 - RNA, 57 nt, Homo sapiens
aagacacagacaacgggaccgaagggagcccaaaggcagaggccgggagcgcaagag

SEQ ID NO: 64548 - RNA, 67 nt, Homo sapiens
caaaaacgccgaaacggaaagcccaagaggagacgacgcagggcaagaacccgccacacaaggcgaa

SEQ ID NO: 64549 - RNA, 96 nt, Homo sapiens
ggaagaggacgagaagaagggggaccacggagagggcaaaagagccggggggcccacgcgcagcaccaggacaaaagaagggcagcacaaaggaaa

SEQ ID NO: 64550 - RNA, 81 nt, Homo sapiens
gcaccccagacggcaggcacaggaggacgggcaccccacaccggaagcacagggcagaacgggaaaaagggagaaaagaag

SEQ ID NO: 64551 - RNA, 52 nt, Homo sapiens
accagagaaagaaacacccgaacagcgacccgggccagacccacacagagac

SEQ ID NO: 64552 - RNA, 84 nt, Homo sapiens
cgccaggccagccgaagaaggcgagcaggggcgggagagccccgcagaagacgccgacgagaaagcaagaacgggacaagcaca

SEQ ID NO: 64553 - RNA, 55 nt, Homo sapiens
gcacaacaggcagacagacaaggccgacgccgggcaagccaagccagccgcccgg

SEQ ID NO: 64554 - RNA, 77 nt, Homo sapiens
agaagcgacaccgaggcagaaccgcaagggcggagaacggaaaagcaccaggaagcagagaggaccgcagaagggaa

SEQ ID NO: 64555 - RNA, 63 nt, Homo sapiens
accaggacaacccgggcagggagggacggagagaccggaggaaaccagaagaaaaacacaggc

SEQ ID NO: 64556 - RNA, 76 nt, Homo sapiens
gcaaaaggaggagaggaggacagacaaaaggaggcaagccgggcaaggcggggggcggcccgcaacggcaaggaac

SEQ ID NO: 64557 - RNA, 76 nt, Homo sapiens
agggagcgcagaggacgccgaggagggggacccacgcccggcaggagaggaacggggagaccagcaaaagagccac

SEQ ID NO: 64558 - RNA, 83 nt, Homo sapiens
cacagagacaaagcgccagccaagcacgccaggaaagagagaagaaaaccgaacaacaaaccagaacaagagagacgacaaac

SEQ ID NO: 64559 - RNA, 85 nt, Homo sapiens
ccgaggagcgggccagccgcgcggcgggaagcggcggcggcggcccagcgccaagaggagaggaagacgaggaagcagaagaaca

SEQ ID NO: 64560 - RNA, 71 nt, Homo sapiens
cggcgcccagcccaaaggcccagaggggagcagagggccgcgccgggggagaaaagaagcagcccacgaac

SEQ ID NO: 64561 - RNA, 77 nt, Homo sapiens
caggccggggcgagcggcgggcccgcgggccaggccgggaggaccaagagaagcaaagggagaaacaacgcaaaaac

SEQ ID NO: 64562 - RNA, 56 nt, Homo sapiens
gcacaccgcgacggcgcgcggcgcgagaacggccaacagcccagcacaagacgccc

SEQ ID NO: 64563 - RNA, 82 nt, Homo sapiens
cggaaccgggaaggacacccaggcagacaaagccccccacagaaaaacggcggagaaggggcagcagaccccgacgacagaa

SEQ ID NO: 64564 - RNA, 86 nt, Homo sapiens
gccccgccgcggcggggacgcaggggagacagggggacagagggcgggagcaggccgagcaggcgggggacacaaaagagaacgac

SEQ ID NO: 64565 - RNA, 74 nt, Homo sapiens
cacgcccccagacgaaaagggaggcacccaaaagagaaaccacgagccccgaggccgagccccggcggaggcac

SEQ ID NO: 64566 - RNA, 70 nt, Homo sapiens
gcgagggccgcgggagacaagaaaggagagcgaagccgcaccaggcaagccggaaaacagaacggcgaga

SEQ ID NO: 64567 - RNA, 61 nt, Homo sapiens
cgaagaaggccagcgggccaggaagcgcaccaggagacgggcccgacaccagacagggcgg

SEQ ID NO: 64568 - RNA, 72 nt, Homo sapiens
cagagacagagaagacaacggagcccaaggaaacggggagcagaaaagggaaccaacaacaggcaaaccaga

SEQ ID NO: 64569 - RNA, 73 nt, Homo sapiens
agagccaccagacaccaggaggaccagcagcaaaagaaggagggccccaggaaaggaagccgcccgaacacga

SEQ ID NO: 64570 - RNA, 68 nt, Homo sapiens
ccgcccaagccgcacagccgcggcggcagcagcaggagaggccgaccgcgggccgcgcacccaccgcc

SEQ ID NO: 64571 - RNA, 74 nt, Homo sapiens
caaaaacagccggaagggggggagagaagccgggaccgcacggggccccggccgaccacgcagggacaccccca

SEQ ID NO: 64572 - RNA, 75 nt, Homo sapiens
gaaggaagaggcaaaaaacaacacaccaaaccagaaaggaagccgggggaccaacaacaaagcacacggacacag

SEQ ID NO: 64573 - RNA, 53 nt, Homo sapiens
gccagagcggaagccaaaggcaacgaccccccgcaaccagcgacaaacccgaa

SEQ ID NO: 64574 - RNA, 77 nt, Homo sapiens
gccccagaacaacgcaacagagcgccgccccgcgccagaagaaggcccaccgaggagaccagggaacggaggcacgg

SEQ ID NO: 64575 - RNA, 83 nt, Homo sapiens
gcacgagagccacagcaacacaggaagcaaaggccaggggggggacaaggaggaaggaagaaaagaaagacagagacagagcc

SEQ ID NO: 64576 - RNA, 52 nt, Homo sapiens
cacccgcacaccccccacgccccgacaggacaaaggaggaaaacgacccaga

SEQ ID NO: 64577 - RNA, 90 nt, Homo sapiens
cggaggccagagaaggggcccgcgaagcccgccgccgcgcgggggagcccagcacagaccgccgccgggaccccgagcgcgcaccccagc

SEQ ID NO: 64578 - RNA, 88 nt, Homo sapiens
aaggacgaaagaagacagagaagcaaagaagcagacacacaccacgccaagaaccggaccccaaaggcacagaggccccacgaagaaa

SEQ ID NO: 64579 - RNA, 79 nt, Homo sapiens
aggcgaaccgaggaccacgcgccaggggaccccacaccacaaaccgaggaaagaagggacagcagaaaacgcagaggga

SEQ ID NO: 64580 - RNA, 59 nt, Homo sapiens
gccagcaaggcgcgggcaacccggcggaacgcaggcaggagaagggcaccggggaggac

SEQ ID NO: 64581 - RNA, 57 nt, Homo sapiens
gacaccggaagccgagaaaggacccagcaggacgaccagccaaagagcccaacgcca

SEQ ID NO: 64582 - RNA, 72 nt, Homo sapiens
ggaacagaaacaagaaggagcaaacacaacagcgcacgaaacacacaaagaaccaccaccgggaggaagcca

SEQ ID NO: 64583 - RNA, 82 nt, Homo sapiens
gaaggaagagacaggaggcagcagacggacaccaggacgagagcacagcccccaggagaggcaggcgcaaaggaggcaacag

SEQ ID NO: 64584 - RNA, 73 nt, Homo sapiens
cagggacccgcaagcgacccgacagaggcacaaaaagcggggaccacaccacacagagcgacgccgacaaagg

SEQ ID NO: 64585 - RNA, 79 nt, Homo sapiens
cagcaggcaggcccgagcacgcgcgggagcagcaggaacccgcccacgccagcgaagccgacaggaccaacgacaggcg

SEQ ID NO: 64586 - RNA, 77 nt, Homo sapiens
ggcccccccggggcggaaggcagaaagaagacccagagaaaaacgggagagaaagggaaggaaaagaccaagaccca

SEQ ID NO: 64587 - RNA, 78 nt, Homo sapiens
caccacgggcgaggcaacgaaaacccggacaaccagcggggcacaacaagggcacaacagagccaccccaccaccccc

SEQ ID NO: 64588 - RNA, 77 nt, Homo sapiens
acacaccagggcagacacgaaaaaagggagagaagagaagagccccgaggcgccaagaaaacacagaacacaggagg

SEQ ID NO: 64589 - RNA, 83 nt, Homo sapiens
cgacaccgcgcggcgcgccggccgcccaaggcgcccaagggacaaaagacgggcaaagcaggaagaacggaagaagaccgaaa

SEQ ID NO: 64590 - RNA, 82 nt, Homo sapiens
gcgacgcaggagcaccgcagcaccaggccaggaggagggcggcagggcagccagagggaagggcacagcaggggggagcgag

SEQ ID NO: 64591 - RNA, 72 nt, Homo sapiens
accacccccaccaaaccaaccaaccacagaggccaggaaagaaaaaaggcagcggaaagaagaaaagaaacg

SEQ ID NO: 64592 - RNA, 54 nt, Homo sapiens
gcacacaagggaggaggcaaagccagggaagagccgcaggaggagaaccaaacg

SEQ ID NO: 64593 - RNA, 82 nt, Homo sapiens
ccaagagggagcgggaaggaggcccacagggaggaaagcagacgacggccagaggggccagccaccggccacgggccaagcc

SEQ ID NO: 64594 - RNA, 81 nt, Homo sapiens
gcgcccggggcacgggggacgcgggcgcgcagggaagacgggggcgcaggcgcgcagagccaaaccccagccaccggaaga

SEQ ID NO: 64595 - RNA, 79 nt, Homo sapiens
ccacgggggcagcgccgaaccaggaccggacccggacccaaaggccagcaagcaaaagcagaccggaaaacccaccggc

SEQ ID NO: 64596 - RNA, 76 nt, Homo sapiens
cgagcgcagaccaccaaacccaggaggagacccccggaaaaccccccccgaggaaacaggaaacaaagccccagca

SEQ ID NO: 64597 - RNA, 83 nt, Homo sapiens
gggcacgggccaccgggaaacgaccggaccgcccaacccagaggagcaagcgaacaaaaaaccgaaaaacacacgggccagga

SEQ ID NO: 64598 - RNA, 75 nt, Homo sapiens
gcccaccggagacacaggaacaaacgagcacgcaaaggagcaggaggaagagcaccaggagagagcgcgagacaa

SEQ ID NO: 64599 - RNA, 68 nt, Homo sapiens
cgagcggggccggccacaggcacgggcaggagacaaccagaggaggaccaggaacgcagacccccgaa

SEQ ID NO: 64600 - RNA, 84 nt, Homo sapiens
gcaggagaagcccaaggcccagggggagggaagcagccaagcgggcagaagaggaagccccagacacgagggcggcgaaggggg

SEQ ID NO: 64601 - RNA, 73 nt, Homo sapiens
gaacacccggaccggacacgccgagcgagaagaccacggagacgaaaagcacaggggaacaaagacagcagga

SEQ ID NO: 64602 - RNA, 70 nt, Homo sapiens
ggaccgacgaaacagacccaggaaccccaaacgcagagaaggaggcgcaacagggcaaggcaaacagaag

SEQ ID NO: 64603 - RNA, 62 nt, Homo sapiens
cagaccgcacaagcagccccggaacacacagacaaagggcaccaaaggaaaacaaaggagga

SEQ ID NO: 64604 - RNA, 77 nt, Homo sapiens
ggccgggcccaggcccccccaacagagaggcacccagacgccccacagccagccggggcggaagaccgcacccccgc

SEQ ID NO: 64605 - RNA, 73 nt, Homo sapiens
agacgaggccgaggcggcggcgcgaggcagagcccaaaaggcagagcgaggagagaagaaggagggaaagcca

SEQ ID NO: 64606 - RNA, 71 nt, Homo sapiens
cccgccaaaacccagggcggaagagggcagccggccacggagcgccgcagagggccacgaccggcgcgcgc

SEQ ID NO: 64607 - RNA, 78 nt, Homo sapiens
ggcagcacagccagaagggcgagggaggaagacggcaggacagggacaccaacgaggaagcaacgacggcacagcacg

SEQ ID NO: 64608 - RNA, 58 nt, Homo sapiens
cgaacggcagacggaaacgaacggaaaacagccccaaagcagcagaccgaagaaagaa

SEQ ID NO: 64609 - RNA, 78 nt, Homo sapiens
gggagcgccaagggcacgggaagaccggaggggacgaagaacggccccagcggcgcacagggagcaggcgggagggac

SEQ ID NO: 64610 - RNA, 65 nt, Homo sapiens
gagacacgaaaacaggaccgcgcgaaacgcccagaaaccaagaagcagcacgccggaaaaccaac

SEQ ID NO: 64611 - RNA, 78 nt, Homo sapiens
aggacgccggcccgcagcgcccgccccaggaaccaccaaggaccgagagcggcaggcgagaacccggaacaacccacc

SEQ ID NO: 64612 - RNA, 82 nt, Homo sapiens
cgggcgagcggcggggagcggcgaagccgcgggcgagaacaccgagagagaagaaggcacagaaaaccagaaacaaacagaa

SEQ ID NO: 64613 - RNA, 83 nt, Homo sapiens
gggcggaggcacaggaagaccccaccccgaaacggaggaagaacgccgccaccagccaccaccaaggacacaaagagaacaag

SEQ ID NO: 64614 - RNA, 69 nt, Homo sapiens
ccaccaagccagagacgacagcgagagacccggaggcacaggcgaagggagggaaaagcacagggccag

SEQ ID NO: 64615 - RNA, 61 nt, Homo sapiens
ccccagaacaaaggacagagggagaagccagaggcaacagggagagcgggcgagcccgacc

SEQ ID NO: 64616 - RNA, 81 nt, Homo sapiens
cgcgggagagggccaccgcccgccacccgcgcgccgccgccgaggagaaagggcgcccgcgccggcagaggaggcgagcac

SEQ ID NO: 64617 - RNA, 76 nt, Homo sapiens
ggaaccagaagggccagggacccgagacggccaagcacaaccaggccgaagaagagccaagagaaccgaacagaag

SEQ ID NO: 64618 - RNA, 77 nt, Homo sapiens
gacgacggcaggaagaaaacgagccaggaacaaagagcaagacacggcccccacagaccccacaaaccaggcaacga

SEQ ID NO: 64619 - RNA, 73 nt, Homo sapiens
cagcccagcgcgggagacaggcagcccacaacaagggaacgccacccccaagccggacgggccaagccgaggg

SEQ ID NO: 64620 - RNA, 76 nt, Homo sapiens
cccaaaccacgaaaccaggagggagcagccccggaggccccaaacccagaagagacacaccccgaaagcgaaaaag

SEQ ID NO: 64621 - RNA, 61 nt, Homo sapiens
gacggcgagacaaacgacaaaaccagaaggaaacaccccaggaaaaagacccccgacacaa

SEQ ID NO: 64622 - RNA, 81 nt, Homo sapiens
agacccgaagaacaggcacacaccaacgggacgacaggaaaagagcgcggcccccccccgaggcacccagggcggaagccc

SEQ ID NO: 64623 - RNA, 72 nt, Homo sapiens
acgccaagcggggagcgcccgcgacagaggagggaggaaaacaaccgagggcagagacagcaaaggcgggga

SEQ ID NO: 64624 - RNA, 77 nt, Homo sapiens
cgggacggaggccagagagagacgacagaaacccaaggaccgcaagccaacgccgcgcagacacagggacccggcgc

SEQ ID NO: 64625 - RNA, 54 nt, Homo sapiens
ggacagccgagccaagcagagcccgaagaagagccgccccacacgcagaaaagg

SEQ ID NO: 64626 - RNA, 38 nt, Homo sapiens
caaggagcaggcgcgaaggagaacccccggagagaaaa

SEQ ID NO: 64627 - RNA, 73 nt, Homo sapiens
aaagaccaaccgcggaaaaccagagacccagacacgcgaaggaacgaaaggccaaaaggcaaaagacgacgga

SEQ ID NO: 64628 - RNA, 71 nt, Homo sapiens
ggacgaagcggaccagaacaaaggcacacagagaaaaaaagggaacaaaacacagcaagcagacaaaaggg

SEQ ID NO: 64629 - RNA, 77 nt, Homo sapiens
gcaagaccacacaccagccggacggcggggccgggcccccggccgcaagcaggccaccagcccccgggccaagagca

SEQ ID NO: 64630 - RNA, 73 nt, Homo sapiens
cagagcagacggagaaacaggaccaggacaaaagaacaccgaaaacaacaggggcaagagggacgcaaagggg

SEQ ID NO: 64631 - RNA, 51 nt, Homo sapiens
ggagccaaacccacagcccggagagagggccaaggcaaaggccgaagagga

SEQ ID NO: 64632 - RNA, 75 nt, Homo sapiens
ggggggccgccgcgaggacccgccaccgaagaggcggaacacagcgggagcggggcggacgccccagggcaggag

SEQ ID NO: 64633 - RNA, 77 nt, Homo sapiens
ggggcgcggagggccgagggagggccgagccagccgcggccggaggagcccccaggccgaaacgcgagccccacccc

SEQ ID NO: 64634 - RNA, 78 nt, Homo sapiens
accgggccggaacgagacgcacgacaggggcaaggccgaggggaacagcacacagagaggaggcggaagcacgccagc

SEQ ID NO: 64635 - RNA, 84 nt, Homo sapiens
aggccaacacgcgggcagcgaacaagcgggagcaaggagggcgaagagcgaggagacacagaagcagcaacaaagaaagacacg

SEQ ID NO: 64636 - RNA, 61 nt, Homo sapiens
cagcagaacagacaagaaggaggccaaaagcaggcccggcacggaggccgaagcccagggg

SEQ ID NO: 64637 - RNA, 84 nt, Homo sapiens
acgagagcagcagcgcacaggagaaagaaagacaaccgcagaggaggccaccagaaacggccagcgagacccggaggagcggac

SEQ ID NO: 64638 - RNA, 80 nt, Homo sapiens
cgagaggaggaggaggagagagcccaaaggacgccaggcaaaagaaggcacgaaggagcgaaggaagagacgggccagga

SEQ ID NO: 64639 - RNA, 85 nt, Homo sapiens
cggaagcggccgacacaccaccacggaacgccaaccggcggaccgcgagacagccagccgaccgagaacgagagaagaggccagc

SEQ ID NO: 64640 - RNA, 33 nt, Homo sapiens
gagaggagaaccagccagagggaccgggcaccc

SEQ ID NO: 64641 - RNA, 55 nt, Homo sapiens
cccgaccccacggcggaagggggagagcacaaggcgaacaagcccccaggcgaga

SEQ ID NO: 64642 - RNA, 77 nt, Homo sapiens
gcagcgcccggcaccgccacgcgcggacaggcagaaaaggcgaggccggaaaccaacagggagaaacgcagaacaac

SEQ ID NO: 64643 - RNA, 71 nt, Homo sapiens
gcccgggcgggacgcggaaaccgacagcgcagccagccgcaacggaagccagcagaccgcagaacggcccc

SEQ ID NO: 64644 - RNA, 83 nt, Homo sapiens
ccgccaacccccgagcaagacgggaccgagcagggcagacaaaaagagagcggcagaggaaaagcgcgccaaaaggacagcgg

SEQ ID NO: 64645 - RNA, 87 nt, Homo sapiens
gagagggggaaccgccgcccaacacacaaaaagcaacaggccggccgagcagcaacaggcccaggggaagcgcggaaagggagaggg

SEQ ID NO: 64646 - RNA, 74 nt, Homo sapiens
cccgccaagcgcacacaaaagaggagaaaaccgggcgcagcccccagggacagaggaacaaggcgccgacaaaa

SEQ ID NO: 64647 - RNA, 81 nt, Homo sapiens
aagcacaccgaaaacccccccagggaaaacgcagaaacacaagaagcaaagcaaacaaccagacagaccacgacggagcgg

SEQ ID NO: 64648 - RNA, 56 nt, Homo sapiens
ggaagaggcccacccacccaaccgaaacagagccgggggcggcaccgacgacagcc

SEQ ID NO: 64649 - RNA, 75 nt, Homo sapiens
gagcacaccccgaacaccacgcgccacgggccaggaacccgcccagcgcgcccagacccggacacacagcaacga

SEQ ID NO: 64650 - RNA, 80 nt, Homo sapiens
caacaaaaagggccgcagacccaaaacggcccccaggaggacgaccagcaaaccggcagaaaaaaccagcaggccaggaa

SEQ ID NO: 64651 - RNA, 53 nt, Homo sapiens
gcagcccaccaagcacagacaagcacccgggcaacccagggggcaggacgacc

SEQ ID NO: 64652 - RNA, 68 nt, Homo sapiens
cggcgcacagcagagacaaaagaacagccccacgaaacacggcaagaccggaacgacagaccccgggc

SEQ ID NO: 64653 - RNA, 68 nt, Homo sapiens
gaaaagacgaagggaaaaaagcagagcccaggagaaaccggacgcgacgggcaaaagcgagaagcaga

SEQ ID NO: 64654 - RNA, 70 nt, Homo sapiens
gcccccagcaaacacccgcccaaaggccgagccggagaaggggagggcgagaagagcaacagaaacgaga

SEQ ID NO: 64655 - RNA, 56 nt, Homo sapiens
ggacgacggggcgagaccccgcccggaccgcagaacccaggagaaacgagagggac

SEQ ID NO: 64656 - RNA, 77 nt, Homo sapiens
gcaaggcggcaggcaaaccccgccagggccaccagaaacgaggaccaagacccacggcgaagaccaacgaaagaccc

SEQ ID NO: 64657 - RNA, 80 nt, Homo sapiens
cgcccaagacagcaagggacagacgggaaaaaagagcaccagggaaggaagacagaaccccacggaagaggaaaccaagc

SEQ ID NO: 64658 - RNA, 74 nt, Homo sapiens
caggccgccaccgaggaaaaggaacgacgagccgcaccagaaccccacccgcacccaggccacagaggaggaaa

SEQ ID NO: 64659 - RNA, 74 nt, Homo sapiens
accgacaggcagcccgaacacaggagaacaccgaagacaagcccaaagaaaggcagggcacccacaagagacaa

SEQ ID NO: 64660 - RNA, 66 nt, Homo sapiens
ggaagccacaaagcaaaacggcacgggagaggagcaacggacccaaagagggagcaagaagggaag

SEQ ID NO: 64661 - RNA, 65 nt, Homo sapiens
cggaagacgagacaaagcaaaagccggacagcaggacacaaaccaaaacgagccgggaagaagga

SEQ ID NO: 64662 - RNA, 62 nt, Homo sapiens
cggcacaccaggcggcaggggcaaccagacgggccaagcggagaagcgacggaggagggggg

SEQ ID NO: 64663 - RNA, 83 nt, Homo sapiens
ccgggggcgaggacaacgacagcgcggcaccccgacaaggagccgaggccagagcagaaaccagcccaggaacccagcgcccc

SEQ ID NO: 64664 - RNA, 67 nt, Homo sapiens
ggcaccagcaggacccgaggccaggagccaggggcccagaaggaccgggaggaaggcaagggccacg

SEQ ID NO: 64665 - RNA, 66 nt, Homo sapiens
caaaagagcgaaacagggaaagcccgccaggacaaagaagagggaacaacagaagcaccagggcag

SEQ ID NO: 64666 - RNA, 82 nt, Homo sapiens
ggacggggcagcggcggcggcgcccgcgcacgcgcaagaccgcgaggcgagacccgagcccccaacaagcccaagaggagag

SEQ ID NO: 64667 - RNA, 90 nt, Homo sapiens
ccaaagaaggagaaaagggagcagcaggagccccgcggggaaaccccaaagagaggagaaacagcgacgacccaaaggggaaacgggagc

SEQ ID NO: 64668 - RNA, 79 nt, Homo sapiens
ggaagcccgagagccgggccaagcggaggcaacaagaccagaccgcgacaggccgcaggcacccaaggcccagaaggca

SEQ ID NO: 64669 - RNA, 67 nt, Homo sapiens
ccgcagacaaaagaagggagaggagcgaaagaacgagagagggaccaggagaaaagcgggagagcgg

SEQ ID NO: 64670 - RNA, 78 nt, Homo sapiens
aagcaagcagcagaagagccaaggaaaaacagcaagaacccaaaaggaaagacggggaccacgaccacagcaacacag

SEQ ID NO: 64671 - RNA, 73 nt, Homo sapiens
cgagggaacggaaagcccaagacgagccggccaaaaggaccaaggcggcagccaagacacgggaaccagcaac

SEQ ID NO: 64672 - RNA, 72 nt, Homo sapiens
ggcgaagcgggggcaccacgacaaggcaggagccgcaagagcgcggaaaggaacaggagcgaccaggacacc

SEQ ID NO: 64673 - RNA, 67 nt, Homo sapiens
ggcaccaaacacccagaacaacaaagaggcaaagagagggaagcagagagcccgagaccgccccccc

SEQ ID NO: 64674 - RNA, 70 nt, Homo sapiens
acccgcccgaaaggccccgcagcgcagacgcggacgggagggaaaaccagacgcaaacagcagacggaag

SEQ ID NO: 64675 - RNA, 94 nt, Homo sapiens
ggagggccgcaagacccaagaagaagaaggcgaaggaccccaacggggaggccaacggaagaagaagcccggggcggcgacggagcacgaccca

SEQ ID NO: 64676 - RNA, 72 nt, Homo sapiens
cgaacaagaaaagcgcaagccccagaagcccagagcacgccgaagccaccagacaaagacccggaagcaaga

SEQ ID NO: 64677 - RNA, 96 nt, Homo sapiens
agcagcgaacgaggaagcagcgaacgagaaccaaggcggacgcggcgagaagagcgacagacagaacgccggaggcgagggaggacgggcaggccc

SEQ ID NO: 64678 - RNA, 73 nt, Homo sapiens
cccacgaacaccgagaagcgagagaaagagccccgcaccacaaagcgacaaggacgaaggcgggccgaaaaga

SEQ ID NO: 64679 - RNA, 74 nt, Homo sapiens
agcgggggaccccccgcccgccgaccgcggcagacggacaagccgagaccaccaggagcagagcggaggcaacc

SEQ ID NO: 64680 - RNA, 72 nt, Homo sapiens
agaagaaagggaaagccagcagaagaacacccagaagcgaaggaccacaggacaccagaggaccagaaccca

SEQ ID NO: 64681 - RNA, 47 nt, Homo sapiens
gccgccccgcgggggacgggggaaacagcagcacagacagacaagag

SEQ ID NO: 64682 - RNA, 78 nt, Homo sapiens
ccgccagcaaaccacacaggccaccggaaacgcaggcccggcgaggggaaggacggggccggcccacggggcagcccc

SEQ ID NO: 64683 - RNA, 77 nt, Homo sapiens
gaccgagagcgcgaaacgcacgagaagaacggccagacggagggagagcgccggaaacagcagcaggcaacccgaag

SEQ ID NO: 64684 - RNA, 57 nt, Homo sapiens
cccacggcccagcaggagaacaccaacaccagcagcagaggcccccagacccgagcc

SEQ ID NO: 64685 - RNA, 77 nt, Homo sapiens
gcggggaggccccagcgcagcagagcgccaagacggaagcgaagagggaacaccccaccgacaaaaacgagagaaaa

SEQ ID NO: 64686 - RNA, 74 nt, Homo sapiens
acagaaaacaagagaccacagaaggggaagaggcaggcgcgggggcgcgcgacccacgcggggggagaaaaccg

SEQ ID NO: 64687 - RNA, 54 nt, Homo sapiens
aaaaggggaagagcaggccaccagaaggggaaccacagccgaaccgcccggaac

SEQ ID NO: 64688 - RNA, 78 nt, Homo sapiens
ggaagcaaggcccggaaaaccgcggccccgaggcaaacaaagcagacccagaggagaccacggagagaaaagagacca

SEQ ID NO: 64689 - RNA, 70 nt, Homo sapiens
cgacaaccccccgccgcaacacccaaccgaaccagagaagaaaccacaccaaaaggcaccggaagaagcg

SEQ ID NO: 64690 - RNA, 69 nt, Homo sapiens
acagacggccagccagcccccacaacagcagggaaaaaccaggacaaaaagcaaaggacggcgcaagga

SEQ ID NO: 64691 - RNA, 57 nt, Homo sapiens
cggcggcagcgcaggacagccagcagaacccgaaagacagcaaggcggcaaggcggg

SEQ ID NO: 64692 - RNA, 57 nt, Homo sapiens
gcaagacccaaacaaaaagacacgaagaggaggaagcccagccaggacccgaaaagc

SEQ ID NO: 64693 - RNA, 126 nt, Homo sapiens
gcagcaggcggacgaggcggaagaccgcgcgcagggccgcagcgggagcggacggcgagcgcgagcggcgcgagaaagcaagaacggaagcacgggcggaggaaagcacaagcagagcccccgcag

SEQ ID NO: 64694 - RNA, 75 nt, Homo sapiens
gagacaaccccgcgcagcacgggaggagcggggagacgcgccagagagaaaagaaaagggagagggagccccaac

SEQ ID NO: 64695 - RNA, 61 nt, Homo sapiens
cccaaaaccagggcggcaaaacgagcgggccagccacgaggcggccccagcgcgggcgaca

SEQ ID NO: 64696 - RNA, 77 nt, Homo sapiens
ggaaccccgggcaaaaaagaaaagaagagagagagaagcaacggaccccaagcagagagcaagcaagaagaaacaaa

SEQ ID NO: 64697 - RNA, 89 nt, Homo sapiens
acaaacaaaaaccaacgaagcagcgacagaggaaaggccgaggggcaaagaaaaggaaagcacggccgaaaagaaggcgaaaacccggc

SEQ ID NO: 64698 - RNA, 75 nt, Homo sapiens
gaagaaggcggccaccgcaacacaagcagcagaggcagccagaaaaaggagcggggcgaggagaagacacgccag

SEQ ID NO: 64699 - RNA, 72 nt, Homo sapiens
gaaggcggcagcaccggcaagaaggcagaccagagccagagccacccgacccgcccccgggcccagcagaaa

SEQ ID NO: 64700 - RNA, 79 nt, Homo sapiens
gggacggaccgagaccggaccgagagcggaccgagagcgcgaaacgcacgagaagggcggaggaggacgacaggaggca

SEQ ID NO: 64701 - RNA, 79 nt, Homo sapiens
aggagcggacagcacccacaaccaaacagaaaaggaggaagaggaagagaggagagccggacgggccaaaaacgacagc

SEQ ID NO: 64702 - RNA, 64 nt, Homo sapiens
caggccaagaggccaaccagcccaagacagcccagaggaaaccgggagcgcgagccccgcggac

SEQ ID NO: 64703 - RNA, 63 nt, Homo sapiens
cccgcgggagagaccagcgccacgagacggcaccaacgacccagcaggacccggccggaagcg

SEQ ID NO: 64704 - RNA, 76 nt, Homo sapiens
agagaagaaaaacggggacaggggagaaaaaagacagaacgaggaaggagaacgaacagacagagagggaagcgag

SEQ ID NO: 64705 - RNA, 77 nt, Homo sapiens
ccgaacccaggaaccgaagaacagacccagacccaccagccacaaaccagccaggaacggcaagaacccgaccacag

SEQ ID NO: 64706 - RNA, 79 nt, Homo sapiens
ggggaaacgaccgccccaaaacgggcccgagggcaggacagcaggcaccggcgaagcacagagaggcgcgaggcaaaac

SEQ ID NO: 64707 - RNA, 73 nt, Homo sapiens
ccgccggccgggccccaccgccacccgacccaggcgcgaagaggacagaaacccgacaaagggaaccgacaga

SEQ ID NO: 64708 - RNA, 68 nt, Homo sapiens
caggccagcagcagcgagcccgccgcaggagaacggaaaaagcccagaaaacgcacaaaaaaaagaag

SEQ ID NO: 64709 - RNA, 83 nt, Homo sapiens
cggcggcggcggcagcagcggcaggagggcagagaggaacccaccccccagggaacaagcgaaagcggaaccaagcagggagc

SEQ ID NO: 64710 - RNA, 75 nt, Homo sapiens
cagaaggcaggacaaggaaaagggcacgggaaggaaaagaggcagaacgaaggggcggggacggagagacacggg

SEQ ID NO: 64711 - RNA, 83 nt, Homo sapiens
cggagagggggcgcgagcgggggacagggccaaagcggcaggagaaggaagggaccggaaacgacaaggcaacccacaagagg

SEQ ID NO: 64712 - RNA, 70 nt, Homo sapiens
gcgagccgcagcagccacccacgagcccggcaaaagcgcacaaacgcccaagaccggagggaagacaagg

SEQ ID NO: 64713 - RNA, 53 nt, Homo sapiens
gcaaagaaccaggaacaccacccgcagcagagagagacacagccgaaagcgga

SEQ ID NO: 64714 - RNA, 75 nt, Homo sapiens
cagagcaccagaggaacagcagggcaagaccagccacaggaaagcagcggagcagggagagcaggaccacacacg

SEQ ID NO: 64715 - RNA, 67 nt, Homo sapiens
gacccggggacccccgacgccaggcagcgcccccaaacgcgaggaagagagccagcaggaccgggga

SEQ ID NO: 64716 - RNA, 66 nt, Homo sapiens
caaccccaagacgaacgccccgcagggagaaagcgaggaccgcgggaagcacaaaggccagcgaac

SEQ ID NO: 64717 - RNA, 73 nt, Homo sapiens
gaccggaccgagagcggaccgagagcgcgaaacgcacgagaaggaacgggcgcaccacgccaccccgccacga

SEQ ID NO: 64718 - RNA, 82 nt, Homo sapiens
gccgcccccagccccccgcccggggagggcaccagaacaaggaccgggagaggggacagggcgacacaagggagcgcccaga

SEQ ID NO: 64719 - RNA, 66 nt, Homo sapiens
gccaggacagacgaaaagggaggacgcccgaccccacccagcccgcaccgggcagccaggccccgc

SEQ ID NO: 64720 - RNA, 87 nt, Homo sapiens
gcccagcaaagagaagaagggcggaccccggaggccgagcggcaccgcccccagcccccgggggccccggggcccccagaaaccgca

SEQ ID NO: 64721 - RNA, 70 nt, Homo sapiens
cacccgcccgagccgggagcacagcagaagggaaacccagacgacaaggaaggccaagggacccacgacc

SEQ ID NO: 64722 - RNA, 52 nt, Homo sapiens
ccaggcaaaggaaccacccaggaaacagcgcaaggcaagggcagacggggga

SEQ ID NO: 64723 - RNA, 56 nt, Homo sapiens
gcaggggaggcggcaacggacacaaaggacggagcagccagacgagccacgcgccg

SEQ ID NO: 64724 - RNA, 53 nt, Homo sapiens
caggaacaaacgagcacgcaaaagccgaggccgccagcgccaagaaaaaaaca

SEQ ID NO: 64725 - RNA, 75 nt, Homo sapiens
gaccggcacccggacaggaggagccagggcccggcccgaaaggagagcccggggacgacgagcccacggcacaac

SEQ ID NO: 64726 - RNA, 107 nt, Homo sapiens
gcgccgccggccccgccgccaagaggagcgagcggacccgcgaggcgccccacaaagccaagcgaggagagaccaagaccacagcgagacacaaaacgcgcccaccg

SEQ ID NO: 64727 - RNA, 76 nt, Homo sapiens
agcaggcaaagaacaaacgagcagaccgcagccaaggcaaagaagagcagaaacaaaggaccaggcagcagaggca

SEQ ID NO: 64728 - RNA, 60 nt, Homo sapiens
gagagcacccaacaggcgcacaaaagagcacaaaagcaccaaggcgcacaacagcgacaa

SEQ ID NO: 64729 - RNA, 81 nt, Homo sapiens
caaggaagaaaaggcggaccggcgaacgaaggaccagccacaagaagacagacacgaggaaggaaaagaccaccacaagcg

SEQ ID NO: 64730 - RNA, 68 nt, Homo sapiens
agaagacgacggcacagcgcacaagaaacccaagcgcgaggcgaacaccccagggccgaagggggccc

SEQ ID NO: 64731 - RNA, 54 nt, Homo sapiens
gggcaagccggacaaggaccggggaccgagagacagagcacccgacccaggcgg

SEQ ID NO: 64732 - RNA, 58 nt, Homo sapiens
ggcagagaaaaaagaggggggagagccagggggaaaaaggaggacaaacgcaagggaa

SEQ ID NO: 64733 - RNA, 91 nt, Homo sapiens
cgcgaagcggccaaagccgcccagacggccaccggcgggaggaacaaaaggaagaagacggcacgggacccccagcacaggcagcaggccg

SEQ ID NO: 64734 - RNA, 69 nt, Homo sapiens
aaggcgggcaaggcccgggcccacgccccgccagaccacgaggagcgcgcagccggccgcgagaggaga

SEQ ID NO: 64735 - RNA, 80 nt, Homo sapiens
gcggccgcggaggagggggcgaccacaagaggcgggcccccacagagagcacacaaacaaagcgaaaccacggaagaaaa

SEQ ID NO: 64736 - RNA, 71 nt, Homo sapiens
gaaacgccaccaacaccccacgagcgaggggaggagagggccacggacccaaccggagcggacaggacaaa

SEQ ID NO: 64737 - RNA, 80 nt, Homo sapiens
gcagagaaggagaagaagggaccaggagccaaaacacaccggaagaccccaccacccccgagagaaggccccgccaagag

SEQ ID NO: 64738 - RNA, 55 nt, Homo sapiens
caaccaaaggccagggcacaaaaaaggcaccacacccagaccaccaaaacaaagg

SEQ ID NO: 64739 - RNA, 77 nt, Homo sapiens
ccgacggagccggaggcgggagccgcggcggccggggagagcgcgcgccgcgcgcccgcacaaacgccggggacaac

SEQ ID NO: 64740 - RNA, 58 nt, Homo sapiens
acaccacaacaaagaagaccacacacgggaaacacaaaacgaacagggcgagacgaac

SEQ ID NO: 64741 - RNA, 76 nt, Homo sapiens
ggacggcgcgacgagacccgaccagcgggggcgcggcggccgcgcagccacccaagagcccaaaaggcagagcgag

SEQ ID NO: 64742 - RNA, 74 nt, Homo sapiens
aaaacaccggcgaaaccaaccgcggggaacaggaaagccgagccaggcggcaaagagggggaaccaagccgcgg

SEQ ID NO: 64743 - RNA, 115 nt, Homo sapiens
gacgcaccagcggacgaagcgagaagccaaacaacgaccgagaggcgcggcgcagacaacccccaagaaagggagcccagaacgaaacaacccagcagagacccacaaaccaccg

SEQ ID NO: 64744 - RNA, 82 nt, Homo sapiens
aacacagcagccggccacgggaacacaaaccagaaccacacccagcggagcaagggaaagagaccggagagaggaaaaaaaa

SEQ ID NO: 64745 - RNA, 74 nt, Homo sapiens
aaacgacaagcccaggccagcgcaacaccaagcacggcaagcgagcaggcaagaacggaagcacgggcggagga

SEQ ID NO: 64746 - RNA, 86 nt, Homo sapiens
ccgccgcgcgggcgcgcgcgcgcgccccggacccgggcggacgagcacgaacacacggacaggcgcagaacagggcagagagagag

SEQ ID NO: 64747 - RNA, 81 nt, Homo sapiens
agggggggcgcgccggaaaccggagcgcgcagcagaacagaaggaggagggccaggaaagacgcgcaacaagcaggggggg

SEQ ID NO: 64748 - RNA, 72 nt, Homo sapiens
accggcaaggagggcagaggcagaaggcgccccacccagcacgagaaaaaaaggccccaaagccggggaaga

SEQ ID NO: 64749 - RNA, 70 nt, Homo sapiens
gggcaggagacagcaaaaaacaccgacgacccccagagcagccccgcccagaaagcagaaaaaaaagaag

SEQ ID NO: 64750 - RNA, 75 nt, Homo sapiens
cggggcacgccaccccccgcacaggggcgggaccaagggcggagaacggaaaagcaccaggaagcagagaggacc

SEQ ID NO: 64751 - RNA, 76 nt, Homo sapiens
agacaccggacaccgagggcccccaaaaggagacccgcccggcaccaaaggccagcgccacccccacagaacgacg

SEQ ID NO: 64752 - RNA, 63 nt, Homo sapiens
gaagcaccagcgaggaagggggcaccaccgcaccaccccggaaaggcagccggccggcccaga

SEQ ID NO: 64753 - RNA, 70 nt, Homo sapiens
gcagccaaggcacagcacccggggccacccggaggagcccacagagcagaagcagagacgcggggcaaca

SEQ ID NO: 64754 - RNA, 78 nt, Homo sapiens
agaagcgccgagcacccccgcgcacacaccccgagggaggaagcaaacaccagagaggcccggaaacggcccgacacc

SEQ ID NO: 64755 - RNA, 77 nt, Homo sapiens
cacagccagaagaccgaagcgcgacggaaggcggagcgccagcagcgggacccacgggagcgggacgggaggcgccg

SEQ ID NO: 64756 - RNA, 66 nt, Homo sapiens
ccacccccaccaccgaccgcgcacaaagaaggccaggcaggacgacgcggagcagggacacgcacc

SEQ ID NO: 64757 - RNA, 72 nt, Homo sapiens
acacgggagagaggccgggcgagcagcaggagcaccggcccaagaaacagggcagcgaaccagaccggaaca

SEQ ID NO: 64758 - RNA, 74 nt, Homo sapiens
ggggcccgccacagggggaacagcacacccagaagccgacacggaaaacaggaggaagaaacaaaaggcagagc

SEQ ID NO: 64759 - RNA, 75 nt, Homo sapiens
cgggagcggagacccgcgcgccaggcgcgcccggccggccagaaggaggacaggaaaaagccgagcgaacgaaac

SEQ ID NO: 64760 - RNA, 85 nt, Homo sapiens
gaacgcgaggaggaagcggggagggccagcaggagaccaaggaccggacagaggaagaaacccggaaggggaagaggaaagcaaa

SEQ ID NO: 64761 - RNA, 80 nt, Homo sapiens
cgcaagaacccagagcggcagaaaacagcccggaagcgcccggcgccgcacgagacaaccaggcacagggaaacgcccag

SEQ ID NO: 64762 - RNA, 74 nt, Homo sapiens
cggaacgggacgcagaaagggcagacacaggcacaccaagggaacgcacaggaaaacggcaaacgagacaaaca

SEQ ID NO: 64763 - RNA, 74 nt, Homo sapiens
agagaagaaaaaaggcagaaaaagaggcaaaaccaggcaacggagaggcagaacaagaagggcaaccagggggg

SEQ ID NO: 64764 - RNA, 103 nt, Homo sapiens
ccagaagaaggcacagcagaaaggacaaaggaggaggcaaggaagagaaagggcacacaggccccgagaaccaagagaacccccaccaaccaggcccggccaa

SEQ ID NO: 64765 - RNA, 72 nt, Homo sapiens
caccgaaaaaaagaagcggccaggggagaccccggacggggaggaccacacaccccgaccacagcgcaacaa

SEQ ID NO: 64766 - RNA, 59 nt, Homo sapiens
gacaacgccaacccaaggaaggaccaaacggagaaccaggaagaaaacaccggagccca

SEQ ID NO: 64767 - RNA, 75 nt, Homo sapiens
acaagaaagcagaaaaaagacacaagcaaccggagggagcaaaagaccggccagagaacaaacccccaaagccag

SEQ ID NO: 64768 - RNA, 77 nt, Homo sapiens
gcgcccggccgcggccagcggagcccgggcggggcaggagccgggagcacggcccaggcagccaagaaggcagagag

SEQ ID NO: 64769 - RNA, 51 nt, Homo sapiens
cacccggcacgccacggcgccccgcaagaacggccgagcgaccaggagagg

SEQ ID NO: 64770 - RNA, 70 nt, Homo sapiens
cagcgagaaacccgccggagcccgcccgaaccggaaaaacggggcacacagcaaaaaagcggacacagcc

SEQ ID NO: 64771 - RNA, 67 nt, Homo sapiens
aaccgcagccgagcggggccggccacaggagcacaaaggaacggaaaccaagccaaagaggcaagaa

SEQ ID NO: 64772 - RNA, 60 nt, Homo sapiens
gaagaggacccccggacaaagcgagcacgcaaggcgggcacagcagcggagaaaacggaa

SEQ ID NO: 64773 - RNA, 73 nt, Homo sapiens
acaagaaggacggaagagaaaacagacccacaaagcacccagaaacacagagacgaagaggagcagaaccaga

SEQ ID NO: 64774 - RNA, 75 nt, Homo sapiens
acaggaccaccgcggcgcgccagcagcacacagccgcaaggccagcaggcaacacgggagaaggaaccgcaaaaa

SEQ ID NO: 64775 - RNA, 68 nt, Homo sapiens
accaagcaggcacagaaagacgaaaccagcggaaaaacaggagcagacgagccaccgagcccgggagc

SEQ ID NO: 64776 - RNA, 86 nt, Homo sapiens
cagaaggagacagcgaagcggggggaaggagcgaaagagacaacaccccgagcccacaagcccccacggaggacacgcccggggcg

SEQ ID NO: 64777 - RNA, 66 nt, Homo sapiens
ccccccaggaacggagccagagcggccggcccccagacaggacgcgggaagggggggagggggaca

SEQ ID NO: 64778 - RNA, 58 nt, Homo sapiens
gcaagcgcgcaggcgacccccggcagccaggcgcaccaggaacgcacgaccagcaggg

SEQ ID NO: 64779 - RNA, 89 nt, Homo sapiens
gggggcacgccgcacgcaagaagaggacagccggacacacgcccgagcagaccagcccgcgcgaggccgcgcccccccgcccgaggggg

SEQ ID NO: 64780 - RNA, 72 nt, Homo sapiens
agagcagcaccaggccagagccagaacaaccaagaggggggagaccggaggacccccaaacaacccggagag

SEQ ID NO: 64781 - RNA, 74 nt, Homo sapiens
agggggaccgggcgcacaggcggcgccgacagcagaacaaaacgccacccaggcaggaggaccaaagagagaca

SEQ ID NO: 64782 - RNA, 58 nt, Homo sapiens
ggcgcccacgggggagcgagccggagacaggaagagaccgagaccaggaaccaggcag

SEQ ID NO: 64783 - RNA, 98 nt, Homo sapiens
agagcccagaggcaagaggccggaaaggaacaagagagcaggaggcacacgaaagcagaagcgccagcaagaaagaacagaagaccaaacacaaaaaa

SEQ ID NO: 64784 - RNA, 79 nt, Homo sapiens
agcgcccggcgcgcggcgcgccgcccggcgagcgggccggaggaaaagaaagagacagagggaccggcagaacacacaa

SEQ ID NO: 64785 - RNA, 67 nt, Homo sapiens
cgccccgggggacccccccaacccccgggccaccggggggagcaccagcggaacgccaggagccaga

SEQ ID NO: 64786 - RNA, 57 nt, Homo sapiens
gaacgcccggaaagagcccaggacaacacaggcaaaggcccggccaacgcaacaggg

SEQ ID NO: 64787 - RNA, 77 nt, Homo sapiens
gcgggagcggcccacgacgggacacgccccggaggaacacagaagcgggagaagggccggcggacgggaacgacgcg

SEQ ID NO: 64788 - RNA, 83 nt, Homo sapiens
cagaaggcaaaacgaagacgaggcaaagcacccagcccaccccgagcagacgaagaaagagaagcagaacgaagaaggaaaaa

SEQ ID NO: 64789 - RNA, 70 nt, Homo sapiens
ccggagcgacgcgcggagcgagagaaaagaacgcggacacgcaagcgcgggaaaagaacacagggaggaa

SEQ ID NO: 64790 - RNA, 79 nt, Homo sapiens
ggaaaagaccagagaaagaaggcagcgcggagggggccagggacagacggccaccccccggcagccaagccagaaggac

SEQ ID NO: 64791 - RNA, 82 nt, Homo sapiens
ccccacgcacaaaccgaacgcggaaacgcccaaagacgggaccggacgagacggaggaacgcgcagaaaacaaaggcaaggc

SEQ ID NO: 64792 - RNA, 78 nt, Homo sapiens
caaaagcaagaagacggcaagcccaaaagacccacagcggggccgggccccgaccacccagagaaaggaaaggagcca

SEQ ID NO: 64793 - RNA, 78 nt, Homo sapiens
gaacggcacgaaaaggcaacacacaagacggaaggagagacaggaagggcacagaaacggcgcgagggcagggaagcc

SEQ ID NO: 64794 - RNA, 84 nt, Homo sapiens
ggaccgccgccacggggcagccagcacaacgggcggaggggcgcgcccccagaaccccacgaaacaggcgccaagggacaaaca

SEQ ID NO: 64795 - RNA, 70 nt, Homo sapiens
cgcggaaggcagcgcccagcagcgcagaggcccacgcggaccggcagcgccaccggaccaccagacaagg

SEQ ID NO: 64796 - RNA, 76 nt, Homo sapiens
gccgggccccggcaccgccgaagcaaggaggcaaaagcagaccggaaaacccaccggcaagaccacacccgagggg

SEQ ID NO: 64797 - RNA, 68 nt, Homo sapiens
gcaggagccagccacggaagcacaagaagcagaagaacagacaaaaagggaggagagggaagaacggg

SEQ ID NO: 64798 - RNA, 79 nt, Homo sapiens
agacccggaaggccaaaggcgcgcaaggaggaaggggggcccacgcggaggacgcagaacacggcgggcggcccgccaa

SEQ ID NO: 64799 - RNA, 84 nt, Homo sapiens
gcagcgagaccacgcccccccacggaagccagccaggccaaaacccagcaagaagcagccagagcggcacaccacacacaggca

SEQ ID NO: 64800 - RNA, 84 nt, Homo sapiens
ccgcccaacgggaccaggccggcgcggaagaggccggcggcgggacggccccacgggacccgccccgaccacagcagcgacacc

SEQ ID NO: 64801 - RNA, 78 nt, Homo sapiens
aggaaggcacaaaggaggaggaggaggacgacgacgaggggaacgaagacagcggacacacaggaaaacacagcaagg

SEQ ID NO: 64802 - RNA, 81 nt, Homo sapiens
cgagcagcacaacgccacaagccaacaaggaaacaccagggggcagccaagcgggaagaggagaccccaaaacgcgggccc

SEQ ID NO: 64803 - RNA, 75 nt, Homo sapiens
cagcaggcaccagcccagaaacacagcgacacccagcggacgggaagaagggagacccagggccccaacccgaaa

SEQ ID NO: 64804 - RNA, 77 nt, Homo sapiens
ggagagaagacgaggcgggccaccacggagaaaacccagacaggccgacaggaaaggagagaaaagagggagggaag

SEQ ID NO: 64805 - RNA, 68 nt, Homo sapiens
cccgggcagagggagccggaagagcgagcccgggagggccaagacagggagccgaaggagggccacgg

SEQ ID NO: 64806 - RNA, 75 nt, Homo sapiens
ccgggccccaggacgcacggcagagggccccggaccaaaagacaggaccggagaaagccagaagagcgcagagaa

SEQ ID NO: 64807 - RNA, 61 nt, Homo sapiens
gcgccaaggaaccaggacagcgacagcggcaacgagaaacggcccagcgaggcagaagcac

SEQ ID NO: 64808 - RNA, 89 nt, Homo sapiens
gcgaagcggccaaagccgcccagacggccaccggcgggaggaacaaaagggcgacccagcaacgcggccggccaggggcaagcgagcac

SEQ ID NO: 64809 - RNA, 81 nt, Homo sapiens
ggccagggaccggcaggagagaagcgaagcaggccggggccgaccgccacacagccacgggcacagaaagcgagagagcca

SEQ ID NO: 64810 - RNA, 89 nt, Homo sapiens
agcgccccgcgcagccgccgcgccgcgggagccggcaaggaaaggaggaaaacaagcgaagcggcaacaaaacggaaaggcagcacagg

SEQ ID NO: 64811 - RNA, 66 nt, Homo sapiens
cgagcagcggacgccggccgccgcaggaggcacacaagaaagggcggaaccgggccggcgagccgg

SEQ ID NO: 64812 - RNA, 72 nt, Homo sapiens
caggcacacagggaacgcgcacgacaccggaagagccagccacccccacaccaaggcggaggcaaggcagac

SEQ ID NO: 64813 - RNA, 46 nt, Homo sapiens
ggccggcagcgcccggacgaggagcgccacgcagagccccgccagg

SEQ ID NO: 64814 - RNA, 77 nt, Homo sapiens
aggaaggcccagcaaagagaagaagcggagccccgggcccagcaggaggcggcccccgcggaccgcccgcccagccc

SEQ ID NO: 64815 - RNA, 68 nt, Homo sapiens
gccaacggaaaggaagaagagaagaggaagaaaggacgaaagccagaagcagaacagacaaacagcga

SEQ ID NO: 64816 - RNA, 76 nt, Homo sapiens
acagcccaggccgacagggccggaaggaggaggcgcacacacggggacacaagaaaagagcggaggggaggggagg

SEQ ID NO: 64817 - RNA, 34 nt, Homo sapiens
gacgggcaacagacaggacaagaaggaaaaaggg

SEQ ID NO: 64818 - RNA, 71 nt, Homo sapiens
caaagcccaagcacgaccaaagacggcagaaccacagcaaaggacaagaaaaccccaggacacagagcggg

SEQ ID NO: 64819 - RNA, 54 nt, Homo sapiens
cgcccaccaggcccgaggagcgacgagggaagaaaacgccagagaagcagagca

SEQ ID NO: 64820 - RNA, 76 nt, Homo sapiens
ggggaccacacagccagaacagggacgccagccgcagaggaagacccggaccagcggaggagagcgcgcaggagaa

SEQ ID NO: 64821 - RNA, 75 nt, Homo sapiens
ccggcagcccgacgcgagccgccggagcgaacgaagaaggaaccagcaaagcgccacgaagcacaagcaagagga

SEQ ID NO: 64822 - RNA, 78 nt, Homo sapiens
ccaagcagccaccagcagcccccagagcgggaccacagaccacaggacagacagagaaagggaagaacaaagccccca

SEQ ID NO: 64823 - RNA, 79 nt, Homo sapiens
ccgcccggggcggggcccgggaagggaccaaagagaggaagcacgccaacgaaaaaacagaagaaacggccaaagggag

SEQ ID NO: 64824 - RNA, 75 nt, Homo sapiens
aggaacgcagaaacacaggaccccccccaacgaggggccgagggaagcacgaggggcgacaggacaacacaccag

SEQ ID NO: 64825 - RNA, 81 nt, Homo sapiens
gcacagccccgggcagaaggaaccccagcacgcaggccggagccagcagaaccccgccggagacaccacggcaaggccaac

SEQ ID NO: 64826 - RNA, 64 nt, Homo sapiens
aagagaagaagaagcaggagaacgaaacggagccagagaaggcagaaggaccagaacagagaag

SEQ ID NO: 64827 - RNA, 78 nt, Homo sapiens
gcgaagcgcgcagagccggaggggcgcgggacacacccccaggaggcccggcagagcaggcgccaccagcaaaaccag

SEQ ID NO: 64828 - RNA, 85 nt, Homo sapiens
gacccagcgcacgggagcagccagagcagaacaaccgggagggcggagcaggggagcgaggcacaggagcccgcccgcaggacgc

SEQ ID NO: 64829 - RNA, 87 nt, Homo sapiens
ccgaaggccgggggccagccaggccgacacccaaccgggcaggcgagacgcagaggaagaacggaccgaagccaaagaacaagagcg

SEQ ID NO: 64830 - RNA, 76 nt, Homo sapiens
cgcgagacgccgagaccccagagaagagacgcagaccaccaagggcagggcgggcacggccccaggggcgccacag

SEQ ID NO: 64831 - RNA, 66 nt, Homo sapiens
ccagaaggccccacgaaggcaccggggaaggcaaaacccaaaccaggaccaagcgacaggaggaac

SEQ ID NO: 64832 - RNA, 81 nt, Homo sapiens
acagggcccagaccgacgaggcgggagcagcggaagacaccaaggccagggagggccaccgcacggaagagaccggaccgg

SEQ ID NO: 64833 - RNA, 78 nt, Homo sapiens
cgccaggcagaaggccccccgaacagcaggcgccaccagcccggaggcagcggcgccagcccgggaggacgggccgca

SEQ ID NO: 64834 - RNA, 70 nt, Homo sapiens
agagcaggacgaaacgcacccgaggaggcgcagaaccgcagcggagaggaaccaggccgcgcaagccgag

SEQ ID NO: 64835 - RNA, 55 nt, Homo sapiens
cggagaggggcggcgccgcgcggccgagggggaaacccgcccagggcgggagacc

SEQ ID NO: 64836 - RNA, 94 nt, Homo sapiens
gacccagacccgcccgccagaaccgcgcgccacccacaaccagagaggacggggacgggccccaggacgaggaagacaaggccagccacggaag

SEQ ID NO: 64837 - RNA, 62 nt, Homo sapiens
agcaagaggagagcgcagccacgcaccacaacggagccaaggaacgaacagggcgggcggag

SEQ ID NO: 64838 - RNA, 81 nt, Homo sapiens
agggaaaagcgccgggcggaccagcaggacgcaagaggaggaaggcgggaaccaggaggccgaaagaggccacacggcgca

SEQ ID NO: 64839 - RNA, 66 nt, Homo sapiens
acggccggaaccccccgggcgcccggagaccgcggggaagacgccacgcccagaccagcggccgcg

SEQ ID NO: 64840 - RNA, 63 nt, Homo sapiens
cacgggaggacgaggccagaaggaaagacaagagagagagacgaccaggccggagcaacagac

SEQ ID NO: 64841 - RNA, 79 nt, Homo sapiens
ccgagaccagccaccaaggccacgacaccagaacgcagaagggggcagcccacaaaaggagaaagacccgagcaaagaa

SEQ ID NO: 64842 - RNA, 69 nt, Homo sapiens
aacggccagagccgcacaaccacaggggcccgacaaggcgcagaaccgcagcggagaggaaccaggccg

SEQ ID NO: 64843 - RNA, 72 nt, Homo sapiens
aggaggcggggagggccaaggggccaaacaaacccacagggaccgacggcacgaaaggacaaaaaccagccc

SEQ ID NO: 64844 - RNA, 74 nt, Homo sapiens
gaaacaaacacacgcaggcaggaagccaggagggaagcccagaagacgcacaagagagaccgaccaaaccccgg

SEQ ID NO: 64845 - RNA, 76 nt, Homo sapiens
cgaggagcgggccagccgcgcggcgggaagcggcggcggcggcccagcgccaagaggaaaaacggcgcagaacaac

SEQ ID NO: 64846 - RNA, 84 nt, Homo sapiens
gcggaggccccagggaagcgcagaaagcaggcgaacccgcggcgcaaaacggaagccagcacaacagacacccggccagaccag

SEQ ID NO: 64847 - RNA, 55 nt, Homo sapiens
ccagagagcggaacacagaggagcgcagcgcccaagcggagaggggccgaccagc

SEQ ID NO: 64848 - RNA, 49 nt, Homo sapiens
cgaaccaggacggcaagcagggacgggggccggaggccaggagagaggc

SEQ ID NO: 64849 - RNA, 69 nt, Homo sapiens
aaaggcaagaaaccaaacagaaccagggaagacaagcaccaggagccagaggccccacagaaagccaaa

SEQ ID NO: 64850 - RNA, 58 nt, Homo sapiens
cggccccacgcacgacgagagggacagcacgacgccgacgcaacgcagccgaagcaca

SEQ ID NO: 64851 - RNA, 65 nt, Homo sapiens
cagaagaaacggacaagccagggcacgcagaccaggccacagggcggaggcggggcagacagggc

SEQ ID NO: 64852 - RNA, 73 nt, Homo sapiens
cagccgacagccagggcggaagcccgccccagagcaggcaggagacagagagaaagcaacagcaggccagccc

SEQ ID NO: 64853 - RNA, 61 nt, Homo sapiens
gcaaaggcagagaccaacccgggacgacgagaagaggacagacggaggagaaggaggaaga

SEQ ID NO: 64854 - RNA, 70 nt, Homo sapiens
cgacccagccgccaggcagacagggccgaacaacaagcaaacaacggaaaggagggggaagcaacggcca

SEQ ID NO: 64855 - RNA, 69 nt, Homo sapiens
aagagccgaggccgaaacaccaaggcagacacaaagcggacacggggaagaaagggacgggccgcaacc

SEQ ID NO: 64856 - RNA, 73 nt, Homo sapiens
cagacagccccagggagaccagcacgagccgggcgggacgccggaaggggcacaagacacgcacaaggaagca

SEQ ID NO: 64857 - RNA, 75 nt, Homo sapiens
caagccgaagcccagcaggacacagcagaaaggagcgaacccaagaaacaaacgaaaacaaacggaagagagggc

SEQ ID NO: 64858 - RNA, 84 nt, Homo sapiens
ggagccggcgcggcgcagcccacggcgcaggcccacggagcgcagccgccgaggacccaccaacaaccgaaaacaggggaacag

SEQ ID NO: 64859 - RNA, 73 nt, Homo sapiens
gcggcccccaggccccgccagaggcaaacgaacaaacacccaaagcagccaggagccagcaaaaagaagagac

SEQ ID NO: 64860 - RNA, 84 nt, Homo sapiens
acgccccgaggcggcagaccgcccccccagccgcgcggcccccagaccccggcgcgggacagcccagagcaagcacacggaggc

SEQ ID NO: 64861 - RNA, 75 nt, Homo sapiens
cgaaggcaaaaccaaacaccccagcccacagagagcaaaacacaagagagcagggaggagagagaggggcgccgg

SEQ ID NO: 64862 - RNA, 80 nt, Homo sapiens
accggcgggaggaacaaaagggagaagccaaaaggacaggcagagggcccaacaacagaagaacccgccagcaagacagg

SEQ ID NO: 64863 - RNA, 73 nt, Homo sapiens
ccccagggagagggaaaaggagcaggaagagaacgagagcccacggcgagaccccgcgaggcaagacaagacc

SEQ ID NO: 64864 - RNA, 71 nt, Homo sapiens
ggccggagacaccagcagccaggacacggccaaggccggcgagaacgcccgcggcagcgaggggaccaagg

SEQ ID NO: 64865 - RNA, 71 nt, Homo sapiens
aaaggcccaaaggccgccaggccgcagacgcgaaggaacggcaaagggagaagagccaaggagaccaaacc

SEQ ID NO: 64866 - RNA, 81 nt, Homo sapiens
gcccgggcccgaggaggcagccaagccgagccgccacccggcccacaacacagcagcccccaggagagcaggaaaagccgg

SEQ ID NO: 64867 - RNA, 96 nt, Homo sapiens
cacaaccgcccccggacaaggggccgacaaccggccaccagcgcgggccggaagcccccggccgcccaccgccaggaggaggaagaccaccggacc

SEQ ID NO: 64868 - RNA, 82 nt, Homo sapiens
aggaccccaccgccaggaccccccaggagagcgccccagggcaagccccgcccggccaacaaacaaacgggaagagagccgg

SEQ ID NO: 64869 - RNA, 95 nt, Homo sapiens
cggcaaaaggcggaccgcccccgccaacgaagaccgagaccagaagacgaccccgacgcaggccaggagccgcggacagaagccgagcacggccg

SEQ ID NO: 64870 - RNA, 83 nt, Homo sapiens
gggagacagcagcaggaacacaggccacccaccccaccagagccggacaccagagccggacaccagggaggagcgagcgacgc

SEQ ID NO: 64871 - RNA, 53 nt, Homo sapiens
caagagcgcaacaagagcaaggccgcgccaggagcacgggccaggagaacgcg

SEQ ID NO: 64872 - RNA, 82 nt, Homo sapiens
gcccggccccgaagagagcccggaaccaccggccgcagccgcagaaaaagcggggaaggggggcaaaaaaaagaagcaagcg

SEQ ID NO: 64873 - RNA, 72 nt, Homo sapiens
ccggaaaaaagcgagcacccgcaagaagagaacccagggaagccgaagagccagcacacagaacacaagagc

SEQ ID NO: 64874 - RNA, 74 nt, Homo sapiens
cgcgcagaagcccagcagcaacaccccaaacagcggcgcacggggcacaacaggcgccacaggagccgcagaag

SEQ ID NO: 64875 - RNA, 52 nt, Homo sapiens
cacgaggcaggagcgcgggccaccaaagaacagcacgaccagacccgagagc

SEQ ID NO: 64876 - RNA, 66 nt, Homo sapiens
aaccagcggacgcggaggcccaaccgaagaaaacaagccgaagaggcgggagaacacaccaggaaa

SEQ ID NO: 64877 - RNA, 71 nt, Homo sapiens
cggagcagcagccgcgcagagaaaaacacaccgacagcagaacacacgcgaaaggaaaccaagcggaaggg

SEQ ID NO: 64878 - RNA, 81 nt, Homo sapiens
accagcgcgagggcccgggcaaggcccgacaggagaagccgcgggagcggaagacaggcccggagcccgacggaccggaga

SEQ ID NO: 64879 - RNA, 108 nt, Homo sapiens
ccgcaagacgacaaggaggcagggacccggagccacccacaggacccgccaccaaagaacaaacagacgccgaagccgcggaaggagaagacacagcagcacaacaga

SEQ ID NO: 64880 - RNA, 84 nt, Homo sapiens
cgcggacgcgaccgaggggacgccgcccgccgcccgccgcaggccacccgggaacggaggagggagcgcgcagaaaacaaggaa

SEQ ID NO: 64881 - RNA, 74 nt, Homo sapiens
aaaccagcaccgggagaggggcacacacggccaacaaaaacaggaaaccagcgcgaaggcgcacagaaaaccac

SEQ ID NO: 64882 - RNA, 74 nt, Homo sapiens
gcccccacagccccccggcgagacagccgaggcaggaagcccggcggacggcccccagaagccgccgaacgccg

SEQ ID NO: 64883 - RNA, 56 nt, Homo sapiens
ccccggagaaaaggccaagaaggcagacaacggcagccgacccccacaaaacagag

SEQ ID NO: 64884 - RNA, 67 nt, Homo sapiens
gcaggccgcgagcagcggacgccggccgccgcaggaggacgccgccagccaccggcgcgaagccaga

SEQ ID NO: 64885 - RNA, 69 nt, Homo sapiens
cccggaaccaccccagaaagcaccagccacagaacaaaccaggggagggaaacgagaaaaacgacgcca

SEQ ID NO: 64886 - RNA, 75 nt, Homo sapiens
gacccggaggaaacaacccaacccgccacacaaggcggcaaaccgacaacagagccgaagaagccccacagcacg

SEQ ID NO: 64887 - RNA, 61 nt, Homo sapiens
gccggagaccccagcccggcggaacaagacaggcagaaaagagaccaaaagaccggaagcg

SEQ ID NO: 64888 - RNA, 77 nt, Homo sapiens
gacgcaaagaacggagcaccgcgcaggaggcagcccgcgggagacacagcaggccccacagaggaaggccggaaggc

SEQ ID NO: 64889 - RNA, 53 nt, Homo sapiens
gcgcccgcgcccgccccaacccagccacagccagggccccccacgcgagaacc

SEQ ID NO: 64890 - RNA, 78 nt, Homo sapiens
aacaagaggaggaggggcaagcgcgcggcaggacccagaccggaagggaggcaggagagcagacacggcccaccgacc

SEQ ID NO: 64891 - RNA, 73 nt, Homo sapiens
gcaaagccaaaaaagcacagaacccgaaacaagagagacccaaaagggccagagcagggagacaaaagagaaa

SEQ ID NO: 64892 - RNA, 74 nt, Homo sapiens
agaggaggcggcagaacagcagaaacggccacagaggaagccaaaagaggagaaacgagaaaacggcaggaggg

SEQ ID NO: 64893 - RNA, 80 nt, Homo sapiens
cgaaagaaacaaggggccagggcagagggcaccgagcggcggagagccgggagaaacacaaagagaacagaggaaggcga

SEQ ID NO: 64894 - RNA, 74 nt, Homo sapiens
aacacgggaagcaggagcgaaagcgccggaagggcagaccccgaacaagaacacacgaaaaacagccaagggga

SEQ ID NO: 64895 - RNA, 77 nt, Homo sapiens
agacaggaccgcagaacagccaagagcgggcccgggccaaccgagggccaccggcgccagagcaagcccgccccgag

SEQ ID NO: 64896 - RNA, 88 nt, Homo sapiens
cagcagccgccagacaagagcagacggcccaaccagagaaaggaaaacccagcgaagcaagagaacagagcggacaccagcagaaaac

SEQ ID NO: 64897 - RNA, 70 nt, Homo sapiens
ggagcagcccgcagaggcccaggagacgacaaagccccgccaagggacgaaacgcacgcagagcacgaag

SEQ ID NO: 64898 - RNA, 70 nt, Homo sapiens
ggacggagaacgccccgaaccccgcacacgaggaagagggcccccgagaacaccgaagaagaacaacgca

SEQ ID NO: 64899 - RNA, 84 nt, Homo sapiens
cgggaacagagaggaagcagagggggggggccagcgacccggggccgagaagacacgcccagcagagccccccgacagaccgcg

SEQ ID NO: 64900 - RNA, 76 nt, Homo sapiens
acccccggcgggcccgaggcggcgagagaggcaggcggagccgaccgggccagaccaaacgacaaagaggcggaga

SEQ ID NO: 64901 - RNA, 72 nt, Homo sapiens
ggcacaggggggagacacccagaggacgcccgccccaggaaaggccgagcaccggccacgaaacagagacac

SEQ ID NO: 64902 - RNA, 61 nt, Homo sapiens
cccacccaaggccaagcaaggcgcaggccaaagggacccagagcgccagggcccgaagagg

SEQ ID NO: 64903 - RNA, 80 nt, Homo sapiens
gaaggaaaagaaccagaagcgagagaaaagcccccaaaagcagcacaggacgggggcaaccggacagagaagcccaagag

SEQ ID NO: 64904 - RNA, 74 nt, Homo sapiens
cagcagagccacgaaaaacagggaaccgaggaagcagagacacgcgaagaggaagaaacgagaacggcaaaagg

SEQ ID NO: 64905 - RNA, 76 nt, Homo sapiens
gcagggaacggagaccaggcaggcagcgggcccgaccagcccggccgcgaggagcagacggcccccccagacgaca

SEQ ID NO: 64906 - RNA, 78 nt, Homo sapiens
cgcccaggccagagaaggggaaggaggggcagcgggaaagcaacggcgcaagcggcggcggcgggcagaggacacaca

SEQ ID NO: 64907 - RNA, 41 nt, Homo sapiens
gcccagaggaagccggaaagagcccggagagggaaagaagc

SEQ ID NO: 64908 - RNA, 70 nt, Homo sapiens
ccccgagcccagcaccgcgggaaggaccaaagcagcagaccacagccaacgaaaccaagcgccagggaag

SEQ ID NO: 64909 - RNA, 91 nt, Homo sapiens
cggaaggcaagaaaccagaaagagaacgggacaacaaaagagccacccaaggggggaaggagacgcacacccacaccgggcaacaggccag

SEQ ID NO: 64910 - RNA, 70 nt, Homo sapiens
acggaaaaacggggaaaacccaaaccaccgaagggccgaccaagcagaacccgagaagagccgagaaaca

SEQ ID NO: 64911 - RNA, 56 nt, Homo sapiens
gagccgggcgcgccgcgacccggcgcccgaaaacaagcgaaccacccaccaacaag

SEQ ID NO: 64912 - RNA, 61 nt, Homo sapiens
ggcgcgacgacgggaggacaaccaacgacagcccagcagcacagggagcgcacccgaacac

SEQ ID NO: 64913 - RNA, 40 nt, Homo sapiens
ggaggagccgcagccaaaaggcaagaacaacaggacaggg

SEQ ID NO: 64914 - RNA, 72 nt, Homo sapiens
caccgagcccgcccacgacggagaggaggagaaaaccggaagagaaaggccgggaagcaggaaagaaaaaaa

SEQ ID NO: 64915 - RNA, 79 nt, Homo sapiens
ccgaagagcagaagaaacagagcgcaagacacaggacacaacccaagaaacaacggacagcagaggcacacaaacggaa

SEQ ID NO: 64916 - RNA, 72 nt, Homo sapiens
gaacgaggaagaggaggacccgaagagcaggacaggagaggaaggagggaaggcaaaccagggaagacccag

SEQ ID NO: 64917 - RNA, 76 nt, Homo sapiens
cagcccgaaccccggacacaacacacggcaacacacggaacagcaaacgagaaggaagacacagaaagaaaaacag

SEQ ID NO: 64918 - RNA, 72 nt, Homo sapiens
aggagaccaggcaccagcaccacggagcacaagagacgggccaacgcacggcccggcagagccagcaccccc

SEQ ID NO: 64919 - RNA, 85 nt, Homo sapiens
ggaagaaacaggccgagacacccacccggcgcggcaacaggcagacagacaacccgcagagcccaaacagggcagcaggcagcag

SEQ ID NO: 64920 - RNA, 77 nt, Homo sapiens
gaagaccacacaccccacaggaaggcacacagcagcaagagcccaaacgcgaaaaaaaccagccgaacgcccagcca

SEQ ID NO: 64921 - RNA, 82 nt, Homo sapiens
acagccaggggagaaaaccaggggaaggaggaggagaagacccagaaggagcgcggaaaagggcagcacacgcggcagggca

SEQ ID NO: 64922 - RNA, 81 nt, Homo sapiens
cccacacccaccaacaacaccacaaaaccacagccaagggaaaaggaaaccagaagagggacgaagaaaacagcgcagcgc

SEQ ID NO: 64923 - RNA, 76 nt, Homo sapiens
aacagaaggaccccaacgcccaccaaagaggaaagcgaggaggagcgagcgcgagaggggaacagagaaaagacga

SEQ ID NO: 64924 - RNA, 74 nt, Homo sapiens
gcgcagaaagggagaaacaacaaacccaagaaaccccaaagagcaagacagccaaaccgaaagacgaacagcac

SEQ ID NO: 64925 - RNA, 73 nt, Homo sapiens
cacgaacagggagagcaggacaccagcacaccgcggaggcgcccaggagaacccccggagagaaaagcaggga

SEQ ID NO: 64926 - RNA, 70 nt, Homo sapiens
caggccggagcacaccacaaagccagaccagaacacacaagaaccgggagaacgaacaaaccaagccaac

SEQ ID NO: 64927 - RNA, 74 nt, Homo sapiens
caagacacagaagcacaacccaaccaagcagaaacaacagaggcgaagaagggcagaacagacaagaaacagag

SEQ ID NO: 64928 - RNA, 59 nt, Homo sapiens
ggaagcacaccaccaaggaacgggcgcagcgagaggcggagcaggagcaaaggagcaag

SEQ ID NO: 64929 - RNA, 55 nt, Homo sapiens
agacaaacagcaaggggcaaagcagaagggaacacccgcacagaaagaccaggga

SEQ ID NO: 64930 - RNA, 81 nt, Homo sapiens
caacgggcgccgggagcggagaacacacagcggggggggcacagggacgagcacaggccccgagggcgccgggcaccgggc

SEQ ID NO: 64931 - RNA, 39 nt, Homo sapiens
acccccagaccaccagaaggcagaggcggagaagaaccc

SEQ ID NO: 64932 - RNA, 83 nt, Homo sapiens
aagcaccgacacaggagaacaagcaggaggagggagacaggggcaaaaaacggcagggaagaggcgagacagaagagagagga

SEQ ID NO: 64933 - RNA, 75 nt, Homo sapiens
aggcacccgggcccccgcccaagcgcgcaagacgcaacacaaacgagaaagacagcccgaacggagaaagagaca

SEQ ID NO: 64934 - RNA, 76 nt, Homo sapiens
caacccgacccgacgaggcaacaacacggcaccacacaagcgaagaagccgagaaaccagccacgcagaagagaca

SEQ ID NO: 64935 - RNA, 61 nt, Homo sapiens
gcgcgcaggggacaggggcggcgaccggcggcgccgaggagaaggagagaaccaggagacc

SEQ ID NO: 64936 - RNA, 55 nt, Homo sapiens
gacggaccccacccaggaagcaaagagcaaggaagaagcaccacgaccaaagccg

SEQ ID NO: 64937 - RNA, 83 nt, Homo sapiens
gaagccgacagacaaccaggccagaagcggacccagaagaggggagcagcaaggaggaagacagccggggccggaggggagcc

SEQ ID NO: 64938 - RNA, 81 nt, Homo sapiens
accggcagcagcgcgccgccgcgcccagccaccgccccccccacgggagagagccagaacagccaacaccgaccaagcccg

SEQ ID NO: 64939 - RNA, 55 nt, Homo sapiens
aggaaccccaagagaccaggcagcgaggaaacaaaggacacaacaggaggccaac

SEQ ID NO: 64940 - RNA, 75 nt, Homo sapiens
gcacgcaacccccccccgaacaggcgacagggggaccgcggcgcgagggacgcaccgccccaggacggggagaaa

SEQ ID NO: 64941 - RNA, 81 nt, Homo sapiens
gacgcgcgggccgcgagcggggcgacccgagaggccagaccggcccgggccgggccaggaggacacgcgcagggcccacga

SEQ ID NO: 64942 - RNA, 69 nt, Homo sapiens
gaaaggggaagcaagagaacgaacccgcgacccacccccagggcaaagacacagaagcaacaaagaaag

SEQ ID NO: 64943 - RNA, 69 nt, Homo sapiens
gccgccaacggaacccaacaggaagggaaggggcggagacgggcggaacgcaggaggccagaggacaga

SEQ ID NO: 64944 - RNA, 54 nt, Homo sapiens
gcaacaagacgcgcccgcgcccaagggcgggcgccccgccaagccgccaacaag

SEQ ID NO: 64945 - RNA, 82 nt, Homo sapiens
aggagcccccccggcagcaacccccacacccagcaccagaggagagcccaccgaaagcccccacaccgccgaaacgacgccg

SEQ ID NO: 64946 - RNA, 72 nt, Homo sapiens
caggaacccgccaccgcggggcgccgcagccagcaacacagggaggagcgggagcacccgagcggaagaccc

SEQ ID NO: 64947 - RNA, 82 nt, Homo sapiens
caaaagcccagggagcggcggcagcaggcagcgcacagcccagcggaggacacgccggggcagggcagccgagaccccaaca

SEQ ID NO: 64948 - RNA, 69 nt, Homo sapiens
cgcaacaggaacggaggcgggcggccagggaaaaaagaggggcacggcccgaaacaccagcgccagcag

SEQ ID NO: 64949 - RNA, 64 nt, Homo sapiens
gggaagaggcgccgggacagggaacaagagagagaaccaaaaaccgccccgaggcagaggccaa

SEQ ID NO: 64950 - RNA, 80 nt, Homo sapiens
gaagaccgacgcgagaagcccagaccgcagggcgggaaaaaaccaagcagcgagcaccaggccaggagggggccacaccg

SEQ ID NO: 64951 - RNA, 77 nt, Homo sapiens
aggccggagcagagggaagcaaggcaaggcaaaggacccagaggagagaaccccccgccaaggcccaacccagcccg

SEQ ID NO: 64952 - RNA, 75 nt, Homo sapiens
cagcggggggacaggccggacgggccacccagaacggcgaagacaggcggagcccgcggcccagacccagccgca

SEQ ID NO: 64953 - RNA, 59 nt, Homo sapiens
ggaaaacccaccgggagcacgaagggacagaggacgcagaaaacaaccacccccaggac

SEQ ID NO: 64954 - RNA, 77 nt, Homo sapiens
aagaggcggacggggagcgaacgggacagcccacacccggcgcggaggaacaaacggagccaagaaaaaggagcccc

SEQ ID NO: 64955 - RNA, 71 nt, Homo sapiens
aacagccccagcccggccccaggaacgccggacacaagagggcaagaaaggcgcgacgggccgaaaaggga

SEQ ID NO: 64956 - RNA, 73 nt, Homo sapiens
aagcaaaggcagagcccgggaacggcgccacggagcccggaggccgacgacaccaggagagacggggcaccag

SEQ ID NO: 64957 - RNA, 66 nt, Homo sapiens
aaaaagagagggccacgagagagaaagacacagccggcgcccccccgcggccggacccgaacacgg

SEQ ID NO: 64958 - RNA, 83 nt, Homo sapiens
cgggacagagcgccgcgaccccagcgggcccggggaggcaccgacgaggaggaggcacaccagaggcagaaccacaacccacc

SEQ ID NO: 64959 - RNA, 85 nt, Homo sapiens
caggccagcgacggggccaggaagcaacggaagcgcagcaacagcaagccccgggcagacaagcagaccggaagaccgacggaag

SEQ ID NO: 64960 - RNA, 80 nt, Homo sapiens
aagcccacgagaagggagcacagacaggggcccacacacacccccaccaggagccaccagaaaggaacagaaacaggcca

SEQ ID NO: 64961 - RNA, 57 nt, Homo sapiens
gccgggcaccccaacacagagaacccaccgcaagagaccaaaggccaagagcaccgc

SEQ ID NO: 64962 - RNA, 61 nt, Homo sapiens
cgggacgaagaggaggacaaagccggccgacccccagggcacaacggggacccagggcgcc

SEQ ID NO: 64963 - RNA, 53 nt, Homo sapiens
agaaggaccaagaaccaggcaagaaaggcaaccacagaggagccaggccgcag

SEQ ID NO: 64964 - RNA, 56 nt, Homo sapiens
cggacgcacgaaccaagccacaacccgagcgagacgacgggaccgaaggaccccgc

SEQ ID NO: 64965 - RNA, 78 nt, Homo sapiens
cgaaccagagaaaacggcaaggaagccaccaggaagaagaggcggaagaaacaacaagcgcaaggagcgcccaaacca

SEQ ID NO: 64966 - RNA, 71 nt, Homo sapiens
gaccacagcccgggagcgaggcccaagcccgcgcaagacccgggccagccgccggaacccgaacgggcggg

SEQ ID NO: 64967 - RNA, 105 nt, Homo sapiens
caagcccggaaaggaggaaaaaaaaaagaggaaaaaaagagaccagaagccgccaggaagaaccagagaagaccagagaaaaaggaaggagaaggacgaagaggc

SEQ ID NO: 64968 - RNA, 70 nt, Homo sapiens
agagaaagaacagagacaaaggaccaaaggcaaccagccagagggcaccggcaacccacaggccggcgca

SEQ ID NO: 64969 - RNA, 72 nt, Homo sapiens
aaacagcccagagcccaaggaccagcagcaggaacacagggccacgaccccagaacaggagcagacaaacca

SEQ ID NO: 64970 - RNA, 37 nt, Homo sapiens
cacggccagggaaggcggaccgccaacagaagggaac

SEQ ID NO: 64971 - RNA, 73 nt, Homo sapiens
acacacccagggacaaaagagcccggacgaggggcaggaccggggacacacgacgcgggacgagcccgccgcc

SEQ ID NO: 64972 - RNA, 80 nt, Homo sapiens
cagaaccaccccaccccaccaagcaggagcaggagagcaaaaccgaacccaccgacagggagcgcgaaggacggaggccc

SEQ ID NO: 64973 - RNA, 73 nt, Homo sapiens
gcgaggccccaacccgggcgaagcgaaaggcaccacaaagaagacagcagagagaagaacccagggggaagag

SEQ ID NO: 64974 - RNA, 84 nt, Homo sapiens
caacacggcgcgaaagccagggaagcgccgaaccccagcccccgcgaggagaccagccagagcacagcgggacagacacaggcg

SEQ ID NO: 64975 - RNA, 80 nt, Homo sapiens
aagagcccgcaagaagaacagagacagcagccaaacccccagggaggaacgacggaacaagggagaagcggagcaaggaa

SEQ ID NO: 64976 - RNA, 86 nt, Homo sapiens
gcagcagagggagcgccgaaggacaagaacagcgccgcaccagcaggccaccccagagaagaggacgagagacaagacaaccaaaa

SEQ ID NO: 64977 - RNA, 82 nt, Homo sapiens
gccagcccgggcgggggagggggagcaagggagaggcgccaccccagcggcaccaagcgccggaacggagcagggacggaaa

SEQ ID NO: 64978 - RNA, 81 nt, Homo sapiens
gccagaaggaagaggaggacacgacccagggcgcggggaagggcggaccccggaggccgagcggcaccgcccccagccccc

SEQ ID NO: 64979 - RNA, 79 nt, Homo sapiens
cgcgcccgggaccgggaaccgcgcgccgcgacggggcaccgccacagcgcgcgcgccccccaggcggccaagaccacca

SEQ ID NO: 64980 - RNA, 70 nt, Homo sapiens
agacaacgcggagcggcgaagagcaaccaggacagggacaagcgcacagcggagaaagcagcgcggccag

SEQ ID NO: 64981 - RNA, 68 nt, Homo sapiens
cagggcccaacacgagcccagacagacagggaacccgcccgcaaaaggccacaaaacggaaaagcggc

SEQ ID NO: 64982 - RNA, 60 nt, Homo sapiens
gaggcaaaggaaaaaaagacaccaccaggagcgggggccagccccccaaccgcagccaca

SEQ ID NO: 64983 - RNA, 83 nt, Homo sapiens
ccaaccgcccgggcccgccccacaggagccggacacgcagacagcaagagccaaaccccagccaccggaagaagaagagaaca

SEQ ID NO: 64984 - RNA, 87 nt, Homo sapiens
aaacaaccgccagggccgggaacaagcgagacaccacgacagcgaggcagccagcagcagccaccagagcccaagagcacagccaaa

SEQ ID NO: 64985 - RNA, 80 nt, Homo sapiens
agccaccaacgccacaccgacccacaggagcgcccgcggaggagcgcccggaccagcccgccgcacccagggaaaaacag

SEQ ID NO: 64986 - RNA, 38 nt, Homo sapiens
gccaccccccaccggggacagggcagcggggaagaaga

SEQ ID NO: 64987 - RNA, 85 nt, Homo sapiens
gggccccggcaccgccgaagcaaggagcacgagagacaaggaggggcgcgccgcccacccccaaagccacacgccgcccccaccg

SEQ ID NO: 64988 - RNA, 77 nt, Homo sapiens
cgggccgggggccgccgggacccggccaccagcaagccggcaaccgcacgaaaaccggaacacagagcaaccaccgc

SEQ ID NO: 64989 - RNA, 82 nt, Homo sapiens
ggcgagggggagagggcagcacgcgcggggccaagaaaccgagaggcccggagggaaaccacagaggcaagaagggaccgcc

SEQ ID NO: 64990 - RNA, 77 nt, Homo sapiens
accgacggagggaccgggagaaacggacaacacccggagcagaaggcacgcaagcggcgaccgggaggcaaggaagg

SEQ ID NO: 64991 - RNA, 75 nt, Homo sapiens
accacaaaccgcgccagaaaagacccaaagacaggaccacgcaccagcagagaaggaaagcaaaccgaagcaggc

SEQ ID NO: 64992 - RNA, 64 nt, Homo sapiens
gacaccagaaagcaccagcggaaacgagcaagagaacggaaaagccgggcaaaaaacagcagaa

SEQ ID NO: 64993 - RNA, 66 nt, Homo sapiens
aaccccagaaacacaaaacaccgaggggcagaaaaacaggccggcaggaaggccccgcacaccccc

SEQ ID NO: 64994 - RNA, 36 nt, Homo sapiens
caaacacccgagcgcgagcaaagcagcccaccagcc

SEQ ID NO: 64995 - RNA, 110 nt, Homo sapiens
agggccgggcgccggcgagagccgcaccgccaacccccgagcaagacgggggggccgacgacgagccccgcgaggagcgcagcggagaggccagaacgcccgccagccca

SEQ ID NO: 64996 - RNA, 52 nt, Homo sapiens
gccgggccggccagcgccggaaaccaacaaacaagccccaccccgaggcaga

SEQ ID NO: 64997 - RNA, 71 nt, Homo sapiens
cgaaaagaaacggaaagcaagcacagagcacaccaaccccaacaacgaccggggacgcccaagccagaaca

SEQ ID NO: 64998 - RNA, 73 nt, Homo sapiens
cgaacccgcaggcccccacacagcgaaggccagaggcgggaggccaaggccaggacacccgaaaggagacggg

SEQ ID NO: 64999 - RNA, 36 nt, Homo sapiens
aaagaacaaccccagcgaggagccggggcaggagaa

SEQ ID NO: 65000 - RNA, 62 nt, Homo sapiens
agccgagggagaacaggcgggccagcacggcccgaggcccagaagccccacaccaacagcag

SEQ ID NO: 65001 - RNA, 72 nt, Homo sapiens
acaccaaacccggaaagagagccagcagggagcacccacgggagaccggggggcaagaaaaggaagaagaag

SEQ ID NO: 65002 - RNA, 82 nt, Homo sapiens
cgaacggggcgagccggaggagcacccaaccccgcgcaaggagaaccaacaagcccggaccggagccaaccccaccgaccaa

SEQ ID NO: 65003 - RNA, 82 nt, Homo sapiens
caagaagggaagcccggggacgccgccaggcacacccaggaaggcgcaccgcaaagaaacagggcgaggccaccgaaacccc

SEQ ID NO: 65004 - RNA, 71 nt, Homo sapiens
agacccaccacgaggacccagacgcccaaagccaccaagccaaagaggggaaagccgagaacaggacagaa

SEQ ID NO: 65005 - RNA, 36 nt, Homo sapiens
cacagcggagaaagaagagacggggcgccggagcca

SEQ ID NO: 65006 - RNA, 83 nt, Homo sapiens
cgagcgcacccagcaagccaggaaggccaagaaaagacagggaaagcggaaccaccaaaaggaggagacaacgaccagaaaac

SEQ ID NO: 65007 - RNA, 72 nt, Homo sapiens
ggggaagaagggggccagggggagccacaggacccacaccgcaggagggcgaacgagaagcaggagaagcaa

SEQ ID NO: 65008 - RNA, 62 nt, Homo sapiens
aagcaagcccccaaggaaccacaccgaggcaaacaaagaacagggaaaaaaggacaacacaa

SEQ ID NO: 65009 - RNA, 77 nt, Homo sapiens
cacacaggagagagcaagaccagccaggggaaacccggagggaaccaagaaaacgagcccggacagaaggggaaaag

SEQ ID NO: 65010 - RNA, 82 nt, Homo sapiens
agaagcccggaaccgggcaccaccgaaaggagaagacggcaacccagccgaggcaggccaaacaaaagaaaaaagaacggcg

SEQ ID NO: 65011 - RNA, 68 nt, Homo sapiens
gcagggcgcccccgggaccgaagaggccagcccaggaggacagaacggccgggaaagccgaccggcac

SEQ ID NO: 65012 - RNA, 70 nt, Homo sapiens
agaagcagcagggacaacagacaggagccgaaacacacaagaccaggcagacagaacccacaaacaaccc

SEQ ID NO: 65013 - RNA, 34 nt, Homo sapiens
ccagcagcaggggcgccagggccgggaccggagg

SEQ ID NO: 65014 - RNA, 77 nt, Homo sapiens
gagcgagaccaggaaagaagggggcagaagaggggaggggcacgcccggaagaccagacccgcagcccagccagacc

SEQ ID NO: 65015 - RNA, 54 nt, Homo sapiens
ggaggcagggccccagggaaggccaggcccaaggaacacacaggcgacgacaca

SEQ ID NO: 65016 - RNA, 72 nt, Homo sapiens
aaaggcagcgacggccaccacgagcacggcccgcgcacgcccggagagagcagcagcagaggaaaaaagaga

SEQ ID NO: 65017 - RNA, 77 nt, Homo sapiens
aaagcgaaggagggcccgcccaccggggaggagaggaaggaagagccaccaacaacaccagggacacaacagcaagg

SEQ ID NO: 65018 - RNA, 81 nt, Homo sapiens
ccccaccccgcagcagggggagcagggcgagagggcaccgcggacggggccgcccaggaagcgcagaaaggaagagaagaa

SEQ ID NO: 65019 - RNA, 81 nt, Homo sapiens
gcccggagggccagaggcaccggcaccagagacgcagccgcagcgagcgcagggagagcagcacgggacgcgagacgccca

SEQ ID NO: 65020 - RNA, 79 nt, Homo sapiens
gaggggccccccccgacgccccaacgaaaaagccagccaggaaagcgggagcgcgggagcaaaggaaagaagagaagcg

SEQ ID NO: 65021 - RNA, 71 nt, Homo sapiens
gaaaaagccaaagaagaaccagagcggcagaacgggaaaaaaaagcacggacagggaaggagaagaagaaa

SEQ ID NO: 65022 - RNA, 74 nt, Homo sapiens
agcccccaaaagcagcacagacccacaggagaaacaccagcgagcagagggaaagccgccagccaccgcgccac

SEQ ID NO: 65023 - RNA, 74 nt, Homo sapiens
gccaagagacgacaaaggagaggaaaacagccacccgagcacggggaccaggggagggggggacaggagaacgc

SEQ ID NO: 65024 - RNA, 79 nt, Homo sapiens
cccacgcagcaggagcgcccgcccgagccagcccgccagcagccccagccaaaggagcagaccgggccgccgccagaga

SEQ ID NO: 65025 - RNA, 84 nt, Homo sapiens
cccggggacccacgcggaggccgcaagaagccccccagccgaggagaacggcaaaaagcgagggagacaacaaggccacccccg

SEQ ID NO: 65026 - RNA, 77 nt, Homo sapiens
cccacaccacacagagagcgacaccccgcagggaccagagcggaagcccacgaggacccgggagccagcagacgaac

SEQ ID NO: 65027 - RNA, 75 nt, Homo sapiens
cagaaaagcgaccaggcgagggagaacacccagcagaggcgcaggaaaagcaccgaaagaacacggaaagaccag

SEQ ID NO: 65028 - RNA, 102 nt, Homo sapiens
agaacaccggacagcagagcaacaacacggcgcacgcccgcagaaacagaggacagcaaaaagccggcgagaacgccgggagggaagaaagcaaaggagaaa

SEQ ID NO: 65029 - RNA, 69 nt, Homo sapiens
ccaccaaacgagagcagccaacgagagaaaaggaggaggacggcacaaaaaaaggcagagaagaggagc

SEQ ID NO: 65030 - RNA, 73 nt, Homo sapiens
cccgggcaggcccaaaaggagccgagggacagagaaaaacacgacagagggaagcagcggaaagcacagggga

SEQ ID NO: 65031 - RNA, 74 nt, Homo sapiens
agaagaaacgaaggcaaagcaacagaaagggaaaccgagcaggacagaggaaaagaacaggcaaacaaggaaag

SEQ ID NO: 65032 - RNA, 36 nt, Homo sapiens
acgagacgcagcaaaggccggaggagaaacccacca

SEQ ID NO: 65033 - RNA, 70 nt, Homo sapiens
cggacaaaggaaggagagggaaaagcacacaggaagcagagggcgcacaaaagagcacaaaagcaccaag

SEQ ID NO: 65034 - RNA, 77 nt, Homo sapiens
cagcaagcggaaaaagcacccaaaccccaaaaagaagcagcagaaaaagcgacagcagcggagcccaccaaaaaaca

SEQ ID NO: 65035 - RNA, 78 nt, Homo sapiens
gaagacccaaaacggaaggcgcgcaagaggcacagggcaacaacacaggcggaggcggcggaaggcagaggagaacac

SEQ ID NO: 65036 - RNA, 68 nt, Homo sapiens
gaagcgaagacagggggcccaaacgggagacaacccccgaaggagggcgagaacgcggacaagcaaac

SEQ ID NO: 65037 - RNA, 83 nt, Homo sapiens
gccgccgccgccgccaccaggaaggagggccccggagcagccacaccaccgaggccccacccagcacgagcacagccccacca

SEQ ID NO: 65038 - RNA, 83 nt, Homo sapiens
cggcagcgcacgcgcagccaaggggagcccaaaagcacgaagcgccagaggacaccgcggcccgaggacgccaccgcacgcca

SEQ ID NO: 65039 - RNA, 72 nt, Homo sapiens
gagaggggacgacagagccagcgagcgaaccagaccaaaaacgcaacaacagacggacagcaagcacacgga

SEQ ID NO: 65040 - RNA, 69 nt, Homo sapiens
acacagacaggagaacagaaagacagaaccagcacagcaaaaaaggcagcgcaccgaccccaacgaaca

SEQ ID NO: 65041 - RNA, 83 nt, Homo sapiens
ggaaacgacagaagcagagaaaagccccaacacccccaaccaccgggcagccaagcagggaaaagccaagaacagaaaagcaa

SEQ ID NO: 65042 - RNA, 54 nt, Homo sapiens
cggcccaaaaccagccgacaaagagggggcccaagaagagagacggggcgccgg

SEQ ID NO: 65043 - RNA, 80 nt, Homo sapiens
aaaggaaccggaaaagcaaaacagggcggcagagcagacagacagcgaacacggaagccacgaaaagcaaaagcacagga

SEQ ID NO: 65044 - RNA, 85 nt, Homo sapiens
cgcgcccgaacggagagcgccacccgggacacagcgccaccccgagcagcggggaagcggccggcgcggaagaggccggcggcgg

SEQ ID NO: 65045 - RNA, 101 nt, Homo sapiens
gagggcgaagcacgacacagaaggggaggggagggaaaggcccaggaaaaagggcaaggccagagaaggcgggagaaagacacgaaccacagaacgcaaca

SEQ ID NO: 65046 - RNA, 86 nt, Homo sapiens
gccggagacagacaaaacaggagggcacacagggaccaagaagccccggggacacgcgagaaaagacgccgaagggaagaccagcg

SEQ ID NO: 65047 - RNA, 74 nt, Homo sapiens
aaagcagaagcgcgcccagaacggacgcgagaacagaaacagcgaaccagcaggcgcgcacagcagccgcgccc

SEQ ID NO: 65048 - RNA, 75 nt, Homo sapiens
cagggcagcccgagacacaccaccccgacggagacggacgcgcacaggagcgagagacccaccccacccgcgcgg

SEQ ID NO: 65049 - RNA, 60 nt, Homo sapiens
gacccaaggcgcaagaaaaggagccggaaacggacaaacagcaccaggaagaagaggcgg

SEQ ID NO: 65050 - RNA, 68 nt, Homo sapiens
gaagcgaggcgcggcacacaaccccgggacacacagaggccccgggaagcagaggacaacaggaaaaa

SEQ ID NO: 65051 - RNA, 77 nt, Homo sapiens
cccaccgggggggaccggaagacagccccacgaagcagcaacccgaaaggagcgcaaaagaagaggaggcgaagaag

SEQ ID NO: 65052 - RNA, 88 nt, Homo sapiens
cagaaacacaggcgaaaagcagacgaccaaacaggcacgagaaagcccccaaaggaaagccgaccaagacggcaccccaacacacaga

SEQ ID NO: 65053 - RNA, 81 nt, Homo sapiens
cacggccgcgcgccccggacaccgccacgcgagccggcggggagggcccgacgcccagcgacagcccaccgaggaagacca

SEQ ID NO: 65054 - RNA, 88 nt, Homo sapiens
gcaagcagcgccgcgggggggggcggacccaggagagaaagacaacgcaacccccaggaaaaagaacgcacgggaaacccaagaagga

SEQ ID NO: 65055 - RNA, 69 nt, Homo sapiens
accaacgaccgaggaacgaccagaggcacaaagcggagacggaaacggaaggcgaccggcccgaggacc

SEQ ID NO: 65056 - RNA, 77 nt, Homo sapiens
ccaagcaaacaccccccccaccaccccaccagaaagcccgcaggggcgagcaggagccgcaacaaaagccccaccca

SEQ ID NO: 65057 - RNA, 61 nt, Homo sapiens
aacaaggcccccaaggccaccggaaaagagggcagagggaaagagcggaggacccggaccg

SEQ ID NO: 65058 - RNA, 67 nt, Homo sapiens
gggacccgcccaaccccgaaaacgagaaagccgaccaagaaccgaagagaagaaccaggagggaaac

SEQ ID NO: 65059 - RNA, 76 nt, Homo sapiens
cgcaaccaccgcccggccacaccaggacgacagacacccgaacgggggacaaggaggagaacaccacaaaagccgc

SEQ ID NO: 65060 - RNA, 70 nt, Homo sapiens
gaggaggcggcggcggagacggggcccgacccgaaaagcgcagccaaccagacgcgcgaagaacgggaca

SEQ ID NO: 65061 - RNA, 61 nt, Homo sapiens
agggggcagagcgagggcaaacaggggggagaacacaaaagcacaaccagcagcaggggcg

SEQ ID NO: 65062 - RNA, 82 nt, Homo sapiens
cccccgcagcacccagccggccacgcccgggcgcgccaggcacagccaagagcggaccggcagcggccagcgcagcggccgg

SEQ ID NO: 65063 - RNA, 70 nt, Homo sapiens
gcgcaggggaccgcaacaggaacggaggcgggcggccaggggagccagacaaccgaaagggaccgcccga

SEQ ID NO: 65064 - RNA, 83 nt, Homo sapiens
ccagagcggggcacggagcgggaaaggccaaagaagagacgaagcaaaggcgcccggagccccagaaccgaagaagagccgca

SEQ ID NO: 65065 - RNA, 66 nt, Homo sapiens
caaggcgggcgcgggggccggggcgcgcgcagcaaaccaagaaggaggggaccgaagcgccaggcc

SEQ ID NO: 65066 - RNA, 84 nt, Homo sapiens
cgagagcgcggagcgggcggagcggcgagagcccccacggggacgaacagcggggacgccccagcagaccgcccaggagaggaa

SEQ ID NO: 65067 - RNA, 78 nt, Homo sapiens
acccgcagccccgcgcgggcaccagggacggaacggagagggggaccaacacagcgagggaggcagccggggagcggc

SEQ ID NO: 65068 - RNA, 77 nt, Homo sapiens
agcagccgacaagacaagaccacagaaagaagcgaacagggagcggaggagcccacaggcgcaaagagcggagaagc

SEQ ID NO: 65069 - RNA, 64 nt, Homo sapiens
gccgccaccagcacacgacagcacagccaggcgagaagcaggcggagggagcgcaaccaggcac

SEQ ID NO: 65070 - RNA, 85 nt, Homo sapiens
cgcccgcacgccaaggcggacacaccacccggaggagagggccaccaaacagcgggaaaaagaacagaggccaacccgacaagag

SEQ ID NO: 65071 - RNA, 79 nt, Homo sapiens
gcaaagaaagaagcaccgaagcacaacaccccgacccccaaggaggcagaggagccaccaggcacgcaacagcacccag

SEQ ID NO: 65072 - RNA, 58 nt, Homo sapiens
cgaagaccacagaaaccaaaagccagagcacggccggccccacacaccgacaccggga

SEQ ID NO: 65073 - RNA, 65 nt, Homo sapiens
gcaccgcgggcggacccagcacgccgggccgggggcgcagcaggaaaccccccaggcaagaggcg

SEQ ID NO: 65074 - RNA, 74 nt, Homo sapiens
ccgcccgggccagcggccgcgcacccccggccggaggcaccagcgccgagacgcaccagagccggaccggggac

SEQ ID NO: 65075 - RNA, 54 nt, Homo sapiens
agaaagaagagcaaggggaaagacaggggggaccaaggcaacgaacacaagcag

SEQ ID NO: 65076 - RNA, 67 nt, Homo sapiens
acgaaacagcaaggaacacagagaacccaacaggggagcccaaacccacccaaaagcgggaaggccg

SEQ ID NO: 65077 - RNA, 89 nt, Homo sapiens
caacgcgcagggcagcggcccccgcccgcaggaaagccaggccagaagaaggaaggccggggaggggacaggaaagacacaccacccca

SEQ ID NO: 65078 - RNA, 53 nt, Homo sapiens
gagggaggggaccgccgcgggacaggcacccaccgcaggcaagaacagcagaa

SEQ ID NO: 65079 - RNA, 72 nt, Homo sapiens
gggggccccgcagagggcaacacagaaaccggccaacccacaaaaagggaacagacccagcaaaacacagga

SEQ ID NO: 65080 - RNA, 82 nt, Homo sapiens
acccaccaagaagagaagaagagggagccggacaagacaaggacagaggacaccccaaggcaccggcgggcgacgagaacaa

SEQ ID NO: 65081 - RNA, 61 nt, Homo sapiens
ggacgagaagcgcagcaacggcgggggaccacgagagcaccacaccgacccaagagaaccg

SEQ ID NO: 65082 - RNA, 85 nt, Homo sapiens
gaaaggacagccccgaacccagcccacacccgggcgcccaccaaggcccagagcggagagccccagagcaggggcccgacggcaa

SEQ ID NO: 65083 - RNA, 80 nt, Homo sapiens
aagaagaagaacagggacacccaccccccagacacacagaagaaaggagccgccacgcccaggcggaggcgggcacgaag

SEQ ID NO: 65084 - RNA, 82 nt, Homo sapiens
ccgcacaccaagagcgggcacaccggacacagcccacaaagaaggacgacccagacggaaaaaccaccaggccccgaaagag

SEQ ID NO: 65085 - RNA, 108 nt, Homo sapiens
cccaggagagggcccacgcagcggagaccgcaggacaccgggaccgggggcgcagcaccgaacccaagcccggcgcagaccacgagccagacaccaccgcaacaacca

SEQ ID NO: 65086 - RNA, 74 nt, Homo sapiens
cccaacgcacaagacgccaagaggaaacccgaagaggggagaaaaggaacaagaaaacaacggaggaacaggag

SEQ ID NO: 65087 - RNA, 57 nt, Homo sapiens
ccccacagacacgccagggagacgcccagacgggaaaagccggcagcaaaagcaccc

SEQ ID NO: 65088 - RNA, 74 nt, Homo sapiens
accaagaaccagggccaaccgaaaaaacaaccagagaggcggacagcagcagagggaaggagcacacgggaagg

SEQ ID NO: 65089 - RNA, 68 nt, Homo sapiens
aaaaccagcccccccagcgcaacggcgaggcgagagcccgaccaagcccaaagggacaccagcaccga

SEQ ID NO: 65090 - RNA, 65 nt, Homo sapiens
gagcaccacagccacacagccacggcgaaaccaagccaacaacaacgagcccgcccccaaacaag

SEQ ID NO: 65091 - RNA, 75 nt, Homo sapiens
cgaaaaaaaagaaggaacccaaagaaccaccccaaacaggaggccacacaaggagacaccggagaacccaacaca

SEQ ID NO: 65092 - RNA, 89 nt, Homo sapiens
cccacccggcgcgcaccggcagcccgggccgagccccgcccgccgccagccagccagcggaaacggagggaaagaagaagaggagggac

SEQ ID NO: 65093 - RNA, 47 nt, Homo sapiens
caacacacagcgaagccaggaagaggcgcccccgcccgccagacaag

SEQ ID NO: 65094 - RNA, 77 nt, Homo sapiens
gcacgcgaagggagcggggaggaaggcagacacaaggaacagccagccaggagaaaaacgaacccaacagaccaccc

SEQ ID NO: 65095 - RNA, 55 nt, Homo sapiens
aggaaggcgcaggagcccggccaccacacccagcggacacacggcgcagcccggc

SEQ ID NO: 65096 - RNA, 102 nt, Homo sapiens
agaccgccgcaggggcacccccaacgagaaccgaacacacaaaagccccaggaagaagaagcagcaacgcaaaggccgcgacccccgggggaagaggacaca

SEQ ID NO: 65097 - RNA, 72 nt, Homo sapiens
cacaccgccaccgaagacgggccccaacacccagagacgaaagacacgagagggcgaagggcgccaacgcgg

SEQ ID NO: 65098 - RNA, 62 nt, Homo sapiens
ggaccaaaacggcgaagcccaccagacggagcgaaccaccgaaggcgaaaggaagagcgaaa

SEQ ID NO: 65099 - RNA, 113 nt, Homo sapiens
gagcgccgcagacgccggggggcggccagagcgccggcaagagccgggccgagaaccggggcagaagagccacaacccaaaccagacacaccgagccccagagacacccaaca

SEQ ID NO: 65100 - RNA, 51 nt, Homo sapiens
cgcagggcgcccccgacaacaagggagggcacagccaagacaacaaccaag

SEQ ID NO: 65101 - RNA, 85 nt, Homo sapiens
ccagggccagaggcaacggggccacaggcccacccggacgaagccacccccaccccaccaaccgaaagaggccaaccaaggccaa

SEQ ID NO: 65102 - RNA, 79 nt, Homo sapiens
ccaggccacggaccgcggagacccccagcccagagcgcaaacaggaaagaacccagggaccaagcgaaacgcaaacgga

SEQ ID NO: 65103 - RNA, 81 nt, Homo sapiens
ccccgggagcgggacacaggcccgagcccaagcgcacgacaccagaggccgaagaacgaagacacaaaagaaggaaaaggc

SEQ ID NO: 65104 - RNA, 63 nt, Homo sapiens
gcgacaggcccaggggcgagccacagcgaaaggaaggccagaacacccgaccccaccgcccgc

SEQ ID NO: 65105 - RNA, 72 nt, Homo sapiens
cgaggcgcaaggagggcagaccacgccgacccaggggacaccacaagcgcgggccccggggcggccgccacc

SEQ ID NO: 65106 - RNA, 56 nt, Homo sapiens
ccaaggagacggagacaaggcgcaaaggaacagaccaaacgcgaagaaccccccac

SEQ ID NO: 65107 - RNA, 59 nt, Homo sapiens
gaaccggcccagaccggccagggacgcgacaaggcggaggaggaggagcgcgaagaaga

SEQ ID NO: 65108 - RNA, 82 nt, Homo sapiens
ccgcaccccaacaagaggaaagacacaccaccaagaagccagcaagcggccaggacacccccggcaccgaggaaaacaagcc

SEQ ID NO: 65109 - RNA, 66 nt, Homo sapiens
cccagagagcgggacacaggaaggccaaaacacgcaagccaaacaaagggccaaaaccgagccgag

SEQ ID NO: 65110 - RNA, 76 nt, Homo sapiens
gaaacgaggacagagccgaaagaaggggaacccagaaccgcgggcagcaagaaccaccaaacaaggacaggaggga

SEQ ID NO: 65111 - RNA, 80 nt, Homo sapiens
aaaaccagcaagcaaaagacccacaggaccgaaaacaaaaccagccaagcagaggagaaaaagacagcaccccagagcca

SEQ ID NO: 65112 - RNA, 77 nt, Homo sapiens
gaaagagaccgcagagacagccaacacggcacccacagaccagaaggaaaacacaccaggcacagaaaggccccccg

SEQ ID NO: 65113 - RNA, 81 nt, Homo sapiens
cgccggggcggcgacacccgggagccgccggcaccgccggaaccggcgcaggagaaagaagaaacaaagagggacccagcc

SEQ ID NO: 65114 - RNA, 85 nt, Homo sapiens
ggccgggaggggacggccgccggagccgcgaggccaaacgacgacacgcggaggcgccggaagcccccacccaacaagaccccac

SEQ ID NO: 65115 - RNA, 79 nt, Homo sapiens
aaaccaagagcacaaacgaaagccacaaggggccaagcagggcccgcagggccccagaagggcgaagggcacaaacaag

SEQ ID NO: 65116 - RNA, 87 nt, Homo sapiens
cacaagacaagggccaaaacaggacagaaagaaggaaaaagcagaaagccagaggaagcgccacagaccgggccaaacaacccagga

SEQ ID NO: 65117 - RNA, 80 nt, Homo sapiens
acgccacgcggcgggcaggccggcggagacggcccggaggcggcggccggggcagcgccgcgagccagcaacgggggaag

SEQ ID NO: 65118 - RNA, 71 nt, Homo sapiens
caaaggggggaagaacaagaaaacccggcaaccaagaagcacaaagaagacaagacccaagagaacgaaga

SEQ ID NO: 65119 - RNA, 72 nt, Homo sapiens
cacaaccgcacgacggcgccaaccggccacagcccaaaccagacagacacggcgagaggagagaacgacaag

SEQ ID NO: 65120 - RNA, 113 nt, Homo sapiens
gcagcgcccggaccggccgagaggaagacgagccgggaggaacggcccggaaacaggaggacgcccagcgagagccagccggaggacccagcagcaggccacccaggccgaag

SEQ ID NO: 65121 - RNA, 70 nt, Homo sapiens
gagggcaagaacgaaccaaccccacaacaccgccggagacagccaaggagccgcgccaggagcacaagaa

SEQ ID NO: 65122 - RNA, 68 nt, Homo sapiens
aacagacgagaaagaaggaaacggaaccaagaacaagcacgcagcgagaacaagccaaagacagaccg

SEQ ID NO: 65123 - RNA, 92 nt, Homo sapiens
ggaggaaccgaaccaggaccaggccccaagcccgaggcccagaggaggagccgcagcaaggcgcgagcccgcggagcaccgcagcgggcccg

SEQ ID NO: 65124 - RNA, 73 nt, Homo sapiens
acgaagaaaagagaaggaaaaacagaacggcaaaccggaaaaaaacgggccgcgccagcagagcgaaaaaggg

SEQ ID NO: 65125 - RNA, 73 nt, Homo sapiens
ggaaacacccccagaagagagcgccgcaaggcacagccagcccgccagggacacacagacgccacagagggac

SEQ ID NO: 65126 - RNA, 58 nt, Homo sapiens
caaagagcagagccaaacggagcggagaaaaaaaggcaggaaagagaaagaagcgagg

SEQ ID NO: 65127 - RNA, 83 nt, Homo sapiens
gcccagggacagggccaggaaccaggacgcagcacaagaggaaaggaacgcaccccccagcagcgaaaaacaggaagacgacg

SEQ ID NO: 65128 - RNA, 90 nt, Homo sapiens
ccgccaccaaggaagaagagcgccaaaagacaggaccaagaaagccaaggacacgcaggacgaagaaggaggagagcccagaagaaacca

SEQ ID NO: 65129 - RNA, 62 nt, Homo sapiens
gggagggccaaacaccccggcgagaacgccgggagggaagaaagcaaaggagaaagaggacg

SEQ ID NO: 65130 - RNA, 84 nt, Homo sapiens
gaaagcaggcaagacagaaggcggacaaaggccaaaggaccccccgacacaaccgcagaccgcaaaacaacaaaaaaccgaaac

SEQ ID NO: 65131 - RNA, 75 nt, Homo sapiens
cagagggaagagggcaccaaaggccaggagaagggagaaacgaagggggggccgcccgcccaaggcaggaagagg

SEQ ID NO: 65132 - RNA, 68 nt, Homo sapiens
cacccgcgccaggaggccgaacgcggaccgccacccgggcaagcaggaaagcagcacggaagaaaaaa

SEQ ID NO: 65133 - RNA, 83 nt, Homo sapiens
gcccaggcggagagaccgcgcgggcaggcaccacaaaggcacagcacgaggaacccccggccaaagaacccacccgggccccc

SEQ ID NO: 65134 - RNA, 80 nt, Homo sapiens
ggacccacccgcaacggacggcacaaacaggggacgacaccggagaaggcagcgacgacagcgacagcgagaagaggagg

SEQ ID NO: 65135 - RNA, 71 nt, Homo sapiens
gacaaaagggccaaagaagggagagaggggcaaaaaggccccgagcaccaggggggcagagccccagggac

SEQ ID NO: 65136 - RNA, 73 nt, Homo sapiens
caaccacgggggacgggaacgagggggaagcggcccaggaaacagaagacagccgaaccaagggcgacaacca

SEQ ID NO: 65137 - RNA, 72 nt, Homo sapiens
agggaaaaagaaccagcggaacaagcaacgaagacagagaaagcgcagacaaaggggaacaggaagcagcgg

SEQ ID NO: 65138 - RNA, 80 nt, Homo sapiens
ccgccggccaggccccccgagcgcccccagcagccgccccgccgaccaaacaggaggaagaagacagaagagcccgcgaa

SEQ ID NO: 65139 - RNA, 79 nt, Homo sapiens
cgagcacagaggcgaacgggagccaaagggccccggggaggcagcacggcaggagacgaggagaggacagcaggacacc

SEQ ID NO: 65140 - RNA, 66 nt, Homo sapiens
caacagaaaccaacaccccaaagacccacgccgaaggcccggcggccacagaggacccaccgagcg

SEQ ID NO: 65141 - RNA, 68 nt, Homo sapiens
aaaaaccaacaagaaacaacaaagaacgggccgggcggggcagggcacacaccaaaaccaaggaagag

SEQ ID NO: 65142 - RNA, 82 nt, Homo sapiens
gccgagaacccggcacaccagggccggaagcccaagcggggagcgcaggaggagagcggcgacagggacgcccgcacaaggg

SEQ ID NO: 65143 - RNA, 78 nt, Homo sapiens
agccccggcacgccggcgcgagcacagaggcgaacgggagccaaagggccccgggggcaagaggagcagcagcggcgg

SEQ ID NO: 65144 - RNA, 68 nt, Homo sapiens
acccgcggcccacggaaagggccagggaacagaacacaaggaccccgaggaacggaccccagcaccac

SEQ ID NO: 65145 - RNA, 85 nt, Homo sapiens
cgccaagagaagaacaacaaacggcaaagaacacgacgagggcaccaacgaacaaggcgagacgcgcaggaggccgaggcccggg

SEQ ID NO: 65146 - RNA, 78 nt, Homo sapiens
cgcccaaggcccgcgggcgggagaacggaaaaccccaacccgaacccaggagaaacgagagggacagcaaggaagacg

SEQ ID NO: 65147 - RNA, 82 nt, Homo sapiens
gaccaccgaggcggagggggagaacacccagagggcaggcacgagcaaggaggagccccgaaaagcaaagaaaaaggaagga

SEQ ID NO: 65148 - RNA, 69 nt, Homo sapiens
aagccccggaaccagcgagagacaccaagaaccgaaggggaaaacgagacaacgaaggggaaagacacg

SEQ ID NO: 65149 - RNA, 79 nt, Homo sapiens
cggaccaaaggcaaaagggcggcggagcagcagaaccagggacagaccaaagggagcgcacaacaaagaagggcacccg

SEQ ID NO: 65150 - RNA, 52 nt, Homo sapiens
cgagacccagagcaccaaggcaaggacaagcccgcgcacaacgcaacagaca

SEQ ID NO: 65151 - RNA, 74 nt, Homo sapiens
aaccgagacgcaaaaggcacaaaaccaaaaccagaacagaaagaaaggcagaagggcggagaacggaaaagcac

SEQ ID NO: 65152 - RNA, 76 nt, Homo sapiens
acccccggcgggcccgaggcggcgagagaggcaggcggagccgaccgggccagacccaaagcggaaaacccgcaag

SEQ ID NO: 65153 - RNA, 72 nt, Homo sapiens
gagagcgggagcagagccgacgggcgcggaccagccaaagcgagagggaaagggccccaagagccgggcgga

SEQ ID NO: 65154 - RNA, 90 nt, Homo sapiens
cgggcgagcggccggcggcgcgggcccggcggcggcggcagcggggccgggccggagcgccacagcaaggggcgcaccgggaaaggaaca

SEQ ID NO: 65155 - RNA, 71 nt, Homo sapiens
gccacacgaaagccaacgaagagcagcagaaaacagaggcgaaacgcacaaaggaagaggccacagggaag

SEQ ID NO: 65156 - RNA, 59 nt, Homo sapiens
ggaaaacaggcagaaaaacgcgacagccaaagaggcggaaccaggacggaagccaagga

SEQ ID NO: 65157 - RNA, 65 nt, Homo sapiens
aacagcggaccagaaccgggccgacgccagggcgcagaaggccagacacagaaccaggaaagcac

SEQ ID NO: 65158 - RNA, 76 nt, Homo sapiens
gcacaagcaggggcggaagccacacaggccagaacgaggaccaacagcaaagccacgccaagacccgggcggcgcc

SEQ ID NO: 65159 - RNA, 58 nt, Homo sapiens
caagcgccggagcaaggaagaccccgagagaaacggcgagaaaaccaaacaggagccg

SEQ ID NO: 65160 - RNA, 84 nt, Homo sapiens
gcgaaggccgggacccggccccggcccacaggggggggcaaacccgagagaacggcggagaagacaaccagacacaagcggaac

SEQ ID NO: 65161 - RNA, 67 nt, Homo sapiens
cgccagccacccacgccagcagaggcgggcgacaaaccccgggggaccacccaccgggggaggcagc

SEQ ID NO: 65162 - RNA, 69 nt, Homo sapiens
ccagacggagacagacacagaccaggccaggcaccgaagggagcaggacccggcacccacagcgccacg

SEQ ID NO: 65163 - RNA, 81 nt, Homo sapiens
cggaaaaccaaccagaagacgaacaaacagcaagaaagaccacaagaccagccagccaggaaagcgggagcgcgggagcaa

SEQ ID NO: 65164 - RNA, 79 nt, Homo sapiens
aacgccacagaaaaacaccacaacaaccagggcagcgccgacacgagaggagagccccccaccaggaaccacgccccga

SEQ ID NO: 65165 - RNA, 78 nt, Homo sapiens
cagaggggaggggaggagaggacacgggagagccgaaccagaagagaaaggagaccaggcccaggaaggaacgaggaa

SEQ ID NO: 65166 - RNA, 75 nt, Homo sapiens
ggcggaagcggcgcgggggaggaacaacaacggcaacagaaggacaggagaaacaggggccaaaaaaccaaagga

SEQ ID NO: 65167 - RNA, 68 nt, Homo sapiens
gcaggccgaaacccaaagaacaggcaaagaccgaaaagcacaccaaacacaagacacccaagaagccc

SEQ ID NO: 65168 - RNA, 64 nt, Homo sapiens
gcaagcgaagccgaaaaagcgcccgagacgggcccgccgaaagggaaaacaaaggcagagaagc

SEQ ID NO: 65169 - RNA, 35 nt, Homo sapiens
cccaaaggcgggaccaggaggcacgcagaccaccg

SEQ ID NO: 65170 - RNA, 72 nt, Homo sapiens
acggcgggggcccgcaaggaacccggcccccagggccacggcagcgggcgcggagacagggaaagagaaggc

SEQ ID NO: 65171 - RNA, 100 nt, Homo sapiens
gccgccccaccccggaacccgcggggcggaccggagaagccccgagcaccccacagaccacagagaagcccacccggaaacaaacgccaggggaccccca

SEQ ID NO: 65172 - RNA, 54 nt, Homo sapiens
ccgaaggccccgggcaaagcggacaccgggcagaagaggcggccacccacgagc

SEQ ID NO: 65173 - RNA, 79 nt, Homo sapiens
gcagccaccgagccgcgaagcgacagggcgccaaggagagcaaaagcagaccggaaaacccaccggcaagaccacaccc

SEQ ID NO: 65174 - RNA, 54 nt, Homo sapiens
acacgggggcaccacccccagccgcaggacagcagaccacagcccggcaggccc

SEQ ID NO: 65175 - RNA, 59 nt, Homo sapiens
acgcaccgcgcgaagacggaagacgcgcccgcgccgcggacaaggcaaaaccagcaagc

SEQ ID NO: 65176 - RNA, 73 nt, Homo sapiens
cagaaacgaaaaaacaccaccaacaggaaagcaagggagggacaaagcccccagaggaaccggggcacaccaa

SEQ ID NO: 65177 - RNA, 74 nt, Homo sapiens
cccacaaagcccagaagaagggcaccagcgaaggagaacagaggacgagacgaagaaaagcaaagaccaaaggc

SEQ ID NO: 65178 - RNA, 53 nt, Homo sapiens
aaggaagaacccgaagcaccggggcaacaggaaaacaacccagagaacccaaa

SEQ ID NO: 65179 - RNA, 65 nt, Homo sapiens
acgagccgcaggagccccgggcagacagggccagaacgaagcacaacaggcagcgggaaaaccga

SEQ ID NO: 65180 - RNA, 83 nt, Homo sapiens
ggaaacgcaagacgggccgagaagcagcgcgaggggaaggaacaaagcagagaaaccaaaaggccagacgaacacgagaggga

SEQ ID NO: 65181 - RNA, 85 nt, Homo sapiens
cagcgcaaaagcccagggccaaaccagagaggccgccggaagcccagcgggccagcacgcggggaccacccagccgcaaaggcag

SEQ ID NO: 65182 - RNA, 70 nt, Homo sapiens
caacaccagagggccccagaaaacaaagccacggaaaaacgcccggggaaaagcagggcggccagagcag

SEQ ID NO: 65183 - RNA, 69 nt, Homo sapiens
aaggcagaggagcagggaggcagcagaacgggaggaagcagacacgagcaaagccaggagacacaagac

SEQ ID NO: 65184 - RNA, 63 nt, Homo sapiens
acaggaaacgaccacagaacagacaggcccaggccgcgaccgcgggaagggccgcagcccggg

SEQ ID NO: 65185 - RNA, 82 nt, Homo sapiens
cgccgcgccgcccggaggacgagagccagcggccagcagcccggagcagaggcagggcagcaccagagcaaaccaagacccc

SEQ ID NO: 65186 - RNA, 81 nt, Homo sapiens
gacagcgagaacaaaggagagaggaccacccagaggagcaacagccagccaggagcccgcccaacagccgacacggagaga

SEQ ID NO: 65187 - RNA, 92 nt, Homo sapiens
cagcacaagagccggggaagacagggaagccagacaggaaccacggaaggagggggcgacacacaagcaggggggaccgacgagcaggcgag

SEQ ID NO: 65188 - RNA, 68 nt, Homo sapiens
aagaagaaaagaacacaaaacgcagaccgcacgaaggggagcacaacccgcaacagaagaacggacga

SEQ ID NO: 65189 - RNA, 83 nt, Homo sapiens
cggaccgagaccggaccgagagcggaccgagagcgcgaaacgcacgagaaggcgaagccaacccaccgccaccaccccaccag

SEQ ID NO: 65190 - RNA, 76 nt, Homo sapiens
caaggcccaaccagacgcagagccggggcaccacaacgacacacccagcccagggaaacacaaagaagacaccaga

SEQ ID NO: 65191 - RNA, 52 nt, Homo sapiens
ccagaccgggacagaaggcaaggccgaggcccgagacgcggggaaccggggg

SEQ ID NO: 65192 - RNA, 68 nt, Homo sapiens
accgagcacaagagcaagacacaggaggcccaaacaaaaagaggaagccgaaaacaccgcagggaaga

SEQ ID NO: 65193 - RNA, 65 nt, Homo sapiens
cccacgcacagagagacgagacgggaagcagggcaagcggcaaaaccaaaggcgacccccaccga

SEQ ID NO: 65194 - RNA, 64 nt, Homo sapiens
caaagaaaccgagaacaaggaccccagcccggcacaaacaggaaggacagccagcccagcccca

SEQ ID NO: 65195 - RNA, 84 nt, Homo sapiens
cccgggaccagaaaaagaccaggaacagcggcgcggagcgcagaaacacgccaagagcccccggaagaggcgcggaggcgcaag

SEQ ID NO: 65196 - RNA, 74 nt, Homo sapiens
agacgccaaacgaccagcagggacacagcaggacaagaacgacagaaagagcaggcagcacacacagaaagaca

SEQ ID NO: 65197 - RNA, 73 nt, Homo sapiens
aggacacaaacaagagagagacaaaaaagagggaaaacaagaggaggaaaaacaaccaggacagaaggaaggg

SEQ ID NO: 65198 - RNA, 75 nt, Homo sapiens
acggaggaggagacagccgacgcaccgccggaagaccagccgcaggagccaagcacaggacagcgcacgaagggg

SEQ ID NO: 65199 - RNA, 81 nt, Homo sapiens
ccaccggagcgaggaaccggaccccggcagccggaggcacccaccacgggccaggcgggccagaggcaagccgcgggagcc

SEQ ID NO: 65200 - RNA, 75 nt, Homo sapiens
ccagcagcaggggcgccaggaaggccgacaaaaggcagagacgggcaagaggcagcaagggcaccaaccgaaaac

SEQ ID NO: 65201 - RNA, 77 nt, Homo sapiens
gagcagggacggcggggaacggccgaaaggacgggccacgaggcaccggccgcgagcaccagcgccccagcacgggg

SEQ ID NO: 65202 - RNA, 80 nt, Homo sapiens
cccaaaacccggaagagcgccccaggagaaacaagcaggaggacaggggaggcagagagacagcgaaagggagaccagcc

SEQ ID NO: 65203 - RNA, 79 nt, Homo sapiens
gccgggaagcaggcccaggggaaggggcgcgcagacccacccggaagccggccgggagggaacggcaggagcagcgagg

SEQ ID NO: 65204 - RNA, 82 nt, Homo sapiens
ggaccgcccggggaaccaaaccgcgcgcgggccgggccggggacaacgaggccgcggagacgggccgcaaggccaggcgcgc

SEQ ID NO: 65205 - RNA, 51 nt, Homo sapiens
gagacgcagaggggcggcgggggggaaacacaaagaagacaccagaagggc

SEQ ID NO: 65206 - RNA, 104 nt, Homo sapiens
cgcggaaccagaaagaaagccaccgagaaacacaaagaaccaagagcggacggagagaacacaagaagaaagacagcacgggccgagccgcgcaacgccccgcc

SEQ ID NO: 65207 - RNA, 65 nt, Homo sapiens
agcaagaggggagaagccccagggaaacaccggagggcaagaagacaaacccaagagagcaagag

SEQ ID NO: 65208 - RNA, 76 nt, Homo sapiens
ggcccaccagaccggaaccaaacaggacaggaaccaaaccgaaggcgccagccaagagaagcagccccgagggagc

SEQ ID NO: 65209 - RNA, 73 nt, Homo sapiens
acggccgcgccccggccgcgccggggccgcgcggccccgcggagccagacaccacgccacccaagagagagca

SEQ ID NO: 65210 - RNA, 95 nt, Homo sapiens
cagaggacaaggagaccaaagagaacaaccccgaagaagcaaagaggaaaccccggaggaaggccagcaggacagcggccgaccgcaggcaagac

SEQ ID NO: 65211 - RNA, 73 nt, Homo sapiens
acagaaggaagagagacagagaagacgcagggaacacaacagagagagaagagagaccaggcgcaaggagacc

SEQ ID NO: 65212 - RNA, 75 nt, Homo sapiens
gaacagggcagcccggaggcacgcaagaagagagcagccaaggcccgggcccgccggccacaccacacgcccccg

SEQ ID NO: 65213 - RNA, 70 nt, Homo sapiens
aacacacggacacgcggcgccacgggccagacaggggcgcaaggaagaaacaggaacgaggaagcaaggc

SEQ ID NO: 65214 - RNA, 59 nt, Homo sapiens
gaacaagacgggaacaacacaaaaggggcaggccacacaccgcaccgacacccaccccc

SEQ ID NO: 65215 - RNA, 72 nt, Homo sapiens
cccaggccagccaccacacgaccacagcagagacaggacaagcaccaggacaaaagaagggcagcacaaagg

SEQ ID NO: 65216 - RNA, 76 nt, Homo sapiens
cgcccgcagccacagagaggaaccccaagccaagcccaagacaaaaacaggccaggcgcgaggaagcagaggcacg

SEQ ID NO: 65217 - RNA, 79 nt, Homo sapiens
aggaaggcccgagggaaagcacgcggaaagagagcgcgcacaccgaaccagagcccccaaagggcagaagagaaccggg

SEQ ID NO: 65218 - RNA, 72 nt, Homo sapiens
gaacaaaagaaggcgaccgacaccccacccacaagacgaaaaggcacagggaacaaagagcagaagacccca

SEQ ID NO: 65219 - RNA, 77 nt, Homo sapiens
gcgcgcgaagcagccaaccgcacagaggacccccagacaacggaacgacaaaaaacaaccaccagcgagcaaaaagg

SEQ ID NO: 65220 - RNA, 65 nt, Homo sapiens
ggccacaagagcgcagggagcccaccgggcgggccggccaaggggaagggccgaacgcccccggc

SEQ ID NO: 65221 - RNA, 68 nt, Homo sapiens
gagaagcaagaaggcccggacacagcaaaccgggccacagaggagcgcagcacacagccgaccgagga

SEQ ID NO: 65222 - RNA, 79 nt, Homo sapiens
gcgaagaccgccgagaacccaagggggagacaggagccaggagcaggggcgcggcagaggcgcggacgagcagcgcagg

SEQ ID NO: 65223 - RNA, 75 nt, Homo sapiens
ggcaccacccaagcggcacgagaaccgggcagcacagcaccgaacacgcccggagccaccggcaagggagaacac

SEQ ID NO: 65224 - RNA, 73 nt, Homo sapiens
cccccaccaacgaccagacacggaccggcaccgccgcgacgcagagggagcagcaccgaggccccccccaccc

SEQ ID NO: 65225 - RNA, 72 nt, Homo sapiens
ggaccagccccgaaacacgggcagaaaagagacacacaaaggaagcaaagccggaaccaagaccaaaacgaa

SEQ ID NO: 65226 - RNA, 78 nt, Homo sapiens
caaaacccagacaccgacgggccgcgaggggaagaggaagcaaagccaagggaaccagaccgggacagagcccgcacg

SEQ ID NO: 65227 - RNA, 63 nt, Homo sapiens
gagcagacagagaagcgcgcagcagagaagaaagcgcaaagcccccggcaaccgcaaagcagg

SEQ ID NO: 65228 - RNA, 93 nt, Homo sapiens
gcggcggacgcgcccgggacgcgcggcggcaccgggaggccgggccgagcgacccgaggcgaacaagaaccacgacgcagaacggaaaacaga

SEQ ID NO: 65229 - RNA, 80 nt, Homo sapiens
ccaaccccacaccccccggcgagccaagaacacggccacccaacagaagagacagaacccgccgcccacaaacccacacg

SEQ ID NO: 65230 - RNA, 65 nt, Homo sapiens
cacgcaaaaagcaggaaaaaagagacaaaacgaccacaacaagaggggaggagccgggaacagcc

SEQ ID NO: 65231 - RNA, 79 nt, Homo sapiens
cagaccggcgccgggacccggcccaggcggccaggcgaggcagcgagaaggacaaccccccaaaggagaaaaaagaaaa

SEQ ID NO: 65232 - RNA, 74 nt, Homo sapiens
gggaaagcaccaaaacgcaggggggcccaggcagaccgaggggaggccacacaagcagagggcagagaagccgg

SEQ ID NO: 65233 - RNA, 70 nt, Homo sapiens
agggaaaacacagaaaccagggaaaaaagaaaagagagaccccacagcacacagcaagggagaaaacaga

SEQ ID NO: 65234 - RNA, 71 nt, Homo sapiens
agaacagcaaaagcgaaggaagcgacccggaaccgggaaaccaggcaagaagcaacgaagagaacagccag

SEQ ID NO: 65235 - RNA, 89 nt, Homo sapiens
ggcacaccagggggcgggacaaccagccccgagacacggacgcagaaagcagggcgcaggcgaaaccgggccccaacagaggagagcca

SEQ ID NO: 65236 - RNA, 83 nt, Homo sapiens
cgcgccaagccgcgagccgcaggagaacgcacgacggaaaagagagggaacagcgagagaaaaccgccagcaaggaggggcca

SEQ ID NO: 65237 - RNA, 112 nt, Homo sapiens
gcgcaagaggggagccgcgggggcgcgcggggccggcccaggggacgccgacagaggaacgcaaggaagaaaagggaacgccaccgccccacggaaggaagaaaagggggag

SEQ ID NO: 65238 - RNA, 57 nt, Homo sapiens
ggacgccccaggaggcgggcacacaggagcggaccaagaaaggaccaaagggagcag

SEQ ID NO: 65239 - RNA, 77 nt, Homo sapiens
ggcgcgcaggagccaaggcaacagaggagaagaggaagaggaaaccagcaagaaggcagggggacagaagcgaagag

SEQ ID NO: 65240 - RNA, 52 nt, Homo sapiens
accgccacccaggcccaagaagggaaagaaaacaagccacccagacaagagg

SEQ ID NO: 65241 - RNA, 79 nt, Homo sapiens
cacacaggggaccagacaaagggagaggggaccgacacccaacagccggccagaacacacagaaaagggccaaaggaag

SEQ ID NO: 65242 - RNA, 80 nt, Homo sapiens
gggagagcgggcagccccaggggacagcccagaggacaagcacaacagcaacagaacgcagccaacagcagcaaagcaag

SEQ ID NO: 65243 - RNA, 64 nt, Homo sapiens
ggacaggagccgggcccgcggagggccaagacagcagccgagaccgacccgcccgcccgcggcc

SEQ ID NO: 65244 - RNA, 38 nt, Homo sapiens
accccgcccacagcacgagccaggcaaacgcagaacca

SEQ ID NO: 65245 - RNA, 80 nt, Homo sapiens
cgcggcggagggcacggccacagggaaagagggaccaagaaaggcccagggaccaaagcccggacaaggcccgagcacca

SEQ ID NO: 65246 - RNA, 74 nt, Homo sapiens
aggcggcagaagacgagggccccaaggcggcagccccgaccgacggggcaacgcgaagaaacaccggagagcca

SEQ ID NO: 65247 - RNA, 95 nt, Homo sapiens
cagagaaaacacccgagagcaccgccgagcggaccccaaggcagggcaccagggcgagaccccgagcccgcaacgggacgacgaccgccgggcag

SEQ ID NO: 65248 - RNA, 81 nt, Homo sapiens
gaagccagcagcaagccgccagggcaaacacgcacaaaagaagagggaaaggaacgcaggaagggccacgggaacaaaaga

SEQ ID NO: 65249 - RNA, 34 nt, Homo sapiens
ggacccggacaccaaccccaaacaggcgggacag

SEQ ID NO: 65250 - RNA, 81 nt, Homo sapiens
acggggcgccgaggcggcacagccgcccagccacccccaggacgcccgcaacccgacacgagacacgagaccagaagccaa

SEQ ID NO: 65251 - RNA, 67 nt, Homo sapiens
cgccgcgagcacaccgcagaaccagggaccggagagaacagaaaaaaagcggcccgggaccaggaaa

SEQ ID NO: 65252 - RNA, 74 nt, Homo sapiens
gcaacaaggcacaaagacccgcagcaacccgagaacaacggggccacacacggcaaaaccaaaaacgcagaaaa

SEQ ID NO: 65253 - RNA, 72 nt, Homo sapiens
aaaaagccagagccaaaaaaacggcggaaaaaagcggagaagaggcaaagaacggccaaggaaggagcgagg

SEQ ID NO: 65254 - RNA, 69 nt, Homo sapiens
accgaggccacgaacgcagagcgacaccgaacgagcagcaagaaggaacgacaaggcgcccagacaagc

SEQ ID NO: 65255 - RNA, 76 nt, Homo sapiens
cgaccagggacgagcggacggccagcgagcgcccggacaggcagccggcacccgcacaacccagggggccgaaccc

SEQ ID NO: 65256 - RNA, 58 nt, Homo sapiens
gcccccagcaccacagcccgcagccccgccagccacccccaggagcagacaagggccc

SEQ ID NO: 65257 - RNA, 74 nt, Homo sapiens
cgcgagaaggacgcgcagccaccccagcggccacacccaagaccggcagacagaacaaaaaaacacaaaaagga

SEQ ID NO: 65258 - RNA, 76 nt, Homo sapiens
gagccgccgccggagcgagaacacgggggcccaccagggaggaagaggcaggcgcagcagagagagcagagccaca

SEQ ID NO: 65259 - RNA, 80 nt, Homo sapiens
aggcgggaggggccgggaggcagaggggcagggggccagacagccaccaaggacaccacgacgccccacagcaggcccgc

SEQ ID NO: 65260 - RNA, 34 nt, Homo sapiens
gcagcagagcgccaagacggacggaggggggagg

SEQ ID NO: 65261 - RNA, 68 nt, Homo sapiens
gcgaaaaagccaaaagaggaaacgagccgccaaacagagccggcggcacgacagcaaaagccagggca

SEQ ID NO: 65262 - RNA, 60 nt, Homo sapiens
gaaaacaaaacaaacacacaaagagcagggaggccagaccaaggacacacacacgagaag

SEQ ID NO: 65263 - RNA, 79 nt, Homo sapiens
caaggagggaagacccgcagggcgacagacacagcaccggccccggcagcgggacgcaggacggcagccgggcccaggc

SEQ ID NO: 65264 - RNA, 80 nt, Homo sapiens
gaaaccaagaccaccccgccgggaccggaggagacacggcccgcaggcgccgaagaagggagggcggagaacggaaaagc

SEQ ID NO: 65265 - RNA, 84 nt, Homo sapiens
cagcaaccagagggccagagggaaggacagggcaggagaagagaagggggacagcaggaccacacggggacacagggagccacc

SEQ ID NO: 65266 - RNA, 77 nt, Homo sapiens
ggacaaccacaagagacgcgggaaagcgagggaagagcgccaaggagaccgggagagagacgaaggacgcgcagggg

SEQ ID NO: 65267 - RNA, 74 nt, Homo sapiens
aaagacgaccacagcagggagaaaagaagcgaaagggcccaccccacggacggaagcaaccaggggcccagcac

SEQ ID NO: 65268 - RNA, 72 nt, Homo sapiens
cgaacacggggccacccagagcccgacacggggcagacaaacacagaccgagaggagaagccgacgaccccg

SEQ ID NO: 65269 - RNA, 87 nt, Homo sapiens
cggcaaaggcggaccgacaccacgacgacgggccacagcagccggcggcggcagagggaggaggaagggaggacggcgaccacgcag

SEQ ID NO: 65270 - RNA, 78 nt, Homo sapiens
ggaccagcaggggcagcgccacaaaccccccacaacgccaggaggaaaagcccaggaaaaagcgcagagaagagagaa

SEQ ID NO: 65271 - RNA, 71 nt, Homo sapiens
ccggaggcagaaccaaaaggaagccaaaggcagagaagcgacccggcgaccgacagagggcaggggcaagc

SEQ ID NO: 65272 - RNA, 37 nt, Homo sapiens
gcacgaagcgcggagacgggacagagcgagagagacc

SEQ ID NO: 65273 - RNA, 73 nt, Homo sapiens
ccgggcccagccgggaacccccacgcggccagcgaaaacgcccagggcgcgagggaacgagaaagggaacggg

SEQ ID NO: 65274 - RNA, 51 nt, Homo sapiens
gcacgaaggaacaaagccacgaaaaccaaagcaaaacaaacggagagagga

SEQ ID NO: 65275 - RNA, 68 nt, Homo sapiens
gggggacggagagacaagaaacccagagaacgcccccgacaccacaaggcaaacgaaaccacaagcgg

SEQ ID NO: 65276 - RNA, 76 nt, Homo sapiens
gaagaaaagcacagagaagacgaaggaggccggagaagaaagaggccacggaccgagccaggacaggggcgcaaaa

SEQ ID NO: 65277 - RNA, 77 nt, Homo sapiens
gaccacggcgcgccccggccggaggccgggcccgggaggagcaggggcagaggggagaacccagccgggaccaagca

SEQ ID NO: 65278 - RNA, 91 nt, Homo sapiens
aagcaagaaagaggcgaagagacaaagaaacaacagcaagcgcaggcccgagggcaggacagcaggcaccggcgaagcacagagaggcgcg

SEQ ID NO: 65279 - RNA, 38 nt, Homo sapiens
ggcaggacaaggacaagggccccgggaaaggaggaccc

SEQ ID NO: 65280 - RNA, 39 nt, Homo sapiens
ggcgggggcaccggcccgagcacgcggggaaagcagcac

SEQ ID NO: 65281 - RNA, 77 nt, Homo sapiens
agcgccaaggcggaaaagcccaagaaacaaacagccagaagcggacccagaagaggggagcagcaaggaggaagaca

SEQ ID NO: 65282 - RNA, 74 nt, Homo sapiens
cgaggaacagggaagggcgcgagcggggacaaagcaccggacaacgcaacagaggccagaacaaaaagaggaca

SEQ ID NO: 65283 - RNA, 65 nt, Homo sapiens
aaaggagccggccggcggcaaaggaccgcacaggcgcaggcgcaaggggccaggggaccaggcac

SEQ ID NO: 65284 - RNA, 86 nt, Homo sapiens
ggcgaccggagcgaacgccacgccgggggcgccggccgagcccgggaaaacgacagcagcagcagggccggaagacgccaccgcaa

SEQ ID NO: 65285 - RNA, 70 nt, Homo sapiens
gaaacagcggaacgcaaccgaaccaaccggaagaagcagcagcaacagccagagacggaggcccaaacag

SEQ ID NO: 65286 - RNA, 84 nt, Homo sapiens
cgggcaaccaaagacgggcgccacagacacaaaaggccagagaggccgacgaaaaccaaaaacgaaaacaaaaccaggaagccc

SEQ ID NO: 65287 - RNA, 78 nt, Homo sapiens
gggggccggggagccaccgcggacgaaagggccgagaaagaagagaggaagaagaggaggaggaggaagaggaggaag

SEQ ID NO: 65288 - RNA, 72 nt, Homo sapiens
aggaaacgagaaaacacaagaagaagcgggacgagcagagaacaaaagggccagcaagaaacggaaaacaga

SEQ ID NO: 65289 - RNA, 59 nt, Homo sapiens
gcaacgccacccgcagcaccacgccaaagaacagccgcggacacagccggggaagagcg

SEQ ID NO: 65290 - RNA, 65 nt, Homo sapiens
acccagccaacaagcaaagccaaaagggagaagccccgaggccagagggggagccagagacccgg

SEQ ID NO: 65291 - RNA, 80 nt, Homo sapiens
caaaaaagcaggaggcaagaaaggggcccggaaaccaaggcaagaaccagacgcagcagcaaaaaccggacagggcgggg

SEQ ID NO: 65292 - RNA, 36 nt, Homo sapiens
ggcaaaagaacgggagcggaggaaggggaaaaaaac

SEQ ID NO: 65293 - RNA, 79 nt, Homo sapiens
agcaaacccagggagcccgacccccagccccgggccgggccccacacagcagcagaacaagcccccgggaaagaagcag

SEQ ID NO: 65294 - RNA, 69 nt, Homo sapiens
ggcggaacagcgacagggaggcgccggcagggacgggaggggagaaagggggacccgaacccccgggcc

SEQ ID NO: 65295 - RNA, 65 nt, Homo sapiens
caagccacagacggccccccgggccgggcacgggcgccagcggcacggcagccccgaacgaccag

SEQ ID NO: 65296 - RNA, 68 nt, Homo sapiens
gcccgaggggcgaggaaaacagcgcaccggagaacagggacgcagaaaacgcacagcacgagaaaagc

SEQ ID NO: 65297 - RNA, 76 nt, Homo sapiens
ccacgccggggaggaggagccacggccggggacaggcacacagagaaaaaaagggaacaaaacacagcaagcagac

SEQ ID NO: 65298 - RNA, 34 nt, Homo sapiens
agcaaacagagcaccagggcggcgccggccaggc

SEQ ID NO: 65299 - RNA, 80 nt, Homo sapiens
acccgggggcacagcaagggaaagaccacagcaagaccacgcccccagccgggggaccaggccgaacgacccggacacaa

SEQ ID NO: 65300 - RNA, 73 nt, Homo sapiens
cggccagaagcgggcggcgcgggggagaggggaccacaagaaagaggagaggaaagcaccgcagcaaaaagaa

SEQ ID NO: 65301 - RNA, 70 nt, Homo sapiens
caaaggcacaggaaggaaacgcgcaacaagaggagaagaccacggagacgaaaagcacaggggaacaaag

SEQ ID NO: 65302 - RNA, 71 nt, Homo sapiens
gaacccaagaccacagccccaggacccaaagacaggaccacgcaccagcagagaaggaaagcaaaccgaag

SEQ ID NO: 65303 - RNA, 79 nt, Homo sapiens
cgagcaggccagcgaacgacaagaccaagagaggcaaagcacaaaggacagagcgggagccaccagcgccaaagggaag

SEQ ID NO: 65304 - RNA, 76 nt, Homo sapiens
ggacaggcgccgcgccgccgcacgggaccgccgagccacaccgggccgccaggcacagagaaggcaaacgggaggg

SEQ ID NO: 65305 - RNA, 73 nt, Homo sapiens
cgaagcagagaaggacggccaagaaaccaggacccccagcaccagcacacagggccgacggagacgcacacgg

SEQ ID NO: 65306 - RNA, 60 nt, Homo sapiens
cggacaagcaccacggaaacaagaagagacagcccggagaagccacgaaaccaggagcga

SEQ ID NO: 65307 - RNA, 70 nt, Homo sapiens
cggcaccccagcacaggcgcccaggagaaggaaagaacccggaaaccacaaggccagcaccgccgggcag

SEQ ID NO: 65308 - RNA, 69 nt, Homo sapiens
agcaggcggacagagggccccagccaggccgcagccccggggagcagggagcgcaggcaaggaggcgag

SEQ ID NO: 65309 - RNA, 63 nt, Homo sapiens
aagccgaaaaaggcagcagcgaagggcagcggcaggagacacggagcgcggaccgcccagacg

SEQ ID NO: 65310 - RNA, 73 nt, Homo sapiens
gaaagaggcaacgggaagaccgggaggcggggcaccaggcccagacggcgaacccgagcaagcaaccaccgcc

SEQ ID NO: 65311 - RNA, 87 nt, Homo sapiens
aggacgccgcggccccaggcgcgcggagagcaggaagacagagagcaagaccccagcccaaccgaggcggcaaggacagcccgggga

SEQ ID NO: 65312 - RNA, 62 nt, Homo sapiens
gggcggaaagaggagagccacaacgcagacaacggcaagcggagaagagcaaggccgaaccg

SEQ ID NO: 65313 - RNA, 79 nt, Homo sapiens
ccgaaccaaggaagcaggccagaggacacaaaagccggaaggggcgaccggaccgggagaagaaggcgccgaggcaagg

SEQ ID NO: 65314 - RNA, 77 nt, Homo sapiens
aagcggaccgagaagaagaggcaggaacgaaccaacgcaggaccaggaaaccaagcgacagacagcggccggacaag

SEQ ID NO: 65315 - RNA, 73 nt, Homo sapiens
ccaacaccacccacccaccacgaaaccccagacgaaaggcacgacagggagcagaaaagaaggaggcacagga

SEQ ID NO: 65316 - RNA, 44 nt, Homo sapiens
ccaccggggacccagcgcgaggcggcagcggcacagcgaggcgg

SEQ ID NO: 65317 - RNA, 72 nt, Homo sapiens
ccgagggggccggaccgggagggcaggcaggcggcacgggcacgagcaagaagcacacacacaccgccgggc

SEQ ID NO: 65318 - RNA, 75 nt, Homo sapiens
cgcacggccgcgcacggaaacagggaaggggcggcggagaccaccacgcacagccacgcgacaggcacacacacc

SEQ ID NO: 65319 - RNA, 82 nt, Homo sapiens
ccacacaccagccccgaaggaccgagaagagaagaccaagaggcaggagcagagagaaggcggcacagggagaacacagggc

SEQ ID NO: 65320 - RNA, 70 nt, Homo sapiens
agagacccccgcaagaggaagacccagcgaaggaaaggacagccagcacaaaaaaacaaaacgagaacac

SEQ ID NO: 65321 - RNA, 66 nt, Homo sapiens
acgggcccgaagaacacagagagcgagggaacggagggaaagcgacaaacaaccaacccacagaga

SEQ ID NO: 65322 - RNA, 79 nt, Homo sapiens
gcacgcgcagccggggccagccccgggcagccccgcccggacagaccgcccacggacacgcgggcaggcccgcacaccg

SEQ ID NO: 65323 - RNA, 76 nt, Homo sapiens
ccgacgccaggcagcgcccccaaacgagcagacagggaggagaagcaggaagagaggagcggagaccaagaagaac

SEQ ID NO: 65324 - RNA, 90 nt, Homo sapiens
gccgcgccgccgccaccagcccaagagaaagggcggaccccgacgcagaccaggcggccagcgcagagccgcagggcccagacaccagca

SEQ ID NO: 65325 - RNA, 59 nt, Homo sapiens
ggccaagaaaaccaggcaaaaagagagacagcaaagccccacccagacggcaggggaag

SEQ ID NO: 65326 - RNA, 77 nt, Homo sapiens
cgcagcagcagcggcagcacaggcacacagcaaagaggacaagaaaggaaacagcagagagaggagggagaaccaaa

SEQ ID NO: 65327 - RNA, 57 nt, Homo sapiens
gggcccggaggagcgaacaaggcgacaacacagaaccaagcgccccaggccacacga

SEQ ID NO: 65328 - RNA, 81 nt, Homo sapiens
caacagagccccgaaaaggaacggagaccacaggggcaggaacacggccacaagcggcccacgcgaaaccaaaagacccca

SEQ ID NO: 65329 - RNA, 82 nt, Homo sapiens
cgagggagcagggaaaccagacgagaagcgacccaacagagcacggccccgggcaaaagcagaccggaaaacccaccggcaa

SEQ ID NO: 65330 - RNA, 36 nt, Homo sapiens
cccccacacagagagaagaggcgaaagaagagggaa

SEQ ID NO: 65331 - RNA, 79 nt, Homo sapiens
aagcggcaaaccaaaagagcaacgacaggaagcaccaaccccgcgaaacccaggacacacagggccacagcagccacca

SEQ ID NO: 65332 - RNA, 73 nt, Homo sapiens
gagcacgggccagagccagccagagacccagcagaagacagcagcccagagaggcagcacagcagggggcgcc

SEQ ID NO: 65333 - RNA, 68 nt, Homo sapiens
ccaacccagaaagcagaggccagagcggagacagacggaggcagccaccagcaggaggaaaaccaacg

SEQ ID NO: 65334 - RNA, 82 nt, Homo sapiens
cccccgagaaaagagcgccagcagccaggaacccgggacagcaggagggggccacggccaagagcgccgcacccaggcggag

SEQ ID NO: 65335 - RNA, 68 nt, Homo sapiens
agcaccacacgaacaagacgcgcagaggcggcgagaagaggaggaacaagagccagagaccagagcag

SEQ ID NO: 65336 - RNA, 64 nt, Homo sapiens
gaagaaagaaaaaccgaacggccacgcagggagcacgagacagcgagcggagggcagacaacgc

SEQ ID NO: 65337 - RNA, 76 nt, Homo sapiens
caaaaaagaacaggagagaaacaaccaggaccggacagagagggaagacagaaggaagcaaagacagagcaaaagg

SEQ ID NO: 65338 - RNA, 68 nt, Homo sapiens
aacaccaaaaacaaaacgaaccaggacggcaagccggcgcgggcaccacgcgaagaccagaaaagcag

SEQ ID NO: 65339 - RNA, 77 nt, Homo sapiens
ccaaggcaagccagagaacacccgccgcgcaaaaggacaaacaagaccaccagcccacaccaccagaccaaaccagc

SEQ ID NO: 65340 - RNA, 62 nt, Homo sapiens
gcagcccccaaggagccgaaaagagaaccacagcaggccagcagacaccgaaagaaccacag

SEQ ID NO: 65341 - RNA, 75 nt, Homo sapiens
gccgacccaccacacaagacggaaaaagcgacggagcccccccccggccgaggccaccaagcaggccagggaagg

SEQ ID NO: 65342 - RNA, 70 nt, Homo sapiens
aaagacccggcaacggaggcaaggcgaaaaacaacgccgcagacgcccccgggacgaaaagaagcaggaa

SEQ ID NO: 65343 - RNA, 75 nt, Homo sapiens
gccacgcacaacaacacaaaggaagcggacccgccaggagaacccgcaggaccaggaggcagaaaaaaccagcag

SEQ ID NO: 65344 - RNA, 70 nt, Homo sapiens
cccccaccagaggcccacggccaaaaaacaggagcaacagaggaccccccaagagaacacaaagcgaggg

SEQ ID NO: 65345 - RNA, 74 nt, Homo sapiens
cgccagggcgcggcccagccgacaagaccaggaaagaggggacaaggagcaacacaaagaagggaaccgagaga

SEQ ID NO: 65346 - RNA, 55 nt, Homo sapiens
gaaaacgaagaaggagagcacacccaccagaggcccaagggccccaagcagaggg

SEQ ID NO: 65347 - RNA, 129 nt, Homo sapiens
accgaagagggggcgaggagagccggagcggggacccaggagccggccagcgcgccggagccgccgagacccaaccagggcagaaccgcacgcagcacccgaaagcaccagaccagccagcaaagacgg

SEQ ID NO: 65348 - RNA, 80 nt, Homo sapiens
ccggcagagaaacccgacgccacagacagcgaggcaaagaccgcgcgagcacgcccaagaaaccaacacccaacagccac

SEQ ID NO: 65349 - RNA, 75 nt, Homo sapiens
ccgggcccgggagccccccggccacgccgggcaccccgagccaggccgccgcaaagcagacagccagcaggggca

SEQ ID NO: 65350 - RNA, 52 nt, Homo sapiens
cggccaccagagaccacgggcgcaagccccggggcagagacacaggacaccc

SEQ ID NO: 65351 - RNA, 75 nt, Homo sapiens
accccgacccccgaacccccagcccaaacccggaaacccagcggcccagccggaaccgacagcgcccaccggcac

SEQ ID NO: 65352 - RNA, 83 nt, Homo sapiens
acgcaacagaacgcaaacacggacacccgccgaaggagcccaggaagagcaaagccgagcgcagaaaggccaaagaagagacg

SEQ ID NO: 65353 - RNA, 63 nt, Homo sapiens
aaagaccgcgagaaaaggccagggcccacgcaaggggccaggaaaaccaggaaggcacaacaa

SEQ ID NO: 65354 - RNA, 77 nt, Homo sapiens
ccacaggaccccagagcgacagcccgggacaccaagaaagaacggaacagggcacaaccaaggagggccagccaccc

SEQ ID NO: 65355 - RNA, 79 nt, Homo sapiens
gcggcacgagggccggcccgcgggcaggacccgagccccaaagacagaaaagccccgagacggaagagaagagaagaga

SEQ ID NO: 65356 - RNA, 68 nt, Homo sapiens
cggcaccgaaacaacggaaagcaaaacggggcaaggacccgacgaccaacagagacagagaccaccaa

SEQ ID NO: 65357 - RNA, 118 nt, Homo sapiens
ggccgccgcccgagcgccgagaaagccccgggagaagcagcgccgcccggggcagaccaggcagaggaagaggcaaagcagacacccggaccaggacaacccccaggcggggcccggc

SEQ ID NO: 65358 - RNA, 76 nt, Homo sapiens
aggagaagaccccagagagccacccacaagacgccacaggccggcaacgccagacaaagcaccgcgcccaaggcgg

SEQ ID NO: 65359 - RNA, 76 nt, Homo sapiens
gccccgcccccccacccaaccggagagagacaggaaggggaaaaagagccagaacacgagaaaagaagaagaacaa

SEQ ID NO: 65360 - RNA, 42 nt, Homo sapiens
acacaacgccacaagccggacacgagagagggggaaccgggg

SEQ ID NO: 65361 - RNA, 72 nt, Homo sapiens
gcgacaacaggaggagaaacccagcagcagacaagcagcagggacaagagaggacagcccaagagacaagac

SEQ ID NO: 65362 - RNA, 41 nt, Homo sapiens
gacccaggaccgcgacacagccagcagaggccaaggcagca

SEQ ID NO: 65363 - RNA, 56 nt, Homo sapiens
ccccggccaccgcagaaaggaagcaaccaccgccggcccgacgcagagacggaaga

SEQ ID NO: 65364 - RNA, 73 nt, Homo sapiens
cggacggaggagcaggcgagaagagaaggacagggacaagcgcacagcggagaaagcagcgcggccaggaggc

SEQ ID NO: 65365 - RNA, 79 nt, Homo sapiens
gaagcgcacgccaaggagcccggccgggcaggagggccggacaagaccagagacggcccgccacgggccccgcagccgc

SEQ ID NO: 65366 - RNA, 72 nt, Homo sapiens
cagcaagggccccagggcaccccgcgaggggagcccaaaagcacgaagcgccagaggacaccgcggcccgag

SEQ ID NO: 65367 - RNA, 63 nt, Homo sapiens
aggaagccgggcagcagggcagccaaacccaccaccagcagaagaccgcgcgagggaagggac

SEQ ID NO: 65368 - RNA, 59 nt, Homo sapiens
accaaaggcagacacgcaggcaaaaggaagcgaaaccacagaaacaaccgaaccagaga

SEQ ID NO: 65369 - RNA, 54 nt, Homo sapiens
gcggggcagcgggccggcgccggcgcgggggagcggagaaacggccaagagaaa

SEQ ID NO: 65370 - RNA, 71 nt, Homo sapiens
cagggggaagcaagcccccaacaagcaaaggaacggaaacgaaaagagacagcagggcaaaacgggccaca

SEQ ID NO: 65371 - RNA, 105 nt, Homo sapiens
ggaaaaacgaagaggaaacagaaaagagaagcagcggaaggcaaggccagcaggcaacacgggagaaggaaccgcaaaaacacaaaagcaaagaggccaccccgc

SEQ ID NO: 65372 - RNA, 76 nt, Homo sapiens
gggccaggcgaagaccggaccgggggcaccggaccgagggcaccacacccgagagagagacagacagggacaagca

SEQ ID NO: 65373 - RNA, 67 nt, Homo sapiens
cggcagggagaccaaggccgccaaagcagggggaagccagagcaacccagcacggcccccaaacgca

SEQ ID NO: 65374 - RNA, 70 nt, Homo sapiens
cagccagagccccgagccggggcccccaggccacggcacagccgggcgcggggagagaggaggggaaagc

SEQ ID NO: 65375 - RNA, 74 nt, Homo sapiens
ccgaggaagcggcacaagcccccgcaaccagcgacaaacccgaaggcgagacgagaaacgaaagcgaaacgaag

SEQ ID NO: 65376 - RNA, 81 nt, Homo sapiens
ccccacgcagcggcagcgaccacagcagcgggcggagcagacaggaacaggcacggagggggcagaagccaagccccaggc

SEQ ID NO: 65377 - RNA, 43 nt, Homo sapiens
gcagagaaaaaggccaccgacggagacaacgaggaccagggcc

SEQ ID NO: 65378 - RNA, 58 nt, Homo sapiens
cagcccaggacggacaacaccaaccaagaagacaggacaacggaggaacaaaccaggg

SEQ ID NO: 65379 - RNA, 60 nt, Homo sapiens
cagcgcgacgggcggacggaggagcggagcagcagagcgaaggaacccaaacggacgaag

SEQ ID NO: 65380 - RNA, 67 nt, Homo sapiens
aacaccaacaaaaaacaggcccagccccggaaccacgaccacccgaaggaaagcccagaaaagcaga

SEQ ID NO: 65381 - RNA, 81 nt, Homo sapiens
aaaagacgaggaaagaaccgggcacaacccccagcagagggccacccgccccaaggcccaagaaacagaacaagaaaaaga

SEQ ID NO: 65382 - RNA, 70 nt, Homo sapiens
ggccagagggaaggacagggaagcaaggaccagaagcgccaacgcaagcagaaagaaggaggcacagacc

SEQ ID NO: 65383 - RNA, 113 nt, Homo sapiens
cagagccaggggagcgcccacacaccgacagaagggaacaggcacaggacggcgcccaaggggggcgccccaggaggagagcacagccaaggcaccaaggaggagggacggcg

SEQ ID NO: 65384 - RNA, 78 nt, Homo sapiens
gcaacccccggggagggggcgggagaggggaacgggacaccaagcagaaccacgccagacaagacccagacggcgaac

SEQ ID NO: 65385 - RNA, 69 nt, Homo sapiens
agaccaagaccccagagcggaccaaaccgacaaggagcgacaaacaagggacgaaacaaaggaccagac

SEQ ID NO: 65386 - RNA, 82 nt, Homo sapiens
cgcagcccgggagcgcggccgccgcggcacggggaacgcagggcagcggcgcacaacaaggaaagaaccccacccaccgccc

SEQ ID NO: 65387 - RNA, 77 nt, Homo sapiens
agggcgccgccacgccgcaggaggcggaggcaagaaaaagagcagccacaaaaccacaaggagaaaaagagcagcca

SEQ ID NO: 65388 - RNA, 76 nt, Homo sapiens
ggcagcaccgcggccgcagggacgcaccaaagaagacagacacgcagaaaaggagccggaccccagggcccagagc

SEQ ID NO: 65389 - RNA, 82 nt, Homo sapiens
ccacggcccccggcgccccggcccccgccccagcccgccggcggcggcggacgggcccagcacaggcagcgcaggcaaaccc

SEQ ID NO: 65390 - RNA, 80 nt, Homo sapiens
gccgaccgccgcccgccacacccgccgccaggcgggcggcggacgaagggcaaagaccggggcccgggagagccgcggac

SEQ ID NO: 65391 - RNA, 75 nt, Homo sapiens
gcccccaagagcaggagacagggacacggcagggggaaggacagacggcaagggggaaaggggaaaccagaaggg

SEQ ID NO: 65392 - RNA, 85 nt, Homo sapiens
cggcgaggggcccggaccgcaggccccaagagagggaggagcagccaagggcgggcccgcagggacccggaaccggccacacccc

SEQ ID NO: 65393 - RNA, 79 nt, Homo sapiens
caaaccaacacccagccaaggggcaggagagaagggagcgaacacaggcggaaccagcggagccgcccgccagaagaaa

SEQ ID NO: 65394 - RNA, 76 nt, Homo sapiens
cgcagcggcgggccgcggcgggccggccgcgcgcggggcgccgacaccgggcggaggagcgacgaagagaggcgag

SEQ ID NO: 65395 - RNA, 69 nt, Homo sapiens
agaggcaaggggccaccaggaggccagggggcgccaggacccccccagcggagccacgaacccagccga

SEQ ID NO: 65396 - RNA, 54 nt, Homo sapiens
gagagaacaggccagccagaaaagaaaacccacaaaggagacccggacagacac

SEQ ID NO: 65397 - RNA, 62 nt, Homo sapiens
ggcggggggaagacaaggaggaagaggccagacaggacaaggcgacacaccaaagaaaaaac

SEQ ID NO: 65398 - RNA, 60 nt, Homo sapiens
caggggcgacagaggcgagaaggaggggcgagaaaggaacgccacaaagcaggcgaacaa

SEQ ID NO: 65399 - RNA, 90 nt, Homo sapiens
ggaaaacgagccaagagaggcagaacccgcacaaaagcggaaagaggacaaaccaagagcaggagggaacggcccagcaagcaggcggca

SEQ ID NO: 65400 - RNA, 78 nt, Homo sapiens
ccagcagaggacagggcgggaagcagcaagagccccccaagagaacccagggggagccacgccggagcgggcaccggc

SEQ ID NO: 65401 - RNA, 77 nt, Homo sapiens
gccccccagccagggaacagaggcacgaaaaaacaagacacggaagagaacacgaggaaaagaacaagccaaaagaa

SEQ ID NO: 65402 - RNA, 73 nt, Homo sapiens
ggcagcaccacgagccagaagcagagccggcaagaacgccccggcaaggacggaggcaggcaccaccaacagc

SEQ ID NO: 65403 - RNA, 73 nt, Homo sapiens
cagcaccacagaaggacgaagagcgacagacgcagaaaacagacacacagcggagacaagcagggccggcagg

SEQ ID NO: 65404 - RNA, 79 nt, Homo sapiens
cgagccagggcagacaaggaaaccgagcagacccacccacaacaccaccgacagagaaccagaggaccggcaacaaccc

SEQ ID NO: 65405 - RNA, 86 nt, Homo sapiens
ccacgaggacaacgggggcgcaggacacagaggggggcgcaaggagccaggcaggaggaagagcgcaggcgccggaagaagagagc

SEQ ID NO: 65406 - RNA, 70 nt, Homo sapiens
ccccgcgccgccgaccccccggcgccgcgccggcggcgcaaccgaagccagaagcgacacagcagagcag

SEQ ID NO: 65407 - RNA, 48 nt, Homo sapiens
cagaagccgcacgcacgcaacccccaggcaaaccgacaccagcgacac

SEQ ID NO: 65408 - RNA, 85 nt, Homo sapiens
caagagcaagacaccggacaccgagggcccccaaaaggcgcggacaagaagacagcagacggacgaagagagggaaggggcggcg

SEQ ID NO: 65409 - RNA, 73 nt, Homo sapiens
cagacagcgagacacccaccagaagagggagaagcggagacaaaggggggcagaaagaagaggaggacaacaa

SEQ ID NO: 65410 - RNA, 72 nt, Homo sapiens
aacacacgggaccgaaacaggccggggcacagcacagcgccggcgcaaggaacagcgccgaagccaagaagc

SEQ ID NO: 65411 - RNA, 73 nt, Homo sapiens
ccaagcaggagacagccaaggggagaccacaccaagcgggagacacaccacgccaagggggaaccacaaaacc

SEQ ID NO: 65412 - RNA, 60 nt, Homo sapiens
cccccaggccgagaccacagaccccgccggggaagaacaggaggggagcgaccagcacag

SEQ ID NO: 65413 - RNA, 61 nt, Homo sapiens
ccagcacaacacaaaaggacgggccaggcgacacgcagaacaaccccaagaccgggggcac

SEQ ID NO: 65414 - RNA, 85 nt, Homo sapiens
gcgccgcagcgccccccgcccgcggcccggcaggacagcccagagcaagcacacggaggcccgggagccagaccgggagcccgcc

SEQ ID NO: 65415 - RNA, 79 nt, Homo sapiens
gcgcggcgcgcggaccccgccgagccagcgccggccgcgcgccgcgcccgcgccacaggagacagacccagcacggacc

SEQ ID NO: 65416 - RNA, 67 nt, Homo sapiens
aaacggcgcaaagccaggaaggagagaggcagaacagaacaaacggagaaacaccggagagcccaaa

SEQ ID NO: 65417 - RNA, 73 nt, Homo sapiens
aagcgcgagccaggaacgaggaaccccgaaaacaaccccggcagcccacaaccccacgcagagggggacgacc

SEQ ID NO: 65418 - RNA, 73 nt, Homo sapiens
acccccagcagcacacaggcggcaccaggacgccgaaaagcgaccggacgcaggcacagggacacgcgagacc

SEQ ID NO: 65419 - RNA, 36 nt, Homo sapiens
gcgcggcccgcccggaaagagaaaggagaccacaag

SEQ ID NO: 65420 - RNA, 76 nt, Homo sapiens
gcaacgaggagacaggcgggggccgcaggaaaaggggaagagcgccccgagaagcagaggaggcccagcagcagcg

SEQ ID NO: 65421 - RNA, 58 nt, Homo sapiens
acacagagacaaaaacaggagaaggaacacaccacaaaaagaggagaaacagaaaaag

SEQ ID NO: 65422 - RNA, 72 nt, Homo sapiens
aaggccggcagaagggaggcacgagggccacaaagcccagacaagcgcagaagcaacagaacccgaaccacc

SEQ ID NO: 65423 - RNA, 81 nt, Homo sapiens
caagcgcggccacccccaaagacaaaagacacagaagaaaaaggggacgaagacacgaagcaggggagccagaaggaccag

SEQ ID NO: 65424 - RNA, 59 nt, Homo sapiens
cgcgcgccgcgcccggaccccagccagggccccccacgcgagaacccgggccggggccc

SEQ ID NO: 65425 - RNA, 71 nt, Homo sapiens
cgaaggaccagaagaagggcggagaccgccggcaacaggcaggcacagccaggaaaggaacgcagacaaac

SEQ ID NO: 65426 - RNA, 81 nt, Homo sapiens
cgcagaaagcaggcgaacccgcggcgcaaaacgacgaagaagacacgaacaggggacgaaaaacgagccgggggcaaaagg

SEQ ID NO: 65427 - RNA, 73 nt, Homo sapiens
caggagccgggagccaccgcgaagagacgggcccccccacacgcaaaccaaaagaaacagccaacaaaaaacc

SEQ ID NO: 65428 - RNA, 73 nt, Homo sapiens
aaacggcacaccaggcggcaggggcaaccagacgggccaagcgagcaggcgacccaaaagagcgaaggaaaac

SEQ ID NO: 65429 - RNA, 86 nt, Homo sapiens
gagcgccgagcgcgccgccgccgccgccagaacaaccgggcgccgacgagacggggcaggaaccacagagaacagcccggacacgc

SEQ ID NO: 65430 - RNA, 86 nt, Homo sapiens
gaggccgaggaagaagccccaggggcaacgacccagggaagaggagcaggacggagggagaaggggccacacggaagggccgagga

SEQ ID NO: 65431 - RNA, 60 nt, Homo sapiens
gaagaagcacccagcaagcgagggaccgggacgccacagccagccaccaggcaggcaacc

SEQ ID NO: 65432 - RNA, 81 nt, Homo sapiens
ggggaaagaaggacaaggagggcccgagaaagagacggccacgccgacagaaaccgacacacagaggaggaccgccggcca

SEQ ID NO: 65433 - RNA, 36 nt, Homo sapiens
gcgaaaaaaggaagcagaacaaggagccgccgcccc

SEQ ID NO: 65434 - RNA, 71 nt, Homo sapiens
acagggagaccgagagcccgcaccaaacagagcagcagcagcagagagaaacagcagcaggagagagccaa

SEQ ID NO: 65435 - RNA, 82 nt, Homo sapiens
gggaagcgaccgggcccacccaaacggaggaagagcccccagaagacaaggaaggggaccaaagaggggcaaggaggacccc

SEQ ID NO: 65436 - RNA, 57 nt, Homo sapiens
agggaaggcggcacaacaaagcacagcaggagaggagccaagcccaacgggacggga

SEQ ID NO: 65437 - RNA, 70 nt, Homo sapiens
gaagaaaaggaccgcagaccagagaagacacacaacaaccccacggagccccaccggaaggagaaaaccg

SEQ ID NO: 65438 - RNA, 69 nt, Homo sapiens
gacacaaaaagagcgaaagagagagagccaacaagagccagacaaacagcgcccaggaggaaaagccca

SEQ ID NO: 65439 - RNA, 84 nt, Homo sapiens
cgggccgagaaagcaaacagaaaggccaaaacccccaagggggggccgcccgcccaaggcaggaagaggggccgcaaagaagac

SEQ ID NO: 65440 - RNA, 79 nt, Homo sapiens
agaaacgcacacgaagaacaagaaaaagcacaagagcaccaacgaggccgagcaaagcccacaaaagaggcagcagaca

SEQ ID NO: 65441 - RNA, 81 nt, Homo sapiens
ggaaggcacaaggacaaacccacccacaaagggggcccgagggaccgccaacaagcggcccgcaccgggccagacaacacc

SEQ ID NO: 65442 - RNA, 40 nt, Homo sapiens
acacgcggcacaagacagagaagaaagacgggacaagggc

SEQ ID NO: 65443 - RNA, 57 nt, Homo sapiens
aagagagcaagagagagaggcagccaagcagcagggacgcaccaaaacggacagccg

SEQ ID NO: 65444 - RNA, 78 nt, Homo sapiens
aacgacagacaacagcgaaacggaccccagaggagcgacaggcacgaccccagagccgacggccagcaggagaggagg

SEQ ID NO: 65445 - RNA, 83 nt, Homo sapiens
ggccacggggcgggggcggggcggcaggagccggccggcaaccgagggacccgcgccaggaccagcgggcgccgacggcgcaa

SEQ ID NO: 65446 - RNA, 75 nt, Homo sapiens
cgggaccgagccagggaggcgaggcccgcaccggaaggacccgacaaaagacacagcagccagaagaggggccca

SEQ ID NO: 65447 - RNA, 75 nt, Homo sapiens
ccggcgcgcagcgccccccgcccaggcacaaagagagacccgaacagccaggcggcgggggaaagagaaagagag

SEQ ID NO: 65448 - RNA, 83 nt, Homo sapiens
cggcgcaggaggagaccggcggcagggcaagcggcgacggaccccaaggccgaagaaaggagagaacccagaagccacaagaa

SEQ ID NO: 65449 - RNA, 64 nt, Homo sapiens
caggaccccccagagaagccaggagcacccggcgcccagacaaagaggaccgaggaggggcgcc

SEQ ID NO: 65450 - RNA, 76 nt, Homo sapiens
aggggcccgcgggggaaaaagcagcgaacccgagaccaacgggaggagcggggggaaggcgaccaggccgcgggaa

SEQ ID NO: 65451 - RNA, 104 nt, Homo sapiens
aacgcggcaggcgcccccgacccccagacgccggaaagaaggcccccgcccggaacccacagcccccgagaaaagccggaaaacagaagcacaaagagaacccg

SEQ ID NO: 65452 - RNA, 73 nt, Homo sapiens
accaaggagaagagaaggacggaacagcccgggccccggccgaaaagcgggcgaagcagaaccccgagcagac

SEQ ID NO: 65453 - RNA, 52 nt, Homo sapiens
ccgaacccagcaccgggaggcagagaaccggcacgcccaggccaacgaaaac

SEQ ID NO: 65454 - RNA, 73 nt, Homo sapiens
gaaaacaaaagaggagaaagaaaccccaaacacggcacaaagaacagccagcaaagcagcagagacgaacaag

SEQ ID NO: 65455 - RNA, 55 nt, Homo sapiens
gggggagaccccaccaccggggacgaggaaacagaaaacaacgaaaacaaagaaa

SEQ ID NO: 65456 - RNA, 79 nt, Homo sapiens
agacacgcgccggaagacagaacgggaaacggcgccacccagaagcaggggcaccagcgggcacaccaagaagcgcccc

SEQ ID NO: 65457 - RNA, 69 nt, Homo sapiens
acaaagcaaggcacagaagcacccacggagcgagagagacccgcgaaaccgacccaagaaaaagaagaa

SEQ ID NO: 65458 - RNA, 37 nt, Homo sapiens
gaggcggccgcacaaagggcggagaacggaaaagcac

SEQ ID NO: 65459 - RNA, 74 nt, Homo sapiens
ggagagccacaaaaaaggaagcgaaaaaaagcaccaaagcagcaacaaagcacacagcgcgccaaagcaagagc

SEQ ID NO: 65460 - RNA, 71 nt, Homo sapiens
cacccccggccggcgcgaggccaggggaacccaaaggacgaaaacccgaggggcagcccaggagccgagaa

SEQ ID NO: 65461 - RNA, 39 nt, Homo sapiens
agcagaaggagaggcgcaaaaacaagaagcaccagaagc

SEQ ID NO: 65462 - RNA, 72 nt, Homo sapiens
ccacgccaagaagcggcagacccgcgcgacgaggagcccgccaagaaaagcgccaggcaggcaggaaagcgc

SEQ ID NO: 65463 - RNA, 75 nt, Homo sapiens
aacagagcacgcgaccagcgaggagcaacacaggagccggaggagggcacggagcggggagccccgcgcacacag

SEQ ID NO: 65464 - RNA, 60 nt, Homo sapiens
gagagggaccggaacggcggcgacaaggggcccgaacagagggaagccgggacacgcccg

SEQ ID NO: 65465 - RNA, 76 nt, Homo sapiens
ccaggcgcggggcgaagggcgcgggcgccagaacaccgccgggggggaaagccaacaccggaacgcaacaaggcga

SEQ ID NO: 65466 - RNA, 79 nt, Homo sapiens
cggcgggagacgcagcgcgacccagcaggaccaagaacgcccagcccgcgggcaccggcagaaaggaggaggaaaacac

SEQ ID NO: 65467 - RNA, 65 nt, Homo sapiens
aagaaggcagcagcaccagcacaacaagggcggagcaggagcaaaggagcaagaaaccagacccg

SEQ ID NO: 65468 - RNA, 74 nt, Homo sapiens
ggaaagaccgacccaacaagacagagggcaagacgccaagagaaaaggcgagagcacaaagcaccaagagccga

SEQ ID NO: 65469 - RNA, 37 nt, Homo sapiens
cccgccccaagcaccgcaggcagacacacaggaaaaa

SEQ ID NO: 65470 - RNA, 66 nt, Homo sapiens
ccgcgaagagacccgacagaacgagcaaggagggaagaaaccaagagaaagcacagaccggaggca

SEQ ID NO: 65471 - RNA, 77 nt, Homo sapiens
gcacaccacacccgcgccgacaggcagggcaagaacccgccacacaaggcgaacagagggcagcaggagcacagacg

SEQ ID NO: 65472 - RNA, 74 nt, Homo sapiens
aaaaaaaaggaagcacaccagagggaagaagagaaagccgaaaaagacaaggggaggacagcggaaaaaccgga

SEQ ID NO: 65473 - RNA, 66 nt, Homo sapiens
cgagaaaaggaacccagccaagccaacaacagaacaccaaccagcggaacgggcacaaagaaggcg

SEQ ID NO: 65474 - RNA, 73 nt, Homo sapiens
acacaaagagggggcggaagagacagccaggcacagaagaccagcgccgaagaaggacgacagggccacccac

SEQ ID NO: 65475 - RNA, 79 nt, Homo sapiens
aggcccacccgcccacagcaggacagccgaacggaacggagagcagccaagcaggggcacaagaaggccaaccccaaaa

SEQ ID NO: 65476 - RNA, 58 nt, Homo sapiens
gcgaaagcacaccaagaaaaacggacccggcgagaagcaaagaagggaacgcgcaacg

SEQ ID NO: 65477 - RNA, 73 nt, Homo sapiens
accccgagggaaacaagaaaacacaaagaggcagcaaaggaccagggaacacaacacgggagggggcgagacc

SEQ ID NO: 65478 - RNA, 82 nt, Homo sapiens
gaagaggaagacggggcggaagaccaagacacgagagaggccgcccgccccccaagaaaggccagccgaagaaaagcgaaag

SEQ ID NO: 65479 - RNA, 75 nt, Homo sapiens
accagaaacccgcccgcgaggaccacggcaccaaccccggcagagagcagaggccgcccgccccccaagaaaggc

SEQ ID NO: 65480 - RNA, 80 nt, Homo sapiens
gcggcaccaacggcaccaacacgcggagcggaagacggcaacccaggggggcacgaacaacaagacaagcaaccaagaaa

SEQ ID NO: 65481 - RNA, 70 nt, Homo sapiens
ggccaaagaagggagagaggacgagggcgcacagaacgggaagaaagccaaacagacaggagacaaaggg

SEQ ID NO: 65482 - RNA, 58 nt, Homo sapiens
agccgagcccgacaaccgagcaaaccagccggcgggcgccacaacggacgacgaaaac

SEQ ID NO: 65483 - RNA, 71 nt, Homo sapiens
aacagaggaaggaaaggcgcaacaacacaaaaaaagcagcaagggaacgcaagcacaggaccagaaacgaa

SEQ ID NO: 65484 - RNA, 75 nt, Homo sapiens
caggggcccgcgacgggccgcccggcaaggcgcccccaaaagagcgaagcgagaccccggaagggggggaacgcg

SEQ ID NO: 65485 - RNA, 79 nt, Homo sapiens
ccccccgccaccaaaggcccaggagagagggaaaggacaagagaagacaacgaagaagaaaaaaaagaaacagaacgca

SEQ ID NO: 65486 - RNA, 74 nt, Homo sapiens
caacccacacggggggcgaagaagagcgccagacccacaggacgacaggcagcgcgggagcaccggaagagcca

SEQ ID NO: 65487 - RNA, 76 nt, Homo sapiens
aagagaccaagcaccaagaaaacgccaaggaacgcagccggcccagcccaccccaggcccccccagcccagcacca

SEQ ID NO: 65488 - RNA, 78 nt, Homo sapiens
ccagcccgcccagcagaccgggaaaaacaagggaccggaccagaacagccacacgaacaacccgaggacggagacaag

SEQ ID NO: 65489 - RNA, 50 nt, Homo sapiens
ggcaggaccccgacgacacgaagcaagcaggcaagcggcaccacgacaac

SEQ ID NO: 65490 - RNA, 69 nt, Homo sapiens
aacagcgagcggagccccgcacgagagggagaagagaagaccagagaaagaacaaccccgcgcacaaga

SEQ ID NO: 65491 - RNA, 41 nt, Homo sapiens
ccccagaccgcggcgaaaggaaacgggccgaagaagcagga

SEQ ID NO: 65492 - RNA, 78 nt, Homo sapiens
ggcacaacacagcccaaacccccgcgacgccggaacaacgggaaagccgcacacccaccaggggcgagggccagcagc

SEQ ID NO: 65493 - RNA, 72 nt, Homo sapiens
cggcaggcgcaacagagcgccggcggcccgggcccgccggccacaccacacgcccccgccgcccacaacgcc

SEQ ID NO: 65494 - RNA, 75 nt, Homo sapiens
aagagcccacaaggaagaacaaagacgagccagacccccagagcccagaaaccaggcgccaggaacagcgggacc

SEQ ID NO: 65495 - RNA, 77 nt, Homo sapiens
cgggccccgacagaagccacaccaccccggaggaccagaagcccaggagggcagaacgacgaaagacggacaggacg

SEQ ID NO: 65496 - RNA, 38 nt, Homo sapiens
ccgcggcacagaggccccagggcacgcacggcggacac

SEQ ID NO: 65497 - RNA, 71 nt, Homo sapiens
aacccgccccagagccgggacacggagaaaagggagggagagaaagagacgaaacagaaggacgaacacga

SEQ ID NO: 65498 - RNA, 79 nt, Homo sapiens
ccgaacggagagcgccacccgggacacagcgccaccccgagcagcggggaagcgccggaaccaaaaagaagccccagag

SEQ ID NO: 65499 - RNA, 55 nt, Homo sapiens
aggagccgcaacaagaaggaaagccaagcacaaccaccagggaagacaaccagga

SEQ ID NO: 65500 - RNA, 71 nt, Homo sapiens
gggcagggccggggaagcaccaaaggccggaggcaccacaacacggccacgagcacccccggagcaaagcg

SEQ ID NO: 65501 - RNA, 87 nt, Homo sapiens
agaaacccacgaagacgcgcggagaaagagaccaccgagcaggacagcggccgaagccagagccggggcggcgccaggccccacacg

SEQ ID NO: 65502 - RNA, 85 nt, Homo sapiens
caaaaggcggagcagaaaacaaccaggcaggacaggggggagcagcagcagcagcagcagcagcacaaagcccggacagggccag

SEQ ID NO: 65503 - RNA, 78 nt, Homo sapiens
acagggcgagagcagcgaaaaggacaaacacgaagagaaaaggagcagccacggcgcagaggaacagccagcagaaga

SEQ ID NO: 65504 - RNA, 92 nt, Homo sapiens
ccggcccagcgcccccacggagcagcacccacccgcacagccgagcaacagaggaaaacaaaaagcagcaaaaaagggaggaaacaagaaag

SEQ ID NO: 65505 - RNA, 77 nt, Homo sapiens
caaaaggcacaaaacaacccaaggggaaagaaccagaccccaaaccaaaaggaagagaccaagccgaagcgcggccg

SEQ ID NO: 65506 - RNA, 64 nt, Homo sapiens
ggccagaaaaagcacacaaagaggcagccggggcagggcaacaacggcggagacccgacaccaa

SEQ ID NO: 65507 - RNA, 52 nt, Homo sapiens
cgccgcagcgccaccgcacggggggcaaaagacaaacagaacaagccacggg

SEQ ID NO: 65508 - RNA, 72 nt, Homo sapiens
gccaggcgccgcccacagggcggagaacggaaaagcaccaggaagcagagaggaccgcagaagggaaggaga

SEQ ID NO: 65509 - RNA, 78 nt, Homo sapiens
aggacacgcacgccagaacacaaagccaaggccgccgaggcagaacaagaagggcaaccaggggggaaggagggagcg

SEQ ID NO: 65510 - RNA, 86 nt, Homo sapiens
cgcgaccagcgccagcgcagccgccagcgccgggacaagaggacccaccgggggcagggcgcaccacgaaaacaacacagcaggga

SEQ ID NO: 65511 - RNA, 78 nt, Homo sapiens
caccaaaggagccagcgcggagcaggcgcagagcagcagaccaccccacgaagaccaagcccagaaccagaagaaaac

SEQ ID NO: 65512 - RNA, 70 nt, Homo sapiens
ggcgcgaccccgcgggcgggaagaggccggagaagccaagacaggaacacagagagcaacagaccagaac

SEQ ID NO: 65513 - RNA, 64 nt, Homo sapiens
gccggaagaaccgcagccgagcggggccggccacaggaaaacaccacccagcgaggaacacaac

SEQ ID NO: 65514 - RNA, 85 nt, Homo sapiens
aagccagcagagaagggggcggcagcgccagcccggcgccccccccagccccagcggaggggcagcagcaggacagggaacccgg

SEQ ID NO: 65515 - RNA, 70 nt, Homo sapiens
aagaggagccaagcaaacagaagcgcggccaaggaaaagacgagggaagaagaccgacaacaaccagggg

SEQ ID NO: 65516 - RNA, 77 nt, Homo sapiens
gcgagcccaagcgcccccgcaccaggacccgaacacggaagaaagacacgcaggaggccgcggccgagcagcgccac

SEQ ID NO: 65517 - RNA, 54 nt, Homo sapiens
gcagcagccacaggaacgcaagaggcacccacagaaggagaacaagcagagcac

SEQ ID NO: 65518 - RNA, 74 nt, Homo sapiens
caaaacagaagaaaacgaagaaaagacagcgcaggcccgccaaggcacgcgcagaaagaaaaacgggggaagca

SEQ ID NO: 65519 - RNA, 77 nt, Homo sapiens
gaacacaaaaacaccccacagaacaggccaggcagcgaacaaagcacaaaagagaccggccagaggcaaagcaagcc

SEQ ID NO: 65520 - RNA, 78 nt, Homo sapiens
agcccgaggaaagaaagacgacgcaccggagaggagaaacgaaaaggacaagagacccaagagcacagaagaagagcc

SEQ ID NO: 65521 - RNA, 89 nt, Homo sapiens
aaggggacagaggagaccccggccaacacggcccccgggcccagggccaagaaaaaggagcagcacgccaaacaagaggaacaagaaga

SEQ ID NO: 65522 - RNA, 78 nt, Homo sapiens
agagcgccaagaaggaccgccacccgagaagcggaaagggccaacggcgaccgccagccaggaagagcggaacggaga

SEQ ID NO: 65523 - RNA, 55 nt, Homo sapiens
cacgggaggacgccagggagcaaaccgagccgagccacgggaaccgagagacaca

SEQ ID NO: 65524 - RNA, 60 nt, Homo sapiens
ggcccgagaccggcacgagcaggaacacggcaacaacaaaggcggcacccaggggccgca

SEQ ID NO: 65525 - RNA, 63 nt, Homo sapiens
cacacggcaagcaaacagaagaagccagcagccacaccagggaaacaaaggacccacgcaaag

SEQ ID NO: 65526 - RNA, 74 nt, Homo sapiens
acgaaaagggagaggaggagaagaccagccaaagcaagaggaaagggcgaaaaaagagcacggaagaccagggg

SEQ ID NO: 65527 - RNA, 83 nt, Homo sapiens
accggcgccgccgggcagggaggggagccgggccaggagacggccagcagaagcaggcgagccccccgagaaaaagaagaaac

SEQ ID NO: 65528 - RNA, 50 nt, Homo sapiens
aaagcgaacaaagaaagggaagagacacaaggaacaggaggcccggaccc

SEQ ID NO: 65529 - RNA, 58 nt, Homo sapiens
gcagaccgcagaaggccggagacaccagcagggcgaagaagagcagagcagccgaagc

SEQ ID NO: 65530 - RNA, 68 nt, Homo sapiens
ccccacagaggaaccgggagcgccgggacaggagccgaccaagccggaaccgagaccagagcacaacg

SEQ ID NO: 65531 - RNA, 64 nt, Homo sapiens
ccccccagccagggaacgaaagggaagcggacggacacccccgagaggccagacaggacgaaag

SEQ ID NO: 65532 - RNA, 75 nt, Homo sapiens
gaaaccagcgccggacagagaagcccccaaggagcgcagaacagaagacgggagacccggccacccccaagcggc

SEQ ID NO: 65533 - RNA, 68 nt, Homo sapiens
aaacaagggaacagcagagcggcgaccaccagaagacaagggagaaaacgggccggaggaaaagggcg

SEQ ID NO: 65534 - RNA, 58 nt, Homo sapiens
cgcagggagaaggaagaggggaaaagagggggacaggggagcacgacagccacggaag

SEQ ID NO: 65535 - RNA, 74 nt, Homo sapiens
aaaagagcccgcgggcgggccgggcggccgggcgccacaggagccgcagaagcaaaggcaccgccaaaccgaaa

SEQ ID NO: 65536 - RNA, 63 nt, Homo sapiens
gggacggagacaggggagcgcagaagacaggcggggaacgggaccagaacgaaaacaaacgga

SEQ ID NO: 65537 - RNA, 76 nt, Homo sapiens
ggaccaagaaccagggcaaacacggggaggaacgccacagagcagggaaggcgaaagagcaaagaggcaaagcggg

SEQ ID NO: 65538 - RNA, 68 nt, Homo sapiens
cacgccccccgcaacaacccacaaggccaggggcggcccagacccagcccggacccagacaccgcaac

SEQ ID NO: 65539 - RNA, 72 nt, Homo sapiens
gcgggcgaagcagagaagaggcggaaaaagaaaacccaaggaacgcacgcccggaaacacacccgcagaaac

SEQ ID NO: 65540 - RNA, 76 nt, Homo sapiens
gcgcgcccagaagaagggaaggcgcgaggaggaaaggaggacgagagagaagacagcaaagggcaggagagagaag

SEQ ID NO: 65541 - RNA, 77 nt, Homo sapiens
gcacagagcacacagggaacaaaacgaggggcccacgagaagagcaggcgacgggggagagggagacagcggcgcaa

SEQ ID NO: 65542 - RNA, 79 nt, Homo sapiens
ccgagagaagacaggagagcgagaccgcggacaacagagagagagcaacccgaccaaaccgagaaagagaaacggaaag

SEQ ID NO: 65543 - RNA, 79 nt, Homo sapiens
cgagaacgggccaggcaggaagccaagaaggacaagaaggggagaagaaaagaaacggcaaaagaaaaaagaaaagaga

SEQ ID NO: 65544 - RNA, 70 nt, Homo sapiens
agggccagacgacggaagacgaaaagcagaaggaagcagaaagaccaagcagcaacccagaccaacaagc

SEQ ID NO: 65545 - RNA, 78 nt, Homo sapiens
acccgcggccccaccggcagcggggcacacaagagagcccggcggcaggacccccgaagcgcgggaagccgagccggg

SEQ ID NO: 65546 - RNA, 76 nt, Homo sapiens
aacgcggccgggccaagcagagaacacagggcacacagggaccaagaagccccggggacacgcgagaaaagacgcc

SEQ ID NO: 65547 - RNA, 71 nt, Homo sapiens
ggaacacgacgaagaagaaagacgaccacaaaccagaggcgcagcgagaaaaacagggacagaaccaaaag

SEQ ID NO: 65548 - RNA, 82 nt, Homo sapiens
aagagcgccccaggagaaacaagcgggcggcggacgaagggcaaagaccggggcccgggagagccgcggacggcggcaacaa

SEQ ID NO: 65549 - RNA, 85 nt, Homo sapiens
cagcaaccagcgccccaacgcaccaccccgacacgcgagacacaggcggaggacccacaggagaggcacaggaccagaccaagac

SEQ ID NO: 65550 - RNA, 85 nt, Homo sapiens
caagaaacgggcagccaggcccccacagcccgcaggcagcagagcgggagcgacagggagaagaagcgaaggaggggggacaaac

SEQ ID NO: 65551 - RNA, 96 nt, Homo sapiens
gaaaacagcagaagaaccaaaaaaaacaccgaaaacgccccacacaaggggcaccacccagggcagagaaaacagaagagaaaggaccagacccag

SEQ ID NO: 65552 - RNA, 70 nt, Homo sapiens
acaagacgcgggaacccaccaaagaagcagagagagacacagccgaaagcggacgcaagagcaagaccag

SEQ ID NO: 65553 - RNA, 76 nt, Homo sapiens
acaggagccccacgccacggccagacaacacagggacacaacaaacacaaccgccacagaagcacaggcaacccca

SEQ ID NO: 65554 - RNA, 82 nt, Homo sapiens
gccgggcagaggaccggaggccgggaagccaacgaccacacgcaccagggccccccacgcgagaacccgggccggggcccgg

SEQ ID NO: 65555 - RNA, 82 nt, Homo sapiens
acccgcgagcgcccaggacccgccaccaaaccgcccgagggaccagagggaaaggaggcccagaaagagaaacacgccccag

SEQ ID NO: 65556 - RNA, 79 nt, Homo sapiens
cgcggggcgcgcggcgccggcggcgcgcggcccccgcgcaggacaggacaaagcccccagaacaccggggaaccacccg

SEQ ID NO: 65557 - RNA, 41 nt, Homo sapiens
cggcgcggagcgcaccaccaggcgccgaccccgacagaacg

SEQ ID NO: 65558 - RNA, 76 nt, Homo sapiens
gggacaacgcaggaaacccacaccgggccgggagcaaccacggaaaccggaacagaagacagggaaggacccaaga

SEQ ID NO: 65559 - RNA, 71 nt, Homo sapiens
agccacaaggaccaccggacgaaaaggagaccaaagggagcaaaggagcgagaaggggcgaagggaacagg

SEQ ID NO: 65560 - RNA, 82 nt, Homo sapiens
ccaccgcacacccgacacagcggagcgcccagaggcgagcccggggaggaagagaacccagaggcaccccggaggaagagga

SEQ ID NO: 65561 - RNA, 76 nt, Homo sapiens
ggcaggggccccaacggggcaagccccccacaaccccccggaggcagcacccaggaaaggaccacaccacggagcc

SEQ ID NO: 65562 - RNA, 76 nt, Homo sapiens
aggcaggggacagggcagcgcgggagcccgaacacaaagagcaagaggcagaaaagaaccaggaaggaagcaggca

SEQ ID NO: 65563 - RNA, 78 nt, Homo sapiens
ggaccccaaacaagcgcgcaaaagcgaggagggccgcggcagaacaaagaacgagcggcaaggcaaagacaacagggg

SEQ ID NO: 65564 - RNA, 99 nt, Homo sapiens
gaagcgccgccaggcccgcaggaccgccggagacagggcaagcaagagcaacgaaccaaagcaaaggaggccgggggaagacggaaaagagagacgggg

SEQ ID NO: 65565 - RNA, 76 nt, Homo sapiens
accgccacgggccgagacacgcagcggcggccagggaccagaaggcggaccccggcagcaagcaacagagcgccaa

SEQ ID NO: 65566 - RNA, 88 nt, Homo sapiens
ggcggacagccgaagcaaggaccgggacacccagagaagcaaaccaaggcaggcacgcaacaagcggacgagaaggggcagacacaag

SEQ ID NO: 65567 - RNA, 83 nt, Homo sapiens
cgaaccagcaaggaaaaacagaacgggcagcaggaacaggggacaaaaggaccgaggggaacccacacagaggagcgccgccc

SEQ ID NO: 65568 - RNA, 80 nt, Homo sapiens
caagggcccgaccgcacccccaacgagcccccccgacggaggcgccagaagacaaaacagaggagaccagaccagaagcc

SEQ ID NO: 65569 - RNA, 78 nt, Homo sapiens
aagcccaaaccacaagccacaaaagggcagagacgcgcaaagcggggaggagcacagggcaggcgaggcaccagaccc

SEQ ID NO: 65570 - RNA, 77 nt, Homo sapiens
aggaggaagagcccccgaaacagccacgccgggcaggaaaccggagcgaagaaaaaggggcagaggagacagggccc

SEQ ID NO: 65571 - RNA, 80 nt, Homo sapiens
ggccacagaggagaggccgggccgcaggaaacgcaagcccggaagcagaagaggagaacgccaagccaaccgaaaaagcc

SEQ ID NO: 65572 - RNA, 69 nt, Homo sapiens
ccgggccaacccggccgcccgacaccccaaccgggggccgagaggcagaggaaaaacaaaaagacgagc

SEQ ID NO: 65573 - RNA, 73 nt, Homo sapiens
ccgccccaccgccgaccaagaagcaagggggaacaggcaaagggcagcaccgaccaccgccgacaagggcagg

SEQ ID NO: 65574 - RNA, 41 nt, Homo sapiens
cagagccgggccaccagaccggcccaggaccccacaccccc

SEQ ID NO: 65575 - RNA, 80 nt, Homo sapiens
gcccagccaccacagaacacccgaggcggcgcagagagaagacagcaccggcaggggagaagaaacccaagcaccccgag

SEQ ID NO: 65576 - RNA, 63 nt, Homo sapiens
gcgaagcgagcgagaaggcacggagcgccgcggagcgcaggcgaacaagaggcgccagcgggc

SEQ ID NO: 65577 - RNA, 74 nt, Homo sapiens
agcgagggggggcgcgccggaaaccggagcgcgcagcagagagaagagggaggccgaggaccagcccggacaga

SEQ ID NO: 65578 - RNA, 56 nt, Homo sapiens
ccacaacgccggcacgaggagggccagacaaggggaacacaagaggagagaagggg

SEQ ID NO: 65579 - RNA, 77 nt, Homo sapiens
ggaaagccaaggaaaaacggagagccacaaaaaaggaagcgaaacagaaacagccgcccagcgaacagcagcacgga

SEQ ID NO: 65580 - RNA, 70 nt, Homo sapiens
ggacggaaaaaccagccgcacgccaaggaaacaggagcgcgccccccagaaccgcccacagcccacggga

SEQ ID NO: 65581 - RNA, 63 nt, Homo sapiens
ccgggagcgaggaaccagaacgaaaagcgccagaaaggagccaaggcaaagagggaccacggc

SEQ ID NO: 65582 - RNA, 70 nt, Homo sapiens
caaaggcacccgcgagcgcaacccaaggcaaggaacacaagcggcggcacaaagggggaccaaggcccca

SEQ ID NO: 65583 - RNA, 87 nt, Homo sapiens
ccgccccggaggagcgcgcaccggcacccacagccagcaggcaggaaaggcaccaaaccgggaggaaccacccagggaaaggaggcc

SEQ ID NO: 65584 - RNA, 78 nt, Homo sapiens
gcccggcccccaaccgcgccagcggagcgaacccgagagcgggagcgggcgggccagaggacagcagcggacggccgg

SEQ ID NO: 65585 - RNA, 80 nt, Homo sapiens
gcaacgagggaaagggacgaacgcacggacaacacggggcgaaccgaccaagaacaacacccagagggccaggagaaggc

SEQ ID NO: 65586 - RNA, 86 nt, Homo sapiens
ccaccacccaacaacccgacggcggaaggccccaacacccggagcagcgccacaagggacaggcaagcccagcagaggagcacgca

SEQ ID NO: 65587 - RNA, 73 nt, Homo sapiens
aggaaaggccaacaggccggcgccccggcaaggccaccgcagaagccacaggagaccggaggccaacggcaga

SEQ ID NO: 65588 - RNA, 69 nt, Homo sapiens
cggccggggggacgggcacggggacagacgggaaacgaaagaccggcgagaagcgcaaaaggcggaaac

SEQ ID NO: 65589 - RNA, 77 nt, Homo sapiens
gaacacagcgccgcccccggccaaaggaaccagggccaccgcagaaaggccgagagacgggaaagcgcggcgaggcc

SEQ ID NO: 65590 - RNA, 76 nt, Homo sapiens
ccgaacaaggccaccagagccacaaacgaaaacgacagagagcccacaggacccacagacggccaaaacgggaagc

SEQ ID NO: 65591 - RNA, 63 nt, Homo sapiens
cgccacccaggagccggagagacagggagcaagaggagcggcggggggcggaggagcagccca

SEQ ID NO: 65592 - RNA, 85 nt, Homo sapiens
gcgggggggaaggacgggcgggccggcgccggagacgagccgaacaacaaccagacgaccgaacggacagaccggaaccaagccg

SEQ ID NO: 65593 - RNA, 81 nt, Homo sapiens
ccggccggagcgggaggcgggccagcgacaaaaagaggaaaagcggccaggaccaccaggcggccacgggcccccagcacc

SEQ ID NO: 65594 - RNA, 75 nt, Homo sapiens
cgcagaacagcggggaaacacaggcaagggaaggccagacacagccagaaggacccaaacccaggaaggaaacag

SEQ ID NO: 65595 - RNA, 70 nt, Homo sapiens
gggggaaaacgaagaacagggcgaaaaaacgagaaagaaagcaggagaccaagaaggaaaaaggcaaccc

SEQ ID NO: 65596 - RNA, 80 nt, Homo sapiens
aacagcaacagcaagaagaagagcccagcagcacccgccccccagccaggaccccgcaccgccgagacccgcgagaccgg

SEQ ID NO: 65597 - RNA, 84 nt, Homo sapiens
cgggaccaggcccgggggcggcggccacgccaaggacgggccagcagcgaaaaaccacgcggaaaggaagagcggacggcgagc

SEQ ID NO: 65598 - RNA, 85 nt, Homo sapiens
aagacgagcccagcgcaaccccaagcgcccaaagacaaaaggagccacggagaaagaaaaaagaaagaagcccgaaccggaaccg

SEQ ID NO: 65599 - RNA, 65 nt, Homo sapiens
aacgcagggaaaagaccgcaccccgggccaggaaacaagacaagggaggcgaggacggacaaaag

SEQ ID NO: 65600 - RNA, 62 nt, Homo sapiens
gccgccgccacggaaagcgaaacccgcccggaaacacaaacccgaggaagaagagaaaacaa

SEQ ID NO: 65601 - RNA, 58 nt, Homo sapiens
aagcagaaacagacaggaccacgcaagggcggaaaaacaaacgagccaccagcgccca

SEQ ID NO: 65602 - RNA, 79 nt, Homo sapiens
ggaaccggcgcaccacgggcccgcccggcacacaccaccgagcgggccaaccacgagcaaacagggaagacgggccaaa

SEQ ID NO: 65603 - RNA, 41 nt, Homo sapiens
cggaggaccacgccggccggacgaaaaggggaaaggagaaa

SEQ ID NO: 65604 - RNA, 70 nt, Homo sapiens
cggaggaaggaagaagaggacgccgggcgcgcaggggggcaacaacgccggccacacggggggggaggga

SEQ ID NO: 65605 - RNA, 60 nt, Homo sapiens
acgagcggagcccgccggagagacagacacggaccagcgaagccgcccgcaggcggaccg

SEQ ID NO: 65606 - RNA, 76 nt, Homo sapiens
cccacccccggccgcccccccaccgccagggacccaccccgggggagcaagaaggcaaaacccaaggcggggcgcc

SEQ ID NO: 65607 - RNA, 76 nt, Homo sapiens
aaacccacccgacgaaacagacccgaagagaagcccaaagacaggaagaaccgagagggacaaacggagaagccaa

SEQ ID NO: 65608 - RNA, 61 nt, Homo sapiens
cgaagacaaggcggccccgccccgggcccgaggaggaacagaggaagcccaaaaggaaaga

SEQ ID NO: 65609 - RNA, 34 nt, Homo sapiens
cggccacggaaaaacgacaggacgacacaaacac

SEQ ID NO: 65610 - RNA, 79 nt, Homo sapiens
ggaagaagaagaagaagaaaaagccaaccagagcccaaccgcccagacagcccagcccgggccagcagcccggcccgcg

SEQ ID NO: 65611 - RNA, 78 nt, Homo sapiens
cccggcccgcagcccccgccggccgcccaacaccgaacacccggcggagaaaccaccacaaacacgaggccagcaacg

SEQ ID NO: 65612 - RNA, 84 nt, Homo sapiens
gggagagagacaccaccccaagaggagaagcagcaagagggcgcacccacgacgcgcacaccaccggcagaccggcgccacagc

SEQ ID NO: 65613 - RNA, 81 nt, Homo sapiens
cggacggcgcgcgcccgaggcgaggaggagcgcggcggaaacaggcaccagcagaccacacaagaaaagcgaaccacacca

SEQ ID NO: 65614 - RNA, 57 nt, Homo sapiens
aacagagcccagcccagaaaaggcacagcaagcaacccggccgaggggggcaccccg

SEQ ID NO: 65615 - RNA, 65 nt, Homo sapiens
cagcccacacaaccaacaagcacaaaacgccgggagggcacgaaagaaacagaaacacaaagcca

SEQ ID NO: 65616 - RNA, 56 nt, Homo sapiens
aggcagagacagccaacaaaaacaggcgagaaggcggaggggggggggacacggag

SEQ ID NO: 65617 - RNA, 74 nt, Homo sapiens
cgaacaagcccgggaggggccccaaaggaaggccgggaccaggaaaacgaaaaacgggcagggacaaggcgcgc

SEQ ID NO: 65618 - RNA, 67 nt, Homo sapiens
ggacagaacaggaccggaaagggggcagcacgccgaaggagagaccagacaacaggccagggaaggg

SEQ ID NO: 65619 - RNA, 78 nt, Homo sapiens
cggggacaggacgacggcagaccacagaagcgccaagccggccaaggccagaccagaaggagcacaggcggaggccgg

SEQ ID NO: 65620 - RNA, 75 nt, Homo sapiens
agcggacaagaagaagacagaacgcccccaccaccgcaaacaacaagcagaccggaagaccgacggaagaccaca

SEQ ID NO: 65621 - RNA, 70 nt, Homo sapiens
aacacagggcaaagaaacggcaacagccggacccaacagaggcagaggagccaccgggcccggccaaagg

SEQ ID NO: 65622 - RNA, 82 nt, Homo sapiens
gcggcccccgcgcacaagccaagaggaacacacgggcgcagggaccgcgggcagcaggagcaggccgggcccgccagggcac

SEQ ID NO: 65623 - RNA, 87 nt, Homo sapiens
ggggaccaacacgcagcagccgcgccgccgccgcgggagccgcgcccgaaccccggcccgaacccaggacccaaagacaggaccacg

SEQ ID NO: 65624 - RNA, 116 nt, Homo sapiens
acaaggggcccgcaacccccagcagcacggggaaggaccggacccggcccgggagcaaagagccgaggaaacccagacccaagaccaaccgaggaggaggaggagggagacgcgcc

SEQ ID NO: 65625 - RNA, 85 nt, Homo sapiens
gcgggaggcaggcagccaggaagggaaaaggccgaggcacagcgggaagaccgcaaagacgacccgagacagggaacagcagcgc

SEQ ID NO: 65626 - RNA, 74 nt, Homo sapiens
gcgaacccccgaccgggagcccacggacggcggaaaacccgaagcagaagcccgacacaggcacaagaccgagc

SEQ ID NO: 65627 - RNA, 70 nt, Homo sapiens
ggagcgacagcacacgcagggaggagaaaaccggaagagaaaggccgggaagcaggaaagaaaaaaacaa

SEQ ID NO: 65628 - RNA, 77 nt, Homo sapiens
ggaccacagcgccgaaagcgccccggaagaccgcgccgccagccgcaaaagcagacacacaccaaacaaggggaaaa

SEQ ID NO: 65629 - RNA, 92 nt, Homo sapiens
gcgccccgggcccacgcgaagccgaggccccgcaacggcaagcagacaacagggagaccccacgggacaccagcccaccggccgaggcgggg

SEQ ID NO: 65630 - RNA, 89 nt, Homo sapiens
cgggcccgggggccggggccgcgcgcccgggccgcgaggacgaggcggcgccgccgggcgggagaggggggcgggccgagcacccgcag

SEQ ID NO: 65631 - RNA, 81 nt, Homo sapiens
cggacggccaggagaacaaggcacacagagacagacaaagcagccggccaagaacggcggcagaaagcaaaggcagaaaca

SEQ ID NO: 65632 - RNA, 59 nt, Homo sapiens
cggacgcagcacagggaccccaaggggcagacacggaacacgaccagccaccagggacc

SEQ ID NO: 65633 - RNA, 55 nt, Homo sapiens
cggagaaaaggccaagaaggcagcgccacgggacagccaacaccagaccgagccc

SEQ ID NO: 65634 - RNA, 77 nt, Homo sapiens
aacaacagagcaaccccaggcaaagaaaaacaaccaccagcgagcaaaaaggcaaagaccaagaccaccaagaagcg

SEQ ID NO: 65635 - RNA, 73 nt, Homo sapiens
gacagaaaagccggcagcaaggaaaagaccagaagggccagggcaccagagaaagcaccagagggaagaagga

SEQ ID NO: 65636 - RNA, 75 nt, Homo sapiens
ccgagggagggccgagccagccgcggccggaggagcccccaggccgcaaaacgggcgggggcaaagaaccacaag

SEQ ID NO: 65637 - RNA, 80 nt, Homo sapiens
gagaccccgaaaacggaagcgcagggagaaggaagaggggaaaaggggaaaagagacgcaaaccacgaggacagagaaga

SEQ ID NO: 65638 - RNA, 81 nt, Homo sapiens
gcccggagcaggaaaaacacagagacagacggcggcagggaagcccaccggccacggcagaaggaaacaacgaggggaggg

SEQ ID NO: 65639 - RNA, 72 nt, Homo sapiens
cacggccacgcagaggaaacgacaggagacacaagacggaggggcgagcgacgcggaaagaagacccccaga

SEQ ID NO: 65640 - RNA, 73 nt, Homo sapiens
cgggccggcgagcgcagcgcgaccgggaggcccagggccccgggcgcgggagccagccgaagaaaggaaaaga

SEQ ID NO: 65641 - RNA, 70 nt, Homo sapiens
ccggccagcgacgcaccgagaaaggaaggaaaaccgacgaagcggggacgggaaagagggcagaagcagc

SEQ ID NO: 65642 - RNA, 88 nt, Homo sapiens
gagcccagccgaaggagaagggggccggggccaaagcgaccaaccccccaccgcacgcagggggccccccgcccggggcaagaccaca

SEQ ID NO: 65643 - RNA, 70 nt, Homo sapiens
gagggcagggggcagggcggcagagagaaagggcgcaaaaagaaagaaaacaaaagccagccaaaaacag

SEQ ID NO: 65644 - RNA, 76 nt, Homo sapiens
gagaacagaggcgagagcggcagcagcaccagcccaagagaaggggcgggcacaagggaagacagcgcccgggacc

SEQ ID NO: 65645 - RNA, 75 nt, Homo sapiens
gcgccggcgcagcggcggggccaggcggggaccgcgccaagaggcgaggccgagacaaacagagcgcgcacaccg

SEQ ID NO: 65646 - RNA, 76 nt, Homo sapiens
ccacccccccagcggccgcagggccgacaagcggaccaagccagacccaagggcgcacgaagaagcaggagcccgg

SEQ ID NO: 65647 - RNA, 78 nt, Homo sapiens
aaaagcaaacgaccagacggcagggaggcacaaaggggaacacagaacaacaagaaccagccaccaggaccaccaggg

SEQ ID NO: 65648 - RNA, 96 nt, Homo sapiens
aaaaccaaaaaaccaagaacggagaacgaaaaacccaccagcaggacagcccagaaacgcaggaccggccgaaaaaacgacaagaaggcccaaaac

SEQ ID NO: 65649 - RNA, 76 nt, Homo sapiens
acggaacaggccggcggccccaccccccagcggaagccgacaccggaacagaaacacaaacagggaccaccccaaa

SEQ ID NO: 65650 - RNA, 82 nt, Homo sapiens
cgggagaaggcgcaacgcggcgcgagccgaggaaggacagggcgggaggggccaccgccaggccgcagcggccggagggagg

SEQ ID NO: 65651 - RNA, 67 nt, Homo sapiens
gccaggggacacaacacaagaccaagccgacacagacccagccagccaccaccgcccaccccacagg

SEQ ID NO: 65652 - RNA, 79 nt, Homo sapiens
agagcgccgaccgggcggcgaggaaggcgccccggccaacaggcagaccacagaaacgaagccgggagaacgcccgggg

SEQ ID NO: 65653 - RNA, 73 nt, Homo sapiens
cacccccagcagcacacagggaaacacaaagaagacaccagaagggccagcaccacgacaacacggcgacaga

SEQ ID NO: 65654 - RNA, 77 nt, Homo sapiens
gagccggacagcgacccccgcaaggaaaggcccagaaaggggcgcccaagaagccaaaagggaagcacgagaagcag

SEQ ID NO: 65655 - RNA, 95 nt, Homo sapiens
gagcccaaggaggcccgacagccaagggaacgccgggcagaccacccgccagcgaagcggaccggacagcacccaaccccaacagagacacggaa

SEQ ID NO: 65656 - RNA, 73 nt, Homo sapiens
ggaaggcccgcagcacacaccagaagaagaagaaggggcacaaaggcaagccacagccaggaaacaccagccc

SEQ ID NO: 65657 - RNA, 37 nt, Homo sapiens
cagagagaccccaagaacccgagaaaccgagaccaag

SEQ ID NO: 65658 - RNA, 56 nt, Homo sapiens
gccagaaccaaacagacgacaaagagcacgggggagagagacaacaggaaaaaggc

SEQ ID NO: 65659 - RNA, 59 nt, Homo sapiens
gaacaaaggagagaggaccacccagaggagcaacgagccaacccgggaagagccacacg

SEQ ID NO: 65660 - RNA, 76 nt, Homo sapiens
ccaggcagcaaaaacaagcagaaagccaacaggcagaccagagacagcgccacgcacccggggagcagaccacgcc

SEQ ID NO: 65661 - RNA, 60 nt, Homo sapiens
gggcgcgagcggggacaaagcaggagaagccaggcacccagggaagccaaggaggaaacg

SEQ ID NO: 65662 - RNA, 66 nt, Homo sapiens
gcgggcagcggggacagaaccccaggcccaggagacggagaggccccgggggcgccgagggcacaa

SEQ ID NO: 65663 - RNA, 71 nt, Homo sapiens
ggccgagagccgcccgggccagcggccgcgcacccccggccggaggcaccagccggccaggcgacgagaga

SEQ ID NO: 65664 - RNA, 82 nt, Homo sapiens
caaagcgggagagacggaccagaccagggccgagcacagaaaccaggcccaagaaggaaaaaagaaaacaaaaacgggaggg

SEQ ID NO: 65665 - RNA, 83 nt, Homo sapiens
gaggaggccggcgcagccccaagacagagcgcacccggcaggcgcaacagagcgccggcggacagggcagaccgccagcagca

SEQ ID NO: 65666 - RNA, 72 nt, Homo sapiens
gaggcgcccggcggagcagaggaaccacacgcgacagaccggagagaacagaaaaaaagcggcccgggacca

SEQ ID NO: 65667 - RNA, 69 nt, Homo sapiens
aaagaccccaccaaggaggcaggacgaggggcaaggaacaggacacggaggagaccccgcgcaggaggg

SEQ ID NO: 65668 - RNA, 83 nt, Homo sapiens
cgacacaccacggagaaccagaccggcgacccgcgacgccgagcacccaggcgacgcccaccaaggagaaacaggcgccaaac

SEQ ID NO: 65669 - RNA, 40 nt, Homo sapiens
acccaccagacaccagccgggcacacagggaccaagaagc

SEQ ID NO: 65670 - RNA, 50 nt, Homo sapiens
gaagacgcagaggaaacggcagcagaacgcgccaccaggggccagaaccg

SEQ ID NO: 65671 - RNA, 78 nt, Homo sapiens
ggcacccgccgccggacaacaccgcccccagccgggcgccagggccaaggcggcaacgggaaggccggcgggcccccc

SEQ ID NO: 65672 - RNA, 70 nt, Homo sapiens
gacaccaccgacaacacccaaggcaacagagggaccaaacaacaaccccgagagagacggaaacacaagc

SEQ ID NO: 65673 - RNA, 81 nt, Homo sapiens
gacagaacaaaacaaaaagcccgagcccaaaccccgccaccacaagggaaaaggacggaggccaagcaacagaggagaaaa

SEQ ID NO: 65674 - RNA, 66 nt, Homo sapiens
accaaaccggaaaccgccaaaaccccccacacaccccgccggggccaaaaccacaccaaaaccaag

SEQ ID NO: 65675 - RNA, 88 nt, Homo sapiens
cggcgacacagcaacacggccgaaaccccaagcaccaccaccaccccggaaaccaggcagggggcagggcgaccacggagccccccag

SEQ ID NO: 65676 - RNA, 75 nt, Homo sapiens
ccagaagccagcccccaggcggaacgcccgccccgcagagagcggcggagaaaccaccacaaacacgaggccagc

SEQ ID NO: 65677 - RNA, 79 nt, Homo sapiens
ccgcaggcggggaggggcagcgggcgcagcggcggccggaaccgcgcgcagcccgggcccacagacaagccgccccccc

SEQ ID NO: 65678 - RNA, 79 nt, Homo sapiens
cgagccaccgcaaagccacagcaccaccagagccagcgcgcggaggagccgaggaaggcgccaccacgaccgccgaacc

SEQ ID NO: 65679 - RNA, 61 nt, Homo sapiens
gcacgcccggagacgggacacaacgcacggacaggccaagcaaggggcggacacaaggcgg

SEQ ID NO: 65680 - RNA, 45 nt, Homo sapiens
gcccccagccagggaacgccgagacgacccaacccggcacgggag

SEQ ID NO: 65681 - RNA, 97 nt, Homo sapiens
ggaccacgccacccccacggcccacggcccggggagacaccagcagcgaacacggagccaaggagaaccgaaggacaccagaccaagcgcaccacca

SEQ ID NO: 65682 - RNA, 81 nt, Homo sapiens
ggcgcgcccagagggcggagcaccgaccgacggaccgcacgccaccgggcaccgcccacccagcaggacggcgcgggccgc

SEQ ID NO: 65683 - RNA, 79 nt, Homo sapiens
gaggagcgaaggcggcggcagagaacgccgggccagcgagcggagaagagagcggaaagagcaacaggacaagaaccca

SEQ ID NO: 65684 - RNA, 60 nt, Homo sapiens
ggggccgccgcgccgccggacgacaccccacagcagaagcccggggcggcgacggagcac

SEQ ID NO: 65685 - RNA, 105 nt, Homo sapiens
cgaccgcgccccgccgcccgccgggcgcccgccagcagcgggccgcgccgcgcccagccgcccgcacggcaaagcaaagaagagccgcgcagaacagaaggacag

SEQ ID NO: 65686 - RNA, 76 nt, Homo sapiens
ccccccagggccaggcgccgccagaacgagcaagcccccaacaccagcaaccccgggggagacaagccggacgggg

SEQ ID NO: 65687 - RNA, 82 nt, Homo sapiens
ggaaccggagcggaaccccccacggaccgggcggagaaaccagccccccggaagggaccacagaccagcacgccggcgccac

SEQ ID NO: 65688 - RNA, 73 nt, Homo sapiens
gcggagcggagcgcggaagggccaggacggggggcccggagcgagacgaggacggcaaccgggggaaagagaa

SEQ ID NO: 65689 - RNA, 67 nt, Homo sapiens
ggaaagccaggaaaaacacacgcagacgcagccgccggagggcgcggagcggggaccgcacaccgcc

SEQ ID NO: 65690 - RNA, 74 nt, Homo sapiens
cacagcagccagggggcagacgcccgcagcagcgccaaagagcagggacggggaaaacaccgacgccggccggc

SEQ ID NO: 65691 - RNA, 78 nt, Homo sapiens
acagccagaacagggacgccagccgcagaggaagacccgaaacacaagccgagaagaaaaaaggaaccaggagagcca

SEQ ID NO: 65692 - RNA, 91 nt, Homo sapiens
ccccgaaaaggggcacagccgagagaagacggaggacgagcgcggggcggcaccggaggaggagaaccgagaaacgaaggaggcccaacca

SEQ ID NO: 65693 - RNA, 71 nt, Homo sapiens
aaaaaaacaagaaccacggcacgaaagggaagcggaggaggaagaagcaaagggggccgcgcccacccgaa

SEQ ID NO: 65694 - RNA, 85 nt, Homo sapiens
cgcccccgcgccccgcaccagagcggggcaccgagccggcagaaaaaaggccaggagacaaccagaccccggggcccagcggagc

SEQ ID NO: 65695 - RNA, 77 nt, Homo sapiens
acggagccaaaaaaagaccagcccaaaaaagcgcggagcccacgggacaggacgacaggacgacccggacaaccacc

SEQ ID NO: 65696 - RNA, 81 nt, Homo sapiens
cagcaaggccagcacagccccgcgacaaccaggaaagaacaagcaccggagagagagcaccagcggcaagcgcccacccag

SEQ ID NO: 65697 - RNA, 83 nt, Homo sapiens
cagacgagcggaggacacccaacccggcaccaaagacaaagagcagggagaacacaaaacaaagccaagaaaacgagaggcgg

SEQ ID NO: 65698 - RNA, 69 nt, Homo sapiens
aaggcaacgcgccgcaaaacagaacgcgggccgccccccgggcgaggcagagacgccaggggcaaagcg

SEQ ID NO: 65699 - RNA, 40 nt, Homo sapiens
cagagcgggccgacccgaaagccacagaacaccgccggcc

SEQ ID NO: 65700 - RNA, 78 nt, Homo sapiens
gggaaagcagaccgcagaggaagaaagcggaaagagcgacaaacaaagaaagacggacggaaacacaaagaagacacc

SEQ ID NO: 65701 - RNA, 90 nt, Homo sapiens
gcaccgccagcacgcgccgccccgcgcgcgagccacgcagcccccaggccagggcaggacagcagcccgcaacaggccggccagcccccc

SEQ ID NO: 65702 - RNA, 74 nt, Homo sapiens
gaaggagggcccaaaggccccagacgagacggaaagagcaagaggagccaggagcacggggggaacaagaccgc

SEQ ID NO: 65703 - RNA, 77 nt, Homo sapiens
ggaaagaagcaacagagaggggagaacccacaggggaccagaagccaggagaggcgccgggacgggcgcacgccacg

SEQ ID NO: 65704 - RNA, 89 nt, Homo sapiens
aagaaaacgcaaaaaaaagcaagaggcaggccaaagagaggacaagcccccacgaggaaaacccccccaccgaaggagggccccacggg

SEQ ID NO: 65705 - RNA, 64 nt, Homo sapiens
agacggcggcagcgcggacaggggcagagcccacgaagcagaaaaggaccggccggaaaacaag

SEQ ID NO: 65706 - RNA, 56 nt, Homo sapiens
aggggccagcggagacagcaagacccgggccagccgccggaacccgaacgggcggg

SEQ ID NO: 65707 - RNA, 73 nt, Homo sapiens
ccgacgacccggaccaagaaggggaggcccgcggcagccacacgcccccaccaccaaccacggcaacaccgga

SEQ ID NO: 65708 - RNA, 77 nt, Homo sapiens
ccaggcaggagccaccggacgagagccagagaccacgggcagcggaaaaaagccaccgaagaaaaaagccgccccac

SEQ ID NO: 65709 - RNA, 73 nt, Homo sapiens
caaagggcagaaggaggccgccgccagcggaagacgcgccaccggagcggaggccccgggggcgccgagggca

SEQ ID NO: 65710 - RNA, 76 nt, Homo sapiens
gcagacggggggagggcccgaccaggcccggggagccaagcagcccggaggagacgacggcccgggacccgaaggc

SEQ ID NO: 65711 - RNA, 79 nt, Homo sapiens
cgcgcgaggaggcaggagaagaaagccgaccacacgaaggggcagaagagcacaagacggaagagaggagcgaccagac

SEQ ID NO: 65712 - RNA, 76 nt, Homo sapiens
acgagccagggcccaggcgccccagggccgccccgcacagacggacagaagagcggggggacggcaccaaggaaca

SEQ ID NO: 65713 - RNA, 107 nt, Homo sapiens
acgccgaccagcgacacgcggccgcggagaccaccgcggcgcggcagcgcgcccgaggggaggggcgaccccggggcccggccagcacgaccgaggaggggcggaca

SEQ ID NO: 65714 - RNA, 73 nt, Homo sapiens
gacgacgcaccgcaggcagacaaaagggccaaagaagggagagaggaggagaagagaggaaggaagaggaaga

SEQ ID NO: 65715 - RNA, 76 nt, Homo sapiens
cgggccgccggcccgcggcgaggcgccaaaccccaccgccacgaaccgagaaaccaagacccgaaaccagccccca

SEQ ID NO: 65716 - RNA, 69 nt, Homo sapiens
accggccgcgagagggagaagaaaccaagaaacagcggaagcaaaaacagaacgggagcagagagaaag

SEQ ID NO: 65717 - RNA, 65 nt, Homo sapiens
ccgacacgacgccgccggcaggcccgcgcaccaggcagcgggccccaggccggggcgagcgggcc

SEQ ID NO: 65718 - RNA, 74 nt, Homo sapiens
cgcgggaacggcgcggaaggcgaaaagaccagagccgagaagaacacaaaccaaagccgcccacacccagaaaa

SEQ ID NO: 65719 - RNA, 69 nt, Homo sapiens
cccagaaacaagcacacaaagaacggaaggaaccaggaccgaagagaacacgggaccccggaagagggg

SEQ ID NO: 65720 - RNA, 72 nt, Homo sapiens
acggggaggacaaccgcaggacccagcagcgcagcagccaaggagacaccccagcggaacacgggcaacggg

SEQ ID NO: 65721 - RNA, 77 nt, Homo sapiens
ggacgagggccgaccggagcccaggcggccccagacgggggaaccccaagcggcaaggagcaccaggaaagcaaaaa

SEQ ID NO: 65722 - RNA, 61 nt, Homo sapiens
gagaacgaaggcggacagcccgcgaaaccaggcaaggagccggcagcgcccgagggagcaa

SEQ ID NO: 65723 - RNA, 72 nt, Homo sapiens
ccagaagagcaggaaaggagggcaccaaccacaaaggcaaccagaggccaggccagagacaccccaagccgc

SEQ ID NO: 65724 - RNA, 73 nt, Homo sapiens
gaaacaaggagaaacaagccaaagaaagaacaggccgcagcacaggagacgaacacaaaggggcagcaacacc

SEQ ID NO: 65725 - RNA, 61 nt, Homo sapiens
cgaagaagccgagggccccgaaggaggacgaggaaggcgcgcagccgagagcaccagggga

SEQ ID NO: 65726 - RNA, 76 nt, Homo sapiens
ggaagagacaaaaaaaaagccagaagaaggacaacgacaaaaagaaggggaccaaaaaccagcccacacagaagaa

SEQ ID NO: 65727 - RNA, 80 nt, Homo sapiens
aaaaacccagcgaccgacgaccgacgacgcagccagagcagcaagaggccaaggggacgacggccacgggcccgggaagc

SEQ ID NO: 65728 - RNA, 80 nt, Homo sapiens
cccgacagcaagagcccagaacgggacaccaaggacccagacggcagagggaagaggaaagcacaaagacacccaacccc

SEQ ID NO: 65729 - RNA, 50 nt, Homo sapiens
caggaacaggggggaccaaggggaggagggaaccaggcgggcagcaaaca

SEQ ID NO: 65730 - RNA, 73 nt, Homo sapiens
acagcgccgaggcccagagagaccccagaaggcaccaagggagggagagaaaagaaaaaagaagcaaccagga

SEQ ID NO: 65731 - RNA, 60 nt, Homo sapiens
ccccagggcaagccccgcccggccaacaaggaacggagggaaagcgacaaacaaccaacc

SEQ ID NO: 65732 - RNA, 80 nt, Homo sapiens
gcagacccaacagcccgcaagccagcaagaggcacggaacagcggaacgggacaggaaacagagccaggcagcccacaaa

SEQ ID NO: 65733 - RNA, 82 nt, Homo sapiens
gggggaagcagagcgcacaaagggaaagggcgcggggcacaagcgggccagaagcacacccgcccggcgcgacaagggccag

SEQ ID NO: 65734 - RNA, 73 nt, Homo sapiens
ccgaggccgcccgcaccgaggagagaggccaggagaaggccgggcccccccaccagaaggccagcacacgaga

SEQ ID NO: 65735 - RNA, 57 nt, Homo sapiens
gagacgcaaagcagcagcagcaaacccacaaagggagaggcgccaccccagcggcac

SEQ ID NO: 65736 - RNA, 71 nt, Homo sapiens
caggagcgggaaaaccgagcgcgggagaagagccacgcagccaccaggcccgccgccaaagcgcagggaac

SEQ ID NO: 65737 - RNA, 77 nt, Homo sapiens
acacagaccaggaggaccaccaaaggagccagcgcggagcaggcgcagagcaggaccgcaagcaggccggcccccag

SEQ ID NO: 65738 - RNA, 69 nt, Homo sapiens
agaagacaaagaacagccacaccagggcccacacaacgcaaggaaagaggacccaaagacaggaccacg

SEQ ID NO: 65739 - RNA, 84 nt, Homo sapiens
aaaccacggaacaaggaccagaccagggcggagaccaccaggggagaggcacaggaggccccccaggccacccaggaccagcgg

SEQ ID NO: 65740 - RNA, 73 nt, Homo sapiens
ggagaagacaaccaggcaggggggccaaacgcgaggcaagagagcaagaccccagaggaaaggaaaagagggg

SEQ ID NO: 65741 - RNA, 60 nt, Homo sapiens
accccaccggacccggaagcagggggcagacccaaaggaaacgcacgaaagaaacaggag

SEQ ID NO: 65742 - RNA, 93 nt, Homo sapiens
agacacaggaaacgagaagcccaaaacaacacagagcggagagaggccgcagaagggcagaagaacaggccgggcacaaaaagccaaccaacc

SEQ ID NO: 65743 - RNA, 77 nt, Homo sapiens
aagcacaaagcacaacaacgcagaaagcccacaagagcagaacagaaggcgcacaaaggaaagagaagcaaaaccac

SEQ ID NO: 65744 - RNA, 77 nt, Homo sapiens
ggccagagaacagaaacggcaaagggccggggacaccaggggcccacaaaccaacaacgaaaaaaggggacaacacc

SEQ ID NO: 65745 - RNA, 64 nt, Homo sapiens
caccacaaaagcgaaagggcacaccacagggcagaaagaaagcaggaccagggggagggaccaa

SEQ ID NO: 65746 - RNA, 49 nt, Homo sapiens
cgccccagcggacacaaaccagccgagaagaaaccgcaagaaagaaagc

SEQ ID NO: 65747 - RNA, 69 nt, Homo sapiens
acagacaccaagggcgcgcgacacgaacaccgaggaggccaagcgacccacaaccgaacacagaagacc

SEQ ID NO: 65748 - RNA, 69 nt, Homo sapiens
aggaaggcgccggaaaggaaccagaaaggacacgagaaggccagccaggaaagcgggagcgcgggagca

SEQ ID NO: 65749 - RNA, 55 nt, Homo sapiens
ccggaggggaaccggaagggacacgcgaacaggacagaccaaggcggacagcggg

SEQ ID NO: 65750 - RNA, 60 nt, Homo sapiens
cgcgcaccagggccggagacagggagcacaaaagccgaggcccgggggaagcgcacaaag

SEQ ID NO: 65751 - RNA, 70 nt, Homo sapiens
gccgccgagcagccgccagccccacggacggacgccagccccacaacagccagaggcagaggcagcaggc

SEQ ID NO: 65752 - RNA, 73 nt, Homo sapiens
ggacggggcggggggaacgaccaagggaacggaagccccagcccgcgcgagccaggcgcccacaggagaacag

SEQ ID NO: 65753 - RNA, 71 nt, Homo sapiens
gcacaggccacagccagccagaagccgcagagcagcagaacagacagaaacacgaaaaccagacagcccca

SEQ ID NO: 65754 - RNA, 72 nt, Homo sapiens
aaaccacaccaaccaagaagagccagaaggaggaagcaccggagcaaaacgggaagagccagaagcaaagag

SEQ ID NO: 65755 - RNA, 80 nt, Homo sapiens
gaaaaaggagcaggcgccagcaaagagaagggaaccgaaccaaggaagccggcgagcaaggggaagcccagccgcagacc

SEQ ID NO: 65756 - RNA, 57 nt, Homo sapiens
aggggaccaggccagggcgcacccacggcagagagccaccggcagaagagccaacga

SEQ ID NO: 65757 - RNA, 71 nt, Homo sapiens
cgcgagcgacaacgggacgggaaacggggaagcaagagccggaaaaagggaaacggaaaaacccagagcac

SEQ ID NO: 65758 - RNA, 67 nt, Homo sapiens
aaggagacacccggacggcaagcagagcgggggcggcgaaagaagacaggcagaggccggcacaggc

SEQ ID NO: 65759 - RNA, 84 nt, Homo sapiens
cggagaggaggcagacgaggcagcaggcgcggcggcggcacaccccacaagacccgccaagagggcgacaagcaagcgagaagg

SEQ ID NO: 65760 - RNA, 56 nt, Homo sapiens
cacaggcggcgccccggaacgggagcgcaggaccacacacccccaacacgcggcgg

SEQ ID NO: 65761 - RNA, 71 nt, Homo sapiens
ggggcgaggcccgcggggccaggagcaaacggggacagcgccgaccggaacagggaccacggaagcccagg

SEQ ID NO: 65762 - RNA, 56 nt, Homo sapiens
cccgggagcgggacacagaagcggaacaagacccagaaaaaggcaaagcacaagag

SEQ ID NO: 65763 - RNA, 81 nt, Homo sapiens
ggagagcaacaaagccgacccaacccaagggccaaagcggcgcacccgaggaggcaaggacccagcaggcccgcgagacag

SEQ ID NO: 65764 - RNA, 67 nt, Homo sapiens
agaaaacggaggaagacccagaacagaaagaggggaccccagcggaacacacccaccacaaggcaga

SEQ ID NO: 65765 - RNA, 84 nt, Homo sapiens
ccgcgccgccccgcgagcacagagcccgccgccgaccgccgcccgccacacccgccgccaggcccaggaccgcagcccagccac

SEQ ID NO: 65766 - RNA, 78 nt, Homo sapiens
cagaccgccccggggacagccagccccgcggaccagaccaggccgcggcccggcaggacccgggccgcgcgagccgga

SEQ ID NO: 65767 - RNA, 54 nt, Homo sapiens
gaaacaagcggcaggaaccggccgcagcgcaaacgagagaaagaagggacccag

SEQ ID NO: 65768 - RNA, 48 nt, Homo sapiens
cgaccgcaacagaacggacccgaggacccaagaagaccagccgaagcc

SEQ ID NO: 65769 - RNA, 74 nt, Homo sapiens
gaggaacgggacaaagcggccagggagcacagaagaggcaaggaggccacggggccgaagacaccaaccgggca

SEQ ID NO: 65770 - RNA, 74 nt, Homo sapiens
agcaaccaaacacagaggaaaagggggaggccagccagcggcaagaaagccaggccgccccacccaccccaggg

SEQ ID NO: 65771 - RNA, 72 nt, Homo sapiens
ccggaggaaaccaagacagcccaaacgccccacgaccaggaccaagaacgcccagcccgcgggcaccggcag

SEQ ID NO: 65772 - RNA, 76 nt, Homo sapiens
ggacagagggagaagacagaaaaaaaaagcggccagaccacaagcgggaagcaaagccaaaagcgcaaacccagaa

SEQ ID NO: 65773 - RNA, 83 nt, Homo sapiens
gcaaggggagacaaaaggcacggcgacacaggcaagaacccgggagagacggccagaaaacagaggcaaaacagcacaggaaa

SEQ ID NO: 65774 - RNA, 72 nt, Homo sapiens
aaaagaccaaagaaggcaaggagagaagagaagaacagcacaggacagggcggagacacacaccaagaccaa

SEQ ID NO: 65775 - RNA, 81 nt, Homo sapiens
ggcgccggagcgccgcggggcccggacccggaggagcgcaccgccaggggaaacggagaagagcgagaaaaaggaacaaac

SEQ ID NO: 65776 - RNA, 90 nt, Homo sapiens
aggcggcgaccgagccggagcgccgacgaccaagaggcgaagagcacacaggacaggccccccagccaccagcggggcccacaggagggc

SEQ ID NO: 65777 - RNA, 76 nt, Homo sapiens
ggacggaaggcgagccgggcccgagacagaggggcaggagcagagagcgagccaaggcgacccaacagaggaagcc

SEQ ID NO: 65778 - RNA, 79 nt, Homo sapiens
ggagaggcagaaaaggagcacagagagcagagcaaaaacaacagggacgaaaaaagacagacgaagggagggaaggaag

SEQ ID NO: 65779 - RNA, 76 nt, Homo sapiens
aggcgcaagcgcccaaagccaagggaacaccggcaaggggaccggaagggaccaccagaaggacaaaaaccgagcg

SEQ ID NO: 65780 - RNA, 78 nt, Homo sapiens
cgaggagcgggggcgcaccagcaggaagacgagcgacaggcgacgaggaagcgggccagcggaagaacgagagagacc

SEQ ID NO: 65781 - RNA, 77 nt, Homo sapiens
gcggcgccgccaacgcgcccccgaggccaccgcacaaaggaagagcgacagcagagaccccaacacccagacagcgg

SEQ ID NO: 65782 - RNA, 73 nt, Homo sapiens
cgggaaaacgccggcgacgggccgccccgccgcgccgggccagggcccggcaggaaccggaacaacccacagg

SEQ ID NO: 65783 - RNA, 78 nt, Homo sapiens
gcccaaggaggcccagcgcagagaagcagaggagagggcaaggaagaaaccaccaaggccaaagcgagcaagagaacc

SEQ ID NO: 65784 - RNA, 82 nt, Homo sapiens
agaagcgagaaggggaaaagccgggacaaaaggagccacggagaaagaaaaaagaaagaagcccgaaccggaaccggagaag

SEQ ID NO: 65785 - RNA, 78 nt, Homo sapiens
cggcgcacggcggccgcggcgcggcgccacggagcgaagaagaagcgcaaacgccggcgggggaacgggagcggcgcg

SEQ ID NO: 65786 - RNA, 76 nt, Homo sapiens
ccagaacccgagccaagaggacacgaaacaagccaggacaggaggccagggcacgggaaggcagcacgaggcaaaa

SEQ ID NO: 65787 - RNA, 88 nt, Homo sapiens
ccagccaggaaaccccaaacacgcaggaagagacaagaagagcagaagaaaagaagaaagccaaaaaagagcacaagcaccaaaagca

SEQ ID NO: 65788 - RNA, 76 nt, Homo sapiens
cacccgccagggaccccgcagcacggggagagaggccggagcagcgcccccggacagagggaacaggcacgcccca

SEQ ID NO: 65789 - RNA, 72 nt, Homo sapiens
gggcaggcgcggcacgggagcggcgaagggcagcccgcgcagggcgagagcgacggacaaaccggcgaccac

SEQ ID NO: 65790 - RNA, 107 nt, Homo sapiens
agagaaccagagagcacaacacggggacgggccagcaagacacaggaaagagagccggagcaagaaaacaccagcgcggagagagacgggaagcgacagaggagcga

SEQ ID NO: 65791 - RNA, 74 nt, Homo sapiens
cgcgggccgcaggccgcgagcagcggacgccggccgccgcaggagcgaaggaagagccaggaaagcaaaagggc

SEQ ID NO: 65792 - RNA, 76 nt, Homo sapiens
acagcacgggagaaagcgcccacgcacgaaagcccaggccaaaaagagagaaccaggagcggcagaccgccgccag

SEQ ID NO: 65793 - RNA, 79 nt, Homo sapiens
cgcggcacaaccggggcgcggcagcgccgaccgagaccaaccgacgggaaaggggcccagacagcggagcagcgcaagc

SEQ ID NO: 65794 - RNA, 67 nt, Homo sapiens
agggacgggcccaggaagcagccaccccagccccaaaacagacccacgcaagaaggcagaagaagag

SEQ ID NO: 65795 - RNA, 48 nt, Homo sapiens
cagagcagacagaacagacaaggggacacgccagccagcaggcaacag

SEQ ID NO: 65796 - RNA, 75 nt, Homo sapiens
aaagccaaccggaaacagacaaagcgcccaacaacccgacaccaagaggccgaggcacaggccaagccccggaca

SEQ ID NO: 65797 - RNA, 75 nt, Homo sapiens
ccaaccgagcacagaaggacacgaggaggggacggcccgccacaggcacagacgaggagggaagcgaagcgggag

SEQ ID NO: 65798 - RNA, 70 nt, Homo sapiens
gggaccagcccaccccgggcccggggccagcagcaggagcacccacgggagaccggggggcaagaaaagg

SEQ ID NO: 65799 - RNA, 77 nt, Homo sapiens
gacccccaggggcgagagaggcagacaccggaaaaggcgagacaaagaggcacccccacggcggaccagcacagaac

SEQ ID NO: 65800 - RNA, 59 nt, Homo sapiens
agaggcagccaccacgggccgggcgggccaaaggagaaacaagaaggagacaacaacgg

SEQ ID NO: 65801 - RNA, 72 nt, Homo sapiens
gggcaacgggccgacagcacaggaaccaaaggcgagacaccacacaacagaggcagcagaccacaaaacaga

SEQ ID NO: 65802 - RNA, 76 nt, Homo sapiens
ccacagcagacccaacggcaaccgagacgaagacaagagccggaggagccaccaacagaagcaggagccaggaaac

SEQ ID NO: 65803 - RNA, 71 nt, Homo sapiens
caaaaacccgccggaagcagaagcgggaaaagaggagagcccaggcgagggcggaagagcgcgggagggga

SEQ ID NO: 65804 - RNA, 70 nt, Homo sapiens
caagggcaacacaacagcacaaacacaaccaggcggaagggagccgaaaggccggcgaaaggcagaagag

SEQ ID NO: 65805 - RNA, 71 nt, Homo sapiens
gaggggaaacgcacagaagcgaagaagagagaagggcacagaccaagacaacgaaccccggccaggacagg

SEQ ID NO: 65806 - RNA, 44 nt, Homo sapiens
agacagcgacaagaaaggggcagagaagacccggccagccaagg

SEQ ID NO: 65807 - RNA, 83 nt, Homo sapiens
gaaggcaggggagcaaaggccgagcggacggaagaacagccggacagaccaacgcaggagaagggggcacacgccaagggaca

SEQ ID NO: 65808 - RNA, 80 nt, Homo sapiens
gcccgcccccggccgccggcagcggccgcgccgcgccacccaaggccggggggggcacagagccccggaagacagccccc

SEQ ID NO: 65809 - RNA, 74 nt, Homo sapiens
aagcgagacccggcgaggagaaccacccgcaggggcgacagcaagaaggagccagcacagaggcaaaagaacca

SEQ ID NO: 65810 - RNA, 52 nt, Homo sapiens
agggccaaagaagggagagagagaaacagaaggacacaacaggaacaaggca

SEQ ID NO: 65811 - RNA, 84 nt, Homo sapiens
aggcgggagcgcggaaacggaaccgggaggcgacgcacacgagcggaggcgaagaacgaaggcagaagcagcaaggaccagaga

SEQ ID NO: 65812 - RNA, 54 nt, Homo sapiens
cacgggcggaaccccggaaccaggcgccaccagcaaaaccagagaaacaggcag

SEQ ID NO: 65813 - RNA, 67 nt, Homo sapiens
agggaagccagggcagagagaaacaagagcacccaggaaagaaccaggaagcacaaaggagaaggga

SEQ ID NO: 65814 - RNA, 70 nt, Homo sapiens
aaccaaggggcaggaggcaaccaaaccacaaaagaagcgccaggcgcgcagcacggagcgacccaaacac

SEQ ID NO: 65815 - RNA, 82 nt, Homo sapiens
cagcggaacagccaggaagggacgcacacaaagcccgaacagcaaggaaaagcccagaaggggaagacccccagcgaacaga

SEQ ID NO: 65816 - RNA, 101 nt, Homo sapiens
aggcggggggcgcagaggacacgaggcggcgggcggagacaggaccgcggcgagcaagcaggcaggagacaaagagggagaaaagagcgcacaaaaacccg

SEQ ID NO: 65817 - RNA, 79 nt, Homo sapiens
cagacccagacaacagcagaaacgcggaaggccagagcaaaggaggccagagcccaggccgaggcgaaaggagaaaacg

SEQ ID NO: 65818 - RNA, 85 nt, Homo sapiens
gcgcgccgggggccccgaacgacggggccgccccgcacaagcggagcacgagaaaaagcggggaaggggggcaaaaaaaagaagc

SEQ ID NO: 65819 - RNA, 86 nt, Homo sapiens
gcaccgggacggaccgagaccggaccgagagcggaccgagagcgcgaaacgcacgagaaggggggcgcacacgcagaaagaacagc

SEQ ID NO: 65820 - RNA, 57 nt, Homo sapiens
gacccgagaaaggagccagaaacagcgagccgacagccaagagaaaccaccaagagc

SEQ ID NO: 65821 - RNA, 82 nt, Homo sapiens
aagacggcgcggcaaccggggagcccgccaggcgaggaccggcccagccaggcccggggcagcggcgaccagagcagccccc

SEQ ID NO: 65822 - RNA, 73 nt, Homo sapiens
ggagaacgaacagacaagcacgccggagggaagagcgagggagagccccaggcaccaccgcacccacgccaga

SEQ ID NO: 65823 - RNA, 71 nt, Homo sapiens
gcccacccgaagcggccagccgcaggaaccgcagcccagcacgaccaggaaagaggcaagcagaaggaggc

SEQ ID NO: 65824 - RNA, 66 nt, Homo sapiens
gaaaggcgccccagccgcgcaaacagcacgccagcagaaccgcagagccagcacccagaggcaggg

SEQ ID NO: 65825 - RNA, 57 nt, Homo sapiens
ccgcgacgacaccccggggaggcgaggagagaggaagcggaagaaagaagagccaag

SEQ ID NO: 65826 - RNA, 106 nt, Homo sapiens
ccacggaaaaggaacagagccaaaccagaagaggagggcccagaagaaaaaggacagagaaaccgaggcgcgaaacaggaaggccacagcagaagagaaggagacc

SEQ ID NO: 65827 - RNA, 76 nt, Homo sapiens
ggacagacggggccacccccacacgcccccagccaaacaggcaacgcccaacaagggccggcgaccagggcagaag

SEQ ID NO: 65828 - RNA, 77 nt, Homo sapiens
ccagccagcggcaagaaagggaccggagaaggcaaccagaccccggaacaacacaacaggagcggaccagcaaggca

SEQ ID NO: 65829 - RNA, 85 nt, Homo sapiens
gcagaggggaagcggcggagcaggaggagggcgaggagaaggagaaaaccgggccaaaagagaagaaaagaggaacccaggaaac

SEQ ID NO: 65830 - RNA, 62 nt, Homo sapiens
ggaccgacagcaaaaagaacgaagcacacacagggacaaggaaggaccgaaggaagaggaag

SEQ ID NO: 65831 - RNA, 32 nt, Homo sapiens
cggcagaacggaaggggaaacggcaagagacc

SEQ ID NO: 65832 - RNA, 76 nt, Homo sapiens
gccaggccggggggggccgaggccgccggagaggagggcccgcccgcgagaaacacagcccaaagaaacacacccc

SEQ ID NO: 65833 - RNA, 71 nt, Homo sapiens
acagcacacgacacccccgggaccgcggagagaagcagcggacagcagagggagagcggcagaggacagaa

SEQ ID NO: 65834 - RNA, 72 nt, Homo sapiens
gaagaaccgcagccgagcggggccggccacaggcgaaaaaggcacagggcaggcgaggacacagccacggaa

SEQ ID NO: 65835 - RNA, 56 nt, Homo sapiens
aggacaaaacgagaagaggaaaaacccccggggcaaaaagcaaacgaaaccggcag

SEQ ID NO: 65836 - RNA, 65 nt, Homo sapiens
agaccacaacaggacacaaaaaggagagaagaccacaggccaaagacccaaagacccaagaagac

SEQ ID NO: 65837 - RNA, 74 nt, Homo sapiens
cgccaacgccgcccaagagagcaagaccgggcccacgaggcgagcgggaaagccgaagaaaggagggcgagagc

SEQ ID NO: 65838 - RNA, 88 nt, Homo sapiens
gaagggaccacaaacgagggccaagaggacacaggaccaaccaagaagcgaagaaaagagaaagaaacagacaagcgagagagcagcg

SEQ ID NO: 65839 - RNA, 65 nt, Homo sapiens
gcacgcgccggaccagggaccgaaggaacacagagacacggcgacggaaggaaggcgggaaacaa

SEQ ID NO: 65840 - RNA, 74 nt, Homo sapiens
ccaaagcagcggcgccggccgccccaccggcggaacccagcaagacccggagaaccaaccagaaccccgaggga

SEQ ID NO: 65841 - RNA, 61 nt, Homo sapiens
acaaaagggccaaagaagggagaaggcgagcccacacaaggggaaggacaagaaaacgaag

SEQ ID NO: 65842 - RNA, 73 nt, Homo sapiens
gcacagagaaggcagaagacagaggaaaagaggaagagggcgggaaggcagggaccgggcaagcggaaagccg

SEQ ID NO: 65843 - RNA, 84 nt, Homo sapiens
accgagaggaacgagcgcggaggagcaggggaacacacagggaggagggaccaggcaagaggacccgagggaggggcgaaggac

SEQ ID NO: 65844 - RNA, 71 nt, Homo sapiens
gaaaccaaagggaacgaaaagaccaaaacggacgaaaagagaaggaagaggaaaaagagccgaccgagggc

SEQ ID NO: 65845 - RNA, 40 nt, Homo sapiens
gagcacgcgcgggagcagcagacacgacgccacagcaaca

SEQ ID NO: 65846 - RNA, 64 nt, Homo sapiens
aaacacgcagaaagagaggggcgccacgcggggaagccagggcgagagaagagcagagcgcacc

SEQ ID NO: 65847 - RNA, 84 nt, Homo sapiens
gcacaccccacgccaggccgcccagcacggcaggagacgaggcacaggccagaaacaggagcgcgaggcgcacgaccaccaagc

SEQ ID NO: 65848 - RNA, 70 nt, Homo sapiens
aagaaaagaccagagagaagcaacaagcacgcaagaggaaaacccagcaacgacggaacgaggagaaaag

SEQ ID NO: 65849 - RNA, 72 nt, Homo sapiens
gcaccaaagcagcggcgccggccgccccaccggcggaacccagcaaggcaaaacgcgcgaaaaaacccggaa

SEQ ID NO: 65850 - RNA, 81 nt, Homo sapiens
gcggaccgcagcccgggccagccggggcggccggccaggaaccacccgaagggggaccgaacaaaaccaaaccacagacaa

SEQ ID NO: 65851 - RNA, 82 nt, Homo sapiens
acccaagacacccacaggaaacggaccgccagcagcccgagacaccgcccggagggcccgcggccaccagccacaggcaggc

SEQ ID NO: 65852 - RNA, 109 nt, Homo sapiens
gcgaccgagaacagaagcccgagacaggccaaagacacaggagaggaggcagcgcagccagggggggcggacgaagcaggacacaccgaacacgcacccgagccaccca

SEQ ID NO: 65853 - RNA, 86 nt, Homo sapiens
ccccacgacggcaagagacccgcgagcccggagaaaccggcagaccagaagcgcgggaagcacaagccagcagacgacaacaggcg

SEQ ID NO: 65854 - RNA, 62 nt, Homo sapiens
ccaacgacccacacaaaaagaaaccggacccggagaggaaccgcgcgcggccgaaccaagcc

SEQ ID NO: 65855 - RNA, 72 nt, Homo sapiens
agaacaggaacgggaaaaaccacgaaagaaaaacacgaccacgaaggaggcgaacagcagggagaaagacag

SEQ ID NO: 65856 - RNA, 84 nt, Homo sapiens
gacagaccgagggaggacaccggaccccggacgcgggaaaggcgaagccgacgagcccgaacagacgcaccagcgggaggaaga

SEQ ID NO: 65857 - RNA, 69 nt, Homo sapiens
gaggccgcgggcggcacggggcgcagaagagcccgggaaccaaacgccccgccccaaagcagacggcaa

SEQ ID NO: 65858 - RNA, 63 nt, Homo sapiens
cccaggacaccacgagaagcaagaccagagaccagagccacaaccagcgaagacccagagaga

SEQ ID NO: 65859 - RNA, 68 nt, Homo sapiens
cgggcggaggagggcaagcgaggggccgacgggacacccccaacacaggcgagagaaagagcccacgg

SEQ ID NO: 65860 - RNA, 72 nt, Homo sapiens
gagagccaacggcaccaccccccaaccaggagacaccccgcggggaaggcaggaacggagccggacccgcgg

SEQ ID NO: 65861 - RNA, 71 nt, Homo sapiens
aaccggaccgggcccggaggagcgaacaaggcgacaacacaggacggggaaagaccgaggcaccgagagca

SEQ ID NO: 65862 - RNA, 74 nt, Homo sapiens
gaggccacccccaaagaaaaggaaaggacagaagccacaaaacacggcacgccagacacaacgagggccagccc

SEQ ID NO: 65863 - RNA, 72 nt, Homo sapiens
cgaacccacaggggagaaacgaagccaaagacgcccccgggccaaacggcagcaaaaacagacagaaaggga

SEQ ID NO: 65864 - RNA, 57 nt, Homo sapiens
gcggggcagccaggacggcggaaaacccgaagcagaagcccgacacaggcacaagac

SEQ ID NO: 65865 - RNA, 73 nt, Homo sapiens
aagcacgagcagaccggcccgaccgcccacagacccaaacaaagggaacagaaaggagagaccacaaggaaaa

SEQ ID NO: 65866 - RNA, 71 nt, Homo sapiens
gccaacaaggaggaagccggccaccccggacgcccccaaaagcccaacgagcccggacggccacgacgggc

SEQ ID NO: 65867 - RNA, 83 nt, Homo sapiens
ggaggcccgcagcgcgagccgcccggggaaaggagacaggaaccaggaccagcagaccccaccaacacgcgaggacaccaacg

SEQ ID NO: 65868 - RNA, 51 nt, Homo sapiens
gcaaagaggcccagggcagaagggaaagaagaaagcaccccgcaaaagaag

SEQ ID NO: 65869 - RNA, 80 nt, Homo sapiens
aggaacaagccagcacaagggcaccagccaggccagcaccagacaggggaggccggcggaggggaggaaggcccgcgcag

SEQ ID NO: 65870 - RNA, 77 nt, Homo sapiens
caaccagaaaggcccggacaccccaacagcccaaagagaagagaagcaaggaaagaagacaagaagaagccaaagca

SEQ ID NO: 65871 - RNA, 76 nt, Homo sapiens
caccagccgccgggaggcaccagcgccgcagagagaacacaaggaacgaaaggaagggaagaagcagaaccaagac

SEQ ID NO: 65872 - RNA, 58 nt, Homo sapiens
ccacgagcgccccccgagcggggggacgcgccaggcacagcagcaggcagacgacccg

SEQ ID NO: 65873 - RNA, 73 nt, Homo sapiens
acacaagcccagagcagagaaacggagacagacccggaacacacgggaggaaccaagggaaacaagaaaaggg

SEQ ID NO: 65874 - RNA, 62 nt, Homo sapiens
ccagaacgggcccgggacaccagcccagccagagcagcggacgggagcgccaccgcagcacc

SEQ ID NO: 65875 - RNA, 75 nt, Homo sapiens
gcgcggaggcgggagcgcggaaacggaaccgggaggcgacgcacacgagcggaggcgaaggcacacagagaaaaa

SEQ ID NO: 65876 - RNA, 73 nt, Homo sapiens
aaaaggaagaaacgacgccccacaaacggacacgcccaccaagaaagaaccggaaaggggaccgggccaggaa

SEQ ID NO: 65877 - RNA, 63 nt, Homo sapiens
aacagcgggaagagacagccaagcagaaggccggagccccgggaccgcaccggcaccgcagcg

SEQ ID NO: 65878 - RNA, 89 nt, Homo sapiens
gaggacacggaagagggaagaaagaagcagcgccagaggccgcggaacaccaccggaacggcgcgcgcagaccgggcagaggagcagcg

SEQ ID NO: 65879 - RNA, 64 nt, Homo sapiens
gaacacacagaaccacacagagcagcccgacggccaggaggcgaagagacgaggaagcccagga

SEQ ID NO: 65880 - RNA, 64 nt, Homo sapiens
cgagccggagcgccgacgaccaagaggcgaagagaacagagaggcacccagacgccccacagcc

SEQ ID NO: 65881 - RNA, 64 nt, Homo sapiens
aagaacagacacccagcgacgaaagcagagcccacccgcaaaacgggccacagaccccgccggg

SEQ ID NO: 65882 - RNA, 53 nt, Homo sapiens
gaaaaacggagggagaaaaagcaagaggaaagcacgagacgacgggaccgaag

SEQ ID NO: 65883 - RNA, 52 nt, Homo sapiens
gaagggacagggccccggccacagcaacccacggcccgcaagaagcccagcg

SEQ ID NO: 65884 - RNA, 75 nt, Homo sapiens
agcccggcagcacagagcaagcgaaacaggcagagagaagccaggaaagaaccggaacagaacaagcagcagagg

SEQ ID NO: 65885 - RNA, 85 nt, Homo sapiens
gagagcccaacgggacgggcaagacgagagggcccgacggaggggaggaaggaggcgccacaccaccaccggggaaccagcgcag

SEQ ID NO: 65886 - RNA, 77 nt, Homo sapiens
gggacgcggcggcaacggagcggcccagcaggcagcaagagagcagcagcccggaagaaagagagacaaggaagagg

SEQ ID NO: 65887 - RNA, 69 nt, Homo sapiens
gcagcgggaaagaagagcgggaagggacaaaacagaggcaacaaggggcaaggaggagccccggaggag

SEQ ID NO: 65888 - RNA, 62 nt, Homo sapiens
agccagcaaaggcaggggaggaagccacccgagaggagccgccggcccaggcggaggcaggg

SEQ ID NO: 65889 - RNA, 75 nt, Homo sapiens
gacggcgaagcaccaacgccaaggagagaaaacagacagaaaagaaccagaaccggccaaaagcgaaaaggcgga

SEQ ID NO: 65890 - RNA, 70 nt, Homo sapiens
gcacgaagggggacacaggcgagaccagaacggaagaccaaccagaagacacacaaagcaggggaagaga

SEQ ID NO: 65891 - RNA, 86 nt, Homo sapiens
cggcgagcgggggcggagaccaggagaccccacggagcgggcgacgagcgacccgggagacacgacggagacggcgaagaacagag

SEQ ID NO: 65892 - RNA, 77 nt, Homo sapiens
aagaggcggacggaggagcaggcgagaagagaagaacgcaacccaggagccccgggcggacagggaagcaaaaagcc

SEQ ID NO: 65893 - RNA, 73 nt, Homo sapiens
gcccgggggaaacagagaaagaaggcggccaggccaaccgaagccaccaggagagaacgccgcgccgcgcgac

SEQ ID NO: 65894 - RNA, 81 nt, Homo sapiens
acgaggaagcagcgaacgagaaccaaggcggacgcggcgagaaggggaagaagacggacagaagcaacaaaggaaaaacgg

SEQ ID NO: 65895 - RNA, 58 nt, Homo sapiens
gggcagaacagcgcggcagcccgaaggagggacccagacacccccgcagcacgcgaag

SEQ ID NO: 65896 - RNA, 67 nt, Homo sapiens
agcggggagggcggagcgcgccgagcgcccacgccgccacccagggggaagaccaagacacagagac

SEQ ID NO: 65897 - RNA, 75 nt, Homo sapiens
aggggaaagcaggggagcacccgcgagggcccaaccccggacgcaggcaagccgacaggaacacccgacgggacc

SEQ ID NO: 65898 - RNA, 76 nt, Homo sapiens
cggcaacccacacaagcgaaggcgcgcaccggaagcaccagcgaggaaggaaggaagggaggaaaagagcccaaag

SEQ ID NO: 65899 - RNA, 59 nt, Homo sapiens
aaaggaagacgaaccggagaagaggccagagaaggacaagaagccaagccgaaaggaca

SEQ ID NO: 65900 - RNA, 50 nt, Homo sapiens
ccagcgcagcgggcccgggccagccgcaggcggccgggcaaagggcagca

SEQ ID NO: 65901 - RNA, 88 nt, Homo sapiens
cgggcagggagaagggggcggcgggcggcgggcggcaaaggagcagccagagggccgggcccagcaccgaccagaaaccaggcgggga

SEQ ID NO: 65902 - RNA, 81 nt, Homo sapiens
gcacgagacccacaggacggcgcagcgggacgcggccgggcccgggaggagcaggggcagaggggagaacccagccgggac

SEQ ID NO: 65903 - RNA, 72 nt, Homo sapiens
gaccacacggacgcgccagcaagccggccaaacaacaagcagccggggaccccgggaggaaaggccccggac

SEQ ID NO: 65904 - RNA, 71 nt, Homo sapiens
aacgacgcggaccagaagccagagcgaggacgccggcaggagcacgccggcagccagaaagaggaggagga

SEQ ID NO: 65905 - RNA, 74 nt, Homo sapiens
agccccaccaagggacccacaccggaaccaggaagaaaagagcaagcaacccaagcggaaagccaagacagccc

SEQ ID NO: 65906 - RNA, 72 nt, Homo sapiens
cgacagaccccgggcacaggaagaccaagaggacggagaggaggacgccgaggcggcaggaagcaagaccca

SEQ ID NO: 65907 - RNA, 78 nt, Homo sapiens
gcgcgccgccgccgaggagaaagaccagaaccgagaagcagcccgggaggagaaaccaacagaccccaccagaaacca

SEQ ID NO: 65908 - RNA, 84 nt, Homo sapiens
cgcccgcccgcccgggggaccgcaggcgggcggggagcgcggaccagaagagaacacgccaggaaagcgacccggaggagagag

SEQ ID NO: 65909 - RNA, 76 nt, Homo sapiens
cccgaaaccacgaaaggggagaccaacaacaacaaccggaaacacgaaggaacccaaacagcagcaggcaagccag

SEQ ID NO: 65910 - RNA, 64 nt, Homo sapiens
gagggaggagagagggagagccaaagaagcacccagccaaacccaggcccgagaagaagaggaa

SEQ ID NO: 65911 - RNA, 77 nt, Homo sapiens
caccggaacaaaaggacggcaacaagggaccaccgaaaaggggacccggggaggggaagcccccagcaaaggacccg

SEQ ID NO: 65912 - RNA, 78 nt, Homo sapiens
cggacaccggcggccccaccagcagacgcagccgagacaccagcccgaaacaccaccaagaccgcgcgcgccaccgcc

SEQ ID NO: 65913 - RNA, 70 nt, Homo sapiens
acagagaaccgaccagaacgcagcaacaaaggaacgagcagagcgacagcgaagcgcagcaacacaagcc

SEQ ID NO: 65914 - RNA, 60 nt, Homo sapiens
gcggccacggggaacccacaaggagaggaccagcgaagcccacaccaaagccccagcagc

SEQ ID NO: 65915 - RNA, 67 nt, Homo sapiens
agggcccagagaggccgccaagcagacccgcacaggaaacacacaccccagaaggcaccgcaccacc

SEQ ID NO: 65916 - RNA, 68 nt, Homo sapiens
cggaaggacaaagagaacacaggaaaggagagcaaggccaaaaaccaagagccagaccagacccaggg

SEQ ID NO: 65917 - RNA, 72 nt, Homo sapiens
cccaggcacagagagcaaccagacggaaaaaggaccagacaaagaaacaaagaaaaaacgcgaaggagaaca

SEQ ID NO: 65918 - RNA, 90 nt, Homo sapiens
gcccaacggcccgcgcgcccagggagaagggcccccgaccccaagccgccacgaagggccaccgcaagaggagccaggagcacgggggga

SEQ ID NO: 65919 - RNA, 74 nt, Homo sapiens
gagccaggaaggaggaggaaaaaaggagcaaaaggaacacaaaaaccgggcacaggaccaaagcaaacacagac

SEQ ID NO: 65920 - RNA, 86 nt, Homo sapiens
ccaacgccaccaaccaaccgcgccgggccgcaagacagcccgggacaacaccgagggggagacaagggacggcgaaggaacgggcc

SEQ ID NO: 65921 - RNA, 73 nt, Homo sapiens
acacgaagggcaggcgccccgacccagaggagcccagccaagcacccagccaaacccaggcccgagaagaaga

SEQ ID NO: 65922 - RNA, 78 nt, Homo sapiens
aggccgcaggaagcgcggaaaagccagagagagaacccgaaacaagagagacccaaaagggccagagcagggagacaa

SEQ ID NO: 65923 - RNA, 62 nt, Homo sapiens
ccggagacagcggcacagagggccgccaggccagcagaagcaggaccacgcccaacaacagc

SEQ ID NO: 65924 - RNA, 77 nt, Homo sapiens
aaagaagagaggcaagaaggcccggggacgcaaccagaggagaggaaacaagaaagggacgcggggccaagacaggc

SEQ ID NO: 65925 - RNA, 53 nt, Homo sapiens
ggaacccaggcaggaacgcaggcggccaaaaggcaacaggcgacaggaggaaa

SEQ ID NO: 65926 - RNA, 70 nt, Homo sapiens
aacacccgcagacaccggccacccagagagcaaaaggcagcgaaacagcagaacaagaagggcaaccagg

SEQ ID NO: 65927 - RNA, 56 nt, Homo sapiens
ccagcaagacccccacagacgaggaaaaccagagacccagacacgcgaaggaacga

SEQ ID NO: 65928 - RNA, 83 nt, Homo sapiens
cgaccgagcaggcgagaccacgggccgcccaacaacaacggagcgggccacgaggccgagcgccggcgggcgcaggaagaggc

SEQ ID NO: 65929 - RNA, 74 nt, Homo sapiens
aacaccagcaaaacagaaccccaaaccccaacaaggagggagcaacaacaaggagcaagcacagcgcgagccag

SEQ ID NO: 65930 - RNA, 75 nt, Homo sapiens
cgaaagcgggagagggaccggaacggcggcgacaaggggcccgaacagaggggacccagcccacaagaacccgac

SEQ ID NO: 65931 - RNA, 84 nt, Homo sapiens
gcaaaacagcacggaagcgcggacggcgcacgacgagacggcagcgcacgggacaaggagccgagaaggacccagccgggaagg

SEQ ID NO: 65932 - RNA, 58 nt, Homo sapiens
caagggggcaggagcgggagcgcagcgaccacaccgaagggcggagaacggaaaagca

SEQ ID NO: 65933 - RNA, 57 nt, Homo sapiens
ggaagccacggcagacacacaacccgacccgacgagcggcaaggaagaggcccggaa

SEQ ID NO: 65934 - RNA, 78 nt, Homo sapiens
agacgcgccgacgcgaggccaaaggagcacgccggcagccagaaagaggaggaggaaaaaaaacagaaacacaagggc

SEQ ID NO: 65935 - RNA, 51 nt, Homo sapiens
cacagaacaggagcacggagaggcagagcaggagggagagccaccacggac

SEQ ID NO: 65936 - RNA, 87 nt, Homo sapiens
ccgagagcagccgccggggcggaggagagcagagccggagccagggcaggccaggagagaaggcccggcccaggccaagagagaaga

SEQ ID NO: 65937 - RNA, 85 nt, Homo sapiens
gagggcgggcggagagggggagcgggagccccgaggccgagggccggcggcagagaccacgcccagcaggagcggcgcaggccac

SEQ ID NO: 65938 - RNA, 76 nt, Homo sapiens
gaacagccgacggggcgaccgccggcccagggggaggcagcacggcaggagacgaggagaggacagcaggacaccc

SEQ ID NO: 65939 - RNA, 81 nt, Homo sapiens
gagagagcgagggcggggcggcaccggcgagccagcgcccacggccgagcacccgccccagcgagccccggaaagagccgc

SEQ ID NO: 65940 - RNA, 82 nt, Homo sapiens
cgaaccaagcaggcagggccaaagccaagaagaggaaaccagaacacggcaagagcagccaccaccaaacccagcaccgcag

SEQ ID NO: 65941 - RNA, 72 nt, Homo sapiens
gaaccaaggccaagaccagaaccagcccgggaaagggcccacggccccacggggcgacgagccacgggcggg

SEQ ID NO: 65942 - RNA, 71 nt, Homo sapiens
caggcagcagaccaaagaacaaacacagggcgcagcaagcaccaaaagcaaacaaagaaagggcagaacga

SEQ ID NO: 65943 - RNA, 58 nt, Homo sapiens
ccccgccggcgcggcgcagcccagcacgggagccggagacgagccaaagcgcagggcc

SEQ ID NO: 65944 - RNA, 83 nt, Homo sapiens
gcccaggaccccaggggaacaagaggccacgcagagccacgccgagcacggcccccggagcggggagccccaaccgaccagac

SEQ ID NO: 65945 - RNA, 76 nt, Homo sapiens
cagccgggacgccgagaaggaggcccagcagcccaggggaaaggaacacccccagcggccagaacggccccaaaaa

SEQ ID NO: 65946 - RNA, 59 nt, Homo sapiens
cagaccccacgaccggacgcccacgaccccagcaggggaagaaagcccgggaacgagag

SEQ ID NO: 65947 - RNA, 61 nt, Homo sapiens
cgacacggggcagacaaacacagcaacacagcacccggcggcaaaccaaacaaaaccagag

SEQ ID NO: 65948 - RNA, 82 nt, Homo sapiens
ccgagaagcccgaggcgcaggggcggggaggagacggcggaaaacggagagacggggagaagagaagcaggaaacaagggaa

SEQ ID NO: 65949 - RNA, 73 nt, Homo sapiens
acaaccaccagaagaacgacagagaggagggagaacaagcaacggcgggacacaaccagagggaagcacgccc

SEQ ID NO: 65950 - RNA, 77 nt, Homo sapiens
ggagaggagcagaaggagcaaaaggcggacaggcagaaacacacccagaccaccccaggggacaccgaagaagaagg

SEQ ID NO: 65951 - RNA, 78 nt, Homo sapiens
ccggggcgaggcagcgaggggaacaccaaggccgagagaagggaaaggacggaaccgggcgaccggaacgggccacga

SEQ ID NO: 65952 - RNA, 70 nt, Homo sapiens
ggagcaccgacccgccgcaaagaagcagaaaccaccagagaccaggcccgaggaagcggcgaaggggggc

SEQ ID NO: 65953 - RNA, 78 nt, Homo sapiens
aggcggcggcgaaaggaacggcgaaggcccacgggagaaaaccgggcgcaaggaaagcggggcagcaaggcaaggaaa

SEQ ID NO: 65954 - RNA, 75 nt, Homo sapiens
caccacgcacgggcgcacggaggacgggaaaaccagcagcagggacagggcgaaacaaccaaggccgacaccaca

SEQ ID NO: 65955 - RNA, 67 nt, Homo sapiens
acgacccaggggggagaggaccagggccgggggaacgaccaggaaaagggggaccaaggccacaaaa

SEQ ID NO: 65956 - RNA, 82 nt, Homo sapiens
gcggcggagaggagggggacgaagcccccagaaagacaccgagaggacggcagggcgcagaaacccgagacgaagcaaggcc

SEQ ID NO: 65957 - RNA, 86 nt, Homo sapiens
gcggccagaaaaaggcgcggaaaaaggaacgaaccagaagccgaagccggagaaccaaggcaaggcacgacgccgcacagccccaa

SEQ ID NO: 65958 - RNA, 68 nt, Homo sapiens
ggaaaaaggaggggaacgagaaaacaggaccaagaagaagaaccagcaaaagacccaccgcgaggcgg

SEQ ID NO: 65959 - RNA, 77 nt, Homo sapiens
aagcaaaaaacaagaaacgacaaagcaagggacgcggacacagacaggcaggagaagaaggagcggcagaaggggcg

SEQ ID NO: 65960 - RNA, 58 nt, Homo sapiens
cccccacaccccgccccagacgaggacccgagccccaaagacagaaaagccccgagac

SEQ ID NO: 65961 - RNA, 35 nt, Homo sapiens
gccagcaaaggaagacgaggacaggagagacaacg

SEQ ID NO: 65962 - RNA, 76 nt, Homo sapiens
ggagcccccccgcaaccgaaggaggcacccagccacaccgaccaggccaaccggagcgcacccacgccacaagccg

SEQ ID NO: 65963 - RNA, 72 nt, Homo sapiens
ggcccccgccccgggcccggggagaagacgcggcggcggggaaaggacaagggacagcagccgcagaagacg

SEQ ID NO: 65964 - RNA, 75 nt, Homo sapiens
ccggccggagacaacggcgaccagagccccgacaccgccagcccagggcaccaggcccggagcaccaaagaagag

SEQ ID NO: 65965 - RNA, 64 nt, Homo sapiens
accaaacagagagaggcagcccacccccccacggggaccgcccacacagggggcacccgaggag

SEQ ID NO: 65966 - RNA, 57 nt, Homo sapiens
gaaaaaaaaagcacaacccagccagagaagagagaagaacacgaagaaaaaaaaaaa

SEQ ID NO: 65967 - RNA, 60 nt, Homo sapiens
cagagcgcggaggccgaaccccgaaggaaagcacgggaggggagagagaaccggcacacc

SEQ ID NO: 65968 - RNA, 50 nt, Homo sapiens
ccggccgacaaccacggacagcagaccacagcccggcaggcccaaaaacc

SEQ ID NO: 65969 - RNA, 80 nt, Homo sapiens
ccaagaaggacaggggccgcagccaaggaaggaggccgcaaacagacaggaagaggcccagcaacggccacccaaagaac

SEQ ID NO: 65970 - RNA, 59 nt, Homo sapiens
cgaaacagaaccgccaggagcggcagacggcaggccagcgcgggcacgagggagaggcc

SEQ ID NO: 65971 - RNA, 59 nt, Homo sapiens
gaaggagcggaaaccgagccagggcgagccggcgacaacagaacccacaggagggccag

SEQ ID NO: 65972 - RNA, 58 nt, Homo sapiens
aaccggagagcacccaacagagcacaagaaccgcccagcacccggagcccccagggag

SEQ ID NO: 65973 - RNA, 77 nt, Homo sapiens
cagcggacaaggaaggaacacaacaaagcaagcacagaagaggagcaaaagaaaaggccaaaacgaaaaaccaaaca

SEQ ID NO: 65974 - RNA, 72 nt, Homo sapiens
cagcccggggccgaccgagcacgaacgcccgccacgacaggagggagcgagcacaaacgacacacgcaaacc

SEQ ID NO: 65975 - RNA, 63 nt, Homo sapiens
gagcaaggaaggcgcgaaacaaggggagacagggaaagagaaggcacagggcagagcaacaga

SEQ ID NO: 65976 - RNA, 52 nt, Homo sapiens
gcccgaagacacaaaaaccacggccagagcaaggcacgcagcacgggggcag

SEQ ID NO: 65977 - RNA, 64 nt, Homo sapiens
cgcgccccacccgcgccccgccgagcgcacaaaacagagagcggcggcaccaggcaagcgggag

SEQ ID NO: 65978 - RNA, 73 nt, Homo sapiens
acagaggaaaccgcaccgcccggagccgcccggggagaggaaccaaccaccaaaccccaggaaccacccaacg

SEQ ID NO: 65979 - RNA, 71 nt, Homo sapiens
gaagcccagaaaagaaaggggacaggccgaaagaccgcaaagccagaacccccagagcacccaagaaccag

SEQ ID NO: 65980 - RNA, 76 nt, Homo sapiens
acaaccaggggaccagagaggacggcaccagccaggaggcggagaccgacgcggaaaaaaagacccaggaggagca

SEQ ID NO: 65981 - RNA, 34 nt, Homo sapiens
cggagaccccagcccggcggcgccggagacccag

SEQ ID NO: 65982 - RNA, 71 nt, Homo sapiens
gagcaaaacgggcgcaacgaccaaaggaacaggaaaacacaccagacccaacacaggagggcaccccaaac

SEQ ID NO: 65983 - RNA, 85 nt, Homo sapiens
gagagaggggagcgcacaaggcagaacaaccgggagggcggagcaggggagcgaggcacaggagcccgcccgcaggacgccccac

SEQ ID NO: 65984 - RNA, 57 nt, Homo sapiens
cccgcggagaaaaggcgacagcccgccaagacagaaccccagccccacaccgaggag

SEQ ID NO: 65985 - RNA, 104 nt, Homo sapiens
ccaaacaaccgcagccgcgcccaggagggaccggaaagcaccccggccacagcgaggccgaaaggcgccagccaagaacacaccaagccagcaagaacaacacc

SEQ ID NO: 65986 - RNA, 71 nt, Homo sapiens
gggccccggcgcccggcgcggagccgcgccgcacgcgcgaccccggggagagcccgaccagagaaaaggcg

SEQ ID NO: 65987 - RNA, 66 nt, Homo sapiens
cagcagagcgccaagacggcagcgggcggaggacggggcaccagagaacccaccggaagaacccca

SEQ ID NO: 65988 - RNA, 32 nt, Homo sapiens
gaagagcgaagaacgaggcaccacagaacagc

SEQ ID NO: 65989 - RNA, 55 nt, Homo sapiens
accgcaaacaagaggccggcaggaaggcgagaacgcggacaagcaaacaaagagg

SEQ ID NO: 65990 - RNA, 58 nt, Homo sapiens
aaccaagccaggcccaaacacccaggcagagggacagaacaccagcggggagacgggc

SEQ ID NO: 65991 - RNA, 71 nt, Homo sapiens
cagacgcagggcgcccccggacagggcagaccgccagcagcacagcaagccacagagagggccggcagggc

SEQ ID NO: 65992 - RNA, 64 nt, Homo sapiens
agcccaaagccgagccagaaaaagccgaaaaaaacacacaaagcgacgccgcggcccgacagga

SEQ ID NO: 65993 - RNA, 81 nt, Homo sapiens
cgcgccccaccccgccagcccagagccacgacggacccagagagggaccagggccaaagaagagccggggggcaggcggac

SEQ ID NO: 65994 - RNA, 73 nt, Homo sapiens
ccgaacaaaaagcagcaggaaagaacaggaaagaacaagaagagggcaggaccccccagggggcccgagccca

SEQ ID NO: 65995 - RNA, 79 nt, Homo sapiens
acccagcggcccagccgggggcaaaaagcagagaaaaaacaacggagaagcaaaaccaacccaagaaagcacacaacac

SEQ ID NO: 65996 - RNA, 78 nt, Homo sapiens
gcgcgccgccgagggaagacacgaagaacaccgccaggacaacccaccaaggggaaggagaaccccgagccgcgacgg

SEQ ID NO: 65997 - RNA, 80 nt, Homo sapiens
cagcagaaggacagcgcaaagcgagaacaacagcagacaagaaaccagccaaggcaagaaagccagagcccgaacggaac

SEQ ID NO: 65998 - RNA, 69 nt, Homo sapiens
cgacccagaggggaaaaaaggggagggcgggccgggaacgccaggaggaagggagggccagaccggaac

SEQ ID NO: 65999 - RNA, 80 nt, Homo sapiens
ggggagaaacacaacggaggacagccagaacccgccccacacaccggaagccccccacaagagaacagcccagcccccag

SEQ ID NO: 66000 - RNA, 80 nt, Homo sapiens
ccgcgggggcaacggagaaaacccggaaccgcgacggcggcaggagaggcagaaagaccaaagggcgacccaaccccaga

SEQ ID NO: 66001 - RNA, 81 nt, Homo sapiens
cagagccaggggccgggagggcgccagggacaggcggggaagaaagccggagaaaagcaccggccccagagccgccaaaca

SEQ ID NO: 66002 - RNA, 68 nt, Homo sapiens
ccaacccccaggaaccgggccagcacccggacaggacacacagcaacgaagcaggggaggagggaaga

SEQ ID NO: 66003 - RNA, 86 nt, Homo sapiens
ggcagccacagcgggaaaagaaagcaacgcgagcccgcacaccgccaggagcaaggcagcgacccagggcacagcggggcacagcc

SEQ ID NO: 66004 - RNA, 65 nt, Homo sapiens
ccggggcagaccaaacggcaaggacggaggggcagaagaggccgccgacaccaagccaacgaaag

SEQ ID NO: 66005 - RNA, 45 nt, Homo sapiens
cacccgggcacagcaggcacggaggccgccaggcacagagaaggc

SEQ ID NO: 66006 - RNA, 73 nt, Homo sapiens
cggcacccccgcccccaggggcacccaccagcgcaccagaacaaagcgggcccaggcggaacccggaacacgg

SEQ ID NO: 66007 - RNA, 88 nt, Homo sapiens
ccaggacacggccacaacaccaagaggggaggggcgaccccggggcccggccagcacgaccgaggaggggcggacagcggaggagaac

SEQ ID NO: 66008 - RNA, 77 nt, Homo sapiens
gagggacgcgcaaggaccaaggggacagcccaccacaagcaggccccaagcccaacagagagcccggaaggaggcag

SEQ ID NO: 66009 - RNA, 74 nt, Homo sapiens
ccagagcccccccaccgagagaaacaaaaagcgaggaaagcgacaacagaccgacccaaaccccccgccagaac

SEQ ID NO: 66010 - RNA, 73 nt, Homo sapiens
cgcggggggcggagcgggcgcggagcccccacaggcagggaccccgacggagagacaaagaagacggaggggg

SEQ ID NO: 66011 - RNA, 78 nt, Homo sapiens
aacaacagccgccaggcccaaagaaccagcggaccgagccaagaaaggagcaagacagaaaagagacaacgcccagcg

SEQ ID NO: 66012 - RNA, 66 nt, Homo sapiens
cccgggcaccggaggaaaggagcgagaacccgagcagcgccagagcaacacaccgcgccccagcac

SEQ ID NO: 66013 - RNA, 71 nt, Homo sapiens
ggagaacgagccggacggcgcccagcacaggccaacaggaaccggaaaacaacgcgcagggccgcagaagc

SEQ ID NO: 66014 - RNA, 60 nt, Homo sapiens
ccaacgaggaaccaaagggagaggaaagccggacaggccgagagacgccgagcccccggc

SEQ ID NO: 66015 - RNA, 72 nt, Homo sapiens
cagggacacgaagcgagcgccgaggagcgcagcgggagcaggaacgggcccccgccagcccacacccaagcc

SEQ ID NO: 66016 - RNA, 69 nt, Homo sapiens
ggaagccaggcacgcacagcggcgaaaaaacgagaaagaaagcaggagaccaagaaggaaaaaggcaac

SEQ ID NO: 66017 - RNA, 79 nt, Homo sapiens
cggaagagagccccaggccagaagagagacccgacgacggaccgcacacggagaaggaagcagacagggcaccggagcc

SEQ ID NO: 66018 - RNA, 71 nt, Homo sapiens
caaccaacaggaaaccacagccaagggcaacaaaccaggaccccccgaggaaagggaccgcccaccagcga

SEQ ID NO: 66019 - RNA, 76 nt, Homo sapiens
cagacacggggaagcgcaaaaacaagacggggcgccccacagaggggcgacgaacagagaaaaggaggccggacaa

SEQ ID NO: 66020 - RNA, 78 nt, Homo sapiens
ccggggacgacggcaacccacaaggccaagcacccccgcaccagccacacaccagagagcacaccccaaagcccaccg

SEQ ID NO: 66021 - RNA, 76 nt, Homo sapiens
gaggccgaaggcaacgccgacacgaggccaggaaaaggaagaaccaaaacggcaagaagaccaagaaacgcacagg

SEQ ID NO: 66022 - RNA, 87 nt, Homo sapiens
cgccccagagaaagcccgccgcaccagcaagcgcgggggcgcccaggagcgcaggacaagcaccaggagccccccgggagcacaccc

SEQ ID NO: 66023 - RNA, 77 nt, Homo sapiens
agaagcgggcccccgccccagcaggacaaacgcacccggcgaaggccgccgacggcccgcacagggagggcacagca

SEQ ID NO: 66024 - RNA, 102 nt, Homo sapiens
agcacaaccacgagccaaacaaccagcccaaccacacgcaacaaccagcagcacagaggcagaagagacaacacagaaaccagggcggaggcaggaacagca

SEQ ID NO: 66025 - RNA, 89 nt, Homo sapiens
ccgaggagcggcgggcggcggcgcgcggacccaggcgcggaggcgaggccagcagcgagagaggaacgaggggcacagaaaccagaaaa

SEQ ID NO: 66026 - RNA, 42 nt, Homo sapiens
agcgcccagcacggagcggaggaaagggcgcaggcgagaggg

SEQ ID NO: 66027 - RNA, 75 nt, Homo sapiens
accgcgggcgccccgaggccaagccaccccggcggaaccgcccccagggcacacggagcacagcaggaagaggaa

SEQ ID NO: 66028 - RNA, 70 nt, Homo sapiens
cccagcgggcacgagaaaaaagggcagggggcagcacgccgaaggagagaccagacaacaggccagggaa

SEQ ID NO: 66029 - RNA, 65 nt, Homo sapiens
gggagcggccagcccgccagaggagagggagcacggcccaggcagccaagaaggcagagagacac

SEQ ID NO: 66030 - RNA, 78 nt, Homo sapiens
gaggaagacgagccgggaggaacggcccggaaacaggaggacgaccaaccccgcccccaccggcccgcggcccaagcg

SEQ ID NO: 66031 - RNA, 78 nt, Homo sapiens
gcagcagccggaaccgcgcaggccgcccccagaaccgcccaaccgcacggcaccccaaagccagccggaggaggaggg

SEQ ID NO: 66032 - RNA, 81 nt, Homo sapiens
gaccaaacacgaggcccggcccagagggacaaaacccaggagcccccgcagggccccggagcccacacggagcagcccgag

SEQ ID NO: 66033 - RNA, 78 nt, Homo sapiens
agaagcgcccggagacagcgccccgagggcccccagagacggacagcgaaggcagagagcagcgggcaccggggccca

SEQ ID NO: 66034 - RNA, 112 nt, Homo sapiens
ggagcgcgcccgaacgccaccagccagaacagagccgggcgcaagcagcagccaaagggccacccgcaagggcaggagaaagcaacacaccgcaacgaaggcccagcgcccc

SEQ ID NO: 66035 - RNA, 76 nt, Homo sapiens
gaggagccagccgccaggccaagaccgagcccgaaaaaaggacaaaacaggagccgcccggcaaagcgaaagcgca

SEQ ID NO: 66036 - RNA, 71 nt, Homo sapiens
accagccccacaaaaaaagaccccagcaagaccaagaacagccaaagaaaccaagcagaaaggaccggaag

SEQ ID NO: 66037 - RNA, 64 nt, Homo sapiens
gaggcgggagcggagacccgcgcgccaggcgcgcccggcagaagaggcggccacccacgagccg

SEQ ID NO: 66038 - RNA, 69 nt, Homo sapiens
gccggacccccccgagagccgggccagcgaaccaccggccagcacaggaagacaggagacagggacaca

SEQ ID NO: 66039 - RNA, 75 nt, Homo sapiens
cagagaccaaaaaaaaaacgcgaacaccgacggagccagggcgaagccgggaaaaagaaccaggccaaggagcgg

SEQ ID NO: 66040 - RNA, 74 nt, Homo sapiens
agcccggggcgcagcagcgaaggaaaccagacgccgccacagagaaggaagacaagagaacaagggccagcaaa

SEQ ID NO: 66041 - RNA, 85 nt, Homo sapiens
cccaaggcggagaccgcacgagggcacccacaccacgacaccgaaaacccaccgagcccgccaaagacacagaaaagcccacgag

SEQ ID NO: 66042 - RNA, 58 nt, Homo sapiens
ggccgacaacagccggcgccgccacggcgcggcgccggacaaaaacacaacaaacaaa

SEQ ID NO: 66043 - RNA, 71 nt, Homo sapiens
gagagaggacagcggccggacgcaggcggcccaaaggcgaaacacagaaggagacaaccacagggccccag

SEQ ID NO: 66044 - RNA, 86 nt, Homo sapiens
cggacccggagaggggagagaagggggagccggcgagaggggcccccagggacagacccggcgaagcaggacgggagcggcccgag

SEQ ID NO: 66045 - RNA, 54 nt, Homo sapiens
cgcagggcgcccccgggggaggcaccaaaaagaagcgcgggccaaagaacaaca

SEQ ID NO: 66046 - RNA, 55 nt, Homo sapiens
cggcccgagaaccacaccccaggagcgacaacaaagaacagccgagcggagaaaa

SEQ ID NO: 66047 - RNA, 58 nt, Homo sapiens
aaaacgaaccaggacggcaagagacacacagaagacgaaagacgaaagaagaacaaaa

SEQ ID NO: 66048 - RNA, 70 nt, Homo sapiens
ggacgccccacggagaaagagagcaaaacaccagagccccaaagaaaaaagccacggggaaggcagaaga

SEQ ID NO: 66049 - RNA, 78 nt, Homo sapiens
gcacccgcggagacggacgcccgggaagagccccagggaggcccacacaaccacaggaagaccccaaccaggccaaac

SEQ ID NO: 66050 - RNA, 89 nt, Homo sapiens
ggaaagacagaacaacacccaaaaaaggaaggcaacaggaagacagcaggggcaccacacagaacccaaagacgggggaaaccagaacc

SEQ ID NO: 66051 - RNA, 87 nt, Homo sapiens
cggcgaaccgagccggaacgggccagcgcgcaagaggccacggcgggggcaccgagaagccccgaccgacgacggagccagccaaag

SEQ ID NO: 66052 - RNA, 76 nt, Homo sapiens
cccaggacaagccacgccaaccagaacgcgaggcccagaaggagccgaggccagagcagaaaccagcccaggaacc

SEQ ID NO: 66053 - RNA, 83 nt, Homo sapiens
gggacgggggagggggcggccgggcggagagaaccagcgaggacgagggacaagcaaggggccaaggagccaaggaggaaacc

SEQ ID NO: 66054 - RNA, 102 nt, Homo sapiens
cggcccggggccccgaaacgggccgcccccacagcaccccgggcggcggaggaccagacaggaaaagagggcaggaagcaacggcaaacaacaacaaccgag

SEQ ID NO: 66055 - RNA, 77 nt, Homo sapiens
cccggccgacgcccggaagacaagaggagaagcgaacggaaaggacgacgacgagagagagacgaaaaaaccaagga

SEQ ID NO: 66056 - RNA, 77 nt, Homo sapiens
agagacgaaccgaagcgggcgggcccccccacccagagcggaggcacccaccacgggccaggcgggccagaggcaag

SEQ ID NO: 66057 - RNA, 40 nt, Homo sapiens
caacgagagacccaggaagagcaacaggaacaagaccacc

SEQ ID NO: 66058 - RNA, 37 nt, Homo sapiens
aaaccccccccggagccgaaaaaagaggcaaaggaag

SEQ ID NO: 66059 - RNA, 87 nt, Homo sapiens
caggagaagccggaccggcgagagcccaaaggagcaaggcgaagcacccaagccagccgggccaggagccacggggccagaagccaa

SEQ ID NO: 66060 - RNA, 89 nt, Homo sapiens
cacaaagacgaacaaagacggcaacgcgcacagcgcagagaagaaaacccggaggagacccaacggaggggacaagaccacaccaaagc

SEQ ID NO: 66061 - RNA, 74 nt, Homo sapiens
acccggccggacccaccgaccagcacaacaaagagagcagggagagaagggggagaaaaggaacagaaaaggaa

SEQ ID NO: 66062 - RNA, 83 nt, Homo sapiens
gccgagagccagagagagcggacgacagaacccggccgacccggaccaacaaccccaaggcggacgaaagaaagaaggagcac

SEQ ID NO: 66063 - RNA, 73 nt, Homo sapiens
gagaacccgggcggcgcagcagaaccggccgcccagccaggagaaccgcgcggaaaccgcggccggcacaaaa

SEQ ID NO: 66064 - RNA, 79 nt, Homo sapiens
agcaaggaacaaaccgaagaacagcgggaaagaaggcaaaacacggaggcgaggggacggcggggagcgcaggacagac

SEQ ID NO: 66065 - RNA, 85 nt, Homo sapiens
cagcccaccagcaggcgggacccgcaccggaaggccacgccaaggaggcaacgcacgggccacaggcagccgcagaacaggccgg

SEQ ID NO: 66066 - RNA, 60 nt, Homo sapiens
cagcccagaaagccgggacaaaggaccgaaggagaagaaggagaaggggaggagaaggca

SEQ ID NO: 66067 - RNA, 82 nt, Homo sapiens
ccgccggccgcagagcacgcggagcgacccgccacgcggccggccaggcgccgcacccacaggaacgccgcggagcagagcc

SEQ ID NO: 66068 - RNA, 63 nt, Homo sapiens
gagaaacaggagacaggagagagagaagaagagacgaaccaccggaacaaagaaggcggaaac

SEQ ID NO: 66069 - RNA, 97 nt, Homo sapiens
gagagcgagcgagggggggcgcgccggaaaccggagcgcgcagcaggacagagcgggagccaccagcgccaaagggaagccaggagcccgggggcac

SEQ ID NO: 66070 - RNA, 86 nt, Homo sapiens
ggccgggcgaccgggcaccagcaggacccgaggccaggagccaggggcccagaaggacccacacagcaccaagacggagaagaggc

SEQ ID NO: 66071 - RNA, 39 nt, Homo sapiens
cgccgaccacaagagaaaagggaccagccaccggggcag

SEQ ID NO: 66072 - RNA, 56 nt, Homo sapiens
ggcgacgaggcacagcgcgcaagaagggagagagaaaaggaacagccgaagccagg

SEQ ID NO: 66073 - RNA, 74 nt, Homo sapiens
cgcccgagccgcaccagcacacaggacgcgggacgggcaccccaacaggccgccacgcccccgcagccaccgcc

SEQ ID NO: 66074 - RNA, 66 nt, Homo sapiens
ggcgacacggcaagagagcccaaggccgcaacagcgggaggcggaggccacccagacccggccggg

SEQ ID NO: 66075 - RNA, 76 nt, Homo sapiens
gaggggcgaggaccccggcggcagacgcaggcgggaccagagcggcgaacacccgcaaacaccacccaagcaaaca

SEQ ID NO: 66076 - RNA, 83 nt, Homo sapiens
cagagacgaaaaaccgaggcgagacccaaagaaaccccaccacgcggcaggggccgccgaggaaaaagcaacaagaagaaaac

SEQ ID NO: 66077 - RNA, 83 nt, Homo sapiens
acagggacacgggagacgggccaaccgagagaaccaggggaagggcagcagaagaaccggcacgccagagcccgccagggccg

SEQ ID NO: 66078 - RNA, 65 nt, Homo sapiens
gggagaggaccacacaaaaccaggcgaacgaagaagcgggccacccacaaaggccaagcgaccac

SEQ ID NO: 66079 - RNA, 74 nt, Homo sapiens
caccacggccacagccgccgcagacccagcagccaagagggaagcagacgagagcaaggggcggaaacccccga

SEQ ID NO: 66080 - RNA, 72 nt, Homo sapiens
cgaagagccccccccccaacaccgcgacacgcagggccacagccgccaaggggcaaccgcccaccaccagac

SEQ ID NO: 66081 - RNA, 62 nt, Homo sapiens
caccccgaccagcacacacgcaaggagacaggaacaagcacaaggaagagcccacagaaaag

SEQ ID NO: 66082 - RNA, 81 nt, Homo sapiens
gacaacccggggcgaacagagcaggacggaaagaacccggccagacggcgaacagcccagcggcaaagcagggcacccaca

SEQ ID NO: 66083 - RNA, 106 nt, Homo sapiens
acaggaggagaccaaacccccgacagcgccaggcccagacgccaacgcaggagcacccagaaagcaccgggaggaaagagagccacacgaagaacacggccaaagg

SEQ ID NO: 66084 - RNA, 92 nt, Homo sapiens
ccggacgcccaggacgcccgaggagccgcgccgccgggacacaccaggagaacaagcccacgcaccggcccgaaaaaaacccccggcggcca

SEQ ID NO: 66085 - RNA, 62 nt, Homo sapiens
gcggaggcacacaacggcagaagaaggaagcaagagaagaaccagccggggagccggcggaa

SEQ ID NO: 66086 - RNA, 50 nt, Homo sapiens
ggaagccgccacagcacaaacgcgacgccacaggcacagggcaagggacg

SEQ ID NO: 66087 - RNA, 72 nt, Homo sapiens
ccgcaggaccgcacccgcggagacggacgcccgggcacgaagaacacaaagcaaaaaggaaaagaagagaag

SEQ ID NO: 66088 - RNA, 83 nt, Homo sapiens
ccagccaacagcgccccggacgcaccagagccaggcgcgcggaaacgcgcgccaggcgcacagcgcaccgcagcccagagcaa

SEQ ID NO: 66089 - RNA, 79 nt, Homo sapiens
cgaacgcaggaaagcaggcaaaaggcgcgcgcgccgccccccacccgccccgggagagcagggcagaaaagaacagacc

SEQ ID NO: 66090 - RNA, 54 nt, Homo sapiens
aggacaagggacagccagagacacaaaagacaggcaccgcacccagcggaggca

SEQ ID NO: 66091 - RNA, 78 nt, Homo sapiens
gcggaagaagaccagaaccggaggcaccggacccggacacccggggcccggacaggagaaacaggagaagcgaggaaa

SEQ ID NO: 66092 - RNA, 77 nt, Homo sapiens
gcaaggggccaccaggaggccagggggcgccagggcccaggaaagagggcacaacggacgcagaagacaagaaagag

SEQ ID NO: 66093 - RNA, 71 nt, Homo sapiens
gacggagaaaaacggagggagaaaaagcaagaggaaagcagggaaaccaaaaccagagaagccggaaccca

SEQ ID NO: 66094 - RNA, 123 nt, Homo sapiens
ggggaagcagcggagcagccggaggacgcggagcccaagaaacgggcagccaggcccccacagcccgcagaagaacggaccgaagccaaagaacaagagcgcagggacagagcgaccaggggc

SEQ ID NO: 66095 - RNA, 75 nt, Homo sapiens
cgagggacaagcagggcggagcagcgggagccagggcccggggacacgagcggccccagcgcccgcacaaggcac

SEQ ID NO: 66096 - RNA, 82 nt, Homo sapiens
gagccaaggaaaaacagcaagaacccaaaaggggcagcgcaagaccccgcacggaagcagcaagcacaggcagcgcagagcc

SEQ ID NO: 66097 - RNA, 80 nt, Homo sapiens
caaggacgagcgacaagaagacgaagaaggaccaaaccacccaggacacggagcagcgggagcccagacgccgcgggagc

SEQ ID NO: 66098 - RNA, 101 nt, Homo sapiens
cacggagcgggggcaggaggcccagcggccaggcggcggaggagaagccagagacgcgcacgaaacgacgaagaggcccgaggacagaggagcaaaggagg

SEQ ID NO: 66099 - RNA, 56 nt, Homo sapiens
cggccagaacccgaacaaaggcaggggaagaaacccgaaggcgggcccaagaggcc

SEQ ID NO: 66100 - RNA, 57 nt, Homo sapiens
cagaagaacgaaaaacacaacgaaaagcaccaaacaggggcgacagcaagaaggagc

SEQ ID NO: 66101 - RNA, 54 nt, Homo sapiens
cgcgagggcggacagcggggcccgcggaaaacaggaggagggcgccagcgaacc

SEQ ID NO: 66102 - RNA, 74 nt, Homo sapiens
cccagccagggcagccgaccggaccacagccagcagaacgcgggccaaaggagaaacaagaaggagacaacaac

SEQ ID NO: 66103 - RNA, 90 nt, Homo sapiens
cagggaccagcgggaaggcagacagcgagggcgacgagagcggaggacaccccggagaggacgggaggacggcagcacagggaaccacag

SEQ ID NO: 66104 - RNA, 90 nt, Homo sapiens
gcaagaaaaaacacgccgagcgacgaagaagaccggaagcccacaaagaccccaaaggaggggacgcacagaaaagacaaaacaaagacg

SEQ ID NO: 66105 - RNA, 75 nt, Homo sapiens
caacggacgggccggcccgagaagccggcaggcgaggcccaagagcaggacgcggcacgaagacccgaagaaaca

SEQ ID NO: 66106 - RNA, 74 nt, Homo sapiens
gccgaaaacagacagaacagaacccaaaagccgacaaccccagaaacaggggagggcagaacaacagcagcaga

SEQ ID NO: 66107 - RNA, 82 nt, Homo sapiens
aagcacgagggcaacacaaagcagcaagcagaaagccggaggcaacagccaaagcccaccaagaacgaggccagacaagaac

SEQ ID NO: 66108 - RNA, 84 nt, Homo sapiens
ggcggccaggccagacccgaaggccaggagacccgaccccaagggggcccgaaggcaccgcagaacggggcgggacgacaggag

SEQ ID NO: 66109 - RNA, 74 nt, Homo sapiens
ccaacaccacggacacagggacagagagaggcagaagaaaaagcacccccaagcgagagagcggcccaaaaagg

SEQ ID NO: 66110 - RNA, 53 nt, Homo sapiens
gcaccagaagcccccagcgggaaaagagcacccaagaccggaccggacgccca

SEQ ID NO: 66111 - RNA, 77 nt, Homo sapiens
ggaccacccgacacgggaggggaggacccgggacaccgcacagccgggaaagccagaggcgcagaggacaggaggcg

SEQ ID NO: 66112 - RNA, 81 nt, Homo sapiens
gcaccggcgccggcggcgggacacccaggcgggacagaaccgcaaggccacaaaccagacggaagcagccacagagccggg

SEQ ID NO: 66113 - RNA, 76 nt, Homo sapiens
ggggcccgcagcgcccgcaaccggggcgaacaggcggccgccaagggggacaaaggggaggacccgagaagaaccg

SEQ ID NO: 66114 - RNA, 38 nt, Homo sapiens
gagaaggaagaggggaaaaggacaagagcaccaagaga

SEQ ID NO: 66115 - RNA, 80 nt, Homo sapiens
gcgacgcgagagaaggacccacggcgcgcgaaggcgcaggccaaccaccaccgggaagagccaaccccagccccgacagc

SEQ ID NO: 66116 - RNA, 78 nt, Homo sapiens
cgcgagggaagagcggcgcccagccagaccaagaccgagacggagaccgagagaccgcggcagcacacgggccacacg

SEQ ID NO: 66117 - RNA, 75 nt, Homo sapiens
aaaacggaaaggaaacacaacaccaagcccacaagggaccaaggcggagacagcgagacaaggcggacgacccca

SEQ ID NO: 66118 - RNA, 73 nt, Homo sapiens
caagacaaaaaaaagaaagaacgccaaagagaaaaaaagaagcagcaaagggaagccgggggaggccacggac

SEQ ID NO: 66119 - RNA, 73 nt, Homo sapiens
ggacaagcgggcagaacagcgcggcaggcacgcagcacgggggcaggggccgacccagaacgccagcgccgca

SEQ ID NO: 66120 - RNA, 57 nt, Homo sapiens
ccccgacagcgggaacagacaggaggaacagaagggaaaaaagagaacggaaaaaca

SEQ ID NO: 66121 - RNA, 71 nt, Homo sapiens
accgaaaacgggcaaggcggcaagagcgagcacaccagaaccagacccaaaagagcaaacaaccgacggag

SEQ ID NO: 66122 - RNA, 66 nt, Homo sapiens
acccagaaaggagccagaacgggaaggccgcaagagacaccacaaaaggacacccgagcgcggaaa

SEQ ID NO: 66123 - RNA, 85 nt, Homo sapiens
ggcgggcaaccagcgggcccggccgccacccgggaaagacaggccgacagcggagacgaaagagggcacccacccacgaagggag

SEQ ID NO: 66124 - RNA, 72 nt, Homo sapiens
aacaccaaaaacaaaacgaaccaggacggcaaccccacaagacacggacacaccaagcccgggccaaggaga

SEQ ID NO: 66125 - RNA, 80 nt, Homo sapiens
gcggccaggagcgcggagcggcccgcgagcgcagagcgcagaggacggagaccgggccaagcaacgaacgacagggaaga

SEQ ID NO: 66126 - RNA, 77 nt, Homo sapiens
aaagaagcgaaaggcaacgcaggcaagcaggccccgccagaggcaacccacagccaccccagcccccggggacaccc

SEQ ID NO: 66127 - RNA, 71 nt, Homo sapiens
cggaagaaccccccgggagccagaccggcaccgaagaccgaaggaacgcggccacgaaaaacgaaaaaagc

SEQ ID NO: 66128 - RNA, 76 nt, Homo sapiens
agaccaaacggcaaggaagcgccccccccaccacggcaagccgcagagggaaccagccgacaggcgaccccgcgag

SEQ ID NO: 66129 - RNA, 65 nt, Homo sapiens
gagagggcagacagaaggaaacagcaaggcccgagaaacggcgaggaaagagaggagccccggaa

SEQ ID NO: 66130 - RNA, 67 nt, Homo sapiens
acagagggaaaacggaccacaccaacaaggcacacacagggacccaagagcacccagaaaaacgcca

SEQ ID NO: 66131 - RNA, 75 nt, Homo sapiens
ccccaggacgccagaccaaaagggagaagacgcaggaacccgaggcgagacgaggacgcgcacaggaaaggacgc

SEQ ID NO: 66132 - RNA, 46 nt, Homo sapiens
gcggaaaccgacagcgcagccagccgcaacgaagacaaacagaccc

SEQ ID NO: 66133 - RNA, 52 nt, Homo sapiens
caggggcagcaccaaaggagcacaccaaccaaggcaaaaacagcaaaagaaa

SEQ ID NO: 66134 - RNA, 74 nt, Homo sapiens
ggagaaggagggaaaaccgccaagggagcggaaggaggaagcaacccacaggcacaaacagagaacgacggggg

SEQ ID NO: 66135 - RNA, 75 nt, Homo sapiens
cggacagagcagacagaacagacaaggggacacggaccaccacaaagaaaaagaaagaaaaggccggaggccgcc

SEQ ID NO: 66136 - RNA, 79 nt, Homo sapiens
ccagcccaccggacacgagacgggaaaaccaacaaggaaaaccggaagcacaagggagagacaggaggggaaacgccag

SEQ ID NO: 66137 - RNA, 77 nt, Homo sapiens
gcgcagccaccccccacccacgcaggcccgcacaccggcacagagacccagaccaggcacaagggacagacaaggcg

SEQ ID NO: 66138 - RNA, 71 nt, Homo sapiens
gccgggaccaacaggggcaagacaagccagaacgagaagcgcaccacagagaagcgacgcccagacacgaa

SEQ ID NO: 66139 - RNA, 73 nt, Homo sapiens
ggaaagaaaacgaaaaaccgggacaaagacgcggcacaagggagcaggaaccaggaacggagagagaggcaca

SEQ ID NO: 66140 - RNA, 118 nt, Homo sapiens
agacagccgcggccaagaagcagaagcgagcaggacgagaacagcaaccagaccccggagacgagaagagaaggaagccaacaccggagccagaaagccgaacccacggccagaggaa

SEQ ID NO: 66141 - RNA, 57 nt, Homo sapiens
aacagcaaaacccccaccggacaacccacaggagggccagaggacaaagcacggcgg

SEQ ID NO: 66142 - RNA, 72 nt, Homo sapiens
aaaagaaggaagaacgaaaaaagggaacccaggcaagcggaagccgcagaaggaccggccagaagcaagccg

SEQ ID NO: 66143 - RNA, 66 nt, Homo sapiens
cccaagcaccagcccacagcccaaaaggcagagcgaggagagaagaaggagggaaagccaaacaac

SEQ ID NO: 66144 - RNA, 81 nt, Homo sapiens
ccagacgccaacgcaggagcacccaggcagcaccgggaccggaggcccagagcgacggacggagaaccaggcccgcagcag

SEQ ID NO: 66145 - RNA, 67 nt, Homo sapiens
gagcagaccggccagccacgaagcagagagcaaagcaccacaggggaaaacaagcagaaccggggac

SEQ ID NO: 66146 - RNA, 80 nt, Homo sapiens
ccccggcgccgcgccggcggcggggagcgcggcgcacccgcgcgcagcagcagagagcgaccgggagcgccgcgcagcga

SEQ ID NO: 66147 - RNA, 60 nt, Homo sapiens
ccgccgcggagacccagcgcacgggagcagccagaagacaagggcagagccaagcgccgc

SEQ ID NO: 66148 - RNA, 76 nt, Homo sapiens
ggccaccaggaggccagggggcgccagagcacggacgcccgggagcgacggggaagacggacgccagcggccccag

SEQ ID NO: 66149 - RNA, 40 nt, Homo sapiens
caggagaccaagaacaaggacgcacgcaagcaaaacaaca

SEQ ID NO: 66150 - RNA, 67 nt, Homo sapiens
caccgccacccagacccccgggagcacgagagcgccacggccgcgaaaccccccacacgcagcaccc

SEQ ID NO: 66151 - RNA, 73 nt, Homo sapiens
gaaaaccagcccagggcaagagggaacaacagacaaaggaagagcggaaaaaacccaaggaaccaccggacaa

SEQ ID NO: 66152 - RNA, 61 nt, Homo sapiens
gaaaaaaaaagaaggcgggagacgaagcagcagcagcgagggaaagcagcccagagccccc

SEQ ID NO: 66153 - RNA, 68 nt, Homo sapiens
ccacaaagcggccgaaacagaaaacaagagaccacagaagcaagaaggagaacaagaagcaaaccaag

SEQ ID NO: 66154 - RNA, 70 nt, Homo sapiens
cgccgccaaggcacccaggaaacagagcaaagcagcgacaacaaagacagaggaagaaaaacagacagac

SEQ ID NO: 66155 - RNA, 74 nt, Homo sapiens
acgcaaccccagaccaacacacaccccggcgacccaccaaagagccgggggacaaagaacaaacggaaaagaaa

SEQ ID NO: 66156 - RNA, 73 nt, Homo sapiens
gaggagccacagcccccaaacagaccacacaagcaaggagccgaagggagaaggacggcagaaaacgagacgc

SEQ ID NO: 66157 - RNA, 62 nt, Homo sapiens
cgcccgccagcggccaagaagcccgcccaggcagaagccaagaccggcccgaggcggccgcc

SEQ ID NO: 66158 - RNA, 67 nt, Homo sapiens
aaaacgggacaacggggaccagcccaacggagacgacagcggcgccaaaagagaggagcgcccagcc

SEQ ID NO: 66159 - RNA, 73 nt, Homo sapiens
gacaagaagcagacggccggagcgagacgaaaggagaaaggaagaaccccagcacaagaagaaaagacaaaac

SEQ ID NO: 66160 - RNA, 115 nt, Homo sapiens
gccccggggcacagcgggcccggcagcgaccagcggccggcccagccgcgggcagggaagcaagagagacaaaaccggcaggcaacaaagaagcacagagaagaacgagaaaagg

SEQ ID NO: 66161 - RNA, 107 nt, Homo sapiens
aacagaaaccccccacaggaaaggagggaagccagaggccaaaggcaggagacagagggaaaaggaagaaacgcggggaaacccaaggaaaaagaaggagagcaagg

SEQ ID NO: 66162 - RNA, 83 nt, Homo sapiens
gaccccaagaccagagccgggaccccagccagcagcgcacccacaccagaaagcggcgggcacaggggaaaaaacaaaacaag

SEQ ID NO: 66163 - RNA, 50 nt, Homo sapiens
cggacgaaggaccaccaaccaaagcagcccagggcgaggaacccagaaac

SEQ ID NO: 66164 - RNA, 72 nt, Homo sapiens
gcacgggaggaggagagcggcccgaaagaacgagagaagcagcggggcggcggggacagggggcgggagcag

SEQ ID NO: 66165 - RNA, 99 nt, Homo sapiens
aaacggcccacccaagagcgaagggaggagaaagacggcacaagaaaggagcacccacgggagaccggggggcaagaaaaggaagaagaagcacaccac

SEQ ID NO: 66166 - RNA, 75 nt, Homo sapiens
ccaccgaaaaccaaaaagaagggagaaaaaaggaccagagccagacacgaaggcccaggcacaacagaggaagca

SEQ ID NO: 66167 - RNA, 78 nt, Homo sapiens
gggacaagcagcaaggcgcggggggccacgcgaggccgagaaggagagaggcgccgggggagacccaaccagaccagc

SEQ ID NO: 66168 - RNA, 72 nt, Homo sapiens
gcaacagggcagaaaaccagccccaggaggggacaaaaccccgaaaaaggcgagaccggaaaccgagagaaa

SEQ ID NO: 66169 - RNA, 70 nt, Homo sapiens
gaggcccgcagccgggacaagggcaccgggaaaccaccaagcaggggcgcggagccccagccaggaccca

SEQ ID NO: 66170 - RNA, 80 nt, Homo sapiens
cggcacccgggacaaggcagacgggagcgcaaggcgccccaaggccagacaaaacagcaccgggccggcggcgagccccc

SEQ ID NO: 66171 - RNA, 73 nt, Homo sapiens
ggaccggccaggaaaacaagagcaagaccccaagcagcaagccaaaacacccgagcaccaccggccagaaggc

SEQ ID NO: 66172 - RNA, 82 nt, Homo sapiens
ccaggagcaggaacaagaccacacagcggagaacaaaaggacggcgaggcggaacgagcccgccgaagaaagccgagaggca

SEQ ID NO: 66173 - RNA, 59 nt, Homo sapiens
gcaaggcaacggccccagagggcagggccggacacggcgcgggacgagcaccggagcgc

SEQ ID NO: 66174 - RNA, 53 nt, Homo sapiens
ggcgcgcaggagccaaggaccgccagcagcagccgaaaacgcacaagaccaac

SEQ ID NO: 66175 - RNA, 56 nt, Homo sapiens
ccaaaaacgcggaagacggggcagcacaaaaagagaggaagacaagccagagaggg

SEQ ID NO: 66176 - RNA, 73 nt, Homo sapiens
cacgccaggacggaggacaggaagggaacgggaaagcgcaacaggacccaaacagggcgaagcgaggaacaag

SEQ ID NO: 66177 - RNA, 75 nt, Homo sapiens
agcccacgggaacaagaggggacagaaagggaggaccacaggccacccagaagggccccaccccaaggggagggc

SEQ ID NO: 66178 - RNA, 73 nt, Homo sapiens
aacgaagagacgacacaaggagacgaggggaagagggaggggcaagacgcaacacggccagaaaccagaacag

SEQ ID NO: 66179 - RNA, 60 nt, Homo sapiens
cgaaaaaaaacagccaaggccagagaaagaccagcgagaggacaggaaacggcgaccaag

SEQ ID NO: 66180 - RNA, 77 nt, Homo sapiens
ccaacaccacagcagcaaggggcaggacaagaaccgccccagccccaccaccgcgccaggaccacccggccccggac

SEQ ID NO: 66181 - RNA, 73 nt, Homo sapiens
aagggcccgcggccaccggcaagacccacccgccacggcaccagcacgcggcagcgaaggggaaccaccccca

SEQ ID NO: 66182 - RNA, 57 nt, Homo sapiens
ccggcacgcaccacggccacccggccggccgaggccagcaggacagcagaccacagc

SEQ ID NO: 66183 - RNA, 77 nt, Homo sapiens
ccgagcaaagagcgaaaccagagcaagcagggcaaaagggcccaccgaacccaccccacccccaaaaaaacccagaa

SEQ ID NO: 66184 - RNA, 77 nt, Homo sapiens
gaccaggagacgaccagcaagcggaacccgggaaaagcaacgggaaaggcaccccccacaagaggagccagcggagg

SEQ ID NO: 66185 - RNA, 83 nt, Homo sapiens
cccccagacggcgacggcgacggggacggaacacagcagcccacagcagagggaggccgcgaagcgaagagaagaagaccgag

SEQ ID NO: 66186 - RNA, 85 nt, Homo sapiens
gacacgcacagcacgacggagaccaagagccgcggcgagccgcacagggcaacacacgcaccgcacggcccccgcccacaaagcg

SEQ ID NO: 66187 - RNA, 71 nt, Homo sapiens
cggaaacacccacagacgccaaggggacaaccggcgaaaggcccccagaaaaaacaccagcagcccagcaa

SEQ ID NO: 66188 - RNA, 71 nt, Homo sapiens
gacagccaagcagcgcacgcccaggaaggaggaggaagcgagcagacaaggagggaaggaacaaaaccagc

SEQ ID NO: 66189 - RNA, 84 nt, Homo sapiens
accggaccgcagcagcagacgaccgcagggccagcccacgaccgcgaccgcacaagcagccgccagcggaaccaagcggcgcgg

SEQ ID NO: 66190 - RNA, 50 nt, Homo sapiens
cccaaccggggaggaaaaccgacgaaggagcaaccagggagcacagaaac

SEQ ID NO: 66191 - RNA, 71 nt, Homo sapiens
cgaagcagcgcaggaacagaagagaagaccagaagacggaacaaccccaggaccaggaacacccaagccag

SEQ ID NO: 66192 - RNA, 72 nt, Homo sapiens
gcgcggaggacgccccaccgccgacgcccccagccaccaggggcaccaccacgaggcgaggggccaaccaag

SEQ ID NO: 66193 - RNA, 69 nt, Homo sapiens
ccaggcaaaggaaccacccaggaaacagcgcaagggcgcgccagaggacaccagacccaaggcgcaaga

SEQ ID NO: 66194 - RNA, 82 nt, Homo sapiens
cgggagcgacgggcggcccaggcgcgcagcgggcgccccccgcaggccagcgaccaccgcagaggccccagcagcgaggacc

SEQ ID NO: 66195 - RNA, 87 nt, Homo sapiens
cggcgccgaggcggccacccgagacgcggcgcgcacgcccggccgcggcaaaagcagaccggaaaacccaccggcaagaccacaccc

SEQ ID NO: 66196 - RNA, 76 nt, Homo sapiens
cgggagagcgcgccagccggccgcgaaacccgaaacaagagagacccaaaagggccagagcagggagacaaaagag

SEQ ID NO: 66197 - RNA, 62 nt, Homo sapiens
gaggcacacaagacagagaccccaaaggacgacacccgcgggccaggccaagagaaacaggg

SEQ ID NO: 66198 - RNA, 88 nt, Homo sapiens
caggcggcaaccaaacggcgccaaggaggagaaggagaagcggcgcccgaccagcggaacgaagaaggagacgcagcgccacggagga

SEQ ID NO: 66199 - RNA, 67 nt, Homo sapiens
agaaacccccgggagacaggaagagagaagacagcagcgaacaagaaggggcagcccaccgggggcc

SEQ ID NO: 66200 - RNA, 65 nt, Homo sapiens
ggcgacccagacggggaaagcggaaggaagcgcggagacgggccgagacccaaggccaagggaaa

SEQ ID NO: 66201 - RNA, 74 nt, Homo sapiens
aacagggaagaggcggcgggggagaagaggaagcgaagccacaagcagcggagaccgggccaaggcaggaagac

SEQ ID NO: 66202 - RNA, 60 nt, Homo sapiens
gcaaagaaggcacaggaaaccagcggcgagagagagcaaagaagccacacacagaagacc

SEQ ID NO: 66203 - RNA, 61 nt, Homo sapiens
cgggacgaaaggacaagcaagaaagggcggcgacggcggcgcgaggaccgaccgggcccgc

SEQ ID NO: 66204 - RNA, 77 nt, Homo sapiens
aaagagaggaaagaagaaaaccaagaaagccccacgaaggcggcacccccacaagcgggaggaacagacacgccaga

SEQ ID NO: 66205 - RNA, 77 nt, Homo sapiens
gagagacgagaggaaaccggaccaggcagacacaccgacgaaaagaagggggggccccagcccggccgaacgggcgc

SEQ ID NO: 66206 - RNA, 40 nt, Homo sapiens
caccgcgggcaaaccgcccgggccgcggaggaggagaaca

SEQ ID NO: 66207 - RNA, 85 nt, Homo sapiens
ccaacccaggcacagcggagccggcgcggggccacaaagacagaagcgaaggggacagggggagaaccgccagggaaacccgggg

SEQ ID NO: 66208 - RNA, 70 nt, Homo sapiens
aagaaccggccaccggccccacacgaccggaaaggacagaagccacaaaacacggcacgccagacacaac

SEQ ID NO: 66209 - RNA, 74 nt, Homo sapiens
agccaggagcccaacaaacgcagaaccgaggacagaggaagggggacggaacaccaccaccgacaaccaggaac

SEQ ID NO: 66210 - RNA, 99 nt, Homo sapiens
gaaaaacaagaaggaaaaacgccacgcaccggagagagcacaggcgagaagaaagccaaggcagcaggaagaagcgggaagaaaaccaggggcccgggg

SEQ ID NO: 66211 - RNA, 81 nt, Homo sapiens
cgcggcagcggagggacggcagccgcgcgagggaaaccaaagggcagccagaccacacgcaacacacagccgcggagaagg

SEQ ID NO: 66212 - RNA, 74 nt, Homo sapiens
cacggaggggcagccacccccggaacagagcagccaaggccggggaggagaaggaggcggccgcacgaacgccc

SEQ ID NO: 66213 - RNA, 47 nt, Homo sapiens
cggacgggagggaaaaccagggcagcgacacccagacccaccggacc

SEQ ID NO: 66214 - RNA, 67 nt, Homo sapiens
ggaccccggagcccagaagacagagggcgagcggcgcacgacacgggaaaaggggggcacccacacc

SEQ ID NO: 66215 - RNA, 79 nt, Homo sapiens
agaaaccagggagcgcccaagaaaccaagaagaacacacccaaagcaaacagagcagaccaaccagcagccaagcaacc

SEQ ID NO: 66216 - RNA, 93 nt, Homo sapiens
acgcccaccaaagaggaaagcgaggaggagcgagcgcgagaggacggcccccaagacagaacaccgcagaccacaccccagcaaaaaagagcc

SEQ ID NO: 66217 - RNA, 74 nt, Homo sapiens
acgcacaaaaaccaaccgagggaaaaagccacgagcaagcaaaccccgaaaccacaccaccagggcaagaaacc

SEQ ID NO: 66218 - RNA, 86 nt, Homo sapiens
ccgcccggccgggagccgccgcgggcaggacgcgcgcgcaggccgggcccaccagcggcgccaccgcgacgaggacaaagccggcg

SEQ ID NO: 66219 - RNA, 72 nt, Homo sapiens
gcggcccaacaaccgccggacaaacagaggaggcagagcccgcgcggggcagacccacgcggacgacagccg

SEQ ID NO: 66220 - RNA, 73 nt, Homo sapiens
gcggccggcgggcaaaggacgccaggaggaagggacaaaaggagccagcagcccaagcaagcagcgaaacaag

SEQ ID NO: 66221 - RNA, 40 nt, Homo sapiens
acccagaacaaaaagggccagacaacgggcggagaaggaa

SEQ ID NO: 66222 - RNA, 71 nt, Homo sapiens
aacacaaggcaggagcgagaagagagagcagagacagccgcggggccgcaaggccaggcgcgcagaggcac

SEQ ID NO: 66223 - RNA, 42 nt, Homo sapiens
cggcccgcgaggcgggccaggaggcaacagcacaggagcagc

SEQ ID NO: 66224 - RNA, 74 nt, Homo sapiens
ccgacggccccgggggcgcgcgcccaccaccccgcccccgcccgagcgaagccagaggacaacagagcaaccag

SEQ ID NO: 66225 - RNA, 86 nt, Homo sapiens
cggagagacaccccaccgaaagcgcgcagggccgccaggcacccggaaggcagccccccagggaccagaccccacaagaaaacaca

SEQ ID NO: 66226 - RNA, 76 nt, Homo sapiens
gaaggacgagccccggggaaagaccgccagcgaggcagacacacggcaaaaggcaacacaagggcaggccagcacc

SEQ ID NO: 66227 - RNA, 73 nt, Homo sapiens
cccccagccggagccccagacaacccggacggccggccaaaggaaagagaagggcgagaccacgacaaagcaa

SEQ ID NO: 66228 - RNA, 64 nt, Homo sapiens
acccagaggccggggaccgccaaccccccaagaagcagagcgacacacagacagccccacccgg

SEQ ID NO: 66229 - RNA, 53 nt, Homo sapiens
ccgcccaaggaggcccagcgcagagccccgagaggggcgcgcagaaacgggaa

SEQ ID NO: 66230 - RNA, 51 nt, Homo sapiens
aaacacgcacagcggaaacaagacggcaaccaagccgggaaaaaagcaaag

SEQ ID NO: 66231 - RNA, 86 nt, Homo sapiens
ggcccggcggcagcggcgcggagaaggcgagcgaaggggaccagaagccaggagaggcgccgggacgggcgcacgccacgcaagac

SEQ ID NO: 66232 - RNA, 70 nt, Homo sapiens
gcccgcggaggagcgcccgggggccggggggcagacaccgggcgccccggcgcgcggacacaggacaagc

SEQ ID NO: 66233 - RNA, 53 nt, Homo sapiens
ggccggagcgacgcgcggagcgagaggacacagagcaggacacgcccagggga

SEQ ID NO: 66234 - RNA, 80 nt, Homo sapiens
ggcccgggccggcgcccgaggggaagagcggcccggcccgagagcccaaaacaacccgcccagagccgacgcaccgccag

SEQ ID NO: 66235 - RNA, 75 nt, Homo sapiens
acgaccccacgcggacgggcgaggagaacacccggaccggacacgccgagcagaagagcaccaggccagggggcc

SEQ ID NO: 66236 - RNA, 94 nt, Homo sapiens
gacaacagcacaccccaggcacaaacaagaggcccggacacaggagaaggaagaccaaagaaaaacacaaagcacgcaagccaaaagcgcccca

SEQ ID NO: 66237 - RNA, 73 nt, Homo sapiens
acgccgaaccaggaacaacaagaaccaagccacagggaaaacacacacaacaggcaaccaagaaaacacccaa

SEQ ID NO: 66238 - RNA, 72 nt, Homo sapiens
aaagaaagcgacaaggaacaagggagaaaggaaaccaaagggagaacgacgaaaagcggcagaacagccgaa

SEQ ID NO: 66239 - RNA, 75 nt, Homo sapiens
agccagaacgggagagggcaggcgcccccacaacccggcggcccaggggaggcggcgccacaccgcgcgaggcgc

SEQ ID NO: 66240 - RNA, 65 nt, Homo sapiens
aggcggggggcgccggcggggaccgcggagccgcgggcggcagagaaccagagagcacagagaaa

SEQ ID NO: 66241 - RNA, 80 nt, Homo sapiens
cccgggcagccagcgggaccccgcagacgaggacaacccgaagagagcgccggccgcccgcaggacaccgagggcccagc

SEQ ID NO: 66242 - RNA, 86 nt, Homo sapiens
gccgggacggggcccagacccccagacggaagagagcgcggcagcgagcgagcagcgcgcgccggagcgcagggcgagcgcggcgg

SEQ ID NO: 66243 - RNA, 86 nt, Homo sapiens
gccgggcggccgcggcgagaccggacccaggggaaggagcgagacacgacgaaggagaagaagccaggagacgcgagagcaaggac

SEQ ID NO: 66244 - RNA, 73 nt, Homo sapiens
aaccgggacgccaaacgaagcggccgagacgagcggacaggggccagcccgcaccgggcacccagcgaccgca

SEQ ID NO: 66245 - RNA, 58 nt, Homo sapiens
ccgccgcgcaaaaaccgaggaaggagagggaccggaccagaacagccagcaaagacaa

SEQ ID NO: 66246 - RNA, 72 nt, Homo sapiens
aggagaagcagccgccggcgcgcgagccacacaacccgcgccggccgcgggaaggagagccaggacacggcc

SEQ ID NO: 66247 - RNA, 73 nt, Homo sapiens
gaaggcgggagcggcccacgcagaagcaaaggagaaacagaaacggaaaccacgcccaaccagagcaagagca

SEQ ID NO: 66248 - RNA, 85 nt, Homo sapiens
acagaggaaggggagggccagcccgcgaaccggccggagagaagagaggagcaggaggcacgccaccggaaaaccggcggacccc

SEQ ID NO: 66249 - RNA, 78 nt, Homo sapiens
ccgccgccccgcaaccggcagccgccgccgggaagggcccaggacagaaggcgggcaaggagcgccccccgagcaccc

SEQ ID NO: 66250 - RNA, 85 nt, Homo sapiens
cgccgccccacgccggaggaaccgagaagagcagagcggagggagccccagacacggaccgggcgaggaagagaaggcgggagca

SEQ ID NO: 66251 - RNA, 73 nt, Homo sapiens
gcccggcgccccaccccaggcggcgaccacagcacacaagccgcgaccacgagcgccagaagaagaagaagac

SEQ ID NO: 66252 - RNA, 78 nt, Homo sapiens
gccggccgcgccaccgcaccgccaccggcccgacccagcccaggggccccgggcgggggcaacagaaggggacgacgg

SEQ ID NO: 66253 - RNA, 80 nt, Homo sapiens
ggacccaacaggacgccccaggcgcaggagcacggagccgccgccgcccagagaaacagagggcaaagaggaccaaagaa

SEQ ID NO: 66254 - RNA, 79 nt, Homo sapiens
gagcggcggagagccgggagaaacacaaagagccgagacccaggagaagaggaaagagaagcgacggagaacagcaccc

SEQ ID NO: 66255 - RNA, 70 nt, Homo sapiens
agagccggccgagcgaaaggaccccagaggaggcgacacaagaaggaaagggaaggagagaccgggagca

SEQ ID NO: 66256 - RNA, 73 nt, Homo sapiens
caagacacgggccccggaaacagggagccaacccaggaaacgaacggcccgaccagcccgacacacacccaaa

SEQ ID NO: 66257 - RNA, 86 nt, Homo sapiens
cgccgcccagcccggccccgcccgcgccggaagagccacgccggcgcggcagaggaagaagaaggcgcaaagcgccgaagggagaa

SEQ ID NO: 66258 - RNA, 40 nt, Homo sapiens
ccaaagggagacacacacggggcagaccaggggaccccac

SEQ ID NO: 66259 - RNA, 74 nt, Homo sapiens
cgcccacggccgcgaccggccggggaacacaagacagcggcccacaagacaaagcccacccacggcaggaaaga

SEQ ID NO: 66260 - RNA, 77 nt, Homo sapiens
cacagaaggacgaagagcgacagagaacaggaagcgggcaggaggccagaggcagaaccccaaaaccagcagaccac

SEQ ID NO: 66261 - RNA, 66 nt, Homo sapiens
cgaacagcaaaccacccagcaggaaaccaagagaagaaggcgcgggagaaaagccacccccacaga

SEQ ID NO: 66262 - RNA, 38 nt, Homo sapiens
ggccccagaccggcagggaaacgcaggagcagaacggg

SEQ ID NO: 66263 - RNA, 84 nt, Homo sapiens
aggcggggcgacccggggggcgcgcccagagccccgcgcagcccagggaaggggacccgacaggacgccccgaagagggcggaa

SEQ ID NO: 66264 - RNA, 78 nt, Homo sapiens
cgcacgcggaagcgccagggcaggagaaacccagcgggcccagagacgcagcgggaaaaccaaggcaagccaggcgag

SEQ ID NO: 66265 - RNA, 89 nt, Homo sapiens
gccccggcggcccgaccgggccccagccacgcaggccacgcggccacgagggcagcggccaccagcgccacgggccagagcccgcccga

SEQ ID NO: 66266 - RNA, 72 nt, Homo sapiens
ccaggccacgccgccgcagcgcccccgcagcaaaacacccccagacacaggcgcgcgacgggaccacaggcg

SEQ ID NO: 66267 - RNA, 75 nt, Homo sapiens
gggcacggagggggccggccgccgagcccgagggcacgaaccgggaaagaggagccgggggggcgagcccgccga

SEQ ID NO: 66268 - RNA, 79 nt, Homo sapiens
ggacccccaacaccagcaccgcagaggcaaggggccaccaggaggccagggggcgccagaagagggggaaccgacacgc

SEQ ID NO: 66269 - RNA, 83 nt, Homo sapiens
gaaaagagcagccgcccccgccggccggcccaacaaaacagaagccacaggcgaagaaggccaccccaggaaaacaaacaaac

SEQ ID NO: 66270 - RNA, 77 nt, Homo sapiens
cggaccgggccccggaggcaggcggcggaaggaaccgcccgccgccacacgcgcaaagcccgggggagagagacgcg

SEQ ID NO: 66271 - RNA, 70 nt, Homo sapiens
gcggggagagggggcggcgccgcccaagaagcgcgcgcccaacgggcacagaccaggagagagaaagaga

SEQ ID NO: 66272 - RNA, 80 nt, Homo sapiens
aaacaagaacccgcccgcggggacccacgggaagaagacgaggcggacaggcggagcgcgggaaaaggaccccacgaagg

SEQ ID NO: 66273 - RNA, 83 nt, Homo sapiens
gcggccggagccgcgaagcgagagggcgggcgcggcggcggccacgcagacacacacgagacccaggcacagcgcgggccgcc

SEQ ID NO: 66274 - RNA, 78 nt, Homo sapiens
gcgcggacccagccgcccggagcaagacccgaacaggacaagaacaaggaaaacaagagaaccgaaaaagaacagaag

SEQ ID NO: 66275 - RNA, 67 nt, Homo sapiens
aacagggacgggggcagggacaagggaaagaaacggcggaaaaacagacggcaaaaacgagagaaga

SEQ ID NO: 66276 - RNA, 73 nt, Homo sapiens
agaagccaggccgggcgggggagaccagcaagcaagcagaggaaagcgccaagagaaagacagcaaagaaaag

SEQ ID NO: 66277 - RNA, 69 nt, Homo sapiens
caaaggccaagaagggggcagacagcaccgccggccaggaggagagcgcaccaccaaaaaggcaaacac

SEQ ID NO: 66278 - RNA, 81 nt, Homo sapiens
cacgcaggaacggcccagcacaagaccgcgacagggggaagaagagcgcaccgaaggcacaagggaaaccagaacaaaagg

SEQ ID NO: 66279 - RNA, 73 nt, Homo sapiens
gacaggaagggaaaggagagacagcacaagaaaagaaagaaggccgagaaagaacaccacaagaagagggaac

SEQ ID NO: 66280 - RNA, 87 nt, Homo sapiens
ccagggaagcgcagaaagcaggcgaacccgcggcgcaaaacgcccaagcaggagcagcaacacgccggcgcccaaacccaaggcgaa

SEQ ID NO: 66281 - RNA, 77 nt, Homo sapiens
gggaaggaggggcagcgggggggacacaggccacacaacaggcgagagagcacgggagcaggaggccaggaacagag

SEQ ID NO: 66282 - RNA, 73 nt, Homo sapiens
cacccacgaccggccccaaggaaaaccagcccagacagcaaccacaacagcaagccaccggccacacacagga

SEQ ID NO: 66283 - RNA, 70 nt, Homo sapiens
cagagaaggggagcgagcccaggaaagagcggaacggggaggggaggagcagagccacaaggaccagaca

SEQ ID NO: 66284 - RNA, 75 nt, Homo sapiens
cgccaagcccggcccggcccgacaccgcgggccgccagacgggaaggagaaggagggggcagagcacggcaggca

SEQ ID NO: 66285 - RNA, 78 nt, Homo sapiens
ccaagaaaaagcaaggagaggaggagcacaacggagacaaaggaacagcagagaacaaaggaccgcaaacgaagacgg

SEQ ID NO: 66286 - RNA, 80 nt, Homo sapiens
ggacccgccacagcccgacgaaaggagccaaaggaaagggagcagcaccggccacacccacagcacgaccggaacccagc

SEQ ID NO: 66287 - RNA, 65 nt, Homo sapiens
cagagaaaggagcacgaaggaacaaagccacgaaaaccaaaggcaccgcgagaccaagaaaagac

SEQ ID NO: 66288 - RNA, 53 nt, Homo sapiens
gcccgaggggccccgaccccggcgcgaagcaaaggccagcggcccaggcggag

SEQ ID NO: 66289 - RNA, 75 nt, Homo sapiens
aagcaaaaagacccccaagaaaccaacggagcagcgcaagaaaaaccccaaaagagaagaaggagcaagaaagaa

SEQ ID NO: 66290 - RNA, 82 nt, Homo sapiens
cccccgagagcggaacagggagcaaggggacgcgagagaccacagggagccacagcccggagcggccaagcagacggacaca

SEQ ID NO: 66291 - RNA, 63 nt, Homo sapiens
gcccaccccccgaacccagccgcaccggcacaagagaaagaaggagggaggggagccccaggc

SEQ ID NO: 66292 - RNA, 77 nt, Homo sapiens
cggagcgcagcagcgcgcgacccggcccaaccccgagccgcgggcacagaggcgagggcgaaaaagagaccgaaaca

SEQ ID NO: 66293 - RNA, 70 nt, Homo sapiens
ggccaccacagaaacaaaagcaacaaagagggaagaaagaagcgaaagagagaagagcaagagaaagcaa

SEQ ID NO: 66294 - RNA, 72 nt, Homo sapiens
caggcaaccccggagcaagcacccgcgcagagaaccaggaaacagacagcgcccacaggcagccgaagaacc

SEQ ID NO: 66295 - RNA, 81 nt, Homo sapiens
gccgccggcggccaagcagccaaccagccaaccgggccccccagcagacgcgacagacgcgaagcaaagcgccacccagaa

SEQ ID NO: 66296 - RNA, 77 nt, Homo sapiens
aggagcaggcggccccgcagggcacaacacggagcacaagccccccagaagggcaaacggaggccagaagaggcagc

SEQ ID NO: 66297 - RNA, 57 nt, Homo sapiens
cacccgcagagcgaggaccggaagacccgacacgaccgaaaacggagggcccaaggc

SEQ ID NO: 66298 - RNA, 76 nt, Homo sapiens
cagaggccggagacacagacagcaacgggcagccggcgaccgcaagaggcggaaaccgcccaccaacaggaagcaa

SEQ ID NO: 66299 - RNA, 85 nt, Homo sapiens
cggcccgcacgccggcacagcgacaacgggggcagccagaaccgcacgaacgacacccggcgacgagagaagcagaagggaagca

SEQ ID NO: 66300 - RNA, 79 nt, Homo sapiens
aggaaagaaccaccgaccaggccaacaaggaaagaccacagcaagaccacgcccccagccgggggaccaggccgaacga

SEQ ID NO: 66301 - RNA, 66 nt, Homo sapiens
gaggcgagacacagcggaggccgcagaccggaggaccccgaagaagaaagaacaccggcagagaga

SEQ ID NO: 66302 - RNA, 65 nt, Homo sapiens
acggcggagaccccccaggacaacagcacacgcacccaagcggcaccccgcgacgaaaggaaacc

SEQ ID NO: 66303 - RNA, 78 nt, Homo sapiens
ggaaggcaaacccaagcaaagaccaaagccacagccaagagcccacggacaccacccaacgagccaggcagcgagcgg

SEQ ID NO: 66304 - RNA, 67 nt, Homo sapiens
gcggccacgacgcaagaagaagcgcggaccccggacgcaaggagaagaaaacgacaggaaaagccgc

SEQ ID NO: 66305 - RNA, 80 nt, Homo sapiens
accaccgcccagcgaccagacccaggcaccgggcgagcggaccagagacaaggccccgagggaggagcccgaaggcgcac

SEQ ID NO: 66306 - RNA, 64 nt, Homo sapiens
cggcaggaaccaccaggacagaaggcagaaacggggacacaagcgaaaggcaacggcgcacaga

SEQ ID NO: 66307 - RNA, 77 nt, Homo sapiens
accgccggcaaccccgggcggccgcaccgccaggagacaccaaaggaggcaagcaaagaccaaccaacgaagcaggc

SEQ ID NO: 66308 - RNA, 67 nt, Homo sapiens
ccagcagcagcagagcaggcagggcagaagaaaagccaccaaccgacagggcgaacaacgcagagag

SEQ ID NO: 66309 - RNA, 80 nt, Homo sapiens
cagcccgaggcgcaccagcaaaaccccggacaagaaagccagagaaacgacaccagggccgccgcacaagacccagcccg

SEQ ID NO: 66310 - RNA, 77 nt, Homo sapiens
ggggggccaccagcaccccgggaccgggaaacaagggccggcggccccgggagcgagacaagaggagccccaccacc

SEQ ID NO: 66311 - RNA, 75 nt, Homo sapiens
cccaggggaagagacacagagcagagccaaggacaagaccagggggaggagagaccccaacaccccaggagacgg

SEQ ID NO: 66312 - RNA, 72 nt, Homo sapiens
agggcgagcacgagcacccgccccaacgagcaagaaggccacggccaacagccgaaaacagcaaggagaaaa

SEQ ID NO: 66313 - RNA, 64 nt, Homo sapiens
gaccaggcgaagcggccgagcaggcgagcgaacgacgggcaaagaccaccacaaagagaagaac

SEQ ID NO: 66314 - RNA, 84 nt, Homo sapiens
cggacaagcccaggagccgaccagagagcaggccagaacacaaagcggaaccggaagaaaagcaacggaaacacaagcgccaag

SEQ ID NO: 66315 - RNA, 73 nt, Homo sapiens
cgcaagagagaggagggggcaccgagcaacgagggcagaaggagcgacgaaaggaagaagccaggggcgcggg

SEQ ID NO: 66316 - RNA, 98 nt, Homo sapiens
aagcacccagaaaaagaaacacaaccccgaaacaacaggcggcagcacccacccccacacagacccgggccaagaagaagagggggagcacccgagcc

SEQ ID NO: 66317 - RNA, 82 nt, Homo sapiens
acgacagcgagacaccgcaccaccaggaggggaaaggacaaggaaggagcggggaacgacacagcagaaaaagaaggccaaa

SEQ ID NO: 66318 - RNA, 79 nt, Homo sapiens
gaggcgggaggagaggaagggacggaagccccaaggcgaagccgacgagcccgaacagacgcaccagcgggaggaagag

SEQ ID NO: 66319 - RNA, 75 nt, Homo sapiens
agagaggcacacccaaagacggggaacaagacccgcagaggagaagacaaggccggaaggcgaggaggcacgagc

SEQ ID NO: 66320 - RNA, 97 nt, Homo sapiens
ggaacggggaacgacggcccagcaggcggggaagagaaagggaaagaaaccgacggccccaggagagagccagcaggcagcaggacgaaggagaaca

SEQ ID NO: 66321 - RNA, 77 nt, Homo sapiens
caacagcagccccagagaagcgggagacggagcccaaagacccgcccagacaggcggcacccagaagccagggggca

SEQ ID NO: 66322 - RNA, 84 nt, Homo sapiens
gacgggagcgaccgagcgggccgccgccgccgccagaaccccgaaaaccaagaaagggggagaccagccaacagaccgggcaga

SEQ ID NO: 66323 - RNA, 52 nt, Homo sapiens
ggaagaaagaaaaaccgaacgggcaagacgccaagagaaaaggcgagagcac

SEQ ID NO: 66324 - RNA, 67 nt, Homo sapiens
accccggccggcacaaggaaccagcccaagaagcaggggaagaagcgaaggagaccgcacagcaggg

SEQ ID NO: 66325 - RNA, 108 nt, Homo sapiens
gagaggcagcaaaaccccgcacgaaaggccggaaagaggggaggggcacgcaacaacacgccagaagcagcgaaaaagaacacaaaacggcagaaccagcaaaagaca

SEQ ID NO: 66326 - RNA, 72 nt, Homo sapiens
cgggaccgaaaccaaaaccacccagcaacgcgacaggccagccaaaaagagagccaagaggaaggaagccca

SEQ ID NO: 66327 - RNA, 70 nt, Homo sapiens
acagcacaccaggaagcaaggggggaaaccgaggaaccaagcgaaacgggagacgggcgcgacgggagaa

SEQ ID NO: 66328 - RNA, 76 nt, Homo sapiens
accagccgaaggggcagacaggagaggagagacgccacgaacagccacaaccagaagagagggagaaaccaaaaaa

SEQ ID NO: 66329 - RNA, 81 nt, Homo sapiens
aaggagcggaagaaggcaggccaaaccaccgaccagcaccaaggagaaacagagacgagcaaggcgagaggcaacgaacga

SEQ ID NO: 66330 - RNA, 74 nt, Homo sapiens
ggaccgcaacaccgcaacccacgcaggcaagggcggagaacggaaaagcaccaggaagcagagaggaccgcaga

SEQ ID NO: 66331 - RNA, 62 nt, Homo sapiens
gcaagaccagacgggaacgggagacaagcgcagcgaggagaagagagggaaaaacaaagaag

SEQ ID NO: 66332 - RNA, 80 nt, Homo sapiens
ccgagccacacccccccccagggccaaggagacggaagaagccaagaagaagcaagaaaacagaagcagaccagcggcag

SEQ ID NO: 66333 - RNA, 78 nt, Homo sapiens
ggcaagacaagccagaacgagaagcgcaccacaggaaaccgccaggcagggacagaccacgcagacacgaaaaccccg

SEQ ID NO: 66334 - RNA, 58 nt, Homo sapiens
ccggccacccaaagcacgggggcaacagaggccagaccaccacggaaacaaggacggg

SEQ ID NO: 66335 - RNA, 78 nt, Homo sapiens
gccgaaccagggccaccgcgcaaggggcagcggcgccgcaagcacgcgagcggccagacgcaacccaagaacaccgcc

SEQ ID NO: 66336 - RNA, 77 nt, Homo sapiens
cggaccgggccggaggagggaggaggagggagagaagaaggggcgacggggcaagcaagggccaaaggcgcggaaag

SEQ ID NO: 66337 - RNA, 85 nt, Homo sapiens
agcagggagaggagcgggaaacgggagggaaccagcaacaagccgacaacaggcaggaggaaagcacagagaccccagccaggcc

SEQ ID NO: 66338 - RNA, 66 nt, Homo sapiens
acgcagggcgcccccggaggaagggaaacgcaccccaagagcgcgaaagacgcagaggaggcccga

SEQ ID NO: 66339 - RNA, 84 nt, Homo sapiens
ggaccaacagaagaacccagaacaacccaagaggacaaacccccaggggcgccaggacaagggcacggcagaaggggcgggagc

SEQ ID NO: 66340 - RNA, 80 nt, Homo sapiens
cccaggcgccgggcgcggcgcagcgccgaggcgggcgaggcgccgcggaccagaggcgccgcacaaggcggccgaccaag

SEQ ID NO: 66341 - RNA, 79 nt, Homo sapiens
agcgaggcagcgacaggacgggaacggacaagggccgaacaccaacagaggaagaaaggagagccgcagaagcaagaga

SEQ ID NO: 66342 - RNA, 74 nt, Homo sapiens
aagagaaaagaccaaaggaaaagagcaaagaaaaacggcccaagacacaggaccccacggaagaaccaaacagc

SEQ ID NO: 66343 - RNA, 76 nt, Homo sapiens
gaaggcgggcgccagaggacaaggagaccaaagagaacaaccccgaagaaggggcaccacccagggcagagaaaac

SEQ ID NO: 66344 - RNA, 79 nt, Homo sapiens
gcgagcccggaaggccggcgcccagagcaacgggagcccagggggcgccacagagaaagaacccaaaacgaaaccccag

SEQ ID NO: 66345 - RNA, 73 nt, Homo sapiens
agaaaaccaccaacaacacgccggcaaccaacagacccggagcagagcacagccgacccagcgcccgcacgca

SEQ ID NO: 66346 - RNA, 72 nt, Homo sapiens
gggaccagcaaacggaaaaggagagaacaggaggagaagagaggagagaggacgaaacacaccaacaaggga

SEQ ID NO: 66347 - RNA, 71 nt, Homo sapiens
gcccgcacccgggaccagcacaagcaccaggaagaagaggcggaagaaacaacaagcgcaaggagcgccca

SEQ ID NO: 66348 - RNA, 83 nt, Homo sapiens
gcagggcgaagcggcggcggcggggggacgcacgagcccggcgccggcaggccccgggccgcgcacacagacccgggcccaac

SEQ ID NO: 66349 - RNA, 80 nt, Homo sapiens
ccacgagggaaggagagcagcaaaaacaagacgccgacaccccaggccacgagccccaggccacggcagcaggcccagcc

SEQ ID NO: 66350 - RNA, 66 nt, Homo sapiens
agggagacgacgcgcgggccgcgagcggggcgacccgaggaagggccgacgaaggagaagcgggaa

SEQ ID NO: 66351 - RNA, 73 nt, Homo sapiens
cagccaaggcgacgcaacacacgagcgggcaacaaccagccacggagcccgcacgccaccgcccccaccgccc

SEQ ID NO: 66352 - RNA, 92 nt, Homo sapiens
aacgacccaacacgagcagagacacgggagcaaaaccagaacagaacccacgacaagaagaacaccaaacgcaagaagcacaaccccacgag

SEQ ID NO: 66353 - RNA, 75 nt, Homo sapiens
accaacaaggcccggacaaagccgaaaccagggaagccggagcgagaacaagagacacccgacggcagaagaagc

SEQ ID NO: 66354 - RNA, 53 nt, Homo sapiens
aaaaaaggaagcgaaaggcccaacgaaccgaagagaaaaggccaccaggaaac

SEQ ID NO: 66355 - RNA, 73 nt, Homo sapiens
gggacagcacccggccccaacggaacagacccgggaagccagggagaagaggaggcggaggacgggccaggag

SEQ ID NO: 66356 - RNA, 78 nt, Homo sapiens
ggcgccacgaaagccggccacgccgggccggagccgggcggagccgggagcggaggaggccagcagccaggcagcagg

SEQ ID NO: 66357 - RNA, 75 nt, Homo sapiens
ccaggaaaaacaccgggaggggcacgaagacccgaccaggagacggggagcggcagaagcacagccaggcaggaa

SEQ ID NO: 66358 - RNA, 78 nt, Homo sapiens
gagacagaaggccagacccggaaaccccgaaacagaagccaacagccaagggggccccagcagacacgcacacccccg

SEQ ID NO: 66359 - RNA, 78 nt, Homo sapiens
cagccccaccaggcccagggccggcccccccaggacaacccagaggcaacaaaggcgagaagcgcacaccacaacagc

SEQ ID NO: 66360 - RNA, 73 nt, Homo sapiens
cggcaccccgaggcccagaaccaccgcaggcaaaagaacccgcccacacggccagaggcacgacacagcaggg

SEQ ID NO: 66361 - RNA, 77 nt, Homo sapiens
gcaccgggcgaaaaggaggaaaagaagccagaccgaggcagaaggacaacaggagagcacgaaccaagcccacggca

SEQ ID NO: 66362 - RNA, 67 nt, Homo sapiens
gacagcacccggccagaggagacgccaaacgagcccaagacgaaagggagcaacgggagcgccaaaa

SEQ ID NO: 66363 - RNA, 66 nt, Homo sapiens
ccagaaacgaaaacaccgacaaaacaagcgagaggccagagggaacgggacggaaggccgacagga

SEQ ID NO: 66364 - RNA, 59 nt, Homo sapiens
gcgcggaaagcgggacggccaacaagaaggagagcagagccggagccagggcaggccag

SEQ ID NO: 66365 - RNA, 91 nt, Homo sapiens
acagcagcacccgagcaaaccccagcaagagcggaggcgcccggcggagcagaggaaccacacgcgacagacacgagaggcgagggacgac

SEQ ID NO: 66366 - RNA, 81 nt, Homo sapiens
gccgcccccaggccgcgccgagcccgccgcgcgggcccgcccgacgcggaagggaacaagcagacccagcgagccgggagg

SEQ ID NO: 66367 - RNA, 83 nt, Homo sapiens
gaaaacagggccggccgcagagcccaccggaaggagaaggaagaggagcgcacccacaaaagcgaaaagccagacaggaacac

SEQ ID NO: 66368 - RNA, 88 nt, Homo sapiens
gcggcggcggcgcggaggcgcaggcagcaacgaggcagcggcaggccagggcagccgcgaagagcgaaagccagggggcgaaacaaaa

SEQ ID NO: 66369 - RNA, 55 nt, Homo sapiens
ggaagaaccccccgggagccagaccggcaccgaagaccgcccgcgagagccaagg

SEQ ID NO: 66370 - RNA, 72 nt, Homo sapiens
cccgggcccaaaagcggaggccggaaaggaaaaacaccagaacggaaacagaaggacacaccagagggagcg

SEQ ID NO: 66371 - RNA, 37 nt, Homo sapiens
aacgaagaaacccgcaggagcaccagacagcaaacga

SEQ ID NO: 66372 - RNA, 69 nt, Homo sapiens
acaggacgggccacccaggagcagacggccagacgaagaaacaggaacgcagcaaggggagggccgaag

SEQ ID NO: 66373 - RNA, 56 nt, Homo sapiens
ccccgcagccggggacgcagacgaaggagcgacccgagcggcaggaagaaggagaa

SEQ ID NO: 66374 - RNA, 96 nt, Homo sapiens
ggcccaggcgggcggcccacaggcaggcggacccgccccgggagaagagaggacgaggccgaaaacacagcaccaacagaaggaagaggggaggaa

SEQ ID NO: 66375 - RNA, 86 nt, Homo sapiens
cagcgagggcgcaccgggggcgggggcgccagcccaccaagaagggccgagcacagcaagcaacaccaggagacaaagccacaaaa

SEQ ID NO: 66376 - RNA, 76 nt, Homo sapiens
gaaccaaaaaccgacacccgaagaaggcagcccacgaacaccgcagagcccccaaaccggaggaaaggccacccag

SEQ ID NO: 66377 - RNA, 60 nt, Homo sapiens
ccgggccgcgccacaccggcaccaagaggagccccgccacaccagcaggcgccaaacacc

SEQ ID NO: 66378 - RNA, 51 nt, Homo sapiens
ccagaacgccaaaagacggaccaaagaaaggaacaagggggcgcaacagcc

SEQ ID NO: 66379 - RNA, 69 nt, Homo sapiens
cccgcagacgcacgaggggcgcacgcacggaagaaaccaggcgacagagaagagagggacggcgcaaac

SEQ ID NO: 66380 - RNA, 80 nt, Homo sapiens
cgcagggaacaggaaaggcccacgcacagccccccgccccccccgcagcgcgcagagcccggccaagaacaagcagcagc

SEQ ID NO: 66381 - RNA, 62 nt, Homo sapiens
gaacaacccacagaagcccaacagcagggaagacacacccaggaccaaccgaaaacaaacac

SEQ ID NO: 66382 - RNA, 74 nt, Homo sapiens
gccagaccgcggggcacacaccggcgcggccgaacccagcgagaaaccaggaaccaccccgggagccgagccca

SEQ ID NO: 66383 - RNA, 85 nt, Homo sapiens
aagccccacacaggcaagacaacgacacaagcggggcaggcgagggaggagcagggccgccgccacaacagagcggccagaggcg

SEQ ID NO: 66384 - RNA, 75 nt, Homo sapiens
cgagacggcccggcgcagcgagcgcggacggagaggaaagcggggacggaacccagccgaagacccggcgaaaga

SEQ ID NO: 66385 - RNA, 75 nt, Homo sapiens
ggcgcgacacacacagcggaggcaaggaagcagacaagcacccaacaaaccaagagcccacagacacacccaaag

SEQ ID NO: 66386 - RNA, 73 nt, Homo sapiens
ccccgcccagcccagaaggcggaaacagaaaagcagcccggagaagacaaccacaaccacaaacggaagcgcc

SEQ ID NO: 66387 - RNA, 111 nt, Homo sapiens
cgcggggcggcgcgccgccgaaggcgggcgcagcggcggagcggagcggagcccggaggcccagggcagggcgcaagcaggagaaaggcgaaggcgcccccgcaggcggcc

SEQ ID NO: 66388 - RNA, 68 nt, Homo sapiens
gaggacgccccaccgccgacgcccccagccaccagggagcacgagacagcgccggccccaacgaggga

SEQ ID NO: 66389 - RNA, 74 nt, Homo sapiens
acagaccaagccacccaagcggggccagcagcagcagaggaaaaaagagaccgagagaaagcagcagaaagggg

SEQ ID NO: 66390 - RNA, 80 nt, Homo sapiens
gggaccggggagagcagacgcacacaggagagccaggacagccacaccccaagaggccacaaggccgccaccgacccaaa

SEQ ID NO: 66391 - RNA, 73 nt, Homo sapiens
agggccagagcgagagggaggcgccccaaagaggaaggagaagagagaagagacccacaacgcgcgagggacc

SEQ ID NO: 66392 - RNA, 72 nt, Homo sapiens
agaagagccgaccacaaggggaggacaaccgcccgggaccaggaaggggagacagcccgaagggcccgggga

SEQ ID NO: 66393 - RNA, 50 nt, Homo sapiens
ccccaggaggggacaaaaccccgaaaaaggcaggagcgccgcgcccaggc

SEQ ID NO: 66394 - RNA, 53 nt, Homo sapiens
aggcgcggacacgcaaaccacacaagaaaagagcaccggccagcagaaccagc

SEQ ID NO: 66395 - RNA, 93 nt, Homo sapiens
cgagccccccagccgcagacaaaagacccggggccggcccgcaaggcgcccccccagagagccagaaagaagccacccagaggagaaggccac

SEQ ID NO: 66396 - RNA, 79 nt, Homo sapiens
gacgcgcgcagcaccgcgccagggcgcacccccgagagagccacggaagggcgccaaggagccaccgccaccacggcgc

SEQ ID NO: 66397 - RNA, 92 nt, Homo sapiens
cgaggacgacggggcgagaccccgcccggaccgcaggggagcagcggaggaagccacaggacgccggggaccgacaggccacaggacccacc

SEQ ID NO: 66398 - RNA, 40 nt, Homo sapiens
gcccccagcacgagcgccccagcccagggccgaaaagaaa

SEQ ID NO: 66399 - RNA, 71 nt, Homo sapiens
gaccaagaaccagccccgacaagggaccgggcgggccccgcaggaaacccccaccggcccacacagacgca

SEQ ID NO: 66400 - RNA, 74 nt, Homo sapiens
ggaccaagaaccagaaaaacgcaagggaaaagagaaaaagaaagcgacggaaaaaaacaaaagaacacaacacc

SEQ ID NO: 66401 - RNA, 76 nt, Homo sapiens
agagcgcggagccgcgcccccgggggaaaagaaacaaacaacaagaagaaggacaaggaacgaaggcaaggaggcg

SEQ ID NO: 66402 - RNA, 79 nt, Homo sapiens
acagcagcgcgcaggccgagaagcgggcagccgagaagggccgaggcccgcaaaaggggccagccccagaaaaagagaa

SEQ ID NO: 66403 - RNA, 31 nt, Homo sapiens
agcccagaaaagaaggacagggcacccgaac

SEQ ID NO: 66404 - RNA, 50 nt, Homo sapiens
aagaaagacaacccgaaagaacaccgaaccagaggccggcccaggcggag

SEQ ID NO: 66405 - RNA, 80 nt, Homo sapiens
aaaggaggaaacagaaacagaacagaagacagagacacgacacagcagccaggcaaagggaaaagaacaaagaaccggga

SEQ ID NO: 66406 - RNA, 74 nt, Homo sapiens
caccccccgccgggagggccacaggaggcggcgggccccgcccgccgaaggggcacaggaaaaaagagcggaaa

SEQ ID NO: 66407 - RNA, 70 nt, Homo sapiens
ggcagcggggcggcgcgcggcgcggcggcggcccgccccgcggcccaggcacacagagaaaaaaagggaa

SEQ ID NO: 66408 - RNA, 73 nt, Homo sapiens
acagaaaagcgaaaaacgcgagaaggcagcaggaagaaacagcgaaccaaaaaccagcagaagcagagaagcc

SEQ ID NO: 66409 - RNA, 64 nt, Homo sapiens
ccggggccccgcggcgcaggaggcggggagcgcagagcgggcgagcgcgaccgaaacaaggacc

SEQ ID NO: 66410 - RNA, 53 nt, Homo sapiens
agcgcgagagacacaggaacggaccgcagggagcagaacggaaacagccccga

SEQ ID NO: 66411 - RNA, 72 nt, Homo sapiens
aaaagccggagaggaccacacaaccgagcagcacaggaaggacacagacaaaagaccaggagagagcagcaa

SEQ ID NO: 66412 - RNA, 106 nt, Homo sapiens
gcgaacgggggcgaacggggcgagccggaggagcacccaaccccgcggagaccagaaagcgggcaacaccaaccgagacgcgagagcacaaaacacaacaaaccgc

SEQ ID NO: 66413 - RNA, 76 nt, Homo sapiens
caagggccaggaagcagagagaacaggggaaaaagaaaagggcgaagacccgaagcagcgcaggaacagaagagaa

SEQ ID NO: 66414 - RNA, 80 nt, Homo sapiens
gcaagggaaagaacccggcggggaaaagggaaggaaaagagacgcagggaacacacaggcacccccaggaggacacagcg

SEQ ID NO: 66415 - RNA, 84 nt, Homo sapiens
cggggaacccccaaacggaaccagaggagcgccgggcacaggcacgcagcggcccgggacacgcccgcggacggcccgagcggc

SEQ ID NO: 66416 - RNA, 81 nt, Homo sapiens
cgccccagcagcaggggcgccagagcagagggacaaacccaggaaggaggacagaaggaccccaagcagcggacacccccg

SEQ ID NO: 66417 - RNA, 80 nt, Homo sapiens
cggccgccgaccccggcagcacaccggcgccccagacgcgcgccggacaacgccaagagccgggccagccacccgggacc

SEQ ID NO: 66418 - RNA, 76 nt, Homo sapiens
gcggccagggaacggggcacgcggccaacgcgggccaaaagcagagaaccaaagaacacggccaggacaagaccag

SEQ ID NO: 66419 - RNA, 80 nt, Homo sapiens
gccccagccccgcggccagacgccagcccacgaagcccaagcagcggcgggagaagacaagaccacggcagcacgacagg

SEQ ID NO: 66420 - RNA, 83 nt, Homo sapiens
gggagcggagaacacacagcggggggggcacaggacgagaacccccgcgaaccagaggaacccagcgagcgagagcggaccag

SEQ ID NO: 66421 - RNA, 62 nt, Homo sapiens
gccgaaaggacgaggaacgggccggaaaaggccgacagaacagaaaggcaaaaagagacaca

SEQ ID NO: 66422 - RNA, 73 nt, Homo sapiens
acccggggcggggaaaaacaagcccaagggcccccagggcacggcccacgagcagcgagcgcccccggccccc

SEQ ID NO: 66423 - RNA, 79 nt, Homo sapiens
ccccgggggaaaagaacgagggcgaccaagagagaaacagaacaaagaagagcagaaaacaaagacaagaaggcaagaa

SEQ ID NO: 66424 - RNA, 64 nt, Homo sapiens
aagcccacagagacacaaccggagcccagagccacgcaaaggaaagacggggccagacaaccag

SEQ ID NO: 66425 - RNA, 73 nt, Homo sapiens
ccccgagaagacggcgaccaccgacgcgccaccgggcagaaggaccgggggccgagagaggggcccaggccgg

SEQ ID NO: 66426 - RNA, 82 nt, Homo sapiens
cagaacggacaggggccgcgccgcgccgcgcgcgggagcgccagcaaggaggaaagacaagccccaaaagcagccgggaaag

SEQ ID NO: 66427 - RNA, 73 nt, Homo sapiens
agcccggacgcagcagccaagcccgcggccccgggggcccccgggccccagcaggcgaagaggaaccagagaa

SEQ ID NO: 66428 - RNA, 75 nt, Homo sapiens
aagcacgacgccccccagagcgcacgggaccagcggacccgcccaggacaagaagagcccggacccccggcgggc

SEQ ID NO: 66429 - RNA, 74 nt, Homo sapiens
ggcacagacaaccagcaagaagaccaaggaagaaaaagccaggagaaaagagaaggaaaacaaaaaaaggagaa

SEQ ID NO: 66430 - RNA, 77 nt, Homo sapiens
acaggcgaacaggacagaaaggccaaggcggaagggacgccgccggaacacaggacgggacgagaacgcgagaagag

SEQ ID NO: 66431 - RNA, 84 nt, Homo sapiens
ccaaccaaccacagaggccaggaaaggccccggagacaggaggccagagaggagggcagggggggccagccacaggagcaaaag

SEQ ID NO: 66432 - RNA, 63 nt, Homo sapiens
cccaaaaggcgggaacagggggcagacccaaaggaaacgcacgaaagaaacaggagagcgcag

SEQ ID NO: 66433 - RNA, 81 nt, Homo sapiens
gaaacaacgagagagccgaggagccagagcaaggggaacgccacggacggggaccacagaaggaagaggggggaaagagaa

SEQ ID NO: 66434 - RNA, 65 nt, Homo sapiens
acgggccaaaggagccacgggcaccggggagaaaaaggggggaggggaacagcagcggagaacac

SEQ ID NO: 66435 - RNA, 73 nt, Homo sapiens
ggagccggggaccaggaggagcgcgacccaaagacaggaccacgcaccagcagagaaggaaagcaaaccgaag

SEQ ID NO: 66436 - RNA, 42 nt, Homo sapiens
cccagcacggccgcaccggggaagcccgaacccagccccacc

SEQ ID NO: 66437 - RNA, 67 nt, Homo sapiens
aagaaaaagagaaagacgaccggaaggcccacgaggaagaaaggaccaagagaaaggcaagaccagc

SEQ ID NO: 66438 - RNA, 54 nt, Homo sapiens
caacagacccagccggcgaccaggggagagcccagggacgcggagggagcccag

SEQ ID NO: 66439 - RNA, 79 nt, Homo sapiens
gcgccaagccaaaacggaccacgaggagggagaaggccacagggaacccggaggacccgacagaaaaggaagaggcaga

SEQ ID NO: 66440 - RNA, 79 nt, Homo sapiens
aaaaccggcagcgagccgagcaaaggagaagacaggacagagcgacaacagagagaacggcccggacaccaggccagga

SEQ ID NO: 66441 - RNA, 67 nt, Homo sapiens
gagggcggacagcggggcccgcggaaaacagggaggggcgagcgacgcggaaagaagacccccagaa

SEQ ID NO: 66442 - RNA, 61 nt, Homo sapiens
gcgggcagcagcaggccgggcccccccgggggcgagaagaaacggacggcccccgcgcccc

SEQ ID NO: 66443 - RNA, 80 nt, Homo sapiens
cgagcaacgagggcaggagcggacagggggaagaggcagaccaggaggcccagcccacgggagcagacaagccccgacac

SEQ ID NO: 66444 - RNA, 77 nt, Homo sapiens
cgccgcagcggcgcagcccacgccagacgaccccacccgcgccgcgacccggagggagcccagccggagacggggcc

SEQ ID NO: 66445 - RNA, 72 nt, Homo sapiens
acaggacgaagaaagcaggcacagagcccacagcagggcgaccagccgacgaaggagcggaggacccgagcc

SEQ ID NO: 66446 - RNA, 60 nt, Homo sapiens
gcagcaggaggcgcgggcaggcagagcaccagaagagcaagaccaggccaggacaaacgc

SEQ ID NO: 66447 - RNA, 62 nt, Homo sapiens
gggggaaagcgccccacagggaaacagaacaggcaacacggcacacaccggaacagccaaga

SEQ ID NO: 66448 - RNA, 65 nt, Homo sapiens
ccgcagcccccggcgccaccagcagccaaaggcgccagaccaaggcgcacaggaaagacgggaag

SEQ ID NO: 66449 - RNA, 54 nt, Homo sapiens
aaagaaaagagaaacaacaggcgcacagaaacagagggcaccagaagcaacccc

SEQ ID NO: 66450 - RNA, 77 nt, Homo sapiens
ccaggcgaccaaaccccacggcaagcgacgcggcccggccccaaggcgccagggccagacaagaaggaggaagagga

SEQ ID NO: 66451 - RNA, 66 nt, Homo sapiens
agggacggggccggaggaaacagcagcccaggaacaacacgaaacgcggcgaggagcgacagccgc

SEQ ID NO: 66452 - RNA, 85 nt, Homo sapiens
agcgggcaccgacagcagaggagaaggagaccagagccaacggagacgcagaaagcgaagcagaagccgagaacagcggcgagcc

SEQ ID NO: 66453 - RNA, 74 nt, Homo sapiens
cggggacaacccccgacggcccacgccagggagggggagagacacgcccaccaagaaagaaccggaaaggggac

SEQ ID NO: 66454 - RNA, 34 nt, Homo sapiens
aggggaccggacaggcgcagaggagaaggcgaag

SEQ ID NO: 66455 - RNA, 71 nt, Homo sapiens
gccgaaacacccacacagcaacaaacagacggggcggccgcacccaggcggaggcagggcacgaaggccag

SEQ ID NO: 66456 - RNA, 89 nt, Homo sapiens
cacgcgcccgggagcacgagagccaacggcacggggcaagaaaaggagaagaaagaagaaaaaaaagagcaaaacaccggaaaacccag

SEQ ID NO: 66457 - RNA, 70 nt, Homo sapiens
ccccccagacggcaacacagaagcggaaacaccaacacgaaaggaaacagacagcgcgaggagagaagcc

SEQ ID NO: 66458 - RNA, 85 nt, Homo sapiens
aaccagggaaacaggagagagccgaggaaacccagacccaagaccaaccgaggaggaggaggagggagacgcgcccaggcagaaa

SEQ ID NO: 66459 - RNA, 64 nt, Homo sapiens
cccacgcccccgcgccggagccccgggccagacgaccgacgcgcgccggcggccccgaaagccg

SEQ ID NO: 66460 - RNA, 74 nt, Homo sapiens
cacccgcgcgggccaacgggggagacaaccggagcagggaccaggagcccccgcaaggggccggcacgggaaaa

SEQ ID NO: 66461 - RNA, 86 nt, Homo sapiens
cacccccagcggccgccggccccccacgaggaagcccggggcggcgacggagcacgacccaaggaggggggaagggggcaggggga

SEQ ID NO: 66462 - RNA, 86 nt, Homo sapiens
ccaagccgcacagccgcggcggcagcagcaggagagggccgagaacacggggcgggccagaacacacggacgcgggggggcccccc

SEQ ID NO: 66463 - RNA, 80 nt, Homo sapiens
aaaacggggcaccagaggaagccgggacccaacgggggggaaccacgacagcggcggcccaggccaggccacgggcaaaa

SEQ ID NO: 66464 - RNA, 66 nt, Homo sapiens
cgcagcacccccaacgacccacgggggcagagagcagccaggaaaggggagagaacgccagcgcgg

SEQ ID NO: 66465 - RNA, 77 nt, Homo sapiens
cagggccagccaacacgaaagagaagccaagcagaaaaaccaaagcacccgaaagaaagagacaagccagagaccca

SEQ ID NO: 66466 - RNA, 73 nt, Homo sapiens
aaaacacccaaaagaagcaacacacaagggcggagaacggaaaagcaccaggaagcagagaggaccgcagaag

SEQ ID NO: 66467 - RNA, 74 nt, Homo sapiens
ccggacagccggcggggacgcaaggagccgacaaggcgcggagacacaagcaggcacgggcacacacaccccgc

SEQ ID NO: 66468 - RNA, 70 nt, Homo sapiens
gaccgcgggccaaaagaacagaggcgaacacaacacaaagggaagaaccaagcgaaggacagaaaacacg

SEQ ID NO: 66469 - RNA, 99 nt, Homo sapiens
ggcacaaaggaggaggaggaggacgacgacgaggggaacgacacgagaggcgagggacgacagagcaagcggcagagggcaagcgggaaaaagaccagg

SEQ ID NO: 66470 - RNA, 38 nt, Homo sapiens
cgaaccaggacggcaacgggagccagcagaccgacgga

SEQ ID NO: 66471 - RNA, 78 nt, Homo sapiens
cagcccccaggaggaccagcaagggccgggcccaggagcgccggccccagcacccacccccgagcacgccgcaacacc

SEQ ID NO: 66472 - RNA, 71 nt, Homo sapiens
agcaaccaccaccaggcgaacgcaagacgacaaggcagagccccggagagccgagagccaaggcggacaaa

SEQ ID NO: 66473 - RNA, 77 nt, Homo sapiens
gaagaccgggcgccagggccgccgccccgcccgggcacgcagcacgggggcaggggccgacccagaacgccagcgcc

SEQ ID NO: 66474 - RNA, 55 nt, Homo sapiens
ggacacaggcccaaacggaaaggaagccaaggaaaacagacacgcgcagaagagc

SEQ ID NO: 66475 - RNA, 71 nt, Homo sapiens
gaagccagggcagaagcaggcgcgaaaaagacaagcgaccggagaaacgagagaagcaagccgcaagaggg

SEQ ID NO: 66476 - RNA, 55 nt, Homo sapiens
ccacaaaaaagagacccacagccagcaacaccgcgcgacacgccgaccgccgcgc

SEQ ID NO: 66477 - RNA, 68 nt, Homo sapiens
gagacaagacaaaaacaccccagaaacagagccagacgcgaagaagagacaaaaggaggaaaagggcg

SEQ ID NO: 66478 - RNA, 60 nt, Homo sapiens
ggccagcgacccgcgccagcgcccagggggggaaaccaccgaggagccaccggcccaggc

SEQ ID NO: 66479 - RNA, 79 nt, Homo sapiens
aggaaggcagggagggagcggggcagagcccaggcggagggcgcgcgacccccgcggggagggagcgaggaaagcgcac

SEQ ID NO: 66480 - RNA, 81 nt, Homo sapiens
aaaaaggaagaaaaagaaagacccagcccacaaagaaggaagagcacaggggaagaagagacccaaacacgaaggccaaca

SEQ ID NO: 66481 - RNA, 74 nt, Homo sapiens
aggccgggccagacacgacaccaccaccccaccccggcgaaaacaggacaccagaagagcagccggccccgacc

SEQ ID NO: 66482 - RNA, 73 nt, Homo sapiens
caaacaaaccccgaaacacaaccaaggagcaccaaaaagaagaaccgcgccaaggccccaagacgcagagaag

SEQ ID NO: 66483 - RNA, 62 nt, Homo sapiens
gcgaggggccaaggcagaagaaacggagaagggcaaagggggcccacgagaagagcaggcga

SEQ ID NO: 66484 - RNA, 68 nt, Homo sapiens
gcccaagcgaaaaagcgggaacgcaggacccaaagcgggcggaaaaacaaacgagccaccagcgccca

SEQ ID NO: 66485 - RNA, 53 nt, Homo sapiens
gcagccggggggaccaaagacagaaagcagaaggagagaacggggacaaggca

SEQ ID NO: 66486 - RNA, 78 nt, Homo sapiens
ccgcagggcgggaaaaaaccaagcagcgagcaccagccccagggcacaccgacagccgagcggcgcaggaggccaagg

SEQ ID NO: 66487 - RNA, 79 nt, Homo sapiens
caggccccgagaggaacccagccgacacgacgccgccggcaggcccgcgcaccagaacacggaccaggacacggaggag

SEQ ID NO: 66488 - RNA, 71 nt, Homo sapiens
agccgccaaccaagcacaggaaggagagcccggacccacccaccggccaacaaacccaaaggaagaaagga

SEQ ID NO: 66489 - RNA, 60 nt, Homo sapiens
gagggcgaaccacccacagaccagccggaacaagagacccgggagacggaggagaagcca

SEQ ID NO: 66490 - RNA, 78 nt, Homo sapiens
caaggagcggaaggcgggagccagagacgaccccagacgggagaaacaggacccccgagggcgcaagaaggacagccg

SEQ ID NO: 66491 - RNA, 117 nt, Homo sapiens
ggaggcacaaaggaccaacagaagaacccagaacaacccaagaggacaaacccccagaaacagaggaagagccggaacaagagaagaaagagcgcaaaccaggggagcacacgagcc

SEQ ID NO: 66492 - RNA, 71 nt, Homo sapiens
aagcaaacggaccagaccgaccaccaaaagcccagaagaggccacaaggaagaagcagcagcgccaaggac

SEQ ID NO: 66493 - RNA, 67 nt, Homo sapiens
ggacagcaagcgcagggacaggaggagcaacgacaaaagcaccaagaaaggaaacagacagcgcgag

SEQ ID NO: 66494 - RNA, 75 nt, Homo sapiens
ccggaccgcagaagggagaccacagcaagacgccgggaccccggaaaccagaaagaggggcgaggaggcgggcca

SEQ ID NO: 66495 - RNA, 79 nt, Homo sapiens
gaaccgagcgacagagacaagcgagcgccgcacaaaaagcagagagaaaaaggggacaaggaaagcacagcaagcaaag

SEQ ID NO: 66496 - RNA, 62 nt, Homo sapiens
gaaccagccgaaccaggacgaggagaccaggccccaccccgagagaagccagacacagaccg

SEQ ID NO: 66497 - RNA, 68 nt, Homo sapiens
cgccgacagccagcggaaagagggagggggcaccggagcacaagagacgcaaccccaccgaagggaca

SEQ ID NO: 66498 - RNA, 76 nt, Homo sapiens
gcgaagaagaggcccaacccccaccccgcccaaggaggcccagcggagcgcgccccccagaaccgcccacagccca

SEQ ID NO: 66499 - RNA, 79 nt, Homo sapiens
agaggggggaccgaagcacagacagcacgcagaaggagaagacagccgaagaagagcagcgaggagcgcgacgaaggca

SEQ ID NO: 66500 - RNA, 85 nt, Homo sapiens
ggccgagggggcacagaagcgggcggcggcgcgccgccccgggcggccgcgggcggacggcccgccacgggccccgcagccgcgc

SEQ ID NO: 66501 - RNA, 62 nt, Homo sapiens
ccgaaaaaggacaaaagcagggaccaagaaaggcccagggaccaaagcccggacaaggcccg

SEQ ID NO: 66502 - RNA, 57 nt, Homo sapiens
caagaaacccaggacgagaacagcaacagacgaagagagaaaggcagggcaccccac

SEQ ID NO: 66503 - RNA, 59 nt, Homo sapiens
cggcccaggacacccgggccaggccacagcgccccaccacaacccaagagacgacccac

SEQ ID NO: 66504 - RNA, 66 nt, Homo sapiens
aaaaacagaggaaaaccagagaccagggaaagaaacagaccagcaagcaggcagacggcaacagaa

SEQ ID NO: 66505 - RNA, 75 nt, Homo sapiens
aacagacagaaggagcaggaaccaaaggcggagaaaaagaaagcggcgcgccaacagacccgggggaagcacagg

SEQ ID NO: 66506 - RNA, 49 nt, Homo sapiens
cgcgccccagcggccacggagggcgacggcggccccccaggcaggagga

SEQ ID NO: 66507 - RNA, 75 nt, Homo sapiens
cccaacacccggagcagcgccacaagggacaggcaagaccggccgcccgcccccggggccgccccccggaacaga

SEQ ID NO: 66508 - RNA, 94 nt, Homo sapiens
ggcacaacgcggcagaaaagaagagggaaggggaagaggggcccgaaggcacaaaggacaggaacaaagaacaggaccaggggacaggaaagag

SEQ ID NO: 66509 - RNA, 70 nt, Homo sapiens
ggagaaagaccagaggcgaaaaggccaaagggcagaacagccaaaccagagcacagggacccaagggggc

SEQ ID NO: 66510 - RNA, 78 nt, Homo sapiens
cagggagcacagagaagaaggcccaaaggagaaacaggcggaagaagggacaaaaggaagaaccaaaccacaaggccg

SEQ ID NO: 66511 - RNA, 85 nt, Homo sapiens
accccagcggcaaggaccagaccgcgggaacagccagcaaaggcaggggaggaagccacccgagagaagaacggcacacaccccc

SEQ ID NO: 66512 - RNA, 55 nt, Homo sapiens
agggccgcaccgggccagccgccaagcgaggcccaaaccacccagaccaggaaac

SEQ ID NO: 66513 - RNA, 34 nt, Homo sapiens
ggaggcgccagcacccccagaaagccgggaccga

SEQ ID NO: 66514 - RNA, 75 nt, Homo sapiens
gaacacccagcccagacacaaggacacaggaggagaggacaagaccaaaaaaagcaaggggccgcagcagaaaag

SEQ ID NO: 66515 - RNA, 77 nt, Homo sapiens
agggaaaagaaacacgcaaaggaagaccagcacagagaaaccccgagaacaacccccaggacaaaggccacaagaga

SEQ ID NO: 66516 - RNA, 83 nt, Homo sapiens
aagagaagaaagaggacaacagacggagcaaagagcaggaagcccggaaacaacaggaaaagccagcaagaaaaagaagaaaa

SEQ ID NO: 66517 - RNA, 82 nt, Homo sapiens
cggaccagccagggcacggccgggacggacggggggcccccgcaagcccccagcaccgaagagaggagaggcaggcggcagc

SEQ ID NO: 66518 - RNA, 72 nt, Homo sapiens
acaacagaaaagaagaaaacgaaggaaggaggacccgaggagagagaagacggaaaggaaacacggaagcac

SEQ ID NO: 66519 - RNA, 68 nt, Homo sapiens
caccccaccagcccaaagggggaacagaaagcccgggaacgagagcagaaccccacacaacccaagcc

SEQ ID NO: 66520 - RNA, 76 nt, Homo sapiens
ccggggccgagaagacacgacacggaaccagaggcagcagcccaaccccgaggacagcccaggccacgcacccacc

SEQ ID NO: 66521 - RNA, 84 nt, Homo sapiens
cggggacccgaacacagacagcgcgggacgagaaggaaagcccgggcagccagagccgcaaagcccgagagaggccgggcgcag

SEQ ID NO: 66522 - RNA, 50 nt, Homo sapiens
agagaggcaaggcagcacgacaaagaccacaagaagaaacaaccgaccga

SEQ ID NO: 66523 - RNA, 80 nt, Homo sapiens
ggccgaacgggggagcgggcaggcagaagaaggggaacccgcgcccaccagggcaccggacgagacggaaccgcacgggc

SEQ ID NO: 66524 - RNA, 84 nt, Homo sapiens
ccccgccggaccgacggcagcagcgggcacagccccaaccccagccccgagagagccaggccaggaaacgaggccgcgcaaggc

SEQ ID NO: 66525 - RNA, 82 nt, Homo sapiens
aagagccgcccgagggaggcgacgggggcgaagagcgcgccgcccccgcccacccagcaccaggagacaaagccacaaaaac

SEQ ID NO: 66526 - RNA, 66 nt, Homo sapiens
ccagacgcaacgggaaaccaaaaggaaccgcaccaaaaagcagagggaacaggcacgccccacccg

SEQ ID NO: 66527 - RNA, 77 nt, Homo sapiens
ccgaggagacgggcgcaggaacccgccagggcgaagccaaggcaccggcgagagcaggacgcggaagaggaccgggc

SEQ ID NO: 66528 - RNA, 52 nt, Homo sapiens
ggccggcgaccaagcgccacccgggaacggaagaagaaggacaagcacagcc

SEQ ID NO: 66529 - RNA, 58 nt, Homo sapiens
ccgcccgaccggcacccagcaggcaggccaagccccacaagggacagccccagaagcg

SEQ ID NO: 66530 - RNA, 68 nt, Homo sapiens
ggagcggggagaggcaagcaacgacccacagcgcggcaccgaccccggggggcgcggggggcccagac

SEQ ID NO: 66531 - RNA, 76 nt, Homo sapiens
gggacgggagcgaggagaggcgcacgggaggccacgcagccgcacgccacccccacccgggggggaggagaccagc

SEQ ID NO: 66532 - RNA, 69 nt, Homo sapiens
ccgggagaggagagcccccaggggagccggcggaaaaaaggggaagaaggccaaccgggggccaagggg

SEQ ID NO: 66533 - RNA, 37 nt, Homo sapiens
agcgcgaaacgcacgagaagaagagaccgacccaaac

SEQ ID NO: 66534 - RNA, 54 nt, Homo sapiens
gggacaaccagcagaggcccaggccaagcaagagaacccagcagacgcaaggcc

SEQ ID NO: 66535 - RNA, 53 nt, Homo sapiens
agacgcagggcgcccccggcaaacgcagaacaaagacgcccaggaagagacaa

SEQ ID NO: 66536 - RNA, 94 nt, Homo sapiens
cgagcggcgacggcggcggcggcgggcacagagacaccaggcgccgagaaggccagcagagaaacaggcaggagaggcccacaggcgcggacgg

SEQ ID NO: 66537 - RNA, 60 nt, Homo sapiens
caagaggaaagacacaccaccaagaagccagcaagcggccaggagaaggaccaagaacca

SEQ ID NO: 66538 - RNA, 73 nt, Homo sapiens
cagcccgcccagaagccacgacagaccaggagagcaccaaacgcccaggagcgagcgaaaaggcaaaagacag

SEQ ID NO: 66539 - RNA, 85 nt, Homo sapiens
caggagcccggcaccccccgccgacaaggaggccacacacacacggaagcgggcagcccccaccacacaaagaagcccgccagcg

SEQ ID NO: 66540 - RNA, 60 nt, Homo sapiens
gaccccaaggggcggcgggcccaaagggcaggcggcggcacagggagaacacagggcccc

SEQ ID NO: 66541 - RNA, 72 nt, Homo sapiens
cccacaaagcaaaagagagaaagaccagggagcaacgggaggcccacaacacccgaacagaagacagaggaa

SEQ ID NO: 66542 - RNA, 80 nt, Homo sapiens
ccgagagcaaccacagcggagacagcgcccccaggaccgccccaaaccacagagccagcgggaccgccgagaggcacgac

SEQ ID NO: 66543 - RNA, 76 nt, Homo sapiens
agacaagacccacaccacccaagaccacgcccgcaaggccaaacagacaggggcaaggccgaggggaacagcacac

SEQ ID NO: 66544 - RNA, 84 nt, Homo sapiens
cgagggagggccgagccagccgcggccggaggagcccccaggccgacagggggacagcagcaccagaaccaaaaagccacaaca

SEQ ID NO: 66545 - RNA, 40 nt, Homo sapiens
ccgcgccagcgacaaacaagcggccagggaccccacaggc

SEQ ID NO: 66546 - RNA, 71 nt, Homo sapiens
cacgaacagcgaagacacaaggaaccgccgcgggaggagaggagcaaccggaagggacaaaagaacaaaaa

SEQ ID NO: 66547 - RNA, 60 nt, Homo sapiens
accagccggcaccggacgaggaagggcaggcggcggagaggagaagaagaacaagagaga

SEQ ID NO: 66548 - RNA, 36 nt, Homo sapiens
gcgcaacagagcgccggcgcgccgcgcccaggcgga

SEQ ID NO: 66549 - RNA, 81 nt, Homo sapiens
acggaaaaggcgggaaagaaggaaccacaacagcacaagccagacaagcaaaaggggcacaacaaaccgcagagcagaagc

SEQ ID NO: 66550 - RNA, 80 nt, Homo sapiens
gggaaaccaccggggcaagccccaccacaaggacaagccagaggcaccagaggaaagccaacgcacacaccggcgacagg

SEQ ID NO: 66551 - RNA, 68 nt, Homo sapiens
gaaaaagaagaaaagaaggaaagcgaggcgacagcgaggaagagagaagggcacagaccaagacaacg

SEQ ID NO: 66552 - RNA, 67 nt, Homo sapiens
aaaccaggaccagaggccagcccacagcagaagagcagcaagggaagaagaacagaaaaggaaagga

SEQ ID NO: 66553 - RNA, 55 nt, Homo sapiens
cgagcaggaggcgccacaggccagagccaacgggcgaagcggcaggaccgggcga

SEQ ID NO: 66554 - RNA, 62 nt, Homo sapiens
gccggcccgcccccgcagcagcgccaggagcaggccgggcccgccagggcacgcgcccgcca

SEQ ID NO: 66555 - RNA, 70 nt, Homo sapiens
ggaaagaggaaaagagaagaggaagaaaaaaggagaggacagaaagcgcaaagcaaagaacagcgaacga

SEQ ID NO: 66556 - RNA, 74 nt, Homo sapiens
aacagagagcaacggacagacagcccaccgggcaggaaaccagagcccgcgcccaggcggaggcaagggcgacc

SEQ ID NO: 66557 - RNA, 72 nt, Homo sapiens
caaagccgcgagaggaccccccaagacagggcaccagcggccagcgcccgaagccaacccagggaccacccg

SEQ ID NO: 66558 - RNA, 75 nt, Homo sapiens
accgcgacacgggggccagaaggaaagcaaggagggacaaggcacacgcgggacggagcccggacccagaccagc

SEQ ID NO: 66559 - RNA, 82 nt, Homo sapiens
gacagaagacaaccgaccgaccgggaaggccccacacggccacgcaggaagggcacccacagacccccaggcaaaccgcccc

SEQ ID NO: 66560 - RNA, 65 nt, Homo sapiens
acaggacaccagacgggcaaagaggagcgacacgaagcaaaagaaagcgcgaagccagcaggaag

SEQ ID NO: 66561 - RNA, 69 nt, Homo sapiens
cgaagcaggaaccagcaacacacaacagggaaagcaccccaaccaagcagcccagcccagacggacaaa

SEQ ID NO: 66562 - RNA, 92 nt, Homo sapiens
ccaggcgcagcaaggagaggcggcggcggcccggcgaagaaagaagggggagcggagagcgcaggcggccgagaagccagggcacagaccgg

SEQ ID NO: 66563 - RNA, 72 nt, Homo sapiens
cggaagaaacggcgagagcaacagacgggacgaaaggacaagcaagaaaggaaaaccgccgccggggccagc

SEQ ID NO: 66564 - RNA, 61 nt, Homo sapiens
ggaaagcacgcgcacagagacaggcagccagcgaccccagaccgaaggcaggcacacggag

SEQ ID NO: 66565 - RNA, 72 nt, Homo sapiens
aacaaggaaagaaagggcagaagcaaaacaggacgacccgaggaacagaggggagaagcagaccgcaccagg

SEQ ID NO: 66566 - RNA, 78 nt, Homo sapiens
gcgccgccccgaagcccagacccaagaagaaaaggccgggccgcaaaaaaacccgggaacacaaggaggggcacaccg

SEQ ID NO: 66567 - RNA, 83 nt, Homo sapiens
acagccccgacggacgcccaagacaacgaagccaccggcgggccccgacggcgacgagcccgaggccgaagaagcacccagga

SEQ ID NO: 66568 - RNA, 83 nt, Homo sapiens
agaaccgcacggggcacggagggcagccagaccggagaagcgcacaggccaccgaaagccaagaaaggagaaaagaaaggaca

SEQ ID NO: 66569 - RNA, 68 nt, Homo sapiens
aaaggaggaggcacagagggacccggagagaagagcacggggacagcaccccaaagaccaaagccaga

SEQ ID NO: 66570 - RNA, 87 nt, Homo sapiens
accacgcccggcagcaaagaccccagcagcaggcgcaaaaacgaacccacaaccgaacgacggacgggaacaaagaaggagaaccag

SEQ ID NO: 66571 - RNA, 56 nt, Homo sapiens
acacagcacgggcgggggacgggcagaaaaacagaaagcaccgggaggaaagagag

SEQ ID NO: 66572 - RNA, 58 nt, Homo sapiens
agccaaagcaggggcaacccagaacccccaggccagagaaggacaagaagccaagccg

SEQ ID NO: 66573 - RNA, 73 nt, Homo sapiens
ggcccacagagaccaaacagccccccgccccccagagggccagagagcgggacgggcagaagaaaacccacca

SEQ ID NO: 66574 - RNA, 81 nt, Homo sapiens
gaccgaacggccccacagccgggcggggggaaagccacagaaagaagacacccgccacacaggacagagaagccaaagaaa

SEQ ID NO: 66575 - RNA, 85 nt, Homo sapiens
aaaaaaacaagaggggggaaaccacaaagagaaggaccgaaggagaagaaggagaaggggaggagaaggcaagccggaaagagcg

SEQ ID NO: 66576 - RNA, 78 nt, Homo sapiens
gggaaaaaggagcagcccgggcaccacagaaaagggcaaagcggccaggccacaccacaggaagccgggggaccacca

SEQ ID NO: 66577 - RNA, 57 nt, Homo sapiens
agagcgcgcagaaaagcgggaagaaaggaccaggcgggcccgagacaagcggccgca

SEQ ID NO: 66578 - RNA, 76 nt, Homo sapiens
gacaaaaaggagacccggccacccaggaacccacagaaaccaagcagaccgaagagaaagaaccgcaaaaagccca

SEQ ID NO: 66579 - RNA, 78 nt, Homo sapiens
cggaggcggcagagaccgggcgagcgacccaggaaggagagaggagaccaagacacaccaccccagggggggcccaac

SEQ ID NO: 66580 - RNA, 51 nt, Homo sapiens
ggcggacaagcaaacaagaggaacagcgggcccaagaggagcgccagccca

SEQ ID NO: 66581 - RNA, 75 nt, Homo sapiens
aggagaaaggggccacagaggccacgaggagacgagcgccaaagacagaagcaagcagaaaagagcaacaccggg

SEQ ID NO: 66582 - RNA, 54 nt, Homo sapiens
caaggaccaagaaggggggcgcgacagcaccgacacagaaacaggaaaacccaa

SEQ ID NO: 66583 - RNA, 74 nt, Homo sapiens
cacgcaccccggggacagggacagaggcacagaagaggggccgagcccagcaagaaagcgaaggcccacagcga

SEQ ID NO: 66584 - RNA, 80 nt, Homo sapiens
ggcccagccgggaacccccacgcggccagcgaaaacgcccagggaaggggccaccagaaggaggacgcagaagaccacaa

SEQ ID NO: 66585 - RNA, 72 nt, Homo sapiens
aaaaaaaccaacagccccccaggaaagaccacagcaagaccacgcccccagccgggggaccaggccgaacga

SEQ ID NO: 66586 - RNA, 84 nt, Homo sapiens
ccccaacgaggggggagacggggcgagcgggcgacggcgcccggcaaggacaaggccccggagccgcagaaccaggcgaggcca

SEQ ID NO: 66587 - RNA, 67 nt, Homo sapiens
gggcccgggccacacacgggccgcggagccagcaccagccgacgagaaggcggaggcaaggcggacc

SEQ ID NO: 66588 - RNA, 80 nt, Homo sapiens
caccagcagacgagccacagcgccgaggcgagccggagcaaggacggggaaccaccaaccggcaagaaagcgcacagccg

SEQ ID NO: 66589 - RNA, 68 nt, Homo sapiens
ccccgcgcggaccacggcagcacgacagcagccggcaggcagagaagaccagggaaacaagcaaaggc

SEQ ID NO: 66590 - RNA, 82 nt, Homo sapiens
ggaggacaacgacaccaccgcagcgacgagcaggaaaaggagcgaacaggggccacagcggaagaagcaggggagcgagccc

SEQ ID NO: 66591 - RNA, 69 nt, Homo sapiens
aaaaaaaggaaacacacaaacgcagggaccgacagcaagaaaaggagaaaacaaggccgcgggcacaca

SEQ ID NO: 66592 - RNA, 65 nt, Homo sapiens
gcccgacccagggcccgcgggccaggagagcgccggcgggggagccgccaccaaaagcagacgga

SEQ ID NO: 66593 - RNA, 80 nt, Homo sapiens
cggaagaggggaggcacaaccgaagacacgagaaggccccagccggcaggcaagacaagacccgacccgggagcgcgccg

SEQ ID NO: 66594 - RNA, 75 nt, Homo sapiens
gcgaggcccaccaagccagggcacaaaaccgccccagccaggaggcagcagccaaggaaagccaggaaacaccag

SEQ ID NO: 66595 - RNA, 35 nt, Homo sapiens
cagaccaacacacaggcccaacaggaacccgaagc

SEQ ID NO: 66596 - RNA, 66 nt, Homo sapiens
gcgcaaaaacaagacggggcgccccacagaggggcgacggaggagggagaggaaaacgggaaaccg

SEQ ID NO: 66597 - RNA, 38 nt, Homo sapiens
ggggccacaccaagaagagagagcaggagcggagagga

SEQ ID NO: 66598 - RNA, 91 nt, Homo sapiens
aacaagacccaagaaggaagaaagagaaagaaggaagaaccaggcgcaggagacacaggccaagccccgagccaagccacggccgaagaga

SEQ ID NO: 66599 - RNA, 77 nt, Homo sapiens
ggaacagcccggcacagccccagcggagcgacgcagaagacggggacgcaccacgaggcggaggcaagggaacggcc

SEQ ID NO: 66600 - RNA, 74 nt, Homo sapiens
caacagccccggaaaaacccaagggaagagagaaggccacgcccgaccccaagcaacaacggggcagggacagg

SEQ ID NO: 66601 - RNA, 115 nt, Homo sapiens
ccgcgcccagcggcacgcagcgagggaaacgggggcagaagaggccacaaaccggaaggagagcaagaagaacaccagacgcccaaagaagaaagagaaaggaacaaacaccagc

SEQ ID NO: 66602 - RNA, 54 nt, Homo sapiens
gcggagaaaagaagacccgggggagagaaggaagaaacaagcccaggacgaaga

SEQ ID NO: 66603 - RNA, 77 nt, Homo sapiens
ggaaacccaaccaagaaggcccaggacgaacgagagccaacagaagcaacgggacaggcgcagcggacaaccacgag

SEQ ID NO: 66604 - RNA, 72 nt, Homo sapiens
cgcgccccggcggggggaagcccgcgccgccggcaccagaggcacggggccaaaaaggcacgagggaacggg

SEQ ID NO: 66605 - RNA, 66 nt, Homo sapiens
gagcaggcgaagacaacaggaaggaaaacagcaggcaacaggaggccgccaaagaacaccgcaggg

SEQ ID NO: 66606 - RNA, 79 nt, Homo sapiens
acgaggaaaccgggaaagccaccgaaaaggaggaacaaggaaagggcaaagcgcccgccggcggcacaacagaaagacc

SEQ ID NO: 66607 - RNA, 76 nt, Homo sapiens
cggacaagccagacaacgccgacagcgagcagggacggggggaaaagcgcacccgggcccgggcgagaaagaagac

SEQ ID NO: 66608 - RNA, 82 nt, Homo sapiens
agcgaaccgcggaaaaaccaagagaaacgaaggaggcccaaccacaaaaggagccgacggaacccagacggagaacaaaagg

SEQ ID NO: 66609 - RNA, 112 nt, Homo sapiens
ggccccccgcgccgcagccgcccagaacccgaccaacaccagaacccagcgcccccagggcggagaacggaaaagcaccaggaagcagagaggaccgcagaagggaaggaga

SEQ ID NO: 66610 - RNA, 55 nt, Homo sapiens
ggaggcccccagccagggaacgaagacaagggaaaagggaccggggaaagggcac

SEQ ID NO: 66611 - RNA, 80 nt, Homo sapiens
cacaggcaagggcagcggagagaaagccaagccgcagcggacaaaaaggcggacaggagaaaaagaggaaagaccaaagc

SEQ ID NO: 66612 - RNA, 51 nt, Homo sapiens
gacaagcaacagaagaaagaaggggacaaagcaaaaaaccaacaagaaaca

SEQ ID NO: 66613 - RNA, 72 nt, Homo sapiens
gaagcagaaaacagcagaacaagaagagaagggcaaaaacaggggcgaccacacgccgaggcgccagacgca

SEQ ID NO: 66614 - RNA, 74 nt, Homo sapiens
caggcagcaggggcccacacagcgacagggccagccccccaagccccgaggacacaaaagcgggacgcacaccc

SEQ ID NO: 66615 - RNA, 62 nt, Homo sapiens
cgagaccggaccgagagcggaccgagagcgcgaaacgcacgagaaggagccacggaaagaca

SEQ ID NO: 66616 - RNA, 74 nt, Homo sapiens
aagccaagacccgaaggagcagaagaagaccgaggaaagcccgcagagccccagggcacccacaagcgcccaca

SEQ ID NO: 66617 - RNA, 75 nt, Homo sapiens
agagcgcaagccgggcagcagcccagcggcagcagaaagagcagcaaagagaagaaaccaagagggaagaggaaa

SEQ ID NO: 66618 - RNA, 73 nt, Homo sapiens
ggaccccaagaagaccacagagggacccggacaaccagaggcagccagcagggggaggaaagaacacagagaa

SEQ ID NO: 66619 - RNA, 74 nt, Homo sapiens
agagaaaccgaagggccccgaacaacagacgaaaaaccgccagaaggggagagacaaccagagcggaaagggag

SEQ ID NO: 66620 - RNA, 83 nt, Homo sapiens
ccagccggcagagcaaaccgcagaaggaccacgaggagcaacggcgagccgcgaagccacccccgggacaaagcgaccagcgc

SEQ ID NO: 66621 - RNA, 72 nt, Homo sapiens
ccacaacaagccagacccccagccccggaccacgggacacggggggcacacaacccagccagccgccggggc

SEQ ID NO: 66622 - RNA, 78 nt, Homo sapiens
gccaccagccaagaagagcccagaagagacacacgaccccgacgcgagaagcagagacaagagagacaccccaaccga

SEQ ID NO: 66623 - RNA, 42 nt, Homo sapiens
gggaaggcgccgaagaggacgaagaggaagagaaacaccaag

SEQ ID NO: 66624 - RNA, 77 nt, Homo sapiens
gaacccgccggagccagccagccgcccgagcaccagcagggagacccgaccaccggaagccacggcccggacccccg

SEQ ID NO: 66625 - RNA, 79 nt, Homo sapiens
cgccgagcaggcgccgccccagcccgcgaacggggaacgcccgcggacggcagggcgcgacaagaagcgcccgcccgac

SEQ ID NO: 66626 - RNA, 34 nt, Homo sapiens
agcgcccagcagcgcaggaggagcacggcgaacc

SEQ ID NO: 66627 - RNA, 89 nt, Homo sapiens
cgcggcgcgaccaggccgggcaccccgagcgcaaggacagcgcgaggccgcgcagcccagcgcagccagaacacagaaacgccccgggc

SEQ ID NO: 66628 - RNA, 85 nt, Homo sapiens
agcgcccgacgcgcaggccggcacgagcccgagaggaaacaggaacacgaaagaggaaaaacgcacaagaaaccgaagccaagga

SEQ ID NO: 66629 - RNA, 82 nt, Homo sapiens
agaaggggaaggaggggcagcggaaacagagcaaagcagcgacaacaaagacagaggaagaaaaacagacagaccaagaaag

SEQ ID NO: 66630 - RNA, 81 nt, Homo sapiens
gccgggcggccgcgcgagccggcggcccggagggggcggcgggacccgacaaacggacagcaggaccagaacaaggagaag

SEQ ID NO: 66631 - RNA, 77 nt, Homo sapiens
aacccccagggccagcgcaacggacgagacccagcaagcccaccaggcagaggggcacacagagcagcgccagccgc

SEQ ID NO: 66632 - RNA, 63 nt, Homo sapiens
gagagggagggcaacaaaacccagcagacacgagagacggaaaacggagggggcgaggccagc

SEQ ID NO: 66633 - RNA, 54 nt, Homo sapiens
agagggaggaacgagggaccggggggcacccagaacgcaagacgggccaaagca

SEQ ID NO: 66634 - RNA, 68 nt, Homo sapiens
gagccggcggccgacccacggaagcccagagggacgggggaagccacgaagacaagggaggcgaggac

SEQ ID NO: 66635 - RNA, 78 nt, Homo sapiens
caggcaaccagcgggaccagaggagaccggagccaccaaaaacgaagaggaaaccgaaccccccacggaaaggacgaa

SEQ ID NO: 66636 - RNA, 53 nt, Homo sapiens
acgcacaccagaggaaggggaccaaaagaggcccggcagacccgcagaccaac

SEQ ID NO: 66637 - RNA, 75 nt, Homo sapiens
gaaaccccacgggggggggcacggccgcgaggccgcgagaacccggcgcagagaccagcccaccacgaccgggac

SEQ ID NO: 66638 - RNA, 84 nt, Homo sapiens
cccaaggacagcagcccaccaagcacagacaagcacaaaacagagagaacccaccaaccaaagaggaacacagaacggagaccc

SEQ ID NO: 66639 - RNA, 78 nt, Homo sapiens
gaagaaagcaacaaaacgaccacgaaaacaagccgagacccacccaacagcgaacaaaggcccaacaccaaaggacaa

SEQ ID NO: 66640 - RNA, 73 nt, Homo sapiens
accaaaaaccgcaccaacgggaacgggacacaccacaggaaggaccagagaagacacacaacaaccccacgga

SEQ ID NO: 66641 - RNA, 78 nt, Homo sapiens
gaagacaggagcgcgagcggaagcccaaaggacaaagcgcagggagcaaacgaagaggaccccacccggggaaaacaa

SEQ ID NO: 66642 - RNA, 53 nt, Homo sapiens
cggccgaaacagaaaacaagagaccacagaagggaccagccggccggagcgcc

SEQ ID NO: 66643 - RNA, 83 nt, Homo sapiens
acccaccccccacaccccccgagcccaccagacaccggccagcacggagaacaccaacaccagcagcagaggcccccagaccc

SEQ ID NO: 66644 - RNA, 75 nt, Homo sapiens
cagacgcagggcgcccccggacaccagcaggaaaacacgggccccagaaacaaggaaagggcaggccaccgagac

SEQ ID NO: 66645 - RNA, 73 nt, Homo sapiens
agcagacggggaagcggagccgcgccacaggccggggaggacagggcgggaaccagcccggcccggggaccgg

SEQ ID NO: 66646 - RNA, 56 nt, Homo sapiens
aagcggaggagagaaagcgagaacaaaaccagcgagggcccaaggaggcagaaacg

SEQ ID NO: 66647 - RNA, 82 nt, Homo sapiens
cggaccgcggagacccccagcccagagcgcaaacgccacaaccaacaaaacaggagccagcgccgaacgaccagcaagaaac

SEQ ID NO: 66648 - RNA, 56 nt, Homo sapiens
caacaacaggacgccacaggaagcaccccagacaccagcaggagaccgcaagagga

SEQ ID NO: 66649 - RNA, 74 nt, Homo sapiens
ggcacagagcggccgcgccagcgaagcccaaaaggcagagcgaggagagaagaaggagggaaagccaaacaacg

SEQ ID NO: 66650 - RNA, 84 nt, Homo sapiens
cacggggagccccggcagcaggagcgcgcagggaacccgcggcccggggaggaacgcaccggaggacacgcaaagggacgccgc

SEQ ID NO: 66651 - RNA, 73 nt, Homo sapiens
gacacacgaacacccaaaggcacaaaacaacaggacaaaccccccccccgggcggaccccccacagcaggagc

SEQ ID NO: 66652 - RNA, 74 nt, Homo sapiens
cagcgcggggacggaaccgggacccgggcgcccgcgcccgccccaacccagccacaggaaggagggccccggag

SEQ ID NO: 66653 - RNA, 67 nt, Homo sapiens
ccgcgcacaagccggagaaggagcacggcccaggcagccaagaaggcagagagacacacaagaaacg

SEQ ID NO: 66654 - RNA, 61 nt, Homo sapiens
gagaccagagaagccaaagaagccagccccgaggaccgaaggagaagaaggagaaggggag

SEQ ID NO: 66655 - RNA, 73 nt, Homo sapiens
agaagagaaaaaccccggggcccccccagaccaaagcgacaccagccacaggaacgacgaacagcagacaggg

SEQ ID NO: 66656 - RNA, 69 nt, Homo sapiens
acggcggcggaaaaccccaaaaggacaaagagagagggaaagcccgccccaacaccccagcaacaaaac

SEQ ID NO: 66657 - RNA, 85 nt, Homo sapiens
cggcccgcaccccgccccccgaccacccagcggaaggagaacgaccgccagaagagaagaggaaggagaaaaacaaaaaagagga

SEQ ID NO: 66658 - RNA, 97 nt, Homo sapiens
aagcccaggcccacgcacaagcgggcaccagggccgaccgccgcaggggacccacagcccggcgaccacggggaaccgaggcagaagcgaagagcaa

SEQ ID NO: 66659 - RNA, 82 nt, Homo sapiens
ggccccgcgccccgacaggaagggaaaaggccgaggcacagcgggaagaccgcaaagacgacccgagacagggaacagcagc

SEQ ID NO: 66660 - RNA, 84 nt, Homo sapiens
ccggcagcagcgcgccgccgcgcccagccaccgccccccccacgccaaaccagggcagagaaggggccccagaacgccgagggc

SEQ ID NO: 66661 - RNA, 81 nt, Homo sapiens
caacagcgagacccggggcgaggacccccgagccaggaaacacagcgcgggaaggaacaagaggcccagggaggccagaaa

SEQ ID NO: 66662 - RNA, 82 nt, Homo sapiens
gaggcaaaagggaaaaaacaggagcacagggccacgaccgccccagggccaccgccagcgagccgcgggggaagaagaagcc

SEQ ID NO: 66663 - RNA, 119 nt, Homo sapiens
gaacgagagagaaaagagaggcaaccacagaagagccaaaaccaaaaccaccccaaacagaaaaacagagcggggaaagaccaacaaagcaccgagaaagccaaaagaagaaaaggcca

SEQ ID NO: 66664 - RNA, 80 nt, Homo sapiens
ccccagccgcagccacaacaccggcaggaaccaccaggacagagccaagcagaagaaccagcacaggcgaagccaaccag

SEQ ID NO: 66665 - RNA, 80 nt, Homo sapiens
agccaccaggcggccgggggggggcgaggggaaaggcaaagccgcgagacacgggcgcagccccgagcccacagccccag

SEQ ID NO: 66666 - RNA, 76 nt, Homo sapiens
ggagaggccaacgggcccccgagacaagcacccccgcgaggagagaacaaggagcaggccaacggccagaagaacg

SEQ ID NO: 66667 - RNA, 85 nt, Homo sapiens
gccccggacaggaggcaggccgccggccgaaggcccgagcgcccgaggcgcgggaggggggaccggcggccaaaggagggaaaaa

SEQ ID NO: 66668 - RNA, 78 nt, Homo sapiens
gggagggggaccgcgaggagcgcagccgcaaggaggccaggccagagggaccaacgaaggcaaacaccacacgcagag

SEQ ID NO: 66669 - RNA, 58 nt, Homo sapiens
ggagacagcaccaaacccacagaggcacgagagaggacagaccccaggaccaagaccc

SEQ ID NO: 66670 - RNA, 76 nt, Homo sapiens
ggccccgcaagaagggccgggggcgagccggagcgaccccggcagaagggagaggccagagcaaagaagaacacag

SEQ ID NO: 66671 - RNA, 33 nt, Homo sapiens
caagcacggaccaaagagagcgcgcgccgcgcg

SEQ ID NO: 66672 - RNA, 75 nt, Homo sapiens
cccgagagccagagaagcgggaaccaagaccaggacaaagaagacccggagagacaagccggaggacgcaaacga

SEQ ID NO: 66673 - RNA, 53 nt, Homo sapiens
aggaagccgcaggaccggaccaggagccaacagacaacggcaagcggagaaga

SEQ ID NO: 66674 - RNA, 75 nt, Homo sapiens
gacaacaccaacaagcaggagagaaggcgaggaagcccaagcacaaaggagaagacgcccaagccaagaaaacac

SEQ ID NO: 66675 - RNA, 67 nt, Homo sapiens
cccaacaaccagacaccagagccagaagaagcaggaaagcgaccaccaccagaaggaggcagagagc

SEQ ID NO: 66676 - RNA, 83 nt, Homo sapiens
gaaacaaggaagaggaaaagaccagggagaaagagaagcacagaagaaaacggcaccgagaacacagacagcaacgaggacgg

SEQ ID NO: 66677 - RNA, 77 nt, Homo sapiens
agacacagacgagcaggggaaggcaagcagaagaggaacagaagaagcagagcagagacggagcagcagcccccaaa

SEQ ID NO: 66678 - RNA, 73 nt, Homo sapiens
gcagacccaccacggacacaccaagaaaaagcgggccgccaggacggcgaaggcagcaaccacagaggaccga

SEQ ID NO: 66679 - RNA, 75 nt, Homo sapiens
ggaggagcccccgggaggaaccggaaccaagaacagagaccagcacaaccagggaagaagacagaaagggcaagg

SEQ ID NO: 66680 - RNA, 80 nt, Homo sapiens
caagagacgacaaaggagaggaaaacagccacccgcgagagaggaacgaggggcacagaaaccagaaaaacggagcgcgc

SEQ ID NO: 66681 - RNA, 54 nt, Homo sapiens
gaggagcaggaacaagcaagggagaaccacaaagaacaagaggaggaagaaaag

SEQ ID NO: 66682 - RNA, 81 nt, Homo sapiens
aggaggcggacggccaggggagaaagaaaccccaccacgcggcaggggccgccgaggaaaaagcaacaagaagaaaaccaa

SEQ ID NO: 66683 - RNA, 49 nt, Homo sapiens
ccgaagacgggccccaacacccagagacgaaagcagcacaggcaagggc

SEQ ID NO: 66684 - RNA, 74 nt, Homo sapiens
gcgcgagccaggacccgcacacggcggcggcgaagccaagacacgggcccgccgagggcgggacccgcgcaggc

SEQ ID NO: 66685 - RNA, 60 nt, Homo sapiens
gggaccaaagcaccggaaagcagcggaaagagcacaggacgagccaacggaggcagccgg

SEQ ID NO: 66686 - RNA, 71 nt, Homo sapiens
caggacagcggcggcgggccgggcagcccggccgacaaccacgggacgagccggggagccgggacgggcag

SEQ ID NO: 66687 - RNA, 61 nt, Homo sapiens
cagagacagcagcccaggcaacgagcgagcgaagaagcaaacgaaaggaaaggaagcacag

SEQ ID NO: 66688 - RNA, 116 nt, Homo sapiens
cagcaccaggagaggccgggcagcggacaacggggacggaccagggcaagcaccgacaggggccaacaggacaaaaccacgacagaagcgacgggagagagagcgccccacacccc

SEQ ID NO: 66689 - RNA, 80 nt, Homo sapiens
ccgagaaggaagacccagaaacaaagggagacacccacacagcacacgcgcccagcgggaacaggggaggaggaaccgag

SEQ ID NO: 66690 - RNA, 61 nt, Homo sapiens
gggccgagacacgcagcggcggccagggaccagcaaacgacaaggagcaaaggcgggcggc

SEQ ID NO: 66691 - RNA, 98 nt, Homo sapiens
aggcacccgacaccacagaacccgcaccagggacagacgcaaaggaggcgaccagacaagccagcgaaaccagccccaagcgcagggcgaacaaaccg

SEQ ID NO: 66692 - RNA, 77 nt, Homo sapiens
ggggcgccagagcaacgccggcccaggccggggaagcggggcgccacggcaggagcgccccgagagcacagcagccg

SEQ ID NO: 66693 - RNA, 88 nt, Homo sapiens
cgacaggcggaggcccccgggcaagaggcgcaaacaagccaacccaggaggaaaaacgaaagagccgcagacgcacagcaaccaccgg

SEQ ID NO: 66694 - RNA, 69 nt, Homo sapiens
gaaaagaagagacagcgagaacaaaggagagaggaccacccagaggagcaacgggagcagggcagcacc

SEQ ID NO: 66695 - RNA, 75 nt, Homo sapiens
cccgggggccacggacccggcgacaacacccggccccgagacagaagccgagaacgaccgaagaaaagcaacaaa

SEQ ID NO: 66696 - RNA, 78 nt, Homo sapiens
agaggacggggacccgcgacccagccccccacccaacgcgcaaccagccaagggaccgcagggagacggcaccaccac

SEQ ID NO: 66697 - RNA, 80 nt, Homo sapiens
cgcggcgggcccgggcggccggcgcaccgcccagcacccaacacggaccggacacgaagccagaggacaacagagcaacc

SEQ ID NO: 66698 - RNA, 52 nt, Homo sapiens
acagggaaagggccagcacaggagaggggaccagaggaacaagaaacagcgg

SEQ ID NO: 66699 - RNA, 77 nt, Homo sapiens
caggcacgcggcgacgccccgggcacgccccccaccggaccacacggcgagacagaaaaacggcccggaggcaagga

SEQ ID NO: 66700 - RNA, 67 nt, Homo sapiens
gcccaaccaccccaaggagcaacacggcggaccacacaagcaaaagaggaaagggagcagcaccggc

SEQ ID NO: 66701 - RNA, 112 nt, Homo sapiens
aaggggagccacgccccacacaggccccacacggcacggcagcaccacaaggaagcaccagagaaggaggaaccggccggcagcagacggaaggaagaaaagccccgcccag

SEQ ID NO: 66702 - RNA, 74 nt, Homo sapiens
cacagcccgcagccccgccagccacccccaggggaacggcacagggaggggacagaccaaccggcagccaaccg

SEQ ID NO: 66703 - RNA, 68 nt, Homo sapiens
ggggggaccgcacgggacgaccaagacaaaccaagacgcccgagagccgaacgaacggcaggagaaca

SEQ ID NO: 66704 - RNA, 56 nt, Homo sapiens
cgcaggggaccgcaacaggaacggaggcgggcggccaggggccagcgccaccggac

SEQ ID NO: 66705 - RNA, 60 nt, Homo sapiens
cggcccagagccccgggcgccggggccgcgagacaaccagagcacccggcacccccgccc

SEQ ID NO: 66706 - RNA, 47 nt, Homo sapiens
gaccacaagggcagaagacagcagggcagccagcgaaggaagaaagg

SEQ ID NO: 66707 - RNA, 83 nt, Homo sapiens
gcagccggccgggaccgcaggcccggaaggccagggaggaccccagacaccggagacgggaaagacaagcaagcccggaaggc

SEQ ID NO: 66708 - RNA, 71 nt, Homo sapiens
cccgcgccccgccagcaccggccccaccacaggacaaaccggcgaccacacacggggacgacggggaagcc

SEQ ID NO: 66709 - RNA, 40 nt, Homo sapiens
ggggagaagccaaaacaggacacagcgagaagaacaacac

SEQ ID NO: 66710 - RNA, 81 nt, Homo sapiens
gaaggggaagaccgcgcaggccggagcaaaggccggaggaccagaaggacacgagggagaaacaaaggcagcgcgccccgg

SEQ ID NO: 66711 - RNA, 70 nt, Homo sapiens
aagagaaagaaggaagcggcgccgaaaaaaaggaggcacaggaggaagaccacgcggcaagcaaaaagga

SEQ ID NO: 66712 - RNA, 73 nt, Homo sapiens
cccgggggaacgcgggcccgcaccccgggggccggcaagagcaggccagaaagagccgccgacccaggcggag

SEQ ID NO: 66713 - RNA, 103 nt, Homo sapiens
cggcacccaccacaagccaggaaggagacacggccccccaaggaaaacaggccgagacacaaagcggcagggaagggacaacagccaggaaaggaacggagag

SEQ ID NO: 66714 - RNA, 46 nt, Homo sapiens
acaccaggcccaagaaaagaacacggaccaacagacacggccgaag

SEQ ID NO: 66715 - RNA, 95 nt, Homo sapiens
acaccgaacagccagggcacagcggaggcgacacccagagagcccagacacacaaagggcggagggccggaaaccaggagggaggggggccagac

SEQ ID NO: 66716 - RNA, 75 nt, Homo sapiens
cagcccggcccagaggacaggcagcccagagccaccgcaggccccaccccccagaaagaagaggaaagacgagcc

SEQ ID NO: 66717 - RNA, 43 nt, Homo sapiens
cagcgaccgggagaacaagacgaagaaacaggacagaggcaaa

SEQ ID NO: 66718 - RNA, 84 nt, Homo sapiens
gcagcgccgaagcagccgggagccggagcgggcgcggacgccgaggcaccgaggcaccagaggagagcccagccaaaggcacgc

SEQ ID NO: 66719 - RNA, 64 nt, Homo sapiens
caaaaaagcagcacaaagcagccagagagagacaagagagacaccccaaccgacaaagagcacc

SEQ ID NO: 66720 - RNA, 74 nt, Homo sapiens
gaccagagacaaagcaagcagcagaacacgaggggaaacccgacaagagaaggaacaaaccaggggagggaaac

SEQ ID NO: 66721 - RNA, 77 nt, Homo sapiens
caagcagaccgaagagacagacaaggcaaagcgaaaggcaccgcaacaacgcccagcgagccgaaggcagacacgag

SEQ ID NO: 66722 - RNA, 82 nt, Homo sapiens
gggacagcacaccacgcggacagggcccccggcccaccccggccacaccaggccaaggcagaggccccaggagaccacccac

SEQ ID NO: 66723 - RNA, 80 nt, Homo sapiens
ccccggcagcggagagccgagcccaaggcaagacccaaggcgacgaccgacaggggggaaagaggagaacagaagcggag

SEQ ID NO: 66724 - RNA, 69 nt, Homo sapiens
agcgagggggggcgcgccggaaaccggagcgcgcagcagagaaagggaagcgagaagagcagaagaggc

SEQ ID NO: 66725 - RNA, 71 nt, Homo sapiens
caaaaacaacgcaggacagcaaagacggggaaagagacccgcggacaacgacgccaccagcccgaacccca

SEQ ID NO: 66726 - RNA, 74 nt, Homo sapiens
accgggggaagccacaagacagagaacaacgggcaggcgaccccaaggaggaccggggagccgcggcaccagca

SEQ ID NO: 66727 - RNA, 75 nt, Homo sapiens
gggcccaggccccgggcaccagagacggaggcgcacgcagagcggcaccacaggagcaacgcacgaaaacgcacg

SEQ ID NO: 66728 - RNA, 59 nt, Homo sapiens
gcagcccagcggcagcagaaagagcagggcaaagagaaccaggagaccccaccaccaca

SEQ ID NO: 66729 - RNA, 48 nt, Homo sapiens
ccgcgaaaggagaagacggaccagacaggaagggaaggggcggagacg

SEQ ID NO: 66730 - RNA, 67 nt, Homo sapiens
gcacggagcacccaaagaagacaacgaggggcacgcgcccacccaggcgcagacgaccgcgaggaaa

SEQ ID NO: 66731 - RNA, 84 nt, Homo sapiens
gccccgccgccaagaggagcgagcggacccgcgagggaaagccaggccagaagaaggaaggccggggaggggacaggaaagaca

SEQ ID NO: 66732 - RNA, 79 nt, Homo sapiens
acgcccggcgcgagccaagcgcgcgccgacggccccacgacgccggccgaggccccggagggaccggggggccaccccc

SEQ ID NO: 66733 - RNA, 75 nt, Homo sapiens
aaaacgccccgggacccaaggaaccaccacagccaaagaccacgggggccaaacaccaggagaagggcgagccaa

SEQ ID NO: 66734 - RNA, 50 nt, Homo sapiens
accgggccaggaaagcagaaaagccagacgagaagaggcgaacggaagca

SEQ ID NO: 66735 - RNA, 68 nt, Homo sapiens
agacccggccgacgcccggaagacaagagaggcggccccaggggggaccaacaagggagaaccaacag

SEQ ID NO: 66736 - RNA, 74 nt, Homo sapiens
ggccgggaagcggccaccgacacgcagcagcggccagcagaacgcgggaccgaaggacgaacagagaaaccccc

SEQ ID NO: 66737 - RNA, 63 nt, Homo sapiens
acgggcgcaaccgcagcacacagcgaccgggagaacaagacgggaccagaccccacaagaaaa

SEQ ID NO: 66738 - RNA, 69 nt, Homo sapiens
agaaagaaccacaccaagagacccaagaggacgaaacagcaagagcagagaaagaccacggacaaaccc

SEQ ID NO: 66739 - RNA, 78 nt, Homo sapiens
ccccacccccaccgccaagcagccacgagaaaggaacaagccgcggggaagcaaaggccagccaccacagacagggcc

SEQ ID NO: 66740 - RNA, 64 nt, Homo sapiens
agcagacagagaggacacgaaacggacaagaggggcggggagaggagacggcagggagggggaa

SEQ ID NO: 66741 - RNA, 88 nt, Homo sapiens
acgaccccgaacccaggacagcaccaggcccaggacagcacgaggcagaacaaccgggagggcggagcaggggagcgaggcacaggag

SEQ ID NO: 66742 - RNA, 130 nt, Homo sapiens
aacaacccgaccgcagcgccccaggaggacgaggaggagcagaggagcaaggaccacacacccccaacacgcggcggagagcgaggagaccagggcggaggcccacgacgcgcaaggggagccagcacga

SEQ ID NO: 66743 - RNA, 74 nt, Homo sapiens
acagagacaaagcgccagccaagaggcggacaacagagcaccccagacgcccgccgcagaggaaagacacggcg

SEQ ID NO: 66744 - RNA, 72 nt, Homo sapiens
gaccaaccaggaagaaccgcacaccagaaaagaaggcgagaaccggggaaaaggacaggccgcggggacacc

SEQ ID NO: 66745 - RNA, 79 nt, Homo sapiens
ggcggccgaccgagaacgcagcaccacgcaagcccggagaaaacaggacccggaaggaaacggcgaagaccgccgaaag

SEQ ID NO: 66746 - RNA, 77 nt, Homo sapiens
cagacacacgcaaacaaggacggagaccacacaggagggaaaaccccgaccaaaagaagcaggacacaggagaagcg

SEQ ID NO: 66747 - RNA, 73 nt, Homo sapiens
caacaaccgcacggcccaggcccgcagagcccacggggaaggccgcaaaagaaagaccggaaggcgggaaggg

SEQ ID NO: 66748 - RNA, 86 nt, Homo sapiens
agacggcggcagcagcggcacaggaaagaaccggaggcgaagcaggccaaagaagaagccaggcgaaagaacagaccgccgcagag

SEQ ID NO: 66749 - RNA, 109 nt, Homo sapiens
ccggaccaacaaacggggagaaaccgcccggacaccacaccgaaaagcgcagcggggcagggcggccgaacccagcacgggaggccgaggcggccggagccgaagcaga

SEQ ID NO: 66750 - RNA, 82 nt, Homo sapiens
ccgcccggcgccggcccgcccccgcagcagcgccagccccggcacaaagcagaccgccccacgggcgcgcccgcgacagcac

SEQ ID NO: 66751 - RNA, 84 nt, Homo sapiens
cccagagacaacgagagaacaggaaaggaaccaagaagccgaaaagaaggccaaaaggagggcgaaacccacacacagaaccag

SEQ ID NO: 66752 - RNA, 74 nt, Homo sapiens
acaaaaggagacgaaaacaccggaacaaaaggacggcaacaaggcaagagcaacgaaccaaagcaaaggaggcc

SEQ ID NO: 66753 - RNA, 57 nt, Homo sapiens
cccaccgaagccaccggaaacaaaagaaagcaccgggaggaaagagagccacacgaa

SEQ ID NO: 66754 - RNA, 74 nt, Homo sapiens
ggacacacagacccccaccaagcagaagagagaagaacacgaagaaaaaaaaaaaggaaagaaaggaaaagaaa

SEQ ID NO: 66755 - RNA, 71 nt, Homo sapiens
aagagcccccagagagaaaggcagacaggagaaggaaagcaagacaaagcagaagaacacgccaaaacaga

SEQ ID NO: 66756 - RNA, 55 nt, Homo sapiens
agggaacaaacaccggagcaccgagcgaagcaacgggagagcaagaggaaggaag

SEQ ID NO: 66757 - RNA, 71 nt, Homo sapiens
aagaacccgaccgcgggagaagcgaacaacaacgggaacacagaaaacggcgcgagggcggcccgcagaag

SEQ ID NO: 66758 - RNA, 73 nt, Homo sapiens
gggcgccgagcgaacgcgcaacagggccgcacgcaagggcggcgacggcggcgcgaggaccgaccgggcccgc

SEQ ID NO: 66759 - RNA, 75 nt, Homo sapiens
ggccgcgcgcgaacccggccgcagggacccgcaggaggcgcaggaagggcaacaccaaaccagaagaaggacgag

SEQ ID NO: 66760 - RNA, 75 nt, Homo sapiens
agcgacccgggagcagcgaggccaggcgcggcggcaagcggggcgggagccgcaggagcagggacggggggaaaa

SEQ ID NO: 66761 - RNA, 65 nt, Homo sapiens
agaaagcacagaacggagggcacagaaggaaggaaaccaccaccggacacggcaagacgagaaaa

SEQ ID NO: 66762 - RNA, 80 nt, Homo sapiens
ggcaccagcaacaccccaggccggggagggcgcgccgaaagcggaaggccgagggggaagagaaaagaaggagggcaagg

SEQ ID NO: 66763 - RNA, 54 nt, Homo sapiens
gaagcccccaaagagagaaccggagagcacccaacagggacccgagagaggaga

SEQ ID NO: 66764 - RNA, 73 nt, Homo sapiens
gacaagccgcagagagagacacacgagagggagagaaaggcggagcacaggcaaagcgacggcgccgaggcgc

SEQ ID NO: 66765 - RNA, 66 nt, Homo sapiens
accaaggcccagccggacaacgaacgcaagaaaagaacaccgaagaaagcagaccaacgcaaaaaa

SEQ ID NO: 66766 - RNA, 82 nt, Homo sapiens
caccaagcggggagaacccgaacaccagcaacccacagcccagccgaggcacgaccgccggacaccgcacaccgccgccacg

SEQ ID NO: 66767 - RNA, 71 nt, Homo sapiens
ccgaccgagcccaggagcgccacgcgcggaaggcagcgcccagcagcgcaggggaagaacagaaagacgga

SEQ ID NO: 66768 - RNA, 68 nt, Homo sapiens
gcaggcagggccgggagcgcggaacaccgcaacaacagggaggcccccggcccccaaagcacacggac

SEQ ID NO: 66769 - RNA, 62 nt, Homo sapiens
agaggccggagagaagagacagagacaggggccaaacccacagggagaaaaccggcacccag

SEQ ID NO: 66770 - RNA, 84 nt, Homo sapiens
acccggcggacaagcggcgggacgccaggacgcggcgagcaaggcaccggagacgcgggcagaaaaaggaaaggaaggcggcgg

SEQ ID NO: 66771 - RNA, 74 nt, Homo sapiens
acacaagggagccggggcccccagcaagaacgggaacaaaaccggcaaaggagaagagaagggggaccagcagc

SEQ ID NO: 66772 - RNA, 78 nt, Homo sapiens
caaacagaacagcagaagcagcaccaggaggcagccaaagaagacccagaggacacaaccaaggaccagcccgaggag

SEQ ID NO: 66773 - RNA, 75 nt, Homo sapiens
agccagacccggggaggcgcacacacaccaaagcggggaccgaagagccaagcaccgcgaagcgccacacggaaa

SEQ ID NO: 66774 - RNA, 69 nt, Homo sapiens
cggccccagagagccaacagccacgacagacaccccaccgagacgcgccacacagggaggcgcgaggcg

SEQ ID NO: 66775 - RNA, 58 nt, Homo sapiens
ggggccccagcaccaaacgccaagaccacggcaccaagagcgccacgccagggacccc

SEQ ID NO: 66776 - RNA, 79 nt, Homo sapiens
aagcggcagcgaggagacccggcgccgccaggccgacgaaaagcccaagggcgaccgcagaacaaggacagcagaaaga

SEQ ID NO: 66777 - RNA, 81 nt, Homo sapiens
gagcaacccgcaaacgggggggcggccggggccgccaccacacgaaacagggcaaggcaaggaacagcagcggggaaccgg

SEQ ID NO: 66778 - RNA, 77 nt, Homo sapiens
gggagacagaggaagccccagaggccacaaggcaggagcgaggggcagagcagcccgacggccaggaggcgaagaga

SEQ ID NO: 66779 - RNA, 75 nt, Homo sapiens
cgaaggagaagcgcccagacgagcagcaagaaacgccgcagaaaagggacgcgcccaggccaaagaccaaaacac

SEQ ID NO: 66780 - RNA, 74 nt, Homo sapiens
gacggaggagagaaaacacaaaaggcaccacagagcgcacccaaacaagagggaaagggccccaagagccgggc

SEQ ID NO: 66781 - RNA, 76 nt, Homo sapiens
ggacccacgaaaacaacaagggggaaagcggaccaagaggaaacccgaagaggcacaggaagaaacagggcaaaag

SEQ ID NO: 66782 - RNA, 61 nt, Homo sapiens
gagcaaaaacacagccagcccacaagcccagaacacagaggagcccgcgccagggagccag

SEQ ID NO: 66783 - RNA, 34 nt, Homo sapiens
cagaggagcgcgggaggcaaggagcgcaccaaca

SEQ ID NO: 66784 - RNA, 75 nt, Homo sapiens
caggcgggcggccacggaccggacccgcgggcccggcggcggagagcgacgcaggggaggacagggaacggcgag

SEQ ID NO: 66785 - RNA, 76 nt, Homo sapiens
cagacagaggggcgacgaccgcacaacagaaagcggagccgcggagcccgggccagaccacaggaaagcgcaggac

SEQ ID NO: 66786 - RNA, 56 nt, Homo sapiens
caggacccggacccggaagagaagagggggcaagaaagccacaaaaagccaggaga

SEQ ID NO: 66787 - RNA, 77 nt, Homo sapiens
gccaacgacaacacaggccagcagaaagcgaagcagaagccgagaacagcggcgagccggaaagaacccacagggca

SEQ ID NO: 66788 - RNA, 71 nt, Homo sapiens
cgcgccccgcccggaccgcgcagaaccagggcggcggccagcgccacgcacgcagagagaccgccccagag

SEQ ID NO: 66789 - RNA, 77 nt, Homo sapiens
aggagaggcccaggccgaccggcgcgcggaggcggcagagacaacacgaagggaggagcgcgcggggccccgggcac

SEQ ID NO: 66790 - RNA, 71 nt, Homo sapiens
ccagggcaaccgccccgcccgcaccaacaggcaaacacacgcacgacacaggcaggccaaaaaggaccaaa

SEQ ID NO: 66791 - RNA, 78 nt, Homo sapiens
ggcccgccgccccgagcggccaggaagcagcggccgccacgggaccagaagccacacccaccgcccgggcaggccacg

SEQ ID NO: 66792 - RNA, 34 nt, Homo sapiens
gccagcggggacaggcagcacccgagaagaacca

SEQ ID NO: 66793 - RNA, 87 nt, Homo sapiens
cccgagagcgggagcgggcgggccaggccagaagcggacccagaagaggggagcagcaaggaggaagacagccggggccggagggga

SEQ ID NO: 66794 - RNA, 70 nt, Homo sapiens
cccgccgccgaccggccagccgggccgcaggaccggggaaggagcacagcacggagggcaagcaggcgga

SEQ ID NO: 66795 - RNA, 66 nt, Homo sapiens
gccgcacggggccgcaaaacgcagagcagagggagccggacacaagagggcaagaaaggcgcgacg

SEQ ID NO: 66796 - RNA, 73 nt, Homo sapiens
ggccaaaaggaaggcgccagaggcagcggcggaagaggcagcagaaggcgagaggacaagcaagcacaaaccc

SEQ ID NO: 66797 - RNA, 80 nt, Homo sapiens
gcacaacaaagaagaaaaaccggaccaagaggaggagagaagagaggaagcgagcagcacgggcaagcgggcagcgaaga

SEQ ID NO: 66798 - RNA, 101 nt, Homo sapiens
gagcaccacggaccccaaggaagccacggcagacacacaacccgacccgacgagggccgcaaggccaggcgcgcagaggcacccaacggcacagaccccac

SEQ ID NO: 66799 - RNA, 70 nt, Homo sapiens
ccgaccggccgcgacagcgaacagcgcggccgcagaggcaccaaaaagcacgaaaggccagcaagaaacc

SEQ ID NO: 66800 - RNA, 37 nt, Homo sapiens
gagaggagggcacacagggcgacagaaaacgggcagg

SEQ ID NO: 66801 - RNA, 72 nt, Homo sapiens
cgccccaaccacaccccccccaaaccgagccaaaagcggcaaggcaacaggagagccaccggaggggaagaa

SEQ ID NO: 66802 - RNA, 56 nt, Homo sapiens
aaacacagcaacccagcacgaacaagggagacaacagccacacaaagcagcaacag

SEQ ID NO: 66803 - RNA, 73 nt, Homo sapiens
gaggagggaggaaaacaaccgagggcagacaagcccgagaagcaagaccgccccaaaaagcaagaaaagaccg

SEQ ID NO: 66804 - RNA, 76 nt, Homo sapiens
gggacaggcagcgcagcccaggaggcagcaccaagaaccaagaaggagcgagggaggagcagcgagacagcaagag

SEQ ID NO: 66805 - RNA, 95 nt, Homo sapiens
acaagagcaaagcacccaccagaaagaggcacagccccaaaagaaaggcaggccacggaaaggagaaagaccaagacagccaccagccgggaaca

SEQ ID NO: 66806 - RNA, 77 nt, Homo sapiens
gaggaaagcgcgagagcgccaaccgaggcaaaagaaacaaacacgcacaccaaaagccgcagaaggcccgccaaaga

SEQ ID NO: 66807 - RNA, 79 nt, Homo sapiens
gggcccggcccgggggccgccccggcgagccgcgacggcgccgcccacggcgaggggaggcaagcaggggggcaaagga

SEQ ID NO: 66808 - RNA, 66 nt, Homo sapiens
gcgaaagccgaggaaaaagcggccgcagcgaggaacgcggggagcagcccagcggagcacaggagg

SEQ ID NO: 66809 - RNA, 103 nt, Homo sapiens
cgaggaagaggagacgggagcccgagcccaggcagcccagcccgcccccagaaaccaggggccacggcgcccgggcggcagacccgaccagggaggacgccca

SEQ ID NO: 66810 - RNA, 49 nt, Homo sapiens
gccgaaccccaggaacaaggcgaccgcgagccaggacgcgcccccccgc

SEQ ID NO: 66811 - RNA, 69 nt, Homo sapiens
ccgagacggccaccccccgcaaagcccaggaaagaagcgaggagggaaaagacaaacaaagcccaccag

SEQ ID NO: 66812 - RNA, 60 nt, Homo sapiens
ccgggcccggccggaggacaagcggcggagaaaccaccacaaacacgaggccagcaacga

SEQ ID NO: 66813 - RNA, 70 nt, Homo sapiens
cgagaaaacgaggccccgagccagccccgacagcgggaacccggcggagaaaccaccacaaacacgaggc

SEQ ID NO: 66814 - RNA, 78 nt, Homo sapiens
aagaccaccccagaacacaccaggacgcccgccacaggccaggagggggaaggaaggaaaaaggggaagaaggccaac

SEQ ID NO: 66815 - RNA, 93 nt, Homo sapiens
accagaaaaaagaaggacaagacaagagaaccaccgggaccacagaacccaagcaaacccacaacacacaggaagcaaagaccaaagaaaacg

SEQ ID NO: 66816 - RNA, 76 nt, Homo sapiens
cagccagaagaaggaccggaagcacacaacaggaaaacaaaagaggagaaagaggaccacacaccccgaccacagc

SEQ ID NO: 66817 - RNA, 80 nt, Homo sapiens
cgcggcacggcgcaggaggagaccggcggcagggcaagcggcgacggaccccaagaaagaccagggacacagagagccac

SEQ ID NO: 66818 - RNA, 74 nt, Homo sapiens
aaagaccaacaacagcgcaggacacgagacggggcgcggcgagcgcgccagacacaccgcggcgcgcgggagcg

SEQ ID NO: 66819 - RNA, 101 nt, Homo sapiens
cccaagcggagaagggggccccagagaaagacagccgagaaaacccgagcaggcgaaaaagaaaagaagaaaagaaaagaaagaaaagaaaaaaggaaaaa

SEQ ID NO: 66820 - RNA, 80 nt, Homo sapiens
acacccgcgcgcgcccgggaggaaggaacgaggcaaggagcaaagcagcggcgcagcccgggacccacaggaccgcgaac

SEQ ID NO: 66821 - RNA, 79 nt, Homo sapiens
agccagacagcagccaagaaagaagcggcacggaaggaaacggcccagcagacaagcaggaaggcggcaggaggagaag

SEQ ID NO: 66822 - RNA, 60 nt, Homo sapiens
ggaagccacggcagacacacaacccgacccgacgagaggccgaaagaaaaaaacaacgca

SEQ ID NO: 66823 - RNA, 53 nt, Homo sapiens
ggccgggccccagccgcgaccccaggcagcacaaggccgacgcgcacgaacac

SEQ ID NO: 66824 - RNA, 85 nt, Homo sapiens
agagacagcggaagggagaccaacgcaaaccaagcaaggaaccagcgagcaaacgcaaacacaacagaaaaaagaaaacacgacc

SEQ ID NO: 66825 - RNA, 66 nt, Homo sapiens
ggaaggaaaggcgcaacaacacaaaaaaagcagcaaggggacagcccccggacccaccgagaaaga

SEQ ID NO: 66826 - RNA, 76 nt, Homo sapiens
gccaacaaagaagaaagaggagcggaagacgaacgaaaccgcccccaaagccagagcccaagccaaaaaggccccg

SEQ ID NO: 66827 - RNA, 59 nt, Homo sapiens
aggaaggcgccaaacgggcagggccaggaaacaagacgaagccaaaggccaaagaagag

SEQ ID NO: 66828 - RNA, 37 nt, Homo sapiens
ggcccccgaaggcgggaacagaccggcaaaaggcagc

SEQ ID NO: 66829 - RNA, 83 nt, Homo sapiens
ggagcacaaaccgaacggccgcgcacagcccgccgccgccccaacgccgggcgcccgcgccggcagaggaggcgagcacccgc

SEQ ID NO: 66830 - RNA, 80 nt, Homo sapiens
ggaggcccccgggcaagaggcgcaaacaagccaacccaggaggaaaaacgggcgaacagagccagacggccaccccagga

SEQ ID NO: 66831 - RNA, 77 nt, Homo sapiens
ccaggagcgcacacacgacaggagaaaggaggagagggaaagcggcggcggcacaccaacaaacgggcccagaagac

SEQ ID NO: 66832 - RNA, 75 nt, Homo sapiens
accaagcagcagaagaagcgccaagaacaagaaaaggaccaggcgacgaggacgacaaggcgaacaagaacggga

SEQ ID NO: 66833 - RNA, 77 nt, Homo sapiens
cgcgagccgcccaccggcgccacgcaagggcgaggcagccccaaacaccgaaaagaggacagccaacccccaacaag

SEQ ID NO: 66834 - RNA, 67 nt, Homo sapiens
gagcaaaaggcagcgcagcggagcaggacagaagaaacccccagaacaagaacacagaagaaaaacc

SEQ ID NO: 66835 - RNA, 79 nt, Homo sapiens
ggggagcggagccaggaccgcaggaagggccgaggggagaaagcggccaagaagacccgcgggggggccgcgcagcccc

SEQ ID NO: 66836 - RNA, 69 nt, Homo sapiens
acagcccaggacagccggaagccacgccgacacaggcagcaccggcagggaaaaaggacagggaaagcc

SEQ ID NO: 66837 - RNA, 96 nt, Homo sapiens
cggaccgcaggagggagaccacagcaagacccaggaccccggaagccagaaaggagggcccgacccggccacagcccaaccgccacgcgacacggg

SEQ ID NO: 66838 - RNA, 77 nt, Homo sapiens
cacccagcacaaccaagacccccgggaccaggaacggcaagggcaccagcaacgacccccgggggaaacgaggcagc

SEQ ID NO: 66839 - RNA, 84 nt, Homo sapiens
acagaagagaggccagccgggaggacacacaagcgggcccccagcacaagggggcaccaggcggagaaggacgccacacgcagg

SEQ ID NO: 66840 - RNA, 74 nt, Homo sapiens
gaagcacgacgaacgagagcacgacaaagcagagaaggcgagcaagggcgcgaggccacggacgcggaggaggg

SEQ ID NO: 66841 - RNA, 86 nt, Homo sapiens
cccagacccaccccaccccagggagccggaggcgggcgcgccccaccaccgccccaccaggaggaggggcagggggaggagagcag

SEQ ID NO: 66842 - RNA, 73 nt, Homo sapiens
ggcagagcacaagcacagacccagacggcagaagaccacccccagaaaacgaaggaaggaggacccgaggaga

SEQ ID NO: 66843 - RNA, 68 nt, Homo sapiens
aaagagagaaccccaaccggggaggaaaaccgacgaagaacaggacaggcccagacggacagcaacca

SEQ ID NO: 66844 - RNA, 95 nt, Homo sapiens
gcccagggagggcaaaggcgccggggaacggagccgcgggaaagggggaccccacccgaggagcagagagcgaggaccaccgaccgcccgagacc

SEQ ID NO: 66845 - RNA, 65 nt, Homo sapiens
agaaaagacaacggcaccagaacagagagccacacacccgaaaggcccgacagacgcagaccacc

SEQ ID NO: 66846 - RNA, 60 nt, Homo sapiens
cgcagcgcgccaccagcccggggcgcggcgacgggaaaaggcaacagaaagacggcaaca

SEQ ID NO: 66847 - RNA, 82 nt, Homo sapiens
gcaagcccagacaagccggggaggaagggcggcggaccgggggagagccacccagcagggaggggaaggggagccagggaac

SEQ ID NO: 66848 - RNA, 92 nt, Homo sapiens
cccagaccggacccgagcagcagcgggggagagcccggaagaacacagccagggaagcagcgcggccacgcccccacgaccggacggacacc

SEQ ID NO: 66849 - RNA, 67 nt, Homo sapiens
ggaaccacgccagcggaacgaaacacacaagacaagacaagaaaaaggcgcagcccaacagaaccca

SEQ ID NO: 66850 - RNA, 82 nt, Homo sapiens
agcacgaggcgggcagcagcagccccggggcccggagagaaggccaagagaggccaacagaggaacaaggcccgcagaaccc

SEQ ID NO: 66851 - RNA, 74 nt, Homo sapiens
ggaccagcaaagcggaggacaggcaccagcgagaacgcgaccagcaagaagaacgagccccccgaagcccagcg

SEQ ID NO: 66852 - RNA, 79 nt, Homo sapiens
ggacaaagggaaaaagcgaaggcgaccgacgagcagaccccccccgcggcccgccaggcgacccacggacagacgcgcg

SEQ ID NO: 66853 - RNA, 78 nt, Homo sapiens
ggcccaccagccaccccaccgcgcagggaggggcccgggaaacagagaaacaccgaaaacagaggcgaaaacaggccg

SEQ ID NO: 66854 - RNA, 85 nt, Homo sapiens
cgagcagaccccaggaagacagagacacacaaacaaaaggcgcgagagaaggagaagaggccaagagccgcaagacgcaagggag

SEQ ID NO: 66855 - RNA, 72 nt, Homo sapiens
aaggaccccggaacgggcgggcggcccccgagcagcggagcccaccaaaaaacacggcgggcgggggcagcc

SEQ ID NO: 66856 - RNA, 57 nt, Homo sapiens
aaacacagaacaacaacgacagaggcagacaacacaaaagggccgggccaacacccg

SEQ ID NO: 66857 - RNA, 92 nt, Homo sapiens
gagaccaacccaagcgaagaagagcggaaaacaagggagagggcggaagaccagagcggggccaggggagagaccaggccaggagagaaaca

SEQ ID NO: 66858 - RNA, 76 nt, Homo sapiens
ggcaccgcccggggacgaaagcagaggcacggagcccacaagaagagacgcaagggcaaaacaaggccggcagagg

SEQ ID NO: 66859 - RNA, 32 nt, Homo sapiens
caaaaccccgaaaggcggcagaagcaaagaga

SEQ ID NO: 66860 - RNA, 90 nt, Homo sapiens
cgagcgcgccgccgccgccgccagaacaaccgggcgccgacgagacgggccacgcaggcgcgggggacgacggcgggggcacacggggag

SEQ ID NO: 66861 - RNA, 61 nt, Homo sapiens
gaagaacagagacagcagccaaacccccagggggagagcaggggccaaaggggaaacagca

SEQ ID NO: 66862 - RNA, 81 nt, Homo sapiens
ggcaaccacagagagagagagggagggaaacagaccccgacagaagaaggaaggcaccagaccagaaaccgaaaaagcagc

SEQ ID NO: 66863 - RNA, 90 nt, Homo sapiens
ggcaccagcaagccagagacgagagagaagagcgccgaggaaacaggcaaaacgggcaccggaaacaccgagaagggccagcgaagaaac

SEQ ID NO: 66864 - RNA, 74 nt, Homo sapiens
caccccaggaaccaggaaaggaaaagagcgggagcgcggagggggcgggcacggaagcaccaccacggacccgc

SEQ ID NO: 66865 - RNA, 82 nt, Homo sapiens
caaggcaagaccgaacagaaggaacgacgcggaccagaagccagagcgaggacgccggcaggcagcaggaggagccagagca

SEQ ID NO: 66866 - RNA, 63 nt, Homo sapiens
cggccagagccgcacaaccacaggggcccgacaagggcggcccagcagggggagacaggaggc

SEQ ID NO: 66867 - RNA, 35 nt, Homo sapiens
aggagacccaacagacgcagacaccagacagcaac

SEQ ID NO: 66868 - RNA, 78 nt, Homo sapiens
aggcccgcaccgcaggcccagaggacagagcagacccgagacagggaagaccgcgcgaaagccagccaaccgcacgac

SEQ ID NO: 66869 - RNA, 37 nt, Homo sapiens
agccccaaaaggcggcaacagaaagccacacacgagg

SEQ ID NO: 66870 - RNA, 69 nt, Homo sapiens
ccccagaaggcaacgcgccgcaaaacagaacgcggaagcagccgacacgagcggcaaaaacagcgaaag

SEQ ID NO: 66871 - RNA, 77 nt, Homo sapiens
ggccacccaaagcacgggggcaacagaggagccagcaccgccgaccgccagcgccagaagccagagagggcggacag

SEQ ID NO: 66872 - RNA, 72 nt, Homo sapiens
agcccaccggaaggagaaggaagaggagcggaagcggaagaaagaagagccaagaagggaagaaaacaagaa

SEQ ID NO: 66873 - RNA, 83 nt, Homo sapiens
ggggacacaggcgccccgcagaccagggagcgacgaaggcccagccgcgcccggagaagaacgaggaaccccagagaggacag

SEQ ID NO: 66874 - RNA, 42 nt, Homo sapiens
gagcgaggcggcgcggccagaaggcaggggaagcgaggagaa

SEQ ID NO: 66875 - RNA, 61 nt, Homo sapiens
cgaaaaagaacgacagagcaaccaggaaagaagagggccccagaagaagggacacgagaaa

SEQ ID NO: 66876 - RNA, 76 nt, Homo sapiens
gcccgcgaagaggagggggcgcggggccaccgcggcggagcccgaggaaccaccacccaccgaagggggacgaaga

SEQ ID NO: 66877 - RNA, 84 nt, Homo sapiens
gggaccgcaggggcgcgcgaaggagcggaagaaggcaggccaaaccaccgaccagagcagcagagccccaggcagacgacgccg

SEQ ID NO: 66878 - RNA, 73 nt, Homo sapiens
cagcaggacgcaccgccaccaggaccgagaaggagagaggcgccgggggagacccaaccagaccagcggcaac

SEQ ID NO: 66879 - RNA, 57 nt, Homo sapiens
ccaagcggagacagcaccgacagaagggagacggaccagcagcacggcacaaggccg

SEQ ID NO: 66880 - RNA, 77 nt, Homo sapiens
caaacagcaggaccagaacccgcgaaagagggaagcggcaaaccaaaagagcaacgccagccaagacgcgcacagac

SEQ ID NO: 66881 - RNA, 79 nt, Homo sapiens
gcccacacccaacggaagaggccggaggagccggagagggagcgccgccggagcgaggaagagagaaggccacgcccga

SEQ ID NO: 66882 - RNA, 73 nt, Homo sapiens
ggacgagcaaaggaagcgcgaacagcagcgcagaggcgagacaggaccgcggacaaaccgccccagggcgacc

SEQ ID NO: 66883 - RNA, 52 nt, Homo sapiens
gaaaccgcaggaaacgagccggggccaaaccgagcgccgccccggcaggcca

SEQ ID NO: 66884 - RNA, 67 nt, Homo sapiens
gagcggaccccaaggggagcccagcagcgacagcggcggggagacggaggaagacacgccagacagc

SEQ ID NO: 66885 - RNA, 36 nt, Homo sapiens
ccacaggaagccaagaaacagacacacgaaggagga

SEQ ID NO: 66886 - RNA, 64 nt, Homo sapiens
agaggggaaagcaaaagaaacagagcagggacagacgcagcgaagaccagagaggacaaccaaa

SEQ ID NO: 66887 - RNA, 82 nt, Homo sapiens
cgcgaggggcgccgaagcgaggggcccggagcacacaaggcgaaagaaaaggcaagagaaccgaagaaggacagaagaagaa

SEQ ID NO: 66888 - RNA, 83 nt, Homo sapiens
agagaaagaaacaacagaaccaggaaaaaccgccaaacgcaggcacaaggcgcagggggaaaggcacaagagacaagccccgg

SEQ ID NO: 66889 - RNA, 76 nt, Homo sapiens
cgcccccaggccgcagccgagcaagcgaagcccagcgcccgcgcagaaagacgcagcacaaggcggccgaccaagg

SEQ ID NO: 66890 - RNA, 61 nt, Homo sapiens
ggaaaagacagagcaagaagcagacaggcaagaagcaccggagcacgacgacagcagaagc

SEQ ID NO: 66891 - RNA, 51 nt, Homo sapiens
ggccagcgacagaccgcgccgcgccggcgaggagggacaggccacggggga

SEQ ID NO: 66892 - RNA, 77 nt, Homo sapiens
ggcccaggccgaccggcgcgcggaggcaaggaggaaaacaagacggaaggagcgccaaaaggaaaagcccagaggaa

SEQ ID NO: 66893 - RNA, 79 nt, Homo sapiens
ggagaccacagccaagagccgggaccccagaagccagaaaggacgaaaaacggaaacgccggaccaaaagcaagccaga

SEQ ID NO: 66894 - RNA, 56 nt, Homo sapiens
caggggcgccggcgcgggcccagcacgaagcaaaccgggacaacaaaagaaaccag

SEQ ID NO: 66895 - RNA, 70 nt, Homo sapiens
ggcaaaccccgccagaggcacacacgcacccgaaagagcgaaagcccagacaggaagcaacgagggagaa

SEQ ID NO: 66896 - RNA, 97 nt, Homo sapiens
ggccccacaccaccgcacgcgcgcccgccgcccgaggagccccgcgcgggaccgccaagcagacgaaggagaacagacacgggcgagccaccgcagg

SEQ ID NO: 66897 - RNA, 56 nt, Homo sapiens
cgggagagaccacagaaggaccagggcccgcgacccaaaaggcccagaccacaaca

SEQ ID NO: 66898 - RNA, 71 nt, Homo sapiens
gcggaggacagcaggccccgcgccggggcccaccggaccgggccacagaggcagaaaccagcagggcggcg

SEQ ID NO: 66899 - RNA, 75 nt, Homo sapiens
ccagaaaccaggcgccaggaacagcgggacccaggacagaaaagacccacggaaaagaaacagaaagccaccccc

SEQ ID NO: 66900 - RNA, 41 nt, Homo sapiens
gcggaggcgaaagcggaacgagccaagaccacgagagaaaa

SEQ ID NO: 66901 - RNA, 72 nt, Homo sapiens
aggacacagccagaagcggaggacccaacagaggaagccgcaagaaacgggacgacaggaaggccagagaag

SEQ ID NO: 66902 - RNA, 98 nt, Homo sapiens
ccagcaggaggcccacaagcagacacaccggacaagaccgacgaacacacgagaccggaagcgccgcaagagaggagggccaagcaaacgaagaacaa

SEQ ID NO: 66903 - RNA, 74 nt, Homo sapiens
cgccaacgacgaagaagagacacaggaagaagggcaccgaaggagaccccaagaaaaggaaaaagagagaccaa

SEQ ID NO: 66904 - RNA, 73 nt, Homo sapiens
cagaggaacggaagaggaccaaagggaggggaaacaagaaccagacaggcacaggcgaggggcggaaagagaa

SEQ ID NO: 66905 - RNA, 63 nt, Homo sapiens
cgggagacagcgggacaggagcagcggccgggagcccagggaggcagcagaccgcaggcgcag

SEQ ID NO: 66906 - RNA, 80 nt, Homo sapiens
caccagggggcccacaaaaaccacccgagcccaacgcgaccccggggcagaacggccggggggcgagcgaccgaaagaca

SEQ ID NO: 66907 - RNA, 71 nt, Homo sapiens
caaaggggcacaccaagaagacgccaggaaagaaggaccgccgcaaaaccggagaaagaaagagcagagga

SEQ ID NO: 66908 - RNA, 64 nt, Homo sapiens
gcgccggccagcacacgacccagagaacccaccccaaggaacgccccgagcgggagccgccaag

SEQ ID NO: 66909 - RNA, 60 nt, Homo sapiens
caaagcagggagcagagccagacagccaccacccggccccagagaaggagaagagagaga

SEQ ID NO: 66910 - RNA, 74 nt, Homo sapiens
acgaaaagagggcccgagcaggaggacagacgagccagcgcagcagccgacacgggagccgagccacaagccgg

SEQ ID NO: 66911 - RNA, 79 nt, Homo sapiens
gagccggggccgggcgacaggagcagggccagaccccggaggagagaaaaacaaggaagaaccagggagaagggaacaa

SEQ ID NO: 66912 - RNA, 97 nt, Homo sapiens
gaaaagggacaaaacaggcaggcggccacaggaaccaagagaccaccaaacccagaacagcacacaaaaaacaaggcacaggaagacgaaacgacaa

SEQ ID NO: 66913 - RNA, 97 nt, Homo sapiens
gcggagcggcgcccaagacagcaagggacagacgggaaaaaagagcaccaaagaagagcaaagagggcagcccggaagggacaaacagaaccaagcc

SEQ ID NO: 66914 - RNA, 71 nt, Homo sapiens
ggacagacccggggcggcgggggacggggccggcggccaaggaggggccacgaggggccaaggcgaccaca

SEQ ID NO: 66915 - RNA, 68 nt, Homo sapiens
cgaccaggagaaccccaccagccacgacagacagaaccaagagggagaagaaaaacaagcaaacacac

SEQ ID NO: 66916 - RNA, 85 nt, Homo sapiens
gcacagagaaccgaccagaacgcagcaacaaagaacgaaaacaaacggaagagagggcagcaagaaagaacaagaaagcgaacgg

SEQ ID NO: 66917 - RNA, 68 nt, Homo sapiens
ccacgggcaccggggagaaaaaggcccagaacagaggggacaacaaacaacagcccggcacaagcagg

SEQ ID NO: 66918 - RNA, 75 nt, Homo sapiens
acaaacacacgcaaaggagaaaggaaccgacagacaaacccagaaagagaaagaaaagcagcagaccaacggagg

SEQ ID NO: 66919 - RNA, 79 nt, Homo sapiens
cacaacgcccgacagcaggagcaccaggagacaaagccacaaaaacaccagaaaaaccaagcagaaaaggagcggcagc

SEQ ID NO: 66920 - RNA, 82 nt, Homo sapiens
ggcaaaggggcaaggacccaacccaggagaaaaaggggcaaagaaaaaggagagaaaaagaggcaaaacaacaagaagaaaa

SEQ ID NO: 66921 - RNA, 97 nt, Homo sapiens
gaacaaaccgaagaacagcgggaaagaaggcaaaacacgggcagacgggaaaggaacccacggaagaccagaaaccaagcaacaggccagaaaacaa

SEQ ID NO: 66922 - RNA, 69 nt, Homo sapiens
ccagagcccacccaacgccccaccggaagacaacgaggggcacgcgcccacccaggcgcagacgaccgc

SEQ ID NO: 66923 - RNA, 72 nt, Homo sapiens
caccacccaggcaaacgaccaaagacaagaagggaaagaccccgacaaaagacaacaccgggacagacgacg

SEQ ID NO: 66924 - RNA, 50 nt, Homo sapiens
cagaaccagacaacacaggaggggcaggaggaacacaacagcagaaaaag

SEQ ID NO: 66925 - RNA, 81 nt, Homo sapiens
gcaagaaagaagaggcaaccacgcccaagcaagcggcccgaacacagaacccaagaaggagcacggaacaagagacccagg

SEQ ID NO: 66926 - RNA, 113 nt, Homo sapiens
agaagaggggcccgagcgcgcccccgagcagccaggcagcagcgcggagaagggagggcgggaagaggcccacgcggaccggcagcgccaccggaccaccagacaaggacacg

SEQ ID NO: 66927 - RNA, 73 nt, Homo sapiens
ccgccccgccgcccagaggacgcccaacaccacccacccaccacgggaccgggaaaggggaaaggacgcgcag

SEQ ID NO: 66928 - RNA, 49 nt, Homo sapiens
cggcccaccccgcagacagagacaggcaaggaaccggagcaaacgaccc

SEQ ID NO: 66929 - RNA, 86 nt, Homo sapiens
aaccaagcaccgaaacagcagcgacaagaccgggacgagaagaagccgcacaccacgaagagaggggcccaaccaggaaggcccac

SEQ ID NO: 66930 - RNA, 74 nt, Homo sapiens
acaaccaacagcgggcggcccacggcacccgcgagcccacgggcggagccccgggaccaacacagcgccacagc

SEQ ID NO: 66931 - RNA, 65 nt, Homo sapiens
agaaaacgcagcaggcaaacgggcaaaccagcggggcagaacacggcacgccgagcacagcagac

SEQ ID NO: 66932 - RNA, 79 nt, Homo sapiens
aagccggaaaggaggaaaaagaagaccagcgacaaaagagaaacccggcagagcagcagccgagacaagacccaccaag

SEQ ID NO: 66933 - RNA, 79 nt, Homo sapiens
gaggcgaggcagggaggacccacccccgggggaaaagaacgagcagcgagagccagacaagccagacaccaagacccca

SEQ ID NO: 66934 - RNA, 77 nt, Homo sapiens
cggacccccccaggagggacccacagggcgaaggaagcgccgacccacaccccgccagagaaagggcaacggggaga

SEQ ID NO: 66935 - RNA, 76 nt, Homo sapiens
ggggccggacaagaaccgaccgagagggaggagccgcagcccaaagcaagaagagcgaggccccgaaagagaaaaa

SEQ ID NO: 66936 - RNA, 58 nt, Homo sapiens
cgcaaggcccccgaccacacgcccgcgcgagagagaagaagaaggaggccgcggccag

SEQ ID NO: 66937 - RNA, 73 nt, Homo sapiens
cagaaagagaacgggacaacaaaagagccacccaaggaaggggagaggccaacaaccaaaaagacagaagggc

SEQ ID NO: 66938 - RNA, 90 nt, Homo sapiens
cgccgcacggaggcgcccggggacggggccgcagggagagcgagccagggaggcggcccccagcagccagagggaaggacaggagagggg

SEQ ID NO: 66939 - RNA, 78 nt, Homo sapiens
aggaccaaaagcaaagcagaggaacagaggaacaaggcgcagagagccaggagaagcaagcgggcacaggagaacacc

SEQ ID NO: 66940 - RNA, 79 nt, Homo sapiens
aggaggaacagaccggcggccgacgggacagagccccgagcagcggagcaggagacccaagcgagagccgggccagcga

SEQ ID NO: 66941 - RNA, 83 nt, Homo sapiens
gaggcaccgggacggaccgagaccggaccgagagcggaccgagagcgcgaaacgcacgagaagaggagagcggaagaaaggag

SEQ ID NO: 66942 - RNA, 65 nt, Homo sapiens
cgacaggaggagacaggcgagagaggaggacacgaccggcaccagaaggagaaaagccgaaacgg

SEQ ID NO: 66943 - RNA, 73 nt, Homo sapiens
acgcgggcagagagcggacccgcgacgcggagagaacacaagaagaaagacagcacgggccgagccgcgcaac

SEQ ID NO: 66944 - RNA, 61 nt, Homo sapiens
agaaaaaccgacaagacaacagaaaagcgaaccggacggcccaccacgacgggcgcgcccg

SEQ ID NO: 66945 - RNA, 83 nt, Homo sapiens
ccgaccaacgacgcgcccacaaccgggccggccccagagcccaccgggaggagaaggaggaggaacgcaggcaggcagggcca

SEQ ID NO: 66946 - RNA, 85 nt, Homo sapiens
agcgcgaggaggagccgaagcccaaaaagcgaaggggaggcgccgcaagcgcgagaccgacacaaggacagagcaccaagaccga

SEQ ID NO: 66947 - RNA, 86 nt, Homo sapiens
ggcggcagcgcgaggccggagaaacaggcgccgcgggcccgcgcccggccggacccgggcccgagccaccaggagagaacgccgcg

SEQ ID NO: 66948 - RNA, 75 nt, Homo sapiens
ggggagcgggacacgagggcgcccaagccagaaccgcgcgcaccgcggagaacgggaaagcgcacaagccaccgc

SEQ ID NO: 66949 - RNA, 84 nt, Homo sapiens
gagccaagaggcggcggcggcggcagcgacagcagcagcagcagccagacgggaaaggcagacagggaccaccacacgaaacca

SEQ ID NO: 66950 - RNA, 74 nt, Homo sapiens
gagagaagaaaacaggagccccagcgccaccgccgaccgaagccgcaaaaggacaacccgccacaacgacaaag

SEQ ID NO: 66951 - RNA, 71 nt, Homo sapiens
gaagaacacgggaaacacgcaaaacacgagcaaggacaaggaaaggcccgagccaaaagacccagagaaag

SEQ ID NO: 66952 - RNA, 73 nt, Homo sapiens
gcggagcccgcagaccgcagaaggccggagacaccagcaggcgcacacgaccaagccacggagaaccagaagg

SEQ ID NO: 66953 - RNA, 32 nt, Homo sapiens
cagcaagcccagacaaggacacaagagaggaa

SEQ ID NO: 66954 - RNA, 78 nt, Homo sapiens
cgaccgaacagcggacgccggggccgcacgccgggcaaaccaccacgggcaaggccgaaggccagggagaccgccacg

SEQ ID NO: 66955 - RNA, 70 nt, Homo sapiens
gagacccagcccaaccagggccccacccgcccagaggacgagagaggaggagggccggggcaggaaggcc

SEQ ID NO: 66956 - RNA, 75 nt, Homo sapiens
cgaggaggaggcggagcggggcccgacgacgaaggaagaccaaggaagaacaggcaagcgaaaaagggaaaagga

SEQ ID NO: 66957 - RNA, 77 nt, Homo sapiens
cagcacaggcgaggagcccaccagacccgaaacacgcacaggcgcgggaagcgaaaaacaaccaccagcgagcaaaa

SEQ ID NO: 66958 - RNA, 82 nt, Homo sapiens
gccaacccagcgggaagggagaaagcacagccagcagcacacaccgaaacaggcgggaccacagcaccagacgaccagccag

SEQ ID NO: 66959 - RNA, 43 nt, Homo sapiens
aaaaggagcaaacaccaaagcgaacagcagaagaagcaacagg

SEQ ID NO: 66960 - RNA, 57 nt, Homo sapiens
gcaaaaaaagcccgccggcagagagacgaagagagaagcagggcagaaagagcggaa

SEQ ID NO: 66961 - RNA, 72 nt, Homo sapiens
aggaggggggcccgcaggcgcggagcgccgcccccgggaccacgagaaagcccagacaggggaaaaaggaca

SEQ ID NO: 66962 - RNA, 74 nt, Homo sapiens
cgcagccagcgaacacccagccgcagcagcgaggaaaagaaggcagcccacagcaagcacgccgacacaaaggg

SEQ ID NO: 66963 - RNA, 53 nt, Homo sapiens
agccacagcgcccagagagggagaaagggcgaccaaagacaggaagagcaaac

SEQ ID NO: 66964 - RNA, 58 nt, Homo sapiens
accgggagcccaggaagcgcagacacacgccaagaagacacccgacacaaaaaggaga

SEQ ID NO: 66965 - RNA, 80 nt, Homo sapiens
ggcgcaaaaaacaaaaaggaagccccggcaccagcacccagaaaaccccacaccagcgcacgcgcggagagggaaggagg

SEQ ID NO: 66966 - RNA, 82 nt, Homo sapiens
aagcgcagcaacagcaagccccgggcaggcagcccaaggccaaccccacgcaccgcccgccccccgaggagcccaagccaac

SEQ ID NO: 66967 - RNA, 76 nt, Homo sapiens
aggggggcagcccgggagcgccccgcaccccagagaccaacgggagccgcaaggacaacagccgcggccagacagc

SEQ ID NO: 66968 - RNA, 60 nt, Homo sapiens
ccgacggccgcagaacgggaccagccgcggagaccagcggaggagagcgcgcaggagaaa

SEQ ID NO: 66969 - RNA, 75 nt, Homo sapiens
ggacagcagccccccccagacccccaggacaagaccaccccagcacaggcgccaggggaggacaccgggaccgac

SEQ ID NO: 66970 - RNA, 74 nt, Homo sapiens
cggggcgcggagcaccagggacgagcacaccaaagacagggcagaccagaaacgggggcagagccggccagggg

SEQ ID NO: 66971 - RNA, 94 nt, Homo sapiens
aacgccaggaggccgggagcgaagaccggcgcacgcccagacaccacgcccaaggaaaaccgccccagagcacacagcaggccccagcccaaac

SEQ ID NO: 66972 - RNA, 70 nt, Homo sapiens
ccgaggcaaaagaaagacagaaaaagcacagaaacgcggaacagagaggaagcaaggcaaagcgggagaa

SEQ ID NO: 66973 - RNA, 56 nt, Homo sapiens
gggcgccacagacacaaaagggacacaggaacgccacaagaaacaacagcaaggcg

SEQ ID NO: 66974 - RNA, 79 nt, Homo sapiens
ggagcccggacggcacagggcgggggggcggcgacgcagccaagcgggccaagccaacagggcgcacgaccggcgaggg

SEQ ID NO: 66975 - RNA, 70 nt, Homo sapiens
gcaagagaggcaacccgaacgcgacaggaggcggccgaaaaaacccaaccagaacgaagcccaaagaaaa

SEQ ID NO: 66976 - RNA, 55 nt, Homo sapiens
cgcccgcagccccccacggagcaggaacacaaacaccgaagcacgggcccaacag

SEQ ID NO: 66977 - RNA, 73 nt, Homo sapiens
caggggagcgaccaccgccacaaacccgcaagcaagagaaaaaaagcagggaggagaagcgggccagaacaag

SEQ ID NO: 66978 - RNA, 61 nt, Homo sapiens
gccccggccccggcacacggggaggggagcggcacgcgcacaggcagacgggcgcacagca

SEQ ID NO: 66979 - RNA, 76 nt, Homo sapiens
ggggaggaggccccaaagggcgagggggcacccgaggaggaagagggcagggcccacggaaagaagggaaacccgg

SEQ ID NO: 66980 - RNA, 82 nt, Homo sapiens
ggcaggccagagaggaagaagggcccgaaaacggccagcagccccgacgcaaaccccagcaccagcaggcggacagcacacc

SEQ ID NO: 66981 - RNA, 75 nt, Homo sapiens
ccagggggggaccggcccgcgccgagccgacaccaccacacaccgccggggaccgacaaggcgaccagccagccc

SEQ ID NO: 66982 - RNA, 73 nt, Homo sapiens
cagggaccgcaccgcggccgggcgccagcgcggcgcaggccaagaccaacaagagacgagaaaacaacaaaaa

SEQ ID NO: 66983 - RNA, 68 nt, Homo sapiens
cgggccaagagcaggacagcacgagcagacagacaagagccaccaaagaagaccagacaggggaagga

SEQ ID NO: 66984 - RNA, 100 nt, Homo sapiens
accaacagacagcggcccccagaagcacggaaaagcccccggccaaaggagagagccaggagccgccaccaacaggaggcccggggagcccgaccaccga

SEQ ID NO: 66985 - RNA, 56 nt, Homo sapiens
gcagccgagaggagcggagcgccagggggccacaggggacaccaaaaggagcacgc

SEQ ID NO: 66986 - RNA, 72 nt, Homo sapiens
cgaccaccacaacgccgcggacgaccgcacgggcaggccaaagccacccccaaaggcagaggaagaacgagc

SEQ ID NO: 66987 - RNA, 84 nt, Homo sapiens
gcggcaccacgccgacgacaggccaacaagaggccaaagagaccgaaggagcagacgaggcacgagcgccagcgcgagacagac

SEQ ID NO: 66988 - RNA, 65 nt, Homo sapiens
cgcggcgcagcagaaaacaagacacggccgaagggacaaaggagcaggcggaggaaaaacaccaa

SEQ ID NO: 66989 - RNA, 81 nt, Homo sapiens
acgccacagcagcaacacggaaacaccaccgaaagccagaagacagcgccagacgaccacaccaacccagagggagagagc

SEQ ID NO: 66990 - RNA, 72 nt, Homo sapiens
gacccagcgagcgggcggcacgcacgcagcgccagaggaagaaaaaagcccaccgcccagaggccccccgga

SEQ ID NO: 66991 - RNA, 75 nt, Homo sapiens
cagaggagaaccgacgaaccggaacagcagagaacaaaggaccgcaaacgaagacggcagcacagcaggcacagg

SEQ ID NO: 66992 - RNA, 106 nt, Homo sapiens
gggaccagcccggaacccgcaccaagccgcccacacgccaaccggccagaggacgagggcgggcgagagagaccagacccgagacacacaccaacacgagagagac

SEQ ID NO: 66993 - RNA, 64 nt, Homo sapiens
cgcggggaaccaaggagacgcccggcacgcagccacaagggcgcagaagccggcagagcccaag

SEQ ID NO: 66994 - RNA, 80 nt, Homo sapiens
ggagagaggggcgggcgagcagaggggaagcggcggagcaggaggagggcggaaagacagaggcaaccacaaagccagac

SEQ ID NO: 66995 - RNA, 60 nt, Homo sapiens
ccaaccgggcaggcgagacgcagaggacgacgcagccagagcagcaagaggccaagggga

SEQ ID NO: 66996 - RNA, 76 nt, Homo sapiens
aaggaccaagaaccaggacaccagaaaggaagaagaacagaacccaggaagagcacaagcagacaaaacaaaggga

SEQ ID NO: 66997 - RNA, 84 nt, Homo sapiens
cgagccgcaaacggcaggcgagcgaaggcacaggcccacaaccgcaccaagaagcacgaccgcgagcaaaccagccggcgggcg

SEQ ID NO: 66998 - RNA, 78 nt, Homo sapiens
cacggacacaagaggaagcggaaaccagggccacagcacgcagccccaggcagaggccccaaagccggggaagaccag

SEQ ID NO: 66999 - RNA, 85 nt, Homo sapiens
agggccaggcgccgccagaacggcggcccccccgggcggccaagacaccccgcgccgggccgaaacccacaacccagcggacacc

SEQ ID NO: 67000 - RNA, 72 nt, Homo sapiens
caagaaacaacgaccagcaccagcaaaccaaaccagggaacggagcagcaagaaggagaaaacgggaaacgg

SEQ ID NO: 67001 - RNA, 82 nt, Homo sapiens
gccagcggggggaggcgaacagcagaccgcccgaaaagaaagcgaacacacaaaacaagaaaaggcacgcaaacccacaaga

SEQ ID NO: 67002 - RNA, 63 nt, Homo sapiens
caccccggcaagaaagggagagcaaacggaagaacagaaggccccaacaagacagggcccacc

SEQ ID NO: 67003 - RNA, 43 nt, Homo sapiens
cgagcacaggcacacacacggccagcacgaagcccgaacaacc

SEQ ID NO: 67004 - RNA, 83 nt, Homo sapiens
gcggacccacggccgacgcgggaaccaggagcgaccacgcgcaccaacgagaaggggagcggaggccaagggagcacgaggag

SEQ ID NO: 67005 - RNA, 62 nt, Homo sapiens
acagccccaggagccggggccgcagccaccaggacgcaaaggcacgcaggcggcgaggagcg

SEQ ID NO: 67006 - RNA, 79 nt, Homo sapiens
caccagacagacgcgcaaaacccaggccccgaccggcgcaagcaggaccgcggccaccgcaacgcacgccccacgccac

SEQ ID NO: 67007 - RNA, 78 nt, Homo sapiens
gggggccccaccgggcccgaaggcgcgagaaggcgggagccgaacacaccggcgacgagagccgagaaggaccaggac

SEQ ID NO: 67008 - RNA, 59 nt, Homo sapiens
cgaagaaacagcggagaaggagaagggagaagaaacagcagccgcagaagcaagaaccg

SEQ ID NO: 67009 - RNA, 76 nt, Homo sapiens
ggacagcgggcggagccgacgagcggcggggacaggagccagcggcccaggggcgggggaggaaacagagacacag

SEQ ID NO: 67010 - RNA, 72 nt, Homo sapiens
ggagcgacaagcgccccgacggagcgccaggacgggaacgaacacaaaccccaggccccaggacacaggaag

SEQ ID NO: 67011 - RNA, 80 nt, Homo sapiens
gcagaaggcaccaaaggcaggcaaagcagagagcagaggccagccacgcaacggcccgaacagcaacagagcaaacagaa

SEQ ID NO: 67012 - RNA, 75 nt, Homo sapiens
cgcccgccacggaccccgagacccggaacccagggccacccgcacggcagcaagaggaaagccgccggggccagg

SEQ ID NO: 67013 - RNA, 70 nt, Homo sapiens
gaccgacccgaaccacgagaaggccgccggcggagagaacaggggagaaccaggcgagggacccacaaga

SEQ ID NO: 67014 - RNA, 76 nt, Homo sapiens
agcaacaagagagggcgacaggggaaggaagaccaacggggagcagagaaaacaacccggcagcagaggagaaacc

SEQ ID NO: 67015 - RNA, 82 nt, Homo sapiens
agcccacagagagcaaaacacaagagagcagggaggaggaacggaagaggaggcaacagaggggcaagaaggaggagaaaca

SEQ ID NO: 67016 - RNA, 51 nt, Homo sapiens
cagcccggaaagacggacagaagaagaccaccggaaagaccagcacaggca

SEQ ID NO: 67017 - RNA, 77 nt, Homo sapiens
aaaaggacgacagcaggagcgaagcaacagagaacaaggacggcacaaaccagggaggcaccgccccaacccccccc

SEQ ID NO: 67018 - RNA, 73 nt, Homo sapiens
caggaaggaccgagaccaggaggaagacggcgaaggcccagaccccaacaggaaccccccggcggcagagagc

SEQ ID NO: 67019 - RNA, 75 nt, Homo sapiens
gaagagcgaccagggacaaaagaggggaaacagggagcccaaaacaagaagcagaccaggccgaaagacacccac

SEQ ID NO: 67020 - RNA, 75 nt, Homo sapiens
gcgaagaagcaacaacccccccgcccgccacagccggcagcgcgaagcagcaaccagaacggccgagcgaccagg

SEQ ID NO: 67021 - RNA, 86 nt, Homo sapiens
cgagccgccgcccccgggaggccggcgccgcagcccgggcccaggccccggcagcgccgggacaaggccggccacgcggaagaaca

SEQ ID NO: 67022 - RNA, 57 nt, Homo sapiens
cccggccccacccaaggacgcgccgacagaagagcccagggccgaaaagaaaacagg

SEQ ID NO: 67023 - RNA, 73 nt, Homo sapiens
aaagcgagcgcaaggaggcagaaaacggggacggacccaggccaggaaagaaagaaccgccacgggcgcgcag

SEQ ID NO: 67024 - RNA, 78 nt, Homo sapiens
ccgcgcgagcagaccaaacgaaggggcagaccaacaccacccagcaaaaaccccgacgaacgcgccagggagcgccag

SEQ ID NO: 67025 - RNA, 73 nt, Homo sapiens
gggcccccaggccaacccccggagaaggggcgcaagcccagaagagcggagcccaagcagccggacacaagag

SEQ ID NO: 67026 - RNA, 85 nt, Homo sapiens
ggggcaaaggggacgcggcaccacggcacgcacaaggcgaggcggaaagagggaaaaccagagacccagacacgcgaaggaacga

SEQ ID NO: 67027 - RNA, 87 nt, Homo sapiens
ggcaaaggcggaccgacaccacgacgacgggccacagcagccggcggcggcagaggggaccaggcagagcacccccaggaaggccac

SEQ ID NO: 67028 - RNA, 85 nt, Homo sapiens
cgaggaccgcgccgcaccccaccaacacccgggaccgcaacgacggcagccccgccgggaccgaaggagaagaaggagaagggga

SEQ ID NO: 67029 - RNA, 71 nt, Homo sapiens
gaagagcccgaacaaacaaacacccagaaacaagaggccgacagaacagaaaggcaaaaagagacacacag

SEQ ID NO: 67030 - RNA, 69 nt, Homo sapiens
agaagccaccggcagagcagaaaaaagcacgaagacacaagccgagggaagagggaggccacccacgcc

SEQ ID NO: 67031 - RNA, 118 nt, Homo sapiens
ccagggcggcccccgcccgacgcccggcgcacggggcgcacaccacggcccgggcgcaccgcgccacggcccccccgcgccccggcggggagggggcccccgcacccccccaaaccca

SEQ ID NO: 67032 - RNA, 77 nt, Homo sapiens
gacccgccaccgccaggccaggaagaacgagacgccaaacaagaagaaggaaccacaacagagcgcagaaggagcca

SEQ ID NO: 67033 - RNA, 56 nt, Homo sapiens
cggacagcggggcccgcggaaaacaggacagcaagagcagccccggaacggaggaa

SEQ ID NO: 67034 - RNA, 91 nt, Homo sapiens
gagagggaggcgggaggagcggcagccgcgaggaggcgcgggagggcgagaacgaccccgagacgccgacaaccccggaacgcgggcaaaa

SEQ ID NO: 67035 - RNA, 57 nt, Homo sapiens
cgggacgcgcgcgggcacccacggagccccggggcggagaggagccaagcccaacgg

SEQ ID NO: 67036 - RNA, 79 nt, Homo sapiens
aaggaaacgccaggcccggaggccaggagagggaagaccaaagcaagggaggagaagccagccccgcggcgggcgggaa

SEQ ID NO: 67037 - RNA, 70 nt, Homo sapiens
agccgccagcgagccccacacaggccaaagccgacagaaaaggaagagacccagcgaacaagaggaagac

SEQ ID NO: 67038 - RNA, 72 nt, Homo sapiens
gaacgccagaacaaacagcgagaaaaccgacccgcccagggagccgaaaggaggggcagcccgggacagccc

SEQ ID NO: 67039 - RNA, 72 nt, Homo sapiens
ggacacacggggccaggcaaaaaacccccccgaaacaacgaacgagcaaggaagggccaaggcagaccccac

SEQ ID NO: 67040 - RNA, 81 nt, Homo sapiens
agccccggagaaccacccggaggagacggggcagacaacggagcccggggaagaaagccgaaaaagaagcgaagcaagaaa

SEQ ID NO: 67041 - RNA, 78 nt, Homo sapiens
cgacaaaggacaggacgagccccaccagccccaagagaagagggacaccccaaaacaggaccaggagcgcaacacaga

SEQ ID NO: 67042 - RNA, 77 nt, Homo sapiens
agaggcgcggccggaggaaaccaagacagcccaaacgccccacgaccagacacgagaggcgagggacgacagagcaa

SEQ ID NO: 67043 - RNA, 62 nt, Homo sapiens
cgcacccgcgccgcgcgccgaggacccagccgggaggggagacccgaccaccggaagccacg

SEQ ID NO: 67044 - RNA, 84 nt, Homo sapiens
gccgaggacggggccgggagaagagcgaccccacagggaggcagggcacaacccagccgcgcaaccccgcccccgggcaaggac

SEQ ID NO: 67045 - RNA, 70 nt, Homo sapiens
gggcgcgcccggcccggcgcgcgcggcccggccggcccggcgccccagaagccaggaacagggaccagac

SEQ ID NO: 67046 - RNA, 66 nt, Homo sapiens
aggaacgcaaaacagaacaacggggacagaaggggcacaccaagggaaggacagacggaaacaaag

SEQ ID NO: 67047 - RNA, 79 nt, Homo sapiens
gaaacagcccagagcccaaggaccagcagcaggaacaaccaggaagcaagagaaaaagcgaaacgagggaacaaggaac

SEQ ID NO: 67048 - RNA, 74 nt, Homo sapiens
cgggaccccgccgcggcgggagggcgcacgcacggacggaaacccagaacaagacacagaaacgcaaagaagac

SEQ ID NO: 67049 - RNA, 73 nt, Homo sapiens
agggacggcagaggaaagggggaagggcagccggacccagagagcaccgagagaggagacgcgacggacgaag

SEQ ID NO: 67050 - RNA, 60 nt, Homo sapiens
cagcaacaggcacacagcaaacaccccagcagggacccagcagccagcgaagccccaagg

SEQ ID NO: 67051 - RNA, 94 nt, Homo sapiens
ccaccgcaggggcaccaaaacacacaccgaaacccacgggcccgaagacaccccgccaaaaggacagaggaccacggagacagcagagagccag

SEQ ID NO: 67052 - RNA, 51 nt, Homo sapiens
aggccggagagaaaacgcagccccaaaaaccagacgagagacagaagacga

SEQ ID NO: 67053 - RNA, 43 nt, Homo sapiens
ggcccgcaagcgcgccgacagggcagaggacaacagcaaccaa

SEQ ID NO: 67054 - RNA, 84 nt, Homo sapiens
ccaaaccacaggcgcccacccaggaaggccgccgagcagcacaggagcaggcggcacagagaagaggacagcggaaggagccca

SEQ ID NO: 67055 - RNA, 52 nt, Homo sapiens
cacggaccaagagagggaggagcagcacaggaaggagaaaaagcacaaaaaa

SEQ ID NO: 67056 - RNA, 77 nt, Homo sapiens
caccgcaagacagggaagcacacggaaccagaggcagcagcccaaccccgaggacagcccaggccacgcacccaccc

SEQ ID NO: 67057 - RNA, 84 nt, Homo sapiens
cgccgcggcagcaagaacagagagagaggggacagacgagagaacgaggaggggacacaaccgcaaggggaagaccgacccacc

SEQ ID NO: 67058 - RNA, 77 nt, Homo sapiens
cggcccgcgagcccggaggaaggaccaccaaccccccccaacacgaccaggcgacaggaaagaagacaacacccacc

SEQ ID NO: 67059 - RNA, 66 nt, Homo sapiens
ccgccccacacaccggaagccccccacaaggaagacgcaaacacaaggaaggaaccaaccgaggca

SEQ ID NO: 67060 - RNA, 79 nt, Homo sapiens
cagaaaaggagaaaaaagcaaagcgaaaagaacacaagaggcaagagcccaacagcaaagggaccgcaggggcggcgac

SEQ ID NO: 67061 - RNA, 63 nt, Homo sapiens
cagaaggagcaggaaccaaagggacgagacaagggcaacgagacacccagcggcccggccccg

SEQ ID NO: 67062 - RNA, 64 nt, Homo sapiens
cccaagaacgggcgacacacagcaagagcaagggcaggaaaggaagaaaggaaacacaaaacgg

SEQ ID NO: 67063 - RNA, 77 nt, Homo sapiens
ggaggcacagggcgcggaccgcacgagcgcggacccaaggccagccagccccaggcaccagcggacaggacagggag

SEQ ID NO: 67064 - RNA, 80 nt, Homo sapiens
accacacaaggaccgggccgcaggccaccaagaccgggaacaagcaagcgccacggccggaacgcacagcggaaggccgc

SEQ ID NO: 67065 - RNA, 61 nt, Homo sapiens
cgaccgcaacagaggagcccggcaccagcaaccagacgacgcagccagagcagcaagaggc

SEQ ID NO: 67066 - RNA, 76 nt, Homo sapiens
aaccagcacgggcccaaagaggccaggggcccggggcccaaccacccaggagaaaaggccagaccaagcgcaaggc

SEQ ID NO: 67067 - RNA, 79 nt, Homo sapiens
cgaccacccggcggggagcacggagggaacgccgcagaaagaagaaggggcaagaacagccacagcagagacaaaaaac

SEQ ID NO: 67068 - RNA, 73 nt, Homo sapiens
cgggccgggccgccaggaccgcaaggaggaagcagaaccaaccaggcggaggacacgcgagaagagaccaaac

SEQ ID NO: 67069 - RNA, 77 nt, Homo sapiens
aaacggggacaggggagaaaaaagacagaacgaggaaggagaacgaacagacagaaacggcgggcggaaaccgcgga

SEQ ID NO: 67070 - RNA, 79 nt, Homo sapiens
gcaggcgacaagcaggagcacagacgaagaagaggagccagcagaagaaacagaaggaacacagccgaagacagcagcg

SEQ ID NO: 67071 - RNA, 80 nt, Homo sapiens
cggaagaggacgacgcgacacaaacaaaaggcaaccagcagcaaccagaaccccgaccccacccgaagagaggaacagga

SEQ ID NO: 67072 - RNA, 61 nt, Homo sapiens
gacccaccaagagggcgggagaaccacgaggagaggggacaaggcccggcaggaaggacag

SEQ ID NO: 67073 - RNA, 81 nt, Homo sapiens
agcacacaacaaaacacaggagggggaagcaggagaaagaaggcaaagaaaagaaggggaagaaagaaaagcagccaagcc

SEQ ID NO: 67074 - RNA, 76 nt, Homo sapiens
gcaggacaccgacaggaacagggaccacggggccgaacggaagagggcagagagagagcccagcagccagggccac

SEQ ID NO: 67075 - RNA, 71 nt, Homo sapiens
gaaagaagcgaagaaacggccacaagaacgaaaacaaacggaagagagggcagcaagaaagaacaagaaag

SEQ ID NO: 67076 - RNA, 78 nt, Homo sapiens
cagagcagccacgagagacagcaggccgagcccgagcgcgggaagaaagggccaaccgccccccagcagcaggcacgg

SEQ ID NO: 67077 - RNA, 62 nt, Homo sapiens
cccagaaaaggaacacaaggcaaacaccagcaacacccgggacaaaaacgggggccaccacc

SEQ ID NO: 67078 - RNA, 71 nt, Homo sapiens
gaacacacaccgaagcaacccaaagcacgaacaagcaagcagcagacagaccgagaccaggaaaaggaacc

SEQ ID NO: 67079 - RNA, 78 nt, Homo sapiens
caaaaagcgaaagaccagccacagaagaggagaggcgaggagaggagcaacggaaagaagaagaaaaagaagaagaag

SEQ ID NO: 67080 - RNA, 76 nt, Homo sapiens
ccagcaccgcggccggcgcagcaacaagagcgcagcgcccgaggagagccggccccacaacagccccccggccgga

SEQ ID NO: 67081 - RNA, 73 nt, Homo sapiens
ccagaagggaagggacgcaacgggacccaccccaggaaaaaccaaaacgcccacaaaccgcaaagaacagaac

SEQ ID NO: 67082 - RNA, 73 nt, Homo sapiens
accagggggaaacacagaacgcaggcaaccccggagcgccccaaccgggcagccgggcaccagaaccccaggc

SEQ ID NO: 67083 - RNA, 65 nt, Homo sapiens
cgcgcccccgccgcgcccgggcggacgccggaggcgcgggcaagaccccgggacccaggccagag

SEQ ID NO: 67084 - RNA, 78 nt, Homo sapiens
ccggcaacggaagaggggcggcaagacgccgacggcggcaaggaacagcagcggggaaccgggacagagaaaggacgc

SEQ ID NO: 67085 - RNA, 59 nt, Homo sapiens
ggaccggacggccgaggcaccacagagggagaccgcccccggggcgagagaccccaacc

SEQ ID NO: 67086 - RNA, 71 nt, Homo sapiens
ccacgggccaccggaccaaaaaccaccgaaggaggacaacgggcagcccacagcgagggaaacagaagaag

SEQ ID NO: 67087 - RNA, 81 nt, Homo sapiens
cgagaagccacccacgccccggcccgcggggacacggcaacccacacgccagcgcgaagcccccccaaaggaggacggcag

SEQ ID NO: 67088 - RNA, 78 nt, Homo sapiens
ccagaggccagcccacagcagaagaacggaaagagcgaaggagggagaccgcagagaggaaggccacgccgacaacag

SEQ ID NO: 67089 - RNA, 85 nt, Homo sapiens
cgggagagccggggcgccgagccgagacgcgaagcgggcccaccgcgagggagaagcgccaagcaagggcccgaggcaaaccagg

SEQ ID NO: 67090 - RNA, 100 nt, Homo sapiens
gaggacaagcacgcccaggcagagccggggcacgggaggagcagcagaccaagacaagcacccccaggcagaggcgggcccgggagaagcggagaccaag

SEQ ID NO: 67091 - RNA, 82 nt, Homo sapiens
ccccaaaggcggaaacaggggagacgaccccagcaaagcgaccggaagggggccaacccccaacaaggcccacggagccggg

SEQ ID NO: 67092 - RNA, 79 nt, Homo sapiens
caaggaggaaccccgagccggagaccagcaagacacacgcgaggaagacagccaagcagagaaacgaaggagcgacaag

SEQ ID NO: 67093 - RNA, 66 nt, Homo sapiens
acccaaggccgcagacaaggacaaagggaggaaaaaggccgggacagaacaacacgcaaaccagag

SEQ ID NO: 67094 - RNA, 83 nt, Homo sapiens
caccaagaacagcgagcaggcgcgcagccaccggagaaggcggcgcacgcgggacagagcacccgaagcgcccagccagcacg

SEQ ID NO: 67095 - RNA, 83 nt, Homo sapiens
gagaacgaaccgagcagcccaggagagacccaaaagacacgcaagacagaaagacagacgagacaagagcccacaaaaaaacg

SEQ ID NO: 67096 - RNA, 86 nt, Homo sapiens
cgaaaagcgccgcagacagaagggggagaagcggaggcacaccgacaaacgaagcggggccaggggaggacccgcccccagccggg

SEQ ID NO: 67097 - RNA, 79 nt, Homo sapiens
gacgaggccagcgcagaagcgaccgacgggggaccgacccaacacccccgacaagagacagggccgccggccaggcgga

SEQ ID NO: 67098 - RNA, 61 nt, Homo sapiens
cagaagcccggggaaacgcaaacacagggacggaaaaggcgcacacgacccggagaacccc

SEQ ID NO: 67099 - RNA, 75 nt, Homo sapiens
cccagccggcagagccacgcgacgcacaacccgagacccgggagggggggccgaagaagccagggggaggaaagc

SEQ ID NO: 67100 - RNA, 76 nt, Homo sapiens
cgagcaagcagccgcggcggaagagcggcgccaggagcgcccaaaccaggcccgcaacaggcgcggcagacagaac

SEQ ID NO: 67101 - RNA, 69 nt, Homo sapiens
caagaacaagaacaagcgggaacccacacccaagagggcccgacaagagaggcggagccacccccacaa

SEQ ID NO: 67102 - RNA, 91 nt, Homo sapiens
cagcaccaccggcaaggaggacacgggcaccgacaccgccggggccaaggaacgcaccgcccagcagacggcccccgcccgccgccacccc

SEQ ID NO: 67103 - RNA, 87 nt, Homo sapiens
cgcccggcacaagcagacggcaaaggcaagagaacagcagcgccgcccgccgacagccaggcccgggagaagcgaggcccgggcagc

SEQ ID NO: 67104 - RNA, 75 nt, Homo sapiens
cacagcacaccggcgcggacaaggaaggccgcggacccccccccccccaccccacaggagaagagacgaaagaag

SEQ ID NO: 67105 - RNA, 80 nt, Homo sapiens
cggcgcccgcggccagccgcaagacccgccacaagcaacgcgggaagagaaggggagggcaggggagcacgcggacagaa

SEQ ID NO: 67106 - RNA, 73 nt, Homo sapiens
gggaccagagacgaagaccacgccggccgcgaccaaggaagcaacggcgacgaggcacaaagccaagaagccg

SEQ ID NO: 67107 - RNA, 69 nt, Homo sapiens
cccacccgcgaccggccggcgagacagagaaaccagaggcaagcgacgggaaggaccaccaaacccagc

SEQ ID NO: 67108 - RNA, 74 nt, Homo sapiens
ggacagcaaggaccgaacaaaagcgcacaaccgggaaggaacaggcggaaagacaggagcgaaggaaaaaacag

SEQ ID NO: 67109 - RNA, 73 nt, Homo sapiens
cggaagagcccgaggcccccgcggggggcggccaggagacgcgggcggcaggcggagcaggagcaaaggagca

SEQ ID NO: 67110 - RNA, 85 nt, Homo sapiens
gaggggcaggaggccagggaggcacaagggcccccaggggacccaggcaccaggaaaccggaacgaagggacccaggagaaaggg

SEQ ID NO: 67111 - RNA, 77 nt, Homo sapiens
ccccagccaaaggcaaagacaagggaggcgaggacggacaaaaggaaacggacgggaggccagccagcagaaggagg

SEQ ID NO: 67112 - RNA, 78 nt, Homo sapiens
gaacgccggccaaagcacaacagaggcaaagaggaacagggcaaagagagggaggcgagaagacaaaacccaagcgca

SEQ ID NO: 67113 - RNA, 77 nt, Homo sapiens
acccaggaaccaagaagaaagaagaaaagagaagaaccagaaccgagccccaaacagaagaagagagggcgaaggag

SEQ ID NO: 67114 - RNA, 75 nt, Homo sapiens
accacgccgcaccccacaaggggggcccacgcggaggacgcagaacacggcgggcggcccgccaacgacgcaaga

SEQ ID NO: 67115 - RNA, 79 nt, Homo sapiens
aacaaaagcaacaaagagggaaggaggcagaaagggagccccaagagagagggccaagccaaccggccaaaacaaccag

SEQ ID NO: 67116 - RNA, 80 nt, Homo sapiens
aaagggaaggacaaggaaacaaacacaaacgggggcaaggaaaggaggaaaacaagcgaagcggcaacaaaacggaaagg

SEQ ID NO: 67117 - RNA, 75 nt, Homo sapiens
agaaccgcgggcggggcagccggaaggccgcaccaagcgcaaggggagaggcaccagcaacagaccaaccgcagc

SEQ ID NO: 67118 - RNA, 77 nt, Homo sapiens
ccgacagggaggcagaggaccgcggagcgcgaacagaggaggagacagaagcaagcaaggccaagacacagccgcgc

SEQ ID NO: 67119 - RNA, 74 nt, Homo sapiens
cccagcaccccagcgcgcagggccgccaggggcgccggagaacagaccaagcacgaaaaccgcacgaaagcgac

SEQ ID NO: 67120 - RNA, 68 nt, Homo sapiens
cggccgggccgcccggcggcaggcagggcgggccccaaacgcgcgaccagggccacagccacaagcac

SEQ ID NO: 67121 - RNA, 69 nt, Homo sapiens
cccgccccgccacgccgcccgcgccgaggacgcggagcccagcaagaacaaagaagccacagacaaaga

SEQ ID NO: 67122 - RNA, 78 nt, Homo sapiens
gagaaacaggaacagcagaagcaagcaggccgcaccgcgaggaacccgagcccaccggcagcaccgcaccggagcccc

SEQ ID NO: 67123 - RNA, 54 nt, Homo sapiens
gggggacgcagccaaaagaaacaggaacagcgacacccagcagaagcagcagga

SEQ ID NO: 67124 - RNA, 78 nt, Homo sapiens
caggccaaagcccaaaccccaggccaagcaaccaccagcagcccccagagcggaacacaggagaaggaaggcagcacc

SEQ ID NO: 67125 - RNA, 72 nt, Homo sapiens
ccccacgccggcaggaaggggcccagagacggggaggcgggcagcccgcagaccaggccagcacggcagcca

SEQ ID NO: 67126 - RNA, 77 nt, Homo sapiens
ggaaacaaaaagaaacaagcaagccgccaaaggagaagaaacaacgaagcaagcccaagggcgcaggggcaacacaa

SEQ ID NO: 67127 - RNA, 67 nt, Homo sapiens
agcacaggagggcaggcaggaagccaacacacacaaaagagggacaacacaagccacagcgcccagg

SEQ ID NO: 67128 - RNA, 83 nt, Homo sapiens
gacaagcggaacaggagccgacgacccggaccaagaaggggaggcccgcggcaggaccaagcgagcgagggccggagcgccac

SEQ ID NO: 67129 - RNA, 89 nt, Homo sapiens
cccccaaggggggaacagagagcaaaaccacaagacaaggagaaagagggaggccgaaggacagaccaagacaaggcaccgggacaggg

SEQ ID NO: 67130 - RNA, 71 nt, Homo sapiens
aaaacacacacacacaaaagcgaccggggccggaaaggagaaccagacgggaaaaagccaaaacaggggaa

SEQ ID NO: 67131 - RNA, 63 nt, Homo sapiens
ccccccagcaaacgagaaaaacccagcgaccgacgaccggccggggcggcgcacccggacggc

SEQ ID NO: 67132 - RNA, 43 nt, Homo sapiens
ggcggcaacaggggcgagaaaggcgggccgacaagaaagccga

SEQ ID NO: 67133 - RNA, 69 nt, Homo sapiens
cacagcgaccgggagcacaccacaggcaaggcgcgaccgcccagggagacggaacccacacagaccaac

SEQ ID NO: 67134 - RNA, 67 nt, Homo sapiens
gcgcccccgagaggaacccaccggaaggagagcgggcccagaccaagagacacccacagccggcccc

SEQ ID NO: 67135 - RNA, 76 nt, Homo sapiens
ccggaccggacgggagagggagaggagaacagaggcgaggaacccacagacgccacagaaaacaaaccgaacagcc

SEQ ID NO: 67136 - RNA, 70 nt, Homo sapiens
gaaggaccaagaaccagccaaacagaggcagaagcaaccaggaacggccagcacccgcaaccccaggaga

SEQ ID NO: 67137 - RNA, 85 nt, Homo sapiens
cccagggccggccaggaggcccaagacaccacagaagcccccgagcccagagacccgggcccgaccaccggccgcccacgcagcg

SEQ ID NO: 67138 - RNA, 59 nt, Homo sapiens
caaagggagggcggccaaccgcacagacgaccaagcagcccgacggccaggaggcgaag

SEQ ID NO: 67139 - RNA, 78 nt, Homo sapiens
cgcggcgcacaacgcaggaacaccgcacgcgcggaggagaaccaagacaggcgcccagggcacaaaggggcgcgaagc

SEQ ID NO: 67140 - RNA, 75 nt, Homo sapiens
ggcgccccagagcccagggcaggacaccgacaggaacagggaccacggggcccccgaaaacacaagaaaagcacg

SEQ ID NO: 67141 - RNA, 79 nt, Homo sapiens
accggaccgcccaccggcccgaaggcaggaacaggcccgccgccccggggcacgccaggcaaccaagacaacaagccaa

SEQ ID NO: 67142 - RNA, 67 nt, Homo sapiens
aaggaaaagagaaagaccgagagccgaggcagaacagagagcggcggaggaggccaagggaggcggg

SEQ ID NO: 67143 - RNA, 81 nt, Homo sapiens
ggcccaccagcccccacgcagaggccagcgaccacaagcagaagaggcgcaaggaagaagagacgccgcgcggcagacaag

SEQ ID NO: 67144 - RNA, 75 nt, Homo sapiens
gacccagcacccccgcacccacgcggcccgcgaaagggcgcaaagcgccaacccaaacgagcgagacacacagaa

SEQ ID NO: 67145 - RNA, 76 nt, Homo sapiens
aggaagggcgggaccaacagggagccagcccagcccaccagggcaggagcgccagccccccgcccagggggggaga

SEQ ID NO: 67146 - RNA, 74 nt, Homo sapiens
gcagcggagcagggcggaaagggagaggcaggaaaccagaggaccccccagccgcaaaacagagaaaggagaaa

SEQ ID NO: 67147 - RNA, 73 nt, Homo sapiens
ggcgccagacacggggccgcacgggacgccggcacgcgaagggccgcaccgcaaggacaaggcacgaggcgcg

SEQ ID NO: 67148 - RNA, 77 nt, Homo sapiens
ggcagcgccgaaccaggaccggacccggacccaaaggccagcaacgcgccccagaccaccggcagggaacagccgag

SEQ ID NO: 67149 - RNA, 71 nt, Homo sapiens
agggacgggcacggaggaggacaggaccaaagaggcgaacaagaggcgccagcgggcgcgccggaagaaca

SEQ ID NO: 67150 - RNA, 81 nt, Homo sapiens
gagcggaggcgaaaaccggcaccgcggacccgaggaagaagagaaaacaaaaaacgacaaaaaaacagaagaaaagagaaa

SEQ ID NO: 67151 - RNA, 70 nt, Homo sapiens
gacgacaagaggcgacgcgaaccggaccagcgcagaagggccgagagaccaagcgacagcaccacacaac

SEQ ID NO: 67152 - RNA, 88 nt, Homo sapiens
aaaaaaacacgaaggcgcacaccaccaggaaacagcaagccagacaacaggccaaagccagggagggccagccccacaagacgacgaa

SEQ ID NO: 67153 - RNA, 72 nt, Homo sapiens
gcgcaggagcagaccagccggacaacgaggcccacaagcgaaaggaagcagagcagaggaaggacaagcaag

SEQ ID NO: 67154 - RNA, 74 nt, Homo sapiens
ccaggggaaaacccccgggaccaggggaaccacaaaaccaagaaacaaaaagcagcaagaagcaaagaaggaag

SEQ ID NO: 67155 - RNA, 75 nt, Homo sapiens
gcgagcccggcccccaagaccgaaaaaaagcggacagagggcgagagccagaagcagacggggggaaaagcgcaa

SEQ ID NO: 67156 - RNA, 72 nt, Homo sapiens
ccccaggaacaccacagagaaggaacacaagagaggaggaagaaaccacaggaggagcaagcacaacaggcc

SEQ ID NO: 67157 - RNA, 65 nt, Homo sapiens
acaagcagaaacagacaggaccacgcaacccaaaggggcaggacaagacagaaggccaagggagg

SEQ ID NO: 67158 - RNA, 65 nt, Homo sapiens
agggaaacaagacaaaggaaaagcggagcggagaccagagacaagagccggagaaagcgggaaca

SEQ ID NO: 67159 - RNA, 94 nt, Homo sapiens
aacaccagaagaccgggaaagcaaaggaagcggagaaccacaaacccaggacccgaaaagccagcaagcgagaccaacaccaacacgagggcgg

SEQ ID NO: 67160 - RNA, 78 nt, Homo sapiens
cagcccccgagggcgggacaagagcaaaaccacaagacaaggagaaagagggaggccgaaggacagaccaagacaagg

SEQ ID NO: 67161 - RNA, 52 nt, Homo sapiens
cgcgcgcagacgacacgccgcgagcgccccggccaaggcagaacaagaaggg

SEQ ID NO: 67162 - RNA, 86 nt, Homo sapiens
gcccccgcaccacggccccagccccgccggacgccaggcagcccaaggccaaccccacgcaccgcccgccccccgaggagcccaag

SEQ ID NO: 67163 - RNA, 83 nt, Homo sapiens
aaccggacgcagcacgcgcgcccagggcaagaagaagcccaacgccacggccgagcccaccccccagagaggggcgccaggcc

SEQ ID NO: 67164 - RNA, 68 nt, Homo sapiens
aaacgcggggacgccacaagacgaaaacaggggcagagcggggggccccagagaggaacagcaaaccg

SEQ ID NO: 67165 - RNA, 61 nt, Homo sapiens
ccacaaagcggccgaaacagaaaacaagagaccacagaagaagccagcccagaaagggaaa

SEQ ID NO: 67166 - RNA, 77 nt, Homo sapiens
gggagcagggaagacgccgcgccaccgagccggaccggagacggggccaacaggaaagcgaagccaacaaagaaagg

SEQ ID NO: 67167 - RNA, 67 nt, Homo sapiens
agagggaaggggaagaggggcccgaagggcggagaacggaaaagcaccaggaagcagagaggaccgc

SEQ ID NO: 67168 - RNA, 74 nt, Homo sapiens
cccgacaagaccaagacacccaaggaggaaaaggcccaggcgagaaagaaaccggaagaaagagacgccaaagg

SEQ ID NO: 67169 - RNA, 85 nt, Homo sapiens
ggcgccccgcagcccccaagcaggagcccgggagcgcgaaggcggaacaggggaggcggcacggggggcgccggcagccggggcg

SEQ ID NO: 67170 - RNA, 72 nt, Homo sapiens
acgggaagccaaggagaagagaccaaggcgcaggaacagcgacggcggcgccgacaggacaagggaaggaca

SEQ ID NO: 67171 - RNA, 57 nt, Homo sapiens
ggagaaaaggaaccggccccgggcaaccagggagaggagccgcaagccgaacaagga

SEQ ID NO: 67172 - RNA, 78 nt, Homo sapiens
cgggcgggccggcgagcgcagcgcgaccgggaggcccaggagaaagacagcaaagaaaaggagaagaaaggaaaaaaa

SEQ ID NO: 67173 - RNA, 79 nt, Homo sapiens
ccacccgggaacggaggagggaacggggcagccgacgccagcgaggccccggaggggcgggcacaggccgagccgggag

SEQ ID NO: 67174 - RNA, 66 nt, Homo sapiens
gacagcgggagccacggccacacgggagagaagcccagggggaggcggcgcaacgcggggaaagca

SEQ ID NO: 67175 - RNA, 47 nt, Homo sapiens
cagaagcgggacaccgagccccgcgacaagagaagcaccagaagacg

SEQ ID NO: 67176 - RNA, 79 nt, Homo sapiens
gggcgacagagagcaacaagaggccagggccagggagcacagaggaagagagagccggaagccaggggcaccacgggag

SEQ ID NO: 67177 - RNA, 79 nt, Homo sapiens
ccggggccgcacggcggcgcagaaagaggcagaagcggaaagacagagaagccgagggcaaggacagcggcaagcaaac

SEQ ID NO: 67178 - RNA, 68 nt, Homo sapiens
cagccagccaggccaccccaccggccgcagcacccaccggccgcaccccaagggcgcgcacagacggc

SEQ ID NO: 67179 - RNA, 51 nt, Homo sapiens
acgcgagccgccggagcgaacggagcagcaaaggaccaggaaggggacagg

SEQ ID NO: 67180 - RNA, 49 nt, Homo sapiens
gcgcagagggcaggacaacacggcccgcacccaggcacgaacggcgaga

SEQ ID NO: 67181 - RNA, 77 nt, Homo sapiens
aacggcaccaggacacacacaaccgggccccccagcgacaaacagccaggccgccgcggcagcgagaaagaccagcc

SEQ ID NO: 67182 - RNA, 73 nt, Homo sapiens
gccagaaccaaaaggcaaggcggccaaggcaagaccaaccgagaaacagcaaaaggaacacaagaagcgaaaa

SEQ ID NO: 67183 - RNA, 79 nt, Homo sapiens
gaaaagcgacgaggagcaaccagggcagagcggcgggaaaccaccaacaacacccccaaaccaaaacagccggaagcgg

SEQ ID NO: 67184 - RNA, 59 nt, Homo sapiens
ccaagaccacaccggaagaagaaacagccaggggccgcaaggccaggcgcgcagaggca

SEQ ID NO: 67185 - RNA, 82 nt, Homo sapiens
gggaaaagaggagggagagaagaaggcaaagaggaccagagaaggaccaccggccggggccggcccaaagccggccgggcca

SEQ ID NO: 67186 - RNA, 73 nt, Homo sapiens
cgggggcagccagccgagggccaccgggaaggacagaaggaacaccggcagcacacgaacagggaaagcacag

SEQ ID NO: 67187 - RNA, 75 nt, Homo sapiens
gggggagagaagcgaggccggaaaaaccgagccacacgaaggaacagaacccccacagcagcacgcaggcgcccc

SEQ ID NO: 67188 - RNA, 103 nt, Homo sapiens
gacccccggccaccggcggcaagccagaacccaacaaggaggccagggcggccagggggcagcacgccgaaggagagaccagacaacaggccagggaagggaa

SEQ ID NO: 67189 - RNA, 71 nt, Homo sapiens
gcggacacgcaaaccacacaaggacacacagcaacgaagcaggggaggagggaagaccggacagcgagcca

SEQ ID NO: 67190 - RNA, 73 nt, Homo sapiens
ccaagacacccgaaggccgcggggccccgaccccccccgcaagcccaagaggagggagggaaggacaccagca

SEQ ID NO: 67191 - RNA, 74 nt, Homo sapiens
gccgagcaggcgccgccccagcccgcgaacggacccaaagacaggaccacgcaccagcagagaaggaaagcaaa

SEQ ID NO: 67192 - RNA, 45 nt, Homo sapiens
ggccaacccaggaggaggaggcccgagagagaaagggaaagaagg

SEQ ID NO: 67193 - RNA, 75 nt, Homo sapiens
gcgccgggcccggaaagcgccgcccagcagccgcagaggaagacaccaccggacaccgaccaggccgcccgagca

SEQ ID NO: 67194 - RNA, 82 nt, Homo sapiens
caagaggccaaccaaccggagcggaagagccgagcccacaaagaagaagaacaagagaggagagagagacagcaccgaagaa

SEQ ID NO: 67195 - RNA, 55 nt, Homo sapiens
aaaggagcccaaacaaagccccagcgaaacagaggaccgcggggccccgagaggg

SEQ ID NO: 67196 - RNA, 56 nt, Homo sapiens
agaggggcagcaagggccaaaccaaaaaaccaaggacgacgggaaaccggacccgc

SEQ ID NO: 67197 - RNA, 77 nt, Homo sapiens
cagagccaggagggcgcggggacgcaacccaacaggggagccgccaggccccggggacagccggcacagcgggagag

SEQ ID NO: 67198 - RNA, 76 nt, Homo sapiens
acccagagcgcacggcgacgccccaggggaaaacccccgggaccagggcagccccgggccggggcacaccgacaca

SEQ ID NO: 67199 - RNA, 67 nt, Homo sapiens
gcggcgccgccggggagaagcccccggggcccaggacgccaaaaggggggaccgcggggccaaaaag

SEQ ID NO: 67200 - RNA, 70 nt, Homo sapiens
ggaccaagaaccagcacagagaagcgccacgagaaaaaaagcgaacgacaggcgccgggaagacgggccg

SEQ ID NO: 67201 - RNA, 76 nt, Homo sapiens
ggggagcagggcgcacgaaaaaagcccgggcaaggggacgcgcagcgaagaccggcaaaggggccccagaaaggga

SEQ ID NO: 67202 - RNA, 70 nt, Homo sapiens
gcgaggaaaaggcggcgggagagcccaaaaggcagagcgaggagagaagaaggagggaaagccaaacaac

SEQ ID NO: 67203 - RNA, 85 nt, Homo sapiens
gcgaccgaagccagcgggggccccagcaccgcaaccaccgccaccagccacggagggcagaggggacgacaccggagaaggcagc

SEQ ID NO: 67204 - RNA, 81 nt, Homo sapiens
cggaccagccacgcgcccccgacgaccgcccgacggcacccggccccgggaaaggcccaccagacgcccgggagaccagac

SEQ ID NO: 67205 - RNA, 79 nt, Homo sapiens
cgcggagggaccagcgagcgggaggcaagaaggacacggaaacagagccccccacagagcacaagacaggacgaaccac

SEQ ID NO: 67206 - RNA, 79 nt, Homo sapiens
cgggacagcccaaggccaggacccccggagcccgaagacagcaccgccagccaagggaaggaggacaggagagacaacg

SEQ ID NO: 67207 - RNA, 78 nt, Homo sapiens
agccccgagccggcgaacaaggcccagcaaggccacagccaccgagaccccaacaacgcaccggaggagccaacccgc

SEQ ID NO: 67208 - RNA, 66 nt, Homo sapiens
aagacgggcgaggaggaaggaccgcgagaaaacacaaaccgaaaggaaaggcgagcgggaagacac

SEQ ID NO: 67209 - RNA, 100 nt, Homo sapiens
gaaaaaaccgagcaacgaagagaaagaaaagcccaacaagaccggcaaggcagggacacagaagaaagcccaagaggacacagcaagaaggggcgccaag

SEQ ID NO: 67210 - RNA, 75 nt, Homo sapiens
gagcgagcgagggggggcgcgccggaaaccggagcgcgcagcagcaggcggacaccgaccgcaggaaggaggagg

SEQ ID NO: 67211 - RNA, 97 nt, Homo sapiens
cagcaccgcagaggcaaggggccaccaggaggccagggggcgccagagagcacaagccggacccccacccggcccgagaagaggacccgaaacagaa

SEQ ID NO: 67212 - RNA, 53 nt, Homo sapiens
agaagagggaccacaaggcaccaagcggggggaacccaaaggcggcggcaaaa

SEQ ID NO: 67213 - RNA, 77 nt, Homo sapiens
acccacgcagagggcggagcggcagggacacacgagaagaaagaggaacagaaaagaggagggagaacaacaaccaa

SEQ ID NO: 67214 - RNA, 76 nt, Homo sapiens
cgggagaagccggaagggaccaagaaaggcccagggaccaaagcccggacaaggcccgagcaccaggaccgcagaa

SEQ ID NO: 67215 - RNA, 73 nt, Homo sapiens
ccaaggcgaggcaggacggcaaggagacggcccgaagcaccagaagaaaggagagagccgaaagagaaaagcg

SEQ ID NO: 67216 - RNA, 75 nt, Homo sapiens
caacaaggacaacaagagacgggacaagacagggcaaaggacagaccagaccgaaaaagaaccagcaggcgacca

SEQ ID NO: 67217 - RNA, 71 nt, Homo sapiens
gcagagggaaaaaagagaggagcgaacgagacagaacaggaaaaagggagggaaacgccacaaaaggcacc

SEQ ID NO: 67218 - RNA, 78 nt, Homo sapiens
caaggcagaacccagccccagcgccagggggcaagaacgcaaagcaacgcaaccagaggacacagacagcgacacgga

SEQ ID NO: 67219 - RNA, 83 nt, Homo sapiens
ggcggcacggcgccgaccagcaccaggggaagcgggacaacggggggagaagagcaaccggacacagaaggggaaggaaaccc

SEQ ID NO: 67220 - RNA, 77 nt, Homo sapiens
agagccggagcggggacccaggagccggccagcgcgccggagccgccgagcgcccaccccacgggaggccgggacgg

SEQ ID NO: 67221 - RNA, 83 nt, Homo sapiens
agagcggcagaggaaagacagcggggcgcgcaccgcagcccacgccgagaggaccccgggggccacggccgggacaccacaac

SEQ ID NO: 67222 - RNA, 63 nt, Homo sapiens
ggcgcggggaccgcggcccgggaacaccgaggccagggggagccgaccggagcggaaccccgg

SEQ ID NO: 67223 - RNA, 107 nt, Homo sapiens
gacgccacgccaagcaaaccgggaaaggagaggacccggagccgggacccacaaaaaaaacacgggcaaaaaagcagaagaccgagacacacacccaacacccaacc

SEQ ID NO: 67224 - RNA, 44 nt, Homo sapiens
gaacggcccggaaacaggaggacgcacacggaagcaggcgaaca

SEQ ID NO: 67225 - RNA, 81 nt, Homo sapiens
cgccccacacccacccagcaagaggaaggggaggagggccaagagccacggaggagacaccagcgcacacggcgcggacag

SEQ ID NO: 67226 - RNA, 72 nt, Homo sapiens
cgggacgccagccaggaggacccccggggaaagggcaaggaggggcaggagcacacccccacaggacccccc

SEQ ID NO: 67227 - RNA, 80 nt, Homo sapiens
cagcaagccccggcagaacgaagccaccaaagccccggccccagagacaggaacaagcacacagagacggggacggcaac

SEQ ID NO: 67228 - RNA, 61 nt, Homo sapiens
cagacccaaggcgcaagaaaaggagccggaaacggacaaacagggcggagaacggaaaagc

SEQ ID NO: 67229 - RNA, 73 nt, Homo sapiens
caaaggccagagcaggacacaggggcccgcacgagccaaaggacacagcaacacccgaaagcccccccgcccc

SEQ ID NO: 67230 - RNA, 72 nt, Homo sapiens
aaaagcggcaaagggaaaaaggcggcgggaacgacacgcaggccgcacgggcccaggcagcccgcagagggg

SEQ ID NO: 67231 - RNA, 79 nt, Homo sapiens
acggagaccagagccacggacggagacacacccccaaaggaaaggacaaccccacagggagaaccggagacaaagcagg

SEQ ID NO: 67232 - RNA, 86 nt, Homo sapiens
cgaggccaggcaaaggaaccacccaggaaacagcgcaagcgccggccacaggcacacggcgaacgacggggaccaccagcggcaaa

SEQ ID NO: 67233 - RNA, 56 nt, Homo sapiens
ccagaccaaaaacgcaacaacagacgccagggacaacacacgggagagcacaaacc

SEQ ID NO: 67234 - RNA, 69 nt, Homo sapiens
accggaaggccaccccgcaggccggcccaagcccccaagaagcccgggacgaacaccaaggccccgcgc

SEQ ID NO: 67235 - RNA, 63 nt, Homo sapiens
gccccagccgcccgcggccgggagcggagccccggggacaaccaccaccagcgagcaaaagaa

SEQ ID NO: 67236 - RNA, 66 nt, Homo sapiens
caagcagggaggacgacgcaaggggaaaagacggcagagacaaggggcgcggagaacaagcgcacc

SEQ ID NO: 67237 - RNA, 72 nt, Homo sapiens
caacaagccagccacggcgcgcaaagcaagcccaaaaaagccccacaccgggaaggagccaacgcaggccca

SEQ ID NO: 67238 - RNA, 92 nt, Homo sapiens
aacaggacagccacgagcccagccaccacccacagcgaggcccgggcgggagcgcacgacgagcccggccgcggagccgcgcacgcacggca

SEQ ID NO: 67239 - RNA, 66 nt, Homo sapiens
gagggggcccgcagcgaaacaacaagggaaacccagacgacaaggaaggccaagggacccacgacc

SEQ ID NO: 67240 - RNA, 85 nt, Homo sapiens
aggaagggcccaaggaccacgcagccaacgacaccggggccaagcacgagaagagaagcccagagcaaaacaccccaaaccagac

SEQ ID NO: 67241 - RNA, 77 nt, Homo sapiens
cgggacgcgagaggaccggcgccgcgccccggcgcggaacccgcccagcggccgagaacaaaacaggagcgaggaca

SEQ ID NO: 67242 - RNA, 73 nt, Homo sapiens
agagagcacccacaaagaccacagaggacacagcgcgccccagcaacagacccgcggaggcaagggcggccgg

SEQ ID NO: 67243 - RNA, 82 nt, Homo sapiens
gccggcgcgggaaacgggcgaagcgacgagccgcgaggaggcagggagaccccaaggcaaaaccaccacacgacaaaaaccg

SEQ ID NO: 67244 - RNA, 67 nt, Homo sapiens
gacgacgcaccgcaggcagacaaaagggccaaagaagggagagagagcgacaaggaaggcgagcggc

SEQ ID NO: 67245 - RNA, 61 nt, Homo sapiens
ggggaggggcggccccacggcgagcaggccggggggggcacagagccccggaagacagccc

SEQ ID NO: 67246 - RNA, 89 nt, Homo sapiens
acagcggggcaggagcgcccgcaccacaccccacgaagggaaaaggccgaggcacagcgggaagaccgcaaagacgacccgagacaggg

SEQ ID NO: 67247 - RNA, 117 nt, Homo sapiens
ccaccaccacgccagccgcaccagccgcccaagccgcacagccgcggcggcagcagcaggagagggagaagcccaccacgcaacgggacggcgcggcggaaggcgcgccagacgagc

SEQ ID NO: 67248 - RNA, 81 nt, Homo sapiens
gggacgcagggaggagcgggacaccccggaagcgggaaaggagcacagcaagcgggagcaggcagaccaaaggaacagaag

SEQ ID NO: 67249 - RNA, 104 nt, Homo sapiens
ccaagagggccaagccagaaaacagaaacgaaacagaacagagagaagcccagaccaaagacagagacaagcggggaagaacggcggagcacaccgaccaaaaa

SEQ ID NO: 67250 - RNA, 79 nt, Homo sapiens
accgccgggcgcccccggacagaccaacgacaagcccgcagcaggcgagcaggagaaggcgagcaggaggagacaagca

SEQ ID NO: 67251 - RNA, 59 nt, Homo sapiens
ccgagccgccgagcgacaacccgcgccccgagggaggagagaaagaacccacgcaggac

SEQ ID NO: 67252 - RNA, 79 nt, Homo sapiens
gagacagccaaacgcagcgcagaccgcgcccgccgagaagacgaccccgacgcaggccaggagccgcggacagaagccg

SEQ ID NO: 67253 - RNA, 72 nt, Homo sapiens
gaaaggaccagcgaagccaccaagggcggcggcacccagcggggggacaggccggacgggccacccagaacg

SEQ ID NO: 67254 - RNA, 78 nt, Homo sapiens
ccggcggcacggcgccgaccagcaccaggggaagcgggacaacgggggaaggagacccaggaagaaagggcgaaggac

SEQ ID NO: 67255 - RNA, 80 nt, Homo sapiens
aaccagcgaaaaacaccaacacaacaaaaggcaccagcagcaagcacagagagaccaccacaaaacggcagagaggccaa

SEQ ID NO: 67256 - RNA, 76 nt, Homo sapiens
agggaggcggcggcgggaacgagggcgagcagaggacgacaggccgggagaaggccggcccacagcccaaaaagaa

SEQ ID NO: 67257 - RNA, 77 nt, Homo sapiens
caacgcgccccgggacgcacacggcaccaaacacggaaggacagaacggaaaagagaaaacaaagccaccaaaggac

SEQ ID NO: 67258 - RNA, 75 nt, Homo sapiens
aaaaaaggcaaaggaagccccagagacaacccagaccagcaccagaacagaagaggaacgacagcgccacccccc

SEQ ID NO: 67259 - RNA, 39 nt, Homo sapiens
cacccaggacaaccgaaaggagcgacggccagcgccccc

SEQ ID NO: 67260 - RNA, 79 nt, Homo sapiens
ggcaaagcccaggcccgggcggccaggggggacccgcgaaggccacagcgcaccagggcgccggcggcccaccgggggc

SEQ ID NO: 67261 - RNA, 78 nt, Homo sapiens
gacgaggacgacgacgaggacgagcacggggcgcccccagccccgcgaaagcacaacagaaaaaccaacagaggaccc

SEQ ID NO: 67262 - RNA, 76 nt, Homo sapiens
agcggagcgaagcgaacaaaaagcagcaaaccggaccaccccgaagaaagcacagcgagaaaaggcaacagcagca

SEQ ID NO: 67263 - RNA, 59 nt, Homo sapiens
gccggcccagcgggaggaaagcgcccggcgaccaaaaacggagcggcaaaccaccaaga

SEQ ID NO: 67264 - RNA, 73 nt, Homo sapiens
gaagacgccacaaacacaggcccaggaagagggacccaggccggcgggaggggagccaaagcgcccagggacc

SEQ ID NO: 67265 - RNA, 67 nt, Homo sapiens
gaaaaacccgaccccccaagcagcaacacagccggaagaacaacaaaagaaaacccaacacaacccc

SEQ ID NO: 67266 - RNA, 83 nt, Homo sapiens
ccgcagagagaggcgcagaaggaccgggagcacagccgccgaacagggaggccgcacagaggaggagcaccaaaccgagggag

SEQ ID NO: 67267 - RNA, 82 nt, Homo sapiens
agggggggggacagcagacccccaccacccaaccggcggcgcagacccggcgcagagagacaagggcacccgaggcaaccac

SEQ ID NO: 67268 - RNA, 73 nt, Homo sapiens
caaccagaggacgcacgaagcggacacccaggcagaaggagggccagacaaggggaacacaagaggagagaag

SEQ ID NO: 67269 - RNA, 71 nt, Homo sapiens
cacgaggacggggagcaagaaacccagggaagagccgacgcaaggccagggggacagagggcaaaaacagg

SEQ ID NO: 67270 - RNA, 59 nt, Homo sapiens
gcgccagccacggacgccacagagggaagaccccaagacagcgggaggcacggcagaaa

SEQ ID NO: 67271 - RNA, 76 nt, Homo sapiens
aagagaaggacggagccacaacgcgacggcccagaacggcagagagaaggacacacacggggacgcccaacagcca

SEQ ID NO: 67272 - RNA, 77 nt, Homo sapiens
cgcccgggggaaacagagaaagaaggcggccaggccaaccgaagggacaaaccgaagaaaaaaagcagcacacacca

SEQ ID NO: 67273 - RNA, 82 nt, Homo sapiens
gggcggcccaaggggaaggaggggccggagggagagagccgggagcccgagcgaggcaacagaggagaagaggaagaggaaa

SEQ ID NO: 67274 - RNA, 59 nt, Homo sapiens
acccaagacgagaggaagggagacggcagagacacccggcccgagacagcaccgaacac

SEQ ID NO: 67275 - RNA, 50 nt, Homo sapiens
ccccaaagcagccaaaagaacggcgagagggaaacaccaacccgaggaac

SEQ ID NO: 67276 - RNA, 74 nt, Homo sapiens
ccaggaccggccgaagacaccccccccccggaccagaggagacaagcgacagagaagaagagaaccgcacgcac

SEQ ID NO: 67277 - RNA, 71 nt, Homo sapiens
acacgcagaacgggcggacgggcgcccagccagaaggacaggagaaacaggggccaaaaaaccaaaggaga

SEQ ID NO: 67278 - RNA, 77 nt, Homo sapiens
gccgccgcacgcaggggcgaaacgaccggagaacgacagagagaaggagacccaacaccccggccagacgggccacc

SEQ ID NO: 67279 - RNA, 74 nt, Homo sapiens
acgcgcaccccggacaccccggccagacagacacagcacagcagccacgaagagcaaagcaagccgaaaaaccg

SEQ ID NO: 67280 - RNA, 68 nt, Homo sapiens
acccgcccgggcgaacccccacccgagaggcacacccaggaacccagaaccgcgggcagcaagaacca

SEQ ID NO: 67281 - RNA, 81 nt, Homo sapiens
ggccgcagcgcaggcagcccagcagagcggggcccggcgcacccaccaccgccgcccacggcagcccagggacccgagcac

SEQ ID NO: 67282 - RNA, 75 nt, Homo sapiens
ggaaaccagcggcgagagagagcacgccagacaccccaagacaacaggaaaaaacccagagaagcccccagaaaa

SEQ ID NO: 67283 - RNA, 74 nt, Homo sapiens
accggggaaagccgcaggaagcggaggaccaaagaaaaaaccagggccaaaaagccagcaaacccggaaagaaa

SEQ ID NO: 67284 - RNA, 85 nt, Homo sapiens
gaacgaggcgagaacgcgcagaccggggagggaaagaaaaagagccgaagcacaaaggcgccagcccacccccggacccgcaacc

SEQ ID NO: 67285 - RNA, 51 nt, Homo sapiens
caggccggcacggaagcagacaaagcagaaacaccagaagggaggaagacg

SEQ ID NO: 67286 - RNA, 68 nt, Homo sapiens
ggagggcgggcgacccaccgccggccacagcgcagaaggagaaaaggaaacgagggaaagagcacgga

SEQ ID NO: 67287 - RNA, 57 nt, Homo sapiens
aagagaaaaaaccgaccccggaccagcaggacagcgagagaaagaacccgccgcgga

SEQ ID NO: 67288 - RNA, 73 nt, Homo sapiens
gagaagaaccggagccggagagaagacgaccccgacgcaggccaggagccgcggacagaagccgagcacggcc

SEQ ID NO: 67289 - RNA, 72 nt, Homo sapiens
gaaaagggacccccgggaagaagacacagaaaacaggaccaccccggaagggggcagcaggcccagaagacc

SEQ ID NO: 67290 - RNA, 72 nt, Homo sapiens
gacacgccgcagagaacccccacccacccacgcaccccagaccaagcaacacagcgaaagcagcacgccaaa

SEQ ID NO: 67291 - RNA, 84 nt, Homo sapiens
cgaagacacgcccagcagggagcggaggagccagacagcgagccagcagcaccggaacaccaagagaagacacccaccgggaca

SEQ ID NO: 67292 - RNA, 68 nt, Homo sapiens
cggggcaccacccggcgccgcgggggcaaaaggaaggccgccccccccacacaccagcccgcgcagac

SEQ ID NO: 67293 - RNA, 81 nt, Homo sapiens
cacacagcgcccggcacggcccacaagaccagcccgcaagagaaggaagccagccaacggggggaggcaccacccaggacc

SEQ ID NO: 67294 - RNA, 74 nt, Homo sapiens
gagagagagcggcgagacgacagaaaaagagaggaagggacccaggagacacaacaagccccaagggagaagca

SEQ ID NO: 67295 - RNA, 40 nt, Homo sapiens
gcgagggagcgagcgggcagcgcgaggcggagaagaaccc

SEQ ID NO: 67296 - RNA, 76 nt, Homo sapiens
caagacggccaagcgacagcgccccaaacaaaccagccaggacccgaaaagccagcaagcgagaccaacaccaaca

SEQ ID NO: 67297 - RNA, 39 nt, Homo sapiens
caaccccggggccacaaagcgaggaccgccagaagcagc

SEQ ID NO: 67298 - RNA, 77 nt, Homo sapiens
gggacgccacccaaagcggccgggagcgcgccccccaccccgagacaggcagcagaagagcgcaggaccgacacaca

SEQ ID NO: 67299 - RNA, 82 nt, Homo sapiens
agccaggccacggcggccacaacagcagcagaggaaacgaggccagagaaggaagcccaaggcacacagcagagcggaacag

SEQ ID NO: 67300 - RNA, 66 nt, Homo sapiens
aacgaggcaggaggcgcaccaccaaacgcacagaaacggcaaagaccgggaaacagaaccgaagcc

SEQ ID NO: 67301 - RNA, 77 nt, Homo sapiens
acggaaccgggacccgggcgcccgcgcccgccccaacccagccacagagaaaaccgagaccgagcgcagaaagacgg

SEQ ID NO: 67302 - RNA, 73 nt, Homo sapiens
accacaagcggcacgggcaaaagacagaccagaagaaggagcccgaggcacggagggcgccaagagaacaaaa

SEQ ID NO: 67303 - RNA, 59 nt, Homo sapiens
gggaagcagacgagagcaagagagaggagcgagaggaagcggaagaaaaccaacaaagg

SEQ ID NO: 67304 - RNA, 76 nt, Homo sapiens
ccaaagcagcgcccggcaaagggagggcgggggcggcagagggcacgcccaggggacgggcagacaagcgcgcggg

SEQ ID NO: 67305 - RNA, 78 nt, Homo sapiens
gcgcggaccacaaaccgcgccagaaaacaggaccggacgccacacaggggggggcagcaaagcggcgcccccagagcc

SEQ ID NO: 67306 - RNA, 73 nt, Homo sapiens
gagggccgagccagcccggcgcagaaagaggagcgagggcgaaggaagaggacaccccaagacaaaacagcca

SEQ ID NO: 67307 - RNA, 73 nt, Homo sapiens
ccagacacagcccccggcccaccacagaggacaaacaccacgggagaacagagggaagaggccaccccaaaga

SEQ ID NO: 67308 - RNA, 104 nt, Homo sapiens
cggcagggcaccgcgcgaagcggccaaagccgcccagacggccaccggcgggaggaacaaaaggaggccagagggaagcaaagcagccaacaccagaagaaggg

SEQ ID NO: 67309 - RNA, 74 nt, Homo sapiens
cagcagggaaaccaacgggggaaaacggaagaaggcggaaagagaaagaaacaagcaccccacgagcagaagaa

SEQ ID NO: 67310 - RNA, 79 nt, Homo sapiens
gagcccagcagcgggccaggacgcagcaagccggccaccacaaaagcccggggcaggagaggccaacggagagacggca

SEQ ID NO: 67311 - RNA, 79 nt, Homo sapiens
gcggccgcccgggccgggccccaccggacggcgaagccgacgagcccgaacagacgcaccagcgggaggaagagggacg

SEQ ID NO: 67312 - RNA, 76 nt, Homo sapiens
ccgcccccaccggacgaggccccccaaccaggcaagaaccgaggcccccaccacgggaagagccagacccaggggg

SEQ ID NO: 67313 - RNA, 74 nt, Homo sapiens
gggacacaccccaggaaaaagacagcccgcagcacgaccagcaggaacgagaacccccggcccagacagcaaga

SEQ ID NO: 67314 - RNA, 82 nt, Homo sapiens
gccaaggccgcgccgggcgggacgggggggcggcccggccccgcagggacagaagagagccgcggccggagggaggggccgg

SEQ ID NO: 67315 - RNA, 75 nt, Homo sapiens
aaagagggccggaaaccggaggcaggaaacgcagcaaagccacgggggagaaggagagaaacagacacagagcag

SEQ ID NO: 67316 - RNA, 76 nt, Homo sapiens
gagaagccaaggccgaagccgagcagaggacaaaacaagagggccagggccaccagaggaccaagccagacgacga

SEQ ID NO: 67317 - RNA, 75 nt, Homo sapiens
ccagccgacccaccaccggcccaggaccccacccccaggaaaaggagcgaacaggggccacagcggaagaagcag

SEQ ID NO: 67318 - RNA, 46 nt, Homo sapiens
gaacaccagaaacagaacgccaagccaagggacgcaacccaccacg

SEQ ID NO: 67319 - RNA, 77 nt, Homo sapiens
gcgccgagcacacacggaacccagaagacccaccaggccaaacggagggaggagaagacagagcgaacagaagccgg

SEQ ID NO: 67320 - RNA, 79 nt, Homo sapiens
ccggagaaggcacagcggcgaccgacgccgcgagcgcgggaagacagccgccaccaggcgcccccccagcaaccaccca

SEQ ID NO: 67321 - RNA, 78 nt, Homo sapiens
cgagcccccgcgagcagcccagccagcagcacaaaggaggacggagggagccgggggaccggccaggaagaaacaggc

SEQ ID NO: 67322 - RNA, 71 nt, Homo sapiens
cggccgggcgcgccggagcgcaggccccgaagggcacgaagaaaggagagacccccgcagaaacggccaaa

SEQ ID NO: 67323 - RNA, 84 nt, Homo sapiens
ggggccgccccccccggacggacagggcccgaaggcgccgcgccggcgggggaagagaccgacagggggaccagcaggcggcgg

SEQ ID NO: 67324 - RNA, 83 nt, Homo sapiens
ggggggcaccggacaagcggaggcaggaagaccaccgcaaccccgcccccgccagaccggcaccgcggagcaaaggaaaaagc

SEQ ID NO: 67325 - RNA, 76 nt, Homo sapiens
gggaacggaaaagcaagaaagcgagggagccaagacgcgaggcaggaaaagggcacaggaccgccacacccaggag

SEQ ID NO: 67326 - RNA, 56 nt, Homo sapiens
gacccgcacccagaggggagcccggaagcagcaacaggagaagagagaaggcaaag

SEQ ID NO: 67327 - RNA, 80 nt, Homo sapiens
cgggcccgccccgggcaggagaagaggggaccgcaagcacccacagccaggaccggagaagccaacagccagccaccgca

SEQ ID NO: 67328 - RNA, 77 nt, Homo sapiens
ggcccggccacccagccgcccggaaggccaagaaaacaggaacgagacggcagccgggaccacgcggagcgcggagg

SEQ ID NO: 67329 - RNA, 72 nt, Homo sapiens
cggcaccgcagcagaaacagccaaagaagaggcagacgacaagaaagaaagcggcgagacaggaagcagagg

SEQ ID NO: 67330 - RNA, 78 nt, Homo sapiens
agcgccccgcgggccggaccaggagagagaaagaccgcagaggagcagaaccacccggcagaaaagcaaccaccgcca

SEQ ID NO: 67331 - RNA, 71 nt, Homo sapiens
gggacagaccagaccggcacccagggggggggaaaaacaagcgaacggaccacgaagagaaaccaccacgc

SEQ ID NO: 67332 - RNA, 74 nt, Homo sapiens
gcggagccaggccgcgacgcggggcacgcacagcagcacgggggcgcggacagaaagaacccaaggggacaagc

SEQ ID NO: 67333 - RNA, 77 nt, Homo sapiens
gaggagaaacagcagaaacgcaccaggccaaagaaagagaaaaaaagcggggaaggggggcaaaaaaaagaagcaag

SEQ ID NO: 67334 - RNA, 62 nt, Homo sapiens
cgagagcgcaaacacccccagacaaaggaaaaggaaaccagacgacaaaagaggaaaaaagc

SEQ ID NO: 67335 - RNA, 46 nt, Homo sapiens
ccagagaaccgagcaccagcacccaaaaggacggaggaaacagcgc

SEQ ID NO: 67336 - RNA, 73 nt, Homo sapiens
gacgccacacgcaggcggcacgggcagccgggccgcccgagcgcgggaaagaacccagcccgcgacacacaca

SEQ ID NO: 67337 - RNA, 75 nt, Homo sapiens
ccgcgaacaggagcccgacagaagcgggaccccacaccagccagggaacaacggcccccagcagacagagcggga

SEQ ID NO: 67338 - RNA, 72 nt, Homo sapiens
caaccgggcaggcgagacgcagaggggagaacacagagcagaaaaccaggacacgcaggggagaaccggagg

SEQ ID NO: 67339 - RNA, 70 nt, Homo sapiens
aaggaccaagaaccaggcgcaaccaaggaaagccaggaagcaggacagcaggcaccggggaaagcaaaga

SEQ ID NO: 67340 - RNA, 63 nt, Homo sapiens
gcagaaaccgccccagaacgcgaagagacccccaggccaaagcacccaaaaaccagcccaaac

SEQ ID NO: 67341 - RNA, 40 nt, Homo sapiens
ccccaagggcgggaacagagaccaggaaaaaaggggaaac

SEQ ID NO: 67342 - RNA, 85 nt, Homo sapiens
ggggcagcaacggcgacaccagcaaggcccagaacgcaagcaggcaccccagcccaaagaggacagagggagcgccgcgccgcgg

SEQ ID NO: 67343 - RNA, 71 nt, Homo sapiens
gcagcgcccgcaaaacgagacgaaaaaaccaccccagggaggacggacgcgcaaacgaaaccggcagcagc

SEQ ID NO: 67344 - RNA, 67 nt, Homo sapiens
cggcggggcgggaggaacgggggagcccacaggagccagacagccaccgggcacgcccgcccagaga

SEQ ID NO: 67345 - RNA, 87 nt, Homo sapiens
gcgaaggccgggacccggccccggcccacaggggggggcaaacccgagagaacggggaggaaaagagccagaacaaacacaggaaca

SEQ ID NO: 67346 - RNA, 84 nt, Homo sapiens
cacccaggccccgacgccccgaggcggggccgaggcgcggcagacagggacaacggccagcacagcccagcagacggccggcag

SEQ ID NO: 67347 - RNA, 54 nt, Homo sapiens
gaaacaaaaacgcacacaacgacccagcaaaccagcaaggcaaggaggaccaag

SEQ ID NO: 67348 - RNA, 57 nt, Homo sapiens
acagagccccccaccacccaggaaacccgggacgacagcagaggcgacaaaccagac

SEQ ID NO: 67349 - RNA, 87 nt, Homo sapiens
aagaacgcagccgccggccgaccaccggaacggacagcccccccaggccaagacaaggggcgcagagcggggggacaggcgcaagac

SEQ ID NO: 67350 - RNA, 75 nt, Homo sapiens
cgccagaaggcgagcgcgccccgcccacagaaacccccggaccaagaccacccaaaaacacagaagagcaacaag

SEQ ID NO: 67351 - RNA, 72 nt, Homo sapiens
gccccgagaaacaacccgagacagggcgccggcccaggcggaggcagggcggacaaaccagcagcccgaacc

SEQ ID NO: 67352 - RNA, 67 nt, Homo sapiens
aaaggagccacagacccggcacaagacagaggcaaggccacaccaggacaagaagaaaaggaaaccg

SEQ ID NO: 67353 - RNA, 78 nt, Homo sapiens
aggccacacacaaaaaggaaggcacaacaggagaaggccgcccgagcgccagagcgcgccagggcagaggagggggac

SEQ ID NO: 67354 - RNA, 60 nt, Homo sapiens
acgagaccccccgcgagagcgcaaacacccccagacaaagcgggcagaggggcaggagcc

SEQ ID NO: 67355 - RNA, 81 nt, Homo sapiens
gcagcgagaacggcggggcgccgagccggaccgcgagagcacaaacgggccacgacagcaaggccacgggagggaaccgaa

SEQ ID NO: 67356 - RNA, 77 nt, Homo sapiens
cgccgccaggaccggaaaacagcggcgaccagcagaccaggaaacaggccgacagcggaaaagaacgaccgaaacag

SEQ ID NO: 67357 - RNA, 73 nt, Homo sapiens
caacaagaaccaccacccccggcgccaagagaagaaaccacaccaaaaggcaccggaagaagcggaagcgaac

SEQ ID NO: 67358 - RNA, 53 nt, Homo sapiens
gcggggcccaaggcgccacaagcggcagcagaagcagcggccaagaacccagg

SEQ ID NO: 67359 - RNA, 63 nt, Homo sapiens
gccagcgaggaggacccccaaagccgagagcggcccaggaggaacaaccagcccacccggaga

SEQ ID NO: 67360 - RNA, 70 nt, Homo sapiens
ggaggccaaagaaaagcggagcaggaaagaggcgaacacaaagaaaggaaaaccaggagaaaaggaacga

SEQ ID NO: 67361 - RNA, 83 nt, Homo sapiens
agggaacaagaggggcagcaagggccaaaggaaaaacgcacgaagcgcgagacacacaaaaccacccccaaagcgaaggaacg

SEQ ID NO: 67362 - RNA, 76 nt, Homo sapiens
gacgaagaggcgaccgccagacggagcacacggacaacggggcggacccagagcgaccaggcgcgccaagccccgc

SEQ ID NO: 67363 - RNA, 75 nt, Homo sapiens
gaagacagaacagaccaaaggaacagagacaaaacagcaaaacgcacacgcagagggaaagaagaagcaagaaga

SEQ ID NO: 67364 - RNA, 73 nt, Homo sapiens
ccgggccgggaggagcgccccccagaagcgccggacggaacgaggaaggcccgagacacgccgaccccgacag

SEQ ID NO: 67365 - RNA, 85 nt, Homo sapiens
caaggaaaagagcccggaaagaagcaacagagaggggagaacccacagcacgaaagcaagagaacaaagcacgaacaacgacgaa

SEQ ID NO: 67366 - RNA, 91 nt, Homo sapiens
gcggggcgcgccgcagagcggcaccgaaggacaggaggcggaagcccggccgcgcaaaacgggcggcccgcgcggaggccgcgagaccgca

SEQ ID NO: 67367 - RNA, 74 nt, Homo sapiens
ggaaccaagaaagagacagcccaaaaagggaacagcacgaggaaagaacaagcccccagggaccgcccggggaa

SEQ ID NO: 67368 - RNA, 74 nt, Homo sapiens
ccacacccaacacacggcccgacgacacacgccgccagccgccaggcgcgggcagccgacccacaccagccgcc

SEQ ID NO: 67369 - RNA, 77 nt, Homo sapiens
gacgggcggcgaacggcggaggcagagaagaagaagggagggaaccgagaaaggagaggagaagaagaaaaacagga

SEQ ID NO: 67370 - RNA, 83 nt, Homo sapiens
gaacgaaacccgaaaacccggaaaaacagaaaagagcaacggagcgaaagggcgcaaaccagaagaagaggggggaagaaacg

SEQ ID NO: 67371 - RNA, 75 nt, Homo sapiens
gcacaccgcaccaaacccggaaggaacgaccgggcagccagaacagcacacagcaccggacggcacacgccggcg

SEQ ID NO: 67372 - RNA, 86 nt, Homo sapiens
aaacccagcaaaaggaaaaaagagaggcccaaagcaccggggggaagaagaagggaacaagcggagggacgcacgagaacgaggag

SEQ ID NO: 67373 - RNA, 62 nt, Homo sapiens
cagcaccaccagagccagcgcgcgccgaggccaccaagcaggccagggaaggaagcagcagc

SEQ ID NO: 67374 - RNA, 72 nt, Homo sapiens
gacgcgaaaagagcggggaagcaaaggaaggacccgagaaacaaagaacacgcacagggcgcccgaggcaag

SEQ ID NO: 67375 - RNA, 32 nt, Homo sapiens
ccggagaaaacccacgagacgcggacaggggg

SEQ ID NO: 67376 - RNA, 74 nt, Homo sapiens
cggagaaacgcaggaaacacacagagagaaccagaccccgaggaacagcacagccccagagggagagacaggcc

SEQ ID NO: 67377 - RNA, 83 nt, Homo sapiens
cgacccgcccagcccccgagagcgggaacaggcacgcgccaccaccccagaaacaccaaccggccaaagaaaggaagaagaag

SEQ ID NO: 67378 - RNA, 82 nt, Homo sapiens
gcggacccgggcagaagaggcgggagagcccgccgacagcgcgagggcgggaaggaagagccaaccgcgcaacgaaccgcac

SEQ ID NO: 67379 - RNA, 83 nt, Homo sapiens
ccacaagaagcagcggacccgcgggagaggcgcagcggaggcggaagcaggaccggggcacgggggaagaaggacggaaacgc

SEQ ID NO: 67380 - RNA, 54 nt, Homo sapiens
ccaacaacaagggcgcggcagagcggagagaaccgcaggaggcacacccgccag

SEQ ID NO: 67381 - RNA, 74 nt, Homo sapiens
ggcacgcccaaccaccagagcaccggacagagggaggaacgaaccaaccgggaggcccggaagaaaagaaaggg

SEQ ID NO: 67382 - RNA, 82 nt, Homo sapiens
gcccccagaacacaacagggcaaaggccccgacagaacacacaaaccagaccagccagagaagagcagccaccagaagccaa

SEQ ID NO: 67383 - RNA, 95 nt, Homo sapiens
ggcgcggacgcggaacccggcgcggcggcggcacgaggcaggcgacgcgagaaggacgcaaacagcagacggaagaccccacggcaaaaccacac

SEQ ID NO: 67384 - RNA, 60 nt, Homo sapiens
acgccaagcccgaacagagccacacgaccccgcggccaagaccgcccacggacacgcggg

SEQ ID NO: 67385 - RNA, 63 nt, Homo sapiens
ggggaggaggccggagaaccccgaacaaagagaccacacgcaagaagagagacggggcgccgg

SEQ ID NO: 67386 - RNA, 73 nt, Homo sapiens
ccagaagaagacccgaggacaaggcgcaagacgccagcgcaagcgcaccaggaaaggaaaagaccgcgagcgg

SEQ ID NO: 67387 - RNA, 80 nt, Homo sapiens
cgaaaggagcaagagcaagacaccggacaccgagggcccccaaaagaggccccacagacaaaaccgccggcggaagagag

SEQ ID NO: 67388 - RNA, 81 nt, Homo sapiens
ggcgccaccaggcggcgcccccgcagcccgcacccacccacgacaggacggacccggaccggaaggccaaaacaagggaag

SEQ ID NO: 67389 - RNA, 86 nt, Homo sapiens
gccaggacgagcagccgaacacagaccaccaggcaaaacaagaaaaagcaccaagaaaaagccaggaaaagaagaaaaaagaagag

SEQ ID NO: 67390 - RNA, 77 nt, Homo sapiens
gcagcggcgcagcccacgccagacgaccccacccgcgccgcgacccgcgccacagaccgggccaaacaacccaggag

SEQ ID NO: 67391 - RNA, 54 nt, Homo sapiens
gcaaggacagcgcgagccaggacccgaaaaagcgggggccgagcgggaacagca

SEQ ID NO: 67392 - RNA, 82 nt, Homo sapiens
cgggccgcgggcgcggacgccggcccgcgcgcgcaccccgcggacgccacagcgccgcaagccccggggcagagacacagga

SEQ ID NO: 67393 - RNA, 59 nt, Homo sapiens
ccccccgcccggaggccgggaaggcccacagcagggaccacccgaggccagccagcccc

SEQ ID NO: 67394 - RNA, 79 nt, Homo sapiens
cgcccacaggggggggccaagagcgcccagcggacacagccccggaggaggggaggacaaaaccaacaacaagccaccc

SEQ ID NO: 67395 - RNA, 65 nt, Homo sapiens
gcgacggcggagggcccggccgccgacccagcggaacaagaggaaaccacccgccgccccaaaac

SEQ ID NO: 67396 - RNA, 74 nt, Homo sapiens
cgcccggcaagcaaacggaaaaaagggagagcaggggagcagcgcggacaaagacgagccccgaacagaggcgg

SEQ ID NO: 67397 - RNA, 79 nt, Homo sapiens
cacccccgggggccacggacccggcgacaacacccggccccgagacagaagccgaacccaggagaaacgagagggacag

SEQ ID NO: 67398 - RNA, 81 nt, Homo sapiens
agccaaccaccccacagaagcgggaagaccaaaaaggccaggagggggccacaccgaacccagccgggaggccaaggccag

SEQ ID NO: 67399 - RNA, 54 nt, Homo sapiens
cagcaggacccccagaggagggccccaaggcggcagccccgaccgacggggcaa

SEQ ID NO: 67400 - RNA, 74 nt, Homo sapiens
gccccaccgccgccgagaggaggccagagaacaggacagggagcccaaggcagaaccgagggaagaagggccga

SEQ ID NO: 67401 - RNA, 84 nt, Homo sapiens
caccaaccagaaaaaccaggaaggcgcccaaagacacgagacaacaagcgaacagaaaagaaagccgcgaaagaggaagcagca

SEQ ID NO: 67402 - RNA, 78 nt, Homo sapiens
cgcgagccgaggaggggcgcgaggagggacggaaggcacaaaggacaggaacaaagaacaggaccaggggacaggaaa

SEQ ID NO: 67403 - RNA, 61 nt, Homo sapiens
ggggacccccccaagggacccggaggaagcagcaccagaccaacaaaccagccggcgggcg

SEQ ID NO: 67404 - RNA, 72 nt, Homo sapiens
gaacagagaagggagccaagcggagggagaacgcaaggacggaccacaaaacccaacgcggacccggcagcc

SEQ ID NO: 67405 - RNA, 79 nt, Homo sapiens
gaagaacgaccagagcgacccgagcagcgcagaccccgccagcgggaagcccgggagaccgaggggcagagagcccacc

SEQ ID NO: 67406 - RNA, 87 nt, Homo sapiens
cccgcgggcgccgggccaggacggcccaccgggggacggcacggcaggcggacgcccggggccccccggaccacgaggagcaccgag

SEQ ID NO: 67407 - RNA, 49 nt, Homo sapiens
ggaccagaccgaccaccaaaagccaggcagcgaacaaagcacaaaagag

SEQ ID NO: 67408 - RNA, 82 nt, Homo sapiens
acgcccgggaagcgcgcaccgccaagcaggagccagcagcgaccacccgagaacggaagggaaaggcagaggccagcagcag

SEQ ID NO: 67409 - RNA, 60 nt, Homo sapiens
aagaccaccggagagaaaaccgcacacacaaagcggagaagcggaggagaccaaggaggc

SEQ ID NO: 67410 - RNA, 69 nt, Homo sapiens
aacaccaagacccgacccaagaacaggaggagcagcacgaggagggaccgcccagacaaggcgcccccg

SEQ ID NO: 67411 - RNA, 73 nt, Homo sapiens
cgacagccgcgacggcgagcccgggccgcgcccgaggagcccccaccgccacgccggaaccccaagaccaagc

SEQ ID NO: 67412 - RNA, 83 nt, Homo sapiens
cccaggaacagacagcccccccagcccagcccagccaggggcaggcggcgcacgggagggagcgaccaggggagggggagagg

SEQ ID NO: 67413 - RNA, 68 nt, Homo sapiens
gacacaggcggagccagaaagcgcaagaaccagccggaaggggccgcacgcccccagcagccgacaac

SEQ ID NO: 67414 - RNA, 46 nt, Homo sapiens
cagaaggaccggcggacacgagaggcaagcaaacaggaaggcggca

SEQ ID NO: 67415 - RNA, 66 nt, Homo sapiens
ggcgaggggcagagccggagagcagccccggcccccgagcagaccccaagcggaccaaggaaaaaa

SEQ ID NO: 67416 - RNA, 66 nt, Homo sapiens
gcgggagcggagacccgcgcgccaggcgcgcccggcaggcccccacgggaacgacgccgcgagagc

SEQ ID NO: 67417 - RNA, 75 nt, Homo sapiens
agaaccgaagaacaagaagcaacaaggcaagaaaaaggaaccgaagaacaaaggaacaggaggcccggaccccca

SEQ ID NO: 67418 - RNA, 70 nt, Homo sapiens
cacggcgccccgcaagggccgagagacccagagacccgacggcaggaagcggggaccaccaagaaggcag

SEQ ID NO: 67419 - RNA, 84 nt, Homo sapiens
ggcaggcgcaaccgcacagcagccgcaggaagcagccaccccaccggacaggaaagaggagagaaacgccaaagaaaaaacaaa

SEQ ID NO: 67420 - RNA, 72 nt, Homo sapiens
aaacgagggacaacacagacccaccagcagaggaacaacgagagcgccccaagggagccagcgcagccacac

SEQ ID NO: 67421 - RNA, 89 nt, Homo sapiens
ggcggcagcgaggagggaaccccgagcggcaccaacagcggcgcgggcaagaagcgcgaaggaaaaagaccagcccaccgcacccaggg

SEQ ID NO: 67422 - RNA, 76 nt, Homo sapiens
gccaaggggagaccacaccaagcgggagacacaccacgccaaggcgggaaccggggaggacggcgcacccagccac

SEQ ID NO: 67423 - RNA, 79 nt, Homo sapiens
ccgccccccaggcagggaacccgggcccagaagacggcccagcagagcacccaaccagcgggaacacagcgccgccccc

SEQ ID NO: 67424 - RNA, 74 nt, Homo sapiens
aaccccacacagacagaacaacccgaaacaagagagacccaaaagggccagagcagggagacaaaagagaaagc

SEQ ID NO: 67425 - RNA, 68 nt, Homo sapiens
cggccgaccgcaccccgagcgccaccgcgcccagagaccggcccgccggcgggcccggaaagccgcgc

SEQ ID NO: 67426 - RNA, 82 nt, Homo sapiens
cgagcggggcccaacaggcggagagagaggggagccggcccccgaaagaggaacccacaggacccggaaacagggacaccga

SEQ ID NO: 67427 - RNA, 76 nt, Homo sapiens
caccccggccccggcccgcccgggccccaaaagaagaagggcaaggcgagcgaagagaaacaaaagcggcggccac

SEQ ID NO: 67428 - RNA, 54 nt, Homo sapiens
agagaacgggcccacacaacccaggcaaccaacagcgacccagggggaaagcca

SEQ ID NO: 67429 - RNA, 85 nt, Homo sapiens
aaaaagagggaggcgaacagccacccgggcacaggaaggggccaccaggcggagcgcaggagggcagacacagaggagaagccac

SEQ ID NO: 67430 - RNA, 87 nt, Homo sapiens
cggccgcggacgaagaggcgaccgccagacggagcacacggacaggaccagaagcagcagccccagaagccccgaagccggggcacc

SEQ ID NO: 67431 - RNA, 74 nt, Homo sapiens
agacaacaacgaggaaaaccaacagcggggaggaagggacagccagcaaaaaaggacacccccaagggcacaac

SEQ ID NO: 67432 - RNA, 77 nt, Homo sapiens
accccgggaggccaggagcgggacgcccgccacgaccgcacccaagaagcaggaggagcagaacaacacagcacccc

SEQ ID NO: 67433 - RNA, 79 nt, Homo sapiens
cgacagggcggagccacccccagggagagcgcgcagggcgacgcgccacagagcgggcgggcgggccacgcggcgggac

SEQ ID NO: 67434 - RNA, 89 nt, Homo sapiens
ccgggggacccgcccgccaggccaccaagggggagcgggccggagagaagagaggggcgcgaggagaaggaaacaggcccggaggcccc

SEQ ID NO: 67435 - RNA, 75 nt, Homo sapiens
gaccgccagagacagagaagacaacgacagcaaagcaagccaagagggcccagccaagaagcacggcaagagcag

SEQ ID NO: 67436 - RNA, 70 nt, Homo sapiens
aagaaaggagacagaaccacacagaacggggcagaaacgggacgggagcgccacggggggaagagagggc

SEQ ID NO: 67437 - RNA, 76 nt, Homo sapiens
gcaaaacgaccacccagagcagaaaaacgaccgggccacagaccacaaagccggcagaagagacaacacagaaacc

SEQ ID NO: 67438 - RNA, 73 nt, Homo sapiens
gcggcggacccaaggcggccaaggacgaggcgaagcagccccgacaaagaacggaaggaggccaacgcagagg

SEQ ID NO: 67439 - RNA, 72 nt, Homo sapiens
gaccggacagaaagccaaaaaggagaaagggaaagcaggccccggccaccaagaccaagaaagaaggccccc

SEQ ID NO: 67440 - RNA, 72 nt, Homo sapiens
ggaagcaggggaaacggagccaaacgagaggggccagccaaggacagggaggaagacccgcggaaggcacac

SEQ ID NO: 67441 - RNA, 89 nt, Homo sapiens
cggagaaggagacaccggaggacgaagagggggagggaagcaggggagcgggacacccggccagccgcgggccagaagaacaccggagc

SEQ ID NO: 67442 - RNA, 75 nt, Homo sapiens
ggaaaccaggagccggccagaagccgcagggccggaccgggcggcgggcggaggcacagcggcggccgccagacc

SEQ ID NO: 67443 - RNA, 84 nt, Homo sapiens
ccacgaggcaggcaggaaccccggacaagcgacaaccgggagagacagggccaggaccagacaccagaaaggaggcacggcagg

SEQ ID NO: 67444 - RNA, 90 nt, Homo sapiens
agccccagcgaggaagcacaccaccaaggaacgggcgcagcgagaggagaaccagccaaaaaagggcagaaccgacaacggggacccgcg

SEQ ID NO: 67445 - RNA, 79 nt, Homo sapiens
ggaaacaaaacgaaggaccaggagagccagagaagcagagcggcagcggggcccggaggggcgacgacacggcggcgaa

SEQ ID NO: 67446 - RNA, 76 nt, Homo sapiens
gggagagacaccgcacacagcgcgcaacgcgggagagcccgggccacccccccaggcaaggaaaggcaacgcaccg

SEQ ID NO: 67447 - RNA, 75 nt, Homo sapiens
cgggccacacaaagcaaccggaggacagcgaacagacaagaccagcagccagcagcacgagcggagaccaagaga

SEQ ID NO: 67448 - RNA, 77 nt, Homo sapiens
ccaggaccacagccccgaccgagagaaccagcgccagagcagcgcccccaggcggcgccgacaccccccaaagaacc

SEQ ID NO: 67449 - RNA, 69 nt, Homo sapiens
cggagaaacagaagcgggacaccgccaagcaaagaaggcccgccagcaacagcaggagcgggaagaggg

SEQ ID NO: 67450 - RNA, 76 nt, Homo sapiens
acaaagaagggaaccgagagaggaagacgcacagccccgaggcagcgcacccacaccagaaagcggcgggcacagg

SEQ ID NO: 67451 - RNA, 74 nt, Homo sapiens
gcggcgggaggccccggcgggggcgcgggcggcgggcagcccgcgggcgcccaggaacagcgcaggaggaggcc

SEQ ID NO: 67452 - RNA, 74 nt, Homo sapiens
gacggacagagcaaaaccaacccgaacacaggacaggagagagagagagagaggaagcgaagaaaaagcgccag

SEQ ID NO: 67453 - RNA, 62 nt, Homo sapiens
cgcagaggcggcgggcaccggaacgccaacaaaccgccaggcaagagccgcagagaaagcgc

SEQ ID NO: 67454 - RNA, 72 nt, Homo sapiens
cagacacagcaccaagagacaggaggcaagagcacgggaaagacagaaacacagcgaaacacaggggaaaag

SEQ ID NO: 67455 - RNA, 67 nt, Homo sapiens
acggcacaggaagacaaggcagacagcagccagaaacgaccgagaaggagggcccgggcagagggaa

SEQ ID NO: 67456 - RNA, 72 nt, Homo sapiens
cccggacgcccggcagcggacccgcgggagacacccacaacgacccaagccccgccccagaccaccggagac

SEQ ID NO: 67457 - RNA, 74 nt, Homo sapiens
cgggcagggaacagcggacaagaagaagacagaacgcccccaccaccgcaaacagacggaaaaaggacaaggag

SEQ ID NO: 67458 - RNA, 69 nt, Homo sapiens
gacccaggacccagaacacaacacgagaggagaccggaaacgagagaaacgaagacgaagaaacagccg

SEQ ID NO: 67459 - RNA, 53 nt, Homo sapiens
caggaaccgggggcaagaggaacagagagaaacagaagacagccgaaccaagg

SEQ ID NO: 67460 - RNA, 82 nt, Homo sapiens
ccagacaaacaaaacaaagagccgcagaagaaagcagcgaagcacacacagcccaggaaacgacaaaaaaagagagaaaagc

SEQ ID NO: 67461 - RNA, 81 nt, Homo sapiens
cgaaggccgggacccggccccggcccacaggggggggcaaacccgagagaacggacagggaaaggacccggccaaggcgca

SEQ ID NO: 67462 - RNA, 74 nt, Homo sapiens
aacaaggcaacagaaagagcaacagcagggcaacagggaagccgcacccaagcgaaggcagcggacaggccacg

SEQ ID NO: 67463 - RNA, 81 nt, Homo sapiens
agccgccccgccagcgcgcccgaacccagaaccccggcagcagcagccgaggaggagcggggacagccaccagggcgagca

SEQ ID NO: 67464 - RNA, 72 nt, Homo sapiens
acaaggcgaccgcagccccccgcccggaggccgggaaggaaacccaagaagaaacagacaaggaccagaagc

SEQ ID NO: 67465 - RNA, 54 nt, Homo sapiens
caaacaccaacaaagggaaggagaacaaaggcccccaaaccggcacgggcgaag

SEQ ID NO: 67466 - RNA, 79 nt, Homo sapiens
gaccgcggaccggcgccccggcgcgaagaggcggaccggacggccgaggaaagaaggagagagagaaggcgaccaaaca

SEQ ID NO: 67467 - RNA, 68 nt, Homo sapiens
caggaggccagagggaagcaaagcagccaacaccagaagaagggacaaaagacgagaaagacagacca

SEQ ID NO: 67468 - RNA, 77 nt, Homo sapiens
gagcccaggccacaagggccgcaagccccggagaacgagagggaccagcccggcgaagccccgccggggaagaagca

SEQ ID NO: 67469 - RNA, 78 nt, Homo sapiens
gggggcccgggcgccccgcagccccccaacaccgcccgccaggacgacgcacaccgagcaggagcccgggccacgccc

SEQ ID NO: 67470 - RNA, 67 nt, Homo sapiens
gggggggggaagccgcagcggaaagcaggagcacaggaccgccagaagcagcgcgacggagagccaa

SEQ ID NO: 67471 - RNA, 75 nt, Homo sapiens
aagagacaggggcagcaggacgcaaaacaaaaggggccaaggacgcacacaccagagaaggcagaccaagggcga

SEQ ID NO: 67472 - RNA, 63 nt, Homo sapiens
accacggcagaggccagaccgacagcaccgggaccccgacaaccagggacccaacgggacgca

SEQ ID NO: 67473 - RNA, 77 nt, Homo sapiens
gacgcacaggagcacagaaacaagagcagaagccagcccaacaagacgaagaagagccgaaacgcgcggccagggga

SEQ ID NO: 67474 - RNA, 56 nt, Homo sapiens
agccgacggaccaaaggcagcaagcacggcccggggccgccgaagggcgggaagcg

SEQ ID NO: 67475 - RNA, 80 nt, Homo sapiens
gcccaagaaacgggcagccaggcccccacagcccgcagacagccccagcacagaggaaagagaaagagccagcaagagga

SEQ ID NO: 67476 - RNA, 72 nt, Homo sapiens
gaaaaagaaaggccacaaccagacaacagacagagagggaagaacaccaaacgcaaaacccagccacacgag

SEQ ID NO: 67477 - RNA, 76 nt, Homo sapiens
aggagacgagagagcgaacgccagggacccggcaggccgcccccggcaagaaccaaaaacgcagaaaacagcacga

SEQ ID NO: 67478 - RNA, 41 nt, Homo sapiens
aaaccacaggagaggagaccaggagagaagacgaaaaagaa

SEQ ID NO: 67479 - RNA, 75 nt, Homo sapiens
aagcaccacccaacggcagggagcacaggaagaagagaaagggaacagcagaaggagcgacgcgaggaggaagag

SEQ ID NO: 67480 - RNA, 89 nt, Homo sapiens
cgggcgcacccgccccggcgccgccggcccgcgggaccgacagccgggcagagagcgaagaagcaggggagaggccgagcgaagaacca

SEQ ID NO: 67481 - RNA, 74 nt, Homo sapiens
gacccggggaccgcggagaccgccaccaggcccggggggagggaagcagccaagcgggcagaagaggaagcccc

SEQ ID NO: 67482 - RNA, 57 nt, Homo sapiens
acagaggccaggagaagcgaaggcggaaggaccacacaacagagaagggaaaacgcc

SEQ ID NO: 67483 - RNA, 42 nt, Homo sapiens
gccgcacccacggcacgaaagggggggccgcccgcccaaggc

SEQ ID NO: 67484 - RNA, 69 nt, Homo sapiens
aggggcgcgagccgcgccgcgccaagggccacccccaaccaggaccaaagacgaccaccaaagccagcc

SEQ ID NO: 67485 - RNA, 80 nt, Homo sapiens
cagcagggcacacaggaaggaacaggaggaaaccacagagggcacccaggacgcagacgaacccaagaggggcacccgcc

SEQ ID NO: 67486 - RNA, 81 nt, Homo sapiens
aaggacgcggcagcaacacgacggcgcccgccgaaccgagagaagacaagacaacgaagagaggaaagaagcggaaaggag

SEQ ID NO: 67487 - RNA, 72 nt, Homo sapiens
cgccggcaggaaggggcccagagacgggggcagaagagagaaagcgaaagggagagcacggccaaacaagag

SEQ ID NO: 67488 - RNA, 61 nt, Homo sapiens
gaggagggaggaggcacaccgagcccgagaaggggcagaccaacaccacccagcaaaaacc

SEQ ID NO: 67489 - RNA, 77 nt, Homo sapiens
aaacaggaggaagcccagggaacggcggcaaaaacaaccaggcagagagacaagcaggagcgaagcaggacaacaag

SEQ ID NO: 67490 - RNA, 82 nt, Homo sapiens
cagcaacggcgagggaccacagcgagaccgcgccggcgaccagcccccaggcaacgcagcaaagaagcagaggagccgcagc

SEQ ID NO: 67491 - RNA, 68 nt, Homo sapiens
ccggaacgaaagcaggacggaggagcgaccaccggccccaccacagccacacaacaacagaccaagaa

SEQ ID NO: 67492 - RNA, 76 nt, Homo sapiens
acgcaaaacaaaagacacaccaaaccagcagcacaacagaaacccgaagagagcccacgggacaaaaaaaccagac

SEQ ID NO: 67493 - RNA, 85 nt, Homo sapiens
gagccgagcgacggcgcggcggagacgccggcgcccccccccccgccgggcaacgccaaagaaaggaaaaccaaagagaagaaac

SEQ ID NO: 67494 - RNA, 76 nt, Homo sapiens
agaaccaggacccaaaaaccacaggacaaagagagcaggcacccgaaaggaagagaagcgcgggaaaacagaggcc

SEQ ID NO: 67495 - RNA, 56 nt, Homo sapiens
cagaccaccacgccaacggcaaaccgacaccagcgacacaagcgcgagggaaccac

SEQ ID NO: 67496 - RNA, 78 nt, Homo sapiens
ggccgcacgacgcgcgggcaccgcgcggccgaaccggggcagcgcgcaaggaggagcagcgagagcggccagcacggg

SEQ ID NO: 67497 - RNA, 78 nt, Homo sapiens
gaggacccagccaaagagagaacgaaaggaaaccggaaacacagagcccggagcacacaaggcgaaagaaaaggcaag

SEQ ID NO: 67498 - RNA, 73 nt, Homo sapiens
aaggcagcagaaaagccagaaaaggagcgccggagcagaccaaaggggaaagaccgaggcggacaggaggaga

SEQ ID NO: 67499 - RNA, 78 nt, Homo sapiens
gcgaggcaccggaacagacgcaggaaggaggaggagcagcgcggaggaggaagccccccggccagaacaccggacgca

SEQ ID NO: 67500 - RNA, 82 nt, Homo sapiens
cggggacccggccagccagcaccaggcgaggagcagcacgcggagagcacgacgggccggacacgcaggcggccacagagac

SEQ ID NO: 67501 - RNA, 39 nt, Homo sapiens
cacccccaggggagaggaaggggacccacgagcagccaa

SEQ ID NO: 67502 - RNA, 69 nt, Homo sapiens
gagagcgggcaccccccaaacgacgcagccacggagagggccggaaggcgcgagcagcaagcccagagc

SEQ ID NO: 67503 - RNA, 49 nt, Homo sapiens
gagagagagcacagaccaaggagcaacacccaaggagaaaccaccacag

SEQ ID NO: 67504 - RNA, 76 nt, Homo sapiens
cgggagcggcgagggaaaagcgaggcaaggcaggcggagcaaacgagacggaagaaaaaaccgacggcccgaacca

SEQ ID NO: 67505 - RNA, 86 nt, Homo sapiens
gaggagcccccagcggggcggagcgaccccgcggggcgcggagaggcagcagaaaaggccaaagcagcagccggggaggccaaagg

SEQ ID NO: 67506 - RNA, 78 nt, Homo sapiens
gggccccgcaaagcgcgagacccgggcgggggcaccgagggcaccacgcgcgggaaacacccaaggaaccaaagcagg

SEQ ID NO: 67507 - RNA, 80 nt, Homo sapiens
ggaccgcaggcgaccacagccgcgcgccgagccccagcgcgagcgaacagaccagcagaagagacacgggagcaccaggg

SEQ ID NO: 67508 - RNA, 53 nt, Homo sapiens
gcaagcgcgcaggcgacccccggcagccaggcgcaccagcacaggccccagac

SEQ ID NO: 67509 - RNA, 81 nt, Homo sapiens
gggggacgggggcggcggggcgccggcggcgggacaggggagaagaaccaaggacaaacagagcgcccagcgcacgcccca

SEQ ID NO: 67510 - RNA, 72 nt, Homo sapiens
caggcaaggaggaagaaaaagacccaaacaagcaaagccgaagaggaggagccaggaggaggaaaggacagg

SEQ ID NO: 67511 - RNA, 71 nt, Homo sapiens
acagccaagagcagccaaacgacgccacgaacaaaagagaggaggccgggaaccccgcagaagaagagggg

SEQ ID NO: 67512 - RNA, 75 nt, Homo sapiens
cgggaccccaccccccacacgggggaccagcagggaccaagaggaaacggggcagagccagaaggagagccaagc

SEQ ID NO: 67513 - RNA, 76 nt, Homo sapiens
acaaaagcacggaggcaagagggacaccgccagggagaccgccacggaaggaaccacacaacagaacaaagaaccg

SEQ ID NO: 67514 - RNA, 75 nt, Homo sapiens
ggggacgccgaccgcgcaaacggcgcagaggcgggccagcaacggaaccacccccggacgcggggcaccacgcca

SEQ ID NO: 67515 - RNA, 72 nt, Homo sapiens
aagaagacccgggaaaagagacacaaaccaggaaagggacagccacgccccagagaagggccaggggcacga

SEQ ID NO: 67516 - RNA, 72 nt, Homo sapiens
aagaccacaaccacgaccacaaaccggcggagccacagaccaacgggagccgcaaggacaacagccgcggcc

SEQ ID NO: 67517 - RNA, 85 nt, Homo sapiens
agcaagaggcgcgagaaacgacgccccagaggaagcggagagggaggggcgcgacccggggaaaccgagcgggcgagagagacca

SEQ ID NO: 67518 - RNA, 72 nt, Homo sapiens
aaagagaaaaacacacccagacggagaaccgcaggaaagggcgacacaggaggggagaaccacccaaagaac

SEQ ID NO: 67519 - RNA, 57 nt, Homo sapiens
cggcgccccaagaccaaaaccaacagaagggccgaaacggagcaggaaccgaaggaa

SEQ ID NO: 67520 - RNA, 74 nt, Homo sapiens
gcaaagcagagcgggcaggacaaccaggggaccagagaggacggcaccagccaggaggacagaacgaccgcccg

SEQ ID NO: 67521 - RNA, 76 nt, Homo sapiens
agaccaccagggggaagcacccaagaccgaagaaggagaaccagcccaagcgcgcacacccggaggagcgcagcaa

SEQ ID NO: 67522 - RNA, 61 nt, Homo sapiens
cagcacccccgccccccaggcgacgagacccagggcagaaaaagcggggaaggggggcaaa

SEQ ID NO: 67523 - RNA, 84 nt, Homo sapiens
gagcaccgggagggaccacggaccccgcaacccaagaaggcagaagccagccccgcaggccgccacccgcccccgggccgccgg

SEQ ID NO: 67524 - RNA, 81 nt, Homo sapiens
cgacgccccacgggcgcacaagccggaggacagccccagggcagaggcccgaaaacggccggagaccccccagacacagca

SEQ ID NO: 67525 - RNA, 70 nt, Homo sapiens
ccccgaagaaccagggcaaaaaaagccaagacgacagaggccggggacacacaaagaccaggagcgcagg

SEQ ID NO: 67526 - RNA, 85 nt, Homo sapiens
aaagggacagcccacgaaccagagaaccagcccacacaaaaccggcacaggggcgagcaccagcacaacaaggagaccaagaacc

SEQ ID NO: 67527 - RNA, 79 nt, Homo sapiens
cgcaccacaggcacagagaaagccaacccagcgaaggaacaagcaaaccccaagcggcaagagaccgacaaacagaggg

SEQ ID NO: 67528 - RNA, 79 nt, Homo sapiens
aggagggagggccagggggcgcccccgcgaggcagagcccaggaacaggcaggagaaacgaggaggaagagaaggaccg

SEQ ID NO: 67529 - RNA, 33 nt, Homo sapiens
cgaaaagggacagcaggcaacgaaagcaaaccg

SEQ ID NO: 67530 - RNA, 71 nt, Homo sapiens
aaaagacgacaaagcaaaaaagacaaagccaaccgaaccccaaaaagggaaacaagaacaaggcacgaaag

SEQ ID NO: 67531 - RNA, 58 nt, Homo sapiens
caccgggggagcgggagcgcggaaaggcggcaccaggacgccgaaaagcgaccggacg

SEQ ID NO: 67532 - RNA, 74 nt, Homo sapiens
ggggggcccaagcaaggccggaagaagagcgcagagagaagaaaacacgcccagcccgagcaagagaacaggga

SEQ ID NO: 67533 - RNA, 81 nt, Homo sapiens
cacaaccgaaagagcaggaccagaaaacccgcacagaccacacgggacccggcagcaaccccaacaaacgccagaggcagc

SEQ ID NO: 67534 - RNA, 75 nt, Homo sapiens
cagccaacgagcagcgcccgaggggcggaagccagagaccaacgagaccgcacagcagggcccgccgaaggacaa

SEQ ID NO: 67535 - RNA, 80 nt, Homo sapiens
cgggcccaggcccgagggggccggaccgggagggcagggacgaacagcggggacgccccagcagaccgcccaggagagga

SEQ ID NO: 67536 - RNA, 83 nt, Homo sapiens
ggcaggagcagaggaaaaaacgaccaagccagagaacagcccccacgcagcccagaagccgcggcgagagggcacaccggcag

SEQ ID NO: 67537 - RNA, 69 nt, Homo sapiens
cgcggggaggcaaggggggaccagacaggcggcaagcacaagaccggcagggaggaagccaagaaaaag

SEQ ID NO: 67538 - RNA, 84 nt, Homo sapiens
aggacaagaccggccccgggcgccacacccagaacacacaaggccgcaagaaggagaggaagggggagaggacggagggaccac

SEQ ID NO: 67539 - RNA, 80 nt, Homo sapiens
agacaacaggacgccgccaagggagaaaccggaaaccgacaaggcaacagggcccagcgcacaacccagcggcagacagg

SEQ ID NO: 67540 - RNA, 58 nt, Homo sapiens
acaaggagaaagccacaacagggcggcaacaggggcgagaaaggcggcaggacacggg

SEQ ID NO: 67541 - RNA, 55 nt, Homo sapiens
accaggaggccagggggcgccaggaaggaagaaagacggaacagaccagagccgc

SEQ ID NO: 67542 - RNA, 80 nt, Homo sapiens
ggcgggggcgccggcagaggaccaggcaccaccggccccggaaggcagcaaccaccggagggcgcagagaagagacagag

SEQ ID NO: 67543 - RNA, 70 nt, Homo sapiens
aaggaccaagaaccaggccccaaaggcgagccacacggaaaagaaagcagacaccaggagaagcacagaa

SEQ ID NO: 67544 - RNA, 55 nt, Homo sapiens
caccaccaacaaaccggggaaacgggagcggcgaaagaaaaacaggaccgcgcgc

SEQ ID NO: 67545 - RNA, 82 nt, Homo sapiens
caacgacgaaggaagaaaaggcaccacccccacagcccgcgcaccaggggagcaaggccggggaagccccggccgggcccgg

SEQ ID NO: 67546 - RNA, 79 nt, Homo sapiens
cccgaaggagagggcgcccgaggaagggcgagcacgggccagcccggccacagcagcacgagcggccgccagggcgccg

SEQ ID NO: 67547 - RNA, 79 nt, Homo sapiens
ccggagcgccggcaaccgggaaagcaaccccacagacaggcagagcccccggggagcgaagcggagcagaccgaaggaa

SEQ ID NO: 67548 - RNA, 80 nt, Homo sapiens
cgggaaacgggcgaagcgacgagccgcgaggaggcgcggggaggcccagcccgccgcagggccaccccgcggcccaccgc

SEQ ID NO: 67549 - RNA, 72 nt, Homo sapiens
cacacgcagaaagccacacacagacgaaaccacaggcagagggcagcaccgccacgcccggagcgcgaagca

SEQ ID NO: 67550 - RNA, 73 nt, Homo sapiens
caaacgcggcgagaaagagagcaaacaaggagcagacggccgcagcaaaggcaggggaggcagaagagagccg

SEQ ID NO: 67551 - RNA, 74 nt, Homo sapiens
acggaggagcaggcgagaagagaaggagacgacacgagaaagcggacaggaacggcaagaaaaggagcggaagc

SEQ ID NO: 67552 - RNA, 90 nt, Homo sapiens
gcaggacgcgccggggccgcccccccgcacggacccagaaccagccgggcggcgcggcggcccgcagaggggaaagaaaaagagcccacc

SEQ ID NO: 67553 - RNA, 73 nt, Homo sapiens
ccaggccaaagaaagagaagccggggggggcacagagccccggaagacagcccccagcgaccagacccagggc

SEQ ID NO: 67554 - RNA, 51 nt, Homo sapiens
cgggcagacacccaccaggcaggaaaaagaacgaccaggacacagagcggc

SEQ ID NO: 67555 - RNA, 76 nt, Homo sapiens
caggcgcagagggggcggcgaccgagaggcgcggagccggggacgccgcagacgggacacggccggccaggagcgg

SEQ ID NO: 67556 - RNA, 62 nt, Homo sapiens
gaaaaaacaggacaccaaacacaaggcccagaaccacgccgcaacaacgagagacgacggca

SEQ ID NO: 67557 - RNA, 73 nt, Homo sapiens
ccacgaagggaggaaaagggcagggacagcgcaggcagcagcggggaaagccacgggaagaccacgaaaacac

SEQ ID NO: 67558 - RNA, 71 nt, Homo sapiens
caaccaaagcgccaaagaaagacagcagaccacagcccggcaggcccaaaaacccaaagggacagaagcac

SEQ ID NO: 67559 - RNA, 77 nt, Homo sapiens
ggcacaggaaaaacagccacccagaccagccccaggggaacagaccccgccccccgaggcgcagcccgaacccagca

SEQ ID NO: 67560 - RNA, 75 nt, Homo sapiens
ggaggggcagcagaaaccacccacccaaggaagacccacgccacaccaccccccaggcgccaccaagcggaccgg

SEQ ID NO: 67561 - RNA, 37 nt, Homo sapiens
ggcacaggaagagacccaaggccccccagagaagccc

SEQ ID NO: 67562 - RNA, 82 nt, Homo sapiens
gggaggcggacggcggggccgggccggagacgcgcccgcgcgcaggggaagcgggcaggacagcccagagcaagcacacgga

SEQ ID NO: 67563 - RNA, 80 nt, Homo sapiens
aaaaccaaccagaagacgaacaaacagcaagaaagaccacaagaccagaccgccaggcgagaagcaaaagaagccgaaag

SEQ ID NO: 67564 - RNA, 76 nt, Homo sapiens
gagaacagcacaggagagagcggaacacgccccgacacagcggacagaaagcaccaaaaccagaagacagagagga

SEQ ID NO: 67565 - RNA, 83 nt, Homo sapiens
acagccgaggggagcgcggggcccggcagaaagacgcaaaacaaaaggggccaaggacgcacacaccagagaaggcagaccaa

SEQ ID NO: 67566 - RNA, 70 nt, Homo sapiens
gggagcacgagccccacagccaaaggaggcaccagaaaccagagagcagaaccaaaaacgcagaaaacag

SEQ ID NO: 67567 - RNA, 60 nt, Homo sapiens
gcgggaccgggcgcagacggcgagaccccgcacagggaagaccaaagcaagggaggagaa

SEQ ID NO: 67568 - RNA, 82 nt, Homo sapiens
ggaagagggagcaccacggaccccaaggaagccacggcagacacacaacccgacccgacgagccaaggagaccccccgacaa

SEQ ID NO: 67569 - RNA, 73 nt, Homo sapiens
accagggcaacaccaaaaacaaaacgaaccaggacggcaaggaaagcggccaaaacaggcggagaagggaaga

SEQ ID NO: 67570 - RNA, 83 nt, Homo sapiens
cccaccccaggcgcagacgccgcccagcccagcagaggaccagccgcagcagaacaaccgccagaggcagcggaggcaagaga

SEQ ID NO: 67571 - RNA, 42 nt, Homo sapiens
gcgccacagaacgagcacgaggcagcccaagacaccccgcgg

SEQ ID NO: 67572 - RNA, 79 nt, Homo sapiens
gcaggagcccgaggaggagccaaggggcagcagcggaagcggaggagggaagcaaggaccagaagcgccaacgcaagca

SEQ ID NO: 67573 - RNA, 75 nt, Homo sapiens
agaaaaacagacacgcaagagaaacaggcacacaagggaggaggcaaagccaggaagaccgcaggaaagcaggaa

SEQ ID NO: 67574 - RNA, 37 nt, Homo sapiens
ggagaagcgaaccggccgcgcgagcgaccgaccgacc

SEQ ID NO: 67575 - RNA, 80 nt, Homo sapiens
gccccgagcgacgggcgaagggaggggggcagcggagcccaggcggcagcgccagccagaagaggaccacagcaaaaaaa

SEQ ID NO: 67576 - RNA, 71 nt, Homo sapiens
gccaaagaagcagaagaagcaaggaaccagcaggaggcacgccacccagggccagacacgcagggccacca

SEQ ID NO: 67577 - RNA, 69 nt, Homo sapiens
gagcacagagccagcacaggaaggagacgacgagggcaggaaagggcagcagaaagcccgggaacgaga

SEQ ID NO: 67578 - RNA, 62 nt, Homo sapiens
cgggcaaaggaacaacaggacccaaaggcacagaggccgaagggacccgagcggggaccgag

SEQ ID NO: 67579 - RNA, 69 nt, Homo sapiens
cagcgccaggcaggcaggagcggcagcccacaagcaggaagaccagccccaggagggaaacagagcacc

SEQ ID NO: 67580 - RNA, 56 nt, Homo sapiens
ccaacggaggccggagggggcagaccgcacgagagaacacagcgcaaccgcagcgc

SEQ ID NO: 67581 - RNA, 104 nt, Homo sapiens
ggccggcgcccagaagggaagacccccagcaaagagcgagcacacacagaccagccaccacaacagcggcacagaagacccggcgggagaagagagcccggcag

SEQ ID NO: 67582 - RNA, 76 nt, Homo sapiens
cagaccgaagggcgaccaccacaacgccgcggacgaccgcacgggcaggcgaagagacgacgcgggggggaacccc

SEQ ID NO: 67583 - RNA, 72 nt, Homo sapiens
cgacccagaacagagcgacagaggcgacgcaaccgcgggagaggcgcgccaaagaaaaggggagaaagccag

SEQ ID NO: 67584 - RNA, 80 nt, Homo sapiens
ccacacccacggcgcaaccgcaccagggcggcgacggcggcgcgaggaccgaccgggcccgcggacgaagaaggcacccc

SEQ ID NO: 67585 - RNA, 73 nt, Homo sapiens
agaccaggcacaagcacaaccccaaaaaaggccagaggaggacagcacgagagaaccaaaggcaagaaccgga

SEQ ID NO: 67586 - RNA, 75 nt, Homo sapiens
gaggggcgcggaggcgaccgccaggcgcccaaacccggaccagagcgcgggcccaggcggaggcggaggcaaggc

SEQ ID NO: 67587 - RNA, 79 nt, Homo sapiens
ccccgcgcgagaccgcccagaggggcccaccgcgcccaaaaaaggcagcggaaagaagaaaagaaacggcccacaagac

SEQ ID NO: 67588 - RNA, 73 nt, Homo sapiens
cagaagaccacgggagaaacaaagaccacaccagaggaaccagggaaaagggacgcaaccggacagcacaaca

SEQ ID NO: 67589 - RNA, 79 nt, Homo sapiens
gcaccgccaggcgccccgggcgcggcaaggacgagccggggcgcgaaggaccgggcaaggagggacagcccgaccaagc

SEQ ID NO: 67590 - RNA, 65 nt, Homo sapiens
ggacagggccacaggcccgggagcggcgcggcggcccagcaggagaaccagagcccggcgaggcc

SEQ ID NO: 67591 - RNA, 72 nt, Homo sapiens
ggagcggcccaccaagaggccagccagaggaagagccaggaacagccaagcccgggcgcggacaggaaccca

SEQ ID NO: 67592 - RNA, 74 nt, Homo sapiens
aggggccgggaggcagaggggcagggccgcagaaagcaacaaagcgagagcacaagaaaacagccccgagcacc

SEQ ID NO: 67593 - RNA, 74 nt, Homo sapiens
aagagcaaccaaacaaaagaagaccaggagaccgcaagcccacagagagccaggccaagccccagcaggaggca

SEQ ID NO: 67594 - RNA, 80 nt, Homo sapiens
gagaccacaaagcaagagagaagccacgcagaggcgacaccccaagagggccgccaccacgaggagcaacccccaaaaga

SEQ ID NO: 67595 - RNA, 41 nt, Homo sapiens
cccacccgcgccgcgacccgaaccaaaacccgggcagaaga

SEQ ID NO: 67596 - RNA, 73 nt, Homo sapiens
aaggaagcaagccccaaggcaagagcaacagcaacagcagcccagaagaaagggaggaacgaggcaacaccgg

SEQ ID NO: 67597 - RNA, 68 nt, Homo sapiens
caagccacgaggcgcccaccccaccgcccgcagaacagacgcaccaacaggacggagaggccgcccac

SEQ ID NO: 67598 - RNA, 78 nt, Homo sapiens
cccagccgcagccacaacaccggcaggaaccaccaggacagagacaccccagccaccgggcagacccccccggcacac

SEQ ID NO: 67599 - RNA, 44 nt, Homo sapiens
aagacggaggagagacacacggggccccagcgagagaacagccg

SEQ ID NO: 67600 - RNA, 87 nt, Homo sapiens
cacagccggcaccagccggacaaaggagagaagggacccaggaccacaccaacgcaaggcacccggaaaccaagcaaagaaaaacaa

SEQ ID NO: 67601 - RNA, 74 nt, Homo sapiens
accacgagccgggccacccaagggcccagcgaccgcgcacaccaggacacgccgggggcccagcacggcaccag

SEQ ID NO: 67602 - RNA, 60 nt, Homo sapiens
gcaaccagaagaaagcaagaagccgcgggacccggggccgacgccaccgccgagcccaga

SEQ ID NO: 67603 - RNA, 75 nt, Homo sapiens
gaggaggcgagcagccgggagacaccgccaccgccaggagcaacgcacgaaaacgcacgaggagcacagaaacgc

SEQ ID NO: 67604 - RNA, 82 nt, Homo sapiens
cgcgcggcgcgggacgcgcgcgggcacccacggagccccggggcggaggcccagcgaggcgggcggggcccacacccggaca

SEQ ID NO: 67605 - RNA, 71 nt, Homo sapiens
cgaccgagacgggcggagaggagaagacagcaaccggaaagggccaaccggcgcacagggagcagaaggga

SEQ ID NO: 67606 - RNA, 67 nt, Homo sapiens
gaagaaagagacccggagccgaacaaggagggaaagcgccaggaccccacaggggacaacacaaagg

SEQ ID NO: 67607 - RNA, 53 nt, Homo sapiens
aaagggccaaagaagggagagaggacccgggaaggccacgacaagaacagaga

SEQ ID NO: 67608 - RNA, 67 nt, Homo sapiens
agaagcacgaaagccccacccgccgcagcaagcagaggacggcgacgggcgccggcggcccgggcag

SEQ ID NO: 67609 - RNA, 68 nt, Homo sapiens
agaaccacaggaaagcagcgaggaacacagagccccagacgcgaggccgagccaggagcacgacagcc

SEQ ID NO: 67610 - RNA, 64 nt, Homo sapiens
cagcgggaccccgggaaacggaggaacacaaccagggagcggggacaacggcaagcggagaaga

SEQ ID NO: 67611 - RNA, 102 nt, Homo sapiens
agaaagggaaagcgagagccgagagaacaagacgaagggaagaccaggagggggagaagggaagcgccaagaagcaacaagcacaggaggagacagcacgca

SEQ ID NO: 67612 - RNA, 55 nt, Homo sapiens
gagaggcaggccaccagccaaagaggcgaagggaggacagaagccaagggcggcc

SEQ ID NO: 67613 - RNA, 65 nt, Homo sapiens
ccaaggaaggacacaagcccccaggacaggcagaagagggcgggccaccaggaggaggggcgcgg

SEQ ID NO: 67614 - RNA, 71 nt, Homo sapiens
agaaagccgcggaaccgcgacaccaagagggaagcacagagggggaggagagggaacaagcgcaggaagca

SEQ ID NO: 67615 - RNA, 66 nt, Homo sapiens
agccaacccgccaaaaaagacaagaaaccgcacaagaccgggagggggcgcaaagggaaaaacagc

SEQ ID NO: 67616 - RNA, 54 nt, Homo sapiens
gcaggaccagaaaaagcagaggcacgggaacacaccgccacagaaacccacaaa

SEQ ID NO: 67617 - RNA, 68 nt, Homo sapiens
cggaggacgggaaaaccagcagcagaaaaccgcccccccaccgggcggccgagaggacagaaagcagc

SEQ ID NO: 67618 - RNA, 82 nt, Homo sapiens
ggaacccaaaaggacagcaacacgcgagagaaacaagacgggaaggaagacgagaaaccagaccaagcaccggaacccaacc

SEQ ID NO: 67619 - RNA, 42 nt, Homo sapiens
acgggcggccggcgcgaggcgaggacagacggacagacgggg

SEQ ID NO: 67620 - RNA, 66 nt, Homo sapiens
cgaagaaggcaaaaccaagaggaaaagagaaacggaagaaagccagggagagacggagagaaaagg

SEQ ID NO: 67621 - RNA, 76 nt, Homo sapiens
cagggcggccccggcgggggcgcggccgagagaaaaggggacgccacggacaccgggaccgaggcccgggcagcgg

SEQ ID NO: 67622 - RNA, 94 nt, Homo sapiens
aaaggacgagaagggaaggaaacagcaagcgaagccgaaaaagcgcccgagacgggcccgccgaaagcaacgcacccgcccccaaagagagaag

SEQ ID NO: 67623 - RNA, 94 nt, Homo sapiens
ccgagcgcgccgccgccgccgccagaacaaccgggcgccgacgagacgggagccaaacaaaggaacgccaagcccggcaggacgacaggaggga

SEQ ID NO: 67624 - RNA, 101 nt, Homo sapiens
cgcagccccagacgcgcacagcacgcacagcgcccaaccaggcaccggaaaagacccggacgacaaaacgaacgaggcgacggccaccgcccgccagccac

SEQ ID NO: 67625 - RNA, 73 nt, Homo sapiens
gggcaggggcggggcaacgcggaagaggagcaacacccaaggagaaaccaccacaggaacaagcggaggaaac

SEQ ID NO: 67626 - RNA, 62 nt, Homo sapiens
aaaaagaaaaagcccggagaaccagaacaccagaggaagacaaaagaagagagccccaaaga

SEQ ID NO: 67627 - RNA, 82 nt, Homo sapiens
aaacaaaacaaaagaacagaaagcgagcagagcccgcgaacaagacaagccggcagaacacagaggcagagaagcaaggcag

SEQ ID NO: 67628 - RNA, 86 nt, Homo sapiens
ggcggaacgccgacgcagaagcccgccgcccccaaagcggaaccggacaccgagggcaacggcagagacagggcagggcagcagca

SEQ ID NO: 67629 - RNA, 55 nt, Homo sapiens
cccaaagagagaaccggagagcacccaacaccagcaacacccaacacaaagcgga

SEQ ID NO: 67630 - RNA, 72 nt, Homo sapiens
gaacaagcgggaaacggagccaccaacaagcgggagaaagacagcaaggacccaaaaggcgggcgaaaacgc

SEQ ID NO: 67631 - RNA, 76 nt, Homo sapiens
gcgcggcgcggggaccgcggcccgccaagggacaccaccccggcacgagaccggcggaccccggagaagaggccca

SEQ ID NO: 67632 - RNA, 75 nt, Homo sapiens
aaagaagccacccgaccacgacaaggagagagagaacgggaggaggggagcgggacaagggaccccaggggcaga

SEQ ID NO: 67633 - RNA, 81 nt, Homo sapiens
gaagcaccgccagcagcgacgcgccagggccagccggagcagagagagaaaaggcaagaagagaaaggaccgagcccgaag

SEQ ID NO: 67634 - RNA, 73 nt, Homo sapiens
cccgccgcggggcgcgcggcgccggcggcgcgcgacccccgcgcaggaaggacacagacaaaagaccaggaga

SEQ ID NO: 67635 - RNA, 79 nt, Homo sapiens
acaggcgacgcggggccaggcaggacccaacgacaggcgccccggcccaacgggaaacccagacgacaaggaaggccaa

SEQ ID NO: 67636 - RNA, 73 nt, Homo sapiens
agcagggccgcccaacgacacgaggccggagaagggagacaagaccagaaagaaagacaagacaggaggccag

SEQ ID NO: 67637 - RNA, 78 nt, Homo sapiens
aacagcagacccaagagcagcggaaaagaccagcacagacaacaaacggaggggcagcagaggaaggaaccagagagg

SEQ ID NO: 67638 - RNA, 46 nt, Homo sapiens
aaagggccaaagaagggagagagacgaggggcccacaacaaaccaa

SEQ ID NO: 67639 - RNA, 95 nt, Homo sapiens
caggagcaggaacaagaccacacagcggagaacaaaagggagagaaacagcaagaaaacagcgggaaccaccagacacagcagacacaaaacaag

SEQ ID NO: 67640 - RNA, 69 nt, Homo sapiens
ggggaccacagcgcggccgccagggaaaagagcaaacgagccggccacacacggcacaagggaagagaa

SEQ ID NO: 67641 - RNA, 74 nt, Homo sapiens
gggccagagcagggagacaaaagagaaagcaggccacgaaaacacaagcagagcaacacaccaggaagcagagc

SEQ ID NO: 67642 - RNA, 78 nt, Homo sapiens
cccggccaagaaaaagcagcgagggaagccgagagaaggcgggaaggccagcaacagaagaaagcaagcaccggggaa

SEQ ID NO: 67643 - RNA, 79 nt, Homo sapiens
cgagaggacgggaccaggcgaagcggccgagcaggcgagcgaacgacggcccaaagacagccccacgcagcccaaaccc

SEQ ID NO: 67644 - RNA, 71 nt, Homo sapiens
ccccgaaccccgcacacgaggaagaggggggccgaagaagccagggggaggaaagcagacagacccaccaa

SEQ ID NO: 67645 - RNA, 73 nt, Homo sapiens
ggggcccacccgacacaaagcaacaccgcgcagagacacgagggggcgacagacagcggaaagccccaggagg

SEQ ID NO: 67646 - RNA, 61 nt, Homo sapiens
gaaagaaaacaaggaagacaagagcgaaaagccaggaaggaggaagaaacagaagagagag

SEQ ID NO: 67647 - RNA, 59 nt, Homo sapiens
agacgaggcacagacccagagggagcacagcgcggaagccccgaggcagccccgcggag

SEQ ID NO: 67648 - RNA, 84 nt, Homo sapiens
ggcccagcgaagagggaagaaccgggcgaccggcaccacaccgagaaagccaggccagaagaaggaaggccggggaggggacag

SEQ ID NO: 67649 - RNA, 75 nt, Homo sapiens
ccagggggaaagcgcgagaagaggagccaaaacacaaggaaccgccggaaagaacgagcaggagcacgaagggga

SEQ ID NO: 67650 - RNA, 62 nt, Homo sapiens
acgacacaggaagaagacaggaaacagagcaaagcagcgacaacaaagacagaggaagaaaa

SEQ ID NO: 67651 - RNA, 71 nt, Homo sapiens
cacaagcccggcaaggaacgaagcccggcaccacagcagaagggaaaggcccagaaagaagagagagcggg

SEQ ID NO: 67652 - RNA, 76 nt, Homo sapiens
gagaccccggcacaggcaggagcacgcgaaaaaccagaccaaacgaaacgcccgcacagcggcacaggagacccgg

SEQ ID NO: 67653 - RNA, 78 nt, Homo sapiens
gcgcgaggacgccgagagcgagaaacaaagccacccagccaagaagaggcggacacaaccaggcagccaggaaaagag

SEQ ID NO: 67654 - RNA, 57 nt, Homo sapiens
ccagcccccgagggcggaacacaggcgaacagaagacgagagcagcagaaacccacg

SEQ ID NO: 67655 - RNA, 60 nt, Homo sapiens
cgcagcgaagcgcacggaaggaagcagggccgagaaagacgcaagaggcgccccaaggaa

SEQ ID NO: 67656 - RNA, 76 nt, Homo sapiens
cggcagcagcggcccgccgccgcccgcccgcgcgcagcccccggaccccgacggagagacaaagaagacggagggg

SEQ ID NO: 67657 - RNA, 75 nt, Homo sapiens
gcggcgccagcgccggcaacggaagaggggcggcaagacgccgacggcgccggagagaagagagagcaggcgcac

SEQ ID NO: 67658 - RNA, 66 nt, Homo sapiens
gaagacaaaagacgcagcaaacaaaaagaacggccagagggaagaggaagcgcccagaagaacagg

SEQ ID NO: 67659 - RNA, 83 nt, Homo sapiens
agcgaaggaggcgggagcggagacccgcgcgccaggcgcgcccgggagggagaagaccaaagaagagagagcaggaccaccac

SEQ ID NO: 67660 - RNA, 78 nt, Homo sapiens
gcggggggaccgcccggcgaccgcaccccccagccgccgggccgccggacacccccgcggggccgagcccaacaggac

SEQ ID NO: 67661 - RNA, 75 nt, Homo sapiens
ccaaggagaagaccaagaaacagccaaagaaccagaacccaaaaacaccagaccagaaagcaccgggaggaaaga

SEQ ID NO: 67662 - RNA, 84 nt, Homo sapiens
agagccaggacacaacaccgcggagcccgcaggcgggcccaccgcaccggacgacgggggacacagaacgcaagaccaccgcga

SEQ ID NO: 67663 - RNA, 33 nt, Homo sapiens
cgaagaagggggccggcggcagaagcaaagaga

SEQ ID NO: 67664 - RNA, 76 nt, Homo sapiens
aagaggcaacagccacgggggccccggaagcaaacgcaaggacacccaacaagcggaccgacaggcaaagaagaaa

SEQ ID NO: 67665 - RNA, 54 nt, Homo sapiens
ccggccagaagcgggcggcgcgggggagagaaccagagcagaagggaagcggga

SEQ ID NO: 67666 - RNA, 87 nt, Homo sapiens
cgaccagaaagaagagaagaagccaggggagagcacggggcagggggacaacagcccaagcccagccggggacccggggcggggagg

SEQ ID NO: 67667 - RNA, 87 nt, Homo sapiens
ccagcagagagaggaagcaggaccggcaaagacacggacccaccaagcgaagcggagcagcaacagaggagaacgccacagcccagc

SEQ ID NO: 67668 - RNA, 75 nt, Homo sapiens
aaggaccaaagagcgggacaggacggacgcggccaagaagcgagagaagaaaaacagaaaaagccaagacagaaa

SEQ ID NO: 67669 - RNA, 78 nt, Homo sapiens
cggaagagcggaaagccgcccagagcccggaccaagcaccccaccaccaaaccacggggacccaacaagccccaggac

SEQ ID NO: 67670 - RNA, 72 nt, Homo sapiens
aggaagaagggcacaagggaaaaaacccaagaagccagggcaagggagaagaaaaagcagaaaggaacagaa

SEQ ID NO: 67671 - RNA, 71 nt, Homo sapiens
gcgaccaacagccgccagagcccgcccaacgcgcggaccacaggagacccaagccccaaggggcggcaggc

SEQ ID NO: 67672 - RNA, 75 nt, Homo sapiens
gggagcgacgggcggcccaggcgcgcagcgggcgccccccgcaggccagcaacggggcggcacacaaggagcgaa

SEQ ID NO: 67673 - RNA, 74 nt, Homo sapiens
aaccggacccagacccagaggcagagccgccccagcagcaggggcgccagacaacggcaagcggagaagagcaa

SEQ ID NO: 67674 - RNA, 79 nt, Homo sapiens
ccaccgggagcgcccaacacacagacacaagccagacccaggagagcaaggcccagaaagagaaaaggggcccgagaag

SEQ ID NO: 67675 - RNA, 66 nt, Homo sapiens
aaggaacgccaagagccaccaacaggaagaggcaaccaagggcagaccgcacaagcagccccggaa

SEQ ID NO: 67676 - RNA, 85 nt, Homo sapiens
gcggcgcggggaggcagcggaaggcggcaggcgccacggccggaacgcacagcggaaggccgccacccgggccaggagccgccgc

SEQ ID NO: 67677 - RNA, 73 nt, Homo sapiens
ccccggaccagcgcaccacaccaagcacaacccccaagcgcgccgggggcccggaaagggacgcgcgcccagg

SEQ ID NO: 67678 - RNA, 76 nt, Homo sapiens
caggaagccaccaacgccacaccgacccacaggagcgcccgcggaggagcgccgggcgagaacgcggacaagcaaa

SEQ ID NO: 67679 - RNA, 74 nt, Homo sapiens
ggacgccaaaagccagacggaacgagggaagagaacccgaaccacaacggacagaaagccccgaaacaggaacc

SEQ ID NO: 67680 - RNA, 77 nt, Homo sapiens
ggcccacagcagggggcagagcaaaaagcggaaccacaagaagaaagcaacgacaagaacccacacgcgccgagccc

SEQ ID NO: 67681 - RNA, 79 nt, Homo sapiens
ggcccaccagaggagaggagcaacaccaccggacccgggcaaggacacagacagcacccaagaaaacccaggccgcgaa

SEQ ID NO: 67682 - RNA, 82 nt, Homo sapiens
aaaaagaagggagcggccgaaggagccaccaggccgggaagcccacgggaaaccagggccgggaagcacacaggaggcgcca

SEQ ID NO: 67683 - RNA, 83 nt, Homo sapiens
cagccagacaggaggaacaggaggaccgcagccagcagagacagccgcagggcacagagccggaggagccaccaacagaagca

SEQ ID NO: 67684 - RNA, 75 nt, Homo sapiens
gccgagcaaacacaacagaagggaacccccacaaagaacagaagcaaggaagcgggcaaaaccagaggaccggca

SEQ ID NO: 67685 - RNA, 82 nt, Homo sapiens
gcagcagaagagaagaagaagcaggagaacgaaacggagccagagaaggcagaaggggaaaaggagaacggaccaagaacga

SEQ ID NO: 67686 - RNA, 72 nt, Homo sapiens
agacccagccagaccagggacaaagagcaaacagacagggccgcaggccccgacagagcgaagagcgcaagg

SEQ ID NO: 67687 - RNA, 81 nt, Homo sapiens
gcaagacggggcgggagccggcagccgacggcaaagggcgggggcaaagcggagaccgacaaagaaggggcaaaccgcccg

SEQ ID NO: 67688 - RNA, 77 nt, Homo sapiens
aacacacgcaaaggagaaaggaaccgacaggagagggcagcagcggacgagcccgaggcggggcgccgcggcgggca

SEQ ID NO: 67689 - RNA, 73 nt, Homo sapiens
agacccgaagggggcccagaacagaccgcagcaaacagaaaaacagaaggacaggaccagggcacccgccccg

SEQ ID NO: 67690 - RNA, 75 nt, Homo sapiens
ggcagacacccggaaaacagccagagacacacgcccaggggcacggcaaagggaaaccgcccggcgagcgagcga

SEQ ID NO: 67691 - RNA, 77 nt, Homo sapiens
cgggcccgcagaaccccgggggcagaacaggcacaggcccacaagggcaagacgccaagagaaaaggcgagagcaca

SEQ ID NO: 67692 - RNA, 70 nt, Homo sapiens
agggccaggacggcaggaccgccagggggaggacaagccggcgaaagcggcagaagacagggaaccagag

SEQ ID NO: 67693 - RNA, 54 nt, Homo sapiens
agcgaaagccaggaggagcgcagcgaagcacccacaggaggcacccgggaagcg

SEQ ID NO: 67694 - RNA, 57 nt, Homo sapiens
aggacccaccgagaggagggagaacacaggaacaggcgcggacacacaccagaggga

SEQ ID NO: 67695 - RNA, 58 nt, Homo sapiens
accgcgggcccgggacagacacaggggaggggaggaagcgcccgggacgagaggaggg

SEQ ID NO: 67696 - RNA, 79 nt, Homo sapiens
gggaagagccggggccgggcgacaggagcagaacagaggcaggaaaggccggcccagcaaaaggaccagaagacacccc

SEQ ID NO: 67697 - RNA, 69 nt, Homo sapiens
ccacacaaacccccagaagagaggcaggcagcccgaggcccacaagcagagaagagaacacacccagaa

SEQ ID NO: 67698 - RNA, 84 nt, Homo sapiens
aagacaaagcagagggaaaggaccaccacaggaaagaaggggagcacagacagagcccagaacacaagaaaccagcggaaagga

SEQ ID NO: 67699 - RNA, 56 nt, Homo sapiens
ccagaggacccaacaccagaagacacacagggaccagccgcccggagaagacaggg

SEQ ID NO: 67700 - RNA, 77 nt, Homo sapiens
caacacaacaggaggcggaggcgaaagcggaacgagacggaaaggacggaaccgaagccggagaagagcccccaccg

SEQ ID NO: 67701 - RNA, 52 nt, Homo sapiens
cacggagcaaagacaaagaacgcccgcgccaagcgggggcagcggggacggc

SEQ ID NO: 67702 - RNA, 77 nt, Homo sapiens
gcccacggcccccagaacccagagacgggcaggcacggaaacagaagcaggggccggcagcacgaggcgggacaggg

SEQ ID NO: 67703 - RNA, 97 nt, Homo sapiens
ggaaaaccaaccagaagacgaacaaacagcaagaaagaccacaagaccaggagaagcaggcaaacagaagcacaggggcgacaacaaccggggacgg

SEQ ID NO: 67704 - RNA, 70 nt, Homo sapiens
caggggcgccagaaggggcagaaaggacccagggggaacccggagccaaccaagacgcccgcggaggggc

SEQ ID NO: 67705 - RNA, 77 nt, Homo sapiens
gcaggggacggaacaggagacccaagaaggaagcccccaaaacacaagaggacggagaagcgacgaaagaagccggg

SEQ ID NO: 67706 - RNA, 123 nt, Homo sapiens
gcccagggccccgggaacggaggaagcgagcggacccgccacacgcggcccacaacagccgaacaagcgggagccggcaggaaagcagcagagcagagcgccagagccgaacgcggccccccc

SEQ ID NO: 67707 - RNA, 75 nt, Homo sapiens
agaacaggccccgccaccagcccaggccagagagcggaaccgcgggcgccgccccgaggcacagcgcgcaccacc

SEQ ID NO: 67708 - RNA, 82 nt, Homo sapiens
gcagcagggcgagcgcgcgcggggcagccgccgcgacggcggccccagcccgacccgggaccgaaagacaacaacgcagaga

SEQ ID NO: 67709 - RNA, 75 nt, Homo sapiens
aaggagcaaggaaccccaaagaagaaaggccagcagccgagcaggggacacagaccccacagggacagaggacag

SEQ ID NO: 67710 - RNA, 76 nt, Homo sapiens
cgggcagcagcagggcgccggaccccgagagaaacggcgagaaaaccaaacaggagccgacagccggagaagggca

SEQ ID NO: 67711 - RNA, 80 nt, Homo sapiens
gcaggccgagaccaagggggcgccccaaccagcgcacgcaggagcgcagaccacaggaagggaccacagaccagcacgcc

SEQ ID NO: 67712 - RNA, 90 nt, Homo sapiens
agaggccgcagcggcaaggagagacgcgcgaggggcgccgaagcgagggacccacccagccaacaaacacccgaaggaccacacgaggac

SEQ ID NO: 67713 - RNA, 71 nt, Homo sapiens
agagaggaagaaagaacagaacagcgaaacaagagggcacaccaaagggaaccaagaagggacccaaaaag

SEQ ID NO: 67714 - RNA, 73 nt, Homo sapiens
cccccgaacggaccccgcgagcaccagagcggcgaacacgccgacaggaggcccacgcggaccggcagcgcca

SEQ ID NO: 67715 - RNA, 76 nt, Homo sapiens
gcagacacagacccacaccacgacaaccagccggggcacaggaaaaaccagaagagaaaaaacaaaggggagaggc

SEQ ID NO: 67716 - RNA, 92 nt, Homo sapiens
cgccccacagcgggccacggaacaagaaagcaagcaggaagccaagggaaaccaggaaaacgcgacccggaggggagcaacagaaagaaagc

SEQ ID NO: 67717 - RNA, 74 nt, Homo sapiens
cagcgccgccggcccggaggcaaaaaaggggacaagccacaagagaagagacaacaggaaggacaaaacggacc

SEQ ID NO: 67718 - RNA, 71 nt, Homo sapiens
agccacggcgggaagaagcaaacgaagggcaagaacaaaaacaaagggggagcgccaggagagaagagacc

SEQ ID NO: 67719 - RNA, 86 nt, Homo sapiens
aaacgaggcgccgcgggcgcggacggcgggaaccggcccggagcgagaacgcgcgccggcagacggcgggcccagacaggaggcgg

SEQ ID NO: 67720 - RNA, 77 nt, Homo sapiens
ggaaggaggagcagcagaccggacgggacgccccggacagggcacgcaaaaaaaccaagggaaaagagacaagaccg

SEQ ID NO: 67721 - RNA, 62 nt, Homo sapiens
cgggcaagcccgcgggcgcaagaaccgcggcaggcagagcagccgagaagaagccaaaaaac

SEQ ID NO: 67722 - RNA, 48 nt, Homo sapiens
ccagaagaggacgcgcaggggagcgaacgcgagcacggccccgcgcga

SEQ ID NO: 67723 - RNA, 76 nt, Homo sapiens
cggaaagcaggaccgcgacggcagcagagcagcagcgggagagaggagagcagagagcagaaacaccgaccaccca

SEQ ID NO: 67724 - RNA, 75 nt, Homo sapiens
gccgccgccgcggaaccgcggcgcagacagccaaggagacgcagaagcggggagagccagccgaagaggagccac

SEQ ID NO: 67725 - RNA, 55 nt, Homo sapiens
caaagcagaccagaaaaaacagcacaccaggaagcaaggacccgaccgcagcgca

SEQ ID NO: 67726 - RNA, 79 nt, Homo sapiens
gagagcaggggggaaaaagacccgaacggaccagcagacgggagacagaccgaaagaaagagggaccaaagaagacacg

SEQ ID NO: 67727 - RNA, 69 nt, Homo sapiens
ccggcgcgcacaagggcagagggccagagcccagaaaagacgaggacccagaagaagagccaggaaagc

SEQ ID NO: 67728 - RNA, 70 nt, Homo sapiens
aaagacacccacaaaacagaggaaaaccagcaaacgacaacagaacgaacgaagcgaagaagggacgaag

SEQ ID NO: 67729 - RNA, 71 nt, Homo sapiens
aaggaccaagaaccaggaagaacagaagagaagaaaaaaagaagaagggaagcgcacgagaacaggaccac

SEQ ID NO: 67730 - RNA, 87 nt, Homo sapiens
ggggaacccaaggcccgagaaaggcagaaaaaaacccacgcagggacccagcccacaaggaagcgaaagaccacagcaagaccacgc

SEQ ID NO: 67731 - RNA, 68 nt, Homo sapiens
aacgcaagccccaacccgcgcgacaagccaaacagcagaagcgagcaacagcagaaaagagaagagac

SEQ ID NO: 67732 - RNA, 62 nt, Homo sapiens
ccagccgcggagccgggggcagggagcaacagcgagcaacaggcaacgaaaacagacaaaac

SEQ ID NO: 67733 - RNA, 83 nt, Homo sapiens
caacaacaaccccacaaaagcggccggcggggaaaagcccgcccaccaccggaccagcaggaccccacgaaaacggacgcaac

SEQ ID NO: 67734 - RNA, 61 nt, Homo sapiens
caggggcaacaaccggacaccaacgccggccagaacagcggggccgggggggccagccacg

SEQ ID NO: 67735 - RNA, 67 nt, Homo sapiens
gccccaaaagcagccgggaaaggagccggccggcggcaaaggagccgaaagacgagaagaagaaaaa

SEQ ID NO: 67736 - RNA, 74 nt, Homo sapiens
gcgacgcaggcagaagcgagacggcaagagaaaaagggcgcacaacgcaggagaagcgcgcggaacccacaagg

SEQ ID NO: 67737 - RNA, 80 nt, Homo sapiens
gaaaccaggcgaaaggacgacacgaggggaggaggaagccaagaacgggagcgaagccacgcagcggcaccaacgaccgg

SEQ ID NO: 67738 - RNA, 42 nt, Homo sapiens
gaggaggccacaccaagccaggcaaaggcagccgagcaccac

SEQ ID NO: 67739 - RNA, 84 nt, Homo sapiens
gacgacaacgagcagccacacccagacgagcgggagaaggcgcgcgcaagcacgcgaggagaacggggagacagccaaggaaac

SEQ ID NO: 67740 - RNA, 75 nt, Homo sapiens
gcaggaaccaccaggacagacacacgcagggcggcggagggaaaaaacaaggagggccgcggccaggagaagcag

SEQ ID NO: 67741 - RNA, 74 nt, Homo sapiens
caccgacacgaaggccaaagaagggagaccagcacgagccgggcgggacgccggaaggggcacaagacacgcac

SEQ ID NO: 67742 - RNA, 70 nt, Homo sapiens
aaaaaaaagccggagaagcaaaaacgccaggacccacccagacgaaaaaaaagagaaaaacgcaagcagg

SEQ ID NO: 67743 - RNA, 72 nt, Homo sapiens
agcgaagaaggaaacagaacaaggacgaaccgaacccacaaacgagcgcgccccgggaccaaggacacgcag

SEQ ID NO: 67744 - RNA, 67 nt, Homo sapiens
ccaacagcggcgccagcaagaaagacagagcaccaggaggcacggaggccccagcccaacccagccc

SEQ ID NO: 67745 - RNA, 64 nt, Homo sapiens
cagaaggaaagagagaaccaccccccaccaaggggacccccgagaagaacagccggacacaaga

SEQ ID NO: 67746 - RNA, 71 nt, Homo sapiens
cgacgaaggccgcaggaccagcagagggagaaaacagcagagacacaggagaaagggagagcgcgagaggg

SEQ ID NO: 67747 - RNA, 80 nt, Homo sapiens
gggcccgcacgagccaaaggacacagcaacacccgaaagccgaaaagacgaggcgaggaggcgagacacccaacccaccc

SEQ ID NO: 67748 - RNA, 77 nt, Homo sapiens
ccacagcaaccccacgcaccgggcgagccccgcggccagcgccccaccgggagccagcccaaaccggggaaaagggc

SEQ ID NO: 67749 - RNA, 69 nt, Homo sapiens
ggagcgggcagcgccagaccgcgacaggcccgaaaaaaacccaggcggcccaggcagaaaagagacaca

SEQ ID NO: 67750 - RNA, 80 nt, Homo sapiens
agcggccgccggagcagcgccggagagggccacgcgcgcaaaaggacacgggaagcccagggcagaacacagggggagga

SEQ ID NO: 67751 - RNA, 73 nt, Homo sapiens
agaacgcaacaccaaggcacaccaccccagacacaccacagagcaacaagaggaaaccagaccacacgcggag

SEQ ID NO: 67752 - RNA, 73 nt, Homo sapiens
aaaaccggccacaaaaccagagcggagacacccaggaggcagaagccagaacaggaggcccggacccccagca

SEQ ID NO: 67753 - RNA, 76 nt, Homo sapiens
ggggaaacagcagagaccccagacgccaccacaacccccagacgcaagccaagcggcaggggcgagcggaccagcg

SEQ ID NO: 67754 - RNA, 62 nt, Homo sapiens
ccgcaacgcccgagcccggacagggaagccacagccaaaaaggagcggaagcacaaagccga

SEQ ID NO: 67755 - RNA, 79 nt, Homo sapiens
aagcaggcgggacaaaaaccccaggagcgagcaggcggaccagccccaccccaggcgaccacagcacacaagccgcgac

SEQ ID NO: 67756 - RNA, 77 nt, Homo sapiens
ggggaaacagagaaagaaggcggccaggccaaccgaagaaacccgcggacaaaagcaacagaaacgccgcacaccag

SEQ ID NO: 67757 - RNA, 75 nt, Homo sapiens
gaggggcgaaaccggacaaagaaacagggcgagcgaggggaaacccccgaagccccaaagacaccgggaagggca

SEQ ID NO: 67758 - RNA, 73 nt, Homo sapiens
ccccgccagcaaggcggcgcgcccaggagacaacaggcacaaagagagaaggaacacccacagggcagacaga

SEQ ID NO: 67759 - RNA, 73 nt, Homo sapiens
gcagaaggggggccacccccgggcgccaggggggacacaaccggggaaaaaaccggccacagacccgaagacc

SEQ ID NO: 67760 - RNA, 78 nt, Homo sapiens
acgaaccagagagggacgaggaaagcacgaagggagcccagcgacacaccagcagcagccaaagaccaaccagccccg

SEQ ID NO: 67761 - RNA, 75 nt, Homo sapiens
ggacaagcgaccccaggcccaggcgagaccaggcaggcggcaggcaacaccaggggcaacaaggacccagacaag

SEQ ID NO: 67762 - RNA, 71 nt, Homo sapiens
ggaacacaacccaccgacaggccaaacgcagaagagcagcacaggaagaacaacacacgcaggagaaaccc

SEQ ID NO: 67763 - RNA, 82 nt, Homo sapiens
cggcaggccaccgccagcgcagcaagcaacccccggccaccgaaggggggccccggcggcggcagaagcggccggcgccggc

SEQ ID NO: 67764 - RNA, 77 nt, Homo sapiens
ggcccaacgaggcgagggcgccccaggagacgcaggaggcaagacgcgaagccaggcccaagacaccagcgagcccg

SEQ ID NO: 67765 - RNA, 78 nt, Homo sapiens
ccggaggccacgcccccccccaccgagcggcccgccccaacccgcgcgccaggacccaaagacaggaccacgcaccag

SEQ ID NO: 67766 - RNA, 75 nt, Homo sapiens
ccgaccgcaacagaacggacccgggaagacaggcggcaccgaccagaacccagcagggggagcgaacaagaagag

SEQ ID NO: 67767 - RNA, 73 nt, Homo sapiens
gccccgacgccgagggcccgcaaggccacagcacggggcacacaggaaaagaaccaaaaggcaacagcacacg

SEQ ID NO: 67768 - RNA, 74 nt, Homo sapiens
ccgcccccccccggcaaacagcggcggagaaaccaccacaaacacgaggccagcaacgaccaacaagacagacc

SEQ ID NO: 67769 - RNA, 69 nt, Homo sapiens
caggaccagcgcagcgcgggccgcaaggccaggcgcgcagaggcacccaacggcacagaccccacacac

SEQ ID NO: 67770 - RNA, 98 nt, Homo sapiens
cacccgagcggcgccagcgcgcgccgccagccagagggccgagagccgcggggagaaggccacacccagggaggagccgaggcaacgacacacgccag

SEQ ID NO: 67771 - RNA, 76 nt, Homo sapiens
ggaaggaaccagccaaaaagcaaggaagccgagccacggagcacccaaagagaccacccgcagcgagcagcggaaa

SEQ ID NO: 67772 - RNA, 69 nt, Homo sapiens
ccaagaggaaagggggccagcaacccagacgcccacaggacaagccccccaccagaaagagcagagccg

SEQ ID NO: 67773 - RNA, 72 nt, Homo sapiens
aagccgggagagaaacacagagccaaagagaagaaccggagaggagccaacccaaggggggaaagcaagcaa

SEQ ID NO: 67774 - RNA, 74 nt, Homo sapiens
ggcacgcccacccagaagagcaggaaaggagggcaccaaccacaaaggaggcaaggaggccacggggccgaaga

SEQ ID NO: 67775 - RNA, 67 nt, Homo sapiens
aagggaaccagcgcacggcagcgagccaccagagaccgggcggggggcgcgccgccaccaacccaca

SEQ ID NO: 67776 - RNA, 73 nt, Homo sapiens
caaccgaaaacgaacccaaaggagagcccgacagaagccaaaacaggaaccgaaaggccaagcaaccagaaag

SEQ ID NO: 67777 - RNA, 114 nt, Homo sapiens
cgcaggacagaaagaccaacagaaacgaggacaaggaccgccgggcaagacccaaggagcacagcaagcgggagcaggcagaccaaaggaacagaagccagggccggaaaacca

SEQ ID NO: 67778 - RNA, 70 nt, Homo sapiens
accaaaaacaggcccggcgagccccgcaggaggcacacgccacgcaccacccggacgaggcgcgcagaca

SEQ ID NO: 67779 - RNA, 73 nt, Homo sapiens
cggggaaggccggggcgcccggcgccggccgagaaggcagaggcgcccggccagaagaacagaaacgaccaac

SEQ ID NO: 67780 - RNA, 69 nt, Homo sapiens
acgacacacacacggagaagggccagggcaaaggcacacaaagcaggacgcaagagacaaggcggggcg

SEQ ID NO: 67781 - RNA, 84 nt, Homo sapiens
cacgacgccgggaccgggaccgccgccgccgccgccaccagggcgcggggcgcgggggcccaggccggaggaaccaccgagcaa

SEQ ID NO: 67782 - RNA, 76 nt, Homo sapiens
aacacaaggcaggagcgagaagagagagcagagacagccgcggacaaccagcaacacacaggggcaagaagagcgg

SEQ ID NO: 67783 - RNA, 73 nt, Homo sapiens
cggccacccggcccccggcaccaggccgaaaacgaagcagaggaacaacaagcggcaccgacgaagccgcaac

SEQ ID NO: 67784 - RNA, 70 nt, Homo sapiens
gacgccagccgcacaaaccacgccgagaagcagacaagcagcaccgcagcggagggagagaaacacggcg

SEQ ID NO: 67785 - RNA, 76 nt, Homo sapiens
ggacgaggagaagcgccgcccggcgggagaagcgcagagccgcagccaggaaggacgaaggaccggggacaccaca

SEQ ID NO: 67786 - RNA, 70 nt, Homo sapiens
cggagaacagggagaccagccaccacaagcccaaaggaccaaacgacgccacaggccggagagaagccag

SEQ ID NO: 67787 - RNA, 60 nt, Homo sapiens
gcaaaccaggacggcggagacagcgcagaccccaagagcacccccaagggacaaaaggcc

SEQ ID NO: 67788 - RNA, 65 nt, Homo sapiens
acgaccccagccaaggagacacacacaggggcgcaagacagggcagagcggcgggaaaccaccaa

SEQ ID NO: 67789 - RNA, 34 nt, Homo sapiens
cccgcaccagaagcaaaggcggaggcaaggagac

SEQ ID NO: 67790 - RNA, 71 nt, Homo sapiens
agacacacaagaggacagggagaaagggccccaagagcgcaaaaaccagacaccccacaccaccacccaga

SEQ ID NO: 67791 - RNA, 76 nt, Homo sapiens
gcaaaagacccaccccggaagaccaaagagaagaggcaaaacaaacacagcgagaaacacaccaacaacagcaaag

SEQ ID NO: 67792 - RNA, 78 nt, Homo sapiens
ccccccgccccacggggcgggcggccaaaccaaacaggaagcacccaccagccaagagcaacagaacagcaagaggaa

SEQ ID NO: 67793 - RNA, 87 nt, Homo sapiens
cgaggacccaagaagcagaaggagaacaagccaggaaaaccccgaaaacgcaagaagcggcgggagcagcggaagacaccaaggcca

SEQ ID NO: 67794 - RNA, 66 nt, Homo sapiens
acgcccaagccacagccaggagccccagaacgggggccccaaccgaccgagagaagggaccaggaa

SEQ ID NO: 67795 - RNA, 105 nt, Homo sapiens
aagaagcaggaaaaggaaacagaaaaggaaccgaagaagcaaagcgacacaaaggggcaaccgacagagcgacaccagccccagaaagcacaaagaaaacacaac

SEQ ID NO: 67796 - RNA, 86 nt, Homo sapiens
cgccccgcgcccgcagcgcgcccaacgcaccccggccagcccgccacacgggcacgggaagaaaacgccagagaagcagagcagcc

SEQ ID NO: 67797 - RNA, 68 nt, Homo sapiens
cagaacacacaccccaaagggaaacagaagacagccgaaccaagggcgacaaccagagacaagcaggc

SEQ ID NO: 67798 - RNA, 69 nt, Homo sapiens
gccaccagcacggaccaggaggcgagcaacagcgccacaagaaagcagcgccggacgagcagggaaaca

SEQ ID NO: 67799 - RNA, 76 nt, Homo sapiens
gcgcgccaccagccagaaagaacagacgccccaccaggccagcggggcgcagagagaacccgggcccaggcgacga

SEQ ID NO: 67800 - RNA, 83 nt, Homo sapiens
cccacagcagcaccgccccagaaacaaggcccgccggagagggaacagcccgacggcccagccacccccaggaccccagggcc

SEQ ID NO: 67801 - RNA, 62 nt, Homo sapiens
gcgggccgaggccgggggcgggccccaggagaccacaagggcggagggcccagaacgcggcc

SEQ ID NO: 67802 - RNA, 77 nt, Homo sapiens
cccacacccaccaacaacaccacaaaaccacagccaagcagagagacgcaggaaaaccgcagacgaagaagcaggag

SEQ ID NO: 67803 - RNA, 74 nt, Homo sapiens
cagccccgagaggggaacaggaccagcacggaggcaaacagaagcccacccccaacggggcaaccagggagaga

SEQ ID NO: 67804 - RNA, 81 nt, Homo sapiens
gcagcgagcggcggaaccccgcggcgggagcgcggcggggccgcagaggcacacacccgggccgagcgaccagagcccaga

SEQ ID NO: 67805 - RNA, 61 nt, Homo sapiens
cggcggcaccgacccgcggcccccgaccgcccagacaacggcaagcggagaagagcaaggc

SEQ ID NO: 67806 - RNA, 78 nt, Homo sapiens
gcgccaggaccgagacaacacggggcaagcaagaacagaccgccacaccagaaagagaagggacagcacagaaggccg

SEQ ID NO: 67807 - RNA, 81 nt, Homo sapiens
cacgagaagaagcagcaacgcagcgccagcggccaaccagacgggggcagacggaaagcacaaaccacaaaagaaaacgaa

SEQ ID NO: 67808 - RNA, 64 nt, Homo sapiens
gcgccaagccgggggcacacagagaaggagacccaggggcgggaacgacccaccggaaacgaac

SEQ ID NO: 67809 - RNA, 68 nt, Homo sapiens
accgagcacaagaagaaacagaaaacaggaagaggcagagaagagagaccaacccgagaggccgacag

SEQ ID NO: 67810 - RNA, 64 nt, Homo sapiens
gacacgcgggccgaccccagagaggcgcggacaggcaaaagcagaccggaaaacccaccggcaa

SEQ ID NO: 67811 - RNA, 65 nt, Homo sapiens
ggagagcacccaacacaccgagacaaccaagcaagggccagcagaaaccgacagaaaagcgcaca

SEQ ID NO: 67812 - RNA, 74 nt, Homo sapiens
caaagaaaaccgggcccgccgcgaccacggcagggggcggggcggccgggcgccgggggagcacgcaccacacg

SEQ ID NO: 67813 - RNA, 74 nt, Homo sapiens
ggggaagggcaggccgggggcggccagaggcagagccaacacccgaagcgaagggcggacagacccagagcagc

SEQ ID NO: 67814 - RNA, 74 nt, Homo sapiens
ccccgggcccggcccggccgcggcccccgccgcggcacgaccccacaggacgaaagagggccccacgcccaaac

SEQ ID NO: 67815 - RNA, 81 nt, Homo sapiens
gaccgacacccaagacaagacagcgcaaggcagggacacggaaagaacaagagaaaaaaccaaaacaagggaggcaaaaaa

SEQ ID NO: 67816 - RNA, 75 nt, Homo sapiens
agagcacgaaccagagcaagcagcaggcggcgccggcgaaagcaacgaagggacgccagaacaagagaaggagag

SEQ ID NO: 67817 - RNA, 78 nt, Homo sapiens
cggggggggcccggaaccgagccccgacaggcagacgacgcgccggagagcagccaagaaagccacagaaagacaacc

SEQ ID NO: 67818 - RNA, 70 nt, Homo sapiens
gaggcgggacgcgaacacagagggaagagaaagcaaacgagcagggcaagaggaccacccgcacccaggg

SEQ ID NO: 67819 - RNA, 72 nt, Homo sapiens
cgggagaggacaagaccacgagccagagcccaaaaggcagagcgaggagagaagaaggagggaaagccaaac

SEQ ID NO: 67820 - RNA, 68 nt, Homo sapiens
gcagcacagacaggaccacagggaccagcaaaaccacaggcaaccccacgacccaagcagacaaacag

SEQ ID NO: 67821 - RNA, 67 nt, Homo sapiens
cccaaccaagaaacaacacgcgagcacagcgaaaaaaaccccgaagaagaggcacaagaccggcagg

SEQ ID NO: 67822 - RNA, 53 nt, Homo sapiens
ccacggcccgacacaccacggcgcggggggggagccaccgcaagcagggcggc

SEQ ID NO: 67823 - RNA, 80 nt, Homo sapiens
cagcacaaaccgccacacaaaagcggacaagcgaagaacaccggaaacgccaggccacaagggagcaaacgaaaagccac

SEQ ID NO: 67824 - RNA, 43 nt, Homo sapiens
ggaaagaacgacgccagggaggccccgggaccaaggacacgca

SEQ ID NO: 67825 - RNA, 80 nt, Homo sapiens
ccaaggagggcaaaggacagagccaacgcgaagcggccggagggagagaagagaagagccccgaggcgccaagaaaacac

SEQ ID NO: 67826 - RNA, 63 nt, Homo sapiens
cgcggggccccaggacgcaggaccgcggcggccgcagggaggaacgggcgcaccacgccaccc

SEQ ID NO: 67827 - RNA, 87 nt, Homo sapiens
cagaggacacgaggcggcgggcggagacaggaccgcggcgagcaagcaacagcgaagaagaggcagcaaaccccgagccgagaagcc

SEQ ID NO: 67828 - RNA, 82 nt, Homo sapiens
cggcggagggcggcagcaggaggaggggccaacaagacggggagccgagagcgccccaggcccccacaacggcgccggggaa

SEQ ID NO: 67829 - RNA, 84 nt, Homo sapiens
cgaaaaggaggaaaagaagccagaccgaggacggacggacaaagccaagcaaaccagaggccccacagcaggcccaaacacccc

SEQ ID NO: 67830 - RNA, 70 nt, Homo sapiens
gagggacaacaaggaggaggccagaaagagaaccggccgagcaccagcccggcgggagagaccccgaggg

SEQ ID NO: 67831 - RNA, 76 nt, Homo sapiens
gaccgaggggacgccgcccgccgcccgccgcaggccacccgggaacggaggaggggcgggccaaaggagaaacaag

SEQ ID NO: 67832 - RNA, 82 nt, Homo sapiens
aaccgccacgccagcacgccaacccggacggacaacaccggggagcgcggaggagccacgggacgaagacggaaacagggga

SEQ ID NO: 67833 - RNA, 75 nt, Homo sapiens
gggaaagccacgcggaaaggagccccgggaacgcaagaaggcgcggccgaacccagcgagaaaccaggaaccacc

SEQ ID NO: 67834 - RNA, 76 nt, Homo sapiens
aagaaggggccccccccggggccgcccgcacagaagaagaaccccaccgagggccaaacagcagagggggaagcag

SEQ ID NO: 67835 - RNA, 66 nt, Homo sapiens
aggaaagcaccagcgggaaaccagagaggagggagcgaggaaccaccggacgaagacagcaaggag

SEQ ID NO: 67836 - RNA, 59 nt, Homo sapiens
cagaaagaaaggccaaagcagcagaaagaagcggcacggaaggaaacggcccagcagac

SEQ ID NO: 67837 - RNA, 74 nt, Homo sapiens
accggacgccgagggcgcaagacaggccagggcagaaaagaggaaaaaaggacaggcaccgccccaaagagcga

SEQ ID NO: 67838 - RNA, 80 nt, Homo sapiens
gggaccggccagcggacacagggcaagagagagaagaagccggcagcccggcccaggccgagaaaaaagagacagacggc

SEQ ID NO: 67839 - RNA, 85 nt, Homo sapiens
agcgcagccgcagccgccccgaagagggggacacgacccggagcacccgaccccgaggaccagccaacgcaggcggagcacacgg

SEQ ID NO: 67840 - RNA, 60 nt, Homo sapiens
gcgacgccggaacaacgggaaagccgcacacccaccaggggcccgggagagggcccaccc

SEQ ID NO: 67841 - RNA, 59 nt, Homo sapiens
gcccggagagcgggacacagaccacacgaaggggcagaagagcacaagacggaagagag

SEQ ID NO: 67842 - RNA, 68 nt, Homo sapiens
aggaccaagaaccagggcaccgagggcggccgagcccggaccacgggcagccgcccaccgccaccagg

SEQ ID NO: 67843 - RNA, 69 nt, Homo sapiens
gcagggagaagaccgaggcaccaaggaaacccgacggaaaagaacagagcagcaccgggaccgccacaa

SEQ ID NO: 67844 - RNA, 60 nt, Homo sapiens
gcacagccacaccgcaccgcaggccgccccgaccgccgaacaagggccaccgcaccaggc

SEQ ID NO: 67845 - RNA, 61 nt, Homo sapiens
acaccccaacaaacaccagcgcgggccccccaggccacccaggaccagcggcacacccccc

SEQ ID NO: 67846 - RNA, 90 nt, Homo sapiens
gcggcggcggcggcggcggcggcggcggcggcggcgcccgggagccggagcccgcggcgccacgccccccccgcgcaccccgccccggcg

SEQ ID NO: 67847 - RNA, 71 nt, Homo sapiens
ggaaccaaaaccacaacccacagcgagacaccagggagccaacagaagggccaggccaaacaaggcaccca

SEQ ID NO: 67848 - RNA, 59 nt, Homo sapiens
gccccagcggcagacggaaacgacagaagcagaggagcaccccccggcccagaaccaaa

SEQ ID NO: 67849 - RNA, 79 nt, Homo sapiens
cgccggaacacccggaagccgagaaagagaaggagggggcagagcacggcaggcagaaggggccaacccgggggaacgc

SEQ ID NO: 67850 - RNA, 83 nt, Homo sapiens
ggaacagccagcaaaggcaggggaggaagccacccgaggaccaagcacgcacagcagcaacggcagagagacacgggaaacgc

SEQ ID NO: 67851 - RNA, 64 nt, Homo sapiens
gaaaaccggcacccagcagcggacaccaccaaaacccggacgaggaaggcagccaggagaaagg

SEQ ID NO: 67852 - RNA, 75 nt, Homo sapiens
ccagaaggcaccagagagaggccgaacggagcagacaaagacccaacagaggaagccgcaagaaacgggacgaca

SEQ ID NO: 67853 - RNA, 56 nt, Homo sapiens
aaacaaaagcaacaaagaggagccaggacaaaaccaggcagaaccaacacgaaccc

SEQ ID NO: 67854 - RNA, 67 nt, Homo sapiens
acaccagaccacagaagaaagggccggaagcagaacggcagagaaagaagaaaggaaagagccaagg

SEQ ID NO: 67855 - RNA, 55 nt, Homo sapiens
cggagcaagagaacgcaagagacgagcacgggcagagacagccacaaaccagagg

SEQ ID NO: 67856 - RNA, 61 nt, Homo sapiens
ccaggcccaacgaagagacgacacaaggagacgaggggaagaggagaaacggccaacagac

SEQ ID NO: 67857 - RNA, 70 nt, Homo sapiens
ccgccccacacgcagaaaagggagagaaaaacgcaacaacgagcgacaaagcaaaaaaagaagcaaacac

SEQ ID NO: 67858 - RNA, 79 nt, Homo sapiens
ggggggggacaggaaagggcaacccacccagacagaaagagacgaaaccagacagagggcaagacagagaccggcgcaa

SEQ ID NO: 67859 - RNA, 87 nt, Homo sapiens
gcaccacaccagcaggcagccgggagccgggcccgggcacggccagcaccccgagaaggccaagagaggccaacagaggaacaaggc

SEQ ID NO: 67860 - RNA, 74 nt, Homo sapiens
cggacaggaggcggccacacaggagacaggcgcggccccggcaacgcgccaagaccccccgcccgaaagccaga

SEQ ID NO: 67861 - RNA, 68 nt, Homo sapiens
cgccagcgcgagacacaagcacacccccagcgcacccaaccagaccggcaccaggcggaaccgcgaac

SEQ ID NO: 67862 - RNA, 74 nt, Homo sapiens
ccaggaggcgggacaccagcacaagaacccacgcagaggcagacaagaagaagaggagcggagaaggcccagcg

SEQ ID NO: 67863 - RNA, 58 nt, Homo sapiens
acgacagccagagagaccaggacggacagcaccagagaacagcagccaagaggccccc

SEQ ID NO: 67864 - RNA, 81 nt, Homo sapiens
cggagccgccaagaagcgagacgaagaagaggccgcacagaagccaggggacacggaaagcacaaggagaaaaaaggccag

SEQ ID NO: 67865 - RNA, 57 nt, Homo sapiens
cggcccacaggggggggcaaacccgagagaacgggccagccaggaaagcgggagcgc

SEQ ID NO: 67866 - RNA, 51 nt, Homo sapiens
gaggcaaaggcagggaccgacccgcccaaggggggagcgaagaacagagcc

SEQ ID NO: 67867 - RNA, 79 nt, Homo sapiens
acgggggagacagcggacccagggccccggggggagaagccgcaccaggcgccgggcggcgacccccacgcgacaccgc

SEQ ID NO: 67868 - RNA, 84 nt, Homo sapiens
gagcgcccgcgccagccgcgcacaacggggcaccgagccgaagggacaagcgaacaggagcgaggagaaaacaagcggacaaag

SEQ ID NO: 67869 - RNA, 72 nt, Homo sapiens
cacgggagaaaaaggaaaacgcggaaaaccgacacaacaggaaagagaaaggagaccacaagaccccgcgcc

SEQ ID NO: 67870 - RNA, 78 nt, Homo sapiens
gggacgcagcccggcggcagcagaacaacaagaaggagaaagacacaacgacagaagaaaaaacacaagaaaagacaa

SEQ ID NO: 67871 - RNA, 37 nt, Homo sapiens
agagagagacacggaggcaaacaccagcaacacccgg

SEQ ID NO: 67872 - RNA, 91 nt, Homo sapiens
cgcggcgggacgcgagcggcgagccggagcgcggagcccggccccgcaccaggaggaggacgacagcacggccgagaaacagacaacccac

SEQ ID NO: 67873 - RNA, 49 nt, Homo sapiens
cgccacaaccacacccgagggcggccaccaagagcacaacacgaaagga

SEQ ID NO: 67874 - RNA, 74 nt, Homo sapiens
ggaccggggcagaccaaacggcaagcgagcggcacccccacgggaacccaaaaagacgcccgccagagcacgag

SEQ ID NO: 67875 - RNA, 75 nt, Homo sapiens
gcgacgagaccacggacacggcagcccgaaggcgggcgaaggagcgacgaaaggaagaagccaggggcgcggggc

SEQ ID NO: 67876 - RNA, 62 nt, Homo sapiens
cggaaggcagcgcccagcagcgcagggggccgacgacgagccccgcgaggagcgcagcggag

SEQ ID NO: 67877 - RNA, 86 nt, Homo sapiens
aagacacggccaagcccagcccaagaaagaaagaaggcaaacacgcagggaaggggaagacggcagcgggccggaggcccaaaaga

SEQ ID NO: 67878 - RNA, 53 nt, Homo sapiens
gcaccagacacgggagaaaggcgagcaggagcgccacgcacaggagacccacc

SEQ ID NO: 67879 - RNA, 77 nt, Homo sapiens
gagagagccaagagagcgaaagaagcaaaacggaccaaggggccaggcgaagagaaccgcacgcaccaaccccgcag

SEQ ID NO: 67880 - RNA, 68 nt, Homo sapiens
ccaaaccgcagcgcccgaaaggagaaaggaggacccgggaagacagagacgggcaacggaaagcgaac

SEQ ID NO: 67881 - RNA, 81 nt, Homo sapiens
caggacagcgcccaccgccaccagcccggaccaccaggccaagaaccgcagggacagaaacagggggggcgagcaccaaag

SEQ ID NO: 67882 - RNA, 77 nt, Homo sapiens
ggagcccgcagaccgcagaaggccggagacaccagcagaagcacccaagccagggagcggcaaaagcaaaagggcca

SEQ ID NO: 67883 - RNA, 88 nt, Homo sapiens
gaagaggggaacaggacagaagaggaggaccaccggagcgaggaaccggaccccggcagcagaaccggcccaagagaaacccagacgc

SEQ ID NO: 67884 - RNA, 81 nt, Homo sapiens
acaccagggcggcccgcgccggcccgaggcccgagaacaccgccgcccgcagccaccgccaggcacacgccacaggccaac

SEQ ID NO: 67885 - RNA, 64 nt, Homo sapiens
accgccagacggccagaaagccgccagagcggggcacggagcggggccagggcaggggcccgga

SEQ ID NO: 67886 - RNA, 89 nt, Homo sapiens
ggagaaccagaccggcgacccgcgacgccgagcacccaggcgacgcccaccaagcgggcgacgcacgaggcacacaggaaggaggggag

SEQ ID NO: 67887 - RNA, 72 nt, Homo sapiens
gcagcagccacgacacccaagccgcacagcagcaccaccccaaaccagacgaaccagcggagcaaggagaag

SEQ ID NO: 67888 - RNA, 76 nt, Homo sapiens
gaagccaaagagcacaaagaacaccaagagagcaagaaaagggaggaacacacgaggaccgcacggaccggccgcc

SEQ ID NO: 67889 - RNA, 60 nt, Homo sapiens
aaccggacagccaagcaacagcccagcaaggggaaagggagcagcaccggccacacccac

SEQ ID NO: 67890 - RNA, 71 nt, Homo sapiens
gaaaaggaagagagaccgacacccaagacaagacagcgcaaggcagccacagcacggacccaaacacggca

SEQ ID NO: 67891 - RNA, 60 nt, Homo sapiens
gagcccagcaagcaagaggagcaggcagcggaggaagaggaccccaaagcaacaccagag

SEQ ID NO: 67892 - RNA, 67 nt, Homo sapiens
cgcaccgcccgccgcccgccgcgcgccgccgggccggcgagaagcggagacggcaggaaagagcacg

SEQ ID NO: 67893 - RNA, 92 nt, Homo sapiens
cgacgcaccgcaggcagacaaaagggccaaagaagggagagagggcaggacccgaggcgccagcagcagcaagaccgggggaccaggcgaac

SEQ ID NO: 67894 - RNA, 85 nt, Homo sapiens
aggaagccggacaaacggccccaagaagagcgaaagccagggggcgaaacaaaacaaaaaggagcaaaaggagaaggcccccagg

SEQ ID NO: 67895 - RNA, 80 nt, Homo sapiens
caaccaccacacgacccagggagacaccgaaaagaagagaaaccagcgcggggaagaaggaagggacgcagaaccgcaga

SEQ ID NO: 67896 - RNA, 90 nt, Homo sapiens
cgagcggccgcgagcagagccgcccagcccgccagcgcgccgggacgccggaaccaaaaagaagccccagagccggggccaggagcccca

SEQ ID NO: 67897 - RNA, 79 nt, Homo sapiens
agccggcgcagcagcaagcccacggaggacccccgcccgaaccgagggaacagggcgccggccgagcccgggaaaacga

SEQ ID NO: 67898 - RNA, 62 nt, Homo sapiens
gacgggggggcggcccggccccgcaggcaccgccacaccaaagaagaggagacaagaagagc

SEQ ID NO: 67899 - RNA, 61 nt, Homo sapiens
ggggcccggagagggggaagggcccaaagccagaaggacaaaccggcgaccacacacgggg

SEQ ID NO: 67900 - RNA, 38 nt, Homo sapiens
acagccaggccgcagagggagggaagccagcagcgagg

SEQ ID NO: 67901 - RNA, 75 nt, Homo sapiens
cgcccggcggagccacgcccgccaacccaagcggggaggccagcccagagaaacagagggcaaagaggaccaaag

SEQ ID NO: 67902 - RNA, 68 nt, Homo sapiens
agcgccaccaccccgcgccagggagcgccgcggcggagcgggagggaaacaagacaaaggaaaagcgg

SEQ ID NO: 67903 - RNA, 56 nt, Homo sapiens
gccaccggccccacacgaccgcaaggccagcagagcccaagggcgccagccaccac

SEQ ID NO: 67904 - RNA, 59 nt, Homo sapiens
aaaggaagaaaagcaggcagagagcgggagcaacagcgagcaacaggcaacgaaaacag

SEQ ID NO: 67905 - RNA, 76 nt, Homo sapiens
acggcagaggagcgaaggccacgagggcacacacggaaagaaccgcgaccaaggcccacggccggcaaaggcagca

SEQ ID NO: 67906 - RNA, 84 nt, Homo sapiens
aaggcggcgcccgaagaaggcaagagcagaggccccagaccgccaagaggcacaggcccgggcaggacggggcggggaccagga

SEQ ID NO: 67907 - RNA, 74 nt, Homo sapiens
aacagcgcagccaggaacaggacgaagaccagcgccagggaaagaaggccccacacaggaaggaggaggaccac

SEQ ID NO: 67908 - RNA, 36 nt, Homo sapiens
cagaaacaccaggaagggagaacgaaagcccgggaa

SEQ ID NO: 67909 - RNA, 48 nt, Homo sapiens
cgccgacgcacgagaaggaagagaacaagagagggggagaacgagcag

SEQ ID NO: 67910 - RNA, 72 nt, Homo sapiens
cccccccaggacaacccagaggcaacaaaggcgagaagagcacaacacagaagaaacggcaagcaaggacga

SEQ ID NO: 67911 - RNA, 76 nt, Homo sapiens
caggacaccgcaagaaggcgaacacaaggagacgacggccgcaaggagagaagaacccgaacaagggaggggccaa

SEQ ID NO: 67912 - RNA, 66 nt, Homo sapiens
acccgacccaccagcgacggaaagcccaacccagcaagcagagccggcgggcaaagcgacgaagac

SEQ ID NO: 67913 - RNA, 77 nt, Homo sapiens
cgcccgcccgggacccgcggccccgccgcgggcggagaacggaaaagcaccaggaagcagagaggaccgcagaaggg

SEQ ID NO: 67914 - RNA, 77 nt, Homo sapiens
cccagggcagcagcagcagcccgccacccaacagaccggagcgaaccaccccaaacagacaggaggacacccaggca

SEQ ID NO: 67915 - RNA, 79 nt, Homo sapiens
aaagagaagggaaccgaaccaaggaaggcccgccgaaggagaagggcaggaagacccagcaggccggcccagagcaggc

SEQ ID NO: 67916 - RNA, 78 nt, Homo sapiens
ggaggcccacggcggcgaccagggggagcgaagccagaccaccaacagcaaacagcgccccacgccccccagggagga

SEQ ID NO: 67917 - RNA, 52 nt, Homo sapiens
cccgaaagcgggaacaggggcagccaccagggaccaaccaccccggacccac

SEQ ID NO: 67918 - RNA, 71 nt, Homo sapiens
acaaggaaccaagacagcgccacagacagaaaagggcgggaggccaggcagcacgcagacaagaagcgcag

SEQ ID NO: 67919 - RNA, 88 nt, Homo sapiens
aaaacgagggagaaggacagaggaaacaggaaacagacacgcgagccaaggggaaaccgcacgcaacagccaagcacagcgccacggg

SEQ ID NO: 67920 - RNA, 69 nt, Homo sapiens
aggcgggcgggccggcgagcgcagcgcgaccgggaggcccaggggccaaggcgacagcaaaacggagaa

SEQ ID NO: 67921 - RNA, 81 nt, Homo sapiens
ggcgccgggacggggccccagagacgcggcgcgcccgcccgcagcgcccaagcaccgcggcgagccgcacagggcaacaca

SEQ ID NO: 67922 - RNA, 75 nt, Homo sapiens
aagcacaaagcaccagcaaagacaacagaggaacaagcagaaagcacgaacaacgagaacaagacacgagcaaac

SEQ ID NO: 67923 - RNA, 52 nt, Homo sapiens
agcgccggggcggcccaggcgagcggggcccccaccggcccccccacagccg

SEQ ID NO: 67924 - RNA, 73 nt, Homo sapiens
caaggccgcggggggagaccccaccaccgggccgcaggggcgcggcacaggagagggggccaaaggcgcgagg

SEQ ID NO: 67925 - RNA, 67 nt, Homo sapiens
agcacagcgcagaaaacgaccacagacgccggacacaagagggcaagaaaggcgcgacgggccgaaa

SEQ ID NO: 67926 - RNA, 54 nt, Homo sapiens
agaaggcccggacacagcaaaccgggccacagaagcccacccagagagagaaga

SEQ ID NO: 67927 - RNA, 74 nt, Homo sapiens
cagcaggaccgcaacccgaagcacccagggcggagccaggacagaccagagagagaaagggcacgaacaagaaa

SEQ ID NO: 67928 - RNA, 80 nt, Homo sapiens
gcccaccacccggaaggaagggcggcacggccccaccacagaggggaggagacgggacacgggacacaaggcggcaggca

SEQ ID NO: 67929 - RNA, 76 nt, Homo sapiens
caccaacccagcgaaggaagacacccacaccccacgaaccacccagacagagaccagcccaggcccacaggggccc

SEQ ID NO: 67930 - RNA, 81 nt, Homo sapiens
gacacaagaagaccgagcaaagagaccccggaacggcaccggagcagagcgccaccagacagaggagcccggaggaggcag

SEQ ID NO: 67931 - RNA, 80 nt, Homo sapiens
caccggccccacgcacgacgagagggacagcacgaaaacgcgcgagagaacagagagaaaacaagggcagaagcagggag

SEQ ID NO: 67932 - RNA, 66 nt, Homo sapiens
cccggccacaggaacaagaaccagggagaagccgcccgaacaccagaagacgaccccgacgcaggc

SEQ ID NO: 67933 - RNA, 77 nt, Homo sapiens
aagaccaaaaaccccccagagacggaggacaccgagagccagcgaaggacaacaaagagacaaagacgaagaagccc

SEQ ID NO: 67934 - RNA, 83 nt, Homo sapiens
gaagaggaggaccaccggagcgaggaaccggaccccggcagcgccgacgcccgccgcggccggggaacaggccacagccagga

SEQ ID NO: 67935 - RNA, 85 nt, Homo sapiens
gcacagcaggcaacgaagcgggaaggaaagcgggggcgagaacgacagggcgccaaaaccgccagaccacagaaggggagccgag

SEQ ID NO: 67936 - RNA, 86 nt, Homo sapiens
accagacgccagcgggacgaggaccgagaccgcggccgggaccgaggcccgggaccgggagcccgggaccgggagccggggggcca

SEQ ID NO: 67937 - RNA, 69 nt, Homo sapiens
ggaggggcccaccagcagggcacacaggaaggaacaggaggaaaccacagaggacaaacggacaccagg

SEQ ID NO: 67938 - RNA, 72 nt, Homo sapiens
ggcaagacgcagccaaagaggccaggcaggcacagaacgaaccaaaaaggaaaggacccacaaagacagaaa

SEQ ID NO: 67939 - RNA, 67 nt, Homo sapiens
gagacaccaaagaagagaaagacaaggagaccaggaagggaaagccccaggccagagcacggccggc

SEQ ID NO: 67940 - RNA, 78 nt, Homo sapiens
ggccgccagccgggagaagacaggacgcaaggagccgacaaggcgcggagacacaagcaggcacgggcacacacaccc

SEQ ID NO: 67941 - RNA, 69 nt, Homo sapiens
agaggcgaccgccagacggagcacacggacagcccgggcccgccggccacaccacacgcccccgccgcc

SEQ ID NO: 67942 - RNA, 76 nt, Homo sapiens
cgacagcagccgcaccgcgcgccagccaccaggagagaacgccgcgccgcgcgacaacggcccggcaggcaaggcc

SEQ ID NO: 67943 - RNA, 78 nt, Homo sapiens
gccaggcaacgcagggacacggccccaacaacaaggccggcagcccccacgcaacggggcgccgacagcgagagcgca

SEQ ID NO: 67944 - RNA, 34 nt, Homo sapiens
gagagacacccagaagggaaaaaagacgacaaga

SEQ ID NO: 67945 - RNA, 68 nt, Homo sapiens
cagggcagcgagaggagccaggagccgccagagaacagcagcacgcccacagaagaccccaggccaag

SEQ ID NO: 67946 - RNA, 75 nt, Homo sapiens
cacgaagcgggaaaacaaggggagaccaggaaagacagagcagagaagaaaagaaaaaggaaaggaagagacaag

SEQ ID NO: 67947 - RNA, 57 nt, Homo sapiens
agaaccagagaaacacacgccgaggccaaagaaagccagggaagaaccacaaggagc

SEQ ID NO: 67948 - RNA, 58 nt, Homo sapiens
aaaccgcagggcggagagaccaggaaagcacccgcagcggggacagcgagggggaggg

SEQ ID NO: 67949 - RNA, 81 nt, Homo sapiens
ggcgacaaggggcccgaacagaggggagacagggaaacgaaaaccaccgggcaccacgagcccacgagagaggacagcccc

SEQ ID NO: 67950 - RNA, 53 nt, Homo sapiens
ccccagagcggaacacagggcccagaccaagccccaccaacagaagagcccca

SEQ ID NO: 67951 - RNA, 75 nt, Homo sapiens
ggccagccaccaccaaggaccggagacacgaagagccggccggacaggacaaggccacagccccgaagaggaggg

SEQ ID NO: 67952 - RNA, 86 nt, Homo sapiens
aacaagaacgaccccaccaccagaccacaacgcgccaacgcgggcagagaacgcagaagcaacacaagaagacaaaggcaaggccg

SEQ ID NO: 67953 - RNA, 74 nt, Homo sapiens
ccgccgggccggggccccgcagcgacaacaggaggccggaagacccaaagcgagggacgggagaaagaacagac

SEQ ID NO: 67954 - RNA, 73 nt, Homo sapiens
cccaggccaagcagccaccagcagcccccagagcgggaccacaggaagcccccccaaaaagcggcggccaccc

SEQ ID NO: 67955 - RNA, 59 nt, Homo sapiens
acagcagggggccgacacaagcgaaacggaaagcaagggaccaagaaaggcccagggac

SEQ ID NO: 67956 - RNA, 81 nt, Homo sapiens
cgcgccgccaccacgcgcgggcgggcagccccgggccaggccgcggccggggcaggagcgcaggacacgagcgagggcgac

SEQ ID NO: 67957 - RNA, 82 nt, Homo sapiens
ggaaagaggagcagcaccaccgagcgggcaccagaaaacccagacaccaagcccccggccagaccacacccagcacaaggcg

SEQ ID NO: 67958 - RNA, 79 nt, Homo sapiens
gagacgggagagggacgcccgaagagcgaccggcgcaggcgacaaaccaagaggagccagaggcgaccgaaagaaaagg

SEQ ID NO: 67959 - RNA, 78 nt, Homo sapiens
cgcccaggagagaaaggagacccgacgcaacgcggagcgcaaggcgagggacgagaacgaggcgagcggccggaagaa

SEQ ID NO: 67960 - RNA, 66 nt, Homo sapiens
gaggaccacccccaaccccacgccaccgaagagccaagcccagaggaacagcaccaaaaacgacgc

SEQ ID NO: 67961 - RNA, 60 nt, Homo sapiens
cacggaagaccaccagcagcggaccaccgagggagaaaaccaaagacgacagcacagaac

SEQ ID NO: 67962 - RNA, 67 nt, Homo sapiens
gccggggaaaccgaacagaagggggcaaaggcacaaacaaggacccagagcgacgacggcggaacaa

SEQ ID NO: 67963 - RNA, 66 nt, Homo sapiens
gagaacagaagaacccgcaagacagaaacccaaggaccagggacaacaaaaaacagagacacgaaa

SEQ ID NO: 67964 - RNA, 79 nt, Homo sapiens
caagggcacgacagaaagaagaagacagggcggagaccagaaacgccaaggacccaggcgacccaacaaaaggccaaaa

SEQ ID NO: 67965 - RNA, 72 nt, Homo sapiens
ggaagacagccacacggcgacaagccccaccaagaagcaaagaccagggaaccagggcgaagacagagacaa

SEQ ID NO: 67966 - RNA, 75 nt, Homo sapiens
cccggcagcagcccgacgcaaaccaaggacggggaccgcacacccaagaggacagggcacccgaacacacgagga

SEQ ID NO: 67967 - RNA, 52 nt, Homo sapiens
gcccgcacccaccgagaaccagccaccgacccacggagccagccaaagaagg

SEQ ID NO: 67968 - RNA, 75 nt, Homo sapiens
gaggcggagcccgcagaccgcagaaggccggagacaccagcaggacccgacaaacggacagcaggaccagaacaa

SEQ ID NO: 67969 - RNA, 86 nt, Homo sapiens
ccgggaggagaaggaaggcaggaaagccagccggcgagagcagggggaggaggagccgccaagcgcagaacccagaccaggggaca

SEQ ID NO: 67970 - RNA, 36 nt, Homo sapiens
aacagcccagcacgaaagagaaggcagcgacggaag

SEQ ID NO: 67971 - RNA, 62 nt, Homo sapiens
cagccccagcgccagggggcaagaacgcaaagagcccaaggcaaggaggacccggagagcga

SEQ ID NO: 67972 - RNA, 53 nt, Homo sapiens
cccccgcagccggaagacagaggagacagaccaagccaaagcaccgcaacaga

SEQ ID NO: 67973 - RNA, 82 nt, Homo sapiens
gcagaagagcccaaaaccaacgaaccaaaagcaaccgcgaagagcaggccggcaagaagccaacggagaaccaaggccaaga

SEQ ID NO: 67974 - RNA, 78 nt, Homo sapiens
cggccagagaaaggaggcagcggcgcgagggcggcccgcagaagagcacagaaggagaaggccagcaaagcggaagac

SEQ ID NO: 67975 - RNA, 78 nt, Homo sapiens
cggaggcggagcggcaacagcaggggaaaggacaaccccacagggagaaccggagacaaagcaggaccccacggaagc

SEQ ID NO: 67976 - RNA, 73 nt, Homo sapiens
gcacacgaccagccagagagagagcgcgaagaccacgcagaacaggcggccagcccggaaaaacagacaaggc

SEQ ID NO: 67977 - RNA, 80 nt, Homo sapiens
gccacaaagggaccgagaagcgaagacaaggcgagaagggggacgaacaggggacaagcaaagcgcccccaaaacagagg

SEQ ID NO: 67978 - RNA, 57 nt, Homo sapiens
aagggcccgggacaacgcgacgagcaacccagcgccgaaccagaccagacccagggg

SEQ ID NO: 67979 - RNA, 78 nt, Homo sapiens
aggagaccagcggggcaacaggcaaaacccaccacaaaaggcggccggggccgggccggggcacggcagaggcgccaa

SEQ ID NO: 67980 - RNA, 75 nt, Homo sapiens
cagacaaaagggccaaagaagggagagagcgccgacaccaggaacgccaaccccaggcccgaaggaccggcccgc

SEQ ID NO: 67981 - RNA, 76 nt, Homo sapiens
gggcacgcggccaggcggcgacacgccaaccccgaaagcaaggcaaaccagggggccacacagagcgcagagggaa

SEQ ID NO: 67982 - RNA, 67 nt, Homo sapiens
ggcacaggagacaggcacaaaggcaccaaacagacgaggaccagagcaccagagcaccaacggaaag

SEQ ID NO: 67983 - RNA, 93 nt, Homo sapiens
aggggaccggaagaagaaccaagaagacaacaacgaaaccggaggcgcacgaaaaggcggacgacagagaaaagaggagaggacacagaaaag

SEQ ID NO: 67984 - RNA, 74 nt, Homo sapiens
ggcacgccagacccccacgcgcagaaggagacccaacaccccggccagacgggccaccaggccggcgccccacg

SEQ ID NO: 67985 - RNA, 42 nt, Homo sapiens
gggccagggccagagcaaagggggaagaagagcgcaccgaag

SEQ ID NO: 67986 - RNA, 72 nt, Homo sapiens
aggcacgaacccggaaagcaccagccgaagaaaggccccaggcccccacagccccgcagggccgccccagca

SEQ ID NO: 67987 - RNA, 75 nt, Homo sapiens
agacccagcgcccaaccgcccggggacaggaaggacgggcgggacagacccggggcccggcggagcaccccagcg

SEQ ID NO: 67988 - RNA, 62 nt, Homo sapiens
gccgcccgccgccgcggagcagaggaaaagaaccaggcaacacaaaaggccgccacagaaga

SEQ ID NO: 67989 - RNA, 57 nt, Homo sapiens
gaggcaacgcacccggaccgggccagcgccccgggggcagcggcccccaccgaggcc

SEQ ID NO: 67990 - RNA, 73 nt, Homo sapiens
caggccaagagggacccacccggcgggcacccccgggaggcccgggcccgaggccccccccccgagggccgga

SEQ ID NO: 67991 - RNA, 72 nt, Homo sapiens
caggcagcagagcccgcaacccagacccaggcacagggcaccgagggcggccgagcccggaccacgggcagc

SEQ ID NO: 67992 - RNA, 76 nt, Homo sapiens
cagccagaaacaggccagcgaagggccaccaaagaaaaaaccaggacaccccaaggggacacgggaacacagagga

SEQ ID NO: 67993 - RNA, 77 nt, Homo sapiens
cccacaaagggacaacgggcccggagagcccgaacggggcaaaaaggcgggacacaccaaaaaggaagaaaagaaaa

SEQ ID NO: 67994 - RNA, 70 nt, Homo sapiens
ggggggaggcgccccagggacgagaggaagaccgaaggacaagacaacgaagagaggaaagaagcggaaa

SEQ ID NO: 67995 - RNA, 54 nt, Homo sapiens
acacgcgagcacacacaacgcgagcacacccccagaagaggggaacgagaagcc

SEQ ID NO: 67996 - RNA, 105 nt, Homo sapiens
gcccaacagaaaaagagaggagggagaacacagaaacccgccccggggaccaagaaaggcccagggaccaaagcccggacaaggcccgagcaccaggaccgcaga

SEQ ID NO: 67997 - RNA, 65 nt, Homo sapiens
aaggcccgccagaagacaaacagacacagagaaccacacagaggacccaagaagaccagccgaag

SEQ ID NO: 67998 - RNA, 42 nt, Homo sapiens
ggaggaaccccacccaaaaaggcacacccagaagccacagga

SEQ ID NO: 67999 - RNA, 75 nt, Homo sapiens
aggggcaaaccaaccggacaagcacagggccaggagcaaggacaaccagggaagcagaaggcaaggaccccggca

SEQ ID NO: 68000 - RNA, 111 nt, Homo sapiens
gcacccaggcgccgcccccaacggcacccgccagcccgcaggccgggcccaaagccgaggaaggcaccaggagaggaggaggggagacgcccaggcagaaagcccaaccag

SEQ ID NO: 68001 - RNA, 76 nt, Homo sapiens
aacggagaaaagcacaaggagaggccgggaccccggacaagagcagcaccgccccggagccacagccagccccacc

SEQ ID NO: 68002 - RNA, 87 nt, Homo sapiens
ggggccccgaaaaaagagagggggggaccgaccgcaacagaacggacccgacaacaggcacaaagagagaaggaacacccacagggc

SEQ ID NO: 68003 - RNA, 82 nt, Homo sapiens
accacaaagaggaaaggacgccaggacacacggcacaaggcgacccaaagaacaacaagaggcaccaggcaggaccgacaga

SEQ ID NO: 68004 - RNA, 83 nt, Homo sapiens
gagccgccgcgcgcccgcgcccccgcgcgacgccagggggggccccagcccggccgaacgggcgcacgacacaaacacaaccg

SEQ ID NO: 68005 - RNA, 63 nt, Homo sapiens
cgaaaagcccacccacaaaaggggggaccaagaaaggcccagggaccaaagcccggacaaggc

SEQ ID NO: 68006 - RNA, 77 nt, Homo sapiens
ccgcagaaggagacacagaagccacaacacacgggagagcacagaaggacagcaggaggacagaaggcggagaggcc

SEQ ID NO: 68007 - RNA, 61 nt, Homo sapiens
gagcagcagcgcagaggagggccccccacacaccaaccagggccggagcgagggagagcag

SEQ ID NO: 68008 - RNA, 76 nt, Homo sapiens
gccgccccgccagcgccagacggacgaggcggcggagaacaagcggcagaaaaaaaacagggcgaccagcggaaga

SEQ ID NO: 68009 - RNA, 81 nt, Homo sapiens
cgggcccaagcacaccggagcaacaaccggcgggccgaggccgcaggaggagggagacaaagcggccagaagaaaagagag

SEQ ID NO: 68010 - RNA, 73 nt, Homo sapiens
gagacaagccaggggaaaaaccagagccccaacgacagaaaaacacgcagaagcggcagcggccgaagaggca

SEQ ID NO: 68011 - RNA, 72 nt, Homo sapiens
ggcaaccgaaagccagcagcggaccgacacagacaacgacgaacgacaaacgacgaaacacgcacaacaaac

SEQ ID NO: 68012 - RNA, 51 nt, Homo sapiens
gcaggacacgaaaacaacaccaaacggccaaggacagacgcccgaaggccc

SEQ ID NO: 68013 - RNA, 75 nt, Homo sapiens
gaaaggcaaaggcaaaggcggccgggagacagccggaagcaaggcagaagaggccggaaagagagggacgaaacc

SEQ ID NO: 68014 - RNA, 78 nt, Homo sapiens
aaacgcaaaggagaagaggaagagcccccagcagaccagcaccgaaagacggacagcacgaaaagccgcggccaggag

SEQ ID NO: 68015 - RNA, 85 nt, Homo sapiens
cggaagccggccacaacgcaaggagcggaaggcgcgaggcaacaacaaaccagccagcacgggggcccagccagccagcagcgag

SEQ ID NO: 68016 - RNA, 86 nt, Homo sapiens
gaggagggcgcagagcccaggagacgcggccaaccagagaggaaagccgaggacagccacacacgccccgggcaccagcaggagaa

SEQ ID NO: 68017 - RNA, 107 nt, Homo sapiens
cacccccaccggcgggcccgccgcagccaccgccccgcggaccaagcggcagcaaaagaccggggacgacgacgaggcaccaccccagccgacaagagcgagcgcac

SEQ ID NO: 68018 - RNA, 48 nt, Homo sapiens
ggaccgggagacaccccgcacacacacccaagcacaacaagacgagag

SEQ ID NO: 68019 - RNA, 81 nt, Homo sapiens
gcccagggaagaaggcgaggcaccggaacagacgcaggaagacgcaggaggagggagacgcacgagacacgggccgcccgc

SEQ ID NO: 68020 - RNA, 78 nt, Homo sapiens
ggcaagagaccgacggcggagcaccgccccggcagaagcggcagcaaaaacgaaaacaaacggaagagagggcagcaa

SEQ ID NO: 68021 - RNA, 79 nt, Homo sapiens
gacaaaacaaccaacgaagacaccgagcgaaagagaaagaggcacccacgggaagcagccagaaagacgacaagagagg

SEQ ID NO: 68022 - RNA, 71 nt, Homo sapiens
gaaagagcgaacaccggcagcgagacaggagccacaggcaaagaaaaagccagccgaggacgggaaccaga

SEQ ID NO: 68023 - RNA, 68 nt, Homo sapiens
agggggaggaagagaagacaacgcacaacaggcacccggaaacaagccacgaaggagagaaaaccagc

SEQ ID NO: 68024 - RNA, 57 nt, Homo sapiens
cgcccacccagggccggaaaagccaacgccggcgaaggacccagcgcagaccccgag

SEQ ID NO: 68025 - RNA, 88 nt, Homo sapiens
caccaggcacccgggcccagccgggaacccccacgcggccagcgaaaacgcccaggaaggagggccccggagcagccacaccaccgag

SEQ ID NO: 68026 - RNA, 35 nt, Homo sapiens
ccaggaccagccgaagaccgacaagggcagggagg

SEQ ID NO: 68027 - RNA, 69 nt, Homo sapiens
gccgaaccgccggcagccggcgacgaggacgaacaccgaaaacgagaaacgaaagagacacgggggcac

SEQ ID NO: 68028 - RNA, 77 nt, Homo sapiens
gcgcagcacacagagaccccacagacgcccacggcccccccgccagccccacagccaggcagccacggccagacgca

SEQ ID NO: 68029 - RNA, 59 nt, Homo sapiens
gacccagccaggcagaccccgggcagcaggaaaagcgagaaagaccccggacaggacag

SEQ ID NO: 68030 - RNA, 76 nt, Homo sapiens
gggagaaacgcagaccgaaaacagaagacaaacgccaaagcacaagagacaggaagcccagcagcgagaagaagcc

SEQ ID NO: 68031 - RNA, 37 nt, Homo sapiens
ggagcccgcaccgggccggcaggcgccccgggcgcgg

SEQ ID NO: 68032 - RNA, 96 nt, Homo sapiens
ccgaacccgccgcgaggggcgagaaaggcccacgcagcccccaagcagggagacccgaccaccggaagccacggcccggacccccgccacgcaaga

SEQ ID NO: 68033 - RNA, 83 nt, Homo sapiens
acggaaccccacccaacaaggcaaaagcagaccggaaaacccaccggcaagaccacacccgaggggagcccaggacaccacga

SEQ ID NO: 68034 - RNA, 40 nt, Homo sapiens
cccgccgggcgccggcggcagcagagaagaaaggggaaaa

SEQ ID NO: 68035 - RNA, 60 nt, Homo sapiens
gcaaaccggagccaaacaagcaccaacacgggagggccggaggccccggacggccacccc

SEQ ID NO: 68036 - RNA, 62 nt, Homo sapiens
caagcggcgacacacgacggaaaaaaaacagggcgaccagcggaagagcgcaacaagcgaag

SEQ ID NO: 68037 - RNA, 79 nt, Homo sapiens
cacagccaagagccgggaccccagaagccagaaagggacaagcacaacagaaccacaaggcaagccagagccacccaaa

SEQ ID NO: 68038 - RNA, 80 nt, Homo sapiens
ccccgccaaccgcaaccagacgccagcgggacgaggaccgagaccgcggccgggaccgaggagacggcaagcaggaaacg

SEQ ID NO: 68039 - RNA, 79 nt, Homo sapiens
cagcagccaaagcccacagccggggaggcgagagaaacccagccgaagcaaaaaggaacaagacaacacacacgcacca

SEQ ID NO: 68040 - RNA, 77 nt, Homo sapiens
gccgagagacagaggggggaagaaacgggcagagggacgagggaccgacccacgcccgcccccaaaggccagaccga

SEQ ID NO: 68041 - RNA, 66 nt, Homo sapiens
ccaaagagcacggagacaagaacgagccagcaaacccgaggagccagagaccaaagccacaaaaaa

SEQ ID NO: 68042 - RNA, 64 nt, Homo sapiens
gggagaccaagagacagacaccgccccgagacgaggaagaagagagggcgaaggaggccacaca

SEQ ID NO: 68043 - RNA, 76 nt, Homo sapiens
cgaaacagaagaagcgaggaaagaccggacgaacaagaggcgccaacccaaacgagcgagacacacagaaaggaaa

SEQ ID NO: 68044 - RNA, 65 nt, Homo sapiens
aggacacagccacggacccagcaaaaccggcggacaagaacacgggccccgagaaacgcagaaaa

SEQ ID NO: 68045 - RNA, 33 nt, Homo sapiens
gacacgagcacaaacgggcggagacagaaaacc

SEQ ID NO: 68046 - RNA, 84 nt, Homo sapiens
gcggaagagcagccaaacagacaggggaagcgccagcaggagagggcaaaggcggaaaacaacaaaagaaaaagaaagccagaa

SEQ ID NO: 68047 - RNA, 78 nt, Homo sapiens
ggagagagagggggccggcagcccgcgaggcgcagcacccgaaacacagcaaacccaccgagacggcaagcaggaaac

SEQ ID NO: 68048 - RNA, 66 nt, Homo sapiens
ccaaccagccccggcaagaccgaaggcgccggccaaaagagcgaggcgcaggaccacccaaaacac

SEQ ID NO: 68049 - RNA, 64 nt, Homo sapiens
aagcacacccaaggacagcagcccaccaagcacagacaagcaccaggggcacagaagggaccac

SEQ ID NO: 68050 - RNA, 75 nt, Homo sapiens
cagcccccgggagcgggacacagggcggagcccgcagagcgggggccaggccagggaaacgcaggaccccgaccc

SEQ ID NO: 68051 - RNA, 73 nt, Homo sapiens
ggcgcaaagaagcccaagccaggacggaccccaagcaagccggcaggaccaacagcaggaaggagcgaacaga

SEQ ID NO: 68052 - RNA, 79 nt, Homo sapiens
cggaaccaaccggaaagccacgccgcaagaagagccacaggaaagcaaagaggcgagccacgaaaagccaagggacaaa

SEQ ID NO: 68053 - RNA, 78 nt, Homo sapiens
caaaaccaccgaaaggaggagcgagaaaccccgaaccaaacagagcccaaggagcggcaaagaaaggaaacaaaagac

SEQ ID NO: 68054 - RNA, 61 nt, Homo sapiens
gcagcaagaacagagagagaggggacagacgagagaacgagggggagaggcaccagcaaca

SEQ ID NO: 68055 - RNA, 71 nt, Homo sapiens
cagcgccgaagggcgagcgggaagacagccgccaccaggcgcccccccagcaaccacccacagacccgaga

SEQ ID NO: 68056 - RNA, 90 nt, Homo sapiens
aaaggagagaggaccacccagaggagcaacgaacccaaggaccgcaaagaaaacccagagaacaccacccgaagagacaccgagaaaggc

SEQ ID NO: 68057 - RNA, 77 nt, Homo sapiens
acggggaaggcaggcccgccggccaagccccacgaaggaggccgcccgaggccccggaagaggcaacaccggagcag

SEQ ID NO: 68058 - RNA, 77 nt, Homo sapiens
ggacggcaaggagggaagacaacaaaaacaacgcaggacagcaaagcaaaacaaacggagagaggagggagaaacaa

SEQ ID NO: 68059 - RNA, 82 nt, Homo sapiens
agagaagcaggaaggaggcagaggcacaccgaaaggaggccaggccagagggaccaacgaaggcaaacaccacacgcagagg

SEQ ID NO: 68060 - RNA, 68 nt, Homo sapiens
gcacaaccaccgcgaacgcgacagaaaggcaggaaggacaccgcaccgccccccgggccccgcgacca

SEQ ID NO: 68061 - RNA, 72 nt, Homo sapiens
agacgcgcccgcgcgcaggggaagcgggcagggcaacaacacggcaccacacaagcgaagaagccgagaaac

SEQ ID NO: 68062 - RNA, 63 nt, Homo sapiens
gagacggagcgaggagaagacggccacgggggacgcagaccaccaggcaggaccaagagaaag

SEQ ID NO: 68063 - RNA, 63 nt, Homo sapiens
cgaagggggaggacaaaaggcggcgagccagaggccaacgcagaggaacggaacagaggaaca

SEQ ID NO: 68064 - RNA, 76 nt, Homo sapiens
agccaaagccaccgcccagcccagacaagccccggacaagagaccccagacgagaaggagacgaccaaaacaaaca

SEQ ID NO: 68065 - RNA, 63 nt, Homo sapiens
cgaccccggcccgcgcggcgccgggcgcggcccggcgacagagacgagagccgaggcgccgga

SEQ ID NO: 68066 - RNA, 77 nt, Homo sapiens
cggacaaggcaacacccgaagaaacaagcacagcacaggaagaaacgccaggaacacaagaaaagacagcagacgag

SEQ ID NO: 68067 - RNA, 85 nt, Homo sapiens
ccaaaccacccacggcccaagccacacccaccgcccgggcaggccacggcggagagggccgggcgcgcaccccgaacccggccgg

SEQ ID NO: 68068 - RNA, 85 nt, Homo sapiens
cgcagcagcggggaggagccaaagcccggcgccaccaagccgcagggagaacacccaacgggagggaaggcgaggagcggaaggc

SEQ ID NO: 68069 - RNA, 79 nt, Homo sapiens
ggacccagggaggaacccacaggacaaaacagcaagggccgggaggaacggcggcaaacaaagagagaggggaagccag

SEQ ID NO: 68070 - RNA, 73 nt, Homo sapiens
gcagacccagcaaaagcgccacagcaaagcagcccaccagccgaaggcaccgggaaacagaacagacgcccaa

SEQ ID NO: 68071 - RNA, 81 nt, Homo sapiens
cagcccaaaagcagcaaagaacaccaagacggcgaccacaggaaggacacaggcaggagcccagggagggaagaacgggaa

SEQ ID NO: 68072 - RNA, 66 nt, Homo sapiens
gagcagggagcagcgcagcgcgcgcagagcgcgccaggggagaagacggcacgagcgccaagcggc

SEQ ID NO: 68073 - RNA, 76 nt, Homo sapiens
gaaaaaacccagaacacgggagaaaaaggaaaacgcggaaaaccgacacaacagccagacacgcaacgaaagagca

SEQ ID NO: 68074 - RNA, 69 nt, Homo sapiens
gcgcaagacacgaaacaccgagagaggacaaccgagggagcaagaaaggaaaaaaagaagcaaccaaga

SEQ ID NO: 68075 - RNA, 84 nt, Homo sapiens
ggcggacacgaggcaggagacgagaccacccggcaaaacgcagagagcgcagaagacaggacaaaaagcccacacaacaccagg

SEQ ID NO: 68076 - RNA, 61 nt, Homo sapiens
gcgcgacacccaaggccggggacacgcgcccaccagggggagccagcagccgggagcgcca

SEQ ID NO: 68077 - RNA, 84 nt, Homo sapiens
ccgcgaaccaacggagcggggcaggggcgacgagagcgcgcgaccccaaacgacacaagaccacagagaaaacccgccaaacgc

SEQ ID NO: 68078 - RNA, 73 nt, Homo sapiens
aagaaagagacaccaccgagaggggcaggggagggcgaggaacgaaagcagggggcgaacacgaacaggagag

SEQ ID NO: 68079 - RNA, 81 nt, Homo sapiens
cggagacggagagggacccgggaaaagaacaacgaccgcagggacagaggacgcagaaaacaaccacccccaggaccaacg

SEQ ID NO: 68080 - RNA, 82 nt, Homo sapiens
gccgaccagcgacacgcggccgcggagaccaccgcggcgcggcagcgcgcccgagaaggacagaaaccgaagggagaagagc

SEQ ID NO: 68081 - RNA, 106 nt, Homo sapiens
cacagagaaggaagcagagacggagggagcccacaccaaggacaccaggagcccccaaggagggaagaggggggaggagaggagagagacccaagagcggggcggc

SEQ ID NO: 68082 - RNA, 79 nt, Homo sapiens
aagaaaaacacagccgggcaacagaacgaacacacaccagaaggaaaaagacccgagaagcgcagacccaccagggaaa

SEQ ID NO: 68083 - RNA, 63 nt, Homo sapiens
cacggcccggcgcccagcggaccaccaggcaccgagccccgcaaccagagcaaggggaggcgc

SEQ ID NO: 68084 - RNA, 42 nt, Homo sapiens
ccaggagaaacgccccaaaaaagccaacaggcagaccagaga

SEQ ID NO: 68085 - RNA, 81 nt, Homo sapiens
aggcacaaaaagggcaagaaagagaagaagacaggaaaaaaaaaacaccgagggagggcaacagagagaaaagcgaacacc

SEQ ID NO: 68086 - RNA, 74 nt, Homo sapiens
cacagagggggaaagccaaggaaaaacggagagccacaaaaaaggaagcgaaaggggacagccgcgccgcgcgc

SEQ ID NO: 68087 - RNA, 96 nt, Homo sapiens
agcaaccaccagcagcccccagagcggaacacaggagcgaaaacgccacaacagagggggccagggcggggaagacaaacagaacaacgggcaacc

SEQ ID NO: 68088 - RNA, 74 nt, Homo sapiens
ccccagaggagggccccaccacaccaaaggaaacgagacagcgggacaacacaagggaaccaaggagggcgccg

SEQ ID NO: 68089 - RNA, 41 nt, Homo sapiens
ccaagacccacaacaaaagggaccaagaaaggcccagggac

SEQ ID NO: 68090 - RNA, 71 nt, Homo sapiens
caacacccagagacgaaagcgagcaacccaaggaggaagcgggggccaaaggcaccagaagggcgccgagc

SEQ ID NO: 68091 - RNA, 50 nt, Homo sapiens
ccgagaaccgcgccaccagagacgggcccagacccacaaccagcaacccc

SEQ ID NO: 68092 - RNA, 77 nt, Homo sapiens
caggcgccgacgcgacagacccaagcgggcacggggccgggcccggcgggcggcgaagaacgcggaggaagcgcgga

SEQ ID NO: 68093 - RNA, 69 nt, Homo sapiens
acgcaaacaacacagaggacacagaaggacgcggcgcagcaacaaacagcggcgacaaaccgagacagc

SEQ ID NO: 68094 - RNA, 81 nt, Homo sapiens
caccagcagcgcgcaggacccagagaaggcgacaaacgggccacaaagcacggaacgaaaacgagggaccacacaaagaca

SEQ ID NO: 68095 - RNA, 72 nt, Homo sapiens
gcaggaccaaaagaagcaaaaccaggagagaagacgaaaaagaagaagcagcgaacagcgaaaagcccaaac

SEQ ID NO: 68096 - RNA, 84 nt, Homo sapiens
aaacagagggagagggagagaagagccaggacaaaaccaggcagaaccaacacgaacccaagcacaaacaagaaaacgagcagg

SEQ ID NO: 68097 - RNA, 75 nt, Homo sapiens
cagacaaggacaaccaggaagaaaccccggagccagcaaaaacacaaacgagggagcaaggacaccaccagggag

SEQ ID NO: 68098 - RNA, 65 nt, Homo sapiens
aggggcgaaccacggaaaggaggaagaagacaccggggacagacaggcaccgggcagagaacacc

SEQ ID NO: 68099 - RNA, 68 nt, Homo sapiens
ggaacgacagaccccgggcacaggaagaccggcgcgcaacacgcagaagaggacgcacccggacagca

SEQ ID NO: 68100 - RNA, 126 nt, Homo sapiens
gggaaagcaagaaaaggagaggcagagaaacaagaacacagagagccaagaacaaaggcaaggagcgccaggagcaagcgggcaagcggagggagggacacacccggccaccacccccccccagca

SEQ ID NO: 68101 - RNA, 81 nt, Homo sapiens
acggggcgccgcggccgggcgggcagcagaaggagagaaaaggcgaaccgaaagagaaaaccaaacagaccacggcaacgc

SEQ ID NO: 68102 - RNA, 79 nt, Homo sapiens
aaacggaaacccccaggcaacccacacccgcagaacacaaccgcaacaaaggcaaaagcagaccggaaaacccaccggc

SEQ ID NO: 68103 - RNA, 72 nt, Homo sapiens
acgcgacgcgccaaaacccgcccggaaaggggacaccggggccccgcggggcaagaagaggccagccggacc

SEQ ID NO: 68104 - RNA, 82 nt, Homo sapiens
ccagcagacagccgaggggagcgcggggcccggcagaaagcccccggcagggccaaggcccccccacggcgcgccgacggac

SEQ ID NO: 68105 - RNA, 75 nt, Homo sapiens
cagccccacgcaaacccggacccggagacgcgggaaggagagggcggacccgagaaggaggcaaacagccggcca

SEQ ID NO: 68106 - RNA, 65 nt, Homo sapiens
gcagagcacaggaaacggaggagcaacccgaaacgagggacacgcgcccaccagggggagccagc

SEQ ID NO: 68107 - RNA, 73 nt, Homo sapiens
ccggggccagaaggagcgaacaacgcaacacgaagaagagacgaagaagggcaagggcaaacgcgagacaacg

SEQ ID NO: 68108 - RNA, 64 nt, Homo sapiens
aaaagagaggagcgaacgagacagaacaggaaaaaggagcgggacaaagaaggacaagaacaca

SEQ ID NO: 68109 - RNA, 74 nt, Homo sapiens
acaaaacgcccagcaaaccaagagggagaagacggaagaaagcagccaagcgggccgccgcccggcgaaaaggg

SEQ ID NO: 68110 - RNA, 75 nt, Homo sapiens
caggagacggaggaagaacccaagccagagcccaggcacagcaagcaacccggccgaggggggcaccccgggagg

SEQ ID NO: 68111 - RNA, 90 nt, Homo sapiens
ggaagcgcacgaaggaggacgccggccagcagaagggggcgacccggaccaggggggaaaagcccgccaggagcccggaaggggccgcac

SEQ ID NO: 68112 - RNA, 104 nt, Homo sapiens
agacgggacagcccagaaaccgccaaagacggaaccgccacagcaccaaaaacgaaggaggcccaaccacaaaaggagccgacggaacccagacggagaacaaa

SEQ ID NO: 68113 - RNA, 58 nt, Homo sapiens
cccacaggccggcgcgcccaaaggcccgcgccgacgccgcagaccccaaaggaaacga

SEQ ID NO: 68114 - RNA, 78 nt, Homo sapiens
ggaaagacaggaggccacccccaaagaaaagagcccgggccagcgcagcagcaagagggggcaggggagcaaggggac

SEQ ID NO: 68115 - RNA, 73 nt, Homo sapiens
gaaggaccaagaaccaggacaggcaaaaagacagccgaaaaagggcggaaaagcagaagccccgggaaggagg

SEQ ID NO: 68116 - RNA, 75 nt, Homo sapiens
cggcgaagccaggcgagccaccacagcacagggccggcagagacgcaacggcggggaccgagccacagcagaggc

SEQ ID NO: 68117 - RNA, 77 nt, Homo sapiens
ccagacacaccggaggacagcaagcgaccgcagagcacggggaacggagagaagaagccagacacaaggacacacgc

SEQ ID NO: 68118 - RNA, 82 nt, Homo sapiens
cacgaccccgcaccggacagcgcgcccaccggaacgaacgcacaaacaaaaaaaaccagacgccccgagagacaaagaagca

SEQ ID NO: 68119 - RNA, 77 nt, Homo sapiens
ggcggaaagcgcggaccgcgccgccccgccgcggcggggacgcagggcggaccgccgggggccgaagggcaacacag

SEQ ID NO: 68120 - RNA, 71 nt, Homo sapiens
caggaagaaagaccagcacgaaagaaaaaggcacaaagcgccaggaaagcccaaggaaaggcccaggcaca

SEQ ID NO: 68121 - RNA, 57 nt, Homo sapiens
aagaaggggggcgcgacagacccgaacgacaaaacgaacgaggcgacggccaccgcc

SEQ ID NO: 68122 - RNA, 57 nt, Homo sapiens
ccacgacgggacacgccccggaggcagcgagagccagacaagccagacaccaagacc

SEQ ID NO: 68123 - RNA, 77 nt, Homo sapiens
acaaaaggagccaccaagaaacccgggaagaagcagggggcaaaaagggggagagacaaccagagcggaaagggaga

SEQ ID NO: 68124 - RNA, 77 nt, Homo sapiens
gcccgggacccgcggaagccggcagcggagaagcggagcgaggacgaaggacggagggaggggcaggaagaacacgc

SEQ ID NO: 68125 - RNA, 74 nt, Homo sapiens
cgggcgggcgggccccccggcaacgcggcaagccaaagcgccacagaccacaaccggaccggcagagaaagaca

SEQ ID NO: 68126 - RNA, 83 nt, Homo sapiens
gaaggcggcccggcgggccaccccacccccgggcggagcgacgcccaccggcccaccccaagccggacgccggcaaagcccca

SEQ ID NO: 68127 - RNA, 81 nt, Homo sapiens
caagccagagcggagaccagaaccggcagaacagcgaggaggaagcagcccagacaagcccaaaggagacaaacaggggaa

SEQ ID NO: 68128 - RNA, 80 nt, Homo sapiens
ggaggaagcccccaccgaggccccccggcaccgcgccgcgccggggcgcccggcacccgcgggggacaaacgccacccgg

SEQ ID NO: 68129 - RNA, 73 nt, Homo sapiens
ccgcagcgggcaaacagcgggggcgccgaccgcaggacacgggggggaaacaagcacgggcgagccaggacac

SEQ ID NO: 68130 - RNA, 80 nt, Homo sapiens
aggcagcggaaccccaggaaccaccacaaaaccagaagaaaacgggagccaaacccacgccaaacggcaagacgcagcaa

SEQ ID NO: 68131 - RNA, 72 nt, Homo sapiens
cccagccccagacagcacgccacgcgggcccgccaagacagccgacaccgaggccgcccgccccccaagaaa

SEQ ID NO: 68132 - RNA, 78 nt, Homo sapiens
cacgcaccgcgcgaagacggaagacgcgcccgcgccggccccgagccccggccccaaagacccaaaacagagacaccc

SEQ ID NO: 68133 - RNA, 70 nt, Homo sapiens
gaggggggaacaggggagacccaagcaaagaaccggcagccgaaccaggccccaaccgaaagcgaaagcc

SEQ ID NO: 68134 - RNA, 81 nt, Homo sapiens
ggagccgcgcggaccagccaagcagcaccaccgggggccgacacgggcgacccacggggaagaggacaggcccacggcggc

SEQ ID NO: 68135 - RNA, 74 nt, Homo sapiens
ccgcgacggggcaccgccacagcgcgcgcgccccccagggccccagcgcaaagcccaaggccacaccaggaccc

SEQ ID NO: 68136 - RNA, 58 nt, Homo sapiens
agaaagccgccgaaggcggccaaaggccggaccacggaaagaccccacgccacgcacc

SEQ ID NO: 68137 - RNA, 85 nt, Homo sapiens
caaagcgcagggccacgcaagcaaaagaacacgccaggagggaacagcaagaaagaaagccgaaccacaggagaacagcaccaac

SEQ ID NO: 68138 - RNA, 83 nt, Homo sapiens
gggaagggcgcgcgcccggacgccacgcacccgcgcgagaagaaagagcacgaggcgagcggggagacccgagagaccaaggg

SEQ ID NO: 68139 - RNA, 68 nt, Homo sapiens
agagaacaccagcgcaaaggggaggacagacaaacagaacgagagccacagagacaaggaagcccccg

SEQ ID NO: 68140 - RNA, 79 nt, Homo sapiens
gccgggcagccgaacggagggcgacggagggaggaaaacaaagagggaaaacggagaaaagcccccccaggccagcgca

SEQ ID NO: 68141 - RNA, 60 nt, Homo sapiens
ggagcccaccagaaacacagccagacacggaccagccgaaacaagaaaacgaaaaacccc

SEQ ID NO: 68142 - RNA, 78 nt, Homo sapiens
aagcgaagcaagacccaggagccagggagagccgggaaacaagccaaaccgaaaggaagggcgaccaagagagaaaca

SEQ ID NO: 68143 - RNA, 71 nt, Homo sapiens
aaaagcgcagaccacagacagaggagaaggcggcccaccccagagcaccggcacagacgccccagggaagc

SEQ ID NO: 68144 - RNA, 83 nt, Homo sapiens
ccgccgggagccagccccaccagccaagaaaaagcggggaaggggggcaaaaaaaagaagcaagcgaagcaccgagcacccac

SEQ ID NO: 68145 - RNA, 64 nt, Homo sapiens
cccaaccagcacgcggagacagccgagaacaaacccagcaacaggaagagacgccaccaacgcc

SEQ ID NO: 68146 - RNA, 63 nt, Homo sapiens
gcgcagggcacaccaggacaaaccggcgaccacacacggggacgacggggaagccggacagca

SEQ ID NO: 68147 - RNA, 79 nt, Homo sapiens
ggaaacagcaagcgaagccgaaaaagcgcccgagacgggcccgccgaaaggggccagagaacaagcccagacagcaaga

SEQ ID NO: 68148 - RNA, 78 nt, Homo sapiens
cgggacagcacggcaggggcaagcaggccacaggacccaggagaggacacggcgcagcaacaaacagcggcgacaaac

SEQ ID NO: 68149 - RNA, 73 nt, Homo sapiens
gccgacgcgggagagaccccacgaagggcagcgaggggaggagcagggggccaggagagagagagagagagga

SEQ ID NO: 68150 - RNA, 75 nt, Homo sapiens
acagcgggaccggccgccccacaccgagcacccgcagaacaggagaggaccagagggggcacccgcacccgacag

SEQ ID NO: 68151 - RNA, 75 nt, Homo sapiens
aggagcacggacggacccagcacgaggaggcgcgaggagagggcccccggaagccgggcccaaccgacagggcac

SEQ ID NO: 68152 - RNA, 83 nt, Homo sapiens
ccaaggaccaagaaccacggacaagaccgagacacccaccacagcagcagcaggcccccacgggaacgacgccgcgagagcca

SEQ ID NO: 68153 - RNA, 81 nt, Homo sapiens
cggacggggggggccgcgcccggccccgcgcgggcggacggcggaggcgcccccagggaccggagaagggcgggaaacagg

SEQ ID NO: 68154 - RNA, 79 nt, Homo sapiens
cagccccgagaagcgggaacaggggaaccaagaagaccgaggaagacacgaggacaggcccaacggagaagggcacaca

SEQ ID NO: 68155 - RNA, 75 nt, Homo sapiens
agcacaccccagcggcacacacagagggcacagaaggaaggaaaccaccaccggacacggcaagacgagaaaaga

SEQ ID NO: 68156 - RNA, 54 nt, Homo sapiens
agggccgggagcccgcaccgggccggcagcaggagagcgggaaagcaccaggca

SEQ ID NO: 68157 - RNA, 81 nt, Homo sapiens
cgaggacccggggccgaggagcgggaagaggcgggggcccggccaggccccaccgccacaagcaggggaacaccgccaacc

SEQ ID NO: 68158 - RNA, 58 nt, Homo sapiens
ccaagcaagaggccggaaagagaagccgcacaggggaaaggggcggaaaaacagggcg

SEQ ID NO: 68159 - RNA, 72 nt, Homo sapiens
aagaaaggacccaagagcagcggaaagcagaccacaccaggccgggcccgggaggagcaggggcagagggga

SEQ ID NO: 68160 - RNA, 66 nt, Homo sapiens
aagaaccggacaaacaagaaacaaggcacagaaccgcggaaacaacgccgcaagagccgcgcaaga

SEQ ID NO: 68161 - RNA, 86 nt, Homo sapiens
accccggaccgagcgcgagggcgccgccgccgcccgccggacccccggaccccccgaccgcgcgccccaaggcccagcccccaccc

SEQ ID NO: 68162 - RNA, 75 nt, Homo sapiens
acggggaccccggagcccagaagacagagggcgagggacaaaaaggcaagaacgagagaagccgaaaaaacggaa

SEQ ID NO: 68163 - RNA, 84 nt, Homo sapiens
gcagcagcgaccccacaggcagcgcccgggcacggggacaagggccagcgggagaacagagacccaccaagaaaccagaacccg

SEQ ID NO: 68164 - RNA, 56 nt, Homo sapiens
agacagcacaaggcagggggaaggaaaggaagagagccacaagcgaaaagagcgag

SEQ ID NO: 68165 - RNA, 85 nt, Homo sapiens
gcaggagaggacaaggagaggagcgggcggcgacggcggcgcgaggaccgaccgggcccgcggacgaagaaggcacccccccgcc

SEQ ID NO: 68166 - RNA, 61 nt, Homo sapiens
accagagcgggaaaacacgcacagcggaaacaagaggaaacagaaaggcaccgaaggaccc

SEQ ID NO: 68167 - RNA, 75 nt, Homo sapiens
gaagccgcagcggaaagcaggagcacagccacgaaccgacggggaccccaagaggaaggaaccggagacgcagcc

SEQ ID NO: 68168 - RNA, 60 nt, Homo sapiens
ccaccgccggaaccgcgggcccgaaggggacaagcagaagcaagcaaacgcacgaggagg

SEQ ID NO: 68169 - RNA, 67 nt, Homo sapiens
aaaagcgacaagaaagaaggcggcaccagggcagcaaagggaccccgaacaagaacacacgaaaaac

SEQ ID NO: 68170 - RNA, 75 nt, Homo sapiens
aacccagcagaaggccagcagaccacgccggggacacaggccgccaaaggagggaaaagggagagcgaagaccac

SEQ ID NO: 68171 - RNA, 63 nt, Homo sapiens
aacgagcacaagggcaccacgcaaacagggaaacagaggccaacccaacagaagcgccacaca

SEQ ID NO: 68172 - RNA, 105 nt, Homo sapiens
agccagccagacccggggggaagggccgaaggagaacccaggacgccgccacagagcaaaaggaacgcgaccggaaaggagagagagacagaaccacagacaagg

SEQ ID NO: 68173 - RNA, 69 nt, Homo sapiens
cgaaaagccgagagacacggacaacagaggaggggaacaggaggagggggggaggagggacaacacaca

SEQ ID NO: 68174 - RNA, 81 nt, Homo sapiens
gggggcgcagagcgcgggaggcggcggcggcgcggagcccagccacggaacccagaacaggccaagccccacaggccacga

SEQ ID NO: 68175 - RNA, 70 nt, Homo sapiens
agggagaacacagaaaccggccccaggaaacaaaaagccaacggaaaaagaaacggcagagcacaggacc

SEQ ID NO: 68176 - RNA, 63 nt, Homo sapiens
cgagcgggacccgccccccgagacgagcggccaggaagagcgagcccgggcacgacggcgacc

SEQ ID NO: 68177 - RNA, 56 nt, Homo sapiens
acgcccacccgggccacgcaccgagcccagcagacccgaggaaggccaccgaaggg

SEQ ID NO: 68178 - RNA, 75 nt, Homo sapiens
gcaaccaggagagagagaaacgaaaaccgggaggccaaacaggggggcaaccgcgaagcaaaagacacagcccag

SEQ ID NO: 68179 - RNA, 75 nt, Homo sapiens
ggagacggcggaggaggagcagcgccaccggacaaggccaaaaaggaaccagccaccgaagcaggacacaaagaa

SEQ ID NO: 68180 - RNA, 78 nt, Homo sapiens
agagcgacccgagcagcgcagaccccgcagcccgaagcagcccaggaacaaggccccaacaggcgggagacaagcccg

SEQ ID NO: 68181 - RNA, 78 nt, Homo sapiens
cggcacgaggggagcagcagaacacgggagggggaaggcccacgggggaacgcgcagcacacggcaagcccaaacgga

SEQ ID NO: 68182 - RNA, 66 nt, Homo sapiens
gccgccgccgcacaagccagcgggaccagccgcagcaagccagaagaacaaaaaacgcacacccca

SEQ ID NO: 68183 - RNA, 78 nt, Homo sapiens
ggcggaacaggcaccaagccggcggggcggccagacagcaaagccgacaggcagccggggaggagccgaaggaaggaa

SEQ ID NO: 68184 - RNA, 79 nt, Homo sapiens
gagcacgccgaaaaacaacaacacagcggccgaacccaagcggaccagccggggaacaccaaaggagccaggcacagca

SEQ ID NO: 68185 - RNA, 78 nt, Homo sapiens
cccccccggaggcggcgggcggaggcggcggggagaggagacgccggcccaccagccagcggggagccgcccacccca

SEQ ID NO: 68186 - RNA, 76 nt, Homo sapiens
acacaaaacggcgaccaaaaacagggaaggaccccagggcagggaccaacaaaagaaggaccaaaaacccggagaa

SEQ ID NO: 68187 - RNA, 78 nt, Homo sapiens
agcgcgccggccgcgaggccacggagagccgccggagagcccaggagcaggggagacagggcacaccaaagggaacca

SEQ ID NO: 68188 - RNA, 76 nt, Homo sapiens
gccaacgagagagagcaccagacacaaggaccaccgagcgcggagcagagaagcaaaaggcagggaacaacagcaa

SEQ ID NO: 68189 - RNA, 80 nt, Homo sapiens
gacgcccagagcgccacggagaagccgccgaagaggcccgagagagaaagggaaagaaggagcggagcagaacaaggacc

SEQ ID NO: 68190 - RNA, 81 nt, Homo sapiens
agggaaggcgccgcgccaggccggggggcggggacccaagggagagagggaacggcgaaagggcagcccggaaggagcacc

SEQ ID NO: 68191 - RNA, 75 nt, Homo sapiens
agaaccccccgaaaggaccccccaggcaagagaagaaagcaccaacaacaaagaaaacgggaagaaccagcagcg

SEQ ID NO: 68192 - RNA, 85 nt, Homo sapiens
gacagaacacgcgcagcggaacggcgagcgagccgacgggcgaggaggggcgcagccagacacccggccgccgggcaggcggcac

SEQ ID NO: 68193 - RNA, 64 nt, Homo sapiens
cacgagcgccaacccaacccgccaggccccagcggggaccagagacgagggaagacagggaggc

SEQ ID NO: 68194 - RNA, 57 nt, Homo sapiens
ccacgaaccaaggaaccagcaaagaggccagcaccccacccgcccacggcacgcacc

SEQ ID NO: 68195 - RNA, 71 nt, Homo sapiens
gaaacaggagacagacacaaaagcgaaccagagcaacagcgcaaggcagccagcagggagaagcgcggaag

SEQ ID NO: 68196 - RNA, 76 nt, Homo sapiens
gagggggcgcccagcgccaacaccaagggccaggcgggcgggaaaaaccaagagcacagcgagccagaagaaagaa

SEQ ID NO: 68197 - RNA, 82 nt, Homo sapiens
gacccggccccggcccacaggggggggcaaacccgagagaacggagccccccaagagaacccagggggagccacgccggagc

SEQ ID NO: 68198 - RNA, 66 nt, Homo sapiens
cccaaaaaccgccgaaaaagagaagacgcacccgaccgggccgaccacgagcggcagcccacaagc

SEQ ID NO: 68199 - RNA, 75 nt, Homo sapiens
caacaagcaaccaggggagaggaaagccgaaggacagagccacccgacacccggcagaccacccagaccgcagaa

SEQ ID NO: 68200 - RNA, 70 nt, Homo sapiens
caaccgcccgaaccagagccggaggcgggaggacgggcgccgcagagaacacgagcgacccgaagacagc

SEQ ID NO: 68201 - RNA, 59 nt, Homo sapiens
acacacagaggggcagccaaaagaagaaaggggcgacaggacaacggacagcaaaaaag

SEQ ID NO: 68202 - RNA, 58 nt, Homo sapiens
cgcgggcaggggcggcgcggcgcgggcggcggggcccacgcccagaacgagaggggaa

SEQ ID NO: 68203 - RNA, 71 nt, Homo sapiens
cgaggggaacaccggcgagcccgggcggggccggcagcaccgcggccgcaggcaggcacaggcggacggcg

SEQ ID NO: 68204 - RNA, 75 nt, Homo sapiens
gaaccaccacacacaaaagcaccagagagagggaagacgacccagaaagagggacagaaaccacagcccaaaaag

SEQ ID NO: 68205 - RNA, 75 nt, Homo sapiens
gcggccaggaggcacacccgcccgcagaagagagcgaccggagcggggaacacggccggcacacaaagaaagccc

SEQ ID NO: 68206 - RNA, 77 nt, Homo sapiens
cagaaaaagaagaggaacaggccaaggggcccacccaaccgggaaaccgcccgagacccagggaacccaaagaacag

SEQ ID NO: 68207 - RNA, 74 nt, Homo sapiens
gggcagaccaacgggccaaagaccacacagacacaccaagcaaaagacaagagggcaccgccagccaaacagaa

SEQ ID NO: 68208 - RNA, 79 nt, Homo sapiens
agcaccgaacaaccggaggccaagccccggcggacgcgagaagaacaggagcgccaggagaccggcacaccagaaagcc

SEQ ID NO: 68209 - RNA, 39 nt, Homo sapiens
ggaggcaacggagcaccagccgacgcggccggagccccc

SEQ ID NO: 68210 - RNA, 56 nt, Homo sapiens
ccacgcaccgagaggccccgcagacccgaagcggaaaagcgcaagccccggggcag

SEQ ID NO: 68211 - RNA, 59 nt, Homo sapiens
cggagcggacaaggcccggccgcgaggagcgggcgccagaaacccaccaagccccgcaa

SEQ ID NO: 68212 - RNA, 55 nt, Homo sapiens
agacaaaggagaggcgagaagggaaagcagaaagagaaaggcaagcagggcgaga

SEQ ID NO: 68213 - RNA, 30 nt, Homo sapiens
ccaggaagccaaggagggcgaaccgcccca

SEQ ID NO: 68214 - RNA, 70 nt, Homo sapiens
aaggaccaagaaccagacgaaacacaccaccacccagaagaccgagaagcaaagaccgacccaagaacag

SEQ ID NO: 68215 - RNA, 61 nt, Homo sapiens
aagcggaacaccagacgaaacaggcaggaagagaacacagaagaagaggagaggaaccagc

SEQ ID NO: 68216 - RNA, 78 nt, Homo sapiens
cgcagcgggccgcaggagcgcgcggagaggggggcgggccgagcacccgcaggccccgcagaggcgcccacagcggac

SEQ ID NO: 68217 - RNA, 91 nt, Homo sapiens
agcacggccgaagccgggggggcgaaggacgacaaggccccagcacccgcagagcagacacgcgagacaacggacgacacagaaggcccgc

SEQ ID NO: 68218 - RNA, 76 nt, Homo sapiens
cggcgcgcgcggacgaagagccccccccccaacaccgcgacacgcagggcagcggggaagaagaaaaggaaccgag

SEQ ID NO: 68219 - RNA, 59 nt, Homo sapiens
cccaggcccaaccggaggagcgcccgggcacccggagcacaccgaagcggacaacaggc

SEQ ID NO: 68220 - RNA, 83 nt, Homo sapiens
cgcgcgagggaccggagcacagcccgcaggcggcgacagcagagcgcccacgccccagcagacccgaggcgaacaagaaccac

SEQ ID NO: 68221 - RNA, 60 nt, Homo sapiens
caagaaaaggaaccccgacaccgaaaccccacaagacgaagcagacgggcagaaaaccag

SEQ ID NO: 68222 - RNA, 79 nt, Homo sapiens
aaggccaccaaacgagagcagccaacggcgaccaagcaaaaggggggcgcggcccagccgcgcgcacacagcaagaagc

SEQ ID NO: 68223 - RNA, 79 nt, Homo sapiens
agcacccggacaccacgaaaggaaaccccaaccaggaacaaacaccgccgcaaaagccccaagcagacaccacggcccc

SEQ ID NO: 68224 - RNA, 54 nt, Homo sapiens
cccaagagacaggcaagagaggaagggacaaaggaagcagccaggacggagaga

SEQ ID NO: 68225 - RNA, 73 nt, Homo sapiens
ccgccccacagaacagggcagcgcagaagaaagaaggaagccagcgacggacaagcgaggaagaagcccgcca

SEQ ID NO: 68226 - RNA, 54 nt, Homo sapiens
gccaccgccgggggcggcccggacgaggggcaggaccggggacacacgacgcgg

SEQ ID NO: 68227 - RNA, 64 nt, Homo sapiens
aggcgcgaaggggagagaccgggcgaagcgcccaagcccggaggaggaggagggggccaggggg

SEQ ID NO: 68228 - RNA, 99 nt, Homo sapiens
gccgccccagaacgcagacagaggagcggacccccgcggcgcgcagcccagcagaggcggggcaccaggcccagacggcgaacccgagcaagcaaccac

SEQ ID NO: 68229 - RNA, 75 nt, Homo sapiens
cgccagacggacagggcccggaacaccaaaaagggggacggaaaaacaaaggaacagccaggacaaccggggcgg

SEQ ID NO: 68230 - RNA, 85 nt, Homo sapiens
ggcgcccagcaacacagaagccgacaaggcgcaagcgaaaacagaccgcgagcccagaggggcgagaggcaagacaaaagaaaac

SEQ ID NO: 68231 - RNA, 75 nt, Homo sapiens
gccccgcgcagcggccccggcggggcaagagcgggggcgggaccccgccgcggcgggaggaaagcaggaccggca

SEQ ID NO: 68232 - RNA, 78 nt, Homo sapiens
agaggccaagcgaggaacaccgaggacagaggcgagccaggaaaggaagccgaagacagaagaggagaacaccacgac

SEQ ID NO: 68233 - RNA, 45 nt, Homo sapiens
agcagggcgggaggagaccggaggagagcacccagcacggaggga

SEQ ID NO: 68234 - RNA, 69 nt, Homo sapiens
cggaagccccgaaaccccaggacccagacacaaaagagggaagaaagaggggcaagacaccgggaaaga

SEQ ID NO: 68235 - RNA, 75 nt, Homo sapiens
cgcgaaggacagggagaagacagcaggaggcgagaacgcggacaagcaaacaaagaggaaaaagagggcaacagc

SEQ ID NO: 68236 - RNA, 67 nt, Homo sapiens
ggaagcgacagagagaggcagagacaaacccgagagcaaaacaaccagccggaaccggacagcacaa

SEQ ID NO: 68237 - RNA, 75 nt, Homo sapiens
ggccaaaggcgccaggaaggagcagagagaccaagcagcggcggagcgcaagaaaagagagaccaaggaaaaggg

SEQ ID NO: 68238 - RNA, 62 nt, Homo sapiens
cagcaagcgaggcaagaaagaaaacggcgggaggggcgaacggggaagacaggccgaggagc

SEQ ID NO: 68239 - RNA, 91 nt, Homo sapiens
cgcgagcgagcggcaaagaggggccggaccacaaggcaagagcagcaggagaagaaaggaagagacgacagccagcaggcaggagcccgcc

SEQ ID NO: 68240 - RNA, 80 nt, Homo sapiens
acaggagagcgcgaaacaggcggaccacacgaaccgggcccccagagagagcgcacccaggccagcaccagcgccagcca

SEQ ID NO: 68241 - RNA, 81 nt, Homo sapiens
aaaaaggccccggaggcccaaaaccaagacaacccaacaaacaaccggagggagggaaggaagaaggaaaagcggaagcgc

SEQ ID NO: 68242 - RNA, 52 nt, Homo sapiens
gaccaaggggcaaggaggaagaagggccaagcccggcggcagggaaggaagg

SEQ ID NO: 68243 - RNA, 68 nt, Homo sapiens
gggggcggcggcgcgagccagcggggccgcccgggcaacccagggggcaggacgaccagcgggaggcc

SEQ ID NO: 68244 - RNA, 79 nt, Homo sapiens
ggccaccaccagcccaaacggcggggaggacggcccgcgaacgcagcccaagggcgccggccgagcccgggaaaacgac

SEQ ID NO: 68245 - RNA, 72 nt, Homo sapiens
gccaaggccgcaacaccggaagaagaaagacaaggcgaccgaaccaaggagcaggccagaaaagaccaggca

SEQ ID NO: 68246 - RNA, 67 nt, Homo sapiens
gggacacgcgagggggggagagaagcacaagcgggggaaaccagacaagagcgagcaagccgccgca

SEQ ID NO: 68247 - RNA, 84 nt, Homo sapiens
gcccggagccggcgcgaaccggcccccgcagcgggacccgggcccggcgaccggcagggagcagccgcccgccacgcgaggccc

SEQ ID NO: 68248 - RNA, 73 nt, Homo sapiens
cgaagagccgagcagccgggggggcggcggcggagacgcgggcccgagcgggccgcgagggaggaccaggcgc

SEQ ID NO: 68249 - RNA, 74 nt, Homo sapiens
aggcaagaccgccccgccgcccagaggacgcccaacaccacccacccaccacgacacgcagcggccgaggcagg

SEQ ID NO: 68250 - RNA, 67 nt, Homo sapiens
agaccccaaagaaggcccgcagaccgaaggaaaaggggaggaaaaccaaccaacacaaaggagacaa

SEQ ID NO: 68251 - RNA, 87 nt, Homo sapiens
acgcaaccaaccgggccaagcaaccccccaccagccccgagagcacgacacagggaaccagccaaacgagacagccacggcagagga

SEQ ID NO: 68252 - RNA, 53 nt, Homo sapiens
aggccagagcccaccaggcagcagccggccgcgagaggagacgacgaagaccc

SEQ ID NO: 68253 - RNA, 76 nt, Homo sapiens
caacagaggaaggaacaaagaagacgaccccgacgcaggccaggagccgcggacagaagccgagcacggccgagac

SEQ ID NO: 68254 - RNA, 77 nt, Homo sapiens
ggcccgggcggaacagcccacaggggggggcaagggcagacgggccagcagaaggagacccaacaccccggccagac

SEQ ID NO: 68255 - RNA, 66 nt, Homo sapiens
cggaggaacagcggcagccacaggagccaggcaaacaaggaccgggaaagaggagacaaaccccag

SEQ ID NO: 68256 - RNA, 70 nt, Homo sapiens
caggaaggaacaagcgagaaaggaagaaacggaaagggagacagggcagagggagaacacccaagagcgg

SEQ ID NO: 68257 - RNA, 77 nt, Homo sapiens
acagacagaacagaacccaaaagccgacaaccccagaaacagagccaggaagaagaagagagaaacggaagaaaagc

SEQ ID NO: 68258 - RNA, 68 nt, Homo sapiens
cagacgcagggcgcccccgcgggggagccggaaggacgcacaaccacacacggacacccacagaaaga

SEQ ID NO: 68259 - RNA, 77 nt, Homo sapiens
agacagagaagagaacacagagaaagcagccaacagcaaagccaggaaagagcacagcaaggaggaaacagcaaggg

SEQ ID NO: 68260 - RNA, 74 nt, Homo sapiens
gccaggaaaaacacacacccacggcagggcaaccccaccgcggaaggcaggcacacagacgagaacagagagga

SEQ ID NO: 68261 - RNA, 78 nt, Homo sapiens
gggcggccgcagcgggccgcggccgaggaggcagcgcgaccccgcacggcagcacaccgcgcccacaggacgaaaccg

SEQ ID NO: 68262 - RNA, 61 nt, Homo sapiens
gaaaagaaggcccaaaccagccagagcggaggagaaggacggcaaggagaaaaagcgaaaa

SEQ ID NO: 68263 - RNA, 77 nt, Homo sapiens
gcggaacacgccccgcaaaggccggaccaagacacagacgccagcagccagagcagaggcgaccgcacagaggaccc

SEQ ID NO: 68264 - RNA, 57 nt, Homo sapiens
agcaccgaaccgcacagcaagcccaggccaacaggaccgccgacggaggagacggaa

SEQ ID NO: 68265 - RNA, 70 nt, Homo sapiens
ccagacgggaacgggagacaagcgcagcgaggagaagcaaaaagccacgagggacacaaggccagcaggg

SEQ ID NO: 68266 - RNA, 80 nt, Homo sapiens
cggacgggagcaagcgacccggccggacccaccgaccagagaggaaacaggccagagaggcaaggacgaccaaggcacac

SEQ ID NO: 68267 - RNA, 81 nt, Homo sapiens
gggggagagccgaaggagcagcccaggaccgagaccggagcagccggggcggagcggagaaacgccgccggcagaggccag

SEQ ID NO: 68268 - RNA, 83 nt, Homo sapiens
cgagcagaggcgcacaccagccaggcagcagacccaaggcggggagccaggaacgggggacaaggagaggcacacacacagaa

SEQ ID NO: 68269 - RNA, 74 nt, Homo sapiens
ccgagagggagggagaaccagcaacggcaaacaaaaccacaggcacaaagagccaccacaagggcccgggccac

SEQ ID NO: 68270 - RNA, 81 nt, Homo sapiens
gcagaggaaaaaacgaccaagccagagaacagcccccacgcagcccagaagcgacaagcccagagaacaggaaagcaaaac

SEQ ID NO: 68271 - RNA, 55 nt, Homo sapiens
caacggcccccgcgccgggcgcagcgcaaaccaggcgagacagcaggagcaccaa

SEQ ID NO: 68272 - RNA, 81 nt, Homo sapiens
gcacagcgcacaagaaacccaagcgcgaggaagggaaaaggccgaggcacagcgggaagaccgcaaagacgacccgagaca

SEQ ID NO: 68273 - RNA, 74 nt, Homo sapiens
agaccaagggaggacggcggaacacggaggcgggaaagaaacgaggaaagaaccaaggaagacacccgccgaca

SEQ ID NO: 68274 - RNA, 79 nt, Homo sapiens
ggggagggggcgaacgcaggggagaggagaagagagcggcggaaggggacggagaagcagagaaggcaaagaagaagac

SEQ ID NO: 68275 - RNA, 66 nt, Homo sapiens
caagggagcagcagcgcaagccccggggcagagacacaggacacccacccgccggggacagacgcg

SEQ ID NO: 68276 - RNA, 79 nt, Homo sapiens
cagaagcccccagcgggaaaagagcacccaagacaaagcagagcccacagacaaggccaaaggcaaagcgcacagaggg

SEQ ID NO: 68277 - RNA, 77 nt, Homo sapiens
gaccaggaacccggaccaagggagccccaaacaagggggacggacagagagcgacagacagaacgccggaggcgagg

SEQ ID NO: 68278 - RNA, 72 nt, Homo sapiens
gcgccgcacccccgaccggaaagggaaccccgaccccgcgccccagggcacgcggacaagggggggcgcgcc

SEQ ID NO: 68279 - RNA, 66 nt, Homo sapiens
ccaaggggacgagcaaaggaagcgcgaacagcagcgcaggggacgaagggaacccgccgggcggcc

SEQ ID NO: 68280 - RNA, 72 nt, Homo sapiens
caagccccaacggcccccgcgccgggcgcagcggagcacccgccccaccccccacaccaccggcacaacacg

SEQ ID NO: 68281 - RNA, 75 nt, Homo sapiens
gagaggcgcccagcgaccagaaggagcagccaacacgaacgggcaggaacacaaccgacaccgcgaaaacaccgc

SEQ ID NO: 68282 - RNA, 75 nt, Homo sapiens
gaggaacaagacgggaacaacacaaaaggggcaggccacaggggagggccggaccacggcaagcacccgacaccc

SEQ ID NO: 68283 - RNA, 78 nt, Homo sapiens
cagagcacgccggccaaccacggaccacaaagacgcagcaagcaaaagaagcgggcacggcaggggaaagaaaaccga

SEQ ID NO: 68284 - RNA, 75 nt, Homo sapiens
agagcggccacacaacggagagcgcaagcccagcgggacagcacaaaccacgagaagcaaaaacagaggaagagc

SEQ ID NO: 68285 - RNA, 95 nt, Homo sapiens
ggaagaccgcgcgcagggccgcagcgggagcggacggcgagcgcgagcggcgcgagaaaggacccagacaggagcgcgggaagaagccggcccgg

SEQ ID NO: 68286 - RNA, 85 nt, Homo sapiens
agcacacagccagagagccaggaagcaaggaggagaaaccagagagcaagacaaagaaacagaagcgcgagaacagaaccccgag

SEQ ID NO: 68287 - RNA, 73 nt, Homo sapiens
ggaagaggcggaaaaaacgcaaggcgcaaaacaaggaccggacagagcacgcacagaagccaccaaaaaggaa

SEQ ID NO: 68288 - RNA, 76 nt, Homo sapiens
gaagagccgcacagaggcaaaaagggagaagccaacaaaggaagggaaaaggagccagaaagcagcagcccaagcg

SEQ ID NO: 68289 - RNA, 72 nt, Homo sapiens
aaggaccaagaaccaggacccaggagcgacaccgaacccacgacccacggaccaggaccaggagggcacggg

SEQ ID NO: 68290 - RNA, 68 nt, Homo sapiens
cgccccgacccgggcgaagaggggaggcaagcaggggggcaaaggaaagaaggcagaaagggaggcca

SEQ ID NO: 68291 - RNA, 81 nt, Homo sapiens
cggaagcccgcaaggaccgaacacccccaccccgaagaccgcggggacccccaaaagacaagggcaaaacggaccagacac

SEQ ID NO: 68292 - RNA, 68 nt, Homo sapiens
ggaagcgcagaagcaaccaaaaggaagacgggaacccggcgcaaggggacaaccacccccaaggagga

SEQ ID NO: 68293 - RNA, 46 nt, Homo sapiens
ccgcagcgcagcgccagccaggcagggagaccccaaggcaaaacca

SEQ ID NO: 68294 - RNA, 83 nt, Homo sapiens
gagcccgccgccgccgccaccacccacccggacacaggagccaccgaggccacccgagcaacgcacgcgcagccccgagcccc

SEQ ID NO: 68295 - RNA, 76 nt, Homo sapiens
cccaccggagagcagagagcggaaaacggcgcagccaacaagggcgcccggggacagcccggacgaagaggaccga

SEQ ID NO: 68296 - RNA, 84 nt, Homo sapiens
acagaagcacgcgaccgaaagaagaaagcaccacggaggacggaaagaaacccaaaggaagcaagaagggagacaccgacagga

SEQ ID NO: 68297 - RNA, 81 nt, Homo sapiens
aagccaaagaaacaccggacagaaagccagacaaagcccccccaaaccagacggagacgggagagcgggcgaagcaaggag

SEQ ID NO: 68298 - RNA, 52 nt, Homo sapiens
aaagacccggcaaagccaaccggggggaagcagaccaagaagacagaagggg

SEQ ID NO: 68299 - RNA, 73 nt, Homo sapiens
caagggagagcacaaacggaacgccggaacgaggccaagaagccaccaccagcacccaccccccagccaccga

SEQ ID NO: 68300 - RNA, 64 nt, Homo sapiens
cgcaccgcaggcagacaaaagggccaaagaagggagagacaccccccaggcacagccacacccc

SEQ ID NO: 68301 - RNA, 79 nt, Homo sapiens
aagcagcgaagaagaggcccaacccccaccccgcccaaggaggcccagcgagggacgaggccacagcagaaaaaaccgg

SEQ ID NO: 68302 - RNA, 82 nt, Homo sapiens
cggacagacacgcgccggagagaaacagcgacaggacacaggagccaggcgagaagccaacagggacaagcaagccacgaga

SEQ ID NO: 68303 - RNA, 79 nt, Homo sapiens
gaagggcaagggggccgaagcaaccagcaaccccggagagcgagcgggcacgagccgggcgcacggaagcacaccgggg

SEQ ID NO: 68304 - RNA, 74 nt, Homo sapiens
acggacgaaagccagagaaaaagcggagaaaaggcacgacagagggagacaaagcgggcagaaaagaagacgga

SEQ ID NO: 68305 - RNA, 83 nt, Homo sapiens
cgccacgccagcacgccaacccggacggacaacaccggggagcgcggagagcggaagccggcagaagaagacccaccaagggg

SEQ ID NO: 68306 - RNA, 65 nt, Homo sapiens
gccgcagggaggggaaacgaagcgcacgaaacaccaagcgcgcgcggcgcggcgaagccccaaaa

SEQ ID NO: 68307 - RNA, 78 nt, Homo sapiens
agaacggagagaaaacccaccaaaccagcgacagaaggcaggccgaggccccagcagcggagggggagcccagacaga

SEQ ID NO: 68308 - RNA, 75 nt, Homo sapiens
cggaccgacggacaagccagaaccggaaacacagaagcaccccagaccggacaagggggacccaaccgacgaacg

SEQ ID NO: 68309 - RNA, 74 nt, Homo sapiens
aaagcagcggccggacagcgccacggcgggccgcgggaggacaccacccacagcgaccaggcacaggaccaggg

SEQ ID NO: 68310 - RNA, 73 nt, Homo sapiens
cggacagagggaagagcaccaccaaagccacaagggcgcagaagccggcagagcccaagagacaacaagccga

SEQ ID NO: 68311 - RNA, 73 nt, Homo sapiens
aggccgaaaagaacaggaacagacgacagggaacagcccagaaacacagcgaaagcgccagcagcgaacccca

SEQ ID NO: 68312 - RNA, 52 nt, Homo sapiens
agggagacacacacggggagagcgagggggaacggacacgaaaacaggaagc

SEQ ID NO: 68313 - RNA, 69 nt, Homo sapiens
gcagaacggaacagcaggaacggcgcgcaagggagccaggacaggagaggaaaaccaagcggaaacagc

SEQ ID NO: 68314 - RNA, 64 nt, Homo sapiens
cgcggagagcacgccagaaggcccgggcacgagcaagaacgaggccaaggaggagggacacaga

SEQ ID NO: 68315 - RNA, 76 nt, Homo sapiens
cccaaaacggcaccccggagaaaaacagagcgaagggaagggagagcgaaacgagaacccaggacaagaaacagca

SEQ ID NO: 68316 - RNA, 79 nt, Homo sapiens
aggaacgacgcggaccagaagccagagcgaggacgccggcagaaagcaccgggaggaaagagagccacacgaagaacac

SEQ ID NO: 68317 - RNA, 74 nt, Homo sapiens
gagccgcagacgaagaacccaggaggcagggcagcggcaaacggcagaacagaagcaacggggaagaaaaacag

SEQ ID NO: 68318 - RNA, 79 nt, Homo sapiens
cagagccccagcccgcggcggagagcccacgcaggaggacaaagccggaggcagaagcaggaaaccagagggagagccg

SEQ ID NO: 68319 - RNA, 86 nt, Homo sapiens
ggcagccccgggcaaccagcaagcccagagaacccacagaaaccaagaaccaacagagaaagaggacgggggccagacaacagcag

SEQ ID NO: 68320 - RNA, 77 nt, Homo sapiens
gaagaggggcggagcccaccgcgagaagagcaagacagggggccgggaaacagaccacgaaaaacacacaacacgac

SEQ ID NO: 68321 - RNA, 76 nt, Homo sapiens
gccccgccaaggaaacagaggccaaaaagcagaaaaacaaaccagcccaagaagcgacaaagcccgcgaccaaacg

SEQ ID NO: 68322 - RNA, 70 nt, Homo sapiens
gagccccccagcaccgagagagaaacacagcccaagagacagaaacgacaagacaagcgaccacccagcc

SEQ ID NO: 68323 - RNA, 51 nt, Homo sapiens
ccgcaccaacgagaagagggacgcgagagcccacgaagagcgacggagcga

SEQ ID NO: 68324 - RNA, 90 nt, Homo sapiens
gagacccgagcacaggccccaggagccgcgggagcgccgccaggagcgcaccagacggacagaccacacgcggacaccaaggcgccaggc

SEQ ID NO: 68325 - RNA, 82 nt, Homo sapiens
agcccccaagagcgggacacagagcacgcagccccgaaggcggcccggccccccaaaaggcagcacacccaccgggaccgac

SEQ ID NO: 68326 - RNA, 71 nt, Homo sapiens
gaacaaggcgacaacacagggagcggcaggggaggcgaagaagagcccggacagaaagacgacaaaaaaac

SEQ ID NO: 68327 - RNA, 79 nt, Homo sapiens
ggagaggcagacgcaccacccagacccaccggcggaggcggaaccaaagagcggcaacaccccccggacccccaggaca

SEQ ID NO: 68328 - RNA, 80 nt, Homo sapiens
gacgcccagccaaacaaaaaggaaaggagacaagcagagacgaaccaggcaaagaaaagaagccgagcccaaaaaaacag

SEQ ID NO: 68329 - RNA, 48 nt, Homo sapiens
ggagaaaaggccaagaaggcaggcgggaaaacggcacaaggcgacgag

SEQ ID NO: 68330 - RNA, 84 nt, Homo sapiens
gggcccccaagacacaccaccgagcggccggacggcccggcagggaaagcaacggcgcaagcggcggcggcgggcagaggacac

SEQ ID NO: 68331 - RNA, 76 nt, Homo sapiens
ggcccggagaacacaaccccccgagaagcccaggaaaaggaagggaaaacaagaggaaaaaaccagcaacccaaca

SEQ ID NO: 68332 - RNA, 70 nt, Homo sapiens
cgaggacagagccgaaagaagggagaggaaggaacaccaggcccggcggcggagggggggcgaagccacg

SEQ ID NO: 68333 - RNA, 71 nt, Homo sapiens
acaaagcaaaccagaaggcagagaggggccccagaggagaaacgccccacgaagcgaaaccccgaaagcac

SEQ ID NO: 68334 - RNA, 70 nt, Homo sapiens
cggaaaagcgaagccgagcccaaacaaagggacagcaaaagggaggaggaagcagccaacagaaaacacg

SEQ ID NO: 68335 - RNA, 62 nt, Homo sapiens
gcgaggggccggagagggccggaccgagcggccgggagaaagacagcaaagaaaaggagaag

SEQ ID NO: 68336 - RNA, 76 nt, Homo sapiens
caccgcccgcccggagcggagcagccccagcgccacgcccaaaaggaacagcaaccgccccgaagcagcacgacgg

SEQ ID NO: 68337 - RNA, 75 nt, Homo sapiens
ccggcaggagaaaaggagagaaacacggagacagcaccaaacccacagaggcacgagacccaacacggaccacgc

SEQ ID NO: 68338 - RNA, 77 nt, Homo sapiens
agagagccagagcaagagcggaccgccgaagaaggagagacgaccacgcaacagaaaaagagcgcacccaagggaag

SEQ ID NO: 68339 - RNA, 76 nt, Homo sapiens
agaaggaaagaaggaacggagaaggcaaagaagcaccggggggaagaagaagggaacaagcggagggacgcacgag

SEQ ID NO: 68340 - RNA, 65 nt, Homo sapiens
cggggaccgcgccaagaggcgaggccgagacaaacgccacaacggacaaaaagacagcagaaagc

SEQ ID NO: 68341 - RNA, 53 nt, Homo sapiens
caaagaagggagagaggacagccagacaagaccccaacgaagggccagaaaag

SEQ ID NO: 68342 - RNA, 72 nt, Homo sapiens
ccagcagaggccccgcaccgcgggagagagcgccccgagacaaaagccacacagcccgcaagaagcccagcg

SEQ ID NO: 68343 - RNA, 69 nt, Homo sapiens
cgcgagagacacaggaacggagagcgcgcgccgcgcgcccgcacaaacgccggggacaacaacccgaag

SEQ ID NO: 68344 - RNA, 82 nt, Homo sapiens
cgcgagaaagaggagaggaaaagcgaaacggccaggaagcaggagcggaagcccagggcccacggccccacggggcgacgag

SEQ ID NO: 68345 - RNA, 75 nt, Homo sapiens
agaaagcagcaacagacaaggcagacacaaaaggaagagaggggcagaggacaacagcaaccaagaagacgagca

SEQ ID NO: 68346 - RNA, 82 nt, Homo sapiens
gaccaagaagaccaggaagagagaaaccacagaagacaacaagaaaaaaaagaggggggaagacacaagaggcagcagcagc

SEQ ID NO: 68347 - RNA, 83 nt, Homo sapiens
gaaggggaaccgacgaaagaaaaccccgagggaaacaagaaaacacaaagaggcagcaaaggcgaagggagggccgccccaac

SEQ ID NO: 68348 - RNA, 79 nt, Homo sapiens
ccgagcaccggagaaaacacaaacccaggagcaccacgcacgagccagggagccgccgggaccggcccgggagacgaca

SEQ ID NO: 68349 - RNA, 59 nt, Homo sapiens
gcagcagcgaccagaagcaagaccccacaagcacagcaaagcgagaagaagaacccaaa

SEQ ID NO: 68350 - RNA, 87 nt, Homo sapiens
gggaccaggaccggaggcagcaccaacaaacaacgcggagcagcggcaggcccacacacgaggaaggcgcccccgacgacgcccgca

SEQ ID NO: 68351 - RNA, 62 nt, Homo sapiens
ggcccaggcgcacacggaaggaacggggcagccgaagaggaagcagacccggacaaaagggc

SEQ ID NO: 68352 - RNA, 74 nt, Homo sapiens
ggaggggcgcggaggcgaccgccaggcgcccaaacccggaccagggaagccaccgcaaaaggggacgcaacggc

SEQ ID NO: 68353 - RNA, 76 nt, Homo sapiens
gggaggccgccaaaagcggagccgccccccaagacacgccaagagaaagaccagaagagaaggcaaaaagaaggaa

SEQ ID NO: 68354 - RNA, 80 nt, Homo sapiens
cagcaggcagcggcagcaccgggagcagcagaggaagggacaagcagaagcaagcaaacgcacgaggaggcaaggaccgc

SEQ ID NO: 68355 - RNA, 69 nt, Homo sapiens
gaacaggacgagagcagcggagaaacgccaggaacgcaagaccaagggagccagcaggccaagggaaaa

SEQ ID NO: 68356 - RNA, 53 nt, Homo sapiens
ccagcacggaccaggaggcgagcaacaggcgaaaagacaaacgacaaaagagg

SEQ ID NO: 68357 - RNA, 64 nt, Homo sapiens
gacacccagggacaaagagacggacagaacgccggacagggcacacaacaacgacagaacgcgg

SEQ ID NO: 68358 - RNA, 80 nt, Homo sapiens
ccgcaccagccggaggggcagaccggacaagccaggagcagacagcgaagggccaagggccaacaacccagaagcgacaa

SEQ ID NO: 68359 - RNA, 70 nt, Homo sapiens
agccggaccgccagagagagaagagaggagggagaacaagcaacggacacagcgaccggacagaagacag

SEQ ID NO: 68360 - RNA, 85 nt, Homo sapiens
gagcgccggaggcggccgcaccgggagcccagcaccaccccagcccaggacgcggagcaggcaccggaggaagagaagggggaca

SEQ ID NO: 68361 - RNA, 78 nt, Homo sapiens
acgggcgggccggcgccggagacgagccggacagaaaaaacggcccgggaaaaccagaaaaacccagagaaaagcaac

SEQ ID NO: 68362 - RNA, 86 nt, Homo sapiens
aacaagaggccccagagggaaaagaagcccaaagaaagggccgcggcggcaaaggcagcacacgggggccccggggacggcggcag

SEQ ID NO: 68363 - RNA, 74 nt, Homo sapiens
aaaggcacaaagcccccgagcacacacaccagagggagcaccgacggcaacacggaggggccgcgccgggcagg

SEQ ID NO: 68364 - RNA, 69 nt, Homo sapiens
gagagagggaagcgcccggccaccaaagcgcgcgggcacagccccccgcagacagaacaggacgaaaca

SEQ ID NO: 68365 - RNA, 74 nt, Homo sapiens
cgagacggaggagagggccgaaacaacgaacgagcaaggaagggccaaggcagaccccacaccggagaacgcaa

SEQ ID NO: 68366 - RNA, 73 nt, Homo sapiens
acacacaccgaaacaacaccaaccaggcgccacaggagccgcagaagcaaaggcaccgccaaaccgaaaacgc

SEQ ID NO: 68367 - RNA, 61 nt, Homo sapiens
caaacacccccagacaaaggaacacagcacccacccacacccacacccgcgacgggaggga

SEQ ID NO: 68368 - RNA, 85 nt, Homo sapiens
ggggcccagggggccggagggccagggccccggagcggcgcgagggcggcccgcagaagagcacagaaggagaaggccagcaaag

SEQ ID NO: 68369 - RNA, 65 nt, Homo sapiens
cccaaccggcagggaaagggcgagaagcgcgccgcccccacagaagagaagcaagcccacccaga

SEQ ID NO: 68370 - RNA, 69 nt, Homo sapiens
gcggcgccccggccgaggggcggcggccccagcacgcaccccgcgccgccgccccccaccaaggaagcc

SEQ ID NO: 68371 - RNA, 86 nt, Homo sapiens
ggaagccgggcgggggagcggggcgcggcgggaaggagcgggcgacccgggggggccagcggagcccgagaagaaaaacccaagcc

SEQ ID NO: 68372 - RNA, 55 nt, Homo sapiens
gagaggcccgcaggagaccgccgcccagcaggggagaaagaaaacacgaaacagg

SEQ ID NO: 68373 - RNA, 64 nt, Homo sapiens
caaggcagaagaaacggagaagggcaaagacagcacccaagaaaacccaggccgcgaaggagaa

SEQ ID NO: 68374 - RNA, 66 nt, Homo sapiens
agacaaaggaccaaagggcacagcagggggcgcagacaccaaaaaaaaggaccacaaaaaagaccc

SEQ ID NO: 68375 - RNA, 50 nt, Homo sapiens
gagccccagccaggggaccgacagcaagaaaaggagaaaacaaggccgcg

SEQ ID NO: 68376 - RNA, 70 nt, Homo sapiens
gcgaaggggaaggcgccgaagaggacgaagaagaccggggagccgagccaacccacccgccaagccaaag

SEQ ID NO: 68377 - RNA, 81 nt, Homo sapiens
agcagcccccggagacagcggcacagagggccgccagagaaacacagcccaaagaaacacacccccccacaacaaggccca

SEQ ID NO: 68378 - RNA, 80 nt, Homo sapiens
aagagcacgaaaaaaccaaagacgggcgcaaagagcgaagaaaccagccagaagaaaggcccagaacagaaacagagaga

SEQ ID NO: 68379 - RNA, 113 nt, Homo sapiens
cacgagggaggcaagagcggcccaccaaggaaaggggacagcaacagccggcgggcggaagggccgccgccacaacagagcggccagaggcggacccccagcagcgagagagg

SEQ ID NO: 68380 - RNA, 71 nt, Homo sapiens
gacaacagccacccccccacacggacggggcccaggacagaaggcgggcaaggagcgccccccgagcaccc

SEQ ID NO: 68381 - RNA, 80 nt, Homo sapiens
aggcaaggaccgggggcgagaggacgcggagccgcggcggagccggaggaagcgaggcacccaagcccgaacaacaggga

SEQ ID NO: 68382 - RNA, 74 nt, Homo sapiens
gcgaaggcgggggagacgaaaacggcaccaagaggcccagcccggccagcaggcagcacaccacaaaccaaggg

SEQ ID NO: 68383 - RNA, 71 nt, Homo sapiens
gaaaaggggcaggcacacaccggacaggcagacaagaccaaaggaggggagacgccagaagcaggacgaca

SEQ ID NO: 68384 - RNA, 51 nt, Homo sapiens
gacgcagggcgcccccgagcagccccaagcacgcaacccaggccgacgcgc

SEQ ID NO: 68385 - RNA, 75 nt, Homo sapiens
caccgcccgccacgcacgccagaaccgaggagagaaggcagccagacggaagaggaggaagcgggaacaaggaac

SEQ ID NO: 68386 - RNA, 79 nt, Homo sapiens
ccccccaagagcaccacacagagcaaaaagacagagaggacccgggaacccagaacggcagacagagcaagagagagga

SEQ ID NO: 68387 - RNA, 71 nt, Homo sapiens
gcgaagagcgaaagggggacaccggggcagcaggggagaagcagaccgcaccaggcgggaccccgaaaaag

SEQ ID NO: 68388 - RNA, 64 nt, Homo sapiens
gcgaagaagggccaaccccggaggaggagcaaagacaagaccaacagccacgccaaaagaaaac

SEQ ID NO: 68389 - RNA, 40 nt, Homo sapiens
aacaggacgaaggcggcgaagaccgcgcgaaacgcccaga

SEQ ID NO: 68390 - RNA, 73 nt, Homo sapiens
gcgcgcgcgcgcggggccccgcaggcgaacggaaggacacccaagagaaaggagagaacgaaagacacagcac

SEQ ID NO: 68391 - RNA, 84 nt, Homo sapiens
gcagccgccggagccagccaacgagcgggcccaggacagaaggcgggcaaggagcgccccccgagcaccccccacagcccacgc

SEQ ID NO: 68392 - RNA, 52 nt, Homo sapiens
cgaagcgggcgcgcgcacggcaggacggaggagaggagccaagcccaacggg

SEQ ID NO: 68393 - RNA, 65 nt, Homo sapiens
gagcacagagcccgccgccgaccgccgcccgccacacccgccgccagacaccaagggaacccaag

SEQ ID NO: 68394 - RNA, 67 nt, Homo sapiens
cgcggagagcccaaacaccaccaccaagggaggggggcacgaagaccgcacacgacagcgacgagcc

SEQ ID NO: 68395 - RNA, 67 nt, Homo sapiens
gaggagaaaggacaggccaacagcaacagaagggggcaaagagaaccaggagaccccaccaccacag

SEQ ID NO: 68396 - RNA, 77 nt, Homo sapiens
gccaaaaaagccaccagcaaaccccccacagcagaggagcaaaaaggaccgagaaaaacccagaaaagaagaaaaaa

SEQ ID NO: 68397 - RNA, 75 nt, Homo sapiens
acaccaaacacacgggaccgaaacaggccggggcacagcacagcgccggcgcaaggccgacgcccgccgcggccg

SEQ ID NO: 68398 - RNA, 58 nt, Homo sapiens
gagagaagggagagagaccaaagacgagagggacggagcgaaccaggcaggccaccga

SEQ ID NO: 68399 - RNA, 97 nt, Homo sapiens
cgacaagcgcccacgaggagacgcggaggacagcccgcaggcgacaacagagcaacgggcaggggggaaaagcgcgggcacccagccagggcgccgg

SEQ ID NO: 68400 - RNA, 87 nt, Homo sapiens
acccagccaggcagaccccgggcagcagggccaagaccggcccagacaggagggcggcagggggggcagggccgcacgggccgcggc

SEQ ID NO: 68401 - RNA, 73 nt, Homo sapiens
acaaccaagccacaaaagacacgccacaaccgcccacacacgcgaccaccaaggcaaaccacagacaaacagg

SEQ ID NO: 68402 - RNA, 71 nt, Homo sapiens
gaagagcgggcgggccagaaggagcgcgaacaaagccaaacagaagaaagaaggaaaagaaaccaagcaaa

SEQ ID NO: 68403 - RNA, 77 nt, Homo sapiens
gaggccccacaaccacgccagcgagcaacaccgccggaaccggacgggaggaacacgcacggaagacgcgcagcagg

SEQ ID NO: 68404 - RNA, 75 nt, Homo sapiens
ccccccacgccacacagggaaggcacacagcagccccgcgcaggggaaaccgcccccaaaggccagaggacgaca

SEQ ID NO: 68405 - RNA, 73 nt, Homo sapiens
agcagaacagaaagaggaaggagacacagcagaggaaaaaaacagacgcgacaagaggcggggagcaggcacc

SEQ ID NO: 68406 - RNA, 82 nt, Homo sapiens
agcgacagcggcggaaggccaccagaggcggcaaagcgaaggcggagcaggagaaagcggcacagaccccagaggaaaaacc

SEQ ID NO: 68407 - RNA, 57 nt, Homo sapiens
accgagaggcagacaagacacccgcagagaggcgccagccgagagcaccaccgaccg

SEQ ID NO: 68408 - RNA, 86 nt, Homo sapiens
gcgccagcggccgagcgggcggcccggccgggcgcccggggcggcggaggccaggcagagcagcccaccagggaggggaggggggg

SEQ ID NO: 68409 - RNA, 85 nt, Homo sapiens
agaaagacgcgaggggacgaggaagacagggaccgcccgaacggagcaccggcgggacaccagaagaaaacggccaggccagcac

SEQ ID NO: 68410 - RNA, 62 nt, Homo sapiens
gggacgacaccgggcagggcagagcacccgacgcacacaggagaccaaagcaggaccgcaga

SEQ ID NO: 68411 - RNA, 75 nt, Homo sapiens
acacgagaaccaccccgacacaacaccaccaggggacagcaggagcaacacccccccggcccaggccagcccccg

SEQ ID NO: 68412 - RNA, 31 nt, Homo sapiens
agccgggccaggcagagaaggaggaagcacc

SEQ ID NO: 68413 - RNA, 63 nt, Homo sapiens
ccacgcgaccccggggccacccaagaaccagggccgaaaacccagaagaacggccacccagag

SEQ ID NO: 68414 - RNA, 88 nt, Homo sapiens
cgcccgccgggaggaccgagccaagagggcagccgccgaaggaacgcgacggcggcgcccgcagccagggaaacgcagagaccagaga

SEQ ID NO: 68415 - RNA, 78 nt, Homo sapiens
acggagaagccgccgaagagacacgagaggcgagggacgacagagcaagcggcagagggcaagcgggaaaaagaccag

SEQ ID NO: 68416 - RNA, 66 nt, Homo sapiens
ggaaggagaccgaaaagaccgaagaaacggacgaaagggagaaaaagagccggaccacaccggaag

SEQ ID NO: 68417 - RNA, 75 nt, Homo sapiens
ggaagacaggccacccagcggggagcacggcgagcagccaggccaggagaggcgagcccccgccccgggaaagcg

SEQ ID NO: 68418 - RNA, 79 nt, Homo sapiens
acgcgccgcacggacaggccgcagccgccggggcaggcagagaaagcaagagacgcaaccgaacgcagagcggagaacg

SEQ ID NO: 68419 - RNA, 54 nt, Homo sapiens
accgggggcagccggggacagccgcgcccccccagcccgaaacgggcacggccc

SEQ ID NO: 68420 - RNA, 72 nt, Homo sapiens
caaggcgccaaacaagaaaaacaaagccaaggaaaccccaacacagagccaagcgccaaaggggccaggccc

SEQ ID NO: 68421 - RNA, 71 nt, Homo sapiens
gaaggcgcgcaccggaagcaccagcgaggaagggcccgggcaagaagacagaacaagcagagaaccgcggc

SEQ ID NO: 68422 - RNA, 85 nt, Homo sapiens
gccgagccaacaggcgggagagccaagcggaagagagacaagagagacaccccaaccgacaaagagcaccagacagccgggaacg

SEQ ID NO: 68423 - RNA, 65 nt, Homo sapiens
aggagacaagcggaggccaggaacaaaacaggaagggaaggggcggagacgggcggaacgcagga

SEQ ID NO: 68424 - RNA, 35 nt, Homo sapiens
ggacaccgaagccaaccgggggcagcggcaagcag

SEQ ID NO: 68425 - RNA, 66 nt, Homo sapiens
ggaaccagacaagcaaagaaccaggacaaaaaggaagcccgggagaggcaaaccaccccggggcgg

SEQ ID NO: 68426 - RNA, 75 nt, Homo sapiens
gcagcccggacaaaggcccgcagcccgaggcgccgccaggccgccgcagccgccgcgcgcgggcggcgcaagggg

SEQ ID NO: 68427 - RNA, 82 nt, Homo sapiens
ccacacccccccgggggggaccacaccaccccagagccaaggcaccgaggccggccaagcagagccggcaggagcggagacg

SEQ ID NO: 68428 - RNA, 80 nt, Homo sapiens
gagaggggaaacagcggagacggaacgggagaagaggcaaagaaacaccaagaccacgcggaaggcaccgaaagaagcaa

SEQ ID NO: 68429 - RNA, 59 nt, Homo sapiens
cggccacggaggcaccagaagaagcaccaggacaaccgcaccagaaaaggacccacggc

SEQ ID NO: 68430 - RNA, 77 nt, Homo sapiens
aggcaccccccacagaaagggcgcgccacgcagagccccgccaggaagacacgccggggaacgaagcagaagacgga

SEQ ID NO: 68431 - RNA, 71 nt, Homo sapiens
cggcaccggagagcgcaaagacacccaaggcaaaaaagccaaaaccaaccaacaacaacgaccggcccgca

SEQ ID NO: 68432 - RNA, 49 nt, Homo sapiens
ggaccagaccgaccaccaaaaggaccgacagcaagaaaaggagaaaaca

SEQ ID NO: 68433 - RNA, 75 nt, Homo sapiens
gacacggggcacgccaccaccaagccacccggccacaaaacgaagccacgaagccccccggaagcaccgaagacc

SEQ ID NO: 68434 - RNA, 81 nt, Homo sapiens
ccgcaggccccaccccccagaaagaagaggaaagacgagcccaggagaccaaggacagaacaagaaacagcacggaaggga

SEQ ID NO: 68435 - RNA, 78 nt, Homo sapiens
gagaaaaggaagagagagcaagagaggccacgcccacgaggcgacagagcaaaggaagggcccagcacagccacaaag

SEQ ID NO: 68436 - RNA, 74 nt, Homo sapiens
cggcggcccacccggcccggccgaccccggcggcccgcccgcccccccccagcaacggggcggcacacaaggag

SEQ ID NO: 68437 - RNA, 80 nt, Homo sapiens
gaggaggcgcgccccccgcgaagcgggccaaggccaccggagggggaccaccaccaggggaaaagaaaccaagcaaaaca

SEQ ID NO: 68438 - RNA, 64 nt, Homo sapiens
cagaaccaccaaaagccaagaaacgggggaaaagccagccagaacacagaacagaacacacgga

SEQ ID NO: 68439 - RNA, 46 nt, Homo sapiens
gcccgcgcggaggcgcggccgacgagagagaagccagaaaacagag

SEQ ID NO: 68440 - RNA, 83 nt, Homo sapiens
aaacagagggaggaagacagccagcagaaacgacgacaccccgaacagaaacgccacgaaccaagagaggcaaaggaagaaca

SEQ ID NO: 68441 - RNA, 82 nt, Homo sapiens
gcaagccgccaccgggagaagcggccgggccaagggacgaacagcggggacgccccagcagaccgcccaggagaggaaagca

SEQ ID NO: 68442 - RNA, 47 nt, Homo sapiens
gaaaggaggacagggcaggcagaccaggcccaccgccaacgcgggaa

SEQ ID NO: 68443 - RNA, 40 nt, Homo sapiens
gagccgccagcgcggccagggggccgacgacgagccccgc

SEQ ID NO: 68444 - RNA, 48 nt, Homo sapiens
cgcccccccacacacagaaggaggccaaaggaagaccaggaaagaaca

SEQ ID NO: 68445 - RNA, 88 nt, Homo sapiens
gcggaggccccagggaagcgcagaaagcaggcgaacccgcggcgcaaaacgcaacggggcggcacacaaggagcgaagggcagggaga

SEQ ID NO: 68446 - RNA, 78 nt, Homo sapiens
gcaaagacgccgcacccaaggccaaacagcagccccccgggaagacacaaacgcaccaccagaaagccaagcggaaaa

SEQ ID NO: 68447 - RNA, 81 nt, Homo sapiens
gacaagaggagaggaagaggaagagaaggcagagggggcgagggaggaaagggggcaaaacgacgaagaagacaagaggac

SEQ ID NO: 68448 - RNA, 65 nt, Homo sapiens
ggaaaagacccggaaagaagagacacagaggagccacacccccagaacaaacggacccaggacaa

SEQ ID NO: 68449 - RNA, 80 nt, Homo sapiens
gcaaccagggcagagacacgcccgggcggggagggcagccgggcccgcccaggccgacgggaagcgaggaggaaagagag

SEQ ID NO: 68450 - RNA, 54 nt, Homo sapiens
gacagcagcccaggagagagggagaaaacgcaggccacaaagacaggaccaaga

SEQ ID NO: 68451 - RNA, 82 nt, Homo sapiens
gcagccgcgcgacgccgagcgcgccgcgagaccccgccccccaggcagaccgcgagacccggcgcgggcacgggacccccgg

SEQ ID NO: 68452 - RNA, 73 nt, Homo sapiens
agcaacaccacgccgccacacagcaaaacagggcagaaaagaacggaacggcagaagaaggggaaaagaaagc

SEQ ID NO: 68453 - RNA, 71 nt, Homo sapiens
gccgcaccacgcggcggccacccggccgggaacgggaaacgcgcgccgagaagccacccgccgagagggag

SEQ ID NO: 68454 - RNA, 52 nt, Homo sapiens
acgaggcgcccaggagacgagcagggccccaggcggcacgacccagagcccg

SEQ ID NO: 68455 - RNA, 69 nt, Homo sapiens
ccagagcccagggcccagaggaccccagccgcgcccgggagagcaagaaaccccaacaaggccggccgc

SEQ ID NO: 68456 - RNA, 78 nt, Homo sapiens
cgcccccgccgcgcccgggagacgccccgccgcccacccagccagcaagcgcccggaggaccgggacccgggccgaca

SEQ ID NO: 68457 - RNA, 71 nt, Homo sapiens
gaaggacgcgggaaaaggaaaccagggccaaccaagaccgggaaccggaagagaaaggacagacaaggcgc

SEQ ID NO: 68458 - RNA, 53 nt, Homo sapiens
ggaccaagaacagaggagccagagccgaagaccaccaggaagggggcgcaggg

SEQ ID NO: 68459 - RNA, 58 nt, Homo sapiens
cgcgccgcagcgccaccgacaagcagaccggaagaccgacggaagaccacaccccgag

SEQ ID NO: 68460 - RNA, 74 nt, Homo sapiens
caaacccccagcaagggacggaacaacgacagagagagaacccaccgcaagagaccaaaggccaagagcaccgc

SEQ ID NO: 68461 - RNA, 63 nt, Homo sapiens
cccgcggagcggagaaccggcacacaggacaggccccccagccaccagcggggcccacaggag

SEQ ID NO: 68462 - RNA, 79 nt, Homo sapiens
ggaggccccagggaagcgcagaaagcaggcgaacccgcggcgcaaaacgggagggccgaggaagacccccggagaacac

SEQ ID NO: 68463 - RNA, 72 nt, Homo sapiens
gcgaccgcccagccccccccgcgagagcgggaacaggaaagcagaacaccagagaggaccaaaacaaccaca

SEQ ID NO: 68464 - RNA, 72 nt, Homo sapiens
aacgaccaggcacagcgacaaaccgggaacaagagcagagaagcaaagccaggcaaacggcaaaagccacag

SEQ ID NO: 68465 - RNA, 52 nt, Homo sapiens
gacaggaggaggaacaagaggagccgagagcagcagaggccgcgacaagaca

SEQ ID NO: 68466 - RNA, 79 nt, Homo sapiens
cagaggaaggacagcaggaagcagaccacgccaaagcaggcacgcaaagagagcaggagaaggacagaccagcagccca

SEQ ID NO: 68467 - RNA, 82 nt, Homo sapiens
agggaggcacgagaagcccggcgacggaggaacgcaggcgcgccagcaccacgaagaaagcccaggagccacgaaagcaggc

SEQ ID NO: 68468 - RNA, 74 nt, Homo sapiens
cgacaaggcgcaagcgaaaacagaccgcgagcccagaggcgccggcgaaagcaacgaagggacgccagaacaag

SEQ ID NO: 68469 - RNA, 77 nt, Homo sapiens
agcaaagccagagaaggacggccgccaggcacagagaaggcaaacgggagggcgaggacaccaagagcagcgcggag

SEQ ID NO: 68470 - RNA, 71 nt, Homo sapiens
gcaaggaaacccaaccccaggaccgggggagcggccgaggacaagcacaagcagcaccaaaaggcagcacc

SEQ ID NO: 68471 - RNA, 73 nt, Homo sapiens
acacccgccccgacccgggcgaagagagcgcgacagagggagagcacccgccacaggccacaaaggaggcagg

SEQ ID NO: 68472 - RNA, 84 nt, Homo sapiens
gccccccgcccggccagccgccccgccgggagaaccgaggccgccccaccccaccggaagacgacgaaaccccaggaggaggcc

SEQ ID NO: 68473 - RNA, 69 nt, Homo sapiens
cccggggacgccgcaggggaacccgccccccagggcacaccgacagccgagcggcgcaggaggccaagg

SEQ ID NO: 68474 - RNA, 69 nt, Homo sapiens
caggcgcaccacggccaggcaaagaaagacgaggagaggagacacaggacagacaggcccaagagcgag

SEQ ID NO: 68475 - RNA, 67 nt, Homo sapiens
agcagcaccgagaaacaaggcaaacaacggacagaggaggcaagcgccagcagccgagcaaagaaaa

SEQ ID NO: 68476 - RNA, 60 nt, Homo sapiens
gggaacaaacacaagccccagcaccacgaacaggagaacacaaagaacccaaacgaaagg

SEQ ID NO: 68477 - RNA, 54 nt, Homo sapiens
cccgagaaccgcaggagccagagaaaccggaaggcgaaacagcgcgccgaagag

SEQ ID NO: 68478 - RNA, 72 nt, Homo sapiens
gaggaggcccccagccagggaaaagcgccccaaacccaagaaggaagcccagagcccaaagaaaaacaggaa

SEQ ID NO: 68479 - RNA, 81 nt, Homo sapiens
cagccggcccgaggacaccgacaccagcaggaccaagaacgcccagcccgcgggcaccggcagaaaggaggaggaaaacac

SEQ ID NO: 68480 - RNA, 56 nt, Homo sapiens
gagggaagaccccaaaacagcgagcgggaccgcccccccaccgcggaagagcaagg

SEQ ID NO: 68481 - RNA, 77 nt, Homo sapiens
agagcaggcgcaaaccccagaccccgccccggccgccgcccgccggggcgagacccccagggaagcccgaacacccg

SEQ ID NO: 68482 - RNA, 76 nt, Homo sapiens
agggacagaacccaaaacaaaaagcaaccaagaccccgcagcaccaggcccacaaaaggacacggcgggggccagc

SEQ ID NO: 68483 - RNA, 78 nt, Homo sapiens
ccgagccagacagggacggaggacgagcaaaagagcaccgaaccggagaccgaggagaaccagccccaagcacgggaa

SEQ ID NO: 68484 - RNA, 102 nt, Homo sapiens
cagaaaggaacggcaccgcggacagagcagacagaacagacaaggggacacggaaaaagcagcaaagggagaaaagaaggccaaacagaagcaggcccagcc

SEQ ID NO: 68485 - RNA, 67 nt, Homo sapiens
gacagaagaaaggggggccccggcgcggagcggcgcccaagacagcaagggacagacgggaaaaaag

SEQ ID NO: 68486 - RNA, 58 nt, Homo sapiens
cacagggggaagggagccagccagcccccaggagccaggaggaggaaaggacaggcaa

SEQ ID NO: 68487 - RNA, 108 nt, Homo sapiens
cgcagcagaggggccacgcgggcccgaggcgcaccaagggcgaaggagccggcccaagcaggggccccgagcagagggaccgcacacagagaccccccgggcccggca

SEQ ID NO: 68488 - RNA, 81 nt, Homo sapiens
ccaacaggaacagggcagacgagcggaggacacccaacccggcgaagagagagaaacgaaaaagaggaaggagcgagggag

SEQ ID NO: 68489 - RNA, 73 nt, Homo sapiens
caaaggaagcgcgaacagcagcgcagagcgccgcccggcgggcgccgggagccgccaggaacccccaagaccc

SEQ ID NO: 68490 - RNA, 68 nt, Homo sapiens
agaaaaggggcgggcggcgacggcggagggcccgacaaaacagaggagaccagaccagaagccccgaa

SEQ ID NO: 68491 - RNA, 37 nt, Homo sapiens
cggacaaagaccagggaagggcgcagcgaggagggga

SEQ ID NO: 68492 - RNA, 83 nt, Homo sapiens
ccgcgcccccgcgcgacgccaggcgccagcagaaccggcggggagccgcagaacccagcggcagcaaggccgccgccgccccg

SEQ ID NO: 68493 - RNA, 73 nt, Homo sapiens
accccccacgcaccgcacaacaagaggccggcggggcgacaggaaaaaagccaggggccagcggcgcagcgga

SEQ ID NO: 68494 - RNA, 75 nt, Homo sapiens
agccccggacccacgccgccagacccacgcggccggaagccggacgaaaaacgcaagacacagagaagaagccag

SEQ ID NO: 68495 - RNA, 66 nt, Homo sapiens
ccagcacacacgaaagacagaacgcagaccggcagaaagaaaagacagcccagccacggaccagcc

SEQ ID NO: 68496 - RNA, 74 nt, Homo sapiens
agggggaagagagagaaacaaaagcgccagagccaagaacgaacagaggcaggaaaggccggcccagcaaaagg

SEQ ID NO: 68497 - RNA, 77 nt, Homo sapiens
gcaggaagccaacaaacaaagaacaaggccaaaaggcgagccaacaggagggcaggagaaaggagaaaaagaggcag

SEQ ID NO: 68498 - RNA, 78 nt, Homo sapiens
gccgaaggcccgcggcgccccggcgcagagagccaacggaccacaacagagaaccaaggacgggaagcagaaaaaaga

SEQ ID NO: 68499 - RNA, 75 nt, Homo sapiens
ggagaaagcagcgcgaacagagcggaagcaagcgaccgaaaaaagcaacgaggaaaagaaaacccaggcacgaaa

SEQ ID NO: 68500 - RNA, 70 nt, Homo sapiens
ccaccccccagaaaacgacaaacagggcagggacaaggagggccaacaaccacaggcgaccgcagaagaa

SEQ ID NO: 68501 - RNA, 75 nt, Homo sapiens
aaaaagaaaacgaaagaagaagagcaaaaccggacaaagaaacgaaggcaaaagcagaccggaaaacccaccggc

SEQ ID NO: 68502 - RNA, 47 nt, Homo sapiens
cgggaccgacgggcacgggggagaggccaggcaagacccgcccgcca

SEQ ID NO: 68503 - RNA, 87 nt, Homo sapiens
agccgcaccaccaacgcggccgacaacagccggcgccgccacgccaaaccagggcagagaaggggccccagaacgccgagggccagc

SEQ ID NO: 68504 - RNA, 83 nt, Homo sapiens
gggccgccggccggcagcaccggggagagcagcaccgaggccagcaagacgcgcccgccacgagagaagaaggcaggcccaca

SEQ ID NO: 68505 - RNA, 75 nt, Homo sapiens
ggccagcagcccagggaagagggaggcgaggagaagccggcaggagacagagagaaagcaacagcaggccagccc

SEQ ID NO: 68506 - RNA, 75 nt, Homo sapiens
cgaagagagggaaaaaccgacacacaagaaaccaggagaaccagcagaagggcacaaaacaaagcccaccccacc

SEQ ID NO: 68507 - RNA, 74 nt, Homo sapiens
ccaaacacgccggaaaccccgcccacagcacgagggcgagcagccccccccccccgacccaccacgggaccagg

SEQ ID NO: 68508 - RNA, 75 nt, Homo sapiens
caggggccgcagccgacgccacacaccccagaacagggcgaaaagaacgagaggaggcccgaaggcaggagaaag

SEQ ID NO: 68509 - RNA, 75 nt, Homo sapiens
aacccaccagacacagccaccggcagcgcagcggaacaacagaggcagggaagacgaggacaacggcacagcaga

SEQ ID NO: 68510 - RNA, 73 nt, Homo sapiens
gcggcccggaccgggagacacggccagacgcccccacccaaacagacaaagccaaacaggaggcacaagacca

SEQ ID NO: 68511 - RNA, 50 nt, Homo sapiens
gggaaaaacggagcaacgcaaggcaggcaacaaggacggaccacaaaacc

SEQ ID NO: 68512 - RNA, 67 nt, Homo sapiens
ccaagggagaaaaccgaccacccagggcagaaaagaacagacccagaagaagcgaaaggggagaaag

SEQ ID NO: 68513 - RNA, 112 nt, Homo sapiens
agcgaacgaccaagaggggcgacgcagagccgagcgaagcggcgcacccacgacgcgcacaccaccggcagaccggcgccacagcaccacccgacggcagcgcggccacccg

SEQ ID NO: 68514 - RNA, 61 nt, Homo sapiens
gcagagccccacagcacgccccagaggcaagaccaaccaagagaggaccgggagcgcaccc

SEQ ID NO: 68515 - RNA, 85 nt, Homo sapiens
ggcaaagggcgccagcccccccgcccgcgcgccccggagcgcgaaggagcgcggggcgagccagcccccacccagaggagaacga

SEQ ID NO: 68516 - RNA, 84 nt, Homo sapiens
cggagaaaaagaagaaaagaaaaagaacagaacaaggacaacgccaccagaggacaaaacccagccggcacaaaccaggaaagg

SEQ ID NO: 68517 - RNA, 76 nt, Homo sapiens
gacaggagggcaagaccgcggcgggaaaccaacccgcaaggcagaaccagcaagggaagggcgaaacagacaacaa

SEQ ID NO: 68518 - RNA, 35 nt, Homo sapiens
cccgcccaaacgccgccagacagccaagcaccgaa

SEQ ID NO: 68519 - RNA, 81 nt, Homo sapiens
ccccgccaggcgccgaccaccccagcaccagcccagagggaaagcacaccaccccagccagacacacagcaacgaagcagg

SEQ ID NO: 68520 - RNA, 85 nt, Homo sapiens
gacgcgcagaaagcggagaccgcccgagaagaggcgcagcggcgcagcgcgggcggcgccaacaagcaaaaagagggcggcagcc

SEQ ID NO: 68521 - RNA, 63 nt, Homo sapiens
ggaagaggacgagcgaagacacgaaagcacaagaggaagagaacgcccaagaagagaagaccc

SEQ ID NO: 68522 - RNA, 75 nt, Homo sapiens
caacacgccagagaccagaagccagcgaacagagaggccaagagcaggagaccaagagcccacaccgggggcacg

SEQ ID NO: 68523 - RNA, 65 nt, Homo sapiens
agaccaacccaagcgaagaagagcggaaaacaagggaaccaagccgccacagggagaaaagagca

SEQ ID NO: 68524 - RNA, 72 nt, Homo sapiens
gagaacgcgcgacagggaaaagacggaaagaccaacggagacaaaacagccaacaccccggccaccccaccg

SEQ ID NO: 68525 - RNA, 73 nt, Homo sapiens
cacaacacccacgcaggccagagagggaggagcaaaagaagggaccaccacagccaaaacaaggagaaggagg

SEQ ID NO: 68526 - RNA, 67 nt, Homo sapiens
cgaagagaaaacaaaggccggagacggggaaccgccgcccaggcgcagaccagcgacggcgcacgag

SEQ ID NO: 68527 - RNA, 73 nt, Homo sapiens
acccaccgggcgcaaaggaagcgcccaaacccgagggcgacccaccaacaggcaacccagacaaagaagagca

SEQ ID NO: 68528 - RNA, 60 nt, Homo sapiens
ggagggagagggccaagaagcagcggacaccgccgaaaagcgaaaagaaacaagccgcgg

SEQ ID NO: 68529 - RNA, 73 nt, Homo sapiens
caaaaacgcaacaacagacgccaggacacggccaaggccggcgagaacgcccgcggcagcgaggggaccaagg

SEQ ID NO: 68530 - RNA, 80 nt, Homo sapiens
ccagccgggggaacagagcgccaaaaggggaccggggggccgggcgcagaaggacaggaggccaggagcacagaaacacc

SEQ ID NO: 68531 - RNA, 80 nt, Homo sapiens
caagggagccgcgcaaaggccccggcaagaaggagaacggaagccagagaaaaggaagagagagcaagagaggccacgcc

SEQ ID NO: 68532 - RNA, 68 nt, Homo sapiens
gacccgcccggggcagcagcccaaagacaagaagcgccaagaaggggaaggaaggggagagcaaaaag

SEQ ID NO: 68533 - RNA, 71 nt, Homo sapiens
cagagcccccgaggccccagaacaccgagaggacggggacgggccccaggacgaggaagacaaggccagcc

SEQ ID NO: 68534 - RNA, 74 nt, Homo sapiens
aggaccaagaaccagaagaacggaccgaagccaaagaacaagagcgcagggacagagcgaccaggggcgagagc

SEQ ID NO: 68535 - RNA, 75 nt, Homo sapiens
ggaggcgccagcgcgacgagaggcacgaagccaaggcgcgagaaggcaccggggcaaacggcacacgaagcacgg

SEQ ID NO: 68536 - RNA, 55 nt, Homo sapiens
cggacgccgcgggagccagagcaccggcgcaggccccccgcagggccagcgcagg

SEQ ID NO: 68537 - RNA, 79 nt, Homo sapiens
cgcgccgcaacacagccgcgaacagcacggcgggccgccccgcccgaagaccgaggagcaagggagaagcgcgccgggc

SEQ ID NO: 68538 - RNA, 78 nt, Homo sapiens
ggaacggaagcggagcagggaagacggagcggcggcccgaaggacacaaccaccagaaggccccacgaaggcaccggg

SEQ ID NO: 68539 - RNA, 66 nt, Homo sapiens
aggaccaacggcaacagaaaagaaaagaggggcacagaaaaaggaccaggaggagaagcaaccaga

SEQ ID NO: 68540 - RNA, 68 nt, Homo sapiens
ggaaacacagcccgcacgacccaagcacccccgccaggggcagggccagaccagcggcagccccggag

SEQ ID NO: 68541 - RNA, 72 nt, Homo sapiens
ggaaaccaggcgaccgaccaggaacccaggcccgcgacagggccacgcacgaggcagagcggaggaccgagg

SEQ ID NO: 68542 - RNA, 76 nt, Homo sapiens
aaagagaaagcacaaaaggcagaagcacagagcacggagcagcaggaaaggcaaaaacgggaacaggccagaggga

SEQ ID NO: 68543 - RNA, 51 nt, Homo sapiens
agccaggggccccaggacaaaggccacagcggagagcaaaggacacccccg

SEQ ID NO: 68544 - RNA, 78 nt, Homo sapiens
gggccggccacggagcggcccgcaagcgcaccccaccaacaaccgcccaaaaggagaaccgacgggagaagaaagaag

SEQ ID NO: 68545 - RNA, 56 nt, Homo sapiens
ggcggggcggccgaccgggagaacgcaaagggacaacccgccacaacgacaaagga

SEQ ID NO: 68546 - RNA, 80 nt, Homo sapiens
ccgagagccgcggggagaaggccacacccaggcagcaagggcaccgcgagcaaggcaagccgacaggaacacccgacggg

SEQ ID NO: 68547 - RNA, 68 nt, Homo sapiens
ggcgagcgacccaggaaggagagaggggagccaggacaggagaggaaaaccaagcggaaacagcccaa

SEQ ID NO: 68548 - RNA, 39 nt, Homo sapiens
aagagaaaaacggagcagaaaagagggggcaccccagac

SEQ ID NO: 68549 - RNA, 85 nt, Homo sapiens
ggagggagggagagcgggccgcgcgggagccgcagggcgcccagcccgcagaaacgaggcggaggaagaagcggacagcagcagc

SEQ ID NO: 68550 - RNA, 74 nt, Homo sapiens
aagcggccaacaccaacggccccagccacgcaccaaaagacagacggggcgacgggcgacgggaggcccgaagc

SEQ ID NO: 68551 - RNA, 71 nt, Homo sapiens
aagaccccaaggagccacgcccgagagcccgagccacgcagagagagagaacccgagcgccgcagcggaga

SEQ ID NO: 68552 - RNA, 71 nt, Homo sapiens
gagcacagggccaagacccgcagccgcaagcccaagccacagaccaaaaagagaaagggaggcaaaaacag

SEQ ID NO: 68553 - RNA, 74 nt, Homo sapiens
gagccgggagaaacgcaaagagaacagacgaaagaccagaaaaagagcagcgggacgccaaaaaagaggggaag

SEQ ID NO: 68554 - RNA, 72 nt, Homo sapiens
aaggccgcgccaggagcacgggccaggagaacgcgggcgcccggcgacgggccagaacacggcccacgccgg

SEQ ID NO: 68555 - RNA, 67 nt, Homo sapiens
cagcaaaccccacacgcccccagaaacccacaaagccccgaggggcagggagcccagagggaacccc

SEQ ID NO: 68556 - RNA, 86 nt, Homo sapiens
cacagcacaggcaaagggccagaaggggaaaaccggcaagcaaggaaggaaagcccaagggcggagaacggaaaagcaccaggaag

SEQ ID NO: 68557 - RNA, 80 nt, Homo sapiens
gcgggcgccgcgccggcacgcgagaggagcgccggaaacgaaggaggcccaaccacaaaaggagccgacggaacccagac

SEQ ID NO: 68558 - RNA, 75 nt, Homo sapiens
cgggagggaacaaagaggggggaaggcaggcaggcaaacccacacgacaggagagcagagacaggacggccccca

SEQ ID NO: 68559 - RNA, 81 nt, Homo sapiens
ccgaccagcgacacgcggccgcggagaccaccgcggcgcggcagcgcgcccgagggagacacagaaccgggaaccgcacgg

SEQ ID NO: 68560 - RNA, 79 nt, Homo sapiens
cgcaaaacaggaccccgcggagaccccgagaaaccgccgaccaagagcgaagcgacgggaaaaaccacgcggagaaggg

SEQ ID NO: 68561 - RNA, 84 nt, Homo sapiens
ggccccccaggagaaggcggaggacaagcccagcaccggccggacacccaacagcacgcagacaaggcaccaacagaacggccc

SEQ ID NO: 68562 - RNA, 77 nt, Homo sapiens
ggagggacagccccaggagccggggccgcagccaccaggacgcaaagagaagagcaccaggccagggggccaaaacc

SEQ ID NO: 68563 - RNA, 59 nt, Homo sapiens
cgggagggggcagccagaaaaagcggggaaggggggcaaaaaaaagaagcaagcgaagc

SEQ ID NO: 68564 - RNA, 80 nt, Homo sapiens
gcgagcgagggggggcgcgccggaaaccggagcgcgcagcagggacacaggacaaggagccaccggagaggaagcggcag

SEQ ID NO: 68565 - RNA, 73 nt, Homo sapiens
ggcacagggagaaggaacgacacgggggacaaggagacggccacagaggggggggcagccagaagaaggaccg

SEQ ID NO: 68566 - RNA, 75 nt, Homo sapiens
ccagaggcgggaggggccgggaggcagaggggcagggggaggccaacagacccaacccagaaggcaccaaacgga

SEQ ID NO: 68567 - RNA, 78 nt, Homo sapiens
caggcagaccccgggcagcaggaagggaaggcaccaccaaaggcaaacaggccagagacgaagagacgagaagagagc

SEQ ID NO: 68568 - RNA, 73 nt, Homo sapiens
ccgaccggggccagcggggaggcgaagacgagacagaggacgcaacccaccacgaagcggagagcaggaaggg

SEQ ID NO: 68569 - RNA, 79 nt, Homo sapiens
gcccgacgagcggcgggagcgaggccagagaagagcagggcagggccgccacagcccaacggcggacccgcaccgagac

SEQ ID NO: 68570 - RNA, 79 nt, Homo sapiens
ccagaggagccagcaagcacaccaggaggaagacaagaggaggcacagagagagaagacaggaggagggaagaaggcca

SEQ ID NO: 68571 - RNA, 71 nt, Homo sapiens
caacgacacacccagcccagaagacaacgaggcaagagagcaaagcgaacaaccagaaacccaccgcggag

SEQ ID NO: 68572 - RNA, 84 nt, Homo sapiens
ccggcggcacccgcacccggggacaagcgcgggaacggcgcggaaggccccgggggcgccgagggcacaagggcaacgacagaa

SEQ ID NO: 68573 - RNA, 75 nt, Homo sapiens
agaggcggaacaggcaccaagccggcggggcggcaggagagagccaaaacgacaggccagggaagaaaacaagaa

SEQ ID NO: 68574 - RNA, 74 nt, Homo sapiens
gaaagacgcagaccgagacgcaagagaccagagccggggcacgagggagccagcgccgcacggaaccggacaag

SEQ ID NO: 68575 - RNA, 82 nt, Homo sapiens
gaacaaagccgaagaccccggagccccagccagggaaccacggagcacgagaaaacggcgggcagagcccggagcagcagag

SEQ ID NO: 68576 - RNA, 83 nt, Homo sapiens
gggggcagcggaccagccagcggacccgaccaggagggagcggaaaacggggcccgggccggcccgacggccaggaggcgaag

SEQ ID NO: 68577 - RNA, 73 nt, Homo sapiens
acagcaggcgaccaggaggaacagaccggcggccgacgggacaaaggggcagaccaacaccacccagcaaaaa

SEQ ID NO: 68578 - RNA, 68 nt, Homo sapiens
gcgcccccgccgcccccgggcgcccggagccccagcagggagaccagaggccagaccgccgggggaga

SEQ ID NO: 68579 - RNA, 81 nt, Homo sapiens
cggcggggcgcccaccaggacagcacaggccgcgaagccacggagaccggcgcaagccccccggagggggcagaagccaag

SEQ ID NO: 68580 - RNA, 88 nt, Homo sapiens
gagcaaggaggagccccgaaaagcaaagaaaaaggaaggacgaacgcaccggagggccggcggccccgggagcgagacaagaggagcc

SEQ ID NO: 68581 - RNA, 77 nt, Homo sapiens
cagggcccgccacggggaggagaagggggccagaaggaaggcaaacagggggcaccgacccgcacgcaagaacccaa

SEQ ID NO: 68582 - RNA, 77 nt, Homo sapiens
aagaaagcgaacaagagaaaaaaaggaaaagcggcagggcaagaaagaaggggcaaacgaaagcagagaggaaaagc

SEQ ID NO: 68583 - RNA, 45 nt, Homo sapiens
cacagccacggcaacggagacaggcgccacgggacacggaaccag

SEQ ID NO: 68584 - RNA, 59 nt, Homo sapiens
cgcgaacggggcgggggaggccaccagccggacagccggcggaaccaggggcgaaaaca

SEQ ID NO: 68585 - RNA, 78 nt, Homo sapiens
gacccccacagcgccagccagggaaagggagcagcaccggccacacccacagcacgaccggaacccagcgaccgacgc

SEQ ID NO: 68586 - RNA, 80 nt, Homo sapiens
agagccgggcccgccgaggcccggagggagagaagagcgaagaagcaggggagaggccgagcgaagaaccagcggccaag

SEQ ID NO: 68587 - RNA, 80 nt, Homo sapiens
gcccccaccaccagaagccgagcccaccccacgaggacagccaggggcgaggaccacaagagcccgaccaagcccaaagg

SEQ ID NO: 68588 - RNA, 72 nt, Homo sapiens
ccaaagggaagccaaacacaaaggaagaagcccggagacgaccaagagggacacccgcgcggcccaggacag

SEQ ID NO: 68589 - RNA, 78 nt, Homo sapiens
cccccccggaccccaggagccggcgcccccgcccgaggagaacaggaacgggaaaaaccacgaaagaaaaacacgacc

SEQ ID NO: 68590 - RNA, 78 nt, Homo sapiens
gggaacaaggaccgacacagaacaagaaggcaaagcccaaaccaaaagaaagggccgagaaagaagagaggaagaaga

SEQ ID NO: 68591 - RNA, 66 nt, Homo sapiens
gcgcggaaacaggaggccagacaggacaaccagcgggccagacgaccagaagcgcgcaaaacaaag

SEQ ID NO: 68592 - RNA, 89 nt, Homo sapiens
gagaggagacagagacagaggccgaagccccaggaaaagccccccgcgcccaggcggaggcaaggcacgaccggccacgcaacccgccc

SEQ ID NO: 68593 - RNA, 77 nt, Homo sapiens
accagaaccagccacgcgaggaaggcgggggagaaggagaggaacaggaagaggccgaccacggggccacaagcagg

SEQ ID NO: 68594 - RNA, 77 nt, Homo sapiens
acgaaagccccacccgccgcagcaagcagaggagagaagaccaagaggcggagaagaggagaaaagggcagaggcca

SEQ ID NO: 68595 - RNA, 66 nt, Homo sapiens
ccaaagcgaacgaagagcaccgggagcggcgaagaggcaccggaggagagagggggcccgcccgcc

SEQ ID NO: 68596 - RNA, 81 nt, Homo sapiens
ggaagcccaccgacgaggacggaggacggagaggaccgcaccagcacgcccacccagaggggcgaaaacacagaaggaaaa

SEQ ID NO: 68597 - RNA, 82 nt, Homo sapiens
aaggggggcaacgggcggggcggagcgccgggccgcgcagcgccgaacgacgggccacaggggcgaacggaaaaaagaggca

SEQ ID NO: 68598 - RNA, 71 nt, Homo sapiens
cggaagcacacaacaggaaaacaaaagaggagaaagcgaggaaaagggaccaacggagccaggaaaaagca

SEQ ID NO: 68599 - RNA, 38 nt, Homo sapiens
agaaacaggacacacaagggagagccggggagacagga

SEQ ID NO: 68600 - RNA, 74 nt, Homo sapiens
cgagcgggcggacaccacaacgccccagcccccaccgagaacagcaccccgcaggggccgggcagagcgacaca

SEQ ID NO: 68601 - RNA, 83 nt, Homo sapiens
ggacccgcgccgcgcccccggcccgcgggcggcccacggcgaggaagaaaacaggcgaaacaaggcacccccagcgccgaaca

SEQ ID NO: 68602 - RNA, 63 nt, Homo sapiens
ggagcggcgcagaccgagacccggacagggcaggaaacagccgagacggcccagacgcgcggc

SEQ ID NO: 68603 - RNA, 59 nt, Homo sapiens
cccgaccgagaccgggccgcccagcacgaccaggaaagaggcaagcagaaggaggccca

SEQ ID NO: 68604 - RNA, 87 nt, Homo sapiens
cacacggccaagagcgggcaccaggaagcgaaggcggccggggggggcacagagccccggaagacagcccccagcgaccagacccag

SEQ ID NO: 68605 - RNA, 56 nt, Homo sapiens
ccaaaaccaggagaaaccaagggcccagaccaagccccaccaacagaagagcccca

SEQ ID NO: 68606 - RNA, 92 nt, Homo sapiens
caagaacaagggacacaacgcgccacgaaggccaggccagggagaacccaacaggacaccaggcccacaaagcacaagccgacacgacaacc

SEQ ID NO: 68607 - RNA, 46 nt, Homo sapiens
accgacaggaggccccggaagacgggccggggcagcagaagaggac

SEQ ID NO: 68608 - RNA, 73 nt, Homo sapiens
gacccacccgggacaaaaccaagggaccaacaaggggaacaaggaagagcgagaaggaagagcacaccccacc

SEQ ID NO: 68609 - RNA, 78 nt, Homo sapiens
ggacagcagcccaccaagcacagacaagcagcgaggcccgacggacagccacaaggaggacccagcccccacagcaaa

SEQ ID NO: 68610 - RNA, 74 nt, Homo sapiens
gagagcaaagacgagcagacacgcaaagaagcccgaggcgcaagagacaagccagaggcacggacgaccccgga

SEQ ID NO: 68611 - RNA, 80 nt, Homo sapiens
gaccccgagggagacacaggcggagcccgcgcccaggcggaggcaagggcgaccggccgcgcaaccccgcgcggggcaag

SEQ ID NO: 68612 - RNA, 78 nt, Homo sapiens
caacccgagggcacagaccaaccgaaaggagacaaaggaggcccggccaacgcaacagggagcccacgcaagaggggc

SEQ ID NO: 68613 - RNA, 68 nt, Homo sapiens
agagaagccccggccgggccggccagcgccggaaaccaacaaacgggccaagcagggaagaggaaccc

SEQ ID NO: 68614 - RNA, 95 nt, Homo sapiens
cggcggggagagaagcggacccgccgagccccggccccaagaacgccgccgccccggagccgccgccagaagcggacccagaagaggggagcagc

SEQ ID NO: 68615 - RNA, 53 nt, Homo sapiens
agccagacgaaagcaccagagagagcacagggaccccacacgggcagcggccc

SEQ ID NO: 68616 - RNA, 67 nt, Homo sapiens
agagcagcacccaaaagaccaggagccacaaaggagggaagcagacggaaagcaagacaggaagaac

SEQ ID NO: 68617 - RNA, 76 nt, Homo sapiens
gacccaaaaggcgcagggcagaagagcacgacgacggccaccagagaggacgcccaacagccagaaggaggcgcgc

SEQ ID NO: 68618 - RNA, 65 nt, Homo sapiens
cgggaaagccggcaagagggagaaggacaccaggcagaggcaagaaccacaaggacacgccagcc

SEQ ID NO: 68619 - RNA, 55 nt, Homo sapiens
acaagaagggcaaagccgaaggaaccaccaagggaaaaaccagcacccacagaag

SEQ ID NO: 68620 - RNA, 60 nt, Homo sapiens
aagacgggccgagaagcagcgcgagcaccagagacacgacgcaaaggccaccaggcagcc

SEQ ID NO: 68621 - RNA, 78 nt, Homo sapiens
cgcccgacccaaagggaaaacagaaacagggggagaggcaccagcaacagaccaaccgcagcaagcacagagacagga

SEQ ID NO: 68622 - RNA, 78 nt, Homo sapiens
ggagcagggcgggaggagaccggaccacaaaacaaaccacccaacacaagcaaagaccacgaagccggaaaagaagac

SEQ ID NO: 68623 - RNA, 78 nt, Homo sapiens
cgggccgcagccggcggcgggcggcggcgaagcggccggcagaagacgaccccgacgcaggccaggagccgcggacag

SEQ ID NO: 68624 - RNA, 82 nt, Homo sapiens
ccgcccccagcccggccgccgggcgggccaagccccggcgggcccggagagggggcaaaggacaaggcgggaggggcagacc

SEQ ID NO: 68625 - RNA, 84 nt, Homo sapiens
aaagaaacacacacggccgcgacccgacgggggcaaccggacagagaagcccaagagaagcaggaggagcagcgcagcggcagg

SEQ ID NO: 68626 - RNA, 83 nt, Homo sapiens
acaaggggaggagacgcaagcaacaaggcaagggagaagaaagagccaggagaagagcagacaggcgcccaaggagaagcaga

SEQ ID NO: 68627 - RNA, 71 nt, Homo sapiens
gaaagaacagacccacccgcaagaacccagggcagaaaggagaaacaggaagaggaacgccggaacaaaga

SEQ ID NO: 68628 - RNA, 80 nt, Homo sapiens
gcggaggcagacgggcggaggagaaagcggcggggagcggagcgcgggggggcccacgagaagagcaggcgacgggggag

SEQ ID NO: 68629 - RNA, 86 nt, Homo sapiens
gcggcggccaggccccagacacagacgagcaggggaaggacagggggggggacgcccacacgggcgcagagcacaagcacacgagg

SEQ ID NO: 68630 - RNA, 69 nt, Homo sapiens
gccggcagcaagcaccagcacccgcagcccggaaccacgcaccagacaacacagggggacgggacccgg

SEQ ID NO: 68631 - RNA, 57 nt, Homo sapiens
gaccccacaccacgcggaggcaaccaggaaggaaaagcgagcgagcccaggccgcgc

SEQ ID NO: 68632 - RNA, 64 nt, Homo sapiens
acgacgcaccgcaggcagacaaaagggccaaagaagggagagaggcagaccaaacacggcagaa

SEQ ID NO: 68633 - RNA, 69 nt, Homo sapiens
aaccgagacacaaagggaaagcggcccccacagagagcacacaaacaaagcgaaaccacggaagaaaag

SEQ ID NO: 68634 - RNA, 37 nt, Homo sapiens
ccgcacaacagcgccaggaggcagcacggcaggagac

SEQ ID NO: 68635 - RNA, 70 nt, Homo sapiens
cgccccagaggaagaagaagacggaggcgccacaggagccgcagaagcaaaggcaccgccaaaccgaaaa

SEQ ID NO: 68636 - RNA, 72 nt, Homo sapiens
ccaggccaacaacccaagggagcgcacgacccacgcggaacgaaacccgagaggagcaggagcaaccgacag

SEQ ID NO: 68637 - RNA, 83 nt, Homo sapiens
accgggcagccccaaacggaaagaagagcaaaaaggaaggcccggggacaaaaccaaagcgaggcccccacacagaggcagcc

SEQ ID NO: 68638 - RNA, 73 nt, Homo sapiens
gcggagaggaccggagcggaaaacccgaaggaaacacaaagaagacaccagaagggccagcaccacgacaaca

SEQ ID NO: 68639 - RNA, 83 nt, Homo sapiens
agcgacgccgacgccaggccgagcaccagccgggacgcggggaccggaacagaggccccacagacaaaaccgccggcggaaga

SEQ ID NO: 68640 - RNA, 76 nt, Homo sapiens
gcagcacagcccaacagaacccaggacccagaccggcgggcaaacccacccggcccaaccacaggacagggcaccc

SEQ ID NO: 68641 - RNA, 84 nt, Homo sapiens
cgacagggcggcggcgccaggcagggcgcagaacaaaaccagccaagcagaggagaaaaagacagcaccccagagccagaacca

SEQ ID NO: 68642 - RNA, 75 nt, Homo sapiens
aggagaagcacagaaggaaccagaacgggacccaggccaagccaccaagcgacagaagggcccgagaacaccgaa

SEQ ID NO: 68643 - RNA, 55 nt, Homo sapiens
ccggaccaccgggcgcggcgccccagccggacccagaccacaagacaggaggacc

SEQ ID NO: 68644 - RNA, 81 nt, Homo sapiens
cccgggaggagaccacaccagcggcacgggcaagccagagggcacgcagggcgaccggaggggaagcggcagagaaggcag

SEQ ID NO: 68645 - RNA, 73 nt, Homo sapiens
cacacgccccacaggcggaaaacaagcaggagggcgggaccaaggagaaaaccggaagagaaaggccgggaag

SEQ ID NO: 68646 - RNA, 78 nt, Homo sapiens
caggccgcgccggcaccccgaggaaaagagacggcggacagacgaagggaggcaaacaaaaaagcgacaggccaggac

SEQ ID NO: 68647 - RNA, 95 nt, Homo sapiens
gagacacccccgaccgcagcgcgcgcggcccacggcgggcgcgcccagagggcggaggccaaggcagagagcgagggggcccggacggccaggcc

SEQ ID NO: 68648 - RNA, 52 nt, Homo sapiens
caggaggaagcccagggaacggcggagaagcagagaaccccagacacagagc

SEQ ID NO: 68649 - RNA, 84 nt, Homo sapiens
ggcgagccgggggagggcccgggagggaggccggccaggccggccgcgccgcgaggagacagaaggcggaggcaaggcgggacc

SEQ ID NO: 68650 - RNA, 55 nt, Homo sapiens
ggcccagggacaagagggaaaggagagggacagggggccgacgacgagccccgcg

SEQ ID NO: 68651 - RNA, 57 nt, Homo sapiens
aaaaggaggagaggaggacagacaaaaggaggcaagagggaaagggccccaagagcc

SEQ ID NO: 68652 - RNA, 63 nt, Homo sapiens
cgcagggcgcccccggacaaaccggcgaccacacacggggacgacggggaagccggacagcaa

SEQ ID NO: 68653 - RNA, 71 nt, Homo sapiens
gaaagcaggagagaagaccagaagggaggagaggagaaaagaagcagcccacgaaccccgacaacagagca

SEQ ID NO: 68654 - RNA, 79 nt, Homo sapiens
gagacggccccaaaaagccaacaaagcccaagcaggggaaggcgaagcacgacagcacggccagaggaacccaagcacc

SEQ ID NO: 68655 - RNA, 59 nt, Homo sapiens
cgggagaggaaccaaggagaaaccaaaaacaggcaaagaggcacccggagaagagggag

SEQ ID NO: 68656 - RNA, 60 nt, Homo sapiens
caccgaacagacccggaaggacggcgagggagcggcgccgggaaccggccccgggcaacc

SEQ ID NO: 68657 - RNA, 72 nt, Homo sapiens
cgaagcagcaaccagcccaaccagagacccacagcagacccccaagggcgaaacaggcgaccagaggggcaa

SEQ ID NO: 68658 - RNA, 60 nt, Homo sapiens
cccggaaggccaaaggcgcgcaaggaggaaggcacagacgggagcagccgcggggccccc

SEQ ID NO: 68659 - RNA, 79 nt, Homo sapiens
gaagcaggacgcgccgcgccccaagggcggaaaacaccccaaaagccaaaagggaaaggaaaagaccaacaacagcgca

SEQ ID NO: 68660 - RNA, 67 nt, Homo sapiens
gaagagcacaagcgaaggagaagagaagaggcaaaaaccaccaggggcagggaacaacgcagaggag

SEQ ID NO: 68661 - RNA, 74 nt, Homo sapiens
agccggacacccgggcccacgcccccaccgcccgcggagccagaaagcgagcgacggaacacaaacaggcggaa

SEQ ID NO: 68662 - RNA, 72 nt, Homo sapiens
cagacacacgagcagggacggaggcaccgcaaagccaccacccagcaaacggggacagcgccgaccggaaca

SEQ ID NO: 68663 - RNA, 80 nt, Homo sapiens
aagaagggaaggcgcgaggaggaaaggaggacgaggcgagacagagggaaagaaccaccaccaacgagacacaaaaagaa

SEQ ID NO: 68664 - RNA, 63 nt, Homo sapiens
cggagcgcccggcaaacaaaccgccacgcacccagaaaaagccaaaggagggccgggccaacc

SEQ ID NO: 68665 - RNA, 80 nt, Homo sapiens
cccgcgccgccgaccccccggcgccgcgccggcggcgggcggaaaacaccccaaaagccaaaagggaaaggaaaagacca

SEQ ID NO: 68666 - RNA, 58 nt, Homo sapiens
accgaccgacggagcagcacaggggcaaagagaaccaggagaccccaccaccacagaa

SEQ ID NO: 68667 - RNA, 79 nt, Homo sapiens
agaaagaggaaaggaggcggggggcggagaacccgaagcacccccggcgccgggacgcccaccagaccgccgacccagc

SEQ ID NO: 68668 - RNA, 78 nt, Homo sapiens
acgagcgccccaccagcaggaaccagggcgagccaggagcagcagcccgacaccccgggccaagaggacaacaagaag

SEQ ID NO: 68669 - RNA, 85 nt, Homo sapiens
gccggccagaagcgggcggcgcgggggagagaaccccagcacccagccaaggggcagagcagacccacgggggacggcgggccac

SEQ ID NO: 68670 - RNA, 71 nt, Homo sapiens
cccaagagcgggacacaggaccgccgaaggaggacaggaccccagaaaacggggaaggaccgaaacgggag

SEQ ID NO: 68671 - RNA, 62 nt, Homo sapiens
cgggcgcccacgcggccgaccaccggggacagagagaacgaccgaagaaaagcaacaaacca

SEQ ID NO: 68672 - RNA, 89 nt, Homo sapiens
ggcaggccacagaggacaaggacagcaggagacgacgacgccggcccggcacagggaccagcggaggggccgagcaggagcccgcgggc

SEQ ID NO: 68673 - RNA, 74 nt, Homo sapiens
caggaaaaagacagcccgcagcacgaccagcaggaacgaccggaaacaggcacagaacagaaggaaaggacgaa

SEQ ID NO: 68674 - RNA, 67 nt, Homo sapiens
cgaaaggggggcagggagagaagcgcccaggaggaaaagcccacacggaccaccccgccggaagggg

SEQ ID NO: 68675 - RNA, 49 nt, Homo sapiens
agagcaagcgggggaccgaacaaggcaaaaggggccccccaccagaaag

SEQ ID NO: 68676 - RNA, 78 nt, Homo sapiens
gacgccacgagaccacaaggcacgacaaaggaaagccagagacgcagcccaggcggcaccaagcaacccagagagacc

SEQ ID NO: 68677 - RNA, 57 nt, Homo sapiens
aacaccccaaccaccaagggggcacgaaaacagaccgagcccccacccccggagcag

SEQ ID NO: 68678 - RNA, 64 nt, Homo sapiens
cagacaagcagagccggcaccacaggaagccgagcaggaggaaaggagagaggagacaaacgaa

SEQ ID NO: 68679 - RNA, 69 nt, Homo sapiens
cggcagcaagcccgcaaacgggacaaaaagggcgcacaaaagagcacaaaagcaccaaggcgcacaaca

SEQ ID NO: 68680 - RNA, 79 nt, Homo sapiens
accgagagaaagagcggcaccaaggaggcacaacagcaagaaagcagccaacaaagggaaagagcaaaaagaggcaaac

SEQ ID NO: 68681 - RNA, 57 nt, Homo sapiens
cacgcggagagcgcacgcacaacacggcccaaacgggcacagggcaggagaagcgcg

SEQ ID NO: 68682 - RNA, 77 nt, Homo sapiens
aagagcaacggaaccagcgccgagaaacgccaagggaccacggaacagcgcaagaaaacaagcagaaaacaagaaga

SEQ ID NO: 68683 - RNA, 90 nt, Homo sapiens
gaacaggaggaagaaaagaaaaagaaaaaagacgacaagaaaaagaaggaagcgccaaaagaagcgccacgcagagccccgccaggaaga

SEQ ID NO: 68684 - RNA, 83 nt, Homo sapiens
gaaaggcaaagaacaagagaagacccagaggaagccaaaagagaccggccagccacagagcagagaaagccggaccagcaggg

SEQ ID NO: 68685 - RNA, 51 nt, Homo sapiens
cgcgccggggcgcccggcacccgcgggaccagcagggccccagcgcacgcc

SEQ ID NO: 68686 - RNA, 60 nt, Homo sapiens
gacgagcacggaagcacaagcaggagcagggaacgagaagacccgagaaaaaacgcaccc

SEQ ID NO: 68687 - RNA, 75 nt, Homo sapiens
gccgcacagccgcggcggcagcagcaggagagcaacggggcggcacacaaggagcgaagggcagggagaacgcca

SEQ ID NO: 68688 - RNA, 33 nt, Homo sapiens
gggcccgaggccccggccagaaggagacccaac

SEQ ID NO: 68689 - RNA, 77 nt, Homo sapiens
ggccggggggcccccgccagcccagggcagccacccggcccgcgcgcccggaagccgcgagccggaagccggaacca

SEQ ID NO: 68690 - RNA, 77 nt, Homo sapiens
cgccccgagacaaggagggagaaagaaaaaacagggccagacgggaagaaacgagaagggaccaggggcggaagcgg

SEQ ID NO: 68691 - RNA, 53 nt, Homo sapiens
ccagggaagagaagagcgaaaggaacaacagcgaagagacaaccggcaaggag

SEQ ID NO: 68692 - RNA, 68 nt, Homo sapiens
gcggcgggccgcagcggcggcacaccggacggcgcgcgccgcgcagggcgcggggaccacgagccagg

SEQ ID NO: 68693 - RNA, 74 nt, Homo sapiens
cgcggccgaccagagaacagaaggaaggcagagcccacaaacccaagcagcaaagaaagagccaagcaaaaagc

SEQ ID NO: 68694 - RNA, 84 nt, Homo sapiens
ggaggcacccagccggagcaggcgcaagaccacaagcgcccggagcacagggcagcggagaccgccaagcgaaagacagaggcc

SEQ ID NO: 68695 - RNA, 76 nt, Homo sapiens
gaaaaagcaaaaccgaacacgaccagcccaggcacccaaagaacagccacaggaagagggaacaaagaaggaaaca

SEQ ID NO: 68696 - RNA, 73 nt, Homo sapiens
agaccggagccagcgaggccacacccgaaagcaagcccagaagggagggggaaccagccaaaccaacgccgac

SEQ ID NO: 68697 - RNA, 55 nt, Homo sapiens
ggggaagaaccacagaacgggaacaggaaacgacaaccaggaaagagcagacgcg

SEQ ID NO: 68698 - RNA, 85 nt, Homo sapiens
agcgaccccaaagaccagacccagcacccccccaggcagcagcagcagcaccggagacaagccccagcccaggggcccggcggag

SEQ ID NO: 68699 - RNA, 82 nt, Homo sapiens
aggcaccaggccaaacgagcggcgaagagggcgacccggacccggaaggggcggaggaagccagaggacaaaacccagccgg

SEQ ID NO: 68700 - RNA, 73 nt, Homo sapiens
agggacgaaggggaacgggaaaggaacaacgggcaagaaagcaagaagggaaccagaaggcaacacccgaaca

SEQ ID NO: 68701 - RNA, 59 nt, Homo sapiens
agcgggcgcggcggcagcaccggaacaacaggggaaaaagaaaagggcgaagacccgaa

SEQ ID NO: 68702 - RNA, 69 nt, Homo sapiens
gcgaacggacaaaagacaggcaaaaaaccggcaagaaacggaaacaaaggaaaagaaaaaagagaccgc

SEQ ID NO: 68703 - RNA, 71 nt, Homo sapiens
cgaccgagacggggagcccaaagcaaagaggaaaagggaaacagcccaggccagacaaccgggaggcgggg

SEQ ID NO: 68704 - RNA, 81 nt, Homo sapiens
aacaggaggaaaacggccaacccaccgcgccgaaagaagaaagccccacacaaggagagcaagcagggagggcccacgaag

SEQ ID NO: 68705 - RNA, 75 nt, Homo sapiens
gagcgaagcccagacagcgcgcacagaaaggcgccgcccgcggccgcccccgcaccggcagcgcgccccgccagc

SEQ ID NO: 68706 - RNA, 70 nt, Homo sapiens
ggaaggaccacggacacagcgagagagaacgccaaacccagacgcccgagaggcccaaagggaagcgcac

SEQ ID NO: 68707 - RNA, 53 nt, Homo sapiens
caaccccaggaaccacagagggaccggggggcaaaccgagggacacccagcga

SEQ ID NO: 68708 - RNA, 70 nt, Homo sapiens
gaagaaccgcaagcccacgaaagaaagccacgaggcccagaaagcgggcaccagcgcaaggaacccagcc

SEQ ID NO: 68709 - RNA, 71 nt, Homo sapiens
ggcgcgcccgcggagaggccggggggaaccagaagaggccaaccagcacgaacgccagcagcacggcaccc

SEQ ID NO: 68710 - RNA, 82 nt, Homo sapiens
ggcagagcaccgaaccccagaggccaagaaagccagcaggccgccagcaggaagcccagcaagcgcccagcagcacgcccca

SEQ ID NO: 68711 - RNA, 78 nt, Homo sapiens
agaacgaaaggagaacaacccagccacagccaagagaagacgggcccgggagaccggaccccgcgggaaccccacagg

SEQ ID NO: 68712 - RNA, 42 nt, Homo sapiens
gcgaggagaaccaacggcccgaaagagccagaacaagccggg

SEQ ID NO: 68713 - RNA, 60 nt, Homo sapiens
ccgaggaagcaaggccgcggggggagaccccaccaccgcggagaggagcgaagagcgaag

SEQ ID NO: 68714 - RNA, 71 nt, Homo sapiens
aggcaaaacggaaggccaggagcaagcagcaggcggagcaggagcaaaggagcaagaaaccagacccggaa

SEQ ID NO: 68715 - RNA, 83 nt, Homo sapiens
ccgccgccgccgccgcgggcgccagaaggaagaggcggacggaggagcaggcgagaagagaagagggggaccaaggagacacc

SEQ ID NO: 68716 - RNA, 54 nt, Homo sapiens
agcgcgcgccgcgcccggaccccaggaccacaaaacccagaaacaaccagcgaa

SEQ ID NO: 68717 - RNA, 58 nt, Homo sapiens
ggcccgagcacgcgcgggagcagcaggaaaacaaagagggaaaacggagaaaagcccc

SEQ ID NO: 68718 - RNA, 60 nt, Homo sapiens
aaaggaacaccacaaacaccggcaggcagggaaaggcccccacaccgccgacgagaggac

SEQ ID NO: 68719 - RNA, 75 nt, Homo sapiens
ggacccggcgccagaggcggggcggaaacgcggaggcaagcacgggccaccaaaagagacaacagccacaaggga

SEQ ID NO: 68720 - RNA, 83 nt, Homo sapiens
aaaggaggcagcgcaaggagggcggcgggacgcaccgaggccagaccgccgaggggccgggcggggcaggaagccaggagaac

SEQ ID NO: 68721 - RNA, 103 nt, Homo sapiens
cacaggccgccggacccgacgcgacaccaccgaaggacagacgccggagcacgcggaggcaggggcccccacgccggccgcagccaaggacccgggaaggcac

SEQ ID NO: 68722 - RNA, 76 nt, Homo sapiens
gccagggcaccagacgggcgggaaagagaggcccgggaggagcggagggaagcaagcagaaaacaagccaaaaaac

SEQ ID NO: 68723 - RNA, 75 nt, Homo sapiens
cgggcgcgggcgaggccgggcggcgccgccccaccggacccgcagacaagccagcgccagggagcacaaccacaa

SEQ ID NO: 68724 - RNA, 72 nt, Homo sapiens
accgcggaaccgcgcagggccgacaaaaagaccagcagagggagggaaggaccaggcgaggggcacaaaaag

SEQ ID NO: 68725 - RNA, 69 nt, Homo sapiens
ccacggcacccccaccagaaggccaaacagcagccaaacccccgaaggggccaaagcaggaagccccga

SEQ ID NO: 68726 - RNA, 41 nt, Homo sapiens
gaggcccaggaagcacggagacacggcggaggcagggggac

SEQ ID NO: 68727 - RNA, 55 nt, Homo sapiens
gaaaacccgggccaacagccggaccgcgcagcgggccgggaccgcagcaagcccc

SEQ ID NO: 68728 - RNA, 68 nt, Homo sapiens
gaaaagacgcgcaggaaaggcaaagagacagagcaccacccagaaaagagcaaccccggccaccagcc

SEQ ID NO: 68729 - RNA, 58 nt, Homo sapiens
cggggaggacagaccgaagcacccgagggacccgaggagcccaccaagccgaccgcag

SEQ ID NO: 68730 - RNA, 31 nt, Homo sapiens
caagggaaaggcgcccggaggggccgagacc

SEQ ID NO: 68731 - RNA, 60 nt, Homo sapiens
agcaagagccagaacacgggacaaagaacagacaggggacaggagagaacaagcagacca

SEQ ID NO: 68732 - RNA, 101 nt, Homo sapiens
ggaaagcacagcaggacaccaggaccggccgaagacaccccccccccggaccagaggccgccgacccagcggaacaagaggaaaccacccgccgccccaaa

SEQ ID NO: 68733 - RNA, 73 nt, Homo sapiens
gcgaagcgggcgagcggggggacgccggcggagacgcgggcgagaggggcgaggaggcgggccaggaaaggag

SEQ ID NO: 68734 - RNA, 75 nt, Homo sapiens
gaaagaggcccggacagagaaggaggggcagagagaagcacccaacccaagaaaacaaagcacaaaaagaagccg

SEQ ID NO: 68735 - RNA, 79 nt, Homo sapiens
cgcgcgggcgcgcaggccgcggggagcaccgggacaaaagggagaaaccagagggacgcacagaaaccccaagaacccc

SEQ ID NO: 68736 - RNA, 79 nt, Homo sapiens
cagccgaacacacggaaaaggccgcccaaaacccagaacacggggcccaaacgcagagaaccacgccgggacacggggc

SEQ ID NO: 68737 - RNA, 74 nt, Homo sapiens
acgggggggcaaacacaccacgagacccggggacacacaggccaacagcaaggagaaacgccacaccgggaaag

SEQ ID NO: 68738 - RNA, 69 nt, Homo sapiens
gagcgagggaggagagagggagagccaaagaagagaaggcgacagaccgaagaaagaaaaccaggagag

SEQ ID NO: 68739 - RNA, 69 nt, Homo sapiens
agggggcccccgggaacgcgaggacaccagcagggcacgacaacgaaagcaaccgagaaaagaggcggc

SEQ ID NO: 68740 - RNA, 100 nt, Homo sapiens
gagacaaccgcagggggaccggccgcggcacaccggagagcgacgggacccccccgcagaaggaagccacagggaggaggaccagcgggagggccacgga

SEQ ID NO: 68741 - RNA, 84 nt, Homo sapiens
cgcagagacagaagccgagcaggacaagggcaggcggcgcaggacgcaccggcacgcaacaaggagccggaagggcgaaacgga

SEQ ID NO: 68742 - RNA, 84 nt, Homo sapiens
cgcagagcgggaccacccgggcacagcaggcacggagaagacgaccccgacgcaggccaggagccgcggacagaagccgagcac

SEQ ID NO: 68743 - RNA, 75 nt, Homo sapiens
gagccgcccccaccagacgaggccaccagccagggaaccacagcaggaggaccgaaggaccacgacggagagccc

SEQ ID NO: 68744 - RNA, 79 nt, Homo sapiens
ggccgaccgcacgccggcgcacgggaaacccaagcgcgcagaaggcaaagaacagaggaggaagaaccagagacggccg

SEQ ID NO: 68745 - RNA, 71 nt, Homo sapiens
caggacccggcgccagaggcggggcggaaacgcggaggcaagcacgggccaccaacaagaagaacagggag

SEQ ID NO: 68746 - RNA, 77 nt, Homo sapiens
aacgcccaccgcggagagcagcacgaccccagcacagagcgaaaagcggcaagaacagccagaggaacagaggagaa

SEQ ID NO: 68747 - RNA, 68 nt, Homo sapiens
ccaagcaacaaaggaaaaagcggggaacgaaggggcgcacgacggaagcaacaaaggaagggcaggcg

SEQ ID NO: 68748 - RNA, 84 nt, Homo sapiens
caccaagccggccagcaagacccgagcccagccagaagcggacccagaagaggggagcagcaaggaggaagacagccggggccg

SEQ ID NO: 68749 - RNA, 75 nt, Homo sapiens
gcggacgcgggagacgccagcgagcgggaggagcccgcggagccaaccaggaaaccgccagacggccgcaccaga

SEQ ID NO: 68750 - RNA, 84 nt, Homo sapiens
ggaagaagccaaaaagccccgacagggacagagcagaagggcgaaagaccgggccgcagaagaggccccaacccgggccagaca

SEQ ID NO: 68751 - RNA, 90 nt, Homo sapiens
ccgaagcgaccaagcccagcggaacgccccgcacgaaccaacaaacaggccggggggggcacagagccccggaagacagcccccagcgac

SEQ ID NO: 68752 - RNA, 85 nt, Homo sapiens
gcaaccagccaagaagacacaagcgcaagcacacccaccgaaacaagacagaggcacagggccaggcacacaacgagaccacggc

SEQ ID NO: 68753 - RNA, 73 nt, Homo sapiens
cagcgccggccgcgcgccgcgcccgcgccacagccagcaggacaggcacacccgggcagccccagcccgcaga

SEQ ID NO: 68754 - RNA, 74 nt, Homo sapiens
cagccagcacaccccgcgagcaaggggcccgggcagagggaaagcagaggacggaacaacccgggggaccgcgg

SEQ ID NO: 68755 - RNA, 68 nt, Homo sapiens
gcgcgcgaaccgagcgcaagggaagaaaagaagacagccagacaacaggcacaaagagagaaggaaca

SEQ ID NO: 68756 - RNA, 54 nt, Homo sapiens
cgcccgcgcacgcgcaagaccgcgaggcgagacccgacgagaacccccgcgaac

SEQ ID NO: 68757 - RNA, 79 nt, Homo sapiens
aaacagcaagaacccaaaagggaacacagacggcagagcagaccagacagcgccagccccaccccaacgaaggccaagg

SEQ ID NO: 68758 - RNA, 77 nt, Homo sapiens
cgcgcgcaaagaaggaggaaacacggaacgacgacgaccgggcaaaccagaacaagaccgaaccgggccagcaggag

SEQ ID NO: 68759 - RNA, 58 nt, Homo sapiens
acgccaagcccgaacagagccacacgaccccgcggccaagcgggaaacgcggcgaagc

SEQ ID NO: 68760 - RNA, 56 nt, Homo sapiens
ggaagaaaacgagccaggaacaaagagcaaggcgaccggcccgaggaccgccgcac

SEQ ID NO: 68761 - RNA, 78 nt, Homo sapiens
ccgggaacggcgccggaggaccagacccaggagggggaggaacacacggcacggccccagacggggacgcagaggagg

SEQ ID NO: 68762 - RNA, 72 nt, Homo sapiens
cacggggaagcgcaaaaacaagacggggcgccccacagaggggcgacgcaaagcccccgcggccggcagccc

SEQ ID NO: 68763 - RNA, 84 nt, Homo sapiens
ggaccgccgcgccggagaggaggaccgcacgagaaggagcgcaagcaccagaaggaaccacagaacggagcacagaaaccagag

SEQ ID NO: 68764 - RNA, 58 nt, Homo sapiens
gccccacagcaaccagcaccagagaaggagcacccgggcgaagggagggccgccccaa

SEQ ID NO: 68765 - RNA, 37 nt, Homo sapiens
ggccgagagggacggacgggaaacccacccaccaccc

SEQ ID NO: 68766 - RNA, 73 nt, Homo sapiens
ccggaaaagaggaaacaaggacccgccacagcccgacgaaaggagccaaaaaagggacccagccgggaaaccg

SEQ ID NO: 68767 - RNA, 83 nt, Homo sapiens
acggcggacggaggcgagccggccggggcccccccggccggcagggggacgggggccgacgagcagggggaggaacaaagcga

SEQ ID NO: 68768 - RNA, 65 nt, Homo sapiens
ggagaaggaccaagaaccaggagcaggcaagggaaccaacaggcgagcagaagaagagagccgag

SEQ ID NO: 68769 - RNA, 73 nt, Homo sapiens
aaggccaggcccaagagccaggagaggagccaagcccaacgggacgggaaaacggccacagccaacgacgcag

SEQ ID NO: 68770 - RNA, 75 nt, Homo sapiens
gaagaaggaaagcaaggacaggcacgccacacacaggcaccaaccagcggacacacggaaaagggacgggaaaag

SEQ ID NO: 68771 - RNA, 92 nt, Homo sapiens
cccgaaaagagaaaaacacagcgaaggagccggccaggggccacggagaaagccgcagcgcaagacgcaaagaacacagaaagaacacacca

SEQ ID NO: 68772 - RNA, 83 nt, Homo sapiens
gcgggggccgcgcgaagacaggaccagggcacggagggacacaaagagggccagccaagccccccggcagcgggggccagggc

SEQ ID NO: 68773 - RNA, 81 nt, Homo sapiens
ccgaggcccgggcgggggcggcccggggccagacggcccgccacgggccccgcagccgcgcccgagcgcccgagcagggac

SEQ ID NO: 68774 - RNA, 76 nt, Homo sapiens
cgggaagacacacccgacccagggaccaagaaaggcccagggaccaaagcccggacaaggcccgagcaccaggacc

SEQ ID NO: 68775 - RNA, 87 nt, Homo sapiens
ccgaagaaacagacccccagacggagccaccaacaacaccagggacacaacagcaaggagcagaaaccgaaacaccagaaggagacc

SEQ ID NO: 68776 - RNA, 82 nt, Homo sapiens
aaagggcggcgaggagggcgccgcggacagccagccaccagcagaaggccccggaggcaaaagcagaccggaaaacccaccg

SEQ ID NO: 68777 - RNA, 112 nt, Homo sapiens
ccgccgggacacaccccaggaaaaagacagcccgcagcacgaccagcaggaacggggagccaaccaaggagagcgaaggagacccacgggagcccacccaagcaccaacaca

SEQ ID NO: 68778 - RNA, 76 nt, Homo sapiens
aggcggcaggggcaaccagacgggccaagggaaaagagccgccaccaggaccgccggcggacaaggggaaacccaa

SEQ ID NO: 68779 - RNA, 73 nt, Homo sapiens
accagggacccgcgaaagcggggcacaggcgggcacgcgcccagagaaccgcagccagaagcaaagcagacag

SEQ ID NO: 68780 - RNA, 80 nt, Homo sapiens
cgaggacaggccccgacgaggacagccaccagcgggcccccacggagggcagcaaggggacggggaacccggcgcaaccg

SEQ ID NO: 68781 - RNA, 75 nt, Homo sapiens
caggagagaaaggagacccgacgcaacgcggagcgcaaggcgagggacgagaacgaggcgcggagcgggaaagac

SEQ ID NO: 68782 - RNA, 78 nt, Homo sapiens
gggagaccacgcccgcggcccgcagcgaggggacagcgggcccaggccggcacaaaggaaggcccgaagccacagagc

SEQ ID NO: 68783 - RNA, 55 nt, Homo sapiens
agaaacaaaagcaacaaagagggaacaggaaaagggaggcaaagacaaccagaaa

SEQ ID NO: 68784 - RNA, 37 nt, Homo sapiens
cgcggagcgacgccgacggccacgggccccgccagca

SEQ ID NO: 68785 - RNA, 77 nt, Homo sapiens
cagagacacaaggcagcaggaggaaaggcaagggcagaaaagaggggaaaaggccagccgcacgcaggcaaacgaaa

SEQ ID NO: 68786 - RNA, 83 nt, Homo sapiens
gcgcggcgcccccggggcggaacccccggcacgagcgcgcccagcgcccgcagaaggcccagaggcagcgagaagaaaaagaa

SEQ ID NO: 68787 - RNA, 71 nt, Homo sapiens
agcaaaagccccagaacgaccacagacacaaggacaagaaagccaccaggacgagaaaaaccaccggacag

SEQ ID NO: 68788 - RNA, 90 nt, Homo sapiens
aaggaggaagaagaagcacagaaaaccgcagaacgggcaggagaaacccagcgggcccagagacgcagcgggaaaaccaaggcaagccag

SEQ ID NO: 68789 - RNA, 86 nt, Homo sapiens
ggagaacgcggcaaagcgaggcacagaacacaccagaggcggaccaagaccccaggaagccccggggcaggcccagaagcaccccg

SEQ ID NO: 68790 - RNA, 75 nt, Homo sapiens
agacgggcaggcacccagagagcccagccccgagggaggcaggaaccccaaccgagaggaaaggaccacacccaa

SEQ ID NO: 68791 - RNA, 89 nt, Homo sapiens
gcgaacggggcgagccggaggagcacccaaccccgcgaaacggaggagagaggacaggcaaagaaaaaaagggcgcagaagcccaaaga

SEQ ID NO: 68792 - RNA, 79 nt, Homo sapiens
gggcacacgaggcgcacaagagccaaggagcgaagcagaagcggagaggaaggcagcaaggcagcaccccgaagcacca

SEQ ID NO: 68793 - RNA, 76 nt, Homo sapiens
aacaaggaccacggcaagggccaccacgggaccccaccggccccccgaccaccaccggccgcgcagggagcagcag

SEQ ID NO: 68794 - RNA, 74 nt, Homo sapiens
acgccgagcacgccggacaaggagaggaggggccacacaaggggcacaacaagcaaaccggagaccggcaccca

SEQ ID NO: 68795 - RNA, 116 nt, Homo sapiens
agaaagacccaacagccgagccacccaagcacgagccaccagcaaccaagggcaagaagacaagccccggaccgcggccaagaagacacggccagcgccgccggccaacaagcacg

SEQ ID NO: 68796 - RNA, 77 nt, Homo sapiens
acggagccgccacccagagcgcacggcgacgccccaggggaaaacccccgggaccagcaaaaccaagaacagaaaga

SEQ ID NO: 68797 - RNA, 82 nt, Homo sapiens
gcccgccccgccgcccccgccgccgcggacccaggggcgcccacgccaggagaaggggacaagagaaaagcacgaagcggga

SEQ ID NO: 68798 - RNA, 101 nt, Homo sapiens
gacaggagacgaacaccgggaggaacgggggaagccagaagcagaggacaacagaacgccagcacaggaacacgcgcgcagaacagacaggagggccaagg

SEQ ID NO: 68799 - RNA, 75 nt, Homo sapiens
gcgccacagccaggagacacgggacagagccacggggaagggagcaagccagaagcgagagcacaaagagagcca

SEQ ID NO: 68800 - RNA, 72 nt, Homo sapiens
cggacgcgccggccagggcgaggagagaaaaagggcgcacaacgcaggagaagcgcgcggaacccacaaggg

SEQ ID NO: 68801 - RNA, 79 nt, Homo sapiens
ggaaccacggagcacgagaaaacggcgggaggcgagaacagagcgagaagacaagcagaagcccggccgcagagaagag

SEQ ID NO: 68802 - RNA, 69 nt, Homo sapiens
aggaggaggagaggagaggaccgagaagacagggacaagaggcaagcaaccccggggaagaggccaggc

SEQ ID NO: 68803 - RNA, 85 nt, Homo sapiens
cgccgcccccccgcggccggagggagaccgcggccggccgagcggagcgcgaggaagcccggggcggcgacggagcacgacccaa

SEQ ID NO: 68804 - RNA, 68 nt, Homo sapiens
gacacgagcacgggaaggagcccgacacacgcgcgaaggagaaggacggaaaagaacccagaagcaag

SEQ ID NO: 68805 - RNA, 59 nt, Homo sapiens
acagcaaaccgggccacagcgccacgcagagccccgccaggaagacacgccggggaacg

SEQ ID NO: 68806 - RNA, 43 nt, Homo sapiens
acgaggagggcgcgagaagacaaagggcggagaacggaaaagc

SEQ ID NO: 68807 - RNA, 72 nt, Homo sapiens
acacggggcaccgcgccgcagcggccggggggggcacagagccccggaagacagcccccagcgaccagaccc

SEQ ID NO: 68808 - RNA, 70 nt, Homo sapiens
ggaccagccaagccccaacggcccccgcgccgggcgcagcggaacaagcgggaaacggagccaccaacaa

SEQ ID NO: 68809 - RNA, 76 nt, Homo sapiens
ccggcagcagcccgacgcaaaccaaggacggggaccgcacacccaagggacaagagaaaaaaagggcgggcgaaca

SEQ ID NO: 68810 - RNA, 77 nt, Homo sapiens
caagaaacgaagcaaaagacagcgaggagcagcagcagcccagcaggcgcggcccgccaggagcggcagcccacaag

SEQ ID NO: 68811 - RNA, 72 nt, Homo sapiens
ccagaaggaaacacaggaaacagaggaagacggggcccaaagaggaagggggaaaggaccaaaaaaaaggac

SEQ ID NO: 68812 - RNA, 63 nt, Homo sapiens
acagagacaagcgagcgccgcacaaaaagcagagagggggaaaaaaacaggggaagagccaga

SEQ ID NO: 68813 - RNA, 79 nt, Homo sapiens
gagcccacagaagcaagaaagcaggccaccagaaggggaggagacgggaacagggcacacggcacggacagggcgggac

SEQ ID NO: 68814 - RNA, 51 nt, Homo sapiens
aacaggcacaagaaagacagcgaccaaaaaggcacaacacagaagaaggcg

SEQ ID NO: 68815 - RNA, 75 nt, Homo sapiens
agcccgggagccccccggagaggcagcccccccgggccaacaaacccgcgggacgcggccccaccgggaaggccg

SEQ ID NO: 68816 - RNA, 79 nt, Homo sapiens
aaggcacaggaagccaagggagcgcagaagggaagaaagacccggggaggagacacaggaccaggccccccgcagaaac

SEQ ID NO: 68817 - RNA, 81 nt, Homo sapiens
cggccaggccagacccgaaggccaggagacccgaccccaaggcaaaagcagaccggaaaacccaccggcaagaccacaccc

SEQ ID NO: 68818 - RNA, 64 nt, Homo sapiens
ccaggacgggagcagcgcccagacccccagaggagcccaccaccggaccgggaccgggaaaggc

SEQ ID NO: 68819 - RNA, 73 nt, Homo sapiens
gcgcccggcgccccccccggcggagagggaccacccgcggcacaagcgacgccaccagcgccgggggccagcc

SEQ ID NO: 68820 - RNA, 80 nt, Homo sapiens
gaccacgcagcaaggcgcacacaggccgccgagacccaggaccgaggggaggccaccccacgaagagagccaacgcacac

SEQ ID NO: 68821 - RNA, 77 nt, Homo sapiens
cagaagcggcgggaaaagaggaagggcaaggaaccggaaaaacacccgggagccggaggggcaacaccgaacgaaca

SEQ ID NO: 68822 - RNA, 67 nt, Homo sapiens
ccagaccacgacagagcaaagacccggccccccccaacagcacgggacccgccggagccagagaacc

SEQ ID NO: 68823 - RNA, 63 nt, Homo sapiens
cacgggaagcccgaaagaaacgacaaaacggaaggcagagaccccaagcagcggcgccacgag

SEQ ID NO: 68824 - RNA, 79 nt, Homo sapiens
gcgacagcaaggggggccacgaggaacaaagacagcccaccaggaagagcgaaaaggcccgggcaagaagacagaacaa

SEQ ID NO: 68825 - RNA, 78 nt, Homo sapiens
cgacgcaccgggcccaaccagcgcccagcccccgcagacccgcgaagcaaaaagcggaaccacaagaagaaagcaacg

SEQ ID NO: 68826 - RNA, 69 nt, Homo sapiens
cggggagaaaaccaacccgagagaaccaagcagagcaacaggagaggggggaccacgaagcaacgccaa

SEQ ID NO: 68827 - RNA, 78 nt, Homo sapiens
aggaggcccgaggagcggccacgcggaaaggccccccgggcaagccagcaccgagaaaccccaggaggccgcgaagag

SEQ ID NO: 68828 - RNA, 84 nt, Homo sapiens
ggccgcgggcgcacgccgggcaccgcccggagccagaaccagagaacagcagaggcccaggaaacagccaccaccccggccccc

SEQ ID NO: 68829 - RNA, 73 nt, Homo sapiens
ggacgcaccacgagggaacacgggcggcgagagaaaaggccagcaccaagacgaaaccggcagaaggcacgcg

SEQ ID NO: 68830 - RNA, 70 nt, Homo sapiens
cagagggcaacggagcccgaaggagcggcaaaacagagcggaaacacaaagagagaggccacaggcccag

SEQ ID NO: 68831 - RNA, 70 nt, Homo sapiens
cacgcaaagaccaccagaacccaggagaaacgagagggacagcaaggaagacgccagagagcggcacacc

SEQ ID NO: 68832 - RNA, 93 nt, Homo sapiens
gcgcacggccccaggaagagaggagagacggcaggaaaggagagaaagggaaaagggaacgcagggacccacccagccaaaagaacccaggga

SEQ ID NO: 68833 - RNA, 76 nt, Homo sapiens
cacgacgccccaaaccgccaggagaaaaaaggacccaaagacaggaccacgcaccagcagagaaggaaagcaaacc

SEQ ID NO: 68834 - RNA, 69 nt, Homo sapiens
gacgccccccaggaccagagcagaggaccaggcaccaagaagagagaaagagaccaagcaagcagagag

SEQ ID NO: 68835 - RNA, 89 nt, Homo sapiens
gccgggaacgacgcagagccgaggcagaagacggggcccgggaccacaggccccggcccagagggacggcaaaacagaacagaaaggcg

SEQ ID NO: 68836 - RNA, 59 nt, Homo sapiens
gcgaggaaaaaaccacgacaaaaccacccagccccagggcaggggcccggagagcgcgc

SEQ ID NO: 68837 - RNA, 71 nt, Homo sapiens
ggaagaagaacgacccgcccggggcagcagaacgggaggcggacgccacccaaccaaagcgacacacacag

SEQ ID NO: 68838 - RNA, 64 nt, Homo sapiens
gcgagaaggcggccacagcaggaggacgcggaacgaaccggggaacagaccggaggaaccgagc

SEQ ID NO: 68839 - RNA, 76 nt, Homo sapiens
ggaaagcggaccgagccggagcggacgacgcacagggcccaggccggaggcagggcggaccggccgcacaaccacc

SEQ ID NO: 68840 - RNA, 74 nt, Homo sapiens
gacccacggcacgccacgggaccaaagcagaccacaaaacgaccggaacgaggcgggacccccaaagaaccaga

SEQ ID NO: 68841 - RNA, 76 nt, Homo sapiens
cgacagccacaacaacccggagggcaggcgggcccggacacacgcgcaagaccgaccaggagcccggcgggggaag

SEQ ID NO: 68842 - RNA, 78 nt, Homo sapiens
cccaaacgcacagaaagagcgaacacccagaaacggagcagacagacagcgaacacggaagccacgaaaagcaaaagc

SEQ ID NO: 68843 - RNA, 76 nt, Homo sapiens
caacagaccaccgacacgccgaccgcagcagagccgaaagcagaaaacgaacgaaaccaccacagcaaccgccccc

SEQ ID NO: 68844 - RNA, 69 nt, Homo sapiens
ccagggcgacaaaaaggccaaggcaaagaaaccgccacagagcgcgaagggacccggccgaaccacgcg

SEQ ID NO: 68845 - RNA, 73 nt, Homo sapiens
cgcgccccccgccgccgccgccgcgcgccaaagcgcgccgccccgggcaaaagccccacaccgcgccgcgacc

SEQ ID NO: 68846 - RNA, 72 nt, Homo sapiens
cggagaaggccgggcgagcgcaaaggaaggcgccgggcccgacccgcgagaggacgcagacaacgaaaacgc

SEQ ID NO: 68847 - RNA, 70 nt, Homo sapiens
agaaggaccaagaaccagcgacaaaagaagcgaagccaggaacaagaggcggaagacacacaacacagag

SEQ ID NO: 68848 - RNA, 78 nt, Homo sapiens
agcagccagaaagcggcacgaacagagccgggagcaagaagaacacccagaggggcccggaacgaagggggagacaac

SEQ ID NO: 68849 - RNA, 74 nt, Homo sapiens
cggcgcggcagagcgggcaggagaggccggcgccgccgaccgggagccgcagcaaggcgcgagcccgcggagca

SEQ ID NO: 68850 - RNA, 84 nt, Homo sapiens
gccgccccaagagcgcagacggccagccgaaaccacggaagaaggaggccgaccaggccgacaaagcagacgcccgcaaacgac

SEQ ID NO: 68851 - RNA, 65 nt, Homo sapiens
gccggacccaacgacggagaaagggccacacaagaggcagaagcaccacggggcccccaaaggga

SEQ ID NO: 68852 - RNA, 72 nt, Homo sapiens
ccgggccccagcaggcgaagcaggagaccgcaacgacccacccgagccacccacgacagaccgaggagcgca

SEQ ID NO: 68853 - RNA, 39 nt, Homo sapiens
gaagcacagggccggccggaacaggagccgggcgcgagc

SEQ ID NO: 68854 - RNA, 64 nt, Homo sapiens
ggcaagcccaccagacggaaccacagacgaggaacccccaggaaacaccaacaagagaaaaaac

SEQ ID NO: 68855 - RNA, 68 nt, Homo sapiens
agaacacgggagaaaaaggaaaacgcggaaaaccgacacaacagacgaagaaacggaaaaagaaccag

SEQ ID NO: 68856 - RNA, 57 nt, Homo sapiens
aggaaggaacggggggagagaacgaaagcaggaggaggcgcggaggaggaggaggaa

SEQ ID NO: 68857 - RNA, 87 nt, Homo sapiens
caagaagaggcgccagaggagccgcccgcccagaacggcggaccggagggcgagccagcccccacccagaggagaacgaaaccacga

SEQ ID NO: 68858 - RNA, 93 nt, Homo sapiens
caggccccagacacagacgagcaggggaagagcgcgaagaaacacgcggaaagaaaacccaagcccgagaccaacaacgagggggaggaggca

SEQ ID NO: 68859 - RNA, 72 nt, Homo sapiens
agcgaggaaaacgccacgacagacacaaccaagcaccggagaaaacccacgacgaagccacaaaagagcaag

SEQ ID NO: 68860 - RNA, 86 nt, Homo sapiens
ggagacagacaagacaagaccggcggggaagcggggacacggaaaacgacagaacgaagcagaagaacgcccaggcaggcagggaa

SEQ ID NO: 68861 - RNA, 72 nt, Homo sapiens
ccagagaaaaggcggaagaccgccaaaaaggacacggagccagccaaaagaagcaagggaaagaccaggagc

SEQ ID NO: 68862 - RNA, 81 nt, Homo sapiens
aaaggcggaggcaaacggcaaagggagagcaggcggggcaagcagacagcgaggggcgcagcaaccaagaacaaaagaaaa

SEQ ID NO: 68863 - RNA, 57 nt, Homo sapiens
gagccccccaagacgaacgagcagccacgaaaccagcgccccaaggcggcccaaaag

SEQ ID NO: 68864 - RNA, 60 nt, Homo sapiens
aaaaccaaggggcaaaccaggcgcaaagccacaagccaggcgaacccccccaaaaaaaac

SEQ ID NO: 68865 - RNA, 67 nt, Homo sapiens
aagcccccaggacagaccgagcccccggaaaccccaggcaaaagcggacgagaaagcggggaacgcg

SEQ ID NO: 68866 - RNA, 69 nt, Homo sapiens
cgaccgaccgagcagggcacacccgcgaggaagaacacgaaacccgaagaaaggggggccagaaggcaa

SEQ ID NO: 68867 - RNA, 77 nt, Homo sapiens
gaccaagaaccagggaaaacacaggaaagaacggcggcgacggaacaagagacagccacacacagaacgcagaagga

SEQ ID NO: 68868 - RNA, 91 nt, Homo sapiens
cgcgggggccgaggcgcgggcaggggcccgccgcgcccacccgaggcggaggcgcgaggggcggacggaggcggcggcggcggcggcggcg

SEQ ID NO: 68869 - RNA, 131 nt, Homo sapiens
aagaaccaaccaccccagcaacaaggcaagagcgacccgcagaaggcggggaccagccgcgccaggcgcaagacaaggcccgcgggccaagacaaacaccacacaagaccccaggcggggcgaggagccgg

SEQ ID NO: 68870 - RNA, 86 nt, Homo sapiens
ggaccgagaccggaccgagagcggaccgagagcgcgaaacgcacgagaaggaagagccgcgggcagggaaagcagccacagacgcc

SEQ ID NO: 68871 - RNA, 80 nt, Homo sapiens
ggcgcccacccaccggaagcgagccggcggcgggaggagcagggcggagcccccagcccccgcgaagagccgagagcgcc

SEQ ID NO: 68872 - RNA, 75 nt, Homo sapiens
gcacgcagacacaacggacaagccagcaaaaccacggccccaggggagaaagaacccaagggccgggcgcgggcc

SEQ ID NO: 68873 - RNA, 69 nt, Homo sapiens
caaaggagaagaaggaaggggaagaggcagaaggagaaggagaaaaaggccggaccagacacacgcaca

SEQ ID NO: 68874 - RNA, 68 nt, Homo sapiens
gaacaagacggaaaggacagcaggaacaagggaggaacacggccaaccacaaagaacaacacagaagc

SEQ ID NO: 68875 - RNA, 76 nt, Homo sapiens
gaacggcgcgccaccgggccgcaggaccaccccgcacaccacccaaggagaaaaggggaggagagcacagaaaaac

SEQ ID NO: 68876 - RNA, 82 nt, Homo sapiens
accagcagcagccgccgggaaagaggccgcccaggagaggcgcgagccccccagggggcgcaggcggaggcaaggcgcgacc

SEQ ID NO: 68877 - RNA, 88 nt, Homo sapiens
ggaaacgggaacaacccaaaaccaaaaccagacacagcacaagcagcggccacaggccggccgggaacacaagagcggcgacgggcag

SEQ ID NO: 68878 - RNA, 76 nt, Homo sapiens
aaaaaacacggcacaaaacaaggaaagagaggcccaagaaacagaacaagaaaaagaagaggaaaggacaggagga

SEQ ID NO: 68879 - RNA, 76 nt, Homo sapiens
cagaaccaccccgcggagagcgcaagccgggcagcagcccagcggcagcagaaagagcagaaagaaagggcgggca

SEQ ID NO: 68880 - RNA, 75 nt, Homo sapiens
ccacgaaagccggccacgccgggccggagccggaagcaaacagcccacagagagcaggaccacaccgggcgaagg

SEQ ID NO: 68881 - RNA, 65 nt, Homo sapiens
cagagccccgcagccggagacccgaaaccagcagcgggagcacgacagcgggagaagcaacggcc

SEQ ID NO: 68882 - RNA, 78 nt, Homo sapiens
cgcccgaacgggcaggcccagacaggccaggagggccgaggcaggcaggaggagcaggagaggaagggcaagcccccg

SEQ ID NO: 68883 - RNA, 71 nt, Homo sapiens
ggaccaaccaaagaaaacaggagggcagcagagcaggcaggcaaacaccagagaggacaaccaaaagcacc

SEQ ID NO: 68884 - RNA, 74 nt, Homo sapiens
cagcccgcgaacacacaagcccccccaggcacacaaagagaaagggaaagaagaaagccagaacagggccggac

SEQ ID NO: 68885 - RNA, 81 nt, Homo sapiens
gccgccgcgccagcggcaacaccacgcccacgggacgaggagagggagggaaccgggcagaggagagagaacgaaacccaa

SEQ ID NO: 68886 - RNA, 54 nt, Homo sapiens
agaccaggacacagagaacagaagcggaacgcagagccagaagagacgaaggac

SEQ ID NO: 68887 - RNA, 80 nt, Homo sapiens
aaccccgggaaaggacaagagagggaagcacgagaaaacaagggaaagaagagaaaaacgcaagaaaaacgagagaaaag

SEQ ID NO: 68888 - RNA, 59 nt, Homo sapiens
ccgacccaagggaaaccaaggggcgggggagcgggaggagccagagcacaccgcaccac

SEQ ID NO: 68889 - RNA, 77 nt, Homo sapiens
agggccgggagccgggccggccagccagggacccccccgcggcaggaacgcacccggcggccccacgcagccaccca

SEQ ID NO: 68890 - RNA, 81 nt, Homo sapiens
ccgaagaaacaagcacagccacgacacaggacagcgccagcccaagccagcagcgcccggggcgggccccggaggacgcac

SEQ ID NO: 68891 - RNA, 69 nt, Homo sapiens
ggaggggaaaggacaaacgcacaaaagcccgagacagcgaaacgggcaagaacagagacgaagaggagc

SEQ ID NO: 68892 - RNA, 127 nt, Homo sapiens
gggcaccgcaggccgcccacaccggggcagcagagggaggcgccagcgcgacgagaggcacgcccaggcgaacggccggagaaccagagaggacccggagcaggaggagaaagagaagcgccagaag

SEQ ID NO: 68893 - RNA, 62 nt, Homo sapiens
gcgcacgggaaccgaagagagccgggcaccacccggggaaacgacaacagcgcaagcagaaa

SEQ ID NO: 68894 - RNA, 65 nt, Homo sapiens
cagcgcagcgcgccaggagcccagcagcaaggggcaaagagaaccaggagaccccaccaccacag

SEQ ID NO: 68895 - RNA, 83 nt, Homo sapiens
ccgggccgacgccagaagacaaagagccaagaaacccacagcacgcacagaaaaaaaaaaagcaggaccaagcaagaaggaag

SEQ ID NO: 68896 - RNA, 69 nt, Homo sapiens
cacacacagggaaaaaggagcagcccgggcaccacagaaaagccagaagaaggccagggaggggcaagc

SEQ ID NO: 68897 - RNA, 78 nt, Homo sapiens
cccacaccacgcggccaccagcagcaggcacgggagacgaaacgcccgcccgcaaacagcaccgcggagcaggggcca

SEQ ID NO: 68898 - RNA, 71 nt, Homo sapiens
ggaggccacgaacacgccggagccgccagcacccagaaccggagagcccagaacgcgggcagcccgaagac

SEQ ID NO: 68899 - RNA, 76 nt, Homo sapiens
cccgacgacggaccgcacacggagaaggaagcgccggaggcgccggcccacaggggggcgacggaggaaggccgga

SEQ ID NO: 68900 - RNA, 80 nt, Homo sapiens
ccggcgcggcgagagaacaggccgaaagggccacaaacccaagggcagcggggaagaagaaaaggaaccgaggccccccg

SEQ ID NO: 68901 - RNA, 69 nt, Homo sapiens
aacgagaacggagccagcaggaaaggggcaggggcaccccccgggaagaagccccccagcaaagccaac

SEQ ID NO: 68902 - RNA, 79 nt, Homo sapiens
caagaacaaaggccgcgacggagggaccagaggaaaggagagcagacgaacagaaaagaaaaacaccaaacacagaaga

SEQ ID NO: 68903 - RNA, 62 nt, Homo sapiens
cgcagaggcaaggggccaccaggaggccagggggcgccagcaaaaccgagacaccggcgagc

SEQ ID NO: 68904 - RNA, 72 nt, Homo sapiens
ccggaggaacacgcagcaccgggagagggaaaagaggacgaggcgcgaaaaggcaaaggcaagaaagagaaa

SEQ ID NO: 68905 - RNA, 73 nt, Homo sapiens
caggcacgccccaaaacagacagagaaaacgaacgaccacgaaccgaaaaaaaaaaacgcagcgcagccccaa

SEQ ID NO: 68906 - RNA, 87 nt, Homo sapiens
cagaacccccaccccgagcaaagcgcgaaagagccccgcggcagagacaccaggcgccgagaaggccagcagagaaacaggcaggag

SEQ ID NO: 68907 - RNA, 79 nt, Homo sapiens
cgcccaccagggccaccagcgccccgggaaaaagacgccaggacggccggcagcaaagaggaccccaagcgggagccca

SEQ ID NO: 68908 - RNA, 83 nt, Homo sapiens
accccggcccgaccccgacccggcccggcaggccccaaccaggcgccggaccgaaggcgcgaccacgacgagaagcgggggcc

SEQ ID NO: 68909 - RNA, 71 nt, Homo sapiens
ggcgcgaggggacagagcccagcccgccggccaggaccgggcaaaccagaacaagaccgaaccgggccagc

SEQ ID NO: 68910 - RNA, 69 nt, Homo sapiens
gagcaacccgcagaagaaaaaaggaagaaagggcacgagggaaacacaaagaagacaccagaagggcca

SEQ ID NO: 68911 - RNA, 92 nt, Homo sapiens
aaggaaaaacggagagccacaaaaaaggaagcgaaaggaccaagaaaggcccagggaccaaagcccggacaaggcccgagcaccaggaccgc

SEQ ID NO: 68912 - RNA, 89 nt, Homo sapiens
cagaacaccggaggcgaaaaaacaccaacacggaccaaccccgaacgaggaggaaggccgaacaagccgaaaaggggcaaccgccaaag

SEQ ID NO: 68913 - RNA, 84 nt, Homo sapiens
agaagcgaagagacgaaccacaagagaaaggaggggacaagaaaacggacacacacagcaaaaaaaaacgggaaccaaaaacgc

SEQ ID NO: 68914 - RNA, 83 nt, Homo sapiens
agcggcgccgcggacaagcacgagggcgcgccgagacgcccgaggcgaagcgcgaaagaggcagaagaagggggagagccaaa

SEQ ID NO: 68915 - RNA, 65 nt, Homo sapiens
acgcggccaccccaccgcagggccacgcccggacacgcagagcagcaagacaaacagagaacagg

SEQ ID NO: 68916 - RNA, 82 nt, Homo sapiens
agcaaggcagaacgccaagccccgcgagcgcacgccaacgacgaggaccgacgcagagaaaccaggcggggaacaagccagc

SEQ ID NO: 68917 - RNA, 37 nt, Homo sapiens
ggcagacaacccgcaggcggccgagcacgccacgaca

SEQ ID NO: 68918 - RNA, 58 nt, Homo sapiens
gcagaagagcccaacaacaaacgaacagagagaagggcgggagaaaccaaggaaagag

SEQ ID NO: 68919 - RNA, 65 nt, Homo sapiens
accaccccaggagcaagcaaacggagagaacagacagggacaagaaaaaccaagcgaagaggaac

SEQ ID NO: 68920 - RNA, 76 nt, Homo sapiens
gggagcggcgggaggccaccgccagaagaggaacagcaaccgggcgcgaaaaaaaaccggggaaaaaagagaaagc

SEQ ID NO: 68921 - RNA, 78 nt, Homo sapiens
aggaaccgaagacacaccgaaccagagacaacaaagcgggcacagagagacccagcgacgagcaaaaggccaaggaag

SEQ ID NO: 68922 - RNA, 80 nt, Homo sapiens
acagaaggaagcagcagcagcagccgagccccgccacgaggaccggccggagaccaccgccggcccgggccgccagcgcc

SEQ ID NO: 68923 - RNA, 56 nt, Homo sapiens
cggccacggccggaaggcagcaagccaggcacaggaagagggcggcacgcggccag

SEQ ID NO: 68924 - RNA, 37 nt, Homo sapiens
acacggcacccggggaggagaggggccccgaggagcc

SEQ ID NO: 68925 - RNA, 81 nt, Homo sapiens
gcgccggccggagaaggccagagcacacacggccaagagcgggcaccaggaagcgaaggcggggagcgcggccacagacgc

SEQ ID NO: 68926 - RNA, 58 nt, Homo sapiens
ggaagaacccagaacaccaaaaaggaggccacgaagacggcaaggaggaaaggaagag

SEQ ID NO: 68927 - RNA, 77 nt, Homo sapiens
ccgaacgccacgaacgggaagcgggcagcacaaaacaaggccggacgaaagaaccaaccacgagaggggagagacgg

SEQ ID NO: 68928 - RNA, 59 nt, Homo sapiens
gcccaggcccagcccggcagcaaaggaacccggagaagagaaagcaggcggggaccccc

SEQ ID NO: 68929 - RNA, 75 nt, Homo sapiens
ccagcccccacaaaagagggcagcccgaggccgccggcaggggaggaggcgcgcagacccgggggcgggcacaca

SEQ ID NO: 68930 - RNA, 72 nt, Homo sapiens
gaggacaaagaagccacgaagcaaaaagacccccaagacacacacccacgggaaggaagaaagcagagccac

SEQ ID NO: 68931 - RNA, 69 nt, Homo sapiens
ccgccagggcccacacccccccccccgacaggcaagaagcagagcgcagagggaagcgcacaagccaaa

SEQ ID NO: 68932 - RNA, 72 nt, Homo sapiens
aagacgacgcaccgcaggcagacaaaagggccaaagaagggagagaggagcagcgacccggagccgccggcc

SEQ ID NO: 68933 - RNA, 76 nt, Homo sapiens
gacccggcgacaacacccggccccgagacagaagccggcaagagggcacagggagacagcgcaagagccgaacgac

SEQ ID NO: 68934 - RNA, 76 nt, Homo sapiens
gacagagacaacaccgagagagaagaaagcagagccaaagaagaacaggagaaaagaaggggagaaagccagaggc

SEQ ID NO: 68935 - RNA, 80 nt, Homo sapiens
gaaggagaaccgaccggccagggcgcagaacagcacacggccccagcggaccaaccaggagggaggacaagcgcacacac

SEQ ID NO: 68936 - RNA, 69 nt, Homo sapiens
gccgcacggccaacagaaggcgagacaaggggaacacagcacaaacggcagaacgaagcccccggcacc

SEQ ID NO: 68937 - RNA, 85 nt, Homo sapiens
gcacgacaaagagcaagagagaggacaggaaccaccaggaggccacaaggagccacaaagaccggcggcggcgcgcacacaccag

SEQ ID NO: 68938 - RNA, 67 nt, Homo sapiens
agcgcccacggggacggagggccgagaagcggggcaccacgaaggaccgaagagggacccagaaagc

SEQ ID NO: 68939 - RNA, 69 nt, Homo sapiens
gaggaaccaaaccagagcacccaaaaggaaacggagaaagaagcgccagcgcccgagccacggcgccgc

SEQ ID NO: 68940 - RNA, 51 nt, Homo sapiens
acagggcagaacggccaagaccggccaacacaggggaccaaaacaaaacga

SEQ ID NO: 68941 - RNA, 39 nt, Homo sapiens
ccgggacacgggggcgaaccggagcagcgccacgcggag

SEQ ID NO: 68942 - RNA, 61 nt, Homo sapiens
ccggcaggaaccaccaggacagaaggccacaacagagaaggaaccagggacccaaagcaac

SEQ ID NO: 68943 - RNA, 80 nt, Homo sapiens
gcagagcgaaggagcggagccaccaggaaggagggccccggagcagccacaccaccgaggccccacccagcacgagcaca

SEQ ID NO: 68944 - RNA, 43 nt, Homo sapiens
gagacaaaaaagcccaagggaacccaggacaagacagccagga

SEQ ID NO: 68945 - RNA, 73 nt, Homo sapiens
acgaaaccacgacccacagaaagagcggagccgcggagcccgggccagaccacaggaaagcgcaggaccccga

SEQ ID NO: 68946 - RNA, 59 nt, Homo sapiens
agcaagccgaacggacgggagaacgaacggggcggaggaaaagccagacggagcccggc

SEQ ID NO: 68947 - RNA, 73 nt, Homo sapiens
ccccggagccaaggcggagaaaacggaagagccaacagagcacaagccggacccccacccggcccgagaagag

SEQ ID NO: 68948 - RNA, 58 nt, Homo sapiens
aggacaaaacaccacaggaggacgggccacgaggcaccggccgcgagcaccagcgccc

SEQ ID NO: 68949 - RNA, 75 nt, Homo sapiens
gcgcagaaacaacaagccccggcagaagggaccaagacacaagaggccagccggcgccccggccagccaagccac

SEQ ID NO: 68950 - RNA, 79 nt, Homo sapiens
ggagccgggccgagccggggcgaagcggaccccagggaccccgacggagagacaaagaagacggagggggggccagcca

SEQ ID NO: 68951 - RNA, 73 nt, Homo sapiens
aaggaccaagaaccaggaaagcaacccaccacaagacaaagaccaccaggacacgaaagcaagaccaagaaaa

SEQ ID NO: 68952 - RNA, 46 nt, Homo sapiens
gcagcagcggcgggaggagccccggggcagacgcggccagccacca

SEQ ID NO: 68953 - RNA, 81 nt, Homo sapiens
cgccccgaccgccgaacaaggaacggggaggcgagcccacacgccagcgggaacggacggccccaacggagcaagaacggg

SEQ ID NO: 68954 - RNA, 73 nt, Homo sapiens
agcgacacaggaagaacagggcgaggacgagacggaaagcagaagacgggcccagccgggaacgcagcgcaac

SEQ ID NO: 68955 - RNA, 73 nt, Homo sapiens
aagggaggcccaagacccacaacaaaagccaggacccgaaaagccagcaagcgagaccaacaccaacacgagg

SEQ ID NO: 68956 - RNA, 72 nt, Homo sapiens
gcagccaaccagaaaaggacaggccccggaacaagaggaggacagaaccaggcgaggaggaagggggaacaa

SEQ ID NO: 68957 - RNA, 82 nt, Homo sapiens
cggccccggccgggagcgccggggccaggagagcgcgccggcgagaagcggccgagccagcagcaggggaaccacaaaacca

SEQ ID NO: 68958 - RNA, 82 nt, Homo sapiens
ccccaggaggcccggcagagcaggcagacgagaccggagaaggaaagacaagccgagagagggaggcccgaggaagagcggg

SEQ ID NO: 68959 - RNA, 77 nt, Homo sapiens
aagaggaggggcccggagagggggaagggcccaaagccagaaggggaccaggcggagccccgaagagcggcaggaaa

SEQ ID NO: 68960 - RNA, 56 nt, Homo sapiens
gaccacaccagacacaggaggggaggacaaaaccaacaacaagccacccacacgag

SEQ ID NO: 68961 - RNA, 111 nt, Homo sapiens
aaaacaagggaaacagaaaagcagccagaaacgaaaacaaagagaacagcaagaaagacagcggcaagcaccggcagaccgagcaggagaggaccgcagcagcaaggccga

SEQ ID NO: 68962 - RNA, 61 nt, Homo sapiens
ccgccgagcgcgcggaggcggaggcggggaaacaggaacacgaaagaggaaaaacgcacaa

SEQ ID NO: 68963 - RNA, 87 nt, Homo sapiens
aagacccaagaagaagaaggcgaaggaccccaacggggaggccaacggaagaagcaagagcgggagcggggcgccagcccccgggag

SEQ ID NO: 68964 - RNA, 64 nt, Homo sapiens
cagaaaaaccacagggaaggagcaggaaaccgaggaaccgaccccaagaggaaaagacacacaa

SEQ ID NO: 68965 - RNA, 85 nt, Homo sapiens
gcacaagagaaagaaggaagcggcgccgaaaaaaagggagacggaaggcgcagacagcaagaggaagaggagaggaagaggcggc

SEQ ID NO: 68966 - RNA, 75 nt, Homo sapiens
cgggaaagagccacgaacacaaaggagggacagcagcaagagccccaaagccaccagggaacggagggaaagcga

SEQ ID NO: 68967 - RNA, 77 nt, Homo sapiens
acgcagggcgcccccgggggccaaagggcgagggcacaaaaaaccacaccccccaccgaggaagagcgggagaaagg

SEQ ID NO: 68968 - RNA, 77 nt, Homo sapiens
agcaaagcaccaaagacgagaaagaaacagcagaacagccggagccccaaaccccaggaccagcaaccacagacaga

SEQ ID NO: 68969 - RNA, 83 nt, Homo sapiens
cgaagccgagcagaggacaaaacaagagggccaggaaagggagaagaggacagaaaaagaccagacgcggaaaaagaagcgag

SEQ ID NO: 68970 - RNA, 75 nt, Homo sapiens
gaggcgacaggaaacccgccacgacaaccgcaccaacaaagacagacaagggcaaaaaaagacccagaagcccaa

SEQ ID NO: 68971 - RNA, 79 nt, Homo sapiens
acgcccgggggaaacagagaaagaaggcggccaggccaaccgaagggaaacacaaagaagacaccagaagggccagcac

SEQ ID NO: 68972 - RNA, 33 nt, Homo sapiens
ggaaacacagaacgcagggacgacgcaaagcag

SEQ ID NO: 68973 - RNA, 75 nt, Homo sapiens
gagccaccaccggggccacgggaggacgagggcaccccaacccgcgacagcaaggccggaggaaaaacagcgggg

SEQ ID NO: 68974 - RNA, 79 nt, Homo sapiens
cgcggggggagcccaaccccggcccaacaccacgcaggccgggcgaggcgaggccacccgggccgccggcggccacggg

SEQ ID NO: 68975 - RNA, 66 nt, Homo sapiens
cggaagagaagagggggcaagaaagacagcaggagacaacccagagcaagagagacaggcgaacgc

SEQ ID NO: 68976 - RNA, 71 nt, Homo sapiens
ggacggcggcggggcggaggggaggaaggcagagaagaacgaaacccacagaaacagggaccgggcaaagc

SEQ ID NO: 68977 - RNA, 51 nt, Homo sapiens
gcagccaacacacagcccaaggacagagagagggaagagcacagacaaaaa

SEQ ID NO: 68978 - RNA, 70 nt, Homo sapiens
cgggcccgaggcggcgagagaggcaggcggagccgaccgggccagggacggcaaacgcggaccggaccag

SEQ ID NO: 68979 - RNA, 75 nt, Homo sapiens
ccggcgccgacggcggcacggcgagggaacaggcacgccccacccgccagccgagcccccgacgcagcacaaagc

SEQ ID NO: 68980 - RNA, 86 nt, Homo sapiens
ggagcgggaccccgagcaccgggccccgcgaccggggcccggggaaggcccgccgcccgccccaggcaccggaacagcacaaccgc

SEQ ID NO: 68981 - RNA, 73 nt, Homo sapiens
acaccaacggccccagccacgcaccaaaagacagacgaacgcgaaagcgagcagcaggacgcacggcgcaaca

SEQ ID NO: 68982 - RNA, 53 nt, Homo sapiens
ccaaccgggaagaagcgccgcagacaccaggcagcccagaaacaggacagcac

SEQ ID NO: 68983 - RNA, 56 nt, Homo sapiens
aagccggggaggaagggcggcggaccggcgcagggggcccccgcccgaccgacagg

SEQ ID NO: 68984 - RNA, 79 nt, Homo sapiens
gggaaccccccagccgcagaaacagagagcacggcaaccgaaaaaggagcgcccggacacaggaggagcaaggaacgca

SEQ ID NO: 68985 - RNA, 78 nt, Homo sapiens
ccgaaaaccccaggggggaaacaagagacccgaaaacagacaaagccgaggaacagaaacaggagaagccccaggaag

SEQ ID NO: 68986 - RNA, 72 nt, Homo sapiens
cagcgaggcgccccagagcccagggcaggacaccgacaggaacagggaccacggggggaaggggcacgaaga

SEQ ID NO: 68987 - RNA, 79 nt, Homo sapiens
cgcccgccaggccgcacacaagcggcgacccgggccgcaaaagaaagaccggaaggcgggaagggagcacagagaacgg

SEQ ID NO: 68988 - RNA, 77 nt, Homo sapiens
ccgccccgcccacgaggagcacagccgggccgcgcgaagaaaaagaccaccaggaaaccggaaaaggcacaacaaaa

SEQ ID NO: 68989 - RNA, 87 nt, Homo sapiens
ccaaggaccccagaagaggagagagagcaagagaggaagaagaacgacccgcccggggcagcaggaagggggccggcaggacaggcg

SEQ ID NO: 68990 - RNA, 79 nt, Homo sapiens
gccgccgaccccccggcgccgcgccggcggcggcgggacaagggcgcaccggggcgcagcgagggaggacaacggggcg

SEQ ID NO: 68991 - RNA, 77 nt, Homo sapiens
ggacggcacgccgcggcggggggggcaagagccgcgccggcagggaacgcagcgccgccagcgcccgggccggccac

SEQ ID NO: 68992 - RNA, 83 nt, Homo sapiens
gcgagaagaacagccggcgcaggcccaccgccccacacccacccagaggggggccggggcaccggccagggggcccggggcga

SEQ ID NO: 68993 - RNA, 78 nt, Homo sapiens
cacacaaagaacggagccagaaaggccccaccccgccacagaacccacagaagggacggagcaagaccgagaccaccg

SEQ ID NO: 68994 - RNA, 92 nt, Homo sapiens
acagaaggcaggccgggcagcccggccccgcgagcgacccaccgaagcagcggccccggggagcccgaggcaggaggggaagcagaaagcaa

SEQ ID NO: 68995 - RNA, 87 nt, Homo sapiens
gaagacagggacggaccacgggaccaagcagacaaaccaagcccagaaccgggacaacccagcaaacaggccagacccgacaggagc

SEQ ID NO: 68996 - RNA, 54 nt, Homo sapiens
aagaaggaagcggcgccgaaaaaaagccgagacacaagccccaaggggaagcac

SEQ ID NO: 68997 - RNA, 52 nt, Homo sapiens
gacaccgccggaaccgacaagagaaggggaacgcgggccgagagccgcgcag

SEQ ID NO: 68998 - RNA, 79 nt, Homo sapiens
ccgcaggcggcaggaaccccccggcgaagaaccaagaaagagggacagcaaaccaaaaaagggagcagaagaagaagaa

SEQ ID NO: 68999 - RNA, 74 nt, Homo sapiens
gaagagcaaagccgagagaggaaacacagcagaaacaaagaagcagcgcgaaaggggggcaaaccgagggacac

SEQ ID NO: 69000 - RNA, 62 nt, Homo sapiens
cggagaacaccagagcaaagccaccccccgaggaaaaaccaggggcacagaagggaccacaa

SEQ ID NO: 69001 - RNA, 84 nt, Homo sapiens
gcccgcggcggcgggcacccggaggcgcccgagcgaagggaaggggaaaaaaaaccgaaacagaaggacggaaagagagaaaaa

SEQ ID NO: 69002 - RNA, 60 nt, Homo sapiens
acgggacacaaggcgccggcgagccgggcggagaacggaaaagcaccaggaagcagagag

SEQ ID NO: 69003 - RNA, 72 nt, Homo sapiens
ggcgggagaaacccgggccggcccaagagagagacacggagcgcgagacaaacgggggagaggaccgcgaga

SEQ ID NO: 69004 - RNA, 80 nt, Homo sapiens
gccgcggagcggggagagcgggggccagcgccccgaggagaggcagacagggagcagcagccccgagaaggaagaggagg

SEQ ID NO: 69005 - RNA, 75 nt, Homo sapiens
caacagacaagggcagacccgaagcaaagggacaggagaccggagaaagcaaacaagggccgaaaagccccaagg

SEQ ID NO: 69006 - RNA, 70 nt, Homo sapiens
acaggaggcagggcccaccccgcccagagaagccagggcgcaggcaaacaaggagaccggaaggccggcc

SEQ ID NO: 69007 - RNA, 83 nt, Homo sapiens
caggagacccgagcaagaggcacaagcaacaaaaagaaacagaacacggcacgagcgacagagcgggagccaccagcgccaaa

SEQ ID NO: 69008 - RNA, 74 nt, Homo sapiens
gacccaggcggaaccaagccccagccggagaaggagcccacaacaaccacagggaccagaccccacaagaaaac

SEQ ID NO: 69009 - RNA, 72 nt, Homo sapiens
gaagcaagaaagaacgcacagccacgcacacaggccagcgacagaagcccagggaaaaggccccaaaagagc

SEQ ID NO: 69010 - RNA, 70 nt, Homo sapiens
aagccgacagggagacacggcaggaacccgcgaagcgggaaggggcggcggggacagggggcgggagcag

SEQ ID NO: 69011 - RNA, 75 nt, Homo sapiens
ggaaaaccgagacccgagaccagaaacacacagaccaaagcgcaaagaaggccaagaagacgacacaaaaggagc

SEQ ID NO: 69012 - RNA, 53 nt, Homo sapiens
gacggcgggagccggaacgggccaggaaagacaggcgaccaacgacgaagagc

SEQ ID NO: 69013 - RNA, 70 nt, Homo sapiens
gccaacccgccgcgcaccgacccgacgcgccggcccacgcgcggccaagagaggagaaaaggcgaccgaa

SEQ ID NO: 69014 - RNA, 57 nt, Homo sapiens
gaaggcccacaggacaggagagaaagacgacaacccggacaaggccacccccgggaa

SEQ ID NO: 69015 - RNA, 73 nt, Homo sapiens
aggcgagcagcgcccccggaaaccgaagaagaacccgagccaaagggaggaaaacagacaaaccaaagcaaaa

SEQ ID NO: 69016 - RNA, 59 nt, Homo sapiens
gccaggacagagggagcacagccaaaacgagcagggccgagagccaggggaaaggccag

SEQ ID NO: 69017 - RNA, 81 nt, Homo sapiens
cgcaggaggccgcaagaagggccgaccgcgcccaccaccacggaggccaccagacgagggggagccagaggacccaaacca

SEQ ID NO: 69018 - RNA, 57 nt, Homo sapiens
caccacgggagccaccacaacgcacaggaagccggagaaccgaaggaccgcggacca

SEQ ID NO: 69019 - RNA, 82 nt, Homo sapiens
gagacgcagggccccaagggcagacagcggacagaagggggccacaccacgaggcgagccaagagcgaggcagccgccggac

SEQ ID NO: 69020 - RNA, 73 nt, Homo sapiens
gaacaggacagagaagacccaagacaagaaaagaaggaggccagcgggacacacaaagaaagacgaaggacac

SEQ ID NO: 69021 - RNA, 99 nt, Homo sapiens
aagggacgaaaaggaaaaggagagagccagagcaagagcggaccgcccaagacacaagggcgacaccagaaagcgcgcgaccggggggagagacgaagc

SEQ ID NO: 69022 - RNA, 72 nt, Homo sapiens
acagcaacccagcacgaacaagcccagcaggccagggccaagggcacaggacaagaagggccagcaaaaccg

SEQ ID NO: 69023 - RNA, 59 nt, Homo sapiens
aagcaagaaggcccggacacagcaaaccgggccacagagaccgccaggcggacgaaccc

SEQ ID NO: 69024 - RNA, 52 nt, Homo sapiens
ggccgccggccgcagcagggaaaaaagcagacagacaacaaaaaagaccaca

SEQ ID NO: 69025 - RNA, 77 nt, Homo sapiens
gcgcccgcgcggcgcggggaccgcggcccggcagagcccaggaccagccgccaagagaggcgacggcccaagcgcca

SEQ ID NO: 69026 - RNA, 71 nt, Homo sapiens
gaaaagagcgaaaaggccaaagcaacgagaagaccgagagaaaggaagccaaaggcacccacgccagagca

SEQ ID NO: 69027 - RNA, 83 nt, Homo sapiens
ggcggcagggccccgagccggcccgggcgagacccagaagaagaagggcaagaagacacagaagcacaaacagcaaaaaccgc

SEQ ID NO: 69028 - RNA, 73 nt, Homo sapiens
caaagagggggcccaagaaggcacgcagcacgggggcaggggccgacccagaacgccagcgccgcaaggaaaa

SEQ ID NO: 69029 - RNA, 81 nt, Homo sapiens
ccccaccccccccggagccaggcggcggaaagcccacagcagcaggcagggaacggggacaggagaaaggagaagagcacc

SEQ ID NO: 69030 - RNA, 76 nt, Homo sapiens
cgccggagccagccaacgagcggcgccggcgaaagcaacgaagggacgccagaacaagagaaggagagcagaaagg

SEQ ID NO: 69031 - RNA, 66 nt, Homo sapiens
gcgacagcggcaacgagaaacggcccaggcaacgagaagcgggggacagagggcacaaacagacaa

SEQ ID NO: 69032 - RNA, 90 nt, Homo sapiens
ggaagaggacagaggcagccccggccaccacaaagacagaacaaccacccccaagggcacccgcccagaaaaaagccaggaagacgaggg

SEQ ID NO: 69033 - RNA, 74 nt, Homo sapiens
cagggccccgcaccagcaacccaccagcccgggaggcaagcgggaggcccggaggcagcccaagcgcggccagg

SEQ ID NO: 69034 - RNA, 40 nt, Homo sapiens
acagagcaaggcaaccgaccaggcgacagagaagagagaa

SEQ ID NO: 69035 - RNA, 84 nt, Homo sapiens
aacaggacagcacaggcacagaaggccaaaaaggcaaccacagagagagagagggagggaggcacaggcaccagccagaccccc

SEQ ID NO: 69036 - RNA, 70 nt, Homo sapiens
ggccgggggagaccccccccccagcgcaggaggccagcacaacacgcgccaaagacacaccgagggggcc

SEQ ID NO: 69037 - RNA, 73 nt, Homo sapiens
gcggaaaaaccggagacgccaaaaagaggcaggaagaaggacaacagccccaacagccccgccggcaggaaga

SEQ ID NO: 69038 - RNA, 80 nt, Homo sapiens
gccggcgcagccccaagacagagcgcacccggcaggcgcaacagagcgccggcgagcccggcggacacggaaggaggccc

SEQ ID NO: 69039 - RNA, 113 nt, Homo sapiens
gccccgggccgcgaagcgcagcgccagacccaaggcccccgaggagcgcgggcgccgaggacccaaggccagccagccccaggcaccagcggacaggacagggaggacgaagg

SEQ ID NO: 69040 - RNA, 72 nt, Homo sapiens
gagccgcccaagggcccacggggaagaccacaccgacccaagagaaccgagcaacccccccagaggaacaag

SEQ ID NO: 69041 - RNA, 75 nt, Homo sapiens
ggggacccaaacccaaaacccccgaaggacaggccccggaacaagaggaggacagaaccaggcgaggaggaaggg

SEQ ID NO: 69042 - RNA, 76 nt, Homo sapiens
cggggaccaggacagcgcgaggcgagggcagagccgcggggcaagacaaagcgagccgaacaggaagcaaagggca

SEQ ID NO: 69043 - RNA, 76 nt, Homo sapiens
gagaaaggcccaccggccgggagggcccagggcggggcccgagaagcagaagaaggacaccccacaccgaaacaga

SEQ ID NO: 69044 - RNA, 78 nt, Homo sapiens
ggaggggccaggcaccgcaggcgaacccaggagaggaaaccagaaaggagaccagagagcggccagccggagaaagag

SEQ ID NO: 69045 - RNA, 78 nt, Homo sapiens
caggaggccagagagccgaccggaggacgcggagaaccggcacagcccccgggaccgaaaagacgcggccccaaagga

SEQ ID NO: 69046 - RNA, 74 nt, Homo sapiens
cagccccgcagccagggcgaacccccgcagggggaggaacagagggacgcaagaacaggaaggggccccggcga

SEQ ID NO: 69047 - RNA, 70 nt, Homo sapiens
gaaggaaccgaaaggcaacggcagcagcagagagaaagccaagaacacaagaagaagaaaggagcaaggc

SEQ ID NO: 69048 - RNA, 74 nt, Homo sapiens
gccaggaacccggggagaccccgacgggaggccgagagaccgagcccagcggacccaaaggacccccgcgagag

SEQ ID NO: 69049 - RNA, 82 nt, Homo sapiens
gaaaggaagcaagcagcagaagagccaaggaaaaacagcaagaacccaaaaggcagaagaagacacaaccaaggcgcacccg

SEQ ID NO: 69050 - RNA, 76 nt, Homo sapiens
cagcgaccacgagggcgaaccacccacagaccagccggaacaagagacccgggcgggaaaccaacccgcaaggcag

SEQ ID NO: 69051 - RNA, 82 nt, Homo sapiens
ccggccgccgcggagcagcaccgccagccacgcaccagcgggggcgggaacacgggccggaggaaggcagccaagaggaagg

SEQ ID NO: 69052 - RNA, 74 nt, Homo sapiens
cggaaggggcacccgcgagaaacgccgccaagcccaggacccagacccagacgggagagacgcaaacaaagaga

SEQ ID NO: 69053 - RNA, 78 nt, Homo sapiens
gggcgcccagagccgcgccgccgcgccgcccgcggaaagaccacagcaagaccacgcccccagccgggggaccaggcc

SEQ ID NO: 69054 - RNA, 65 nt, Homo sapiens
cggaacgcccgaccgcacacggccacccgaggagaaggaagcgccggccaaacgagcacagcaaa

SEQ ID NO: 69055 - RNA, 77 nt, Homo sapiens
cacgaggcacccccggaccagaacggcacggccacgggcgggcaggcaagaaaaacacggagagcaacaaagaggga

SEQ ID NO: 69056 - RNA, 67 nt, Homo sapiens
aagaagaggccagagagagcgcagaggggaaccagaagaggccaaccagcacgaacgccagcagcac

SEQ ID NO: 69057 - RNA, 52 nt, Homo sapiens
acgggcgccgcaaccaacagcaggcgcaaaaacgaacccacaaccgaacgac

SEQ ID NO: 69058 - RNA, 71 nt, Homo sapiens
aggccgaaaagacagagaggggaaaccccgaaaggggggcagggagagaagacagagaacaaacagcggac

SEQ ID NO: 69059 - RNA, 83 nt, Homo sapiens
cagaagccccacaaccgcaaaggggacagggagcccagcccgagagccaaagcaggaggagcagaagcagcgagcgacacaca

SEQ ID NO: 69060 - RNA, 78 nt, Homo sapiens
agacgaaaaccgcggaagcgaacaagaggagaacggcagcgcggagggggccgcacggaggacacgcacggaccaggc

SEQ ID NO: 69061 - RNA, 70 nt, Homo sapiens
gccccagaacaggccagggcggaaggcaggacgccgccacacaacgcaagggaggcagaaagcccagcac

SEQ ID NO: 69062 - RNA, 85 nt, Homo sapiens
accgcccagcgagccgggagcccaggaggcgagcaaggcacccgagggcgaggccagccgggggcaccgggagcgccggccaccg

SEQ ID NO: 69063 - RNA, 45 nt, Homo sapiens
ggggcccagaacccagaggggagcccggagagccaggaccaaaag

SEQ ID NO: 69064 - RNA, 56 nt, Homo sapiens
caggaggcaggaccaagggggcaaggcggcccggcacgcacacgggcagaagagcc

SEQ ID NO: 69065 - RNA, 103 nt, Homo sapiens
agaaccagagccacccgggagaggaagagcgaggaggaacgcgcaaggcaaagcaccgagcacaacagggagaagacagcaagaccccgaaccgagcagacga

SEQ ID NO: 69066 - RNA, 63 nt, Homo sapiens
aagacccaggacaccccgaagccgagaaagggggagaaaaggaaaagaagaaagcgaaacggc

SEQ ID NO: 69067 - RNA, 71 nt, Homo sapiens
gaggaagagcaaggagaggcccagcaaacaaaggcaggaagagaaaagcaccggccacgaaacagagacac

SEQ ID NO: 69068 - RNA, 56 nt, Homo sapiens
ccaggccagccaaaacaccagaaacagaacggaggccggaagcgaccgaaacacca

SEQ ID NO: 69069 - RNA, 76 nt, Homo sapiens
ggaccacagaccgcgcgcccacacagccccgcggcagaggcaacagccggcggcacacagaccgacagacaaaaca

SEQ ID NO: 69070 - RNA, 76 nt, Homo sapiens
gcagaaagaacagaggcgacggcagaagagacaagggaagcagggacaccccccccagcgggcagaccggcaagga

SEQ ID NO: 69071 - RNA, 61 nt, Homo sapiens
cagcccggagcgggcacaggccagggaaagggagcagcaccggccacacccacagcacgac

SEQ ID NO: 69072 - RNA, 76 nt, Homo sapiens
ccagccgcagacccccggaggaggggagcgccacgagacggcgcggacggacagaaggaacccccaccccgcgacc

SEQ ID NO: 69073 - RNA, 67 nt, Homo sapiens
caccaacagcgaagaccaggcgggaaaaaggcccaaaaacacacagggaaaaaccagcacagacgcc

SEQ ID NO: 69074 - RNA, 79 nt, Homo sapiens
agccaggaggaaccgcgcaaaccacccaggaaggaccgagaccccacaagacgcaccaacgcaagcaacaccaagagag

SEQ ID NO: 69075 - RNA, 42 nt, Homo sapiens
gcgacaggacgggaacggacaaggcgaccagccagcccggga

SEQ ID NO: 69076 - RNA, 69 nt, Homo sapiens
cccccagggagccgaagccaagggacggccaccccaggaaagaccacagcaagaccacgcccccagccg

SEQ ID NO: 69077 - RNA, 73 nt, Homo sapiens
cgccagcagaccaccccgggagggacgaagagagagaaacgaaaaagaggaaggagcgagggagcacaagcag

SEQ ID NO: 69078 - RNA, 75 nt, Homo sapiens
ccggccgcagcgcgagcgaacgaccaagaggggcgacgcagagccgagcgaagcgagcacagaccagcgcgcgac

SEQ ID NO: 69079 - RNA, 79 nt, Homo sapiens
ccggacccggaagagaagagggggcaagaaagaggacaaaaacaagaacgaaaggaagagacgagaccgaagaaaagaa

SEQ ID NO: 69080 - RNA, 80 nt, Homo sapiens
accggccgagaccagccagggagcgcgaaccgcccgcggaaccacagcccagcacggaaggacgcgaaagaagacagacc

SEQ ID NO: 69081 - RNA, 73 nt, Homo sapiens
agcaagcagggagggaacagagagagaaaaacacaaaagagccaagagaggaaccaggacagaaacccacaga

SEQ ID NO: 69082 - RNA, 76 nt, Homo sapiens
aaaccaaaacagcacccagacaagcaagggcaccccaacaagccccaggacaaggacccgggagaaaaacgggaag

SEQ ID NO: 69083 - RNA, 77 nt, Homo sapiens
cagaagcaggcccccagccgcagccacaacaccggcaggaaccaccaggacagaaagcagagcggagagccaggacg

SEQ ID NO: 69084 - RNA, 77 nt, Homo sapiens
gacaccgcacgcgcacggacggcacagcccgccgaacccgaaaggaggacacgccaggaaaaccacgagagggcgac

SEQ ID NO: 69085 - RNA, 72 nt, Homo sapiens
gaagcgcggcagggagcgcgggggcccgcgcagcagcgaccacgcacagaagcgaagaaaacaaagcaagac

SEQ ID NO: 69086 - RNA, 68 nt, Homo sapiens
acgagagagaggcccgcccagcccccaaaggcggaaacagcagggacacacagcgcacagaagcccag

SEQ ID NO: 69087 - RNA, 78 nt, Homo sapiens
aggggggacaggcaggagcgaagcagcagaaccccaggcgggacgggagacggggcacgcccagagcaggccgccagc

SEQ ID NO: 69088 - RNA, 57 nt, Homo sapiens
gacgacaccccggggaggcgaggagagagacccggccgaagggacagaaccaggaga

SEQ ID NO: 69089 - RNA, 81 nt, Homo sapiens
ccgcggcgcccgggcccgggcggcggcccaccgcccacggaccagcaccagacagcgaaaaagaggacccaaaaaagagag

SEQ ID NO: 69090 - RNA, 82 nt, Homo sapiens
cagaccgaggagaggacagcccggcccagccacccgggggcaaagcggcgcaggccggagggccgggggacggggcgagcac

SEQ ID NO: 69091 - RNA, 66 nt, Homo sapiens
aacgaggaagaaaacaagaaaaacggccggacccgagcaagccgagcagccaaggagcgccgcgcc

SEQ ID NO: 69092 - RNA, 58 nt, Homo sapiens
aacgaagcccagaaaagcacaaaagaggaggacacagcagaaggaaaacccccgggaa

SEQ ID NO: 69093 - RNA, 76 nt, Homo sapiens
gggagggggcgaacgcaggggagaggagaagagagcggcggaaggggcccaggaggcaagagcgagaagagcgcaa

SEQ ID NO: 69094 - RNA, 70 nt, Homo sapiens
cacgcccggcaggagagaccacaaaaagaggaggacacgggaaaaccccaaaccacgggagcacgcaagc

SEQ ID NO: 69095 - RNA, 75 nt, Homo sapiens
ggcgcagacggccaaaggacgggacaaaggcccggggcgggaagcgacccagcaaaaagccagcccggccacccg

SEQ ID NO: 69096 - RNA, 74 nt, Homo sapiens
aacagaccggagcgaaccaccccaaacagcaacacccccagggagcgggggcggaaacacggaagagggggagg

SEQ ID NO: 69097 - RNA, 71 nt, Homo sapiens
ggccggcaacccacacaagcgaaggcgcgcaccggaagcaccagcgaggaagaagacgccaagccacgaac

SEQ ID NO: 69098 - RNA, 74 nt, Homo sapiens
acccagaacccggcgaccacgaaggaggagcccagcaggacagggggccgggacccacccacgagagcgcgaaa

SEQ ID NO: 69099 - RNA, 75 nt, Homo sapiens
cacagcgacacccagcaggcaccagcccagaaacacagcgacacccagggcagacacaaggaacagccagccagg

SEQ ID NO: 69100 - RNA, 77 nt, Homo sapiens
aaccgaaagaagcggaaagcagaagcgcgcagcaacggcggggacagagaaaaaggaaggcaaccccacccccagga

SEQ ID NO: 69101 - RNA, 67 nt, Homo sapiens
gggcaagggacccggccagcgacgcaccgagaaaggaaggaaaaccgacgacagacaacagggagac

SEQ ID NO: 69102 - RNA, 68 nt, Homo sapiens
cggaaggacacagagccaacccagaagagccaagaggagaccagggagacaaaccggaacacgacaga

SEQ ID NO: 69103 - RNA, 81 nt, Homo sapiens
ccggcagccccacgccccgcccgaagccgacccgacgcccccaggagacaagcagaccggaagaccgacggaagaccacac

SEQ ID NO: 69104 - RNA, 87 nt, Homo sapiens
ggggagaagagcgaagagaccggagccgacagacgaaccgggggcggcggcagacaagaggacagcgcccgccgccgcccggaaccg

SEQ ID NO: 69105 - RNA, 85 nt, Homo sapiens
gaaaaggagaaggaaagcgaaggggaaggcgccgaagaggacgaaggaccacccaccgagaaaaggacacaaaggagaagcgggg

SEQ ID NO: 69106 - RNA, 64 nt, Homo sapiens
cccagcccaggaaccggaccacagaggggaaacagggaggcccagcgaagagaaagaaaacaag

SEQ ID NO: 69107 - RNA, 69 nt, Homo sapiens
gaagacgaaccaaccagagagagagccgccgaagaaagacagagacagaagacaaccgacagaacaaaa

SEQ ID NO: 69108 - RNA, 80 nt, Homo sapiens
cgcggccagcgaaaacgcccaggagccccgacgcggcacaagcgacccgcacggagcgaccgggcccgccccggcggcaa

SEQ ID NO: 69109 - RNA, 75 nt, Homo sapiens
gcggcccaagcggcaaacggcagagcaggccgcggcgacccagcgagaccgggcgcaggaccgggccggggggga

SEQ ID NO: 69110 - RNA, 77 nt, Homo sapiens
caggagaaaccccggaccggaaccgaaccgcaccagggacgagacgaaccacggaccagcaccaccacagccagcca

SEQ ID NO: 69111 - RNA, 90 nt, Homo sapiens
gggcaagggcagaagggaacagggccacagcaagcccacagcacagaaaggcagacacaagacgagcacccccgagaaaagaaagagaca

SEQ ID NO: 69112 - RNA, 77 nt, Homo sapiens
ccagcagaagcccagcggcaaaaaccaggaaaacaggcggcaagggcccccgggcggcggacaaacagaccggaaaa

SEQ ID NO: 69113 - RNA, 76 nt, Homo sapiens
aaccccaggaaacggccaggagcaaagacagaaggaaaaaggacagccaagccagcggaggccgaaaacaggccgg

SEQ ID NO: 69114 - RNA, 71 nt, Homo sapiens
ggagcccagaaaagcagaaaagcaaccgagagcacaaacaagggcaggccggcacgagacaggagaacgca

SEQ ID NO: 69115 - RNA, 72 nt, Homo sapiens
gcgcgccgggcacccccagaaggcccggccccagagagcaacgggaggagcagggacaaggccaaagaaagg

SEQ ID NO: 69116 - RNA, 81 nt, Homo sapiens
aaagcccacggcaagacagcaccaacaacaggacaacccaaaaggagacaggagaagaaccaagcgggcaaaggaagcaca

SEQ ID NO: 69117 - RNA, 79 nt, Homo sapiens
aagaccgaaaagaagagaacaaagaagaggcgggcggagggcacaccagagggggaaagcaggcgagggacacggaagg

SEQ ID NO: 69118 - RNA, 84 nt, Homo sapiens
aaagagggagaagaaaacaaagcccaaaccagccagcacgggggcccagccagccagcagcgaggggggacggaggcggcacgg

SEQ ID NO: 69119 - RNA, 73 nt, Homo sapiens
acgacgccgggaccggccaagggcccacacaccaagaccaagcaagggggaacaggcaaagggcagcaccgac

SEQ ID NO: 69120 - RNA, 85 nt, Homo sapiens
gcgggcccgggagacccaggcgggacagagggagccaggcagagggcggaaaacaccccaaaagccaaaagggaaaggaaaagac

SEQ ID NO: 69121 - RNA, 78 nt, Homo sapiens
ggcaagacccacccaagcacacccaaggacagcagcccaccaagcacagacaagcagaacggaaaacagccccaaagc

SEQ ID NO: 69122 - RNA, 69 nt, Homo sapiens
ggacgcccaaccggcaaaaccggagggcccgagggcaggacagcaggcaccggcgaagcacagagaggc

SEQ ID NO: 69123 - RNA, 48 nt, Homo sapiens
ggaagggaacaaaaaccagggaaacccagacgacaaggaaggccaagg

SEQ ID NO: 69124 - RNA, 72 nt, Homo sapiens
cagccgagaaacccgaagacacaggaggcaaggggaaaagaccaaaacacgcagaggggcgggcacgcacga

SEQ ID NO: 69125 - RNA, 81 nt, Homo sapiens
gcggagaggagagcacacggcaccgagggaggggagaaaccagaagaagacccggcacacaacacggggaagcaagagggg

SEQ ID NO: 69126 - RNA, 55 nt, Homo sapiens
gcccaggccgcacggacggggggggagcgccgcgcccaggcggagacaggaggac

SEQ ID NO: 69127 - RNA, 41 nt, Homo sapiens
aaccaggaaccgcgcagggccagccaggacggaacccgcac

SEQ ID NO: 69128 - RNA, 63 nt, Homo sapiens
ggcgagccagaccaagcgaagagcgcggagggaaccgagagacacaggggcacaagacgggac

SEQ ID NO: 69129 - RNA, 83 nt, Homo sapiens
gagaaccgaagagcaaaggcaagaaggcaacgacgccacgggaaggaccaccaaccagggaccaaagaagccaaacccacaaa

SEQ ID NO: 69130 - RNA, 78 nt, Homo sapiens
cacgacggggcgcggacagacaaagacggaaagcggggaagacaaaaaccgaggaacccaacacggaaaaagacaccc

SEQ ID NO: 69131 - RNA, 71 nt, Homo sapiens
ccggaggagcgaacaaggcgacaacacagacgccaggaagccggacgcgcagggaaaacgagaggacccag

SEQ ID NO: 69132 - RNA, 43 nt, Homo sapiens
cacgggcggcgcagggggagggcggagggggcagggcagaagg

SEQ ID NO: 69133 - RNA, 60 nt, Homo sapiens
gggacgggaaccccgagagaagaggccaaccccgcccccggagacagcaaccaggagcca

SEQ ID NO: 69134 - RNA, 73 nt, Homo sapiens
cagaaggggaggaggggcgcccgagaaggggacggcgggcgagggaggggaccgccgcgaccgcacgagagaa

SEQ ID NO: 69135 - RNA, 71 nt, Homo sapiens
caaacacagaccagagagaagacagcaaaacgccccaggacccggcgggggcaaggaagcacggaggcccg

SEQ ID NO: 69136 - RNA, 77 nt, Homo sapiens
gcccacgaggaagcccccccaaaaagggggcgaggaagagacaggcgggggagaagaagcagggccaaacgcaggag

SEQ ID NO: 69137 - RNA, 67 nt, Homo sapiens
accggccgccccgcccccaccgccgcagacccccaagcagcagggcagcgaaccacaggagcaggcg

SEQ ID NO: 69138 - RNA, 78 nt, Homo sapiens
cgagaagccaaacaacgaccgagaggcgcggcgcagaagagacccagacgaagagcgcacagaaagagggaaaacaaa

SEQ ID NO: 69139 - RNA, 70 nt, Homo sapiens
gaccaccgaaaaaagaccaggcaagaccaggcaggaaacaggcccagaagcgccggaggagaagacagcc

SEQ ID NO: 69140 - RNA, 59 nt, Homo sapiens
cccaagcgacgcaggcagaagcgagacggcaagcaagggccacgcagaaaggaccagag

SEQ ID NO: 69141 - RNA, 86 nt, Homo sapiens
ccggcaggcggcacccaccgccgggaggaggaggaggagccgagaggagcgagcgagcgcggaaggcggaaaccccaggcacccgc

SEQ ID NO: 69142 - RNA, 75 nt, Homo sapiens
agagccggaagcgaggagacagaagacagagccaaacacccaggacgccgccagccaccggcgcgaagccagacc

SEQ ID NO: 69143 - RNA, 67 nt, Homo sapiens
gggaaaccccgaaaggggggcagggagagaagggcagggaacacacacaaaaggagggaggggggcg

SEQ ID NO: 69144 - RNA, 74 nt, Homo sapiens
gggccccgggcgccaagcggcaccgggacgagaacacaaagcagcgggccggccggccgggggaacgcgccgcc

SEQ ID NO: 69145 - RNA, 79 nt, Homo sapiens
ccgggggcgcacggcgggcagagcgcaaggcaacaccagaaaacgcgccggaccgggaagccggaagcaggacgccgcc

SEQ ID NO: 69146 - RNA, 64 nt, Homo sapiens
gcacacgcacaagaaaaaggacacaggaaccgcagcacaaaaggagaaacacaaacggagccaa

SEQ ID NO: 69147 - RNA, 83 nt, Homo sapiens
agaaaaagaagaagagacgagaagagaaagaagcccaccgggggacggcacggcaggcggacgcccggggccccccggaccac

SEQ ID NO: 69148 - RNA, 81 nt, Homo sapiens
cccgcaaccgaccgaccgcgcgggcccaagcaccgagaggcgagggagaagaacggaccgaagccaaagaacaagagcgca

SEQ ID NO: 69149 - RNA, 54 nt, Homo sapiens
acccggagaacaccgagccacggccgagaaaggcaccccccgcccgcggagccc

SEQ ID NO: 69150 - RNA, 75 nt, Homo sapiens
cacagggacgagccaccagagaacccaggagaaacgagagggacagcaaggaagacgccagagagcggcacaccg

SEQ ID NO: 69151 - RNA, 70 nt, Homo sapiens
gcaggaccacccaccagccaccaggacaacaaccgacagcccccccacaaaggcaagacagagcaacgga

SEQ ID NO: 69152 - RNA, 55 nt, Homo sapiens
ggggcgagcagacccaggcagccgcgcaaggagcggcagcccacaagcaggaaga

SEQ ID NO: 69153 - RNA, 44 nt, Homo sapiens
ccacaggggagcagccacaggaagggggcggaggacggaaccag

SEQ ID NO: 69154 - RNA, 66 nt, Homo sapiens
aacacggagcgacaacgaccggcgaagaaggccaaccgcagaggccgaaccgcccgggaccgcaac

SEQ ID NO: 69155 - RNA, 74 nt, Homo sapiens
gacagagcgaccaggggcgagagcgggcaccccccaaacgacgcagccacggagagaaagccgcaaaagcgaga

SEQ ID NO: 69156 - RNA, 74 nt, Homo sapiens
accccccggcgccgcgccggcggcggccagcacccgcccgaggacagagaggcgagcgcccggaggggagagag

SEQ ID NO: 69157 - RNA, 70 nt, Homo sapiens
gagcccagcaaccggcaacagcccgcgagcagcgccacgggccacacgcccgccacaccacagaagaggg

SEQ ID NO: 69158 - RNA, 96 nt, Homo sapiens
gacgagggcaaaggcaaggggggaccgcggccacggacgccgacacacagccgcgccagacaggaagggaaggggcggagacgggcggaacgcagg

SEQ ID NO: 69159 - RNA, 78 nt, Homo sapiens
cgccagcagaccaggagcggccaccacaccgaaggcgcacacaagagcccaggacagaaaaacacacagagaaagaag

SEQ ID NO: 69160 - RNA, 59 nt, Homo sapiens
gacgcaggaagaacggcgggcacagcagcagggcaggcagagagaaagcaagaagcccc

SEQ ID NO: 69161 - RNA, 77 nt, Homo sapiens
gcgggcgaacccgggccaagcgacacccaccaccccccaaaggggagaacaggaacagagcagccaaggccggggag

SEQ ID NO: 69162 - RNA, 76 nt, Homo sapiens
accacgggcaggaaggcagcgcacgacagcaaaaggaacagaggagcggaaacgcaggaggagagagacggaccca

SEQ ID NO: 69163 - RNA, 76 nt, Homo sapiens
gcacgacgcgccaacaacgggcacacaagggggacaaggagaagaaaccgccgaccagaggggagcacacaaagaa

SEQ ID NO: 69164 - RNA, 62 nt, Homo sapiens
gcggggcagccgccgcccccgggaacacaccgccggggagccagaagaggaggaagcgaccg

SEQ ID NO: 69165 - RNA, 102 nt, Homo sapiens
ggagcccaggaagcagacaaggacaggagaagagcaagcacaacacccggaccaccggggccggggaaagaacaaccggaggggaagacgaagaaggacccg

SEQ ID NO: 69166 - RNA, 68 nt, Homo sapiens
caggaggcgcggaggacgccccaccgccgacgcccccagccaccagaaagcccaagcgcaaaaaaaag

SEQ ID NO: 69167 - RNA, 73 nt, Homo sapiens
aagaccaagacaggccggaacccgaaaggagcggaccagggccccagggacgcagggggcagggcagaggaca

SEQ ID NO: 69168 - RNA, 53 nt, Homo sapiens
gaccggccgaagacaccccccccccggaccagagggagcgggcaagaagagga

SEQ ID NO: 69169 - RNA, 86 nt, Homo sapiens
cccgccagcaggcaaccagacccagaagacacaagaccagaggaggccccccagccaccagaaccacaccaaaaaaggagaccaca

SEQ ID NO: 69170 - RNA, 75 nt, Homo sapiens
aagaccccgaagaggaagacaaggaagaagagggacgcagcggagggacaaagagccaacagagacaaaggagac

SEQ ID NO: 69171 - RNA, 80 nt, Homo sapiens
gaacgcagcagcagccgccaagacgccccacgacggcaggcgcacggaacagcgaggccagcaggagacggagccacgga

SEQ ID NO: 69172 - RNA, 78 nt, Homo sapiens
aaaacagaccgcaaaagacgaagcaaagcgagaggagaaggagcgagcgagcggccagcaacagccaccccgccccac

SEQ ID NO: 69173 - RNA, 74 nt, Homo sapiens
cggcggcgcaccaaccgcgcgcaccgccgacccggaagaccgccgccggacgcaaggaccaaaaaacaaagggc

SEQ ID NO: 69174 - RNA, 34 nt, Homo sapiens
cccccaggccgagagggagagacacagcccaaga

SEQ ID NO: 69175 - RNA, 65 nt, Homo sapiens
gggacaaaggagccaggacaaggagaccgaaaccgggcagcaaacaccgaaagagacggaagagc

SEQ ID NO: 69176 - RNA, 73 nt, Homo sapiens
acaacacgcccagagagaagcggagaggaccaaggcgaagcacacccggccgggagaggcagggcgaggaaag

SEQ ID NO: 69177 - RNA, 75 nt, Homo sapiens
ccgaggacaccgcaaaggccccagcggcccaggaaagcggcaacggggaagaagacgcgaggacggagggcgacc

SEQ ID NO: 69178 - RNA, 77 nt, Homo sapiens
ggggaaacaggcgaggcggcggcgcccggagggcagcgagcggggacgacgagcccacggcacaacggaccgacaga

SEQ ID NO: 69179 - RNA, 56 nt, Homo sapiens
agcagaaggagcaaaaggcggacaggcagcacacacaccaccacgggacaagccac

SEQ ID NO: 69180 - RNA, 46 nt, Homo sapiens
agggaaagacgcagaccgagacgcaagaacagggaagcggaaccaa

SEQ ID NO: 69181 - RNA, 73 nt, Homo sapiens
accggcgggaggaacaaaagggcggagaacggaaaagcaccaggaagcagagaggaccgcagaagggaaggag

SEQ ID NO: 69182 - RNA, 85 nt, Homo sapiens
aacgacagcgacggcacgccgaagcaccgccggggggaagccccgcgccggccgcccggggcccacgcgggaccagccagaagcc

SEQ ID NO: 69183 - RNA, 55 nt, Homo sapiens
aggcaggaaacccagagacgggcgccaaaggaccgaacgcgcaagccccggggca

SEQ ID NO: 69184 - RNA, 77 nt, Homo sapiens
aaggcaagcgcagcaacaacagagagcacgggagccgccgcccccccaagaacaggccccaggacaggggccggggg

SEQ ID NO: 69185 - RNA, 69 nt, Homo sapiens
gcggaaggggagaaaacaccgaaccaggcaaagagcacacgccggagccgggaagaaaacgagcacaac

SEQ ID NO: 69186 - RNA, 61 nt, Homo sapiens
ggcacgcagccggggaccgcccggccgcgagccggcgcagacggcccccacagagagcaca

SEQ ID NO: 69187 - RNA, 79 nt, Homo sapiens
agccacagaccgcgcggagagggcaggacaaaacaccagacgagcgaaggagaagccagaggcaggaaaaaaacgcccg

SEQ ID NO: 69188 - RNA, 73 nt, Homo sapiens
acgaggaacagcgaaggggagcccagggaagcccgggaccgaaaaaacggcgaggggaaaaggaaggaaaccg

SEQ ID NO: 69189 - RNA, 71 nt, Homo sapiens
cagccccgaaagcgggaacagcccaggaaaagaagaccccccccggaaagccggaacagggcgaccggggg

SEQ ID NO: 69190 - RNA, 70 nt, Homo sapiens
gaacaggcggaccagggagcccgcccaaaagcgcaacaaggccaaagaaaagacgcccccggaaaaaaac

SEQ ID NO: 69191 - RNA, 68 nt, Homo sapiens
cagcacggccaccaggggacgccagagaaccagcgcgagaccgaggcacgggcaggcacagcagacca

SEQ ID NO: 69192 - RNA, 78 nt, Homo sapiens
acacaggaccggaaggccagagcccccacagagccgcccaacccccaaagcagccacaagaaggagagacgcagagcc

SEQ ID NO: 69193 - RNA, 72 nt, Homo sapiens
cccgagagccgcgccgcagggcgcccggccgccaggccagcggacaaaccggcgaccacacacggggacgac

SEQ ID NO: 69194 - RNA, 69 nt, Homo sapiens
ccagcgagaccgagccgcaccccaaggagagaaggcaaagcgggaaaaaagggacaagaggaccaccaa

SEQ ID NO: 69195 - RNA, 82 nt, Homo sapiens
cgggacaccggaagccgagaaaggcccccagaagccgccgaacgccgcacccccggggccgaggagcccccacacagccgag

SEQ ID NO: 69196 - RNA, 83 nt, Homo sapiens
aaaggccagagaacaaacagaacgccaaaagacgaacacaaagggaaagaggagaggcacccgaaagccaggccagaaaacag

SEQ ID NO: 69197 - RNA, 104 nt, Homo sapiens
accagccgccgccccgcagccccccgcagcacccagccggccacggggagacacaagaccggcggccacgcaccccccaagaagaggcacccaggcacaaggag

SEQ ID NO: 69198 - RNA, 78 nt, Homo sapiens
acagccagcccagagaggaagacaagggaggcgaggacggacaaaaggaaacggacgggaggccagccagcagaagga

SEQ ID NO: 69199 - RNA, 74 nt, Homo sapiens
ccgacaaggggcggaggaagggaggagacccgaccccagaagaaccccggaaaaggagacagaagcgcaagaac

SEQ ID NO: 69200 - RNA, 76 nt, Homo sapiens
ccggggcccccagaagacaagcagagccgcagcccgaacagcccacagaacggcacacggcacggacagggcggga

SEQ ID NO: 69201 - RNA, 77 nt, Homo sapiens
gccagacacagcggcgaagcgcggaacgcgaagggaagaaaaaacaagaaagccaggccaagcacagagacaagaga

SEQ ID NO: 69202 - RNA, 41 nt, Homo sapiens
ggacagaagccagagagagcaagcccgaccaggagagacca

SEQ ID NO: 69203 - RNA, 71 nt, Homo sapiens
gccccgcgggaccccccgccggaccccacagcaacaaggggccagcgccaccggaccgcacgcgcacggac

SEQ ID NO: 69204 - RNA, 72 nt, Homo sapiens
aggaccaagaaccagggcaagaccacccacaacccgagaggaccacacggaagggggccacgagaaggcagg

SEQ ID NO: 69205 - RNA, 81 nt, Homo sapiens
gacgccgaaggggcgagggcagaccaacgggccaaagaccacacagacacaccaaggaagcagggaggaaaggccgccaga

SEQ ID NO: 69206 - RNA, 61 nt, Homo sapiens
ccccccgaacagcaggcgccaccagcccggaggcggccggggcggccccaagcaacagcag

SEQ ID NO: 69207 - RNA, 70 nt, Homo sapiens
agaaaagggaaagggaagagaacggcacgaaaaggcaacacacaagagaacagagccgagcgaaacaaca

SEQ ID NO: 69208 - RNA, 66 nt, Homo sapiens
acacaaagaaaaaacccccgaacagaggggaaggcaaagggggaaaccacaccacccgccacagac

SEQ ID NO: 69209 - RNA, 34 nt, Homo sapiens
ccaaagaagggagagagcacaggagggagcagga

SEQ ID NO: 69210 - RNA, 69 nt, Homo sapiens
ccagaagagggcacgcacagagacccaaagagaagacgaaacggacggcacgggaaaaacaggaaaccc

SEQ ID NO: 69211 - RNA, 75 nt, Homo sapiens
gggaaccgacgaaagaaaaccccgagggaaacaagaaaacacaaagaggcagcaaaggggccggacaagggaggg

SEQ ID NO: 69212 - RNA, 54 nt, Homo sapiens
gaccaagaaccagagccaaccggggacaaggcggacggcggcgaacaacaacag

SEQ ID NO: 69213 - RNA, 68 nt, Homo sapiens
gaaacgaaagggaggcaagacagggcggagaacggaaaagcaccaggaagcagagaggaccgcagaag

SEQ ID NO: 69214 - RNA, 63 nt, Homo sapiens
ccaaccaagaaaggggcacggcaaaagaccaagagcacagcagaagaccacaggaaaccacgc

SEQ ID NO: 69215 - RNA, 83 nt, Homo sapiens
gcagccaacaccccacccaggaacggcccggagacaaaagcggcagagaggaggaggagcacgagcaccccgcccgaaacccc

SEQ ID NO: 69216 - RNA, 81 nt, Homo sapiens
cgccgaggggcccgcagagcgcgccccggggaaggagccccacagccccaggaacaagcagaaagcacgaacaacgagaac

SEQ ID NO: 69217 - RNA, 66 nt, Homo sapiens
aacccaggcagccggcgcccagaccgcaccaccgacaccagacaacggcaagcggagaagagcaag

SEQ ID NO: 69218 - RNA, 77 nt, Homo sapiens
acgcccgcggagcagccgagagggggcaccccagacaggagaacgggacagggcagacgggaggagagaaagagcaa

SEQ ID NO: 69219 - RNA, 78 nt, Homo sapiens
cagaaaaccaagccggcagacgcgaaggagaaaaagcaggggaagcagcgcacgccagccgggaccagcggagaacac

SEQ ID NO: 69220 - RNA, 59 nt, Homo sapiens
aacaagccacaaggaagcccaaggaaaggcccaggcacagcagacgcacggaggcgggg

SEQ ID NO: 69221 - RNA, 79 nt, Homo sapiens
gcgagacacagggaccaagaaaaacaccaggagacaaagccacaaaaacaccagaaaaaccaagcagaaaaggagcggc

SEQ ID NO: 69222 - RNA, 69 nt, Homo sapiens
gcgagaacggcccggagacaggcggcagacggggaaggccaaccgaaccgggcggcgccagaaaacgaa

SEQ ID NO: 69223 - RNA, 72 nt, Homo sapiens
acaagaggcgacgcgaaccgggcggagaacggaaaagcaccaggaagcagagaggaccgcagaagggaagga

SEQ ID NO: 69224 - RNA, 67 nt, Homo sapiens
ccccgagggcgggaacagggaaggacagaaacaagaaacgcaaaacccgacacagagcagcagagcg

SEQ ID NO: 69225 - RNA, 77 nt, Homo sapiens
gcgcggggagaaggaggggcaggaaagcagcgggaccaggcagaccgcgagacccggcgcgggcacgggacccccgg

SEQ ID NO: 69226 - RNA, 84 nt, Homo sapiens
gggacaccagaagcacgaagaccaggacacaaccggaaccgcaggaacaggccgcgagcaagccgagcgagacgaagagaccag

SEQ ID NO: 69227 - RNA, 72 nt, Homo sapiens
aaaaccagcggagcgacacagccaacggaacgggcacaaagaaggcgcaggcaagacgcagagaggagaaca

SEQ ID NO: 69228 - RNA, 70 nt, Homo sapiens
cagcgccaccggcgcccggccacgggagccaggaaaccaggagccggccagaagcgagcacgacaccacc

SEQ ID NO: 69229 - RNA, 77 nt, Homo sapiens
gcggcgacacgcgacgcgccaaaacccgcccggaaaggggacaccgcccgacagagaaaggcacaacccagaccaga

SEQ ID NO: 69230 - RNA, 78 nt, Homo sapiens
aaacgggggggcggccggggccgccaccacacgaaacagggcaaggaacggcaagaacccgaccacaggacagggacc

SEQ ID NO: 69231 - RNA, 73 nt, Homo sapiens
gcgccccaccccgacgcgggcccaaaggacagcccaggcagcagcaaggacaagaggagaaaagccagcaagc

SEQ ID NO: 69232 - RNA, 76 nt, Homo sapiens
gccggacgcgagcgaggcggagaagggacacggcaggcgccaggagccagcaggccaagggaaaagcagcggaaaa

SEQ ID NO: 69233 - RNA, 74 nt, Homo sapiens
gccagaagcgcagccagaaacaacaggaggccggagccaaaacagggcagaagaagcgcccaagaagacaagaa

SEQ ID NO: 69234 - RNA, 88 nt, Homo sapiens
gccccggagggagacgcgcgccgaggagaacccagcgggagacgcaggcagaaggaaagggcgcagaccgggcagcagcagccgcgga

SEQ ID NO: 69235 - RNA, 72 nt, Homo sapiens
aagaacgcaagaacaaaaacggggccgcgaccgaaaacacagaaggagacagccccaacggacaaaacagaa

SEQ ID NO: 69236 - RNA, 83 nt, Homo sapiens
aaggcgcagcagaggggccacgcgggcccgaggcgcaccaagggcgaaggagccggcccaagagagggccgaggcagacaagg

SEQ ID NO: 69237 - RNA, 84 nt, Homo sapiens
cgggaagaagccggcccggggccgcggacgaggaccagcagaggccagcacgagaacccaggcccacccgggcaggagaggccg

SEQ ID NO: 69238 - RNA, 58 nt, Homo sapiens
gcagaggacgccgccgggcccggggaccccaacgccaaaagaagacaccagcaacaga

SEQ ID NO: 69239 - RNA, 80 nt, Homo sapiens
cgcggcccacgggacccccaggagggacccgcagggacaaacagcaggggccaagaaagaaggagagggggcgacaggac

SEQ ID NO: 69240 - RNA, 58 nt, Homo sapiens
gaggagcaagacagagagagggcccgagggaccgccaacaagcggcccgcaccgggcc

SEQ ID NO: 69241 - RNA, 54 nt, Homo sapiens
acccacgccggggacaagccggcaacacacggaagggaaggcgcggcgggcagc

SEQ ID NO: 69242 - RNA, 73 nt, Homo sapiens
gagggagagccaaagaaggaggggcagcagcaggacagggaacccgggagacagcaacagacggaggaacggg

SEQ ID NO: 69243 - RNA, 73 nt, Homo sapiens
agcgccggggacagccaagcgaggggagcggccacacagcagcgcggacaggacgaacagagcgggagagccc

SEQ ID NO: 69244 - RNA, 73 nt, Homo sapiens
ggcaggccagacccccccccaaagccacccgcggaaggagggggcccagacccacggcaccacaagcgcccca

SEQ ID NO: 69245 - RNA, 97 nt, Homo sapiens
caaccccccaggacgggcggaggcggggggaccggcgggcggcaaggcgccaccggaagaaacgggaggggaggagccgggaaagacagcgccaagc

SEQ ID NO: 69246 - RNA, 76 nt, Homo sapiens
gaccacaggacccccaacccgcggcgagggaacccccaggccaccgggcgaaggaggagccgggaaggacaccaag

SEQ ID NO: 69247 - RNA, 75 nt, Homo sapiens
agaaacgaaacccccccccccacccaccaaaccggagggggaaaaaacccaaggcgcaaagcggggacgagagcc

SEQ ID NO: 69248 - RNA, 76 nt, Homo sapiens
accaaaaaccacacgggaagagggcacaggacgcggccaagggcagggagaagggacaacacagaacacagaccag

SEQ ID NO: 69249 - RNA, 77 nt, Homo sapiens
gaggagccgccccaccacacagcaacggacaaagggggcacccgaggaggaagagggcagggcccacggaaagaagg

SEQ ID NO: 69250 - RNA, 73 nt, Homo sapiens
acgccagcgacaaccagccgacccaccaccggcccaggaccccacccccagagacaaggcagacagaacgcag

SEQ ID NO: 69251 - RNA, 72 nt, Homo sapiens
gccacaccgggcacgaggcgggaaacgagcaagaaacaaaagaagagaggggacaaccgcccaccgacccag

SEQ ID NO: 69252 - RNA, 48 nt, Homo sapiens
cgccacacgccaaagacaaaagagaacgaacgcagaccgggaaaacca

SEQ ID NO: 69253 - RNA, 79 nt, Homo sapiens
caccaaccccaacccggagagcggcgagcacaacaagggacacaacgcgaaggccacaccccaagaaagcggccgaaac

SEQ ID NO: 69254 - RNA, 72 nt, Homo sapiens
gggaggagagcgcaaggggagacaaaaggcacggcgacacaggcaagaacccggcaaaggggaaaaacgaac

SEQ ID NO: 69255 - RNA, 76 nt, Homo sapiens
ggcacaaggacgagcgacaagaagacgaagaagcaggcaccacacccgagggcgccacgcggccacaagacgggag

SEQ ID NO: 69256 - RNA, 78 nt, Homo sapiens
gaagcacagaccccaaacgaagcagaagaaggacaccccacaccgaaacagaccccagagacagaggcagccccacag

SEQ ID NO: 69257 - RNA, 75 nt, Homo sapiens
ggagccggcagcagagcaaaacagagcggaacgaacaaggggaaacaaaaagccaacggaaaaagaaacggcaga

SEQ ID NO: 69258 - RNA, 70 nt, Homo sapiens
aacaacaacagaagaagaacagcggcgcgcagcccaaacccgacccaggcacaggcacaacagccaaaaa

SEQ ID NO: 69259 - RNA, 71 nt, Homo sapiens
aaacaaaagagagcgcacgaccgcaggcagcccgaggcccacaagcagagaagagaacacacccagaaggc

SEQ ID NO: 69260 - RNA, 61 nt, Homo sapiens
gaggagaaagaaaccgcaaaaccaaaaccagacccaaagccagaaaagacgaggaaacaac

SEQ ID NO: 69261 - RNA, 55 nt, Homo sapiens
cagaagccccgggagcaccgagaagcggagaagggcgggaaaccaacccgcaagg

SEQ ID NO: 69262 - RNA, 81 nt, Homo sapiens
agccgaggaagagggcggcgacgggggggacgagcggagcccgggacaggaggacaacaaaggacaggaaaagaagaaaaa

SEQ ID NO: 69263 - RNA, 86 nt, Homo sapiens
ggagggggaaaaaacccaaggcgcaaagccgaaaagacgaggcgaggaggcgagacacccaacccaccccaccccggagggccaga

SEQ ID NO: 69264 - RNA, 57 nt, Homo sapiens
gacagaaccagggccgggggccaggcaagcggcaccacgacaaccccacaccaacga

SEQ ID NO: 69265 - RNA, 109 nt, Homo sapiens
ggaagaaaaagccaagagacgcgaggacaaagcagcagaaccacacaggaggaggggccaagggagaagcacgagccgcggcaggagagcaagcgcagaagaagcggcg

SEQ ID NO: 69266 - RNA, 53 nt, Homo sapiens
ccaaaaacaaaacgaaccaggacggcaagccggcgcggaaagagaaaacaacc

SEQ ID NO: 69267 - RNA, 62 nt, Homo sapiens
ccgcagcaccccccggacccagccccggggccaagcgcgcccggaagggcaggagaaacaaa

SEQ ID NO: 69268 - RNA, 87 nt, Homo sapiens
cagggaaaggagagcaccacacaaggaaagccaggccagaagaaggaaggccggggaggggacaggaaagacacaccaccccaccga

SEQ ID NO: 69269 - RNA, 69 nt, Homo sapiens
cacgggcagaggcagggaggcaggggaacagcagacccagaccgagggccaggagacagggcacgagac

SEQ ID NO: 69270 - RNA, 53 nt, Homo sapiens
acacaagcaccgggacccaggacgcgccgaaaagcgaaaagaaacaagccgcg

SEQ ID NO: 69271 - RNA, 57 nt, Homo sapiens
cgccaaaacacagcgaggagacagagacgagagaaacgacaccaagaacgagcgcga

SEQ ID NO: 69272 - RNA, 72 nt, Homo sapiens
acaacccggccgaggcacgacaagcccccccaaagccccgaaacagagcagacaaagggcgagcgcggggac

SEQ ID NO: 69273 - RNA, 56 nt, Homo sapiens
aaccgcagacccgggcccgggaggacgcccgaccccacccagcccgcaccgggcag

SEQ ID NO: 69274 - RNA, 85 nt, Homo sapiens
aaaggcgcaggccaagcgcccacgccggaccgggcaggggcgaaggaacagaagaccaacaaccaagagaggagacgcccgcaca

SEQ ID NO: 69275 - RNA, 77 nt, Homo sapiens
gcagaccgcagaaggccggagacaccagcaggacagacacacaccccaggcaacccgccaagagacaaagcccaagg

SEQ ID NO: 69276 - RNA, 69 nt, Homo sapiens
aaaaccacaaagcggccgaaacagaaaacaagagaccacagaagggggcagcacgccgaaggagagacc

SEQ ID NO: 69277 - RNA, 59 nt, Homo sapiens
gccagcagacgcgaccgaccgccaaggggacacacagccaacgccagccccgaggccac

SEQ ID NO: 69278 - RNA, 65 nt, Homo sapiens
gaagaggcgccacagggggcagcacgccgaaggagagaccagacaacaggccagggaagggaagg

SEQ ID NO: 69279 - RNA, 79 nt, Homo sapiens
caggaccccacgagaccccgagcaacggacacccagagccagggaccagcggaaaagaagaagagagccaaccaaagaa

SEQ ID NO: 69280 - RNA, 58 nt, Homo sapiens
gcccccaaaaaccggcagggagacgagaacccggaccgccgcgccccccaacgaccag

SEQ ID NO: 69281 - RNA, 72 nt, Homo sapiens
ccaacccggacggacaacaccggggagcgcgggaaaaaagcagggggcaaggcacacaaacagcagcccagg

SEQ ID NO: 69282 - RNA, 76 nt, Homo sapiens
ccagacagggccccgggacacggagcgacggcagcccccagccccaaggccccaaccggacccggagccccaggag

SEQ ID NO: 69283 - RNA, 65 nt, Homo sapiens
acgggaacgaagggcaagcccaacgccgaaagggaggaagaagagacagaaagcacagagaagca

SEQ ID NO: 69284 - RNA, 88 nt, Homo sapiens
gcggggacccgacgcccgcacgagaaaggacagggacaggaaagaaagaaaaagaaaagaaaaacagaaagggcaaagacaaggaaaa

SEQ ID NO: 69285 - RNA, 82 nt, Homo sapiens
gcccggaagccccggaccacacagaagccgagccgggaacccacagggagggcaaaagcagaccggaaaacccaccggcaag

SEQ ID NO: 69286 - RNA, 75 nt, Homo sapiens
gccaccgcggcggcgcccgcaccgcgcccgcaaaaagacgaccccgacgcaggccaggagccgcggacagaagcc

SEQ ID NO: 69287 - RNA, 74 nt, Homo sapiens
cacacccaaccgccacggaagggacgagaacccccgcgaaccagaggaacccagcgagcgagagcggaccagag

SEQ ID NO: 69288 - RNA, 73 nt, Homo sapiens
gaccgagaaggcagcgccccagcaaaagcggacacagacaggcaggagaagaaggagcggcagaaggggcgaa

SEQ ID NO: 69289 - RNA, 79 nt, Homo sapiens
gcagccaagcaggaccacccaccagccaccaggcgggagaccagggccagcccggccacaccccaggcggcacccgccg

SEQ ID NO: 69290 - RNA, 75 nt, Homo sapiens
cccggaaaaccaaccagaagacgaacaaacagcaagaaagaccacaagaccagccgggagagagcgcgaaccgga

SEQ ID NO: 69291 - RNA, 108 nt, Homo sapiens
cgaagcgccgcaggcgcgcccggaccgacgcgcaccccggacaccccgggcacccgacaggaggaccacgccgaacaaggaaaggaacagaccacgcaaaagaaccgc

SEQ ID NO: 69292 - RNA, 71 nt, Homo sapiens
ccaagaaaggaaaaacccaaggacaacgacgggccccaccccagggaacccgagaaggccaacaaaagagc

SEQ ID NO: 69293 - RNA, 84 nt, Homo sapiens
cgggaccacaagacaacgcggagcggcgaagagcaaccagggcgaccagacgaggggagacggacgggggagagaggccaaacg

SEQ ID NO: 69294 - RNA, 83 nt, Homo sapiens
acgaaccgccagcagcagcagcacgacagaggagggcccgccggaggagaggccccccaggccacccaggaccagcggcacac

SEQ ID NO: 69295 - RNA, 77 nt, Homo sapiens
cccccggccccgacggggcgggggccccagccccacagaccagcccagcacagggaaacacaaagaagacaccagaa

SEQ ID NO: 69296 - RNA, 91 nt, Homo sapiens
aaaaaaaggaagaggggaagccaccgagcaacaacagccacagcacacgacggcgcccaaaacgagagaggacacgcaccacagacccagc

SEQ ID NO: 69297 - RNA, 71 nt, Homo sapiens
accgaggccaacaacacaggcagaagagcaccaggacaaaagaagggcagcacaaaggaaagccccaaacc

SEQ ID NO: 69298 - RNA, 72 nt, Homo sapiens
ggaaaaagcacaagcgaagaccgaagcccaaagcagggcggagaacggaaaagcaccaggaagcagagagga

SEQ ID NO: 69299 - RNA, 83 nt, Homo sapiens
ccagaaaaccgacaacccccagaaagccaagccggagcaaaaggagaagccaaaccaagaggagagcgcgacgccagaagacc

SEQ ID NO: 69300 - RNA, 64 nt, Homo sapiens
gaggcccaccccgccgggaaagggacgcgagagcccacgaagagcgacggagcgaacccggacg

SEQ ID NO: 69301 - RNA, 59 nt, Homo sapiens
accaagaaccagaacagagaaaaggaggccggacaaaaacccacaacgccgcaaaacaa

SEQ ID NO: 69302 - RNA, 76 nt, Homo sapiens
agcaagacgccaggacccacggaagccagaaaggcccgagagcccccagacaggggcacgaggaggcaaaacagag

SEQ ID NO: 69303 - RNA, 61 nt, Homo sapiens
agggggagagcccggcgaaagcaagacgggaggaccagggggcggagaacggaaaagcacc

SEQ ID NO: 69304 - RNA, 83 nt, Homo sapiens
ggcagaccgccccgggccgcggccgccggagaagaaaggggaccggggacacacccacgaacacaaagggcccggacggagcc

SEQ ID NO: 69305 - RNA, 74 nt, Homo sapiens
gcgagaggacaggacggcagacaccggaccaaaagaggcgaagaaacgcgcaaagcaagcaccaagccagacac

SEQ ID NO: 69306 - RNA, 81 nt, Homo sapiens
gaaggggacaacagagagcgcaagaacgggaaccacacaacaggaaggaacccaggcggcagccccaacgggggcgggggc

SEQ ID NO: 69307 - RNA, 51 nt, Homo sapiens
aaggaccaagaaccaggcgccaagcccacgggcgcaccaacggagagccag

SEQ ID NO: 69308 - RNA, 80 nt, Homo sapiens
caaaaggcagaaccagcccggaggcaaagggaagccggaagaggaagacacagcacccggagagaaggcagaagcagccg

SEQ ID NO: 69309 - RNA, 41 nt, Homo sapiens
ccagggaagagacacacccagagggagacggggggcggccc

SEQ ID NO: 69310 - RNA, 73 nt, Homo sapiens
agcaaagccaggacccaccacgccggcagggccagggcagagcggcgggaaaccaccaacaacacccccaaac

SEQ ID NO: 69311 - RNA, 77 nt, Homo sapiens
aacggaggcaaggggagcacggaagacgggcaggcaggggagcaaaggaaaagaacaggaagagaaaccagcagggc

SEQ ID NO: 69312 - RNA, 68 nt, Homo sapiens
acgacggggcacgaaccagaaaccacaacagacagggggagggaggcaagaaagacacaaagacgagc

SEQ ID NO: 69313 - RNA, 74 nt, Homo sapiens
cgcgaggggcgacggggagaaggaaacccaaccggcgcgacgcgaaggacgaagcgaggacaaaaaccaagcag

SEQ ID NO: 69314 - RNA, 76 nt, Homo sapiens
aggcacccccggaccagaacggcacggccacgggcgggcaggcaagcaaaggagagccagagcgaacccaagacgg

SEQ ID NO: 69315 - RNA, 81 nt, Homo sapiens
gccgcgacacaccgcacccacacgggcgagaagcccacgaggcaacacgcaaggccgccaccagaagagcccagaaacacc

SEQ ID NO: 69316 - RNA, 120 nt, Homo sapiens
ggccccggagcgcggcgcccgcggccgggcggcgcggccgcccgggccgggccccaccggacgacccaagaaaccgagagacacaccacaaccacaggccgacggagcccgaacaccagc

SEQ ID NO: 69317 - RNA, 73 nt, Homo sapiens
gagaccaaaagaggaccggacagaaagccaaaaaggagaaaggcccagcgaaccgccagggagccagaagcag

SEQ ID NO: 69318 - RNA, 77 nt, Homo sapiens
ggcaaggcccacccccacaaggagggcaaggcccaagcccggagcggcagcacggggacaccagcagggcccgccac

SEQ ID NO: 69319 - RNA, 42 nt, Homo sapiens
ccgcccggcggcaccgccaggcagaggggaggagacacgaag

SEQ ID NO: 69320 - RNA, 68 nt, Homo sapiens
caacagggaggagcggagaacaagccaccggccggaaaacgcaaaaccagaagcgcgccgacacggcc

SEQ ID NO: 69321 - RNA, 77 nt, Homo sapiens
cacgcaacccgaccccagagaccaagccacccaccaacacggggccggcacaacccggagccacccaccgagggcag

SEQ ID NO: 69322 - RNA, 78 nt, Homo sapiens
agcacagccggaagagaggagaaagcacccagggagagagcagagacagagcagcgcagaggagagaagaagaccgaa

SEQ ID NO: 69323 - RNA, 76 nt, Homo sapiens
gagggaaggcgcgggcagcaaagggggcaccaaggcccggcaagcaccaaacccggggggcaccccacaaacagca

SEQ ID NO: 69324 - RNA, 49 nt, Homo sapiens
gggcagcagcacaccaagagcgagaagaagccggaacaggaaacacaaa

SEQ ID NO: 69325 - RNA, 75 nt, Homo sapiens
agcccccgcggaggcagcgagacgcacagccagcaagagggagcaggcaggagcaggcaccaggcaccagaaaga

SEQ ID NO: 69326 - RNA, 73 nt, Homo sapiens
ccaaaagaacaggggggcccacaggagagggaacagcagggcacaccaagccagaaggcgaggcgcacggcag

SEQ ID NO: 69327 - RNA, 63 nt, Homo sapiens
cgggcgacggccaccaccgcccccccgcccccgcgggggcgggagccccagagaacagacggg

SEQ ID NO: 69328 - RNA, 38 nt, Homo sapiens
aacacagagcaggagaacgccagaggaggccgccgcac

SEQ ID NO: 69329 - RNA, 72 nt, Homo sapiens
ccccaggccaggccagacgggcgccagggcggaaccaagcagggaaacgaaaaagcgagcaggagcacgaag

SEQ ID NO: 69330 - RNA, 63 nt, Homo sapiens
ggacccaagcaacccaagggaaccgggcccaggggacgcccagaaccagcgcaccggcccgcc

SEQ ID NO: 69331 - RNA, 81 nt, Homo sapiens
cccgaccccgcggccggacgacccaagcccgcgagcaggagaggggccaaaagggcggggaacggaccaccagccccaacg

SEQ ID NO: 69332 - RNA, 79 nt, Homo sapiens
cggcgcgagacgaacgccacggggcagccgcaacaggggagaagacgcgcgccggggccgcagccggccaggggacccg

SEQ ID NO: 69333 - RNA, 34 nt, Homo sapiens
gcgaagcgaaaaaaagcgaggccacgcaagcccc

SEQ ID NO: 69334 - RNA, 81 nt, Homo sapiens
caaaaagccccagaccagagacagaagcagaggacgccagaccccgaaaagagcccaacaggaaaagagaacagcagggag

SEQ ID NO: 69335 - RNA, 80 nt, Homo sapiens
agccggggagggaacggccgcgagacaccggcagaaggcagccaggagggcgaggccagacgccgaaaagaagcgagaac

SEQ ID NO: 69336 - RNA, 34 nt, Homo sapiens
gcagcggagagcccacaaaaaccggccaccacac

SEQ ID NO: 69337 - RNA, 71 nt, Homo sapiens
ggacgacagccagagagggagcccacaggagacaaaagccaaaagaaccaccgagcagcaagagaaagaga

SEQ ID NO: 69338 - RNA, 51 nt, Homo sapiens
gaagaggagccagaaagggcgcacaagacacgggcgcagccccgagcccac

SEQ ID NO: 69339 - RNA, 76 nt, Homo sapiens
cgagcggagccggcaggaaggggaccgggcggcggagcggcggaagaagacagaagcgaaggggacagggggagaa

SEQ ID NO: 69340 - RNA, 48 nt, Homo sapiens
cacacacacagacagaagcagaaagggccgccaaaacagggagagaga

SEQ ID NO: 69341 - RNA, 66 nt, Homo sapiens
ggaaaacccccacacggaggggacgaagacaaaaaccagaccccgaccgccacggacccgggcgcc

SEQ ID NO: 69342 - RNA, 77 nt, Homo sapiens
ggggagaggcggccaagaacggaaggaagcggcgagccaagcaagccccaacaggcgaacgggccaggcccaggaca

SEQ ID NO: 69343 - RNA, 73 nt, Homo sapiens
accccacaacgaaaccgcaggcaccaagaagaccaacaagcagaagagccaagacaaaaaggaggggcagaaa

SEQ ID NO: 69344 - RNA, 80 nt, Homo sapiens
gcaaaaagagaaaaaagccgcgaacaggcaagagaggagaaagggaaccaaccaaacaagcgcagccaggagagcaggga

SEQ ID NO: 69345 - RNA, 78 nt, Homo sapiens
ggagaaagggagcgcaccccaggaagccgaggccgccagcgccaagaaaaaaacaaggccaaagccagccccagaaac

SEQ ID NO: 69346 - RNA, 57 nt, Homo sapiens
gcagacaaggacaaccaccaaaggagccgaacccaaaaagagcagcaccgcgagcga

SEQ ID NO: 69347 - RNA, 72 nt, Homo sapiens
aaaaagcggggcggacacagaaagggaaacagccaaacagcaaccccagaaacccacaagagcaaagaaaga

SEQ ID NO: 69348 - RNA, 83 nt, Homo sapiens
gagagcggggcccacacacagccccgcccagcagcaccgaccagggccgccccgagcagagacgaaggggaggaccaggcggc

SEQ ID NO: 69349 - RNA, 57 nt, Homo sapiens
gcaagaccagccaggggaaacccggagggaaccaagaaggcacgagacacgcaccag

SEQ ID NO: 69350 - RNA, 76 nt, Homo sapiens
gagcccagagaacgacagaaaaaggccgaccccgcccggaagagcacagaccccagcagggggcgaagacgacggg

SEQ ID NO: 69351 - RNA, 79 nt, Homo sapiens
gcacgcgacggaggcggcggacaggcgacagcgaccgcggcagacaagaacccagcacaaaaccagccccggccacaga

SEQ ID NO: 69352 - RNA, 75 nt, Homo sapiens
agggacaacagaacaaaggaagggacgggccaagcagggaagaggaacccgaaggccgagagaaccaaggaagag

SEQ ID NO: 69353 - RNA, 55 nt, Homo sapiens
ccggaacgggcgggcggcccccgaggcgcaagccgcagcgggccccgcggaccgg

SEQ ID NO: 69354 - RNA, 59 nt, Homo sapiens
gaaggaaaaccacaaccagcaacaggggcagaagccaagagagcagcagccgagacaag

SEQ ID NO: 69355 - RNA, 61 nt, Homo sapiens
ccgcgcgcacccagccgccccagcggcgcggcgccgcccacgcggaagccgcagaaggacc

SEQ ID NO: 69356 - RNA, 65 nt, Homo sapiens
agaagaggaaaggacgcagacaaagcgcggggcaaggagcgcgaggggaaaaacaacacaccgaa

SEQ ID NO: 69357 - RNA, 79 nt, Homo sapiens
gccgcgggaagacgcggcggcggcggcggaggagagccgcagagcgcgcagaccccgaccacaggcaaacgagagaccg

SEQ ID NO: 69358 - RNA, 73 nt, Homo sapiens
aggaaaacaggaaagaagagacaaaaagagagagaccgcagcggggggccaagggcagggagaagggacaaca

SEQ ID NO: 69359 - RNA, 82 nt, Homo sapiens
agacaagcaggagcgaagcaggacaacaagcgggaaggcgaacgcggcgcaagcgacgacacagccagacaggcagaccgcg

SEQ ID NO: 69360 - RNA, 73 nt, Homo sapiens
cgcagcaagaccgccagccagagaacgcgagaccggggcgaaacaagccaaggagaccgggagagagacgaag

SEQ ID NO: 69361 - RNA, 68 nt, Homo sapiens
ggggggagaagggagggaaaacaaccacaggaaaccagaaccgcacagcaagccccgggggaaaagag

SEQ ID NO: 69362 - RNA, 79 nt, Homo sapiens
aaagaccacagccccacccccaccccagcccgcaacagaggccccgcgccaccgccgggcccggcacgaggggcccgcc

SEQ ID NO: 69363 - RNA, 83 nt, Homo sapiens
ggggcacccgcggccggcccggggccccgggaccggcgcccccccgcaccacacacggaagcagacgcgcagaggacgaccca

SEQ ID NO: 69364 - RNA, 55 nt, Homo sapiens
cgaacgcaaacggcaccccaccccagacgccacacacagaacgacaccacagcga

SEQ ID NO: 69365 - RNA, 69 nt, Homo sapiens
ccgcccgcccccgccccacgaagccagaaagaagccacccagagagaaccaggcagaacaagcagaaca

SEQ ID NO: 69366 - RNA, 75 nt, Homo sapiens
agaagcagaggaaagcacgcagcaaaaagcaggggccggaacaacacgggcaccacagacaagggaggcgaggac

SEQ ID NO: 69367 - RNA, 79 nt, Homo sapiens
gagcaagagacgcacggaggcggcccgcccggaaggcaagcgcagcaacaacagagagcacggccccgccccgccgagc

SEQ ID NO: 69368 - RNA, 71 nt, Homo sapiens
gcagcgcccagcagcgcagaagccaaaacacccgagcaccaccggccagaaggcgccagacccaggaggag

SEQ ID NO: 69369 - RNA, 58 nt, Homo sapiens
gagaaacggaccaccaccgaaggaacggacaacaaggagagagccaccagagggggcg

SEQ ID NO: 69370 - RNA, 61 nt, Homo sapiens
ggggacccaggagccggccagcgcgccggagccgccgaggcccgggagaacgcaccagcaa

SEQ ID NO: 69371 - RNA, 68 nt, Homo sapiens
cccgccccccgaaggcgcgccccaaacaggcgacggaagaccacgacccaaagcgaggcacgaggcca

SEQ ID NO: 69372 - RNA, 78 nt, Homo sapiens
ggccgcaggccaccgacacgagacaaccgggagccggcggcccagaaggacggaacagccagggaggcgcgacacggc

SEQ ID NO: 69373 - RNA, 77 nt, Homo sapiens
ggagagccccggagaccacggagcggccagcagccggaccacccaaggcccgcccgagaaaggcgaacggccaccca

SEQ ID NO: 69374 - RNA, 85 nt, Homo sapiens
ggaggccgccagcagaggcggagcccgcagaccgcagaaggccggagacaccagcagggccagaagcccccaggaggagaacgag

SEQ ID NO: 69375 - RNA, 52 nt, Homo sapiens
acggaccgaaaaacacagaaggagaggggcaacggacacaggagacagccac

SEQ ID NO: 69376 - RNA, 105 nt, Homo sapiens
ccggaacagcgccgaggcccaaggcagaggcgaggcggaagggcaccccacccggaaacccccaaagagaaagaagaagaaaacgagacccaaaagggagaaaga

SEQ ID NO: 69377 - RNA, 77 nt, Homo sapiens
agacacaaagccgcgaaaggccgggaagagggagagcaaacggccagcccacgggaaaacccagaaacagaaagaaa

SEQ ID NO: 69378 - RNA, 75 nt, Homo sapiens
cgcggcgcccgccccagggccaaccgccccccagcagcaggcacgggcgaaccccgagccccgccccacgcccgc

SEQ ID NO: 69379 - RNA, 73 nt, Homo sapiens
gcagacagccgagccccccaaccacaggacagccccaggggcaggacagggggaaccagaaagcccgacgaac

SEQ ID NO: 69380 - RNA, 74 nt, Homo sapiens
cagaccacagcacagccgggaaggggagccaccagccccccgggccagcgcggaggcgggaaaacaaaccaagc

SEQ ID NO: 69381 - RNA, 80 nt, Homo sapiens
gcccccaggcggccccgggaagaaggaggccgaccaggccgacaaagcagacgcccgcaaacgaccggggaaagcaccca

SEQ ID NO: 69382 - RNA, 68 nt, Homo sapiens
gcagccccgccagccaggcggcagcaggagcccagcccggcgacagcgaaagaaagaacccgagaccc

SEQ ID NO: 69383 - RNA, 63 nt, Homo sapiens
cgcggcgcgcgaccgacacgaaggcagacacggcccgggcaaacagcagaacgcaagagggga

SEQ ID NO: 69384 - RNA, 84 nt, Homo sapiens
agcagccaagggaaccaacgaccacaaccaggagacagacccagcacggaccccccccccagccgggcgaggccccgaaacgca

SEQ ID NO: 69385 - RNA, 81 nt, Homo sapiens
cccgaccggaggagaaccccgacccaccacacgagccccggccacccggagaaaggccacggccccagcccaccggaccgg

SEQ ID NO: 69386 - RNA, 89 nt, Homo sapiens
caagaggcggacaaaacgccaggcggaccagaaggccagcaaagaccgaagacaacgaccggaagaaggaaaacacaggccccaccaag

SEQ ID NO: 69387 - RNA, 72 nt, Homo sapiens
ccacacccggaacgacaccaggaacccaaggcccggcagggcagagacacccaagacacccccagcaaagca

SEQ ID NO: 69388 - RNA, 62 nt, Homo sapiens
cccgagccggagaccagcaagacacacggaacgaaaaccacacaagggacaacagaagagga

SEQ ID NO: 69389 - RNA, 74 nt, Homo sapiens
gagcaaggcgacgaaccggagagaggagaacgaacaccggaccgccaggaaggagaaaacacaggcaggaagaa

SEQ ID NO: 69390 - RNA, 85 nt, Homo sapiens
gccaagaagcggggcggagagaagggcccggcggacaggacccgcggccgagagacgcggaggagcggacgcggaggccgccggg

SEQ ID NO: 69391 - RNA, 78 nt, Homo sapiens
agggccaaagaagggagagagacccccgaggagaggcggagagcgagcgacaccgaaaagcggaaagagggaaacagg

SEQ ID NO: 69392 - RNA, 77 nt, Homo sapiens
cgcaggcgccgcacggaggcgcccggggacggggccgcagggagggggggccccagcccggccgaacgggcgcacga

SEQ ID NO: 69393 - RNA, 66 nt, Homo sapiens
gggaccacaagaccagaagccaaagaacaagcggagaagaacagagggcagcggaacgcgccgacg

SEQ ID NO: 69394 - RNA, 58 nt, Homo sapiens
ggaaaacgcggaaaaccgacacaacagcaaagcccagacaagccagggaacgaagggc

SEQ ID NO: 69395 - RNA, 79 nt, Homo sapiens
cgagaccccgcccggaccgcagcggaacaggaaccaggagcgacgggaaacaacaggcagcaggaaaggggccacgaga

SEQ ID NO: 69396 - RNA, 72 nt, Homo sapiens
gaagcaagccaccgaccacaccgcccggggccgggcagcgagcccacacaggggagaaagaggcccacgcca

SEQ ID NO: 69397 - RNA, 89 nt, Homo sapiens
cagccccgccgccggggggacccaccggaggcgccaccacggccccgcacccccaagccgccgacaccacgccgaccaaagccaagcgc

SEQ ID NO: 69398 - RNA, 80 nt, Homo sapiens
ccaacacaacaaaaggcaccagcagcaagcacagagagaccaccacaaagaaccccaggcgcgcagacgcaggggagggc

SEQ ID NO: 69399 - RNA, 61 nt, Homo sapiens
cgaaaaagaccaagcgagccccccccaaggaaaaaagaacggaccgaagccaaagaacaag

SEQ ID NO: 69400 - RNA, 85 nt, Homo sapiens
gccaccgccgccaggcggacaaaaggccaggccacagggcaccacaacacgcccacccaggaggcggccggccaagcccagccag

SEQ ID NO: 69401 - RNA, 99 nt, Homo sapiens
gacaggaggagacaggcgagagaggaggacacgaccgccacgccgcaagaagagccacaggaaagcaaagaggcgagccacgaaaagccaagggacaaa

SEQ ID NO: 69402 - RNA, 80 nt, Homo sapiens
acgcggaaagaagcagaaggccggacccaagccagaagcccgcaaagcccccagaccgcagaaacagacaacgccaccag

SEQ ID NO: 69403 - RNA, 59 nt, Homo sapiens
cacccgcgcagccgcccacgggccacggccaggcccaggaggcaaggaccgcccagccc

SEQ ID NO: 69404 - RNA, 72 nt, Homo sapiens
caccagaacggagcagggaacacgaccccaaggaggggaaaagacagaagcagaccccaccaccccgagcaa

SEQ ID NO: 69405 - RNA, 83 nt, Homo sapiens
gcccaggagccggcccagccacagccacaaggcgagcgaggagagccacgagcagccgaaggcgcgcagaacgccgcaccacc

SEQ ID NO: 69406 - RNA, 79 nt, Homo sapiens
cggacagggccgacggcgacgagggcgccacacgggccagggcagggccacccagggccagcaggcgaaagagaagcaa

SEQ ID NO: 69407 - RNA, 75 nt, Homo sapiens
gagaggacccccccccccccccaagacaggaagggaaggggcggagacgggcggaacgcaggaggccagaggaca

SEQ ID NO: 69408 - RNA, 72 nt, Homo sapiens
cggcgcggggcccgcggagcccaggccccccccggacccgccgcagagccaggggacaagaccccccccagg

SEQ ID NO: 69409 - RNA, 74 nt, Homo sapiens
gcgcggcagggagcgcgggggcccgcgcagcagcgaccacggcgggggacagccggcgcggcccaagaagagac

SEQ ID NO: 69410 - RNA, 57 nt, Homo sapiens
aaaggaggcagcagccccggccgggagacacgacaaggcacgaggcgcggcgaccac

SEQ ID NO: 69411 - RNA, 74 nt, Homo sapiens
acaacaccagagcgaccagaagccaaagggccaccaaggcaaaggcagacaacccgcagccggccaacgggagg

SEQ ID NO: 69412 - RNA, 84 nt, Homo sapiens
ggcacgaaaaccgggccagaaggagaggagaagaggaacgcaggagagcagcgaaggagccgaacagacggacccgggaagcgg

SEQ ID NO: 69413 - RNA, 70 nt, Homo sapiens
agacaagcaacacaccacagcagcgaagcagggggaggacaagcggcccacgacgcacccgaagaaaagg

SEQ ID NO: 69414 - RNA, 62 nt, Homo sapiens
acccgagggcggccaccaagaggcacaggcaggaccaccggaggagagcgaagcgggaacgg

SEQ ID NO: 69415 - RNA, 82 nt, Homo sapiens
caaggagccggcaggggggcggagccacgggcaaagggaaacaaaaacaacgggaggcggaacacgcaccggacaagccaac

SEQ ID NO: 69416 - RNA, 67 nt, Homo sapiens
caaggcgcccgcagaacaagaaaggaacgccccaacagaggaccccccccagagggggacaccaggc

SEQ ID NO: 69417 - RNA, 68 nt, Homo sapiens
ccggggcggcgcgcgggccgcagagcagcacacgacaaccgggaccaggacacagaggaagaagaaca

SEQ ID NO: 69418 - RNA, 69 nt, Homo sapiens
cgggagggggaggggaggaaggaaaggaggggacgcggggacggccgcggaggaggagaacaccgacaa

SEQ ID NO: 69419 - RNA, 79 nt, Homo sapiens
cgcagcgccccagcgcgccccaggagcggccgccagaagacccgaggaagacaggaccccagcaggggaacgccaaaaa

SEQ ID NO: 69420 - RNA, 71 nt, Homo sapiens
gggggaaagacgcacagccagacaggagaaaaaccacgggaagacaaggggaagcaacaccagagaacacg

SEQ ID NO: 69421 - RNA, 73 nt, Homo sapiens
aacacacgacaggcccgaggaaacccagaaaacagaggagagggagagcgcaacagcacccggggcgggcaca

SEQ ID NO: 69422 - RNA, 89 nt, Homo sapiens
caggccagcgcagcggcgcagaccggggcacggggcggccggggaaggagaaggggccaaacaggagaagaagaagaagaagacaggcg

SEQ ID NO: 69423 - RNA, 82 nt, Homo sapiens
gcacgccggcggggaccgcgggaaggcgaggacgaggacgaggacgcaaggaggagaaagaccacagggaaccggaacgaag

SEQ ID NO: 69424 - RNA, 75 nt, Homo sapiens
ccccgggcacccccaggggaccaacccagaggccaaaaaggcgaaacgagccgcgcccaagacagggaaggaaga

SEQ ID NO: 69425 - RNA, 85 nt, Homo sapiens
accagcccagccgggggcggcccggcgccggcccgccgcgcgccaccaggccgaccccaggacacacgccccagcaccgccccag

SEQ ID NO: 69426 - RNA, 63 nt, Homo sapiens
agagccagcgccgagaagaagccgcggggaggacggcagggggaaacaggaagagaacagaac

SEQ ID NO: 69427 - RNA, 54 nt, Homo sapiens
gggaggaagaaccacgacaaaggaccgacagcacgaggaggagagaagaaaagc

SEQ ID NO: 69428 - RNA, 85 nt, Homo sapiens
gccgccccgcgagcacagagcccgccgccgaccgccgcccgccacacccgccgccagccgggccgagccagggcccccagaggag

SEQ ID NO: 69429 - RNA, 85 nt, Homo sapiens
acgaacaacaccccagaacagaggagcccaggcacaagggagaggacagacagagccaaacggggacgcaagagaaagaagcaac

SEQ ID NO: 69430 - RNA, 74 nt, Homo sapiens
agagcgcggagcgggcggagcggcgagagcccccacggaaaacaccgggaaaggcccaaaccggcgaaaacccc

SEQ ID NO: 69431 - RNA, 89 nt, Homo sapiens
cggaggacggggccgggcgaccgggcaccagcaggacccgaggccaggagccaggggcccagaagggcccacgagacgcgaacaaacgc

SEQ ID NO: 69432 - RNA, 66 nt, Homo sapiens
aggcggcaaccaaacggcgccaagggacgaacagcggggacgccccagcagaccgcccaggagagg

SEQ ID NO: 69433 - RNA, 79 nt, Homo sapiens
acgccaccccagcacaggcggcgccacacgccccgcgcgcggcgccgaacggcaggcaccgcagcgggggagaccaccc

SEQ ID NO: 69434 - RNA, 58 nt, Homo sapiens
ggaacgcagccaccggaaaggaagaagaacagagcgccgggacaggaaaccacaaccg

SEQ ID NO: 69435 - RNA, 72 nt, Homo sapiens
gggagaaacacaggaacaaacgacaggggaaggaacaaagcagagaaaccaaaaggccagacgaacacgaga

SEQ ID NO: 69436 - RNA, 60 nt, Homo sapiens
cgaaggcaccacagagagccaacaaaacacgagaccccaaggaaaaaaccggccaggaaa

SEQ ID NO: 69437 - RNA, 73 nt, Homo sapiens
gccgccccccccccgaaaagccggaggagccaccaacagaagcaggagccaggaaaccaaaacccacagagag

SEQ ID NO: 69438 - RNA, 76 nt, Homo sapiens
aaacaggggacagaaagcagcccggacgcgaccacgcaaggccccaaggggaagcgaagaaacagaaaaagacgca

SEQ ID NO: 69439 - RNA, 79 nt, Homo sapiens
cgcgaccacacgcccccaggcggaccggaagcgagcaggagcagagcggaagacccaccagaaagagcaaacaacagga

SEQ ID NO: 69440 - RNA, 79 nt, Homo sapiens
cagaccccaaagacagacggccggggggggcacagagccccggaagacagcccccagcgaccagacccagggccagagc

SEQ ID NO: 69441 - RNA, 73 nt, Homo sapiens
gcaccggaacaaggccgcaagacggcaggcaccgagaccagcgaggagaagacgacccaagacccacaccccg

SEQ ID NO: 69442 - RNA, 79 nt, Homo sapiens
ccggccaacccagaaccccagcaccgaaagggaccgaaaggagagcaaagggagccggacacgcacagaaaaagaagga

SEQ ID NO: 69443 - RNA, 79 nt, Homo sapiens
gaagagggagcaccacggaccccaaggaagccacggcagacacacaacccgacccgacgaaaccccagaacccagcccg

SEQ ID NO: 69444 - RNA, 78 nt, Homo sapiens
ggaaacgggccccccggcgagagacgcagccccgcacagaacacagcaccaaagcaggcggggcgaaggcggagcccc

SEQ ID NO: 69445 - RNA, 78 nt, Homo sapiens
ggcaagagaaccccgcggggaaggggggcagaggccggaccccagcacacagaagccgagacgaccccgcaaaacccg

SEQ ID NO: 69446 - RNA, 71 nt, Homo sapiens
gaaggcgaacacagaggaaaccgcaccgcccggagggagccaggcaggccaagcgcggcccgaggacggcc

SEQ ID NO: 69447 - RNA, 85 nt, Homo sapiens
cccgcaccgagagaccacgccagccggcaagacggcacaccggggaagcaccgggcacaagacgaagacccccgacgcccagccc

SEQ ID NO: 69448 - RNA, 70 nt, Homo sapiens
aagggccaaagaagggagagagggccagcgcccccgccgccccccagagacacaccggaggcaggcccgc

SEQ ID NO: 69449 - RNA, 78 nt, Homo sapiens
gcagacgaagcaagacgggaagaaaggagaggccagggacagaagccacaggaccacaccaaggagaagaagacccgg

SEQ ID NO: 69450 - RNA, 75 nt, Homo sapiens
cgcgcccgggagagcaagaaagaccccagcaggccccaaggagcggcaagaggaccggccgacgcacagacccgc

SEQ ID NO: 69451 - RNA, 68 nt, Homo sapiens
gcaccaccaaagaggcacccaggacacaacagcggaccaagcgccggggcaagcaccccaggcggcgc

SEQ ID NO: 69452 - RNA, 74 nt, Homo sapiens
aaaagaaaaagacaaagaggcgaaagcaggacaggcgggagacaggaaaggaaaacagggcgggaggcgagcca

SEQ ID NO: 69453 - RNA, 75 nt, Homo sapiens
acccccgcggcgcgcagcccagcagagggcccagaccgaagccaaccccgcccacagaagccaagcccagggcgc

SEQ ID NO: 69454 - RNA, 69 nt, Homo sapiens
ggaaacggcaagaccaaaaaacacaaaccaggcaacaggcagaaaaagaaccagggaagacgccacgcc

SEQ ID NO: 69455 - RNA, 72 nt, Homo sapiens
gacaggagacagcccaacaaggggcgggagcaaaaggcaaagccaaacaggaagccggcgagcaaggggaag

SEQ ID NO: 69456 - RNA, 74 nt, Homo sapiens
ggacgcaccaacgaggaaccgaggaggcgcaaaggggaagaaagacccaaccagagagcgggcacgaacgcaga

SEQ ID NO: 69457 - RNA, 80 nt, Homo sapiens
gcgagcccgacgagcaaccccccacagagagagccagaaccagaaagaacaaccaggccccggggcaggggaaccagagc

SEQ ID NO: 69458 - RNA, 53 nt, Homo sapiens
gcaaagggacaggagaccggagaaagcaaacaaggcgacgccaggagcacacc

SEQ ID NO: 69459 - RNA, 84 nt, Homo sapiens
acagacgaccggcacacagcagagagccggaaagggagcgacccagacaaagagaagaaaggccggagagcggcggacagcagg

SEQ ID NO: 69460 - RNA, 53 nt, Homo sapiens
gagccaacacaaggaaggaccaagaacgcccagcccgcgggcaccggcagaaa

SEQ ID NO: 69461 - RNA, 79 nt, Homo sapiens
gggagaggcgggacaagccaagggacaggggggccgggggaacgaggaagcgcccaagggccgcacgccccaccccgag

SEQ ID NO: 69462 - RNA, 75 nt, Homo sapiens
caacagaagcaccggccagggcaccggggcccggcgcccgggcccgccccggagggaaaccacagccccaaggag

SEQ ID NO: 69463 - RNA, 76 nt, Homo sapiens
aaaacagcaacagggacgaaggccggcccacagcccaaaaagaaacaggaccgaaagccagagcgaagccaaagcc

SEQ ID NO: 69464 - RNA, 72 nt, Homo sapiens
aaggcagaggcgcgagcgaacccacacagcggaaggaccagaggcgacacggcaagggaaccaaaagacgag

SEQ ID NO: 69465 - RNA, 73 nt, Homo sapiens
cgacaacacggaaaaacgcgcccggcggacaagccacgagcacggaaacccagcaccccagaacacgggaagg

SEQ ID NO: 69466 - RNA, 59 nt, Homo sapiens
aggagggaggaacgcaacaaaacgacacaaaaggagcagagacgggacaggagagcggc

SEQ ID NO: 69467 - RNA, 56 nt, Homo sapiens
caagaacgccgggaacccagggcacaaggcccacaaagaaaaaaacacacacgagg

SEQ ID NO: 69468 - RNA, 78 nt, Homo sapiens
cccacccagcagcacacccgaccgaaggcgaaagacaagggccacgagaagagaggcccgcagccgagcccgaggaaa

SEQ ID NO: 69469 - RNA, 68 nt, Homo sapiens
cgagcaacagaggacgacaagacacaacagcgccagcccccagaaaagccagccagcccaaacgacag

SEQ ID NO: 69470 - RNA, 64 nt, Homo sapiens
gcgcacgacagccccggcacccggggagaagcagcgcacagccgaggaagagagccacaagcga

SEQ ID NO: 69471 - RNA, 81 nt, Homo sapiens
gagacgggggcggcggccgcgcgggcggcgggaccggggaagacgccggccgcaggagaacgagagggaccagcccggcga

SEQ ID NO: 69472 - RNA, 82 nt, Homo sapiens
cccgggggcagcagcaacgccggacgcccacgcaagcaggcaagaaaggcacaaaaggcaggaaagggacgacgggaggagg

SEQ ID NO: 69473 - RNA, 70 nt, Homo sapiens
gcaaagcaaaggaagaccggaaaacagaagaaaacgaagcaggcaggggacggaaagagagccgcagcgc

SEQ ID NO: 69474 - RNA, 83 nt, Homo sapiens
aaccgcgccaccgggaggggacggcccagccccagcgcggcccagaacaaaacaggagcgaggacacgcaccagcggacgggg

SEQ ID NO: 69475 - RNA, 72 nt, Homo sapiens
gcgggaaaccggcccagcggcagaccgacaaagaaccaccgcaaggaccagggaaccgggcagacccccgga

SEQ ID NO: 69476 - RNA, 68 nt, Homo sapiens
gaaccaaggaagcaggccagaggacacaaaaggcccggagaggaagccgccagccaccaaggagacca

SEQ ID NO: 69477 - RNA, 70 nt, Homo sapiens
gggagagaaggccgagacagagaaggccaagagaggccaacagaggaacaaggcccgcagaacccaagag

SEQ ID NO: 69478 - RNA, 79 nt, Homo sapiens
gcagagaacaagacggacgcaccgacggaacgagacgcagagccccagcggggaggcgcaacacgaggcgccgcagcac

SEQ ID NO: 69479 - RNA, 75 nt, Homo sapiens
gcaccccccccaccaccgcagggaggcgcggccgcaacaccgaagccaccgagcgccggggggcggcgcggcacg

SEQ ID NO: 69480 - RNA, 74 nt, Homo sapiens
ccaagacaagaggagaacggacggaccggacggaaagacagggagagggcaccagcaccggagggggcacaggc

SEQ ID NO: 69481 - RNA, 74 nt, Homo sapiens
cgggcagccgccgacgagcaggcacaggaagagggcggcacgcggccagagagcacaacgggaggaagggaagg

SEQ ID NO: 69482 - RNA, 77 nt, Homo sapiens
caagacggcaggggccccaggaggaaggcacaggggcagagagcagcaccgggcgcccccagcagacccgaaggcgg

SEQ ID NO: 69483 - RNA, 83 nt, Homo sapiens
ccagggcagggccgcgggcgcgggcaggggcggcgcggcgcgggcggcggggcccacggaccgcgcgcgcagggaagcaggac

SEQ ID NO: 69484 - RNA, 75 nt, Homo sapiens
gccgccacaaccgccagacaaccggagccacgccccacgaccgccagaaagaggcaggcaagcgagaaggaggac

SEQ ID NO: 69485 - RNA, 73 nt, Homo sapiens
agcacgggcccaaagaggccaggggcccggcccgagcgcggaagaaaccgccgagagaccggcaagcgggagc

SEQ ID NO: 69486 - RNA, 52 nt, Homo sapiens
aaaaaggcgcaagaaccaaaaaccaacagccaaccagaaaaccagaaacacc

SEQ ID NO: 69487 - RNA, 83 nt, Homo sapiens
gcggaaaggagggcggcccggaccgggagacacggccagacgcccccagagaggcggaaaaaagccaagaaaaaaaaacagaa

SEQ ID NO: 69488 - RNA, 59 nt, Homo sapiens
ggggcgccgaaagccgcagcgagacgccgaggagccacggagcggcgcaccagaagcag

SEQ ID NO: 69489 - RNA, 69 nt, Homo sapiens
gagggcagaggagaaggcggaaggcccacaccccacccagggccacggcccacaaagaaacacggccaa

SEQ ID NO: 69490 - RNA, 79 nt, Homo sapiens
cggagagagcacgaaggacccagcagggcaccagagaacacgccccagaccacggaaaaccagcccacaacggccccca

SEQ ID NO: 69491 - RNA, 66 nt, Homo sapiens
ccacgcgagacgccaccaggggaccgaagaaacggaccaaagccgcggggcggaccgagggcgcac

SEQ ID NO: 69492 - RNA, 69 nt, Homo sapiens
aaagagaggagggagaacacagaaacccgccccgggacccaaagacaggaccacgcaccagcagagaag

SEQ ID NO: 69493 - RNA, 68 nt, Homo sapiens
cccaccggcgggcaacacccgccgcagaggacgcggcgcagcaacaaacagcggcgacaaaccgagac

SEQ ID NO: 69494 - RNA, 69 nt, Homo sapiens
agaagagaaagcgaacaggaaaacccggccagggagacgagaagacgaaagcaaaaagccgccgcccag

SEQ ID NO: 69495 - RNA, 78 nt, Homo sapiens
cgaccacaaggggaggacaaccgcccgggaccagacacgagaggcgagggacgacagagcaagcggcagagggcaagc

SEQ ID NO: 69496 - RNA, 75 nt, Homo sapiens
cggcgcgagggggcgcaggaccggccgcaggccaccgacacgagacaaccgggagccgggcggagccaagaaaac

SEQ ID NO: 69497 - RNA, 81 nt, Homo sapiens
agacggccaccggcgggaggaacaaaagccggccaggggcaaaggagaggaagaggaagaggaagaggcagcggcgcgcca

SEQ ID NO: 69498 - RNA, 79 nt, Homo sapiens
cggggggaggcgggcaaggaacaggcgagaaacagcccacaccagaccagaaagaggggacgaagccccaaggcacccc

SEQ ID NO: 69499 - RNA, 65 nt, Homo sapiens
cagaggaccccagccgcgcccgggagagcaaggacagaagagaacaaaacaacgggaacccagga

SEQ ID NO: 69500 - RNA, 69 nt, Homo sapiens
aaaaggaaacgacccggacagccagggaaaggaaggaacaacaccacggaggaaacggccaccaaacca

SEQ ID NO: 69501 - RNA, 78 nt, Homo sapiens
ccaggagcagaacagccggaccgcaccccggaccaccccacaccagacagacagcccaaggcggaaaagcgaaggaag

SEQ ID NO: 69502 - RNA, 77 nt, Homo sapiens
agaagcaagaaggcccggacacagcaaaccgggccacagagggggaggggccaggaagacaaaaacagagagaacag

SEQ ID NO: 69503 - RNA, 68 nt, Homo sapiens
ggagcccagacagcggcagaaagaaagaccagaccagacgcccgcgcgggcggggggacaacaagcca

SEQ ID NO: 69504 - RNA, 71 nt, Homo sapiens
gccacgcggaagggaggcgcgaagagcgaaagggggaaccggggcagcaggcaaagaccagcaaggcacca

SEQ ID NO: 69505 - RNA, 76 nt, Homo sapiens
gcggcggccagggacccaaagagagaaaaaagccgcccacaaggagagcgaccacgggaccagcggacccaaaaac

SEQ ID NO: 69506 - RNA, 83 nt, Homo sapiens
agaccaccacaacaagagacaacaccgcgcggaccacaaaccgcgccagaaaaggggagacgccgcaacaaagccacaaggaa

SEQ ID NO: 69507 - RNA, 81 nt, Homo sapiens
gggcgaagcgacgagccgcgaggagcaggaagggccgcggcagggcaagacagcggaagggcgaaggcgagacggagacaa

SEQ ID NO: 69508 - RNA, 73 nt, Homo sapiens
aaaagcacccccccaccggccaggaacaggaggagagaccagcagcaaacccacgcggcgcaccgcacaccag

SEQ ID NO: 69509 - RNA, 73 nt, Homo sapiens
ggagcaacagggcagaaaaccagccccaggaggggacaaaaccccgaaaaaggcagccccagcccccagcagc

SEQ ID NO: 69510 - RNA, 78 nt, Homo sapiens
acacagcggagacccagggcgcgaccacagaccaacccccggcagggagaaggaggagggcggggagaagagggggcg

SEQ ID NO: 69511 - RNA, 78 nt, Homo sapiens
cccccggcagcaggcccagcgaccaccccgcgcagccaccggacaccgcagggacgagcaacaggggaaagagacccc

SEQ ID NO: 69512 - RNA, 73 nt, Homo sapiens
accaacaagaggccaaggaggccaccagacaggaggcagcgggcggggagagagcgacacgccgcacacgaac

SEQ ID NO: 69513 - RNA, 90 nt, Homo sapiens
cacccgggagcggcggccacggaggcaccagaagaagcaccagggcggagaacggaaaagcaccaggaagcagagaggaccgcagaaggg

SEQ ID NO: 69514 - RNA, 95 nt, Homo sapiens
caacggcgcacccaacgccccgcggagggaccgaggagaaccgaggcaccgggaaaacgcagaggaacgagggggagccacgaggagaaggccac

SEQ ID NO: 69515 - RNA, 43 nt, Homo sapiens
gggccgaccccagagcggcgcggacaggaggcccagcgcaaac

SEQ ID NO: 69516 - RNA, 71 nt, Homo sapiens
gcccaaagcccacaacggagcacacgggcccaggaagacaacagaacgcacaaaaccaaagagaggaacga

SEQ ID NO: 69517 - RNA, 86 nt, Homo sapiens
aggacggaagcccaagggcacaaagcagaaacccccgggagacagaggacgcagcgcggcagggacccagggcaacgccgccggaa

SEQ ID NO: 69518 - RNA, 80 nt, Homo sapiens
caaagccaccccaggaagcgaagaggagcgagcaacaaaaacccaaccaccaccagcagcccacaacagcaagaaagcag

SEQ ID NO: 69519 - RNA, 67 nt, Homo sapiens
ccagcaaaccccccgacccgagaccaaagccagaaggcggaggaagaacgacagaaaagaagccacg

SEQ ID NO: 69520 - RNA, 76 nt, Homo sapiens
ggcgacgccacccaagacacaaacggcgacacaggaaacaggacccaaaaaacagagcacgcgaccagcgaggagc

SEQ ID NO: 69521 - RNA, 51 nt, Homo sapiens
gcgaaagacgagcgccgaggggcagccccgggagcaaagacacagcaacga

SEQ ID NO: 69522 - RNA, 64 nt, Homo sapiens
ggagaagacaggagagagcgccaaggaccggcaaggggggaaacagcagcacagacagacaaga

SEQ ID NO: 69523 - RNA, 39 nt, Homo sapiens
ccaaggcaggcagacacgaggcggagacaaggcggacgg

SEQ ID NO: 69524 - RNA, 72 nt, Homo sapiens
ccacgggcagcggaaaaaagccaccgaagagaggagccagccacacggaaagaagaaaagaaaagagagagc

SEQ ID NO: 69525 - RNA, 79 nt, Homo sapiens
caagacgagcgacaggagcacacccggagaagcaggagcccaccggcagcccgacggagaagacacggaaacccggagc

SEQ ID NO: 69526 - RNA, 79 nt, Homo sapiens
aaagaccagggaaccacagggaacccaagagacccgcccagaaccgcaggagccaaggaccaggcagccggagcgaaga

SEQ ID NO: 69527 - RNA, 53 nt, Homo sapiens
gggacaacaaaggaagggagcggagcggcggacaccagaagagaaaagggcaa

SEQ ID NO: 69528 - RNA, 58 nt, Homo sapiens
gcagaaaggggggcagagccacgacgggcacagacccacaggaccgcgaacaaggagg

SEQ ID NO: 69529 - RNA, 59 nt, Homo sapiens
cggagaccagagacaagggaggggggaagacagggcccagcaccacaggacgggccggg

SEQ ID NO: 69530 - RNA, 64 nt, Homo sapiens
ccgacgccaggcagcgcccccaaacgaggaacagcaccaaaaacgacgcgaacccaagagaaga

SEQ ID NO: 69531 - RNA, 77 nt, Homo sapiens
caagacccggccggcgccgcggccgcggagaagacggcccagcagagcacccaaccagcgggaacacagcgccgccc

SEQ ID NO: 69532 - RNA, 67 nt, Homo sapiens
gcgccgaggacgcaggacccaagcaggccgcgaaggaaacacccaaagggaagcgacgaaggacacc

SEQ ID NO: 69533 - RNA, 108 nt, Homo sapiens
cacagacggaagcaaggaacaaaccgaagaacagcgggaaagaaggcaaaacacggcaggggaaagcgcgagcgagcacccggagcagcagagcacccaacaggggac

SEQ ID NO: 69534 - RNA, 68 nt, Homo sapiens
cggaaaagcagcaaccggggcgaaggagaaagaaacacccaaaacagcgccggggaaacagaagcagg

SEQ ID NO: 69535 - RNA, 71 nt, Homo sapiens
gaaaacccgacaccccaagagcggagcagaggggaggccaggccgagacggaaagacgggcaggacccacg

SEQ ID NO: 69536 - RNA, 75 nt, Homo sapiens
cccagcgacgcgccccacggagccaggccccgaaaccgcggcggggcagagcaacaccgagaccggggcgacagg

SEQ ID NO: 69537 - RNA, 78 nt, Homo sapiens
gccgacaagcaagcagcgcgccggccccaacacggaccggaacaggacaccaggagggcgggacacgcagaggagggc

SEQ ID NO: 69538 - RNA, 74 nt, Homo sapiens
agcgcccccaccacgggaggggccaggccacggacgaagcccagagggagagccggggagacaggagagccgcc

SEQ ID NO: 69539 - RNA, 71 nt, Homo sapiens
acaagcagggaagagacaggccggaaagcaaagacagccaaaaacaacaagcggggaagacaagaaaacca

SEQ ID NO: 69540 - RNA, 83 nt, Homo sapiens
aggaaagcagaagaagaagccagaaggagaaagaggaagaaaagaaggcggcgaagcaaggagaaaagacaaacccggggcaa

SEQ ID NO: 69541 - RNA, 77 nt, Homo sapiens
cggcaggcagcacaagcagcagaaccgggcccggaccgacaggaaagaaggagcccacaaagaaaagaacaccgcca

SEQ ID NO: 69542 - RNA, 63 nt, Homo sapiens
ccggcccggagaacacacaccgccgcaggcgcccccgggggaaggaccccccacagcgggagg

SEQ ID NO: 69543 - RNA, 77 nt, Homo sapiens
cagacgccgaaaagaggacaccaacaggggggagaaagcaaggagaaacaaacccaaggcacggccacgacagggcc

SEQ ID NO: 69544 - RNA, 76 nt, Homo sapiens
aacggaccaaggacgcgaagaacccaaacaggggaccagaaacaacgaagcaagcccaagggcgcaggggcaacac

SEQ ID NO: 69545 - RNA, 69 nt, Homo sapiens
gccaccagaaagcaacagcagaggaacaccgcccccggagccggcagaggcaagaagggacggcagaca

SEQ ID NO: 69546 - RNA, 86 nt, Homo sapiens
cgaggggcagcgcgcacccgcacccgcaggccgagggacggccaagaagcgcaagaacccaagaaggcagaagccagccccgcagg

SEQ ID NO: 69547 - RNA, 124 nt, Homo sapiens
ggagacggaccacagcaagcagaggcgggggggggaaagacgaggaaagaggaggaaaacaaaagcgcacaggaagaacaaaggacggaggagaaccgaaaaaagcagagaaaaggagccagga

SEQ ID NO: 69548 - RNA, 75 nt, Homo sapiens
gggaccaggaccgaggagagccccgccagccaggagccaacccgccccgaaggaccccaacaccaaggcaacagc

SEQ ID NO: 69549 - RNA, 48 nt, Homo sapiens
cggacacagcaaaccgggccacagagccagggccagaaacggcgcagg

SEQ ID NO: 69550 - RNA, 72 nt, Homo sapiens
ggaaaaaggacagcggagacacggagacaagcccccacgaggaaaacccccccaccgaaggagggccccacg

SEQ ID NO: 69551 - RNA, 81 nt, Homo sapiens
caaccggaaagcaagggagcggcacagccagaagaccgaagcgcgacggaaggcacagccagggcagggccaggaggccac

SEQ ID NO: 69552 - RNA, 32 nt, Homo sapiens
ccgacagccgcagaacgccgcaaaagacaaag

SEQ ID NO: 69553 - RNA, 74 nt, Homo sapiens
aagaccaaggaggcgcccaggaagaaagacacaggacaacgaacgaaacggcgacagcgaccgaagaacagagc

SEQ ID NO: 69554 - RNA, 85 nt, Homo sapiens
gagacaacggggagagccagcacagagggcaggcaaaaccccaaaagagccgcgcagcgagccacgcaccaaaccagcagccggg

SEQ ID NO: 69555 - RNA, 65 nt, Homo sapiens
acggcaggagcagaccaaaggcacaggaagaagcgcagggaaacagggcaagacagaggaagaaa

SEQ ID NO: 69556 - RNA, 81 nt, Homo sapiens
gagcgccgggacgcggagcccggagcggggcgacgaggcgagcgggggccgggcagggcacaagcccaggaaaaacagaac

SEQ ID NO: 69557 - RNA, 78 nt, Homo sapiens
gacgacaaagacagccaaaggagaccaaggagccaaaagggagaccagaagcacgcaagcgggaaggcggaggagcag

SEQ ID NO: 69558 - RNA, 81 nt, Homo sapiens
acacagggggcgacaaacggcgcaaagccaggaagaacagcacagagaagacaaagggagcaacccccggacagaaggcaa

SEQ ID NO: 69559 - RNA, 85 nt, Homo sapiens
ggagaaccgcggggacagcagccggccagccggggggcacgcccgcccgggccgaaacagccaaaggccaggaggacagaggacc

SEQ ID NO: 69560 - RNA, 78 nt, Homo sapiens
caaccgcaggcaaccagcagccccaggggcgggccacgaggcacgacccaaacgcggccggacaagcagacccacccc

SEQ ID NO: 69561 - RNA, 74 nt, Homo sapiens
gagagagcacgaaggacccagcagggcaccagcccgacaagcgcccgaggcaagccaagcgaggacaggaggag

SEQ ID NO: 69562 - RNA, 43 nt, Homo sapiens
accccgagcagcagcagcacagggcccaccaagagagggccag

SEQ ID NO: 69563 - RNA, 79 nt, Homo sapiens
gaaacaccggcccgaggcgaagccagcccacaggggcaagccaaggccaccgagccacaagaccacagcaccgaccccc

SEQ ID NO: 69564 - RNA, 88 nt, Homo sapiens
ggcagagcaaggggcacgcagaaggaccggccacggccaccggccagaacggaggaaaaacgacgagccaggaaacaacgcaagaacg

SEQ ID NO: 69565 - RNA, 89 nt, Homo sapiens
ggccggcgccaccccgccagacccgcccgcaccgcacacccacaacagagaagaagccccgcaaaaaaggcacaaacccagcacagaga

SEQ ID NO: 69566 - RNA, 53 nt, Homo sapiens
ggcagacaaaagggccaaagaagggagagaggccacccagggaagcgaagaaa

SEQ ID NO: 69567 - RNA, 77 nt, Homo sapiens
gaaaagagaagagccgaacgaaagaagaagaaacccgggaaagcaaaagcgaagggaaaaaaggggaaaaggaagga

SEQ ID NO: 69568 - RNA, 69 nt, Homo sapiens
gacggccagacagaaccccgacagcagagacgacgcggcaagcagcggaagaggacgacgcgacacaaa

SEQ ID NO: 69569 - RNA, 83 nt, Homo sapiens
agcagcgcgcccgcgccagcacacgacaccgagccgccgccgaccgagaacagaggcgaacacaacacaaagggaagaaccaa

SEQ ID NO: 69570 - RNA, 73 nt, Homo sapiens
gaacaccagggagaagcaaagacggcaagggcagccgaccaagcccaccaagggacgccagcacccaaccgcc

SEQ ID NO: 69571 - RNA, 71 nt, Homo sapiens
cacagcggcggaccccacaccaagggcccgagggcaggacagcaggcaccggcgaagcacagagaggcgcg

SEQ ID NO: 69572 - RNA, 81 nt, Homo sapiens
cccagaccaccgggcggaggcacagcacgggcgcgggcaagacacacggacgggacggcacacacgcaagccccacaagac

SEQ ID NO: 69573 - RNA, 76 nt, Homo sapiens
aggaaacagaacacggccaaccaggcaccacccccccaagaacagcaacccgccaggaccacgcagacccaccggg

SEQ ID NO: 69574 - RNA, 75 nt, Homo sapiens
aacaaagccccaggaggggagcagggcagggcggaacgaagaacgcaggagcaaagaccagacccacagagagag

SEQ ID NO: 69575 - RNA, 96 nt, Homo sapiens
acggagagaccccacgagcgccacacggccgcaccgcgcgagcacgggcggagcgaacggaaccggagaggacacagcagaagagaacacgcccga

SEQ ID NO: 69576 - RNA, 71 nt, Homo sapiens
gggaggcagaaaaaccccggaaaacgggaagagcccgcaaggaagaggcgacccggcagacagcccgaacc

SEQ ID NO: 69577 - RNA, 81 nt, Homo sapiens
acccgacaaagggcgcagacgaggagagcagggaaaggacgcacccgcgcccaaacaggagcgccccacccaagaagagcg

SEQ ID NO: 69578 - RNA, 79 nt, Homo sapiens
aagcgggccacccacaaagaacacgacacagaccccggccggaacccagggagaccagccccccccacgcaccagaaac

SEQ ID NO: 69579 - RNA, 73 nt, Homo sapiens
acggagaaaacccgcgacgccaaccacgacgaagcggaaggcagaaggccggagcccaacagaaagcccagcc

SEQ ID NO: 69580 - RNA, 105 nt, Homo sapiens
cgacagaacccaagccgagcaccccgccagcgccaccagacagcacgaccagccggagaggacggcacccgggggaggccgccggccagggacccagcccgacca

SEQ ID NO: 69581 - RNA, 82 nt, Homo sapiens
ggaagcagacgagaaaaacacgggcgccaggaacgcggaacagaaccaaaggcaggacagccagcaggccacccacaagaaa

SEQ ID NO: 69582 - RNA, 78 nt, Homo sapiens
gacacccaccacagaaacaacgaccgggagcagaaggcagcccaaggaggaaaagaaaccaaaggaaaaccacgaagc

SEQ ID NO: 69583 - RNA, 65 nt, Homo sapiens
caaggagccaccagcacggaccaggaggcgagcaacagacagcccccgagcgcaagacccgggga

SEQ ID NO: 69584 - RNA, 52 nt, Homo sapiens
gaccacgccaagagacagcgacagggacccccacgaaagcaagagaacaaag

SEQ ID NO: 69585 - RNA, 76 nt, Homo sapiens
cagcacacaggaaaaccaaacggcaaccaaggcagcgagaggaagaaaggacacaaagcagaagaaaagccacaaa

SEQ ID NO: 69586 - RNA, 65 nt, Homo sapiens
aaaccccacccacacaggaccaaagggagacacacacggggagcgccacgcagagccccgccagg

SEQ ID NO: 69587 - RNA, 73 nt, Homo sapiens
cccacgccggagaacacagagggcgcaagaagaagaagcagcgaagccggggcgaggcccaccacgcaccacg

SEQ ID NO: 69588 - RNA, 86 nt, Homo sapiens
cggcgggaccgggcggcacgcacgcgggcagggaacaggcggagcggaaggacgcaaaagagcccggaccaggaacggaccgggag

SEQ ID NO: 69589 - RNA, 71 nt, Homo sapiens
ggccagacgacaacaaagagcacgaaggaagaggcccggaaaggaaggggggaaaggccagccgaaccgcc

SEQ ID NO: 69590 - RNA, 73 nt, Homo sapiens
agcggaccgagagcgcgaaacgcacgagaaggcagacagaacgaaaaggggacaacagaccggacagcagaga

SEQ ID NO: 69591 - RNA, 70 nt, Homo sapiens
acgagaaacaaacgaccaccaaaagaaaggcaaacaagaagacaggcgagcagaaggccggcggggcagc

SEQ ID NO: 69592 - RNA, 91 nt, Homo sapiens
gaagacaaaaagaagacggacagggcacacagaaccgaaaaagagcgggcaagagaccgacagcccacagacccagacagagggagcggag

SEQ ID NO: 69593 - RNA, 79 nt, Homo sapiens
cggcgcgcggcgcgccccggcccgcccggcgccgcccgcgggagccgccgccggccacccgggccacaggagaaagccg

SEQ ID NO: 69594 - RNA, 74 nt, Homo sapiens
gcccaacgaggaacgcacgccaggagccagaggaagaccaaggaagccgaagcccggagcgagagcgagagaag

SEQ ID NO: 69595 - RNA, 37 nt, Homo sapiens
aaaggggagaagcgcaaacaagagaaccacccaaaag

SEQ ID NO: 69596 - RNA, 64 nt, Homo sapiens
acggaggagcgaccaccggaggcaaaccggccgaagaccgcgaggaaaaacaagaacaagaaac

SEQ ID NO: 69597 - RNA, 70 nt, Homo sapiens
ccagaagcgggcggcccgcgacgaagaagaagccgcagacccggcgggaaacacaaagaagacaccagaa

SEQ ID NO: 69598 - RNA, 74 nt, Homo sapiens
gagaacggacgcaagcggggaggggaaggccagcaacagaagaaagcaagcaccggggaaagcggcccgaaaca

SEQ ID NO: 69599 - RNA, 56 nt, Homo sapiens
agaaaaagcacaagagcaccaacgagggaagcaagaccagagagcaaagggagagg

SEQ ID NO: 69600 - RNA, 64 nt, Homo sapiens
acaagacgcacgggaaccaacagggacccagcagggaagaccgaggaggacccagagggagcgc

SEQ ID NO: 69601 - RNA, 80 nt, Homo sapiens
cggagcacggcccccgaggacggaggcacagcgcagcgacgagagggggcggagaacggaaaagcaccaggaagcagaga

SEQ ID NO: 69602 - RNA, 79 nt, Homo sapiens
gggccgaagcagcaggacaccgaccaggacaggacacccagcaacagaccgagaagacagcggcaaaaccagccggaaa

SEQ ID NO: 69603 - RNA, 79 nt, Homo sapiens
aaaaaaacagagccgagaaaggaagggcgggaccaacagggagccaggaccgaggaggaagaaaagagcggaagcaaac

SEQ ID NO: 69604 - RNA, 40 nt, Homo sapiens
ccccagcccgccccaaaagggacaccagcacacacacacc

SEQ ID NO: 69605 - RNA, 83 nt, Homo sapiens
gcggccgagacaaaggcaccaggccaccacagaaacaaaagcaacaaagaggaccaaaaagagccaagcgagaagagagaacc

SEQ ID NO: 69606 - RNA, 75 nt, Homo sapiens
aacagagcggcgcccagagaaacagaaagacaaaccacccagagcaaggaccgagcaggacaacagcaaggcaag

SEQ ID NO: 69607 - RNA, 80 nt, Homo sapiens
aagacgaaggaaagaaagagcaaaagaccgagaccccagaagagcggaggaaagcaggaagcagaggcaaagaagacgca

SEQ ID NO: 69608 - RNA, 86 nt, Homo sapiens
ccccgcagaggcagacccagcaccagaccaggcggcacccgccccgaggaggggaccagacacaagcccacgcaggagacgggagg

SEQ ID NO: 69609 - RNA, 78 nt, Homo sapiens
ggggcagaagagacgaagacagacacacaagaggacagggagaaagggccccaagagccagcaacagaagaaagcaag

SEQ ID NO: 69610 - RNA, 80 nt, Homo sapiens
agaccacgagccccccccagccaacccaagaccaacaccgcacaacggccacaacacagacccacaaggaagcgaagcaa

SEQ ID NO: 69611 - RNA, 80 nt, Homo sapiens
ggaaaggcgggcacccaccccgaaccagcaccccaccacaacaggagaacaagaccacgggcccgggacaccaggagcca

SEQ ID NO: 69612 - RNA, 74 nt, Homo sapiens
aaaagcccaaagagccaccgggcggaggcggaaagcaagagaagccccagcacgcagagcagacgcgaggcagc

SEQ ID NO: 69613 - RNA, 61 nt, Homo sapiens
cacgaaagcaccaacgagacccgccacacgaggaccaggccggcacgacaagacccaggca

SEQ ID NO: 69614 - RNA, 54 nt, Homo sapiens
aaaaaccccaaagaacccgacgggcgaagcgggagcggaaaccccagaagcgca

SEQ ID NO: 69615 - RNA, 83 nt, Homo sapiens
ggccccccggcggagaagaagcgcggccgcaccggccaaggcacggaggagcagacagacgccgagaagcagaggccccgagg

SEQ ID NO: 69616 - RNA, 77 nt, Homo sapiens
aaacccacccggcccccggcgccgccagcgaggcacaggagggaagggcaacaacccaccgggggaaacaccagacg

SEQ ID NO: 69617 - RNA, 76 nt, Homo sapiens
caaggacacaacccggccgcagagcccaggaaagaccacagcaagaccacgcccccagccgggggaccaggccgaa

SEQ ID NO: 69618 - RNA, 56 nt, Homo sapiens
acaggacaaaagaagaagcagcaagagagaaacagcggaaaaaaaaggagccgggg

SEQ ID NO: 69619 - RNA, 82 nt, Homo sapiens
gggcccaccccgagaccgcccccagaccagaccgcgccagaccaccaaggagccccaagggggggcaggcagcagagaggcc

SEQ ID NO: 69620 - RNA, 90 nt, Homo sapiens
gaccccgggcagcccaacgagaaccggagggcaccggagagaggacacgaggcacaggaagcaagaaaccgcacaaagccagcaacaacc

SEQ ID NO: 69621 - RNA, 50 nt, Homo sapiens
cgggccaggaaacaagcgggaagcacaggagagcaggcacgaccccagcg

SEQ ID NO: 69622 - RNA, 83 nt, Homo sapiens
gggacgccagagccggaacggcccacaccagaagccacagcagcaagggcggagaacggaaaagcaccaggaagcagagagga

SEQ ID NO: 69623 - RNA, 71 nt, Homo sapiens
gggcgaaggggccacgcgaggacaccacgccacaacaggccgggcgccccccaagaccgaagaggagcaac

SEQ ID NO: 69624 - RNA, 77 nt, Homo sapiens
ccgggaaaccagggccaacaggcgaagggagagaagaaaacacgcccagcccgagcaagagaacagggaaaagagga

SEQ ID NO: 69625 - RNA, 87 nt, Homo sapiens
gccggacggagccaacagcgcgggcagcgaaccgggggagcgaggcacgggaaggcgaggagcggaaggcgagcggagcggcggagg

SEQ ID NO: 69626 - RNA, 75 nt, Homo sapiens
cgaaaaccaacgcccccccagcacacagaggagagcgacgagaaggagcagaaaaccacagaggaggggacggac

SEQ ID NO: 69627 - RNA, 65 nt, Homo sapiens
caagcaaccacaacgacaagggcaaaaacaagagcacaaccaggccggaaaggaaaaacaccaga

SEQ ID NO: 69628 - RNA, 53 nt, Homo sapiens
cggacagcagcgcaggcaaaaaacagggcacacggcacggacagggcgggacg

SEQ ID NO: 69629 - RNA, 74 nt, Homo sapiens
cagggacccgcgaaagcggggcacaggcgggcacgcgcccagaagcaaagccagggagggaaccgaagccacgg

SEQ ID NO: 69630 - RNA, 78 nt, Homo sapiens
cgagccgcagaccagaccgggaggagcagccgcgcgccgagaagcacccgcgacccagaagacagcggaaagacccag

SEQ ID NO: 69631 - RNA, 49 nt, Homo sapiens
gaggggccaacggacgacagccaggaagaggcgcccccgcccgccagac

SEQ ID NO: 69632 - RNA, 71 nt, Homo sapiens
acaacagaagagaaaaagcaccagagcggaaggaagcaggagcagggacggggggaaaagcgcacccgggc

SEQ ID NO: 69633 - RNA, 74 nt, Homo sapiens
aggaagcagcagagcaacaagaaggccaaaaaaacccagcggaaagcaacaaaaggcacgaaggaagcacagaa

SEQ ID NO: 69634 - RNA, 82 nt, Homo sapiens
agcaaccagagggccagagggaaggacaggagcggaggacaccccggagaggacgggaggacggcagcacagggaaccacag

SEQ ID NO: 69635 - RNA, 56 nt, Homo sapiens
ggcaggagcaagaggaggagacgcgcgagagccggggggaaccacaaagaacggag

SEQ ID NO: 69636 - RNA, 82 nt, Homo sapiens
accacccgccggcacaccgaggacaggaccgacagcacaacaccgcacggggagccaagccggcccccccagcgccgccgcc

SEQ ID NO: 69637 - RNA, 48 nt, Homo sapiens
ggaaaggccaacagaacaagagagaccaggggccgccgcgccaggcgg

SEQ ID NO: 69638 - RNA, 67 nt, Homo sapiens
aaacaaaaccccagccgcccgcgcggacgcgaggccgaggccggcccaagcccccaagaagcccggg

SEQ ID NO: 69639 - RNA, 58 nt, Homo sapiens
gcggcgccgcggccgcgcggacggacgccgccgccggcgagaaggaagaaaccaaacg

SEQ ID NO: 69640 - RNA, 83 nt, Homo sapiens
caccagaccgggagccggccccgggccccaccaccaaggcacaacccgacaccagacgagacggacggcaagaacgccagccc

SEQ ID NO: 69641 - RNA, 75 nt, Homo sapiens
agcccagaagaagagagacccagacggggcgaagaggggggaagcgaggcaggaagcccagcacgccgaaggcca

SEQ ID NO: 69642 - RNA, 73 nt, Homo sapiens
ccagcggcgaggcccagagcccagcgaaacaaaccccaaccaccggccccgcagcagggacgcaccaaaacgg

SEQ ID NO: 69643 - RNA, 78 nt, Homo sapiens
gggagaagcaagacgaagaacagagaaaggggagcaagaagaaagagcagggaggagggagcgacaggaagaaagaaa

SEQ ID NO: 69644 - RNA, 89 nt, Homo sapiens
ccgccagaagagaaaaagcccaggcaaaaacacccaaccaggcacagagaaagggggcaccaccgcaccaccccggaaaggcagccggc

SEQ ID NO: 69645 - RNA, 52 nt, Homo sapiens
aaagacaggagaccaaaaagaagcgacaggaagcgacagcagaaggaagcaa

SEQ ID NO: 69646 - RNA, 67 nt, Homo sapiens
cgcccaagaagaaccgaagagacagcccgcacggaccgggaagagaaaagaggagaaaggagcccag

SEQ ID NO: 69647 - RNA, 55 nt, Homo sapiens
ggccgcaagccccggagccgaggccagagcagaaaccagcccaggaacccagcgc

SEQ ID NO: 69648 - RNA, 97 nt, Homo sapiens
ggaccgggaacccacgaggcacccggacccgcaggccgcgcagagaccaccagacaacggcaagcggagaagagcaaggccgaaccgagaggaaggg

SEQ ID NO: 69649 - RNA, 83 nt, Homo sapiens
ccgggggcccagcccgggcggcgcggccagaccccaagacgccgagacagaaacagaacggcgaagggagaaaagaccacaca

SEQ ID NO: 69650 - RNA, 86 nt, Homo sapiens
cggagcgcgaaggccgggacccggccccggcccacaggggggggcaaacccgagagaacggaaagaccacacagggaaacgaccag

SEQ ID NO: 69651 - RNA, 72 nt, Homo sapiens
ggaaaaagaaaagcacccgggacaaggcggcgaccacacccagacagaaggcccggcgggggcaacgagaag

SEQ ID NO: 69652 - RNA, 80 nt, Homo sapiens
cgagcaacacaggggcggcgcccaccacggccgaggcccgccacggcaccgcagcgcagaggaagacaagcgggagcgga

SEQ ID NO: 69653 - RNA, 60 nt, Homo sapiens
cccccgagcgggaagcaggcgcagccacaggcaaccccgcacaaacccagcgaacaacgg

SEQ ID NO: 69654 - RNA, 72 nt, Homo sapiens
gcgaccccgagcccacgcaaaggccgcacggaggagagccccgagggcccgggcagagaaagccggaagcga

SEQ ID NO: 69655 - RNA, 67 nt, Homo sapiens
acaaaaaacagacggagcggagaaagagggagacgcaccccacacaccccgagaggagacaaccagg

SEQ ID NO: 69656 - RNA, 60 nt, Homo sapiens
cagagggagacgggaaaggagaggcggcgcccaaggacgcaggaaacccggaaaggaagg

SEQ ID NO: 69657 - RNA, 75 nt, Homo sapiens
ccaaaacccccagcgcgacgggcgcaagccaaaaccagacggagccacaacagggcacggaaacaggagaaggac

SEQ ID NO: 69658 - RNA, 62 nt, Homo sapiens
ggccagcgagccgacccagcgccgaggggggggaaccacacgggggggaggacgcaccgcgg

SEQ ID NO: 69659 - RNA, 77 nt, Homo sapiens
ccgaagcgccagaccggagacggggaccaagaccccaggaacccacgaaccaaggaggagacaggcaagacggcggc

SEQ ID NO: 69660 - RNA, 77 nt, Homo sapiens
ggagagcaacaaagccgacccaacccaagggccaaagagagaaacggaagaagcaagacgaaagggcaagaagaaac

SEQ ID NO: 69661 - RNA, 90 nt, Homo sapiens
gccacgccaaggaggggcaggaggaagaacggcaaaacggaggagcagagcgaaacggaagagaaaaccgaaaaagcagaagcacaagcc

SEQ ID NO: 69662 - RNA, 67 nt, Homo sapiens
gacagcggagaggcgcagacccgacggagaagacacggaaacccggagccgcaccgcccacacgaag

SEQ ID NO: 69663 - RNA, 84 nt, Homo sapiens
caggaggccagggggcgccagaaacaacaccacaccaaagagagaggagaccacaaagaacacggacgacgggggacaggcgac

SEQ ID NO: 69664 - RNA, 72 nt, Homo sapiens
ccggccaagcacccgcagcaggccacaagcccgcgccagaccaacaagcggcagacccacaccggacacagc

SEQ ID NO: 69665 - RNA, 81 nt, Homo sapiens
cggaccccaaggaagccacggcagacacacaacccgacccgacgacccccgaagaaaggaaacaggggcgccccaccagag

SEQ ID NO: 69666 - RNA, 75 nt, Homo sapiens
gaaccgcagcaaaccacagaccaggcgggccacgaaaacgccacagagccagaccagcaccgaaaaccaccgaaa

SEQ ID NO: 69667 - RNA, 54 nt, Homo sapiens
caagcacacaacaaacagaacgcaaagaaaaccacagagaccgagcaaggggcc

SEQ ID NO: 69668 - RNA, 75 nt, Homo sapiens
ccccccggcgccgcgccggcggcgaggcgaggggacggcggggagcgcaggacagacgcccccgcgagaccaggg

SEQ ID NO: 69669 - RNA, 68 nt, Homo sapiens
gccgcggaaaggggagaagaagaaaggccagagaacaccacgacccagcggaaaaaagacccacaggc

SEQ ID NO: 69670 - RNA, 39 nt, Homo sapiens
agccaagaccacagcagcacccaggcgaaggcaggggac

SEQ ID NO: 69671 - RNA, 80 nt, Homo sapiens
cgggccgcccagaaagaccacgccacagcgcccagcgaaagccaagacaaagagacgggaacccgggagggaaaccagac

SEQ ID NO: 69672 - RNA, 76 nt, Homo sapiens
aaggggagaagaaaaccgggagcaggacacgagacacaggccgcacgcacgcgggggaccccaagggaaaccggcc

SEQ ID NO: 69673 - RNA, 66 nt, Homo sapiens
acacacaccagaaacagcgcaccacccgcaggcagcgccaacgcaaacacagcagggggacacaca

SEQ ID NO: 69674 - RNA, 45 nt, Homo sapiens
gcggcgggaccacgccggcagagaaaccgaaaagaagcagagaaa

SEQ ID NO: 69675 - RNA, 80 nt, Homo sapiens
aagcaggaagaggaagacccacaagccaagacagcaggaccagggaaggacgggaggcggcggagcccaagcaaggggag

SEQ ID NO: 69676 - RNA, 86 nt, Homo sapiens
ggaaacagcaagcgaagccgaaaaagcgcccgagacgggcccgccgaaagccaagaaggacaagaaggggagaagaaaagaaacgg

SEQ ID NO: 69677 - RNA, 54 nt, Homo sapiens
cgccgagggcgaggcggacgcgcggcgcgcaggcgaccacagcacacaagccgc

SEQ ID NO: 69678 - RNA, 71 nt, Homo sapiens
agcacacgaaagaaggaggaccaagaaacagcgagcagcaggcaaagacaccgccgcccagccacaggacc

SEQ ID NO: 69679 - RNA, 85 nt, Homo sapiens
caccagaaagcaaacgagggcacacggcgggggcgggccccggccagggcccaggcagccggggcggaacccccagacagcacgc

SEQ ID NO: 69680 - RNA, 72 nt, Homo sapiens
cccggcccgcgggaagcaggacgcgccgcgccccaagggggcagcacgccgaaggagagaccagacaacagg

SEQ ID NO: 69681 - RNA, 56 nt, Homo sapiens
aagcccacaccccgcgaaggaggacacggaccaaaggaggggcagcagcaggacag

SEQ ID NO: 69682 - RNA, 104 nt, Homo sapiens
cgcgccccccgccgccgccgccgcgcgccaaagcgcgccgccccgggcaaaagaacgaccccgccaacaccggaacaccggccagcagaaccagaagcgcacgc

SEQ ID NO: 69683 - RNA, 79 nt, Homo sapiens
cacccgaagacccccagcagcagacccaagaagacagaccccgaggagacgccccaaagcccagagaagaccagagagg

SEQ ID NO: 69684 - RNA, 64 nt, Homo sapiens
aagagcgcaccaacccccacacgcaacgagcaggagaccagaaggcccccgcaggccccaggga

SEQ ID NO: 69685 - RNA, 73 nt, Homo sapiens
acacgccgccacccccaccggagagccggccagggcagcgcggacacaccgcaggcgcgggccccagcccgcc

SEQ ID NO: 69686 - RNA, 80 nt, Homo sapiens
caggcccagggagaaagggagagccaggacagaaggacaaggccaggaccaccgggaccaacgagggaacagaaagagga

SEQ ID NO: 69687 - RNA, 66 nt, Homo sapiens
ccacccacgggggccaaggaggaagggcccagacaggggccgacgagaagaacaggaacaaccgac

SEQ ID NO: 69688 - RNA, 84 nt, Homo sapiens
aaaggaacggcaccgcggacagagcagacagaacagacaaggggacacgaaagaacgacaggcagacagaaaaagagaagagac

SEQ ID NO: 69689 - RNA, 59 nt, Homo sapiens
gcaccaggagccacagacgaccggcacacagcagagaggaccgacaccaccaaccaagg

SEQ ID NO: 69690 - RNA, 66 nt, Homo sapiens
aacagggagaggccgcggacacaggagaccagagaggacaaccaaaagcaccgaaccggaacaaag

SEQ ID NO: 69691 - RNA, 73 nt, Homo sapiens
gacaaaggaacaaccaaacaaaccggcaacacaaacaacacaggcacggccaagagagcgaggccaccaggac

SEQ ID NO: 69692 - RNA, 54 nt, Homo sapiens
cacgggcacaggggccccgccagcaaggcaagccagacaacaggccaaagccag

SEQ ID NO: 69693 - RNA, 95 nt, Homo sapiens
gcaagacggcaggcgagagccgacccaggccgccggccccacaggagcgagaagaggcgacaccagggcccaaagaacaaccgaaaggaagaagg

SEQ ID NO: 69694 - RNA, 88 nt, Homo sapiens
aagagaaaacgaggacccaagaagcagaaggagaacaagccaggaaaaccccgaaaacgcaagaagcggaccaaagacagagacaagc

SEQ ID NO: 69695 - RNA, 83 nt, Homo sapiens
cagcagggaagccacccccccggaccccacccacacccccccccaccgcagcagcacccgacaggaacgggcaggcaaaaggc

SEQ ID NO: 69696 - RNA, 78 nt, Homo sapiens
cagcgacacaagcggacagaacagacgggacccccagccaaaggcaaaggggaaacacccagcagcaacccaggcgca

SEQ ID NO: 69697 - RNA, 66 nt, Homo sapiens
accggaagaagaaacagccagggaccacgaagaaagaccgaagcaaaggaagaaggagcaagccag

SEQ ID NO: 69698 - RNA, 75 nt, Homo sapiens
cggcccacgacgggacacgccccggaggggaaaggaggacaaaaggaaaaaaaaaaagggaagacagagaggcgg

SEQ ID NO: 69699 - RNA, 81 nt, Homo sapiens
aggcgcagagacggggacacgaaaagcccagccacgggggacagaaccaccaaaaggccagggccggagcaagccacagcc

SEQ ID NO: 69700 - RNA, 85 nt, Homo sapiens
ccgccgggaggaggcgcgggacgggcggcgcggggcggcgggggaccgagcgccggcggcgggagcggcggagccaccgcgccca

SEQ ID NO: 69701 - RNA, 83 nt, Homo sapiens
cagccccaggaacaaggaaaagcaccaggcaaaccaccacacaccagcaaagggggccgacacaagggaagggcacccacccc

SEQ ID NO: 69702 - RNA, 77 nt, Homo sapiens
gaaaggaacccacccgaaggcgagacaccgaaacccaggaccaccacgggcccaccagcgggaggagagccaaccac

SEQ ID NO: 69703 - RNA, 72 nt, Homo sapiens
acggcagcgagacggccggccggccccggcagggcaggacaggcacccgaaccgaagcagaaccgagaaaac

SEQ ID NO: 69704 - RNA, 75 nt, Homo sapiens
cggagagcccaaacaccaccaccaagggaccgccacgaccagcagcccggagcccccccagccggcagccccggc

SEQ ID NO: 69705 - RNA, 62 nt, Homo sapiens
acgacggcaggaaaccacgaccggcgagacgacgggaccgaaggaccccgccagagacaacc

SEQ ID NO: 69706 - RNA, 86 nt, Homo sapiens
cacagagagccggaaaggggcaaaaaccccggagcccgaccaggacccgagaacaagacacaggggccagcagcccccccgagggc

SEQ ID NO: 69707 - RNA, 80 nt, Homo sapiens
gggaaaagcagaaccagcaaagaggagcgaagcggagcgcaggggaggcagggagcccagaaagaagagaaaaagagaga

SEQ ID NO: 69708 - RNA, 86 nt, Homo sapiens
gccgcccccagggagggagccgcagccgagggacaagaacccaagaaacaggaaaaaacccaaaacaccaaaaggaccagcgagaa

SEQ ID NO: 69709 - RNA, 80 nt, Homo sapiens
agaaagaaagaggccacgcgcggacggcgcgagggagagggacaagccaaggccgcgagacgaacaggaggcagaaccaa

SEQ ID NO: 69710 - RNA, 74 nt, Homo sapiens
gcgccgggagagaaggaaacaagagagaaaaggaacagccgaagccaggggcaagcgaaaccacagaagaaagg

SEQ ID NO: 69711 - RNA, 80 nt, Homo sapiens
gggccacccccacacgcccccagccaaacaggaacgcaaggcggggaaaaaaaggcagcacacagacgcagcaacgggca

SEQ ID NO: 69712 - RNA, 76 nt, Homo sapiens
ccagccggcaccgccaccccacaggcccccaccaggccgcggcaggggggccagcccacaaaacacagccagggag

SEQ ID NO: 69713 - RNA, 62 nt, Homo sapiens
aagagagaaaaaccggacccaagagagaggagcgagaggaagcggaagaaaaccaacaaagg

SEQ ID NO: 69714 - RNA, 77 nt, Homo sapiens
cggcgagagccgcaccgccaacccccgagcaagacggggccgacagaacagaaaggcaaaaagagacacacagggaa

SEQ ID NO: 69715 - RNA, 69 nt, Homo sapiens
cgagagaacgaaaaacagaaacgagccagacgaaacagcagacaaacagcagcaggcgcaaaaacgaac

SEQ ID NO: 69716 - RNA, 75 nt, Homo sapiens
cggcggccgggccccgagacggggacggcgacgaaacccggggaacagaggcaaacagaaagcacgggaagagac

SEQ ID NO: 69717 - RNA, 67 nt, Homo sapiens
cggggggaggacccgaccaggcccacgacacaaggcccacaaaggccgagagcgcccaaaggggacc

SEQ ID NO: 69718 - RNA, 65 nt, Homo sapiens
cacccccgcccgaccgcccagcccccccacaggaagccacagggaggaggaccagcgggagggcc

SEQ ID NO: 69719 - RNA, 68 nt, Homo sapiens
ggaaaaccacaccaagggaaggaaggaccagagaaacgaaaggagccaaaaaccgaacacccggaagg

SEQ ID NO: 69720 - RNA, 79 nt, Homo sapiens
agaacgcagcccaggcaggagcagagaccgggaggcagcaacccagaggccaccgccaagcaaaacaaaaccccaagcg

SEQ ID NO: 69721 - RNA, 68 nt, Homo sapiens
gggagaaacagcaacagaaggacggagaagcgaaagccagaccggcaagagcggaagaaagcaccaaa

SEQ ID NO: 69722 - RNA, 65 nt, Homo sapiens
aagacacgggagccagggaggaccagcggacccgccgaagcagacaggggaccccgcgcccaccc

SEQ ID NO: 69723 - RNA, 77 nt, Homo sapiens
cggaggccacgaacacgccggagccgccaggacgggccaggcgacacgcagaacaaccccaagaccgggggcacgca

SEQ ID NO: 69724 - RNA, 84 nt, Homo sapiens
caggcagaggcgaggaaaaaaccacgacaaaaccacccacaaggccagcagagcccaagggcgccagccaccacccagacgacc

SEQ ID NO: 69725 - RNA, 82 nt, Homo sapiens
gccacggcagacacacaacccgacccgacgagaagccaaggaaagaccagaaagaagacaccgaaaaaccgggaaagaaaag

SEQ ID NO: 69726 - RNA, 72 nt, Homo sapiens
gacaaaccgaaaggacagccaaagcagaacggaaagcgacaaaagcggaaccaggagccgacaacaacccga

SEQ ID NO: 69727 - RNA, 80 nt, Homo sapiens
cccggcccgggggccgccccggcgagccgcgacggcgccgcccacggcgagagcagacagacagcgaacacggaagccac

SEQ ID NO: 69728 - RNA, 69 nt, Homo sapiens
agcacacccgacgcgcagaacccaccagacaacaagcccaagccggagaaagcacgagaaaagccaaag

SEQ ID NO: 69729 - RNA, 61 nt, Homo sapiens
gcggcagcaagaacagagagagaggggacagacgagagaacgaggaggaaaccaaacagag

SEQ ID NO: 69730 - RNA, 57 nt, Homo sapiens
gaaacaaggcaacagaaagagcaacagcagggcaacaggaaccggccgaaccagacc

SEQ ID NO: 69731 - RNA, 89 nt, Homo sapiens
cgagccggcgacggacgcggcgcgcgaccgacacgaagacaccacgacagcgaggcagccagcagcagccaccagagcccaagagcaca

SEQ ID NO: 69732 - RNA, 68 nt, Homo sapiens
gacagggccggcaccaaccaccaggagccgaagacgaggaaaaaggggcgagcaacgagacgggcggg

SEQ ID NO: 69733 - RNA, 88 nt, Homo sapiens
cgccccaagaagaggaagccgagagggggagacccaggcccagaggaagaaagcaagcaaaggagccccggaaaaacggcgagcgaac

SEQ ID NO: 69734 - RNA, 77 nt, Homo sapiens
ccgccgaaggcgggcgcagcggcggagcggagcggagcccggagggacacacagaaaggaggagcccaggaccaccg

SEQ ID NO: 69735 - RNA, 80 nt, Homo sapiens
gggagacagaaacgaggcgcccccagcagcaggaggacgacgacaaggcacaagaaggagaacaagaagcaaaccaagaa

SEQ ID NO: 69736 - RNA, 80 nt, Homo sapiens
cgagcccagccgaaggagaagggggacgagccccagcacagcagcagccagaccagcagcaacaggcccagcagccacgc

SEQ ID NO: 69737 - RNA, 80 nt, Homo sapiens
aaaaagacccaccaaggaagcagcggccacgccaggagagcagccagcgggacagaaggaggaagagggagcaccacgga

SEQ ID NO: 69738 - RNA, 73 nt, Homo sapiens
cgggccgagacacgcagcggcggccagggaccagaggagagaaagaacccacgcaggacgacagaagaggccg

SEQ ID NO: 69739 - RNA, 64 nt, Homo sapiens
gcggaaagcacgcgcacagaggggcaacagaaagccacaaccggacaagaaaaaaaagaaaacg

SEQ ID NO: 69740 - RNA, 71 nt, Homo sapiens
caaacagcaacaacgggccggaagggcaaaacacaaggcaagggacgaaagacaacggcaagcggagaaga

SEQ ID NO: 69741 - RNA, 57 nt, Homo sapiens
cggagcagagcgacagcgggcgcagcccgaggacgagagaccggcgcaggagggcgc

SEQ ID NO: 69742 - RNA, 71 nt, Homo sapiens
gcagggaacaacggaggaggcaccaccgaacacagcccgaccacccaaagaagaggaggagagccgacagg

SEQ ID NO: 69743 - RNA, 73 nt, Homo sapiens
cagcgaggcccacagaaaagccacaacccagacaagagcgagcaagccgccgcagcaagccagagaccaaagc

SEQ ID NO: 69744 - RNA, 79 nt, Homo sapiens
cgaagccccacgcgggacgccacacgaaggccaccacaaaagcagccacaaggagaagagaaggagcgcgggcgcgcca

SEQ ID NO: 69745 - RNA, 77 nt, Homo sapiens
agaggccgaaaaacggcacacccaccaagcacccaacagaagaagagagcgcagcaaaaccaacccaccaaaaagcc

SEQ ID NO: 69746 - RNA, 77 nt, Homo sapiens
ggcgacccccaccgagacgaagcgggcggcgaagagacagccagcggaacaccccggacgggacgccggcagccaag

SEQ ID NO: 69747 - RNA, 81 nt, Homo sapiens
gagacggagaaaccaacagcgggaagaaaaaccgggcccacgaacacacacagacccaagggcccgcagcaaggcgaagga

SEQ ID NO: 69748 - RNA, 84 nt, Homo sapiens
gaggaagagaagcagaaggaagagaggaaaggagaaggagccagagaagaggccaagggcgagacccagaagggcacagaagga

SEQ ID NO: 69749 - RNA, 52 nt, Homo sapiens
gcgccacaaccccaggccacgagcggcacaggacagaaccgcaaacaacgga

SEQ ID NO: 69750 - RNA, 80 nt, Homo sapiens
ggcgcgcagcacgcgcggaggccggcccgccgggcgccgcagaccccaccgaacaagccagccagcaccacccaacacca

SEQ ID NO: 69751 - RNA, 72 nt, Homo sapiens
gcggcaggaacgcacccggcggccccacgcagccacccaaaaacagggaaacacaaagaagacaccagaagg

SEQ ID NO: 69752 - RNA, 71 nt, Homo sapiens
aaggaacgacgcggaccagaagccagagcgaggacgccggcagcccgagaaaagcacagcacccgcaggcc

SEQ ID NO: 69753 - RNA, 64 nt, Homo sapiens
gcaacacccgagaacggcgggaagagaagacacgagcacaaacgccagaagacagggccagaaa

SEQ ID NO: 69754 - RNA, 50 nt, Homo sapiens
gagacagccccgaaaacacggggcaccagagacagacgcccaacaggcac

SEQ ID NO: 69755 - RNA, 60 nt, Homo sapiens
caggcccaggcccgcgacccgggcagagaagagaaacagaagcggagagacagggacaag

SEQ ID NO: 69756 - RNA, 68 nt, Homo sapiens
cagaccccacgaacacaaaggaacccacaggacccggaaacagggacaccgaaccacccaacagcaaa

SEQ ID NO: 69757 - RNA, 76 nt, Homo sapiens
cggggacacgcggccccagcgcccggccccccaccggacacccgcggaacccaggagaaacgagagggacagcaag

SEQ ID NO: 69758 - RNA, 78 nt, Homo sapiens
gccgcgacaaggcgacccgagggacggaccaaggagcggcgcggggaccaaacccggagccagccaccccgacccaaa

SEQ ID NO: 69759 - RNA, 41 nt, Homo sapiens
gcgcacgggcccgccgccagaacgggggcaagaccagagac

SEQ ID NO: 69760 - RNA, 76 nt, Homo sapiens
ccgcgaaaggaggaggcacagaaacaaagcagcagaacacaggaacacagagaagaagaggaagcagcagcacagg

SEQ ID NO: 69761 - RNA, 54 nt, Homo sapiens
cgaggacgaggcggcgccgccgggcgggagccgggccccgaggaccgagacagg

SEQ ID NO: 69762 - RNA, 76 nt, Homo sapiens
cacaacggaaggacaagcacacaggacaagcaaagccaacagccagggccaaaacccccaaaacaaggaagcacac

SEQ ID NO: 69763 - RNA, 87 nt, Homo sapiens
gagggaggagcggggacggcgacccaggagaggagagaacgcccgcgaggccaggggggggagacaagggagaggacgcgccccagg

SEQ ID NO: 69764 - RNA, 70 nt, Homo sapiens
gaaaaccgacgccaaaagcagaaagagaaccaaaggcaagaaccggagcaggagaaaagccggaaagaaa

SEQ ID NO: 69765 - RNA, 79 nt, Homo sapiens
cacaacaagcccagcgagacgacaccgaggccagccagggccagaagcccccaggaggagaacgagcaacggaagccag

SEQ ID NO: 69766 - RNA, 72 nt, Homo sapiens
aacagacaggaccacgcaaccacccacacagaaagccagggccggagggagaacagagcggccccccccacc

SEQ ID NO: 69767 - RNA, 81 nt, Homo sapiens
cagagccgggcaaggaacacgcccgcaacagaagccaggcaaggaacgcggagaaacaaaaggcaggaaaggccaagccca

SEQ ID NO: 69768 - RNA, 71 nt, Homo sapiens
cacgaaaagaaggggaacccggaccgcgaaggcgggggagacgaaaacaccagcccaggcccacaggggcc

SEQ ID NO: 69769 - RNA, 78 nt, Homo sapiens
ggcaggccgacgcgcacacacagccagagccaggagcagcggacgccacaacaaagagacagggccgacacgcccccg

SEQ ID NO: 69770 - RNA, 79 nt, Homo sapiens
gccaccggaccgggcgacgccacggccgcacacacgggaccggacaacaacagggcccacgccagggagcgggaggacg

SEQ ID NO: 69771 - RNA, 95 nt, Homo sapiens
ggcggcggcccaccaaggaaagggcgacagcaacagccgccggcggaaggggggggaccagcacgaaggaaggaagaggaggacgccaggaagca

SEQ ID NO: 69772 - RNA, 82 nt, Homo sapiens
gaaggccgggacccggccccggcccacaggggggggcaaacccgagagaacgggagggaaaaaaaagaagacaacaaggcca

SEQ ID NO: 69773 - RNA, 72 nt, Homo sapiens
aggaggcggcccaaggcacaaggaccgggaggcacggggcggaaaccacagccccccaccgccagaaccccc

SEQ ID NO: 69774 - RNA, 71 nt, Homo sapiens
cgccacaccggccaagaggcgaagcccagggccggcacgagcacacgacagcggaggcgcaggccaggggg

SEQ ID NO: 69775 - RNA, 69 nt, Homo sapiens
cagcgcgccacccagaccagccagaggccagcaagcggaaaaggaaaccagaaaaacggagccgaaccg

SEQ ID NO: 69776 - RNA, 64 nt, Homo sapiens
cccccaagggcgggaacagaacagagaaaaggaggccggacaaaaacccacaacgccgcaaaac

SEQ ID NO: 69777 - RNA, 65 nt, Homo sapiens
aaaacaaaaaggccagaaagaggagcagagacgccggacagggcccaccggaccgggccacagag

SEQ ID NO: 69778 - RNA, 74 nt, Homo sapiens
cgacaagagaaagaaaaacaagaacgaggaacacgaacaggaacccgcaggcccaaccaggcccaccgccaacg

SEQ ID NO: 69779 - RNA, 73 nt, Homo sapiens
ccagacaaccggagccacgccccacgaccgccagggggagggggggccgcaggaggacaccccgcccaggggg

SEQ ID NO: 69780 - RNA, 79 nt, Homo sapiens
ccgcgggcgcaagaaccgcggcaggagaaagacagcaaagaaaaggagaagaaaggaaaaaaacaaccccgggcacccc

SEQ ID NO: 69781 - RNA, 78 nt, Homo sapiens
gaaaaaggcgacgggcagaggaaggcgacagcggacacacccaggcggagacaaccagagccagaggagagagcggag

SEQ ID NO: 69782 - RNA, 67 nt, Homo sapiens
aaggcccgggcgggacgcggaaaccgacagcgcagccagccgcaacgagcgacgccgacaaaggagg

SEQ ID NO: 69783 - RNA, 73 nt, Homo sapiens
cccaggcgcccggagcaccgaaacgccgaaaacgagccgaaaaaaggacaccagccaggcgcgggggagccag

SEQ ID NO: 69784 - RNA, 74 nt, Homo sapiens
acaaaaacgcacacaacgacccagcaaaccaacggcggaaaacccgaagcagaagcccgacacaggcacaagac

SEQ ID NO: 69785 - RNA, 71 nt, Homo sapiens
acaagaggcaccggaagagaccaaaacaacgaaagccaaagcagacccccaagcgagcggagcggaaggag

SEQ ID NO: 69786 - RNA, 81 nt, Homo sapiens
ggggcgcgcccgccgacggggcaaagaaaaaggagagaaaaagaggcaaaacaacaagaagaaaagagaaaaaagagagcg

SEQ ID NO: 69787 - RNA, 62 nt, Homo sapiens
gccccccaccagaggaagccacaggcacagccagcagcccgggcagagggcaacccggcccc

SEQ ID NO: 69788 - RNA, 35 nt, Homo sapiens
cggggaggccaggagaaggaaacacaaagaagaca

SEQ ID NO: 69789 - RNA, 79 nt, Homo sapiens
cagcggcaccacggcgacgcacaaggccaaccaagccccgagcagacccagccgaaaccaaggaaggggcaaacagaaa

SEQ ID NO: 69790 - RNA, 72 nt, Homo sapiens
cggccgaggagaaaaggcagagagcacaggagacccggagacagggccaaccgccaggaaggaagagggaca

SEQ ID NO: 69791 - RNA, 80 nt, Homo sapiens
gacaggaccccaggcccagccccggaaaaagagaacggcaaagaaagcaacggccgccgggacagaacggacgggcagag

SEQ ID NO: 69792 - RNA, 80 nt, Homo sapiens
cgggaaggccaacaaaaaaaggaacgggaagaaaaagcggggaaaacaaaaaaaagaaggagggaagagggggccaggac

SEQ ID NO: 69793 - RNA, 76 nt, Homo sapiens
aacgcacaaagggagcagggagaggagcgggaaacgggagggaaccagcaacaagccggaacggagcacagccaac

SEQ ID NO: 69794 - RNA, 97 nt, Homo sapiens
agcaagcaccgaacaaggggccccaaagggcgaaacacccaaggcggcgcaaaagggacccgacacaggacaagagacgggaaccagggcccacacc

SEQ ID NO: 69795 - RNA, 80 nt, Homo sapiens
ggaggaacgcccggccgcgcccacaagaggagcgcacgggaacacaccgcccagccacgcgggaaggccaaccgaaccgg

SEQ ID NO: 69796 - RNA, 78 nt, Homo sapiens
acggccaggaagccgaggcccggacccccagggccgaggaaacaaggggaaccagcggcgagccgcccgcacggaaag

SEQ ID NO: 69797 - RNA, 102 nt, Homo sapiens
cacggacccaccagagagacccacagagaggagcggaaaacacgagaaccggcccagaggaggagaagagaggagagaggacgaaacacaccaacaagggaa

SEQ ID NO: 69798 - RNA, 76 nt, Homo sapiens
ggccgaccaaaccacaccgaaggaagccagacagccgcaacacaagggcgagggccagagcaagagagcaccagcc

SEQ ID NO: 69799 - RNA, 74 nt, Homo sapiens
aaacacaggacacgcggcagagaggaacgagggggccaccccaagaagacacaaacaaggagggacacccagca

SEQ ID NO: 69800 - RNA, 57 nt, Homo sapiens
gaaggcgggaagggaagcggccaaggcacggaggccgcggaagcccggggcggcgac

SEQ ID NO: 69801 - RNA, 83 nt, Homo sapiens
gagcagccaggaaacccgagcaagacacaacagggcacagaagagacgaaagggcgagggacgaagaaagaaagaaccgagag

SEQ ID NO: 69802 - RNA, 80 nt, Homo sapiens
ggcaccccacaggcccgcaagcgggaacgcccgcggacggcagggcgcgacaagaagcgcccgcccgacgagcggcccgc

SEQ ID NO: 69803 - RNA, 60 nt, Homo sapiens
cgacaggggaacagacagaaggagcaggaaccaaaggaggacagcagcggacggccggac

SEQ ID NO: 69804 - RNA, 81 nt, Homo sapiens
ggagaggcaggcgccgagagggcgggccagggccgcacccggagaccgcgggcacgcgcaccaggcggagagaagaggggc

SEQ ID NO: 69805 - RNA, 83 nt, Homo sapiens
acaggcggcgaagaggcggagggaacgaaggggacgggagcggcggcgggggcacagccaggaaaaaggaggcggcaacaggg

SEQ ID NO: 69806 - RNA, 79 nt, Homo sapiens
aaaggacgccgcggccccaggcgcgcggagagcagggggaaaagcccccaaaagacagagcaacccacagggaagcaaa

SEQ ID NO: 69807 - RNA, 39 nt, Homo sapiens
acccgccgagcagcagaacgccggcgccacaacccagcc

SEQ ID NO: 69808 - RNA, 82 nt, Homo sapiens
gacagacaggcggcggccggaaggcggcaagcccggcagcgggaacacagagagcgaagccagccccaggacccaggaagcc

SEQ ID NO: 69809 - RNA, 73 nt, Homo sapiens
gcacgcacgaaaccggcaagccagcggaggggaagaagacagccggcaaagggagacaaaacaccagaccaac

SEQ ID NO: 69810 - RNA, 49 nt, Homo sapiens
cagcgcccagcccccaggcgaggagaagagacaacagcccaagacacag

SEQ ID NO: 69811 - RNA, 71 nt, Homo sapiens
aaaaggagcaaaaggaacacaacagcaaccggaaagggccaaccggcgcacagggagcagaagggacgaga

SEQ ID NO: 69812 - RNA, 74 nt, Homo sapiens
acaacaccaggagcagcagggcaggggccagcaacagcgcagcaagaacgaagaggcaccccacacggcaacac

SEQ ID NO: 69813 - RNA, 80 nt, Homo sapiens
ccgcagccccccgccccagaaaccccaagcaccggggacgaaaacaggcgcggaagagggagcgcgaaggagcgcaccag

SEQ ID NO: 69814 - RNA, 66 nt, Homo sapiens
acgcaaccgaagacgcagaggaaaagacaggggagaaagaccagggaggagacccaccagaacccc

SEQ ID NO: 69815 - RNA, 74 nt, Homo sapiens
gaagccgcgggcggcggccgccaccgcagcgggcaacacgcccccccagagaaaaagcccggagccgacagcaa

SEQ ID NO: 69816 - RNA, 78 nt, Homo sapiens
accagcccagagggaaagcacaccaccccagccaggcgccacccagcccagcaagagcaccggggcggcagcaggggg

SEQ ID NO: 69817 - RNA, 72 nt, Homo sapiens
ccacaggcgcaagcagggggaggcgaagaaacccgaaacgccaccaaagggagaagaacgcccgagccgcca

SEQ ID NO: 69818 - RNA, 83 nt, Homo sapiens
gccgggcgggacgggggggcggcccggccccgcagcaggaggcaaagggaccccaagaaaccaaagggcaagagccgcagccc

SEQ ID NO: 69819 - RNA, 61 nt, Homo sapiens
aggacagcgggaagcgaaagaacgcagaggcccacagcaagccggagcgggcagggcacac

SEQ ID NO: 69820 - RNA, 82 nt, Homo sapiens
ggagccgcgcaaaggccccggcaagaagccgagagcggcccaggaggaacaaccagcccacccggagagggcacgcgcgggg

SEQ ID NO: 69821 - RNA, 73 nt, Homo sapiens
gggcaacgagaggcccagagggcagaagcacaacacaccgccagaagaacacgcccaccaagaccggcgagac

SEQ ID NO: 69822 - RNA, 74 nt, Homo sapiens
gggcgcgccccagcacccgccccggggcaccacccccaaggaaggcccagggcagccggaaccaagggaccagc

SEQ ID NO: 69823 - RNA, 75 nt, Homo sapiens
aacacgccaccacgaagacacagggaccaagcgagagcccgaagcacagcagaacagccaggccgccgcggcagc

SEQ ID NO: 69824 - RNA, 66 nt, Homo sapiens
accaccacccccggagaaaaagaaggaaagacaaaacaggaaccggccgaaccagaccggagcagg

SEQ ID NO: 69825 - RNA, 71 nt, Homo sapiens
gaaaagcgccaaggaaaaggacgagaacgccgcgacagaaagcgcaaaaaccagacaccccacaccaccac

SEQ ID NO: 69826 - RNA, 74 nt, Homo sapiens
acggagagaaacgcacaaagaaagaagggaaaaggaccaacccaaccaaacagcagcggaagaaagggagaagg

SEQ ID NO: 69827 - RNA, 41 nt, Homo sapiens
gccccgaccgccgaacaagaaaggaaggcggaggaaggcgg

SEQ ID NO: 69828 - RNA, 74 nt, Homo sapiens
caggagagcgcggaggcgggagcagcaggacgcaccgccaccaggaccgaggacaaccgcaccagaaaaggacc

SEQ ID NO: 69829 - RNA, 76 nt, Homo sapiens
cccacgcgaccccggggccacccaagggaacgaagaaggacagaacggacaaggcagagcaaggaaaagacggcca

SEQ ID NO: 69830 - RNA, 71 nt, Homo sapiens
gaaagcgaccggcagagcgcaaaaagacggaagaggcgcgaggacacgacgcaagacacagacggaccaaa

SEQ ID NO: 69831 - RNA, 80 nt, Homo sapiens
ccaaccccgacacggcgagggcgccacggcagggggagcgaagaaaccgcaaaggggagaaaaacccgaacaccagggag

SEQ ID NO: 69832 - RNA, 80 nt, Homo sapiens
gccggccccgccgccaagaggagcgagcggacccgcgagggcaccacagaaaagcaaggcgaaggaggacaggagacgac

SEQ ID NO: 69833 - RNA, 79 nt, Homo sapiens
agccacgagaaagcggcagccagaccacgggagaggaagcaacagcggggagggaggaaaaagggccaacacccagaaa

SEQ ID NO: 69834 - RNA, 75 nt, Homo sapiens
gcccgccacggcgccgagccgcggccgaccccgacaggggccccaccagccaacaccccccccagaaggaagagg

SEQ ID NO: 69835 - RNA, 32 nt, Homo sapiens
aacaccaccaccaagggacacaggacaaggag

SEQ ID NO: 69836 - RNA, 82 nt, Homo sapiens
cgcgccgggcaccgaggaccagccaagacaggagagccacaagaagaggacagcagcagacaaagaacgcgaacagcccagg

SEQ ID NO: 69837 - RNA, 84 nt, Homo sapiens
ggaccgcgcggacccggccgggagaagcagcagcgcaagagccaggaccccaggagcgggccagcccgcccccaggagggcagc

SEQ ID NO: 69838 - RNA, 71 nt, Homo sapiens
gggcgcaccacagagaccggccaaaccacccagcagcgaaccagacccagggggcagaaggcaggcaagga

SEQ ID NO: 69839 - RNA, 40 nt, Homo sapiens
aggcggcgggcagcgcccgggcggagaacggaaaagcacc

SEQ ID NO: 69840 - RNA, 51 nt, Homo sapiens
gacaaagaaaacaagaaggacggcaccagacgacaagacaacaaggccagg

SEQ ID NO: 69841 - RNA, 70 nt, Homo sapiens
acagagcaaggggaggagcaaccaccgagacagggcccaccagaaaacacgaaggagaagcgcaaaggaa

SEQ ID NO: 69842 - RNA, 80 nt, Homo sapiens
gggcagccagggcgggaagcagagagcgcagaagacaggacaaaaagcccacacaacaccaggaggaccgaaagacacgc

SEQ ID NO: 69843 - RNA, 75 nt, Homo sapiens
ggagcaggggcgcagcgcggccgcggagacagggagacccggggcggaagcacaggaagagggcggcacgcggcc

SEQ ID NO: 69844 - RNA, 112 nt, Homo sapiens
aaaggaacaaagggaacacgcgaccagcgcccgagccccggccgccgccgcgagcaccgaaaaggggcccgggcagagggaaagcagaggacggaacaacccgggggaccgc

SEQ ID NO: 69845 - RNA, 80 nt, Homo sapiens
aaccgcgagcacccgagaggaccggcgagggcacaggaggcggagcaagcggggagaaaccggggaagcgacgaggaagc

SEQ ID NO: 69846 - RNA, 85 nt, Homo sapiens
agagcggaccgagagcgcgaaacgcacgagaaggaaggaagggaacacggacgacgagacacgaccaacacaggcgaccaaacga

SEQ ID NO: 69847 - RNA, 91 nt, Homo sapiens
gaaggccacacccaggcagcaagggcaccgcgagcaagagacccagaggagaaggaaggagcagaggacaaaaggaaaggaaagaggagca

SEQ ID NO: 69848 - RNA, 59 nt, Homo sapiens
gcgcgccggccccaacacggaccgggaggcaccgccccaacccccccccgcccggagaa

SEQ ID NO: 69849 - RNA, 52 nt, Homo sapiens
ccggccaccccccagaaaacgacaaacagggaccagacaggcaaaacaccag

SEQ ID NO: 69850 - RNA, 75 nt, Homo sapiens
cagaacgggcagagaccgcaggaagaagcgaagagccagaggagcagccaagaagccccccaggggcccgcagac

SEQ ID NO: 69851 - RNA, 79 nt, Homo sapiens
ggcgaagcccaagccccgccccacgccacagaggccgcgggagagcgggggcgggaggcgggccccgggggcagcaccc

SEQ ID NO: 69852 - RNA, 77 nt, Homo sapiens
gagaaagaacccaaaaccacgggcagggaagaagcagccgagccaccaggccaagggaagggcacgaacgaagggaa

SEQ ID NO: 69853 - RNA, 79 nt, Homo sapiens
caggacacacaaagagggagaacagcacagccagacccaaggcgcggcccaaggagcagggcgcaccgggagcggagga

SEQ ID NO: 69854 - RNA, 83 nt, Homo sapiens
cggcagccacccaccgccgccgcccccaggaagggccgggccggggcacgggcccacggccccccaccgggccaccccggggg

SEQ ID NO: 69855 - RNA, 70 nt, Homo sapiens
ccaacccaccggcacgacaggcagacggagaacaggacacaaggacgacacccacacggagacagccaag

SEQ ID NO: 69856 - RNA, 81 nt, Homo sapiens
gaggacgcgggccgaggagagcggaggaggggccggaaagccagcacgcagcaccgaccaccccacccaagggagaggcag

SEQ ID NO: 69857 - RNA, 72 nt, Homo sapiens
accacccaaaaggagacccaccaagcaacgggacacagagggcgccagcagagggcaggcacgagcaaggag

SEQ ID NO: 69858 - RNA, 78 nt, Homo sapiens
gaacagaaacgccacgaaccaagagaggcaaaggaagaacaacagaggaccccagggaacagcaaaccaagccagaga

SEQ ID NO: 69859 - RNA, 75 nt, Homo sapiens
gcgcaaggcgccaggaggaccggggcgggagagcgacccgggccggcagacggcccgccacgggccccgcagccg

SEQ ID NO: 69860 - RNA, 72 nt, Homo sapiens
gaacccagcccacaccacaacacagaacgaagagaagaagcgagcggcgcgagggcggcccgcagaagagca

SEQ ID NO: 69861 - RNA, 74 nt, Homo sapiens
gaaacgcccacaccaagaaaaacggcccgacagagaaaggcacaacccagaccagagaagcgaccagacgcacc

SEQ ID NO: 69862 - RNA, 60 nt, Homo sapiens
cgcgggacgagccagagcgaagcgggaaggcagagcagcacgcgaagagacagaaaccag

SEQ ID NO: 69863 - RNA, 79 nt, Homo sapiens
cgcggcccccccccggagggaaaaggcccggcgaggacgccccaaaagcagacccgcacgaccacccagcagggcggcc

SEQ ID NO: 69864 - RNA, 59 nt, Homo sapiens
cggagcccaggccggggggaggcaccgcgccgcacgcgcaggaaaacgaacggccgaac

SEQ ID NO: 69865 - RNA, 61 nt, Homo sapiens
ggaccagaacggcacggccacgggcgggcaggcaagagaaccaggagcggcagaccgccgc

SEQ ID NO: 69866 - RNA, 85 nt, Homo sapiens
ccggaggcagggggacacagccacccaggaacgcaagcagaaagaccgcaaagcagcagcacgaacaaaaggccgccccacgccg

SEQ ID NO: 69867 - RNA, 66 nt, Homo sapiens
ggagaggaaaaaggaagagagcacgcagccaggaaaccacgaggaagaagacggcacgggaccccc

SEQ ID NO: 69868 - RNA, 75 nt, Homo sapiens
gaaaccagagcaagcagggcaaaagggggggaaagggaagaagacagcggcaccgaacaagacaaggcaacacca

SEQ ID NO: 69869 - RNA, 78 nt, Homo sapiens
cacccccgggaccaggggcccgacagcgcaacaggaaaagccaagaaagacccaaaagaccccagaccagaaagaggc

SEQ ID NO: 69870 - RNA, 37 nt, Homo sapiens
cggcgagggacggaaaaggaaaacacgcaaaagaagc

SEQ ID NO: 69871 - RNA, 77 nt, Homo sapiens
cagcaagaacgggaacaaaaccggcagcggggaaaccagcacgaggccagcaccggagagagaaacagacagagaag

SEQ ID NO: 69872 - RNA, 63 nt, Homo sapiens
gggagggggccaagcaccccaggagagaagcagaagaggaaaaaacacaacgcccagacggag

SEQ ID NO: 69873 - RNA, 77 nt, Homo sapiens
agagaagcaggaaggaggcagaggcacaccgaaaggccgagggaggaccgggaacagcacaccggacgcaacacggg

SEQ ID NO: 69874 - RNA, 64 nt, Homo sapiens
cgggcaggccggccacagacaagaagagagacccgggccagaggccaggcaccacaacaagggg

SEQ ID NO: 69875 - RNA, 80 nt, Homo sapiens
agcgaaggcaacaggagcgggaaacgagccgaggaaggcaccaggagaggaggaggggagacgcccaggcagaaagccca

SEQ ID NO: 69876 - RNA, 91 nt, Homo sapiens
gggcgccacaggaaggcaaaccacgcggagggacgacacagaggaccccaaggagccacaagcagggagcgcccggaggaaccagaccgga

SEQ ID NO: 69877 - RNA, 74 nt, Homo sapiens
aaaggcaccaaacgaacgaggaccacagaggggaggaggacagcccggcagaccacacacacgccccacagaca

SEQ ID NO: 69878 - RNA, 75 nt, Homo sapiens
gaggagaaggcacggggagaaggccaggggggcccacgcggaggacgcagaacacggcgggcggcccgccaacga

SEQ ID NO: 69879 - RNA, 77 nt, Homo sapiens
aaaaccggacgagcgagcaagagacaacggcaacacgacaagaagccggcccaccgcagcacaggcgcgaggaaagg

SEQ ID NO: 69880 - RNA, 71 nt, Homo sapiens
cagcgaaaaccgaaggcaaagaaccccaccgacacaacggggaccgcagccacgaggcagaacgaagagag

SEQ ID NO: 69881 - RNA, 85 nt, Homo sapiens
ggagggagcgaggaaccaccggacgaagacagcaaggagacccgccaaagccgccgggcaagggccagagcagaggcggagaggg

SEQ ID NO: 69882 - RNA, 82 nt, Homo sapiens
cgagcggagaggagagcacacggcaccgagggagagccccccaagagaacccagggggagccacgccggagcgggcaccggc

SEQ ID NO: 69883 - RNA, 71 nt, Homo sapiens
gaagagcccgccagcaccaaccaacaggcaagcaggaaaaaaaggagaaacaggaagacaaccaccagaac

SEQ ID NO: 69884 - RNA, 76 nt, Homo sapiens
cccgcccccgccccacgaagccagaaagaagccacccagagagaaccaggggacgcggacgcaacagggaaaggag

SEQ ID NO: 69885 - RNA, 71 nt, Homo sapiens
gaaacggaggagcccgccgaagcagggccagaggccagacagagcgcaagcgagggcggggcgaaagcccc

SEQ ID NO: 69886 - RNA, 75 nt, Homo sapiens
acgcgaaggaacggcaaaggagaacccccggagcagagcgagaagacagcggcaggcgagcggagaggccagggg

SEQ ID NO: 69887 - RNA, 85 nt, Homo sapiens
agaaccaaccaccccagcaacaaggcaagagcgacccgcagaaggcggggaccagccgcgccagaccaagaaaccggaaccaaaa

SEQ ID NO: 69888 - RNA, 71 nt, Homo sapiens
ggaggaccccaaccgcccaggaaacagcccaaaaccgccgcgcgcgaccaaagggcccgcagcgagaaagg

SEQ ID NO: 69889 - RNA, 43 nt, Homo sapiens
gaagaacgagacgaagccaggcgcggagcaaaggcgacacgcc

SEQ ID NO: 69890 - RNA, 77 nt, Homo sapiens
cacaaaagaggagaaaaccgggcgcagccggcgcgggagagcagccggacccagaccagggagcccaggaggaggaa

SEQ ID NO: 69891 - RNA, 78 nt, Homo sapiens
agaagggaaagaaagaaagagacaacgacagccaacagccagaaggcacaaagagcacacggaacgccagggaaggac

SEQ ID NO: 69892 - RNA, 78 nt, Homo sapiens
ggcagagcagggaagaccgagcccgaccacccaggccacacacgaggggaccgaaagagcgccggagaagggaggaag

SEQ ID NO: 69893 - RNA, 81 nt, Homo sapiens
aggagcccaaggcggcccggcgggcgacggacggccggacagggaggagaggcgagaagaggagaagaagagggcacggga

SEQ ID NO: 69894 - RNA, 64 nt, Homo sapiens
ccgcgcccggccccgcggggccgcccggcccgcccgagcccagaggcaggcgaaccgcagaagc

SEQ ID NO: 69895 - RNA, 63 nt, Homo sapiens
aggcggagccaccggccggcgaagacacggccgagaccccgacgcccgacggccacacgccag

SEQ ID NO: 69896 - RNA, 83 nt, Homo sapiens
cacaaacgccacgcagaacagccaccaaggccccccaggccacccaggaccagcggcacacccccccgcggcccaaaaagccc

SEQ ID NO: 69897 - RNA, 81 nt, Homo sapiens
aagcggggaggacagcccgaggcaaaaagcgcccaagaccggagagagggagacgcagcaaagggaagacagaaggaagca

SEQ ID NO: 69898 - RNA, 80 nt, Homo sapiens
accacaacacaacaccccaccccaagccgacaacagcgagggccagcgaagacaacagggaagaccaagaggaaaaccaa

SEQ ID NO: 69899 - RNA, 74 nt, Homo sapiens
cacaagcgggacgccccaggaaggagaacacacgcggcccagaaggacggaacagccagggaggcgcgacacgg

SEQ ID NO: 69900 - RNA, 62 nt, Homo sapiens
ccagcaagggccccagggcaccccgcgaccaagcgacacccgccgcaagccacgccacgcgg

SEQ ID NO: 69901 - RNA, 76 nt, Homo sapiens
agccgggcgcccggcgaaggagccgcggcggggggaaaaggagccccaccaagcgcaagccccggggcagagacac

SEQ ID NO: 69902 - RNA, 70 nt, Homo sapiens
aaaacacaggaacaacggggaccacggacgcgccgagccaaacagaaaaagcccagaagaaagggcaggg

SEQ ID NO: 69903 - RNA, 84 nt, Homo sapiens
caacaacaccacaaaaccacagccaagcagagcaccaaacaggggggaaggaagacaaacagagccaagcagacagaaacccgg

SEQ ID NO: 69904 - RNA, 79 nt, Homo sapiens
ccggccgggaagcggccaccgacacgcagcagcggccagggagcaagaaagcggaaaaacagaaggagggccaacaaga

SEQ ID NO: 69905 - RNA, 77 nt, Homo sapiens
ggcagccaacacccagaggaggaccagaggccgccaggcacagagaaggcaaacgggagggcgaggacaccaagagc

SEQ ID NO: 69906 - RNA, 83 nt, Homo sapiens
ccacccccacgaggcggagcagccaagcaggaggcaaagggaccccaagaaaccaaagggcaagagccgcagcccggcagaca

SEQ ID NO: 69907 - RNA, 79 nt, Homo sapiens
agcccgggcagagaccaggacaagacgcggcgccgacgggccccgaggccgcgggcggcccaggaaaccaccacaggcg

SEQ ID NO: 69908 - RNA, 75 nt, Homo sapiens
aaccagcgagcgcaggcagcaagagcaggaggagacgcacagcacaggaccagagcaaagggggagcgccaggag

SEQ ID NO: 69909 - RNA, 41 nt, Homo sapiens
agcaaggaagacccacggagagaaaacggaacaacgaagaa

SEQ ID NO: 69910 - RNA, 81 nt, Homo sapiens
gagggcagccgccagcgcccagaagaagggccgcacgaaacaaccaaggaaaggaagcaccgagaggcgaaggggcacggc

SEQ ID NO: 69911 - RNA, 75 nt, Homo sapiens
agagcacccggacgcgcccccagacaccggcgggacgggaagaacgggcaggagaaacgaccccgcaggaagggg

SEQ ID NO: 69912 - RNA, 80 nt, Homo sapiens
cgcccagcccacaagagcgggacacaggaaaccagacaaaagaccaagaagagagaaccaacagaacaaaacaaggaaga

SEQ ID NO: 69913 - RNA, 91 nt, Homo sapiens
cgcccagagacgcgagcccgccgccgccgccaccacccacccggacacagagcacacgaagcgaaccgcccccgaaccagacccgaccgag

SEQ ID NO: 69914 - RNA, 72 nt, Homo sapiens
cggcaggggccgcggcccggagcgacccaaaaaagaggacagcggaccacccgggcgcgccacacagcgccc

SEQ ID NO: 69915 - RNA, 79 nt, Homo sapiens
aacaaagaacggacccacaccgaggcacccgaagaagagaccaccaaccagcgccacgggacagccaacaccagaccga

SEQ ID NO: 69916 - RNA, 87 nt, Homo sapiens
ggggagccacgaggaagcacagaaaacgcgcgcaaccaaagccacgcggagaacacaccaaccccggcccggggcgaggacccgggg

SEQ ID NO: 69917 - RNA, 82 nt, Homo sapiens
ccacgcccggcccggccgcgcccgcggaaccagaccaggggcaggagaggcggaggacaggagggagcgggccaacacaaac

SEQ ID NO: 69918 - RNA, 80 nt, Homo sapiens
acaggggcccccaccacccggaggagcagcccgccccgccgggggagacgacccccgccaggccaccggccagaacggag

SEQ ID NO: 69919 - RNA, 75 nt, Homo sapiens
agacaagccacaggagaaggaaaccagacgccgccacagagaaggaagacaagagaacaagggccagcaaagaaa

SEQ ID NO: 69920 - RNA, 55 nt, Homo sapiens
gccgcagacacaagcccccagggcaccaccccaaaaacagacaagaaaaaacaga

SEQ ID NO: 69921 - RNA, 69 nt, Homo sapiens
gcagggacccgaaaaggaggaagaaaacaaccggacacacccgggccagcccaccacaaaccaaacgag

SEQ ID NO: 69922 - RNA, 76 nt, Homo sapiens
accaaccagccgccgaaacaccacgccacacaccagcggaggaaagacacaggaagagcagaaaccaccccaaccc

SEQ ID NO: 69923 - RNA, 73 nt, Homo sapiens
cgccgcggagcccgcagcccgccggcgcgccccacgggccaggaggggcaggcgaggaacccagggggcagac

SEQ ID NO: 69924 - RNA, 73 nt, Homo sapiens
accggaccgaagacaccagcccgacaagaaaacagcgccagaacgaaaccagaacagaaagggacgggacagc

SEQ ID NO: 69925 - RNA, 73 nt, Homo sapiens
ccagcacgaggaggcgcgaggagagcccacagcaggaaccacaggaccaaaggacaaaaagaaacaaagccgg

SEQ ID NO: 69926 - RNA, 82 nt, Homo sapiens
cgccaaccgcaaccagacgccagcgggacgaggaccgagaccgcggccgggaccgaggggcggagaacggaaaagcaccagg

SEQ ID NO: 69927 - RNA, 62 nt, Homo sapiens
ccccccagcagaccaaaaaaaccacccaagaaacccagaagagggagaaaggagcccgagag

SEQ ID NO: 69928 - RNA, 73 nt, Homo sapiens
agcaggacagacggaagagaagaaacggagcaagagcagggaccaccacacgaaaccaaggaaaaaccgggaa

SEQ ID NO: 69929 - RNA, 60 nt, Homo sapiens
ggcacgagcgccgacaacccggcgccagagccgggacaaaacacgacagccccaagcccc

SEQ ID NO: 69930 - RNA, 76 nt, Homo sapiens
aaaaagagaaaccaaacggaacagagaccggcaaaagaaggcgccaacaggcgaagcaaggccaacagagcagcgg

SEQ ID NO: 69931 - RNA, 75 nt, Homo sapiens
gcagcaacacaggcgagcccaaacaggagcaggaggcagacagaaaggccacaaaagaagacccaaagcaccaac

SEQ ID NO: 69932 - RNA, 62 nt, Homo sapiens
gccgcagcggcaaggagagacgcgcgaggggcgccgaagcgaggggacagcaaggcggcaag

SEQ ID NO: 69933 - RNA, 76 nt, Homo sapiens
aaggccagcgggccaggaagcgcaccaggagaggcaaggacaaaaacccagagaccagaaggcgcggcagcacgag

SEQ ID NO: 69934 - RNA, 101 nt, Homo sapiens
gcccgggccagcgccgggaccgccacaaccacacccgagggcggccaccaagagggacagcaaggacacccccccaaaagaaacaggaaggaaaaagagaa

SEQ ID NO: 69935 - RNA, 63 nt, Homo sapiens
cccggagaggcagagccgcggaagaggggaccggcgcggacccaggcgggagagacggcagga

SEQ ID NO: 69936 - RNA, 65 nt, Homo sapiens
gccgcgccaccgagccggaccggagacggggccaacaggcagcaaagcaccgccgagggccaggg

SEQ ID NO: 69937 - RNA, 74 nt, Homo sapiens
ccaagcagacacagacccacaccacgacaaccagccggggcacagacgaggagccgggccgccaccgccccaga

SEQ ID NO: 69938 - RNA, 82 nt, Homo sapiens
gagccgcggaggagcgggccgggcggggggcccggaagggggagcgaaaaaggggagacgacaaggacaccgggagcgcgac

SEQ ID NO: 69939 - RNA, 77 nt, Homo sapiens
gggaagacaggacaacggaaaccccaaacagagaaaaaaaaaagggggcaaaaggccgaagcacacgccaacgccgg

SEQ ID NO: 69940 - RNA, 81 nt, Homo sapiens
ggagccgccccgcaggggccagggcacgcacgcaggccaggcgcggggaggcccagcccgccgcagggccaccccgcggcc

SEQ ID NO: 69941 - RNA, 70 nt, Homo sapiens
aaacgaaagaagggagaggcggggagcagcgccgggagaaggaccacgcaggaagaacccgcagcgcaca

SEQ ID NO: 69942 - RNA, 78 nt, Homo sapiens
cggcggaggaggcgcagccggacaagccgccaccggccccgccgaacgccacggcgcccggccccccggccacccccg

SEQ ID NO: 69943 - RNA, 71 nt, Homo sapiens
gggagcagaggggacagaggcaccaaggaccccaagacagacaccgaaaacgagaaacgaaagagacacgg

SEQ ID NO: 69944 - RNA, 39 nt, Homo sapiens
gagagcgcgaaacgcacgagaagacgcgcggaaccacag

SEQ ID NO: 69945 - RNA, 68 nt, Homo sapiens
aaacagcaagacagcaaccaaccaccacaaagagggaacacacacaacgacggagccaacggacaccc

SEQ ID NO: 69946 - RNA, 77 nt, Homo sapiens
accagacgccgaacacacgacaggcccgaggaaacccagaaaacagggagaaaaaggcagcagaaggcgcagccaaa

SEQ ID NO: 69947 - RNA, 60 nt, Homo sapiens
cccgcgcgcaggggaagcgggcaggcagggagaccccaaggcaaaaccaccacacgacaa

SEQ ID NO: 69948 - RNA, 36 nt, Homo sapiens
acccagcacgggagcgagcagggcacggaccgaaga

SEQ ID NO: 69949 - RNA, 73 nt, Homo sapiens
aagagcacagaaggagaaaaaacaccagcagcccagcaaccaaaaagaagaccgcacccaaacaagggaacca

SEQ ID NO: 69950 - RNA, 70 nt, Homo sapiens
gagacccagagccagcgcaggggaagccgcaaggaccaacggaacagaagcgccacgcagagagcaaggc

SEQ ID NO: 69951 - RNA, 117 nt, Homo sapiens
ccggagccgagcagaccaccgcgcgaacccgcagccgcaggccgcgccgggaccagcaaacagccggcaccaggagcagcaccagagcgaacgagcccccggggagcggcggacacc

SEQ ID NO: 69952 - RNA, 80 nt, Homo sapiens
gggggcaacaagacggacccagccaggagcgggagggaccccagcacgaccaaagaagccgaggcccggccacccgagac

SEQ ID NO: 69953 - RNA, 68 nt, Homo sapiens
aagggaccggaagcaacgaagaaaaggaagcaacaagagcgcaacaagagcaggggagcccaaaagca

SEQ ID NO: 69954 - RNA, 70 nt, Homo sapiens
ccagaggaccgcggcgaagcaaaggaacgcgccggaagaaaaggccgacaaaccggcgaccacacacggg

SEQ ID NO: 69955 - RNA, 51 nt, Homo sapiens
acccggccaacaccacgccacccaagcagaccgcaggcgcagggaggaggc

SEQ ID NO: 69956 - RNA, 79 nt, Homo sapiens
gccggagcaagaggcgagggcgagcggcagccgccgccagggggaaaggaagaaaaggccacaagagaaccaaggaaaa

SEQ ID NO: 69957 - RNA, 78 nt, Homo sapiens
aagccagagagggcggggagacaaggaggccgagagaccgcaggcacggggccaaaaaggcacgagggaacgggaaag

SEQ ID NO: 69958 - RNA, 82 nt, Homo sapiens
agaagacaccggggacagacagggcacggaccggccacaggggccaccgcacagggcgccaccagcgggaacccaccggacc

SEQ ID NO: 69959 - RNA, 88 nt, Homo sapiens
acacccaacgcaggaaagaccccaacgccaccgagagggcgccggaagacagcccagagcaagcacacggaggcccgggagccagacc

SEQ ID NO: 69960 - RNA, 73 nt, Homo sapiens
ggccaaagaagggagagaggcgggcgccggcagacccggggggggaagagaagaaccgaaaggccacagccgg

SEQ ID NO: 69961 - RNA, 77 nt, Homo sapiens
accgggcgcgcggggcaccagaaggggcgagggccaagggaacggggggaagaggggcacgagaaagacacggcacc

SEQ ID NO: 69962 - RNA, 66 nt, Homo sapiens
agcagaaacagacgaggcaagagagggcgcagagcgcgcagagcggcaggccaggcggcccgggag

SEQ ID NO: 69963 - RNA, 73 nt, Homo sapiens
ggaggccaggacggagagggagaagccaaacaccaaaagccagagaacaagaaagcacgcaaaagaagaacag

SEQ ID NO: 69964 - RNA, 57 nt, Homo sapiens
gagaaggggaggcagcgcggcccagcgcagggcccccagacccgcacgggaacagcg

SEQ ID NO: 69965 - RNA, 75 nt, Homo sapiens
gccgacccgccagaggaggccccccagccacggaaacgggcaaagaaaaaggagagaaaaagaggcaaaacaaca

SEQ ID NO: 69966 - RNA, 35 nt, Homo sapiens
ccggcgacgacgcccgaggccacaagcccgcgcca

SEQ ID NO: 69967 - RNA, 62 nt, Homo sapiens
cgacgagcgacccgggagacacgacgggaaaagcgaagacgcagccaaggggaccgcagggc

SEQ ID NO: 69968 - RNA, 69 nt, Homo sapiens
gccagagaacaacaaaggaggaccaggacaacaccacacagcacggaagccaaagggcaaaacggaggc

SEQ ID NO: 69969 - RNA, 69 nt, Homo sapiens
gacaccagccgagagcacggggacaccaaaggaccagcacaccggaaaacagaggacagcccgacagga

SEQ ID NO: 69970 - RNA, 78 nt, Homo sapiens
cagaggggggacgaacccacagaacaggagcaaacaaagaaggcgaggacacagagaagaaagagagcccagcaaaaa

SEQ ID NO: 69971 - RNA, 56 nt, Homo sapiens
agaaacggaacaccaagggcacagaacggcacccacgaacccgccgagagagaagc

SEQ ID NO: 69972 - RNA, 79 nt, Homo sapiens
gcaaagcgaacgcaaaacaacagaagaagacgaggcgaaggccgaaccccgaccaaagagaggcacaacacagaaaagg

SEQ ID NO: 69973 - RNA, 81 nt, Homo sapiens
ggcggacgccgcagagcgccgaggaggcccgcggggcaaccgccacgagacaccaagccccaagggaggaagaaaccgaag

SEQ ID NO: 69974 - RNA, 69 nt, Homo sapiens
cgccgaagcgcacgaccccgacacccccaagcgcggagccagcgcccggcaaggagcgagcgggagaca

SEQ ID NO: 69975 - RNA, 76 nt, Homo sapiens
ggggcagaccaccaccgcagggccccccacggacccagaggcggagaagaacccaaccaaaaccaggcggcaaccc

SEQ ID NO: 69976 - RNA, 68 nt, Homo sapiens
aacccaggagcacgaagggaagccaaggccaccaaaacaggcaaacgaacagagaacgaggaagaaaa

SEQ ID NO: 69977 - RNA, 39 nt, Homo sapiens
gcacagcgcagcgacgagagggggacacaggacaaggag

SEQ ID NO: 69978 - RNA, 44 nt, Homo sapiens
gaccgcgccaggcagaagggagggaaacagcgaaaagcaaccag

SEQ ID NO: 69979 - RNA, 74 nt, Homo sapiens
cccccaaagagccgaggccgaaacaccaaggcagacacaaagcggacacggccaaaacaaaggggagggaggag

SEQ ID NO: 69980 - RNA, 61 nt, Homo sapiens
ccccgggcccccggagcggaccgacggaaagaggcccaggagggaacggaaaagagcacag

SEQ ID NO: 69981 - RNA, 70 nt, Homo sapiens
aacacgacaacacgaccgccaggagcccgggccagggggggacaaacaaaaaaacaggaaaggccagcca

SEQ ID NO: 69982 - RNA, 39 nt, Homo sapiens
gccgccgccccgagggcccacaacccccgaccccggccg

SEQ ID NO: 69983 - RNA, 56 nt, Homo sapiens
gaccaagaaccagcgggaagacacacaaccgcgaccaccaggaacaacggaaccac

SEQ ID NO: 69984 - RNA, 84 nt, Homo sapiens
gcgggggcgccagcccaccaagaagggccgagcacagcaagcaagccacacacccccacggcgagacccagagagccaagaggg

SEQ ID NO: 69985 - RNA, 61 nt, Homo sapiens
ccgacgggacccaccgcgccccagcccgagccagggcgagggaggcaccgccccaaccccc

SEQ ID NO: 69986 - RNA, 77 nt, Homo sapiens
cggaaccgggagacaccgagaaaccagaggaaggaccccagagaagacagcagcaggcgagaggcagaacccggaaa

SEQ ID NO: 69987 - RNA, 78 nt, Homo sapiens
cgcgaagaagacgccacagacggaaagcacccgaggagaaagggaacgaaaaagacgagcagggaagaacacccacca

SEQ ID NO: 69988 - RNA, 76 nt, Homo sapiens
caaaagcacgcacgaaaccggcaagccagcggaggggaggaccaccaccggccgcacaggagagcaacagccccca

SEQ ID NO: 69989 - RNA, 82 nt, Homo sapiens
gaagccacaggagaccggaggccaacggcagaagccaccacaaaagcgaaagggcacaccacagagcaaaaaagcccgacgc

SEQ ID NO: 69990 - RNA, 71 nt, Homo sapiens
ccgcgccaagaaagaccaacccaaggcgcagaagagcaagaccgaagacaacaaaagaaaacaaagcacgg

SEQ ID NO: 69991 - RNA, 86 nt, Homo sapiens
ccccaggagcccagccacagccaccggacccccagggaaaccagcccagagaagacgggagcccccggggcccgcccagcaagcca

SEQ ID NO: 69992 - RNA, 80 nt, Homo sapiens
ccagccccagcgccccagacgcccgggccggcggcgaagccccgcaggaaagcacagagagcaggaacaaggcagccaag

SEQ ID NO: 69993 - RNA, 78 nt, Homo sapiens
aacagacagccacgcagacggaaacaaggcaacagaaagagcaacagcagggcaacaggacgaccgaaaacccagcca

SEQ ID NO: 69994 - RNA, 54 nt, Homo sapiens
ggaaccggcagggcaagcggcgacacacgacgggccccgccccagccgagcccc

SEQ ID NO: 69995 - RNA, 78 nt, Homo sapiens
gaaaaagacacgcgcaacaaagcagaagaagaagaggacaggcccaggaaagggaagaacaaaggaagagagcaggaa

SEQ ID NO: 69996 - RNA, 53 nt, Homo sapiens
gggcgacagcgcaaggagacgaaggggcgaaggagaaagaaacacccaaaaca

SEQ ID NO: 69997 - RNA, 78 nt, Homo sapiens
cagccaagcaaacaccccccccaccaccccaccagaaagagccaacgccggcggaccccagcgacacagcagaaccag

SEQ ID NO: 69998 - RNA, 78 nt, Homo sapiens
gcgggagggcacccgggggaccccgcacacgaagagacgccgggcaccccaacacgaagccggagaacacagcagcgc

SEQ ID NO: 69999 - RNA, 72 nt, Homo sapiens
cgccggcgagagccgcaccgccaacccccgagcaagacggggaaacgcggacaagggcaaagaccgaacaag

SEQ ID NO: 70000 - RNA, 74 nt, Homo sapiens
cgacaacccaaggacccagacagcaaagccgacaggcagccggggaggagccgaaggaaggaacaggcagccac

SEQ ID NO: 70001 - RNA, 78 nt, Homo sapiens
agggcggagcagcgcagaggaaaggcggcagccaggcccgcggcaggcggggccaggcccgagccagaaggaggccca

SEQ ID NO: 70002 - RNA, 83 nt, Homo sapiens
ccaacgaggaggacccgcccagccccggaaaggggcaggaacgacaaaccaaagccagaacacacgccgagcaagcaaagcaa

SEQ ID NO: 70003 - RNA, 84 nt, Homo sapiens
cgccgcaggaccagacgcggcagcaacagcgagaccggggcgaggaccccgagccaggaggagccggcgcgcacagccccagcc

SEQ ID NO: 70004 - RNA, 85 nt, Homo sapiens
cggagccgcacaccgggccgcccgcgcgacggggaaccgcgaccgagacggcaggcggcggaagcgaaagagccgggcgggggcg

SEQ ID NO: 70005 - RNA, 81 nt, Homo sapiens
cagaacgaagccgacgaccagccaaaggagaacagccggaagcgcccaggacccccaggaaccaccaagaaaagccccagg

SEQ ID NO: 70006 - RNA, 84 nt, Homo sapiens
acgcagcgcggaaagccgaggcggggcgccaagaccagcagcaccaggagccccccgcccagacaagcacgccaaccaccggag

SEQ ID NO: 70007 - RNA, 80 nt, Homo sapiens
ccaagacacaaggggagcaaacagggaccgaaggaccggagggcggcagaaacgccccccccgcaggccagacggagacc

SEQ ID NO: 70008 - RNA, 74 nt, Homo sapiens
ggggccgcgggaaggccgaccgacgccgcggaccgacagcacgaggaggagagaagaaaagcggcccgagacaa

SEQ ID NO: 70009 - RNA, 54 nt, Homo sapiens
caaccagccggcccgaagaccgcagacacgcaaggagggcagcccggaggagcg

SEQ ID NO: 70010 - RNA, 89 nt, Homo sapiens
cccggcgccggcccccaaggggcacaacaggggcggcacccggaaacaagccacgaaggagagaaaaccagcagcagcgcagcagagac

SEQ ID NO: 70011 - RNA, 54 nt, Homo sapiens
ggaggccacccggaagacacgcagcgacggacggaccgagggagaaacacgcga

SEQ ID NO: 70012 - RNA, 78 nt, Homo sapiens
cgagcacaacaacgaagaggagcgggaagaggaagagggagaggggggaagcgaagccgagacggccgaccccgccac

SEQ ID NO: 70013 - RNA, 74 nt, Homo sapiens
ggccgagcgaggcggcgcggccagaaggacaccaggagaaacgggcaaccaaggagacggaaggcagcccaaag

SEQ ID NO: 70014 - RNA, 56 nt, Homo sapiens
ggcaccagaaaccagagagcaggcaaagaaaaagccagccgaggacgggaaccaga

SEQ ID NO: 70015 - RNA, 76 nt, Homo sapiens
ccccccaagaaaccaaccacaggacaagaccagccccgacaccccccaagaggggagccgccaccaaaagcagacg

SEQ ID NO: 70016 - RNA, 39 nt, Homo sapiens
ccaaacgagagcagccaacgagcagcaaggcgaaccggc

SEQ ID NO: 70017 - RNA, 58 nt, Homo sapiens
ggaacacagggacgccacgaaccggagccaaagaagaccagaaagaacacacaaaggc

SEQ ID NO: 70018 - RNA, 74 nt, Homo sapiens
cccccacggcccccaaaaacagagaagggggagccacagcccagcggcagaacaagacggagcgccaggcccag

SEQ ID NO: 70019 - RNA, 76 nt, Homo sapiens
ggaaagcacaacaagacacgccaccagaaacagcagggcacggggaagaggaacccaaggaccgcaaagaaaaccc

SEQ ID NO: 70020 - RNA, 82 nt, Homo sapiens
cgggaccagacgaggaacagcaaaaaggcagcggaggaggagaaagagaggacccccggaccggcccgagggccgcggccgc

SEQ ID NO: 70021 - RNA, 72 nt, Homo sapiens
cagaggaaggcagcaccaggaagacaggggaacacccccagagagaggccggacagcccgggagacgagccc

SEQ ID NO: 70022 - RNA, 82 nt, Homo sapiens
agcccccagcgggaacaggcaccgagagcgcccagcgacaaacaggaaaccagaggcgacccaggccacaccaacacagcgc

SEQ ID NO: 70023 - RNA, 75 nt, Homo sapiens
ccaacggggcagaaggacccaccgagaggagggagaacacaggaacaggcgcggcagccaggagccggacgagaa

SEQ ID NO: 70024 - RNA, 69 nt, Homo sapiens
ccaaaacaaagggccaggaagaaagccacagaggccccaaagcaggggacacaggcgggcaggggcacg

SEQ ID NO: 70025 - RNA, 77 nt, Homo sapiens
agaagaccagaaaaagaaagcgacccaaaccgccgccggacgggaacaagggacaaaccaaagaccaaccaagaggc

SEQ ID NO: 70026 - RNA, 79 nt, Homo sapiens
ggaggaaacccccgcccggcaccagcaaaccagcggcgcgacgagggcggacggagggaagccacacggaggcggggcg

SEQ ID NO: 70027 - RNA, 74 nt, Homo sapiens
agcccccccagaagaacgcgaaccgaccgagaaagccagagaagcaaaagaaacaaggcaagacggaagcaaga

SEQ ID NO: 70028 - RNA, 75 nt, Homo sapiens
aaaaccgccaaacgcaggcacaaggcgcagggggaaaggagacgggcgaacacagggaagaaggacggagccagc

SEQ ID NO: 70029 - RNA, 75 nt, Homo sapiens
gaaggcagggcaaaccagaaagacgaaacaacgaacgagcaaggaagggccaaggcagaccccacaccggagaac

SEQ ID NO: 70030 - RNA, 80 nt, Homo sapiens
gcggggcccgccgccccgcgggggagggcggagcggcgcggccccagcccccgggggggcccgagggcaggaaaggaggg

SEQ ID NO: 70031 - RNA, 72 nt, Homo sapiens
cgaagcccccgccgccgcgagaagaaacgggggagaaggaggaacacaaagaggaccagcgacaaaccagac

SEQ ID NO: 70032 - RNA, 61 nt, Homo sapiens
gacgggccgcgaggggaagaggaagcaaagccaaggggcacaacagcaggacgcccagaac

SEQ ID NO: 70033 - RNA, 83 nt, Homo sapiens
acgaaaacaagaggggagacggacgagcaagagaggacgcgaggcccagagagggaaagccacgccagggacacacagcgggg

SEQ ID NO: 70034 - RNA, 82 nt, Homo sapiens
gggcccagagcgaccgcccccgcggaggggggccgccgccgaccgggaaggaaagaacaacccccaacccaaacccggggag

SEQ ID NO: 70035 - RNA, 77 nt, Homo sapiens
ccacaccaccacccaggccacacagccagcagcagccacgggcacccaggagacgggaaacggccaacagggcagcc

SEQ ID NO: 70036 - RNA, 86 nt, Homo sapiens
ccgcggagaggaggggacaacccaaaggacggcacccgaggccgggagacaggagcggccgccagcgcacgcgcaccggccagcgc

SEQ ID NO: 70037 - RNA, 75 nt, Homo sapiens
cggcaaagcaagcgggccaccgagaggcggccgaggaaccagggggaaggccccgggcagccgagcgccagggaa

SEQ ID NO: 70038 - RNA, 85 nt, Homo sapiens
gcggggacccgcgcacgcgcccccgcgccgacgccgccggacggccgcacccccgcccgagacccgagcccagcaagaccacgac

SEQ ID NO: 70039 - RNA, 73 nt, Homo sapiens
cccccgcccgccccgccgcccgagccggcgccaaggaggggaggacaaaaccaacaacaagccacccacacga

SEQ ID NO: 70040 - RNA, 63 nt, Homo sapiens
cagaggacggagccacgaaacccagaaggaggaggagcgcgaagaagaccacagcccaggagc

SEQ ID NO: 70041 - RNA, 76 nt, Homo sapiens
aggggccgggagagaagccagagcggaggccaagggagcagagaggaacagcacggaggagagagcagagaaggag

SEQ ID NO: 70042 - RNA, 83 nt, Homo sapiens
gagcaaccccaagcaccacaaaaaccacgagagcccgcccaacaaacagaggacaggacaccggggaacccgaccgcgacaga

SEQ ID NO: 70043 - RNA, 78 nt, Homo sapiens
accccacaggacaacccgaggagccaccaggaaaccagccaagcaaccggaaagaggcagaacaccaaggaaagaaga

SEQ ID NO: 70044 - RNA, 60 nt, Homo sapiens
ggacccacgcacagagaggcccagcgaaggcccgggcggcaggacacgagacggcgagcc

SEQ ID NO: 70045 - RNA, 72 nt, Homo sapiens
ccccacgacacaagcggaagaaacccgaagaacgagaagcccaaagaggccacaggcagaaaggacaaggac

SEQ ID NO: 70046 - RNA, 74 nt, Homo sapiens
ccaccgagcaacaacagccacagaacggaagaaggcggaaagagaaagaaacaagcaccccacgagcagaagaa

SEQ ID NO: 70047 - RNA, 72 nt, Homo sapiens
gcacggcgggaaggagaggggcaggcgccaccaggggccagaaccgcccacggcccccacagcggacccgga

SEQ ID NO: 70048 - RNA, 69 nt, Homo sapiens
aaggagacacgaggaaggaaacaagaagagggccaaaacgccccggaaagagggccccaaagcaaaacc

SEQ ID NO: 70049 - RNA, 79 nt, Homo sapiens
ccacgcgccgcacccaaacccagccgcgcagcccgaagagagaacaggagagggaaggcaaaacaacccgcagggcaca

SEQ ID NO: 70050 - RNA, 62 nt, Homo sapiens
accagaccaaggccgcaccagcacagggaacaccagaggcgggaccacgggcagcgcccagg

SEQ ID NO: 70051 - RNA, 57 nt, Homo sapiens
aagcaggggcgcagaaggcggaaccgagaagggggcccacaggaggagcaagaagag

SEQ ID NO: 70052 - RNA, 91 nt, Homo sapiens
aggcgaaggagccggcggaacaccaccgagcacgaggaagagcaacgaaaagagaaaagaagaaaaggagaagacagaagaccagccaaaa

SEQ ID NO: 70053 - RNA, 70 nt, Homo sapiens
ggggaagccgcagcggaaagcaggagcacaggcacgggaggacccagcccacggaaagaggcgaggggag

SEQ ID NO: 70054 - RNA, 74 nt, Homo sapiens
ggagccggggacgcgaaacgaaaacaccacgacgaagacgggagaacacagcgccggcagaagcaagacgcgaa

SEQ ID NO: 70055 - RNA, 68 nt, Homo sapiens
ccccagccgcgcccgggagagcaagcccagcaagcaaccacgagagcacaaggacaaccaacaacccc

SEQ ID NO: 70056 - RNA, 75 nt, Homo sapiens
gaggcaagacacgacggaaggcccaaggcccacccgcggcgcgagccagcagcgcgcggacacaagaccccggcc

SEQ ID NO: 70057 - RNA, 58 nt, Homo sapiens
acacaaaggcaaccaccggagcaagccaaccaaaaccaagaagggcaggcaggaccaa

SEQ ID NO: 70058 - RNA, 82 nt, Homo sapiens
gagcccgcggcggggaggcgcggcccgggacgccgagcagggaggcagaaggaacgagggagcacggagggaaaagaagccg

SEQ ID NO: 70059 - RNA, 67 nt, Homo sapiens
cggggaaagggggaaacacagaccccaagggaaggagaaacaacaagaaaacggcccggacggagga

SEQ ID NO: 70060 - RNA, 78 nt, Homo sapiens
gccgcggacggccgggccgacgggccgagcccagagccggagagccacccgcacgaggcccgcgcccacgccgcgccc

SEQ ID NO: 70061 - RNA, 75 nt, Homo sapiens
agccaccaaaacagacccgggcagcaccagaacacaaaaggagaggagccaagcccaacgggacgggaaaacggc

SEQ ID NO: 70062 - RNA, 62 nt, Homo sapiens
gacccggagacgacccgacgaagcccacgccgggacccagcgcagaggcgagggcgaaaaag

SEQ ID NO: 70063 - RNA, 73 nt, Homo sapiens
ggcgagagccccccacccggaagagcaagcaggaacgaacaggcccaaggcgccagggacgaagaggacccgc

SEQ ID NO: 70064 - RNA, 69 nt, Homo sapiens
agaagacagaggaaaagaggaagagggcgggaaggcaggacagagcaccggcccaggcggaggcaaggc

SEQ ID NO: 70065 - RNA, 76 nt, Homo sapiens
agcggccgggcccggcagccccgacgcagccgggaaggaggggaaagcgcgaaaaagggcgcaaggccaagccaga

SEQ ID NO: 70066 - RNA, 49 nt, Homo sapiens
acgggggaccaggcccgggcgggggaggcagagacgccacagcaccggc

SEQ ID NO: 70067 - RNA, 71 nt, Homo sapiens
gcaggagggcgaccaggcagcggaacgcgccgacgccgcaaccagcaccccgaggagcggaaccagaccgc

SEQ ID NO: 70068 - RNA, 70 nt, Homo sapiens
agggccagcgggaggagccacaagaacggaagcagaagcacgcaagcagagacagagaggaagacacggc

SEQ ID NO: 70069 - RNA, 71 nt, Homo sapiens
accagcaccaaccaaagcaagagaaagagcccagacgcaaagacaagcaggggccacaaaggaaaacggca

SEQ ID NO: 70070 - RNA, 83 nt, Homo sapiens
cgacgacgcccgacgagcgcagaaccacacaggcgacagacccacaaggcccacaccggcgcgagaaggccaccagccccaac

SEQ ID NO: 70071 - RNA, 92 nt, Homo sapiens
cccgccagcagccgccggagccagccaacgagcgagcaagccagagagcaaagccccaaacaaagccagcaagaccacagcacaggagaaag

SEQ ID NO: 70072 - RNA, 65 nt, Homo sapiens
cggggaaacaaggaaggcaggacaaaggcgacggggaaaccacccgaacaaggaaggcaaaggcg

SEQ ID NO: 70073 - RNA, 35 nt, Homo sapiens
gcaagagcggccagggaagaccaagggaacggaag

SEQ ID NO: 70074 - RNA, 98 nt, Homo sapiens
gagacggcgagggcgcccggacaagaacccacagaaggacaagggagagaggaggcagagagccccgcgacgagagagacagagagaccacgccgagc

SEQ ID NO: 70075 - RNA, 72 nt, Homo sapiens
aagcacccggagaggaggaaaaaaaggaccaccccaacaggaaacaagccgagagacacacaagagcagaag

SEQ ID NO: 70076 - RNA, 82 nt, Homo sapiens
cggggggaacgaccaccgagcaccaagggaagcggagcagggcgaaaggcccagaggaagccccggaccgcagacaaggcga

SEQ ID NO: 70077 - RNA, 54 nt, Homo sapiens
gcaaggaaacggcaaaacagcccacacggaacaagcaccgaacaagcgaaggag

SEQ ID NO: 70078 - RNA, 42 nt, Homo sapiens
gagaggggaccgacacccaacagggcacagggccccagggcc

SEQ ID NO: 70079 - RNA, 59 nt, Homo sapiens
gaagagaggacaccgacagagcaccaggagcgcagaagcagccaccaacggcaggaaga

SEQ ID NO: 70080 - RNA, 70 nt, Homo sapiens
cacgagccacccgccgcagaagaggaaagagaggggcggagcagcaggcggaagcagggggacaagccac

SEQ ID NO: 70081 - RNA, 88 nt, Homo sapiens
cgagagcggaccgagagcgcgaaacgcacgagaaggagaacgcgacacacaccaagcgaagcccggagcccgagacgggaaaagaggc

SEQ ID NO: 70082 - RNA, 79 nt, Homo sapiens
aagccaacaagagaaaaacaacccaagaccaacaggagggaaccaggcgggcagcaaacaagaaaaggaacggccaaga

SEQ ID NO: 70083 - RNA, 100 nt, Homo sapiens
gccaacggggccaagagaagcggggagacagagaagcaggaccaacacaagaagacaccaaagccaccgcacccccggccaggagaggagcagcagcggc

SEQ ID NO: 70084 - RNA, 48 nt, Homo sapiens
cagaaagaacagccgcgacacaaagggccgacaagaccagcaccggcg

SEQ ID NO: 70085 - RNA, 86 nt, Homo sapiens
cggccgccgcgccgcccggcagcccggcagagaaaaagcgccccacagccagggcgaaacgacggacagcacccagagccacgagc

SEQ ID NO: 70086 - RNA, 35 nt, Homo sapiens
gacagaagacccccgccagaccgaaacaaggaccc

SEQ ID NO: 70087 - RNA, 117 nt, Homo sapiens
gccaggcgcagagcaagggggaagcgaagcgaagagaggggaaccacacgccagaaaccccgccccggcccccacgccggcgagccccaggcagggccagagggggccagggcccca

SEQ ID NO: 70088 - RNA, 68 nt, Homo sapiens
gggccgaccggccaagcgcacccccaaggggcagccggcacccgcacaacccagggggccgaacccag

SEQ ID NO: 70089 - RNA, 71 nt, Homo sapiens
gcggagaccaggagcgcccgcgcgagaacgcaaagggaaggggaagcaggccaacccagaacacaccccag

SEQ ID NO: 70090 - RNA, 75 nt, Homo sapiens
gagaagaagacccaaaaaaaagaggagcagcaggcacagcacgggcagagccagaacagagaaaccggaggaaac

SEQ ID NO: 70091 - RNA, 71 nt, Homo sapiens
aaaaggcaggacagacagcagggccgaccaagcaccgcagacccaaccccagaaacggcgaggaaagagag

SEQ ID NO: 70092 - RNA, 51 nt, Homo sapiens
gacagccgcggccgggcccgagcagcgggaagcccgaaccgggaggcagac

SEQ ID NO: 70093 - RNA, 79 nt, Homo sapiens
aagaggggaggcacaaccgaagacacgagaaggccccagccggcagggaaagcccgaaaaggaccagcgaagcaagcac

SEQ ID NO: 70094 - RNA, 83 nt, Homo sapiens
aagccaacgccggcgaagcggacagaaggcacgggggcccgcacgagaaagacacggcagcgcaggcagaccgcaggcgcaag

SEQ ID NO: 70095 - RNA, 78 nt, Homo sapiens
cgaaaaaaaccaacacgcaaccagaaacaacagggcagcccaaggaccaagggagaagagacccaggaggcagggcag

SEQ ID NO: 70096 - RNA, 82 nt, Homo sapiens
ccgcgagagacgagagcacgacacggccgcacgggcccacgccagagaacaaaccgcaaggccagaagaacccagaaagcgc

SEQ ID NO: 70097 - RNA, 80 nt, Homo sapiens
agcgaccggaagggaaagcgccgagagacgggccgcgccgcccgcaagcagaggcgccccggcagacggccccgacgacc

SEQ ID NO: 70098 - RNA, 75 nt, Homo sapiens
caaccgaaaacgaacccaaaggagagcccggacagagggcagccaggacaccaaaacgacaccacccacaaaaga

SEQ ID NO: 70099 - RNA, 67 nt, Homo sapiens
gacccacccaaaaagaagaggggaccccgaaaggaaccaggaagagaccacacagaggggccccccc

SEQ ID NO: 70100 - RNA, 73 nt, Homo sapiens
aaggagcggggcgacggccccacccccgagcccagcaccgcgggaagacggaaaagaagaaaacagggaaagg

SEQ ID NO: 70101 - RNA, 81 nt, Homo sapiens
ggcggcaacgcagcacagcggcccaacggcaccagggacaccaggggagaaagaaccacacgagaagcgagaaggacgagg

SEQ ID NO: 70102 - RNA, 75 nt, Homo sapiens
gcgcgaaagcggcaaaggggaaaaaaaagggagaaacagaccaagggcaaaagagcaacgccacaagagccacag

SEQ ID NO: 70103 - RNA, 73 nt, Homo sapiens
ggcgcccgacgagcacggcggccaagggccggaaggggccagagggaagcacacaaccccgcgaagggaggag

SEQ ID NO: 70104 - RNA, 83 nt, Homo sapiens
cgccgggcggacaacacggagaacgacccaaccagggcccggccgaggccagcacaccaagaccacggccgccgggccgcacc

SEQ ID NO: 70105 - RNA, 46 nt, Homo sapiens
gcaaagagacaccgcacccaaggcaaggccccagcccaagcgggcc

SEQ ID NO: 70106 - RNA, 65 nt, Homo sapiens
gagcaaacgcgaaccgcgcaggacgccaaaccaagccgcagggggaaggcaaaccaaaagggacc

SEQ ID NO: 70107 - RNA, 84 nt, Homo sapiens
acagaaggccaaaaaggcaaccacagagagagagagggagggacaaaacaccaacaaaaaaaagcaagagaaccaggaagaacc

SEQ ID NO: 70108 - RNA, 32 nt, Homo sapiens
ccaccaaagggaaagaggcaaaaccaagccac

SEQ ID NO: 70109 - RNA, 86 nt, Homo sapiens
gccgccagggagcccccgcgcgcccggccggcccggagcaccgagccgcggcacggaggagcccgccgcccgcagccaaccgccgg

SEQ ID NO: 70110 - RNA, 77 nt, Homo sapiens
aaaagagaacgaccaacaccaggacggagcaggagaacaccaaagaccgacgggagaacaccgcccaccaccccaga

SEQ ID NO: 70111 - RNA, 70 nt, Homo sapiens
gaccccaaggaaaaaccaagaaagacagaaggagacccccacccaaaagaagcacagcacaacgaaagaa

SEQ ID NO: 70112 - RNA, 86 nt, Homo sapiens
ccaggagcccgagagagaaggcgccacaaggcgggcgacagagagaagcggccagggcggagcagccacaaacaagccgggcggag

SEQ ID NO: 70113 - RNA, 58 nt, Homo sapiens
gaccaacgggaagcccacagacagccccccccagccagagcccgggcgcgggaagaga

SEQ ID NO: 70114 - RNA, 79 nt, Homo sapiens
gaaaacagcccagcacacgggaggcaaacgaaaaccggaacagcagcacagcaaaggagaaaagaagagacagaagagg

SEQ ID NO: 70115 - RNA, 75 nt, Homo sapiens
ggacgcaacgaaaccggcacggccgcccggcaagcggcagccacacccggagaaggagccgcccagggacgaagc

SEQ ID NO: 70116 - RNA, 95 nt, Homo sapiens
cgcgcccgcgcccccgcgcgacgccagggccggggacacgggcggcaagccgccacgcggggcgggacccgcagcgcggcccgcaggacggaagg

SEQ ID NO: 70117 - RNA, 67 nt, Homo sapiens
gacaaggggaaaacacgcacaaggagagaggacgcccggccacccaacacccggcacgcgggacccg

SEQ ID NO: 70118 - RNA, 81 nt, Homo sapiens
cggcagccgcgggagcacggcgacgccagcggcggagaggaggacagccagaagaaagccacaggccgagagcaaacagcc

SEQ ID NO: 70119 - RNA, 75 nt, Homo sapiens
agcaccggaaagaggacgaagcagaaagcaaggaaacgagcagaagggcggggaacagaccagggaaggggagga

SEQ ID NO: 70120 - RNA, 77 nt, Homo sapiens
cacaaacaaccagcagcgacccacgccagggggaagaccagcaagaccccgcaaagaacgggcaccccgggcggaaa

SEQ ID NO: 70121 - RNA, 51 nt, Homo sapiens
aggcaaacacacgcacgacacaggcagggaaaaaccaaaacgcccacaaac

SEQ ID NO: 70122 - RNA, 63 nt, Homo sapiens
gcgggaccaccggcaccaccaaagaagaccgaggagcagggagcaaccacaaggaaaggaaac

SEQ ID NO: 70123 - RNA, 86 nt, Homo sapiens
gagacggcgagcgcggcgcgccgagaaagcccgagcccggaggagcagcacggagcgggagagcgggcgagagaagaagaaaccaa

SEQ ID NO: 70124 - RNA, 80 nt, Homo sapiens
gggaagcaggacgcgccgcgccccaaggccccgagccccggccccaaagacccaaaacagagacaccccccagcccccgc

SEQ ID NO: 70125 - RNA, 72 nt, Homo sapiens
gcccgcgcgcgggaagaggcggaacaggcaccaagccggcggggcgggaggacagaaacacgacacacccgg

SEQ ID NO: 70126 - RNA, 48 nt, Homo sapiens
gagcggagacgaccgaggagggcacggagcggggagccccgcgcacac

SEQ ID NO: 70127 - RNA, 82 nt, Homo sapiens
cggaaaacagagaggccagaaaggcgcaggccaagcgcccacgccggaccgggcaggaagaagacggcacgggacccccagc

SEQ ID NO: 70128 - RNA, 66 nt, Homo sapiens
gcggcgccgcgccccagaccagaggaacgcgaagagacccccaggccaaagcacccaaaaaccagc

SEQ ID NO: 70129 - RNA, 91 nt, Homo sapiens
gagcaaggaccacagaaacgcagaaaaaggggaaagaaaaggcacccagaagcaaccggcgaagggagagacgccgagcccaggaggcaag

SEQ ID NO: 70130 - RNA, 67 nt, Homo sapiens
cccccgcaggcggcgccaggggggagcgcccaggcggagagaggcagcagggccagcggccagaccc

SEQ ID NO: 70131 - RNA, 41 nt, Homo sapiens
gccggaggagaacaagagcccgaggaaacaagccacacccg

SEQ ID NO: 70132 - RNA, 64 nt, Homo sapiens
ggcggaggcgccccgccagccaaggacgacagagggggcagagacaagaagcaacgaagagaca

SEQ ID NO: 70133 - RNA, 78 nt, Homo sapiens
gcagcccgagacccaccagagggcgccacaaacggggacggaagggcccgcaacgaacgaacgaaccgagagaagggg

SEQ ID NO: 70134 - RNA, 80 nt, Homo sapiens
gcggagaggaggcagacgaggcagcagcccagacaggcagaaacgccaaccgcgccaacccgaggaccagaccgacaaac

SEQ ID NO: 70135 - RNA, 74 nt, Homo sapiens
cgcgggcagagagcggacccgcgacgcggcagaccggggaaccagcaccccagaaggaggagagccagagccca

SEQ ID NO: 70136 - RNA, 73 nt, Homo sapiens
aagacgcacagaaccgaaacgccccagcagcacgcaaacaacacagaggacacagaaggcgaggccgccaaag

SEQ ID NO: 70137 - RNA, 41 nt, Homo sapiens
gaaggcagcgcgcccaggagaagaaccgaacccggaaaaga

SEQ ID NO: 70138 - RNA, 56 nt, Homo sapiens
cgggcaggcaggggagcaaagaaggggcggaaaaacagagcaggcaaaaacaccag

SEQ ID NO: 70139 - RNA, 62 nt, Homo sapiens
gggacggaaaaggcaaacagaaaagccaagagcaggaccgaacgccaacggcaagaaaggga

SEQ ID NO: 70140 - RNA, 54 nt, Homo sapiens
ccccccaccccgagacagggaagccgaggcaccacacgagccccggcgaccccc

SEQ ID NO: 70141 - RNA, 78 nt, Homo sapiens
gcaccaacgggaagggccggcccgcccccggccggggcgcagcggaggcaggcccgggcccgccggccacaccacacg

SEQ ID NO: 70142 - RNA, 85 nt, Homo sapiens
ccgcccccgccgccgcgcacaaccgcacggcagaggagaaggcagagcccccccaggcagaagcccgagcgggaaccagcgaagc

SEQ ID NO: 70143 - RNA, 77 nt, Homo sapiens
ggaaacaggaggaagaacccaagccaaagcccagacaagaacgagccagcaaacccgaggagccagagaccaaagcc

SEQ ID NO: 70144 - RNA, 74 nt, Homo sapiens
acaggcggaagcagggacgggccagcaagccgggcgaaagacaacagggaccggaagccagagcacagaagagc

SEQ ID NO: 70145 - RNA, 75 nt, Homo sapiens
agaaaacaaagacaaaaggagacgagaagaagacaagaggagagcagcagcgggacaacgcccaacagcacaaca

SEQ ID NO: 70146 - RNA, 76 nt, Homo sapiens
agccccaccaagacaccaaggagaggccaaccagcccagagacccgggagccagggacgaaggaccgagacacacc

SEQ ID NO: 70147 - RNA, 70 nt, Homo sapiens
caccaaaaagcaaacggaccagaccgaccaccaaaagagcagggccgccccgaggagagcgacgcccggg

SEQ ID NO: 70148 - RNA, 76 nt, Homo sapiens
cgaccccggcgcgaagcaaagaaacgaaagagcccagacacccaagagggccaagccagaaaacagaaacgaaaca

SEQ ID NO: 70149 - RNA, 84 nt, Homo sapiens
cagcccagagagacggaaacaggaacaccaaggaagcaaaagccccagaacgaggaccagagagagaagaaaaccggaccaaac

SEQ ID NO: 70150 - RNA, 72 nt, Homo sapiens
cagcccgaggccccagccagcgaacacaagcaagcccggaaggcccagccaggccaccaaccaacgagacga

SEQ ID NO: 70151 - RNA, 60 nt, Homo sapiens
gcgcggggcgggccgccagcggggacaggcagcggcgggacgaccccacaacccgagcgc

SEQ ID NO: 70152 - RNA, 83 nt, Homo sapiens
cggggcacagacaaggagccaggaccccggaccagcagggggaggaacacgaccggaagacaggccaaggagagcagcgcgga

SEQ ID NO: 70153 - RNA, 78 nt, Homo sapiens
ggggaccaaggccgagagccggaacaaacgagggcccgggaggaccgacgcagccaggggaagaagacggacagaagc

SEQ ID NO: 70154 - RNA, 77 nt, Homo sapiens
ggccgaaggaggaacacagcacgagcgccggaccagcgcgagcgccacggcacggccccacccgggcacaccgagcc

SEQ ID NO: 70155 - RNA, 65 nt, Homo sapiens
ggaaggaaaagaccagcacacgagcgaagaaaggaaggcgacagagaccggggccggagcaggca

SEQ ID NO: 70156 - RNA, 63 nt, Homo sapiens
aagagaggcaccgcggaacacaagaggggagccgccaccaaaagcagacggaaaacccacggg

SEQ ID NO: 70157 - RNA, 78 nt, Homo sapiens
cgcgccgggcaccgaggaccagccaagacaggaaaacaacggaaagaggaggaagagagagacaccccagccgcccag

SEQ ID NO: 70158 - RNA, 65 nt, Homo sapiens
caagcgcgacaggccaggcagaacaaacggaccagcgaccgggcacccgccgcagcaagagagag

SEQ ID NO: 70159 - RNA, 37 nt, Homo sapiens
ggaaagaacaccgaccagagaagaaacgcgcgccacc

SEQ ID NO: 70160 - RNA, 72 nt, Homo sapiens
cacagcaccagaaggaagcgggccgccgcccggcgaaaagggggcccacgcaacaagggaaaggcaagacgg

SEQ ID NO: 70161 - RNA, 55 nt, Homo sapiens
ggaaaacaaggcgcagcggcagcagacgacaggacggcagagccccaagaaagcg

SEQ ID NO: 70162 - RNA, 71 nt, Homo sapiens
aaagggcaccaaaccggaggcccaacaacaacagaagagaagagaaagaaggggacgacacagcagaaaaa

SEQ ID NO: 70163 - RNA, 89 nt, Homo sapiens
cgaggaggaaagcgagccgccaagacccgcaccggaggcagagaaacaaggagaggagaagccgggaagcccaggcccaccacgccggg

SEQ ID NO: 70164 - RNA, 72 nt, Homo sapiens
gcgcggagccgcacaacccccgggacccgcaagaggcaccccagccacccgggcgccggcgaaagcaacgaa

SEQ ID NO: 70165 - RNA, 58 nt, Homo sapiens
gcaaggggccaccaggaggccagggggcgccagccacggaacccagaacaggccaagc

SEQ ID NO: 70166 - RNA, 69 nt, Homo sapiens
cgacccgagcacaaggcaagagaccaaccccagccccgaaagagggaacaggcacgccccacccgccag

SEQ ID NO: 70167 - RNA, 85 nt, Homo sapiens
cgggacccagcccaggcggcgcggacggggcgggggcaaagaaaaaggagagaaaaagaggcaaaacaacaagaagaaaagagaa

SEQ ID NO: 70168 - RNA, 65 nt, Homo sapiens
gccgcaggaggcagcagccccgaagagaaacacacggacaacaaacggcgggggcagggcgcgac

SEQ ID NO: 70169 - RNA, 60 nt, Homo sapiens
agaacggcacacgcgagcgcagggaaccaggccccccccagagagcaaacaccacacaca

SEQ ID NO: 70170 - RNA, 62 nt, Homo sapiens
agacagaaaaagagcggagaaaagagaggggaagaagagaagggagaagacaggggacaagc

SEQ ID NO: 70171 - RNA, 85 nt, Homo sapiens
cggaggaagagccgggcagcccggagcgggccagagccgggcagcgacgacagcccgcgggggggcaccagccggcccggcaggc

SEQ ID NO: 70172 - RNA, 59 nt, Homo sapiens
cgcccccagccgcggggacgagccggaaaggcggccagccaggggaagcccccccaaga

SEQ ID NO: 70173 - RNA, 72 nt, Homo sapiens
gacacaggcacaccaaggggcaaaccgacaccagcgacacaagcgcgagggaaccacagaggacaggcgagg

SEQ ID NO: 70174 - RNA, 84 nt, Homo sapiens
gaaaacagccggacggacgaaccgcccgcaggcccgcgcagcccaaagcaacaccaacacaaggcagagaacgcagaagcaaca

SEQ ID NO: 70175 - RNA, 49 nt, Homo sapiens
gcacaccccaggaaccaggaaaggaaaaggccacaggacagccacaaaa

SEQ ID NO: 70176 - RNA, 63 nt, Homo sapiens
gagaaggagaaccccaccggaggaggagcagcggacaggcgaccggagccggggcccgacgaa

SEQ ID NO: 70177 - RNA, 58 nt, Homo sapiens
cgccgccaacgcgcccccgagcagacagggcaacggccacccaaccagcgcgccaggc

SEQ ID NO: 70178 - RNA, 78 nt, Homo sapiens
agaacccagacagacgcagcaccacaagccccggggacacgcacagagagagcaggagacggagggcagaggcaggga

SEQ ID NO: 70179 - RNA, 82 nt, Homo sapiens
ccgcaggcagcaccggaggcccaggcccggcagcccaacccagcaggacaagggccaaggccgcggcaagccacgaagccca

SEQ ID NO: 70180 - RNA, 82 nt, Homo sapiens
aggggcagcaagggccaagccacaaggcgaacaaccagccccaaccacagaccgacgcagagcgcgggggccaaagaagaca

SEQ ID NO: 70181 - RNA, 64 nt, Homo sapiens
gaccgcagagcgggcagaaaaacccacagggacgggagaaagaacagacaagccgcaagaaccg

SEQ ID NO: 70182 - RNA, 63 nt, Homo sapiens
aaaaacagacgaggggaggcacccggcaggaccgggagacagcagaagaaacggaacaacacc

SEQ ID NO: 70183 - RNA, 74 nt, Homo sapiens
gcccgcccccagagaggggagccggcgaggacaaaaccgaaggaggacaaaggaaagggcgccaacaaaggaga

SEQ ID NO: 70184 - RNA, 57 nt, Homo sapiens
ggcgcggcgcgcgaggagcaggaaaaggaccacggagaggacgaagacccaagaagg

SEQ ID NO: 70185 - RNA, 56 nt, Homo sapiens
acgcgcggaaggcagcgcccagcagcgcagaagagacacaccccccagaaggagca

SEQ ID NO: 70186 - RNA, 76 nt, Homo sapiens
gcagcaagaccccccgggaaccacccgcgcccccaggaagccgcgagcagaacgcgccagcaacacgggcgaccag

SEQ ID NO: 70187 - RNA, 80 nt, Homo sapiens
cggaggccgcacgcacagccaccagaccaggggccgacccgcccgagacccagaagcggcaggggcgcagcaccagaccc

SEQ ID NO: 70188 - RNA, 72 nt, Homo sapiens
agagaagaggaaagaggggagcaaccaggagagggcgagaggggaccggagcaacaccccccaggccagaac

SEQ ID NO: 70189 - RNA, 79 nt, Homo sapiens
gggagcagcagcgaggaacagacaggaggggaggcaccggcagcggacccgcccagagcacaaccggccgcgccaacca

SEQ ID NO: 70190 - RNA, 85 nt, Homo sapiens
cagaagccaccacaaaagcgaaagggcacaccacaggaaaccaccacggacccaaggcggaggcccagggagacccaaaacccgg

SEQ ID NO: 70191 - RNA, 72 nt, Homo sapiens
gaacgagaaggaagagagccaacccacacagcagcgaaccacacaggaaacagaaagccggcgaggggaggc

SEQ ID NO: 70192 - RNA, 58 nt, Homo sapiens
cccccaccccagacaggggaacagggcacagcccacccagggggggagccgcacgacc

SEQ ID NO: 70193 - RNA, 71 nt, Homo sapiens
aacacccagagcccgcaacccggcagcagaagacaagaagaggaggaggaccgggggaaagcaaaaaaacc

SEQ ID NO: 70194 - RNA, 80 nt, Homo sapiens
ggcagagcaccgaaccccagaggccaagaaagccagcagggaaagacaaggagccgggccgagaaaccgaaccagagacc

SEQ ID NO: 70195 - RNA, 76 nt, Homo sapiens
ccaggagccagggaggacgaagaaagccgggccagaacaggcgaaaaaaggggggagaacaagcaaacgcagcaaa

SEQ ID NO: 70196 - RNA, 80 nt, Homo sapiens
cgcgaccggggcccggggaaggcccgccgcccgccccagccaacacacggagcacagagagacccaagagaagggccaga

SEQ ID NO: 70197 - RNA, 84 nt, Homo sapiens
cgggaagagggacaacagaagacggacgaagacagcgagagccagacaagccagacaccaagaccccacgaaagaccgggagcc

SEQ ID NO: 70198 - RNA, 76 nt, Homo sapiens
cggaagaaaggccgcccccgccaccaccagaagaaaaaggaccaggcacagagcgcaaagacagaccccaggagac

SEQ ID NO: 70199 - RNA, 58 nt, Homo sapiens
gcggggaggcgaggccggacgcacccggggggcccaggccccagaagaagggacacga

SEQ ID NO: 70200 - RNA, 76 nt, Homo sapiens
cacgcaagcaggcaaccgaaacagggcccgccccaccgggggccaccccagggaggagaagagggacccagaaggc

SEQ ID NO: 70201 - RNA, 89 nt, Homo sapiens
gcagccagccgcccgccgacgccgccggcagccacggagaagcgaaggacaaaggcagaaagaggccagaagaaacaccagggaaggag

SEQ ID NO: 70202 - RNA, 74 nt, Homo sapiens
ggaagacacccagaagaaagcccacggcggaaaaccacagggccagggcacccaccaacaggcacagaaggaca

SEQ ID NO: 70203 - RNA, 83 nt, Homo sapiens
gacggcggaaaacggagagacggggagaagcagagccagagcccaagcccccgcagggagcccaccgcgaccaggaccaccgc

SEQ ID NO: 70204 - RNA, 62 nt, Homo sapiens
gggaggagcccgggcgaagaggaggcggaagccaagccacacgacagcagcagcaccacaag

SEQ ID NO: 70205 - RNA, 56 nt, Homo sapiens
agaagaaggggggggggacaaaggaagaagacggcacgggacccccagcacaggca

SEQ ID NO: 70206 - RNA, 71 nt, Homo sapiens
aacaccgacggcagcagcggaccagaccccacaagaaaacacacaaccacaggcccaagcaaacacaccaa

SEQ ID NO: 70207 - RNA, 83 nt, Homo sapiens
gaggagccacagccaaaaaacggagccggaccagaccgccggagcacgccgagaccaccgaggacacaaccgcccaccacgcc

SEQ ID NO: 70208 - RNA, 69 nt, Homo sapiens
gcccgcaagaaggccggccggcagccagggcagcaggcgggcagaaaggaacgaacaaagcgcaagaac

SEQ ID NO: 70209 - RNA, 59 nt, Homo sapiens
gagaagaaagggggcccaggacccagcaggcccgccccagggcaggcgccacgaccagc

SEQ ID NO: 70210 - RNA, 84 nt, Homo sapiens
gagaaaagaaacccgacaccaaccaggaggccgagacaacaacggcaccgcgcgggagaacagagacccaccaagaaaccagaa

SEQ ID NO: 70211 - RNA, 78 nt, Homo sapiens
acgccacgacaccggcacccagcaccacccggaggagaccggcagcagacaacagcagaaaggaagacacaggagcag

SEQ ID NO: 70212 - RNA, 66 nt, Homo sapiens
gcagcgcagcagccaaggagacaccccagcgccgccgccgggagcgcgccgccaaccagccgcggc

SEQ ID NO: 70213 - RNA, 83 nt, Homo sapiens
cagacagcggaggaggaaccgaaccaggaccaggccccaagcccgaggcccagaggaggagcaaaggacaagccggaacgcga
